United States Patent Application Publication US 2018/0305689 A1 - sequence listing, part 104

SEQ ID NO: 1526357 - RNA, 19 nt, Artificial Sequence
  Description of Artificial Sequence: Synthetic oligonucleotide
  Antisense strand to SEQ ID NO: 1526356
uaauccagaacccugggua

SEQ ID NO: 1526358 - RNA, 19 nt, Artificial Sequence
  Description of Artificial Sequence: Synthetic oligonucleotide
  Sense strand starting at position 914 of SEQ ID NO: 1244969
gggcucugauugcuaauga

SEQ ID NO: 1526359 - RNA, 19 nt, Artificial Sequence
  Description of Artificial Sequence: Synthetic oligonucleotide
  Antisense strand to SEQ ID NO: 1526358
ucauuagcaaucagagccc

SEQ ID NO: 1526360 - RNA, 19 nt, Artificial Sequence
  Description of Artificial Sequence: Synthetic oligonucleotide
  Sense strand starting at position 1010 of SEQ ID NO: 1244969
uaaugcagccuguaagcua

SEQ ID NO: 1526361 - RNA, 19 nt, Artificial Sequence
  Description of Artificial Sequence: Synthetic oligonucleotide
  Antisense strand to SEQ ID NO: 1526360
uagcuuacaggcugcauua

SEQ ID NO: 1526362 - RNA, 19 nt, Artificial Sequence
  Description of Artificial Sequence: Synthetic oligonucleotide
  Sense strand starting at position 1223 of SEQ ID NO: 1244969
gguccacgucucuaaaucu

SEQ ID NO: 1526363 - RNA, 19 nt, Artificial Sequence
  Description of Artificial Sequence: Synthetic oligonucleotide
  Antisense strand to SEQ ID NO: 1526362
agauuuagagacguggacc

SEQ ID NO: 1526364 - RNA, 19 nt, Artificial Sequence
  Description of Artificial Sequence: Synthetic oligonucleotide
  Sense strand starting at position 1257 of SEQ ID NO: 1244969
agcauaacaugucuuagaa

SEQ ID NO: 1526365 - RNA, 19 nt, Artificial Sequence
  Description of Artificial Sequence: Synthetic oligonucleotide
  Antisense strand to SEQ ID NO: 1526364
uucuaagacauguuaugcu

SEQ ID NO: 1526366 - RNA, 19 nt, Artificial Sequence
  Description of Artificial Sequence: Synthetic oligonucleotide
  Sense strand starting at position 1360 of SEQ ID NO: 1244969
ugacuuugcauggagugua

SEQ ID NO: 1526367 - RNA, 19 nt, Artificial Sequence
  Description of Artificial Sequence: Synthetic oligonucleotide
  Antisense strand to SEQ ID NO: 1526366
uacacuccaugcaaaguca

SEQ ID NO: 1526368 - RNA, 19 nt, Artificial Sequence
  Description of Artificial Sequence: Synthetic oligonucleotide
  Sense strand starting at position 1676 of SEQ ID NO: 1244969
gaguccucgccguggauga

SEQ ID NO: 1526369 - RNA, 19 nt, Artificial Sequence
  Description of Artificial Sequence: Synthetic oligonucleotide
  Antisense strand to SEQ ID NO: 1526368
ucauccacggcgaggacuc

SEQ ID NO: 1526370 - RNA, 19 nt, Artificial Sequence
  Description of Artificial Sequence: Synthetic oligonucleotide
  Sense strand starting at position 1736 of SEQ ID NO: 1244969
gacaccaggucgugagaaa

SEQ ID NO: 1526371 - RNA, 19 nt, Artificial Sequence
  Description of Artificial Sequence: Synthetic oligonucleotide
  Antisense strand to SEQ ID NO: 1526370
uuucucacgaccugguguc

SEQ ID NO: 1526372 - RNA, 19 nt, Artificial Sequence
  Description of Artificial Sequence: Synthetic oligonucleotide
  Sense strand starting at position 2597 of SEQ ID NO: 1244969
cccagugguuuggcuacaa

SEQ ID NO: 1526373 - RNA, 19 nt, Artificial Sequence
  Description of Artificial Sequence: Synthetic oligonucleotide
  Antisense strand to SEQ ID NO: 1526372
uuguagccaaaccacuggg

SEQ ID NO: 1526374 - RNA, 19 nt, Artificial Sequence
  Description of Artificial Sequence: Synthetic oligonucleotide
  Sense strand starting at position 2665 of SEQ ID NO: 1244969
gagguaguauaguaaggua

SEQ ID NO: 1526375 - RNA, 19 nt, Artificial Sequence
  Description of Artificial Sequence: Synthetic oligonucleotide
  Antisense strand to SEQ ID NO: 1526374
uaccuuacuauacuaccuc

SEQ ID NO: 1526376 - RNA, 19 nt, Artificial Sequence
  Description of Artificial Sequence: Synthetic oligonucleotide
  Sense strand starting at position 2670 of SEQ ID NO: 1244969
aguauaguaagguagcuaa

SEQ ID NO: 1526377 - RNA, 19 nt, Artificial Sequence
  Description of Artificial Sequence: Synthetic oligonucleotide
  Antisense strand to SEQ ID NO: 1526376
uuagcuaccuuacuauacu

SEQ ID NO: 1526378 - RNA, 19 nt, Artificial Sequence
  Description of Artificial Sequence: Synthetic oligonucleotide
  Sense strand starting at position 2674 of SEQ ID NO: 1244969
uaguaagguagcuaagagu

SEQ ID NO: 1526379 - RNA, 19 nt, Artificial Sequence
  Description of Artificial Sequence: Synthetic oligonucleotide
  Antisense strand to SEQ ID NO: 1526378
acucuuagcuaccuuacua

SEQ ID NO: 1526380 - RNA, 19 nt, Artificial Sequence
  Description of Artificial Sequence: Synthetic oligonucleotide
  Sense strand starting at position 2772 of SEQ ID NO: 1244969
uuaauuugcucaucuguga

SEQ ID NO: 1526381 - RNA, 19 nt, Artificial Sequence
  Description of Artificial Sequence: Synthetic oligonucleotide
  Antisense strand to SEQ ID NO: 1526380
ucacagaugagcaaauuaa

SEQ ID NO: 1526382 - RNA, 19 nt, Artificial Sequence
  Description of Artificial Sequence: Synthetic oligonucleotide
  Sense strand starting at position 2793 of SEQ ID NO: 1244969
uagggaugauaauagcaau

SEQ ID NO: 1526383 - RNA, 19 nt, Artificial Sequence
  Description of Artificial Sequence: Synthetic oligonucleotide
  Antisense strand to SEQ ID NO: 1526382
auugcuauuaucaucccua

SEQ ID NO: 1526384 - RNA, 19 nt, Artificial Sequence
  Description of Artificial Sequence: Synthetic oligonucleotide
  Sense strand starting at position 2796 of SEQ ID NO: 1244969
ggaugauaauagcaauacu

SEQ ID NO: 1526385 - RNA, 19 nt, Artificial Sequence
  Description of Artificial Sequence: Synthetic oligonucleotide
  Antisense strand to SEQ ID NO: 1526384
aguauugcuauuaucaucc

SEQ ID NO: 1526386 - RNA, 19 nt, Artificial Sequence
  Description of Artificial Sequence: Synthetic oligonucleotide
  Sense strand starting at position 2823 of SEQ ID NO: 1244969
ugggcaauuggaggauuaa

SEQ ID NO: 1526387 - RNA, 19 nt, Artificial Sequence
  Description of Artificial Sequence: Synthetic oligonucleotide
  Antisense strand to SEQ ID NO: 1526386
uuaauccuccaauugccca

SEQ ID NO: 1526388 - RNA, 19 nt, Artificial Sequence
  Description of Artificial Sequence: Synthetic oligonucleotide
  Sense strand starting at position 2862 of SEQ ID NO: 1244969
gcauuuagcuccuucgaua

SEQ ID NO: 1526389 - RNA, 19 nt, Artificial Sequence
  Description of Artificial Sequence: Synthetic oligonucleotide
  Antisense strand to SEQ ID NO: 1526388
uaucgaaggagcuaaaugc

SEQ ID NO: 1526390 - RNA, 19 nt, Artificial Sequence
  Description of Artificial Sequence: Synthetic oligonucleotide
  Sense strand starting at position 2873 of SEQ ID NO: 1244969
cuucgauaagcuuaaccau

SEQ ID NO: 1526391 - RNA, 19 nt, Artificial Sequence
  Description of Artificial Sequence: Synthetic oligonucleotide
  Antisense strand to SEQ ID NO: 1526390
augguuaagcuuaucgaag

SEQ ID NO: 1526392 - RNA, 19 nt, Artificial Sequence
  Description of Artificial Sequence: Synthetic oligonucleotide
  Sense strand starting at position 2882 of SEQ ID NO: 1244969
gcuuaaccauuguuguacu

SEQ ID NO: 1526393 - RNA, 19 nt, Artificial Sequence
  Description of Artificial Sequence: Synthetic oligonucleotide
  Antisense strand to SEQ ID NO: 1526392
aguacaacaaugguuaagc

SEQ ID NO: 1526394 - RNA, 19 nt, Artificial Sequence
  Description of Artificial Sequence: Synthetic oligonucleotide
  Sense strand starting at position 2944 of SEQ ID NO: 1244969
cuguuauggucugcuccau

SEQ ID NO: 1526395 - RNA, 19 nt, Artificial Sequence
  Description of Artificial Sequence: Synthetic oligonucleotide
  Antisense strand to SEQ ID NO: 1526394
auggagcagaccauaacag

SEQ ID NO: 1526396 - RNA, 19 nt, Artificial Sequence
  Description of Artificial Sequence: Synthetic oligonucleotide
  Sense strand starting at position 3975 of SEQ ID NO: 1244969
uuugacugcgccugaaauc

SEQ ID NO: 1526397 - RNA, 19 nt, Artificial Sequence
  Description of Artificial Sequence: Synthetic oligonucleotide
  Antisense strand to SEQ ID NO: 1526396
gauuucaggcgcagucaaa

SEQ ID NO: 1526398 - RNA, 19 nt, Artificial Sequence
  Description of Artificial Sequence: Synthetic oligonucleotide
  Sense strand starting at position 9 of SEQ ID NO: 1244970
aguggaccuuuauugguaa

SEQ ID NO: 1526399 - RNA, 19 nt, Artificial Sequence
  Description of Artificial Sequence: Synthetic oligonucleotide
  Antisense strand to SEQ ID NO: 1526398
uuaccaauaaagguccacu

SEQ ID NO: 1526400 - RNA, 19 nt, Artificial Sequence
  Description of Artificial Sequence: Synthetic oligonucleotide
  Sense strand starting at position 93 of SEQ ID NO: 1244970
ggugucucaggguagagau

SEQ ID NO: 1526401 - RNA, 19 nt, Artificial Sequence
  Description of Artificial Sequence: Synthetic oligonucleotide
  Antisense strand to SEQ ID NO: 1526400
aucucuacccugagacacc

SEQ ID NO: 1526402 - RNA, 19 nt, Artificial Sequence
  Description of Artificial Sequence: Synthetic oligonucleotide
  Sense strand starting at position 126 of SEQ ID NO: 1244970
gagggauccucagaaauug

SEQ ID NO: 1526403 - RNA, 19 nt, Artificial Sequence
  Description of Artificial Sequence: Synthetic oligonucleotide
  Antisense strand to SEQ ID NO: 1526402
caauuucugaggaucccuc

SEQ ID NO: 1526404 - RNA, 19 nt, Artificial Sequence
  Description of Artificial Sequence: Synthetic oligonucleotide
  Sense strand starting at position 176 of SEQ ID NO: 1244970
ggacuuccauaggagauaa

SEQ ID NO: 1526405 - RNA, 19 nt, Artificial Sequence
  Description of Artificial Sequence: Synthetic oligonucleotide
  Antisense strand to SEQ ID NO: 1526404
uuaucuccuauggaagucc

SEQ ID NO: 1526406 - RNA, 19 nt, Artificial Sequence
  Description of Artificial Sequence: Synthetic oligonucleotide
  Sense strand starting at position 189 of SEQ ID NO: 1244970
agauaagauuucugacuca

SEQ ID NO: 1526407 - RNA, 19 nt, Artificial Sequence
  Description of Artificial Sequence: Synthetic oligonucleotide
  Antisense strand to SEQ ID NO: 1526406
ugagucagaaaucuuaucu

SEQ ID NO: 1526408 - RNA, 19 nt, Artificial Sequence
  Description of Artificial Sequence: Synthetic oligonucleotide
  Sense strand starting at position 252 of SEQ ID NO: 1244970
gaacauucuagguggcgaa

SEQ ID NO: 1526409 - RNA, 19 nt, Artificial Sequence
  Description of Artificial Sequence: Synthetic oligonucleotide
  Antisense strand to SEQ ID NO: 1526408
uucgccaccuagaauguuc

SEQ ID NO: 1526410 - RNA, 19 nt, Artificial Sequence
  Description of Artificial Sequence: Synthetic oligonucleotide
  Sense strand starting at position 253 of SEQ ID NO: 1244970
aacauucuagguggcgaaa

SEQ ID NO: 1526411 - RNA, 19 nt, Artificial Sequence
  Description of Artificial Sequence: Synthetic oligonucleotide
  Antisense strand to SEQ ID NO: 1526410
uuucgccaccuagaauguu

SEQ ID NO: 1526412 - RNA, 19 nt, Artificial Sequence
  Description of Artificial Sequence: Synthetic oligonucleotide
  Sense strand starting at position 348 of SEQ ID NO: 1244970
aacucaaagguaugucaga

SEQ ID NO: 1526413 - RNA, 19 nt, Artificial Sequence
  Description of Artificial Sequence: Synthetic oligonucleotide
  Antisense strand to SEQ ID NO: 1526412
ucugacauaccuuugaguu

SEQ ID NO: 1526414 - RNA, 19 nt, Artificial Sequence
  Description of Artificial Sequence: Synthetic oligonucleotide
  Sense strand starting at position 349 of SEQ ID NO: 1244970
acucaaagguaugucagaa

SEQ ID NO: 1526415 - RNA, 19 nt, Artificial Sequence
  Description of Artificial Sequence: Synthetic oligonucleotide
  Antisense strand to SEQ ID NO: 1526414
uucugacauaccuuugagu

SEQ ID NO: 1526416 - RNA, 19 nt, Artificial Sequence
  Description of Artificial Sequence: Synthetic oligonucleotide
  Sense strand starting at position 357 of SEQ ID NO: 1244970
guaugucagaauuggauga

SEQ ID NO: 1526417 - RNA, 19 nt, Artificial Sequence
  Description of Artificial Sequence: Synthetic oligonucleotide
  Antisense strand to SEQ ID NO: 1526416
ucauccaauucugacauac

SEQ ID NO: 1526418 - RNA, 19 nt, Artificial Sequence
  Description of Artificial Sequence: Synthetic oligonucleotide
  Sense strand starting at position 407 of SEQ ID NO: 1244970
ugcugaguuucaguuagag

SEQ ID NO: 1526419 - RNA, 19 nt, Artificial Sequence
  Description of Artificial Sequence: Synthetic oligonucleotide
  Antisense strand to SEQ ID NO: 1526418
cucuaacugaaacucagca

SEQ ID NO: 1526420 - RNA, 19 nt, Artificial Sequence
  Description of Artificial Sequence: Synthetic oligonucleotide
  Sense strand starting at position 427 of SEQ ID NO: 1244970
uggcaaucccuccacaguu

SEQ ID NO: 1526421 - RNA, 19 nt, Artificial Sequence
  Description of Artificial Sequence: Synthetic oligonucleotide
  Antisense strand to SEQ ID NO: 1526420
aacuguggagggauugcca

SEQ ID NO: 1526422 - RNA, 19 nt, Artificial Sequence
  Description of Artificial Sequence: Synthetic oligonucleotide
  Sense strand starting at position 566 of SEQ ID NO: 1244970
aaacgaagaugcuugugau

SEQ ID NO: 1526423 - RNA, 19 nt, Artificial Sequence
  Description of Artificial Sequence: Synthetic oligonucleotide
  Antisense strand to SEQ ID NO: 1526422
aucacaagcaucuucguuu

SEQ ID NO: 1526424 - RNA, 19 nt, Artificial Sequence
  Description of Artificial Sequence: Synthetic oligonucleotide
  Sense strand starting at position 567 of SEQ ID NO: 1244970
aacgaagaugcuugugaug

SEQ ID NO: 1526425 - RNA, 19 nt, Artificial Sequence
  Description of Artificial Sequence: Synthetic oligonucleotide
  Antisense strand to SEQ ID NO: 1526424
caucacaagcaucuucguu

SEQ ID NO: 1526426 - RNA, 19 nt, Artificial Sequence
  Description of Artificial Sequence: Synthetic oligonucleotide
  Sense strand starting at position 643 of SEQ ID NO: 1244970
uuucuuaugcgauagguac

SEQ ID NO: 1526427 - RNA, 19 nt, Artificial Sequence
  Description of Artificial Sequence: Synthetic oligonucleotide
  Antisense strand to SEQ ID NO: 1526426
guaccuaucgcauaagaaa

SEQ ID NO: 1526428 - RNA, 19 nt, Artificial Sequence
  Description of Artificial Sequence: Synthetic oligonucleotide
  Sense strand starting at position 645 of SEQ ID NO: 1244970
ucuuaugcgauagguacua

SEQ ID NO: 1526429 - RNA, 19 nt, Artificial Sequence
  Description of Artificial Sequence: Synthetic oligonucleotide
  Antisense strand to SEQ ID NO: 1526428
uaguaccuaucgcauaaga

SEQ ID NO: 1526430 - RNA, 19 nt, Artificial Sequence
  Description of Artificial Sequence: Synthetic oligonucleotide
  Sense strand starting at position 647 of SEQ ID NO: 1244970
uuaugcgauagguacuauu

SEQ ID NO: 1526431 - RNA, 19 nt, Artificial Sequence
  Description of Artificial Sequence: Synthetic oligonucleotide
  Antisense strand to SEQ ID NO: 1526430
aauaguaccuaucgcauaa

SEQ ID NO: 1526432 - RNA, 19 nt, Artificial Sequence
  Description of Artificial Sequence: Synthetic oligonucleotide
  Sense strand starting at position 692 of SEQ ID NO: 1244970
acuaaaugauaggaucuaa

SEQ ID NO: 1526433 - RNA, 19 nt, Artificial Sequence
  Description of Artificial Sequence: Synthetic oligonucleotide
  Antisense strand to SEQ ID NO: 1526432
uuagauccuaucauuuagu

SEQ ID NO: 1526434 - RNA, 19 nt, Artificial Sequence
  Description of Artificial Sequence: Synthetic oligonucleotide
  Sense strand starting at position 745 of SEQ ID NO: 1244970
uuaggccuuuguuccuaua

SEQ ID NO: 1526435 - RNA, 19 nt, Artificial Sequence
  Description of Artificial Sequence: Synthetic oligonucleotide
  Antisense strand to SEQ ID NO: 1526434
uauaggaacaaaggccuaa

SEQ ID NO: 1526436 - RNA, 19 nt, Artificial Sequence
  Description of Artificial Sequence: Synthetic oligonucleotide
  Sense strand starting at position 747 of SEQ ID NO: 1244970
aggccuuuguuccuauauu

SEQ ID NO: 1526437 - RNA, 19 nt, Artificial Sequence
  Description of Artificial Sequence: Synthetic oligonucleotide
  Antisense strand to SEQ ID NO: 1526436
aauauaggaacaaaggccu

SEQ ID NO: 1526438 - RNA, 19 nt, Artificial Sequence
  Description of Artificial Sequence: Synthetic oligonucleotide
  Sense strand starting at position 755 of SEQ ID NO: 1244970
guuccuauauuugaugagu

SEQ ID NO: 1526439 - RNA, 19 nt, Artificial Sequence
  Description of Artificial Sequence: Synthetic oligonucleotide
  Antisense strand to SEQ ID NO: 1526438
acucaucaaauauaggaac

SEQ ID NO: 1526440 - RNA, 19 nt, Artificial Sequence
  Description of Artificial Sequence: Synthetic oligonucleotide
  Sense strand starting at position 757 of SEQ ID NO: 1244970
uccuauauuugaugaguau

SEQ ID NO: 1526441 - RNA, 19 nt, Artificial Sequence
  Description of Artificial Sequence: Synthetic oligonucleotide
  Antisense strand to SEQ ID NO: 1526440
auacucaucaaauauagga

SEQ ID NO: 1526442 - RNA, 19 nt, Artificial Sequence
  Description of Artificial Sequence: Synthetic oligonucleotide
  Sense strand starting at position 846 of SEQ ID NO: 1244970
gaagcuccugagugggaua

SEQ ID NO: 1526443 - RNA, 19 nt, Artificial Sequence
  Description of Artificial Sequence: Synthetic oligonucleotide
  Antisense strand to SEQ ID NO: 1526442
uaucccacucaggagcuuc

SEQ ID NO: 1526444 - RNA, 19 nt, Artificial Sequence
  Description of Artificial Sequence: Synthetic oligonucleotide
  Sense strand starting at position 848 of SEQ ID NO: 1244970
agcuccugagugggauauu

SEQ ID NO: 1526445 - RNA, 19 nt, Artificial Sequence
  Description of Artificial Sequence: Synthetic oligonucleotide
  Antisense strand to SEQ ID NO: 1526444
aauaucccacucaggagcu

SEQ ID NO: 1526446 - RNA, 19 nt, Artificial Sequence
  Description of Artificial Sequence: Synthetic oligonucleotide
  Sense strand starting at position 914 of SEQ ID NO: 1244970
cuggaagaggcguaagagu

SEQ ID NO: 1526447 - RNA, 19 nt, Artificial Sequence
  Description of Artificial Sequence: Synthetic oligonucleotide
  Antisense strand to SEQ ID NO: 1526446
acucuuacgccucuuccag

SEQ ID NO: 1526448 - RNA, 19 nt, Artificial Sequence
  Description of Artificial Sequence: Synthetic oligonucleotide
  Sense strand starting at position 923 of SEQ ID NO: 1244970
gcguaagaguggacagcuu

SEQ ID NO: 1526449 - RNA, 19 nt, Artificial Sequence
  Description of Artificial Sequence: Synthetic oligonucleotide
  Antisense strand to SEQ ID NO: 1526448
aagcuguccacucuuacgc

SEQ ID NO: 1526450 - RNA, 19 nt, Artificial Sequence
  Description of Artificial Sequence: Synthetic oligonucleotide
  Sense strand starting at position 987 of SEQ ID NO: 1244970
gcgaucuagaccugggaaa

SEQ ID NO: 1526451 - RNA, 19 nt, Artificial Sequence
  Description of Artificial Sequence: Synthetic oligonucleotide
  Antisense strand to SEQ ID NO: 1526450
uuucccaggucuagaucgc

SEQ ID NO: 1526452 - RNA, 19 nt, Artificial Sequence
  Description of Artificial Sequence: Synthetic oligonucleotide
  Sense strand starting at position 2201 of SEQ ID NO: 1244970
gccauaucauucccguuaa

SEQ ID NO: 1526453 - RNA, 19 nt, Artificial Sequence
  Description of Artificial Sequence: Synthetic oligonucleotide
  Antisense strand to SEQ ID NO: 1526452
uuaacgggaaugauauggc

SEQ ID NO: 1526454 - RNA, 19 nt, Artificial Sequence
  Description of Artificial Sequence: Synthetic oligonucleotide
  Sense strand starting at position 2231 of SEQ ID NO: 1244970
cucagacgucugcaugguu

SEQ ID NO: 1526455 - RNA, 19 nt, Artificial Sequence
  Description of Artificial Sequence: Synthetic oligonucleotide
  Antisense strand to SEQ ID NO: 1526454
aaccaugcagacgucugag

SEQ ID NO: 1526456 - RNA, 19 nt, Artificial Sequence
  Description of Artificial Sequence: Synthetic oligonucleotide
  Sense strand starting at position 2273 of SEQ ID NO: 1244970
augggaagcucaguagaga

SEQ ID NO: 1526457 - RNA, 19 nt, Artificial Sequence
  Description of Artificial Sequence: Synthetic oligonucleotide
  Antisense strand to SEQ ID NO: 1526456
ucucuacugagcuucccau

SEQ ID NO: 1526458 - RNA, 19 nt, Artificial Sequence
  Description of Artificial Sequence: Synthetic oligonucleotide
  Sense strand starting at position 2276 of SEQ ID NO: 1244970
ggaagcucaguagagaagu

SEQ ID NO: 1526459 - RNA, 19 nt, Artificial Sequence
  Description of Artificial Sequence: Synthetic oligonucleotide
  Antisense strand to SEQ ID NO: 1526458
acuucucuacugagcuucc

SEQ ID NO: 1526460 - RNA, 19 nt, Artificial Sequence
  Description of Artificial Sequence: Synthetic oligonucleotide
  Sense strand starting at position 2286 of SEQ ID NO: 1244970
uagagaaguugacucgcuu

SEQ ID NO: 1526461 - RNA, 19 nt, Artificial Sequence
  Description of Artificial Sequence: Synthetic oligonucleotide
  Antisense strand to SEQ ID NO: 1526460
aagcgagucaacuucucua

SEQ ID NO: 1526462 - RNA, 19 nt, Artificial Sequence
  Description of Artificial Sequence: Synthetic oligonucleotide
  Sense strand starting at position 2524 of SEQ ID NO: 1244970
acuagagaagcuuggugaa

SEQ ID NO: 1526463 - RNA, 19 nt, Artificial Sequence
  Description of Artificial Sequence: Synthetic oligonucleotide
  Antisense strand to SEQ ID NO: 1526462
uucaccaagcuucucuagu

SEQ ID NO: 1526464 - RNA, 19 nt, Artificial Sequence
  Description of Artificial Sequence: Synthetic oligonucleotide
  Sense strand starting at position 2526 of SEQ ID NO: 1244970
uagagaagcuuggugaaag

SEQ ID NO: 1526465 - RNA, 19 nt, Artificial Sequence
  Description of Artificial Sequence: Synthetic oligonucleotide
  Antisense strand to SEQ ID NO: 1526464
cuuucaccaagcuucucua

SEQ ID NO: 1526466 - RNA, 19 nt, Artificial Sequence
  Description of Artificial Sequence: Synthetic oligonucleotide
  Sense strand starting at position 2617 of SEQ ID NO: 1244970
cgagguacugugaguguaa

SEQ ID NO: 1526467 - RNA, 19 nt, Artificial Sequence
  Description of Artificial Sequence: Synthetic oligonucleotide
  Antisense strand to SEQ ID NO: 1526466
uuacacucacaguaccucg

SEQ ID NO: 1526468 - RNA, 19 nt, Artificial Sequence
  Description of Artificial Sequence: Synthetic oligonucleotide
  Sense strand starting at position 2628 of SEQ ID NO: 1244970
gaguguaaacccugaggau

SEQ ID NO: 1526469 - RNA, 19 nt, Artificial Sequence
  Description of Artificial Sequence: Synthetic oligonucleotide
  Antisense strand to SEQ ID NO: 1526468
auccucaggguuuacacuc

SEQ ID NO: 1526470 - RNA, 19 nt, Artificial Sequence
  Description of Artificial Sequence: Synthetic oligonucleotide
  Sense strand starting at position 2646 of SEQ ID NO: 1244970
uucuuugggucuuuccuaa

SEQ ID NO: 1526471 - RNA, 19 nt, Artificial Sequence
  Description of Artificial Sequence: Synthetic oligonucleotide
  Antisense strand to SEQ ID NO: 1526470
uuaggaaagacccaaagaa

SEQ ID NO: 1526472 - RNA, 19 nt, Artificial Sequence
  Description of Artificial Sequence: Synthetic oligonucleotide
  Sense strand starting at position 3471 of SEQ ID NO: 1244970
guaugaacauucguaccaa

SEQ ID NO: 1526473 - RNA, 19 nt, Artificial Sequence
  Description of Artificial Sequence: Synthetic oligonucleotide
  Antisense strand to SEQ ID NO: 1526472
uugguacgaauguucauac

SEQ ID NO: 1526474 - RNA, 19 nt, Artificial Sequence
  Description of Artificial Sequence: Synthetic oligonucleotide
  Sense strand starting at position 3844 of SEQ ID NO: 1244970
agagucuggcuuuagaguu

SEQ ID NO: 1526475 - RNA, 19 nt, Artificial Sequence
  Description of Artificial Sequence: Synthetic oligonucleotide
  Antisense strand to SEQ ID NO: 1526474
aacucuaaagccagacucu

SEQ ID NO: 1526476 - RNA, 19 nt, Artificial Sequence
  Description of Artificial Sequence: Synthetic oligonucleotide
  Sense strand starting at position 3891 of SEQ ID NO: 1244970
gagggaaucuugcucuugu

SEQ ID NO: 1526477 - RNA, 19 nt, Artificial Sequence
  Description of Artificial Sequence: Synthetic oligonucleotide
  Antisense strand to SEQ ID NO: 1526476
acaagagcaagauucccuc

SEQ ID NO: 1526478 - RNA, 19 nt, Artificial Sequence
  Description of Artificial Sequence: Synthetic oligonucleotide
  Sense strand starting at position 2270 of SEQ ID NO: 1244971
gcgggcauguugagacuuu

SEQ ID NO: 1526479 - RNA, 19 nt, Artificial Sequence
  Description of Artificial Sequence: Synthetic oligonucleotide
  Antisense strand to SEQ ID NO: 1526478
aaagucucaacaugcccgc

SEQ ID NO: 1526480 - RNA, 19 nt, Artificial Sequence
  Description of Artificial Sequence: Synthetic oligonucleotide
  Sense strand starting at position 2444 of SEQ ID NO: 1244971
gagaaaucguccuccuacc

SEQ ID NO: 1526481 - RNA, 19 nt, Artificial Sequence
  Description of Artificial Sequence: Synthetic oligonucleotide
  Antisense strand to SEQ ID NO: 1526480
gguaggaggacgauuucuc

SEQ ID NO: 1526482 - RNA, 19 nt, Artificial Sequence
  Description of Artificial Sequence: Synthetic oligonucleotide
  Sense strand starting at position 2477 of SEQ ID NO: 1244971
cugcguuucucuuccaauc

SEQ ID NO: 1526483 - RNA, 19 nt, Artificial Sequence
  Description of Artificial Sequence: Synthetic oligonucleotide
  Antisense strand to SEQ ID NO: 1526482
gauuggaagagaaacgcag

SEQ ID NO: 1526484 - RNA, 19 nt, Artificial Sequence
  Description of Artificial Sequence: Synthetic oligonucleotide
  Sense strand starting at position 2933 of SEQ ID NO: 1244971
aggacaagcuucucaaugu

SEQ ID NO: 1526485 - RNA, 19 nt, Artificial Sequence
  Description of Artificial Sequence: Synthetic oligonucleotide
  Antisense strand to SEQ ID NO: 1526484
acauugagaagcuuguccu

SEQ ID NO: 1526486 - RNA, 19 nt, Artificial Sequence
  Description of Artificial Sequence: Synthetic oligonucleotide
  Sense strand starting at position 2934 of SEQ ID NO: 1244971
ggacaagcuucucaauguc

SEQ ID NO: 1526487 - RNA, 19 nt, Artificial Sequence
  Description of Artificial Sequence: Synthetic oligonucleotide
  Antisense strand to SEQ ID NO: 1526486
gacauugagaagcuugucc

SEQ ID NO: 1526488 - RNA, 19 nt, Artificial Sequence
  Description of Artificial Sequence: Synthetic oligonucleotide
  Sense strand starting at position 2951 of SEQ ID NO: 1244971
ucccguuucgcuggguuua

SEQ ID NO: 1526489 - RNA, 19 nt, Artificial Sequence
  Description of Artificial Sequence: Synthetic oligonucleotide
  Antisense strand to SEQ ID NO: 1526488
uaaacccagcgaaacggga

SEQ ID NO: 1526490 - RNA, 19 nt, Artificial Sequence
  Description of Artificial Sequence: Synthetic oligonucleotide
  Sense strand starting at position 2964 of SEQ ID NO: 1244971
gguuuaggauccgaggagu

SEQ ID NO: 1526491 - RNA, 19 nt, Artificial Sequence
  Description of Artificial Sequence: Synthetic oligonucleotide
  Antisense strand to SEQ ID NO: 1526490
acuccucggauccuaaacc

SEQ ID NO: 1526492 - RNA, 19 nt, Artificial Sequence
  Description of Artificial Sequence: Synthetic oligonucleotide
  Sense strand starting at position 3113 of SEQ ID NO: 1244971
guggguuugcgcgagggau

SEQ ID NO: 1526493 - RNA, 19 nt, Artificial Sequence
  Description of Artificial Sequence: Synthetic oligonucleotide
  Antisense strand to SEQ ID NO: 1526492
aucccucgcgcaaacccac

SEQ ID NO: 1526494 - RNA, 19 nt, Artificial Sequence
  Description of Artificial Sequence: Synthetic oligonucleotide
  Sense strand starting at position 3114 of SEQ ID NO: 1244971
uggguuugcgcgagggauc

SEQ ID NO: 1526495 - RNA, 19 nt, Artificial Sequence
  Description of Artificial Sequence: Synthetic oligonucleotide
  Antisense strand to SEQ ID NO: 1526494
gaucccucgcgcaaaccca

SEQ ID NO: 1526496 - RNA, 19 nt, Artificial Sequence
  Description of Artificial Sequence: Synthetic oligonucleotide
  Sense strand starting at position 3281 of SEQ ID NO: 1244971
uguuguuaccggcgucaca

SEQ ID NO: 1526497 - RNA, 19 nt, Artificial Sequence
  Description of Artificial Sequence: Synthetic oligonucleotide
  Antisense strand to SEQ ID NO: 1526496
ugugacgccgguaacaaca

SEQ ID NO: 1526498 - RNA, 19 nt, Artificial Sequence
  Description of Artificial Sequence: Synthetic oligonucleotide
  Sense strand starting at position 3322 of SEQ ID NO: 1244971
acgcaaucagcuugucaaa

SEQ ID NO: 1526499 - RNA, 19 nt, Artificial Sequence
  Description of Artificial Sequence: Synthetic oligonucleotide
  Antisense strand to SEQ ID NO: 1526498
uuugacaagcugauugcgu

SEQ ID NO: 1526500 - RNA, 19 nt, Artificial Sequence
  Description of Artificial Sequence: Synthetic oligonucleotide
  Sense strand starting at position 3345 of SEQ ID NO: 1244971
cucggccaucccuaggaaa

SEQ ID NO: 1526501 - RNA, 19 nt, Artificial Sequence
  Description of Artificial Sequence: Synthetic oligonucleotide
  Antisense strand to SEQ ID NO: 1526500
uuuccuagggauggccgag

SEQ ID NO: 1526502 - RNA, 19 nt, Artificial Sequence
  Description of Artificial Sequence: Synthetic oligonucleotide
  Sense strand starting at position 3809 of SEQ ID NO: 1244971
ccucgcugcugcuguaauu

SEQ ID NO: 1526503 - RNA, 19 nt, Artificial Sequence
  Description of Artificial Sequence: Synthetic oligonucleotide
  Antisense strand to SEQ ID NO: 1526502
aauuacagcagcagcgagg

SEQ ID NO: 1526504 - RNA, 19 nt, Artificial Sequence
  Description of Artificial Sequence: Synthetic oligonucleotide
  Sense strand starting at position 3828 of SEQ ID NO: 1244971
ccucuugucuccugggaga

SEQ ID NO: 1526505 - RNA, 19 nt, Artificial Sequence
  Description of Artificial Sequence: Synthetic oligonucleotide
  Antisense strand to SEQ ID NO: 1526504
ucucccaggagacaagagg

SEQ ID NO: 1526506 - RNA, 19 nt, Artificial Sequence
  Description of Artificial Sequence: Synthetic oligonucleotide
  Sense strand starting at position 3830 of SEQ ID NO: 1244971
ucuugucuccugggagaaa

SEQ ID NO: 1526507 - RNA, 19 nt, Artificial Sequence
  Description of Artificial Sequence: Synthetic oligonucleotide
  Antisense strand to SEQ ID NO: 1526506
uuucucccaggagacaaga

SEQ ID NO: 1526508 - RNA, 19 nt, Artificial Sequence
  Description of Artificial Sequence: Synthetic oligonucleotide
  Sense strand starting at position 3843 of SEQ ID NO: 1244971
gagaaaugagauugcuuuc

SEQ ID NO: 1526509 - RNA, 19 nt, Artificial Sequence
  Description of Artificial Sequence: Synthetic oligonucleotide
  Antisense strand to SEQ ID NO: 1526508
gaaagcaaucucauuucuc

SEQ ID NO: 1526510 - RNA, 19 nt, Artificial Sequence
  Description of Artificial Sequence: Synthetic oligonucleotide
  Sense strand starting at position 3914 of SEQ ID NO: 1244971
cugucaagaucuggugugu

SEQ ID NO: 1526511 - RNA, 19 nt, Artificial Sequence
  Description of Artificial Sequence: Synthetic oligonucleotide
  Antisense strand to SEQ ID NO: 1526510
acacaccagaucuugacag

SEQ ID NO: 1526512 - RNA, 19 nt, Artificial Sequence
  Description of Artificial Sequence: Synthetic oligonucleotide
  Sense strand starting at position 14 of SEQ ID NO: 1244972
cuggaucacugcugaauga

SEQ ID NO: 1526513 - RNA, 19 nt, Artificial Sequence
  Description of Artificial Sequence: Synthetic oligonucleotide
  Antisense strand to SEQ ID NO: 1526512
ucauucagcagugauccag

SEQ ID NO: 1526514 - RNA, 19 nt, Artificial Sequence
  Description of Artificial Sequence: Synthetic oligonucleotide
  Sense strand starting at position 23 of SEQ ID NO: 1244972
ugcugaaugaggcagagau

SEQ ID NO: 1526515 - RNA, 19 nt, Artificial Sequence
  Description of Artificial Sequence: Synthetic oligonucleotide
  Antisense strand to SEQ ID NO: 1526514
aucucugccucauucagca

SEQ ID NO: 1526516 - RNA, 19 nt, Artificial Sequence
  Description of Artificial Sequence: Synthetic oligonucleotide
  Sense strand starting at position 38 of SEQ ID NO: 1244972
agaucuaguugaguacaua

SEQ ID NO: 1526517 - RNA, 19 nt, Artificial Sequence
  Description of Artificial Sequence: Synthetic oligonucleotide
  Antisense strand to SEQ ID NO: 1526516
uauguacucaacuagaucu

SEQ ID NO: 1526518 - RNA, 19 nt, Artificial Sequence
  Description of Artificial Sequence: Synthetic oligonucleotide
  Sense strand starting at position 39 of SEQ ID NO: 1244972
gaucuaguugaguacauau

SEQ ID NO: 1526519 - RNA, 19 nt, Artificial Sequence
  Description of Artificial Sequence: Synthetic oligonucleotide
  Antisense strand to SEQ ID NO: 1526518
auauguacucaacuagauc

SEQ ID NO: 1526520 - RNA, 19 nt, Artificial Sequence
  Description of Artificial Sequence: Synthetic oligonucleotide
  Sense strand starting at position 41 of SEQ ID NO: 1244972
ucuaguugaguacauauau

SEQ ID NO: 1526521 - RNA, 19 nt, Artificial Sequence
  Description of Artificial Sequence: Synthetic oligonucleotide
  Antisense strand to SEQ ID NO: 1526520
auauauguacucaacuaga

SEQ ID NO: 1526522 - RNA, 19 nt, Artificial Sequence
  Description of Artificial Sequence: Synthetic oligonucleotide
  Sense strand starting at position 120 of SEQ ID NO: 1244972
gccucauggucuuccuaaa

SEQ ID NO: 1526523 - RNA, 19 nt, Artificial Sequence
  Description of Artificial Sequence: Synthetic oligonucleotide
  Antisense strand to SEQ ID NO: 1526522
uuuaggaagaccaugaggc

SEQ ID NO: 1526524 - RNA, 19 nt, Artificial Sequence
  Description of Artificial Sequence: Synthetic oligonucleotide
  Sense strand starting at position 347 of SEQ ID NO: 1244972
gugggagaugcuugauuca

SEQ ID NO: 1526525 - RNA, 19 nt, Artificial Sequence
  Description of Artificial Sequence: Synthetic oligonucleotide
  Antisense strand to SEQ ID NO: 1526524
ugaaucaagcaucucccac

SEQ ID NO: 1526526 - RNA, 19 nt, Artificial Sequence
  Description of Artificial Sequence: Synthetic oligonucleotide
  Sense strand starting at position 658 of SEQ ID NO: 1244972
cugagaggugaacgacuaa

SEQ ID NO: 1526527 - RNA, 19 nt, Artificial Sequence
  Description of Artificial Sequence: Synthetic oligonucleotide
  Antisense strand to SEQ ID NO: 1526526
uuagucguucaccucucag

SEQ ID NO: 1526528 - RNA, 19 nt, Artificial Sequence
  Description of Artificial Sequence: Synthetic oligonucleotide
  Sense strand starting at position 724 of SEQ ID NO: 1244972
gagacucagccaugaccuu

SEQ ID NO: 1526529 - RNA, 19 nt, Artificial Sequence
  Description of Artificial Sequence: Synthetic oligonucleotide
  Antisense strand to SEQ ID NO: 1526528
aaggucauggcugagucuc

SEQ ID NO: 1526530 - RNA, 19 nt, Artificial Sequence
  Description of Artificial Sequence: Synthetic oligonucleotide
  Sense strand starting at position 3479 of SEQ ID NO: 1244972
gcgggcauguugagacuuu

SEQ ID NO: 1526531 - RNA, 19 nt, Artificial Sequence
  Description of Artificial Sequence: Synthetic oligonucleotide
  Antisense strand to SEQ ID NO: 1526530
aaagucucaacaugcccgc

SEQ ID NO: 1526532 - RNA, 19 nt, Artificial Sequence
  Description of Artificial Sequence: Synthetic oligonucleotide
  Sense strand starting at position 3653 of SEQ ID NO: 1244972
gagaaaucguccuccuacc

SEQ ID NO: 1526533 - RNA, 19 nt, Artificial Sequence
  Description of Artificial Sequence: Synthetic oligonucleotide
  Antisense strand to SEQ ID NO: 1526532
gguaggaggacgauuucuc

SEQ ID NO: 1526534 - RNA, 19 nt, Artificial Sequence
  Description of Artificial Sequence: Synthetic oligonucleotide
  Sense strand starting at position 3686 of SEQ ID NO: 1244972
cugcguuucucuuccaauc

SEQ ID NO: 1526535 - RNA, 19 nt, Artificial Sequence
  Description of Artificial Sequence: Synthetic oligonucleotide
  Antisense strand to SEQ ID NO: 1526534
gauuggaagagaaacgcag

SEQ ID NO: 1526536 - RNA, 19 nt, Artificial Sequence
  Description of Artificial Sequence: Synthetic oligonucleotide
  Sense strand starting at position 60 of SEQ ID NO: 1244973
gcaauaugccaagauccua

SEQ ID NO: 1526537 - RNA, 19 nt, Artificial Sequence
  Description of Artificial Sequence: Synthetic oligonucleotide
  Antisense strand to SEQ ID NO: 1526536
uaggaucuuggcauauugc

SEQ ID NO: 1526538 - RNA, 19 nt, Artificial Sequence
  Description of Artificial Sequence: Synthetic oligonucleotide
  Sense strand starting at position 217 of SEQ ID NO: 1244973
guuauuuguuagcuuggaa

SEQ ID NO: 1526539 - RNA, 19 nt, Artificial Sequence
  Description of Artificial Sequence: Synthetic oligonucleotide
  Antisense strand to SEQ ID NO: 1526538
uuccaagcuaacaaauaac

SEQ ID NO: 1526540 - RNA, 19 nt, Artificial Sequence
  Description of Artificial Sequence: Synthetic oligonucleotide
  Sense strand starting at position 233 of SEQ ID NO: 1244973
gaaggauuacaccgugcuu

SEQ ID NO: 1526541 - RNA, 19 nt, Artificial Sequence
  Description of Artificial Sequence: Synthetic oligonucleotide
  Antisense strand to SEQ ID NO: 1526540
aagcacgguguaauccuuc

SEQ ID NO: 1526542 - RNA, 19 nt, Artificial Sequence
  Description of Artificial Sequence: Synthetic oligonucleotide
  Sense strand starting at position 235 of SEQ ID NO: 1244973
aggauuacaccgugcuuga

SEQ ID NO: 1526543 - RNA, 19 nt, Artificial Sequence
  Description of Artificial Sequence: Synthetic oligonucleotide
  Antisense strand to SEQ ID NO: 1526542
ucaagcacgguguaauccu

SEQ ID NO: 1526544 - RNA, 19 nt, Artificial Sequence
  Description of Artificial Sequence: Synthetic oligonucleotide
  Sense strand starting at position 242 of SEQ ID NO: 1244973
caccgugcuugaguucuaa

SEQ ID NO: 1526545 - RNA, 19 nt, Artificial Sequence
  Description of Artificial Sequence: Synthetic oligonucleotide
  Antisense strand to SEQ ID NO: 1526544
uuagaacucaagcacggug

SEQ ID NO: 1526546 - RNA, 19 nt, Artificial Sequence
  Description of Artificial Sequence: Synthetic oligonucleotide
  Sense strand starting at position 529 of SEQ ID NO: 1244973
cggagaucucgccacggca

SEQ ID NO: 1526547 - RNA, 19 nt, Artificial Sequence
  Description of Artificial Sequence: Synthetic oligonucleotide
  Antisense strand to SEQ ID NO: 1526546
ugccguggcgagaucuccg

SEQ ID NO: 1526548 - RNA, 19 nt, Artificial Sequence
  Description of Artificial Sequence: Synthetic oligonucleotide
  Sense strand starting at position 713 of SEQ ID NO: 1244973
cgauaugccuuuccaaauu

SEQ ID NO: 1526549 - RNA, 19 nt, Artificial Sequence
  Description of Artificial Sequence: Synthetic oligonucleotide
  Antisense strand to SEQ ID NO: 1526548
aauuuggaaaggcauaucg

SEQ ID NO: 1526550 - RNA, 19 nt, Artificial Sequence
  Description of Artificial Sequence: Synthetic oligonucleotide
  Sense strand starting at position 751 of SEQ ID NO: 1244973
guguaacuguacuugcgaa

SEQ ID NO: 1526551 - RNA, 19 nt, Artificial Sequence
  Description of Artificial Sequence: Synthetic oligonucleotide
  Antisense strand to SEQ ID NO: 1526550
uucgcaaguacaguuacac

SEQ ID NO: 1526552 - RNA, 19 nt, Artificial Sequence
  Description of Artificial Sequence: Synthetic oligonucleotide
  Sense strand starting at position 752 of SEQ ID NO: 1244973
uguaacuguacuugcgaaa

SEQ ID NO: 1526553 - RNA, 19 nt, Artificial Sequence
  Description of Artificial Sequence: Synthetic oligonucleotide
  Antisense strand to SEQ ID NO: 1526552
uuucgcaaguacaguuaca

SEQ ID NO: 1526554 - RNA, 19 nt, Artificial Sequence
  Description of Artificial Sequence: Synthetic oligonucleotide
  Sense strand starting at position 955 of SEQ ID NO: 1244973
cugcgaaagccugaggcua

SEQ ID NO: 1526555 - RNA, 19 nt, Artificial Sequence
  Description of Artificial Sequence: Synthetic oligonucleotide
  Antisense strand to SEQ ID NO: 1526554
uagccucaggcuuucgcag

SEQ ID NO: 1526556 - RNA, 19 nt, Artificial Sequence
  Description of Artificial Sequence: Synthetic oligonucleotide
  Sense strand starting at position 993 of SEQ ID NO: 1244973
uccgcugggucuguaauua

SEQ ID NO: 1526557 - RNA, 19 nt, Artificial Sequence
  Description of Artificial Sequence: Synthetic oligonucleotide
  Antisense strand to SEQ ID NO: 1526556
uaauuacagacccagcgga

SEQ ID NO: 1526558 - RNA, 19 nt, Artificial Sequence
  Description of Artificial Sequence: Synthetic oligonucleotide
  Sense strand starting at position 997 of SEQ ID NO: 1244973
cugggucuguaauuaucaa

SEQ ID NO: 1526559 - RNA, 19 nt, Artificial Sequence
  Description of Artificial Sequence: Synthetic oligonucleotide
  Antisense strand to SEQ ID NO: 1526558
uugauaauuacagacccag

SEQ ID NO: 1526560 - RNA, 19 nt, Artificial Sequence
  Description of Artificial Sequence: Synthetic oligonucleotide
  Sense strand starting at position 2298 of SEQ ID NO: 1244973
gggauuaucugcgcagggu

SEQ ID NO: 1526561 - RNA, 19 nt, Artificial Sequence
  Description of Artificial Sequence: Synthetic oligonucleotide
  Antisense strand to SEQ ID NO: 1526560
acccugcgcagauaauccc

SEQ ID NO: 1526562 - RNA, 19 nt, Artificial Sequence
  Description of Artificial Sequence: Synthetic oligonucleotide
  Sense strand starting at position 2299 of SEQ ID NO: 1244973
ggauuaucugcgcagggua

SEQ ID NO: 1526563 - RNA, 19 nt, Artificial Sequence
  Description of Artificial Sequence: Synthetic oligonucleotide
  Antisense strand to SEQ ID NO: 1526562
uacccugcgcagauaaucc

SEQ ID NO: 1526564 - RNA, 19 nt, Artificial Sequence
  Description of Artificial Sequence: Synthetic oligonucleotide
  Sense strand starting at position 2325 of SEQ ID NO: 1244973
agauuccugccagagcaaa

SEQ ID NO: 1526565 - RNA, 19 nt, Artificial Sequence
  Description of Artificial Sequence: Synthetic oligonucleotide
  Antisense strand to SEQ ID NO: 1526564
uuugcucuggcaggaaucu

SEQ ID NO: 1526566 - RNA, 19 nt, Artificial Sequence
  Description of Artificial Sequence: Synthetic oligonucleotide
  Sense strand starting at position 2430 of SEQ ID NO: 1244973
gguuuacucgcuuaggauc

SEQ ID NO: 1526567 - RNA, 19 nt, Artificial Sequence
  Description of Artificial Sequence: Synthetic oligonucleotide
  Antisense strand to SEQ ID NO: 1526566
gauccuaagcgaguaaacc

SEQ ID NO: 1526568 - RNA, 19 nt, Artificial Sequence
  Description of Artificial Sequence: Synthetic oligonucleotide
  Sense strand starting at position 2526 of SEQ ID NO: 1244973
gcccucuucgcagagaauc

SEQ ID NO: 1526569 - RNA, 19 nt, Artificial Sequence
  Description of Artificial Sequence: Synthetic oligonucleotide
  Antisense strand to SEQ ID NO: 1526568
gauucucugcgaagagggc

SEQ ID NO: 1526570 - RNA, 19 nt, Artificial Sequence
  Description of Artificial Sequence: Synthetic oligonucleotide
  Sense strand starting at position 2537 of SEQ ID NO: 1244973
agagaaucguuucugcaca

SEQ ID NO: 1526571 - RNA, 19 nt, Artificial Sequence
  Description of Artificial Sequence: Synthetic oligonucleotide
  Antisense strand to SEQ ID NO: 1526570
ugugcagaaacgauucucu

SEQ ID NO: 1526572 - RNA, 19 nt, Artificial Sequence
  Description of Artificial Sequence: Synthetic oligonucleotide
  Sense strand starting at position 2560 of SEQ ID NO: 1244973
cucagaaucgcacacguuu

SEQ ID NO: 1526573 - RNA, 19 nt, Artificial Sequence
  Description of Artificial Sequence: Synthetic oligonucleotide
  Antisense strand to SEQ ID NO: 1526572
aaacgugugcgauucugag

SEQ ID NO: 1526574 - RNA, 19 nt, Artificial Sequence
  Description of Artificial Sequence: Synthetic oligonucleotide
  Sense strand starting at position 2612 of SEQ ID NO: 1244973
uaguuugaccucgggcuua

SEQ ID NO: 1526575 - RNA, 19 nt, Artificial Sequence
  Description of Artificial Sequence: Synthetic oligonucleotide
  Antisense strand to SEQ ID NO: 1526574
uaagcccgaggucaaacua

SEQ ID NO: 1526576 - RNA, 19 nt, Artificial Sequence
  Description of Artificial Sequence: Synthetic oligonucleotide
  Sense strand starting at position 2670 of SEQ ID NO: 1244973
guuaaagcuguccaaguga

SEQ ID NO: 1526577 - RNA, 19 nt, Artificial Sequence
  Description of Artificial Sequence: Synthetic oligonucleotide
  Antisense strand to SEQ ID NO: 1526576
ucacuuggacagcuuuaac

SEQ ID NO: 1526578 - RNA, 19 nt, Artificial Sequence
  Description of Artificial Sequence: Synthetic oligonucleotide
  Sense strand starting at position 2691 of SEQ ID NO: 1244973
aggaacagauugucagguu

SEQ ID NO: 1526579 - RNA, 19 nt, Artificial Sequence
  Description of Artificial Sequence: Synthetic oligonucleotide
  Antisense strand to SEQ ID NO: 1526578
aaccugacaaucuguuccu

SEQ ID NO: 1526580 - RNA, 19 nt, Artificial Sequence
  Description of Artificial Sequence: Synthetic oligonucleotide
  Sense strand starting at position 2700 of SEQ ID NO: 1244973
uugucagguuucccgcaaa

SEQ ID NO: 1526581 - RNA, 19 nt, Artificial Sequence
  Description of Artificial Sequence: Synthetic oligonucleotide
  Antisense strand to SEQ ID NO: 1526580
uuugcgggaaaccugacaa

SEQ ID NO: 1526582 - RNA, 19 nt, Artificial Sequence
  Description of Artificial Sequence: Synthetic oligonucleotide
  Sense strand starting at position 2703 of SEQ ID NO: 1244973
ucagguuucccgcaaagaa

SEQ ID NO: 1526583 - RNA, 19 nt, Artificial Sequence
  Description of Artificial Sequence: Synthetic oligonucleotide
  Antisense strand to SEQ ID NO: 1526582
uucuuugcgggaaaccuga

SEQ ID NO: 1526584 - RNA, 19 nt, Artificial Sequence
  Description of Artificial Sequence: Synthetic oligonucleotide
  Sense strand starting at position 2711 of SEQ ID NO: 1244973
cccgcaaagaagugucuua

SEQ ID NO: 1526585 - RNA, 19 nt, Artificial Sequence
  Description of Artificial Sequence: Synthetic oligonucleotide
  Antisense strand to SEQ ID NO: 1526584
uaagacacuucuuugcggg

SEQ ID NO: 1526586 - RNA, 19 nt, Artificial Sequence
  Description of Artificial Sequence: Synthetic oligonucleotide
  Sense strand starting at position 2716 of SEQ ID NO: 1244973
aaagaagugucuuaugaaa

SEQ ID NO: 1526587 - RNA, 19 nt, Artificial Sequence
  Description of Artificial Sequence: Synthetic oligonucleotide
  Antisense strand to SEQ ID NO: 1526586
uuucauaagacacuucuuu

SEQ ID NO: 1526588 - RNA, 19 nt, Artificial Sequence
  Description of Artificial Sequence: Synthetic oligonucleotide
  Sense strand starting at position 2753 of SEQ ID NO: 1244973
gcuugaaacuaccauggaa

SEQ ID NO: 1526589 - RNA, 19 nt, Artificial Sequence
  Description of Artificial Sequence: Synthetic oligonucleotide
  Antisense strand to SEQ ID NO: 1526588
uuccaugguaguuucaagc

SEQ ID NO: 1526590 - RNA, 19 nt, Artificial Sequence
  Description of Artificial Sequence: Synthetic oligonucleotide
  Sense strand starting at position 2886 of SEQ ID NO: 1244973
cagagucagcuccaggauu

SEQ ID NO: 1526591 - RNA, 19 nt, Artificial Sequence
  Description of Artificial Sequence: Synthetic oligonucleotide
  Antisense strand to SEQ ID NO: 1526590
aauccuggagcugacucug

SEQ ID NO: 1526592 - RNA, 19 nt, Artificial Sequence
  Description of Artificial Sequence: Synthetic oligonucleotide
  Sense strand starting at position 2888 of SEQ ID NO: 1244973
gagucagcuccaggauucu

SEQ ID NO: 1526593 - RNA, 19 nt, Artificial Sequence
  Description of Artificial Sequence: Synthetic oligonucleotide
  Antisense strand to SEQ ID NO: 1526592
agaauccuggagcugacuc

SEQ ID NO: 1526594 - RNA, 19 nt, Artificial Sequence
  Description of Artificial Sequence: Synthetic oligonucleotide
  Sense strand starting at position 2897 of SEQ ID NO: 1244973
ccaggauucugagagaacg

SEQ ID NO: 1526595 - RNA, 19 nt, Artificial Sequence
  Description of Artificial Sequence: Synthetic oligonucleotide
  Antisense strand to SEQ ID NO: 1526594
cguucucucagaauccugg

SEQ ID NO: 1526596 - RNA, 19 nt, Artificial Sequence
  Description of Artificial Sequence: Synthetic oligonucleotide
  Sense strand starting at position 2936 of SEQ ID NO: 1244973
aacguagggccuugaguuu

SEQ ID NO: 1526597 - RNA, 19 nt, Artificial Sequence
  Description of Artificial Sequence: Synthetic oligonucleotide
  Antisense strand to SEQ ID NO: 1526596
aaacucaaggcccuacguu

SEQ ID NO: 1526598 - RNA, 19 nt, Artificial Sequence
  Description of Artificial Sequence: Synthetic oligonucleotide
  Sense strand starting at position 2979 of SEQ ID NO: 1244973
acguuauccuguccuuacu

SEQ ID NO: 1526599 - RNA, 19 nt, Artificial Sequence
  Description of Artificial Sequence: Synthetic oligonucleotide
  Antisense strand to SEQ ID NO: 1526598
aguaaggacaggauaacgu

SEQ ID NO: 1526600 - RNA, 19 nt, Artificial Sequence
  Description of Artificial Sequence: Synthetic oligonucleotide
  Sense strand starting at position 2981 of SEQ ID NO: 1244973
guuauccuguccuuacuua

SEQ ID NO: 1526601 - RNA, 19 nt, Artificial Sequence
  Description of Artificial Sequence: Synthetic oligonucleotide
  Antisense strand to SEQ ID NO: 1526600
uaaguaaggacaggauaac

SEQ ID NO: 1526602 - RNA, 19 nt, Artificial Sequence
  Description of Artificial Sequence: Synthetic oligonucleotide
  Sense strand starting at position 3005 of SEQ ID NO: 1244973
ggcccaggugguuguguua

SEQ ID NO: 1526603 - RNA, 19 nt, Artificial Sequence
  Description of Artificial Sequence: Synthetic oligonucleotide
  Antisense strand to SEQ ID NO: 1526602
uaacacaaccaccugggcc

SEQ ID NO: 1526604 - RNA, 19 nt, Artificial Sequence
  Description of Artificial Sequence: Synthetic oligonucleotide
  Sense strand starting at position 3011 of SEQ ID NO: 1244973
ggugguuguguuagacacu

SEQ ID NO: 1526605 - RNA, 19 nt, Artificial Sequence
  Description of Artificial Sequence: Synthetic oligonucleotide
  Antisense strand to SEQ ID NO: 1526604
agugucuaacacaaccacc

SEQ ID NO: 1526606 - RNA, 19 nt, Artificial Sequence
  Description of Artificial Sequence: Synthetic oligonucleotide
  Sense strand starting at position 3014 of SEQ ID NO: 1244973
gguuguguuagacacugaa

SEQ ID NO: 1526607 - RNA, 19 nt, Artificial Sequence
  Description of Artificial Sequence: Synthetic oligonucleotide
  Antisense strand to SEQ ID NO: 1526606
uucagugucuaacacaacc

SEQ ID NO: 1526608 - RNA, 19 nt, Artificial Sequence
  Description of Artificial Sequence: Synthetic oligonucleotide
  Sense strand starting at position 3063 of SEQ ID NO: 1244973
uuaagcaaguuugcacaua

SEQ ID NO: 1526609 - RNA, 19 nt, Artificial Sequence
  Description of Artificial Sequence: Synthetic oligonucleotide
  Antisense strand to SEQ ID NO: 1526608
uaugugcaaacuugcuuaa

SEQ ID NO: 1526610 - RNA, 19 nt, Artificial Sequence
  Description of Artificial Sequence: Synthetic oligonucleotide
  Sense strand starting at position 3096 of SEQ ID NO: 1244973
uggagaugauuccuuaccu

SEQ ID NO: 1526611 - RNA, 19 nt, Artificial Sequence
  Description of Artificial Sequence: Synthetic oligonucleotide
  Antisense strand to SEQ ID NO: 1526610
agguaaggaaucaucucca

SEQ ID NO: 1526612 - RNA, 19 nt, Artificial Sequence
  Description of Artificial Sequence: Synthetic oligonucleotide
  Sense strand starting at position 3097 of SEQ ID NO: 1244973
ggagaugauuccuuaccuc

SEQ ID NO: 1526613 - RNA, 19 nt, Artificial Sequence
  Description of Artificial Sequence: Synthetic oligonucleotide
  Antisense strand to SEQ ID NO: 1526612
gagguaaggaaucaucucc

SEQ ID NO: 1526614 - RNA, 19 nt, Artificial Sequence
  Description of Artificial Sequence: Synthetic oligonucleotide
  Sense strand starting at position 3117 of SEQ ID NO: 1244973
cugaaagauucucuacagu

SEQ ID NO: 1526615 - RNA, 19 nt, Artificial Sequence
  Description of Artificial Sequence: Synthetic oligonucleotide
  Antisense strand to SEQ ID NO: 1526614
acuguagagaaucuuucag

SEQ ID NO: 1526616 - RNA, 19 nt, Artificial Sequence
  Description of Artificial Sequence: Synthetic oligonucleotide
  Sense strand starting at position 10 of SEQ ID NO: 1244974
accucagaccugcaugauu

SEQ ID NO: 1526617 - RNA, 19 nt, Artificial Sequence
  Description of Artificial Sequence: Synthetic oligonucleotide
  Antisense strand to SEQ ID NO: 1526616
aaucaugcaggucugaggu

SEQ ID NO: 1526618 - RNA, 19 nt, Artificial Sequence
  Description of Artificial Sequence: Synthetic oligonucleotide
  Sense strand starting at position 24 of SEQ ID NO: 1244974
ugauuagggucagaagaga

SEQ ID NO: 1526619 - RNA, 19 nt, Artificial Sequence
  Description of Artificial Sequence: Synthetic oligonucleotide
  Antisense strand to SEQ ID NO: 1526618
ucucuucugacccuaauca

SEQ ID NO: 1526620 - RNA, 19 nt, Artificial Sequence
  Description of Artificial Sequence: Synthetic oligonucleotide
  Sense strand starting at position 61 of SEQ ID NO: 1244974
gguggaaaucccuggaacu

SEQ ID NO: 1526621 - RNA, 19 nt, Artificial Sequence
  Description of Artificial Sequence: Synthetic oligonucleotide
  Antisense strand to SEQ ID NO: 1526620
aguuccagggauuuccacc

SEQ ID NO: 1526622 - RNA, 19 nt, Artificial Sequence
  Description of Artificial Sequence: Synthetic oligonucleotide
  Sense strand starting at position 62 of SEQ ID NO: 1244974
guggaaaucccuggaacuc

SEQ ID NO: 1526623 - RNA, 19 nt, Artificial Sequence
  Description of Artificial Sequence: Synthetic oligonucleotide
  Antisense strand to SEQ ID NO: 1526622
gaguuccagggauuuccac

SEQ ID NO: 1526624 - RNA, 19 nt, Artificial Sequence
  Description of Artificial Sequence: Synthetic oligonucleotide
  Sense strand starting at position 72 of SEQ ID NO: 1244974
cuggaacucuguucucaau

SEQ ID NO: 1526625 - RNA, 19 nt, Artificial Sequence
  Description of Artificial Sequence: Synthetic oligonucleotide
  Antisense strand to SEQ ID NO: 1526624
auugagaacagaguuccag

SEQ ID NO: 1526626 - RNA, 19 nt, Artificial Sequence
  Description of Artificial Sequence: Synthetic oligonucleotide
  Sense strand starting at position 74 of SEQ ID NO: 1244974
ggaacucuguucucaauuc

SEQ ID NO: 1526627 - RNA, 19 nt, Artificial Sequence
  Description of Artificial Sequence: Synthetic oligonucleotide
  Antisense strand to SEQ ID NO: 1526626
gaauugagaacagaguucc

SEQ ID NO: 1526628 - RNA, 19 nt, Artificial Sequence
  Description of Artificial Sequence: Synthetic oligonucleotide
  Sense strand starting at position 84 of SEQ ID NO: 1244974
ucucaauuccugcacagga

SEQ ID NO: 1526629 - RNA, 19 nt, Artificial Sequence
  Description of Artificial Sequence: Synthetic oligonucleotide
  Antisense strand to SEQ ID NO: 1526628
uccugugcaggaauugaga

SEQ ID NO: 1526630 - RNA, 19 nt, Artificial Sequence
  Description of Artificial Sequence: Synthetic oligonucleotide
  Sense strand starting at position 185 of SEQ ID NO: 1244974
gagacaaauggugguacau

SEQ ID NO: 1526631 - RNA, 19 nt, Artificial Sequence
  Description of Artificial Sequence: Synthetic oligonucleotide
  Antisense strand to SEQ ID NO: 1526630
auguaccaccauuugucuc

SEQ ID NO: 1526632 - RNA, 19 nt, Artificial Sequence
  Description of Artificial Sequence: Synthetic oligonucleotide
  Sense strand starting at position 187 of SEQ ID NO: 1244974
gacaaauggugguacauga

SEQ ID NO: 1526633 - RNA, 19 nt, Artificial Sequence
  Description of Artificial Sequence: Synthetic oligonucleotide
  Antisense strand to SEQ ID NO: 1526632
ucauguaccaccauuuguc

SEQ ID NO: 1526634 - RNA, 19 nt, Artificial Sequence
  Description of Artificial Sequence: Synthetic oligonucleotide
  Sense strand starting at position 428 of SEQ ID NO: 1244974
cugccuagcucaguaagga

SEQ ID NO: 1526635 - RNA, 19 nt, Artificial Sequence
  Description of Artificial Sequence: Synthetic oligonucleotide
  Antisense strand to SEQ ID NO: 1526634
uccuuacugagcuaggcag

SEQ ID NO: 1526636 - RNA, 19 nt, Artificial Sequence
  Description of Artificial Sequence: Synthetic oligonucleotide
  Sense strand starting at position 629 of SEQ ID NO: 1244974
gggcagguugcuggugaau

SEQ ID NO: 1526637 - RNA, 19 nt, Artificial Sequence
  Description of Artificial Sequence: Synthetic oligonucleotide
  Antisense strand to SEQ ID NO: 1526636
auucaccagcaaccugccc

SEQ ID NO: 1526638 - RNA, 19 nt, Artificial Sequence
  Description of Artificial Sequence: Synthetic oligonucleotide
  Sense strand starting at position 690 of SEQ ID NO: 1244974
uccuuugaggcucauccaa

SEQ ID NO: 1526639 - RNA, 19 nt, Artificial Sequence
  Description of Artificial Sequence: Synthetic oligonucleotide
  Antisense strand to SEQ ID NO: 1526638
uuggaugagccucaaagga

SEQ ID NO: 1526640 - RNA, 19 nt, Artificial Sequence
  Description of Artificial Sequence: Synthetic oligonucleotide
  Sense strand starting at position 906 of SEQ ID NO: 1244974
ucacaauaaucuuacgaga

SEQ ID NO: 1526641 - RNA, 19 nt, Artificial Sequence
  Description of Artificial Sequence: Synthetic oligonucleotide
  Antisense strand to SEQ ID NO: 1526640
ucucguaagauuauuguga

SEQ ID NO: 1526642 - RNA, 19 nt, Artificial Sequence
  Description of Artificial Sequence: Synthetic oligonucleotide
  Sense strand starting at position 908 of SEQ ID NO: 1244974
acaauaaucuuacgagaaa

SEQ ID NO: 1526643 - RNA, 19 nt, Artificial Sequence
  Description of Artificial Sequence: Synthetic oligonucleotide
  Antisense strand to SEQ ID NO: 1526642
uuucucguaagauuauugu

SEQ ID NO: 1526644 - RNA, 19 nt, Artificial Sequence
  Description of Artificial Sequence: Synthetic oligonucleotide
  Sense strand starting at position 1476 of SEQ ID NO: 1244974
aggaauaaaucucgaaagg

SEQ ID NO: 1526645 - RNA, 19 nt, Artificial Sequence
  Description of Artificial Sequence: Synthetic oligonucleotide
  Antisense strand to SEQ ID NO: 1526644
ccuuucgagauuuauuccu

SEQ ID NO: 1526646 - RNA, 19 nt, Artificial Sequence
  Description of Artificial Sequence: Synthetic oligonucleotide
  Sense strand starting at position 2240 of SEQ ID NO: 1244974
gccuuucugcccgugaguu

SEQ ID NO: 1526647 - RNA, 19 nt, Artificial Sequence
  Description of Artificial Sequence: Synthetic oligonucleotide
  Antisense strand to SEQ ID NO: 1526646
aacucacgggcagaaaggc

SEQ ID NO: 1526648 - RNA, 19 nt, Artificial Sequence
  Description of Artificial Sequence: Synthetic oligonucleotide
  Sense strand starting at position 2409 of SEQ ID NO: 1244974
uuucuaaugcauuauguga

SEQ ID NO: 1526649 - RNA, 19 nt, Artificial Sequence
  Description of Artificial Sequence: Synthetic oligonucleotide
  Antisense strand to SEQ ID NO: 1526648
ucacauaaugcauuagaaa

SEQ ID NO: 1526650 - RNA, 19 nt, Artificial Sequence
  Description of Artificial Sequence: Synthetic oligonucleotide
  Sense strand starting at position 2436 of SEQ ID NO: 1244974
uuauuuguccgcugacucu

SEQ ID NO: 1526651 - RNA, 19 nt, Artificial Sequence
  Description of Artificial Sequence: Synthetic oligonucleotide
  Antisense strand to SEQ ID NO: 1526650
agagucagcggacaaauaa

SEQ ID NO: 1526652 - RNA, 19 nt, Artificial Sequence
  Description of Artificial Sequence: Synthetic oligonucleotide
  Sense strand starting at position 2496 of SEQ ID NO: 1244974
uacuuuguucucuguagga

SEQ ID NO: 1526653 - RNA, 19 nt, Artificial Sequence
  Description of Artificial Sequence: Synthetic oligonucleotide
  Antisense strand to SEQ ID NO: 1526652
uccuacagagaacaaagua

SEQ ID NO: 1526654 - RNA, 19 nt, Artificial Sequence
  Description of Artificial Sequence: Synthetic oligonucleotide
  Sense strand starting at position 2541 of SEQ ID NO: 1244974
gcagcuggugcucaagacu

SEQ ID NO: 1526655 - RNA, 19 nt, Artificial Sequence
  Description of Artificial Sequence: Synthetic oligonucleotide
  Antisense strand to SEQ ID NO: 1526654
agucuugagcaccagcugc

SEQ ID NO: 1526656 - RNA, 19 nt, Artificial Sequence
  Description of Artificial Sequence: Synthetic oligonucleotide
  Sense strand starting at position 2717 of SEQ ID NO: 1244974
uuacuuacgcgugaaugca

SEQ ID NO: 1526657 - RNA, 19 nt, Artificial Sequence
  Description of Artificial Sequence: Synthetic oligonucleotide
  Antisense strand to SEQ ID NO: 1526656
ugcauucacgcguaaguaa

SEQ ID NO: 1526658 - RNA, 19 nt, Artificial Sequence
  Description of Artificial Sequence: Synthetic oligonucleotide
  Sense strand starting at position 2745 of SEQ ID NO: 1244974
gagcucagacuuuguauca

SEQ ID NO: 1526659 - RNA, 19 nt, Artificial Sequence
  Description of Artificial Sequence: Synthetic oligonucleotide
  Antisense strand to SEQ ID NO: 1526658
ugauacaaagucugagcuc

SEQ ID NO: 1526660 - RNA, 19 nt, Artificial Sequence
  Description of Artificial Sequence: Synthetic oligonucleotide
  Sense strand starting at position 2746 of SEQ ID NO: 1244974
agcucagacuuuguaucau

SEQ ID NO: 1526661 - RNA, 19 nt, Artificial Sequence
  Description of Artificial Sequence: Synthetic oligonucleotide
  Antisense strand to SEQ ID NO: 1526660
augauacaaagucugagcu

SEQ ID NO: 1526662 - RNA, 19 nt, Artificial Sequence
  Description of Artificial Sequence: Synthetic oligonucleotide
  Sense strand starting at position 2844 of SEQ ID NO: 1244974
acaaccaucuuguaaggga

SEQ ID NO: 1526663 - RNA, 19 nt, Artificial Sequence
  Description of Artificial Sequence: Synthetic oligonucleotide
  Antisense strand to SEQ ID NO: 1526662
ucccuuacaagaugguugu

SEQ ID NO: 1526664 - RNA, 19 nt, Artificial Sequence
  Description of Artificial Sequence: Synthetic oligonucleotide
  Sense strand starting at position 2848 of SEQ ID NO: 1244974
ccaucuuguaagggagaca

SEQ ID NO: 1526665 - RNA, 19 nt, Artificial Sequence
  Description of Artificial Sequence: Synthetic oligonucleotide
  Antisense strand to SEQ ID NO: 1526664
ugucucccuuacaagaugg

SEQ ID NO: 1526666 - RNA, 19 nt, Artificial Sequence
  Description of Artificial Sequence: Synthetic oligonucleotide
  Sense strand starting at position 2861 of SEQ ID NO: 1244974
gagacaucaucagugccau

SEQ ID NO: 1526667 - RNA, 19 nt, Artificial Sequence
  Description of Artificial Sequence: Synthetic oligonucleotide
  Antisense strand to SEQ ID NO: 1526666
auggcacugaugaugucuc

SEQ ID NO: 1526668 - RNA, 19 nt, Artificial Sequence
  Description of Artificial Sequence: Synthetic oligonucleotide
  Sense strand starting at position 2862 of SEQ ID NO: 1244974
agacaucaucagugccauu

SEQ ID NO: 1526669 - RNA, 19 nt, Artificial Sequence
  Description of Artificial Sequence: Synthetic oligonucleotide
  Antisense strand to SEQ ID NO: 1526668
aauggcacugaugaugucu

SEQ ID NO: 1526670 - RNA, 19 nt, Artificial Sequence
  Description of Artificial Sequence: Synthetic oligonucleotide
  Sense strand starting at position 3226 of SEQ ID NO: 1244974
gggacuuucccauaaugcu

SEQ ID NO: 1526671 - RNA, 19 nt, Artificial Sequence
  Description of Artificial Sequence: Synthetic oligonucleotide
  Antisense strand to SEQ ID NO: 1526670
agcauuaugggaaaguccc

SEQ ID NO: 1526672 - RNA, 19 nt, Artificial Sequence
  Description of Artificial Sequence: Synthetic oligonucleotide
  Sense strand starting at position 3257 of SEQ ID NO: 1244974
ugcacaagugugcuauguu

SEQ ID NO: 1526673 - RNA, 19 nt, Artificial Sequence
  Description of Artificial Sequence: Synthetic oligonucleotide
  Antisense strand to SEQ ID NO: 1526672
aacauagcacacuugugca

SEQ ID NO: 1526674 - RNA, 19 nt, Artificial Sequence
  Description of Artificial Sequence: Synthetic oligonucleotide
  Sense strand starting at position 3264 of SEQ ID NO: 1244974
gugugcuauguugagaaau

SEQ ID NO: 1526675 - RNA, 19 nt, Artificial Sequence
  Description of Artificial Sequence: Synthetic oligonucleotide
  Antisense strand to SEQ ID NO: 1526674
auuucucaacauagcacac

SEQ ID NO: 1526676 - RNA, 19 nt, Artificial Sequence
  Description of Artificial Sequence: Synthetic oligonucleotide
  Sense strand starting at position 3324 of SEQ ID NO: 1244974
gcagcagccuuaucaaaca

SEQ ID NO: 1526677 - RNA, 19 nt, Artificial Sequence
  Description of Artificial Sequence: Synthetic oligonucleotide
  Antisense strand to SEQ ID NO: 1526676
uguuugauaaggcugcugc

SEQ ID NO: 1526678 - RNA, 19 nt, Artificial Sequence
  Description of Artificial Sequence: Synthetic oligonucleotide
  Sense strand starting at position 3433 of SEQ ID NO: 1244974
cccaucuuggaguguugua

SEQ ID NO: 1526679 - RNA, 19 nt, Artificial Sequence
  Description of Artificial Sequence: Synthetic oligonucleotide
  Antisense strand to SEQ ID NO: 1526678
uacaacacuccaagauggg

SEQ ID NO: 1526680 - RNA, 19 nt, Artificial Sequence
  Description of Artificial Sequence: Synthetic oligonucleotide
  Sense strand starting at position 3449 of SEQ ID NO: 1244974
guacuuugguugcuggaga

SEQ ID NO: 1526681 - RNA, 19 nt, Artificial Sequence
  Description of Artificial Sequence: Synthetic oligonucleotide
  Antisense strand to SEQ ID NO: 1526680
ucuccagcaaccaaaguac

SEQ ID NO: 1526682 - RNA, 19 nt, Artificial Sequence
  Description of Artificial Sequence: Synthetic oligonucleotide
  Sense strand starting at position 3563 of SEQ ID NO: 1244974
gaaggcuuccuauggaggu

SEQ ID NO: 1526683 - RNA, 19 nt, Artificial Sequence
  Description of Artificial Sequence: Synthetic oligonucleotide
  Antisense strand to SEQ ID NO: 1526682
accuccauaggaagccuuc

SEQ ID NO: 1526684 - RNA, 19 nt, Artificial Sequence
  Description of Artificial Sequence: Synthetic oligonucleotide
  Sense strand starting at position 3625 of SEQ ID NO: 1244974
gcgggucuccaggaagauc

SEQ ID NO: 1526685 - RNA, 19 nt, Artificial Sequence
  Description of Artificial Sequence: Synthetic oligonucleotide
  Antisense strand to SEQ ID NO: 1526684
gaucuuccuggagacccgc

SEQ ID NO: 1526686 - RNA, 19 nt, Artificial Sequence
  Description of Artificial Sequence: Synthetic oligonucleotide
  Sense strand starting at position 3678 of SEQ ID NO: 1244974
gcaggaagagugggaugua

SEQ ID NO: 1526687 - RNA, 19 nt, Artificial Sequence
  Description of Artificial Sequence: Synthetic oligonucleotide
  Antisense strand to SEQ ID NO: 1526686
uacaucccacucuuccugc

SEQ ID NO: 1526688 - RNA, 19 nt, Artificial Sequence
  Description of Artificial Sequence: Synthetic oligonucleotide
  Sense strand starting at position 3687 of SEQ ID NO: 1244974
gugggauguagauggcaaa

SEQ ID NO: 1526689 - RNA, 19 nt, Artificial Sequence
  Description of Artificial Sequence: Synthetic oligonucleotide
  Antisense strand to SEQ ID NO: 1526688
uuugccaucuacaucccac

SEQ ID NO: 1526690 - RNA, 19 nt, Artificial Sequence
  Description of Artificial Sequence: Synthetic oligonucleotide
  Sense strand starting at position 3735 of SEQ ID NO: 1244974
ggaggagugacgggucaaa

SEQ ID NO: 1526691 - RNA, 19 nt, Artificial Sequence
  Description of Artificial Sequence: Synthetic oligonucleotide
  Antisense strand to SEQ ID NO: 1526690
uuugacccgucacuccucc

SEQ ID NO: 1526692 - RNA, 19 nt, Artificial Sequence
  Description of Artificial Sequence: Synthetic oligonucleotide
  Sense strand starting at position 3904 of SEQ ID NO: 1244974
guccuaggcauugguggaa

SEQ ID NO: 1526693 - RNA, 19 nt, Artificial Sequence
  Description of Artificial Sequence: Synthetic oligonucleotide
  Antisense strand to SEQ ID NO: 1526692
uuccaccaaugccuaggac

SEQ ID NO: 1526694 - RNA, 19 nt, Artificial Sequence
  Description of Artificial Sequence: Synthetic oligonucleotide
  Sense strand starting at position 3959 of SEQ ID NO: 1244974
ggaagaugccuggaguuca

SEQ ID NO: 1526695 - RNA, 19 nt, Artificial Sequence
  Description of Artificial Sequence: Synthetic oligonucleotide
  Antisense strand to SEQ ID NO: 1526694
ugaacuccaggcaucuucc

SEQ ID NO: 1526696 - RNA, 19 nt, Artificial Sequence
  Description of Artificial Sequence: Synthetic oligonucleotide
  Sense strand starting at position 50 of SEQ ID NO: 1244975
gggugcucccgccaagagu

SEQ ID NO: 1526697 - RNA, 19 nt, Artificial Sequence
  Description of Artificial Sequence: Synthetic oligonucleotide
  Antisense strand to SEQ ID NO: 1526696
acucuuggcgggagcaccc

SEQ ID NO: 1526698 - RNA, 19 nt, Artificial Sequence
  Description of Artificial Sequence: Synthetic oligonucleotide
  Sense strand starting at position 142 of SEQ ID NO: 1244975
cugacaucuuugcccagaa

SEQ ID NO: 1526699 - RNA, 19 nt, Artificial Sequence
  Description of Artificial Sequence: Synthetic oligonucleotide
  Antisense strand to SEQ ID NO: 1526698
uucugggcaaagaugucag

SEQ ID NO: 1526700 - RNA, 19 nt, Artificial Sequence
  Description of Artificial Sequence: Synthetic oligonucleotide
  Sense strand starting at position 143 of SEQ ID NO: 1244975
ugacaucuuugcccagaau

SEQ ID NO: 1526701 - RNA, 19 nt, Artificial Sequence
  Description of Artificial Sequence: Synthetic oligonucleotide
  Antisense strand to SEQ ID NO: 1526700
auucugggcaaagauguca

SEQ ID NO: 1526702 - RNA, 19 nt, Artificial Sequence
  Description of Artificial Sequence: Synthetic oligonucleotide
  Sense strand starting at position 519 of SEQ ID NO: 1244975
uguagagugcguccucgua

SEQ ID NO: 1526703 - RNA, 19 nt, Artificial Sequence
  Description of Artificial Sequence: Synthetic oligonucleotide
  Antisense strand to SEQ ID NO: 1526702
uacgaggacgcacucuaca

SEQ ID NO: 1526704 - RNA, 19 nt, Artificial Sequence
  Description of Artificial Sequence: Synthetic oligonucleotide
  Sense strand starting at position 521 of SEQ ID NO: 1244975
uagagugcguccucguaga

SEQ ID NO: 1526705 - RNA, 19 nt, Artificial Sequence
  Description of Artificial Sequence: Synthetic oligonucleotide
  Antisense strand to SEQ ID NO: 1526704
ucuacgaggacgcacucua

SEQ ID NO: 1526706 - RNA, 19 nt, Artificial Sequence
  Description of Artificial Sequence: Synthetic oligonucleotide
  Sense strand starting at position 1063 of SEQ ID NO: 1244975
aggaaacagcucugcuuau

SEQ ID NO: 1526707 - RNA, 19 nt, Artificial Sequence
  Description of Artificial Sequence: Synthetic oligonucleotide
  Antisense strand to SEQ ID NO: 1526706
auaagcagagcuguuuccu

SEQ ID NO: 1526708 - RNA, 19 nt, Artificial Sequence
  Description of Artificial Sequence: Synthetic oligonucleotide
  Sense strand starting at position 1213 of SEQ ID NO: 1244975
ggagucggcucuucugaag

SEQ ID NO: 1526709 - RNA, 19 nt, Artificial Sequence
  Description of Artificial Sequence: Synthetic oligonucleotide
  Antisense strand to SEQ ID NO: 1526708
cuucagaagagccgacucc

SEQ ID NO: 1526710 - RNA, 19 nt, Artificial Sequence
  Description of Artificial Sequence: Synthetic oligonucleotide
  Sense strand starting at position 1530 of SEQ ID NO: 1244975
ccuguagaucucugacucu

SEQ ID NO: 1526711 - RNA, 19 nt, Artificial Sequence
  Description of Artificial Sequence: Synthetic oligonucleotide
  Antisense strand to SEQ ID NO: 1526710
agagucagagaucuacagg

SEQ ID NO: 1526712 - RNA, 19 nt, Artificial Sequence
  Description of Artificial Sequence: Synthetic oligonucleotide
  Sense strand starting at position 1605 of SEQ ID NO: 1244975
agaggagugucgccauggu

SEQ ID NO: 1526713 - RNA, 19 nt, Artificial Sequence
  Description of Artificial Sequence: Synthetic oligonucleotide
  Antisense strand to SEQ ID NO: 1526712
accauggcgacacuccucu

SEQ ID NO: 1526714 - RNA, 19 nt, Artificial Sequence
  Description of Artificial Sequence: Synthetic oligonucleotide
  Sense strand starting at position 1667 of SEQ ID NO: 1244975
agcgaagccacaggauuau

SEQ ID NO: 1526715 - RNA, 19 nt, Artificial Sequence
  Description of Artificial Sequence: Synthetic oligonucleotide
  Antisense strand to SEQ ID NO: 1526714
auaauccuguggcuucgcu

SEQ ID NO: 1526716 - RNA, 19 nt, Artificial Sequence
  Description of Artificial Sequence: Synthetic oligonucleotide
  Sense strand starting at position 1991 of SEQ ID NO: 1244975
ugggcugaacccugagaga

SEQ ID NO: 1526717 - RNA, 19 nt, Artificial Sequence
  Description of Artificial Sequence: Synthetic oligonucleotide
  Antisense strand to SEQ ID NO: 1526716
ucucucaggguucagccca

SEQ ID NO: 1526718 - RNA, 19 nt, Artificial Sequence
  Description of Artificial Sequence: Synthetic oligonucleotide
  Sense strand starting at position 2169 of SEQ ID NO: 1244975
aggugacauuccuuggaga

SEQ ID NO: 1526719 - RNA, 19 nt, Artificial Sequence
  Description of Artificial Sequence: Synthetic oligonucleotide
  Antisense strand to SEQ ID NO: 1526718
ucuccaaggaaugucaccu

SEQ ID NO: 1526720 - RNA, 19 nt, Artificial Sequence
  Description of Artificial Sequence: Synthetic oligonucleotide
  Sense strand starting at position 2170 of SEQ ID NO: 1244975
ggugacauuccuuggagau

SEQ ID NO: 1526721 - RNA, 19 nt, Artificial Sequence
  Description of Artificial Sequence: Synthetic oligonucleotide
  Antisense strand to SEQ ID NO: 1526720
aucuccaaggaaugucacc

SEQ ID NO: 1526722 - RNA, 19 nt, Artificial Sequence
  Description of Artificial Sequence: Synthetic oligonucleotide
  Sense strand starting at position 2171 of SEQ ID NO: 1244975
gugacauuccuuggagaug

SEQ ID NO: 1526723 - RNA, 19 nt, Artificial Sequence
  Description of Artificial Sequence: Synthetic oligonucleotide
  Antisense strand to SEQ ID NO: 1526722
caucuccaaggaaugucac

SEQ ID NO: 1526724 - RNA, 19 nt, Artificial Sequence
  Description of Artificial Sequence: Synthetic oligonucleotide
  Sense strand starting at position 2172 of SEQ ID NO: 1244975
ugacauuccuuggagauga

SEQ ID NO: 1526725 - RNA, 19 nt, Artificial Sequence
  Description of Artificial Sequence: Synthetic oligonucleotide
  Antisense strand to SEQ ID NO: 1526724
ucaucuccaaggaauguca

SEQ ID NO: 1526726 - RNA, 19 nt, Artificial Sequence
  Description of Artificial Sequence: Synthetic oligonucleotide
  Sense strand starting at position 2349 of SEQ ID NO: 1244975
cccgaucucuccugaggac

SEQ ID NO: 1526727 - RNA, 19 nt, Artificial Sequence
  Description of Artificial Sequence: Synthetic oligonucleotide
  Antisense strand to SEQ ID NO: 1526726
guccucaggagagaucggg

SEQ ID NO: 1526728 - RNA, 19 nt, Artificial Sequence
  Description of Artificial Sequence: Synthetic oligonucleotide
  Sense strand starting at position 2350 of SEQ ID NO: 1244975
ccgaucucuccugaggaca

SEQ ID NO: 1526729 - RNA, 19 nt, Artificial Sequence
  Description of Artificial Sequence: Synthetic oligonucleotide
  Antisense strand to SEQ ID NO: 1526728
uguccucaggagagaucgg

SEQ ID NO: 1526730 - RNA, 19 nt, Artificial Sequence
  Description of Artificial Sequence: Synthetic oligonucleotide
  Sense strand starting at position 2352 of SEQ ID NO: 1244975
gaucucuccugaggacaga

SEQ ID NO: 1526731 - RNA, 19 nt, Artificial Sequence
  Description of Artificial Sequence: Synthetic oligonucleotide
  Antisense strand to SEQ ID NO: 1526730
ucuguccucaggagagauc

SEQ ID NO: 1526732 - RNA, 19 nt, Artificial Sequence
  Description of Artificial Sequence: Synthetic oligonucleotide
  Sense strand starting at position 2850 of SEQ ID NO: 1244975
cuggcugggccgugagaau

SEQ ID NO: 1526733 - RNA, 19 nt, Artificial Sequence
  Description of Artificial Sequence: Synthetic oligonucleotide
  Antisense strand to SEQ ID NO: 1526732
auucucacggcccagccag

SEQ ID NO: 1526734 - RNA, 19 nt, Artificial Sequence
  Description of Artificial Sequence: Synthetic oligonucleotide
  Sense strand starting at position 2928 of SEQ ID NO: 1244975
cggcucuccuuccggaaga

SEQ ID NO: 1526735 - RNA, 19 nt, Artificial Sequence
  Description of Artificial Sequence: Synthetic oligonucleotide
  Antisense strand to SEQ ID NO: 1526734
ucuuccggaaggagagccg

SEQ ID NO: 1526736 - RNA, 19 nt, Artificial Sequence
  Description of Artificial Sequence: Synthetic oligonucleotide
  Sense strand starting at position 2930 of SEQ ID NO: 1244975
gcucuccuuccggaagaga

SEQ ID NO: 1526737 - RNA, 19 nt, Artificial Sequence
  Description of Artificial Sequence: Synthetic oligonucleotide
  Antisense strand to SEQ ID NO: 1526736
ucucuuccggaaggagagc

SEQ ID NO: 1526738 - RNA, 19 nt, Artificial Sequence
  Description of Artificial Sequence: Synthetic oligonucleotide
  Sense strand starting at position 3018 of SEQ ID NO: 1244975
caaacaaaucgaggugcaa

SEQ ID NO: 1526739 - RNA, 19 nt, Artificial Sequence
  Description of Artificial Sequence: Synthetic oligonucleotide
  Antisense strand to SEQ ID NO: 1526738
uugcaccucgauuuguuug

SEQ ID NO: 1526740 - RNA, 19 nt, Artificial Sequence
  Description of Artificial Sequence: Synthetic oligonucleotide
  Sense strand starting at position 3146 of SEQ ID NO: 1244975
gagugaauguuagcgcauc

SEQ ID NO: 1526741 - RNA, 19 nt, Artificial Sequence
  Description of Artificial Sequence: Synthetic oligonucleotide
  Antisense strand to SEQ ID NO: 1526740
gaugcgcuaacauucacuc

SEQ ID NO: 1526742 - RNA, 19 nt, Artificial Sequence
  Description of Artificial Sequence: Synthetic oligonucleotide
  Sense strand starting at position 3304 of SEQ ID NO: 1244975
ucaggaagcuccuucuaga

SEQ ID NO: 1526743 - RNA, 19 nt, Artificial Sequence
  Description of Artificial Sequence: Synthetic oligonucleotide
  Antisense strand to SEQ ID NO: 1526742
ucuagaaggagcuuccuga

SEQ ID NO: 1526744 - RNA, 19 nt, Artificial Sequence
  Description of Artificial Sequence: Synthetic oligonucleotide
  Sense strand starting at position 3543 of SEQ ID NO: 1244975
gcgcgguggccuucugaga

SEQ ID NO: 1526745 - RNA, 19 nt, Artificial Sequence
  Description of Artificial Sequence: Synthetic oligonucleotide
  Antisense strand to SEQ ID NO: 1526744
ucucagaaggccaccgcgc

SEQ ID NO: 1526746 - RNA, 19 nt, Artificial Sequence
  Description of Artificial Sequence: Synthetic oligonucleotide
  Sense strand starting at position 3862 of SEQ ID NO: 1244975
gcccuaaugucccacaaug

SEQ ID NO: 1526747 - RNA, 19 nt, Artificial Sequence
  Description of Artificial Sequence: Synthetic oligonucleotide
  Antisense strand to SEQ ID NO: 1526746
cauugugggacauuagggc

SEQ ID NO: 1526748 - RNA, 19 nt, Artificial Sequence
  Description of Artificial Sequence: Synthetic oligonucleotide
  Sense strand starting at position 3880 of SEQ ID NO: 1244975
gcuaguuccugguaauugu

SEQ ID NO: 1526749 - RNA, 19 nt, Artificial Sequence
  Description of Artificial Sequence: Synthetic oligonucleotide
  Antisense strand to SEQ ID NO: 1526748
acaauuaccaggaacuagc

SEQ ID NO: 1526750 - RNA, 19 nt, Artificial Sequence
  Description of Artificial Sequence: Synthetic oligonucleotide
  Sense strand starting at position 3884 of SEQ ID NO: 1244975
guuccugguaauuguuuau

SEQ ID NO: 1526751 - RNA, 19 nt, Artificial Sequence
  Description of Artificial Sequence: Synthetic oligonucleotide
  Antisense strand to SEQ ID NO: 1526750
auaaacaauuaccaggaac

SEQ ID NO: 1526752 - RNA, 19 nt, Artificial Sequence
  Description of Artificial Sequence: Synthetic oligonucleotide
  Sense strand starting at position 3887 of SEQ ID NO: 1244975
ccugguaauuguuuaugau

SEQ ID NO: 1526753 - RNA, 19 nt, Artificial Sequence
  Description of Artificial Sequence: Synthetic oligonucleotide
  Antisense strand to SEQ ID NO: 1526752
aucauaaacaauuaccagg

SEQ ID NO: 1526754 - RNA, 19 nt, Artificial Sequence
  Description of Artificial Sequence: Synthetic oligonucleotide
  Sense strand starting at position 3888 of SEQ ID NO: 1244975
cugguaauuguuuaugauc

SEQ ID NO: 1526755 - RNA, 19 nt, Artificial Sequence
  Description of Artificial Sequence: Synthetic oligonucleotide
  Antisense strand to SEQ ID NO: 1526754
gaucauaaacaauuaccag

SEQ ID NO: 1526756 - RNA, 19 nt, Artificial Sequence
  Description of Artificial Sequence: Synthetic oligonucleotide
  Sense strand starting at position 488 of SEQ ID NO: 1244976
ccugaaauguguucccugu

SEQ ID NO: 1526757 - RNA, 19 nt, Artificial Sequence
  Description of Artificial Sequence: Synthetic oligonucleotide
  Antisense strand to SEQ ID NO: 1526756
acagggaacacauuucagg

SEQ ID NO: 1526758 - RNA, 19 nt, Artificial Sequence
  Description of Artificial Sequence: Synthetic oligonucleotide
  Sense strand starting at position 490 of SEQ ID NO: 1244976
ugaaauguguucccuguaa

SEQ ID NO: 1526759 - RNA, 19 nt, Artificial Sequence
  Description of Artificial Sequence: Synthetic oligonucleotide
  Antisense strand to SEQ ID NO: 1526758
uuacagggaacacauuuca

SEQ ID NO: 1526760 - RNA, 19 nt, Artificial Sequence
  Description of Artificial Sequence: Synthetic oligonucleotide
  Sense strand starting at position 494 of SEQ ID NO: 1244976
auguguucccuguaacauu

SEQ ID NO: 1526761 - RNA, 19 nt, Artificial Sequence
  Description of Artificial Sequence: Synthetic oligonucleotide
  Antisense strand to SEQ ID NO: 1526760
aauguuacagggaacacau

SEQ ID NO: 1526762 - RNA, 19 nt, Artificial Sequence
  Description of Artificial Sequence: Synthetic oligonucleotide
  Sense strand starting at position 522 of SEQ ID NO: 1244976
uggaacccuugagaugaaa

SEQ ID NO: 1526763 - RNA, 19 nt, Artificial Sequence
  Description of Artificial Sequence: Synthetic oligonucleotide
  Antisense strand to SEQ ID NO: 1526762
uuucaucucaaggguucca

SEQ ID NO: 1526764 - RNA, 19 nt, Artificial Sequence
  Description of Artificial Sequence: Synthetic oligonucleotide
  Sense strand starting at position 545 of SEQ ID NO: 1244976
auccuucuuccuugugaca

SEQ ID NO: 1526765 - RNA, 19 nt, Artificial Sequence
  Description of Artificial Sequence: Synthetic oligonucleotide
  Antisense strand to SEQ ID NO: 1526764
ugucacaaggaagaaggau

SEQ ID NO: 1526766 - RNA, 19 nt, Artificial Sequence
  Description of Artificial Sequence: Synthetic oligonucleotide
  Sense strand starting at position 836 of SEQ ID NO: 1244976
cguagcucuccugaggaaa

SEQ ID NO: 1526767 - RNA, 19 nt, Artificial Sequence
  Description of Artificial Sequence: Synthetic oligonucleotide
  Antisense strand to SEQ ID NO: 1526766
uuuccucaggagagcuacg

SEQ ID NO: 1526768 - RNA, 19 nt, Artificial Sequence
  Description of Artificial Sequence: Synthetic oligonucleotide
  Sense strand starting at position 864 of SEQ ID NO: 1244976
gaaggagacucgguuaaug

SEQ ID NO: 1526769 - RNA, 19 nt, Artificial Sequence
  Description of Artificial Sequence: Synthetic oligonucleotide
  Antisense strand to SEQ ID NO: 1526768
cauuaaccgagucuccuuc

SEQ ID NO: 1526770 - RNA, 19 nt, Artificial Sequence
  Description of Artificial Sequence: Synthetic oligonucleotide
  Sense strand starting at position 866 of SEQ ID NO: 1244976
aggagacucgguuaaugug

SEQ ID NO: 1526771 - RNA, 19 nt, Artificial Sequence
  Description of Artificial Sequence: Synthetic oligonucleotide
  Antisense strand to SEQ ID NO: 1526770
cacauuaaccgagucuccu

SEQ ID NO: 1526772 - RNA, 19 nt, Artificial Sequence
  Description of Artificial Sequence: Synthetic oligonucleotide
  Sense strand starting at position 874 of SEQ ID NO: 1244976
cgguuaaugugggcccaau

SEQ ID NO: 1526773 - RNA, 19 nt, Artificial Sequence
  Description of Artificial Sequence: Synthetic oligonucleotide
  Antisense strand to SEQ ID NO: 1526772
auugggcccacauuaaccg

SEQ ID NO: 1526774 - RNA, 19 nt, Artificial Sequence
  Description of Artificial Sequence: Synthetic oligonucleotide
  Sense strand starting at position 1002 of SEQ ID NO: 1244976
aggcuuugacaucaggcaa

SEQ ID NO: 1526775 - RNA, 19 nt, Artificial Sequence
  Description of Artificial Sequence: Synthetic oligonucleotide
  Antisense strand to SEQ ID NO: 1526774
uugccugaugucaaagccu

SEQ ID NO: 1526776 - RNA, 19 nt, Artificial Sequence
  Description of Artificial Sequence: Synthetic oligonucleotide
  Sense strand starting at position 1041 of SEQ ID NO: 1244976
ucugcuacuacuugggaga

SEQ ID NO: 1526777 - RNA, 19 nt, Artificial Sequence
  Description of Artificial Sequence: Synthetic oligonucleotide
  Antisense strand to SEQ ID NO: 1526776
ucucccaaguaguagcaga

SEQ ID NO: 1526778 - RNA, 19 nt, Artificial Sequence
  Description of Artificial Sequence: Synthetic oligonucleotide
  Sense strand starting at position 1054 of SEQ ID NO: 1244976
gggagagcuugggcaaguu

SEQ ID NO: 1526779 - RNA, 19 nt, Artificial Sequence
  Description of Artificial Sequence: Synthetic oligonucleotide
  Antisense strand to SEQ ID NO: 1526778
aacuugcccaagcucuccc

SEQ ID NO: 1526780 - RNA, 19 nt, Artificial Sequence
  Description of Artificial Sequence: Synthetic oligonucleotide
  Sense strand starting at position 1192 of SEQ ID NO: 1244976
ggcugauucugcucuggau

SEQ ID NO: 1526781 - RNA, 19 nt, Artificial Sequence
  Description of Artificial Sequence: Synthetic oligonucleotide
  Antisense strand to SEQ ID NO: 1526780
auccagagcagaaucagcc

SEQ ID NO: 1526782 - RNA, 19 nt, Artificial Sequence
  Description of Artificial Sequence: Synthetic oligonucleotide
  Sense strand starting at position 1194 of SEQ ID NO: 1244976
cugauucugcucuggauga

SEQ ID NO: 1526783 - RNA, 19 nt, Artificial Sequence
  Description of Artificial Sequence: Synthetic oligonucleotide
  Antisense strand to SEQ ID NO: 1526782
ucauccagagcagaaucag

SEQ ID NO: 1526784 - RNA, 19 nt, Artificial Sequence
  Description of Artificial Sequence: Synthetic oligonucleotide
  Sense strand starting at position 1196 of SEQ ID NO: 1244976
gauucugcucuggaugaau

SEQ ID NO: 1526785 - RNA, 19 nt, Artificial Sequence
  Description of Artificial Sequence: Synthetic oligonucleotide
  Antisense strand to SEQ ID NO: 1526784
auucauccagagcagaauc

SEQ ID NO: 1526786 - RNA, 19 nt, Artificial Sequence
  Description of Artificial Sequence: Synthetic oligonucleotide
  Sense strand starting at position 1301 of SEQ ID NO: 1244976
caauuucuaucagggugaa

SEQ ID NO: 1526787 - RNA, 19 nt, Artificial Sequence
  Description of Artificial Sequence: Synthetic oligonucleotide
  Antisense strand to SEQ ID NO: 1526786
uucacccugauagaaauug

SEQ ID NO: 1526788 - RNA, 19 nt, Artificial Sequence
  Description of Artificial Sequence: Synthetic oligonucleotide
  Sense strand starting at position 1836 of SEQ ID NO: 1244976
acucucauugcaggucuua

SEQ ID NO: 1526789 - RNA, 19 nt, Artificial Sequence
  Description of Artificial Sequence: Synthetic oligonucleotide
  Antisense strand to SEQ ID NO: 1526788
uaagaccugcaaugagagu

SEQ ID NO: 1526790 - RNA, 19 nt, Artificial Sequence
  Description of Artificial Sequence: Synthetic oligonucleotide
  Sense strand starting at position 2085 of SEQ ID NO: 1244976
uggagucugucacugauac

SEQ ID NO: 1526791 - RNA, 19 nt, Artificial Sequence
  Description of Artificial Sequence: Synthetic oligonucleotide
  Antisense strand to SEQ ID NO: 1526790
guaucagugacagacucca

SEQ ID NO: 1526792 - RNA, 19 nt, Artificial Sequence
  Description of Artificial Sequence: Synthetic oligonucleotide
  Sense strand starting at position 2086 of SEQ ID NO: 1244976
ggagucugucacugauacu

SEQ ID NO: 1526793 - RNA, 19 nt, Artificial Sequence
  Description of Artificial Sequence: Synthetic oligonucleotide
  Antisense strand to SEQ ID NO: 1526792
aguaucagugacagacucc

SEQ ID NO: 1526794 - RNA, 19 nt, Artificial Sequence
  Description of Artificial Sequence: Synthetic oligonucleotide
  Sense strand starting at position 2122 of SEQ ID NO: 1244976
ccagacuggucagucauga

SEQ ID NO: 1526795 - RNA, 19 nt, Artificial Sequence
  Description of Artificial Sequence: Synthetic oligonucleotide
  Antisense strand to SEQ ID NO: 1526794
ucaugacugaccagucugg

SEQ ID NO: 1526796 - RNA, 19 nt, Artificial Sequence
  Description of Artificial Sequence: Synthetic oligonucleotide
  Sense strand starting at position 2201 of SEQ ID NO: 1244976
gggcuuaggcacuaacauu

SEQ ID NO: 1526797 - RNA, 19 nt, Artificial Sequence
  Description of Artificial Sequence: Synthetic oligonucleotide
  Antisense strand to SEQ ID NO: 1526796
aauguuagugccuaagccc

SEQ ID NO: 1526798 - RNA, 19 nt, Artificial Sequence
  Description of Artificial Sequence: Synthetic oligonucleotide
  Sense strand starting at position 2425 of SEQ ID NO: 1244976
acuggagaguuccagaaau

SEQ ID NO: 1526799 - RNA, 19 nt, Artificial Sequence
  Description of Artificial Sequence: Synthetic oligonucleotide
  Antisense strand to SEQ ID NO: 1526798
auuucuggaacucuccagu

SEQ ID NO: 1526800 - RNA, 19 nt, Artificial Sequence
  Description of Artificial Sequence: Synthetic oligonucleotide
  Sense strand starting at position 2475 of SEQ ID NO: 1244976
ggaagaaaguuccuucccu

SEQ ID NO: 1526801 - RNA, 19 nt, Artificial Sequence
  Description of Artificial Sequence: Synthetic oligonucleotide
  Antisense strand to SEQ ID NO: 1526800
agggaaggaacuuucuucc

SEQ ID NO: 1526802 - RNA, 19 nt, Artificial Sequence
  Description of Artificial Sequence: Synthetic oligonucleotide
  Sense strand starting at position 2575 of SEQ ID NO: 1244976
cuugcuaacucaguuuagu

SEQ ID NO: 1526803 - RNA, 19 nt, Artificial Sequence
  Description of Artificial Sequence: Synthetic oligonucleotide
  Antisense strand to SEQ ID NO: 1526802
acuaaacugaguuagcaag

SEQ ID NO: 1526804 - RNA, 19 nt, Artificial Sequence
  Description of Artificial Sequence: Synthetic oligonucleotide
  Sense strand starting at position 2583 of SEQ ID NO: 1244976
cucaguuuagugugaguga

SEQ ID NO: 1526805 - RNA, 19 nt, Artificial Sequence
  Description of Artificial Sequence: Synthetic oligonucleotide
  Antisense strand to SEQ ID NO: 1526804
ucacucacacuaaacugag

SEQ ID NO: 1526806 - RNA, 19 nt, Artificial Sequence
  Description of Artificial Sequence: Synthetic oligonucleotide
  Sense strand starting at position 2648 of SEQ ID NO: 1244976
uguguauagaguggaucua

SEQ ID NO: 1526807 - RNA, 19 nt, Artificial Sequence
  Description of Artificial Sequence: Synthetic oligonucleotide
  Antisense strand to SEQ ID NO: 1526806
uagauccacucuauacaca

SEQ ID NO: 1526808 - RNA, 19 nt, Artificial Sequence
  Description of Artificial Sequence: Synthetic oligonucleotide
  Sense strand starting at position 2649 of SEQ ID NO: 1244976
guguauagaguggaucuau

SEQ ID NO: 1526809 - RNA, 19 nt, Artificial Sequence
  Description of Artificial Sequence: Synthetic oligonucleotide
  Antisense strand to SEQ ID NO: 1526808
auagauccacucuauacac

SEQ ID NO: 1526810 - RNA, 19 nt, Artificial Sequence
  Description of Artificial Sequence: Synthetic oligonucleotide
  Sense strand starting at position 2703 of SEQ ID NO: 1244976
gagagugggcuuuguguau

SEQ ID NO: 1526811 - RNA, 19 nt, Artificial Sequence
  Description of Artificial Sequence: Synthetic oligonucleotide
  Antisense strand to SEQ ID NO: 1526810
auacacaaagcccacucuc

SEQ ID NO: 1526812 - RNA, 19 nt, Artificial Sequence
  Description of Artificial Sequence: Synthetic oligonucleotide
  Sense strand starting at position 2755 of SEQ ID NO: 1244976
cugggucagacugggaauu

SEQ ID NO: 1526813 - RNA, 19 nt, Artificial Sequence
  Description of Artificial Sequence: Synthetic oligonucleotide
  Antisense strand to SEQ ID NO: 1526812
aauucccagucugacccag

SEQ ID NO: 1526814 - RNA, 19 nt, Artificial Sequence
  Description of Artificial Sequence: Synthetic oligonucleotide
  Sense strand starting at position 2859 of SEQ ID NO: 1244976
ggacaagaacuauguauuc

SEQ ID NO: 1526815 - RNA, 19 nt, Artificial Sequence
  Description of Artificial Sequence: Synthetic oligonucleotide
  Antisense strand to SEQ ID NO: 1526814
gaauacauaguucuugucc

SEQ ID NO: 1526816 - RNA, 19 nt, Artificial Sequence
  Description of Artificial Sequence: Synthetic oligonucleotide
  Sense strand starting at position 2904 of SEQ ID NO: 1244976
gcaggaauguuucuccuua

SEQ ID NO: 1526817 - RNA, 19 nt, Artificial Sequence
  Description of Artificial Sequence: Synthetic oligonucleotide
  Antisense strand to SEQ ID NO: 1526816
uaaggagaaacauuccugc

SEQ ID NO: 1526818 - RNA, 19 nt, Artificial Sequence
  Description of Artificial Sequence: Synthetic oligonucleotide
  Sense strand starting at position 2905 of SEQ ID NO: 1244976
caggaauguuucuccuuag

SEQ ID NO: 1526819 - RNA, 19 nt, Artificial Sequence
  Description of Artificial Sequence: Synthetic oligonucleotide
  Antisense strand to SEQ ID NO: 1526818
cuaaggagaaacauuccug

SEQ ID NO: 1526820 - RNA, 19 nt, Artificial Sequence
  Description of Artificial Sequence: Synthetic oligonucleotide
  Sense strand starting at position 2928 of SEQ ID NO: 1244976
cugggaguuccugaagcaa

SEQ ID NO: 1526821 - RNA, 19 nt, Artificial Sequence
  Description of Artificial Sequence: Synthetic oligonucleotide
  Antisense strand to SEQ ID NO: 1526820
uugcuucaggaacucccag

SEQ ID NO: 1526822 - RNA, 19 nt, Artificial Sequence
  Description of Artificial Sequence: Synthetic oligonucleotide
  Sense strand starting at position 3102 of SEQ ID NO: 1244976
cgaaguguguuuccugaau

SEQ ID NO: 1526823 - RNA, 19 nt, Artificial Sequence
  Description of Artificial Sequence: Synthetic oligonucleotide
  Antisense strand to SEQ ID NO: 1526822
auucaggaaacacacuucg

SEQ ID NO: 1526824 - RNA, 19 nt, Artificial Sequence
  Description of Artificial Sequence: Synthetic oligonucleotide
  Sense strand starting at position 3108 of SEQ ID NO: 1244976
guguuuccugaauggaaug

SEQ ID NO: 1526825 - RNA, 19 nt, Artificial Sequence
  Description of Artificial Sequence: Synthetic oligonucleotide
  Antisense strand to SEQ ID NO: 1526824
cauuccauucaggaaacac

SEQ ID NO: 1526826 - RNA, 19 nt, Artificial Sequence
  Description of Artificial Sequence: Synthetic oligonucleotide
  Sense strand starting at position 3157 of SEQ ID NO: 1244976
uggugucuucaugaugaug

SEQ ID NO: 1526827 - RNA, 19 nt, Artificial Sequence
  Description of Artificial Sequence: Synthetic oligonucleotide
  Antisense strand to SEQ ID NO: 1526826
caucaucaugaagacacca

SEQ ID NO: 1526828 - RNA, 19 nt, Artificial Sequence
  Description of Artificial Sequence: Synthetic oligonucleotide
  Sense strand starting at position 3288 of SEQ ID NO: 1244976
acuagauucuacucgcaga

SEQ ID NO: 1526829 - RNA, 19 nt, Artificial Sequence
  Description of Artificial Sequence: Synthetic oligonucleotide
  Antisense strand to SEQ ID NO: 1526828
ucugcgaguagaaucuagu

SEQ ID NO: 1526830 - RNA, 19 nt, Artificial Sequence
  Description of Artificial Sequence: Synthetic oligonucleotide
  Sense strand starting at position 3306 of SEQ ID NO: 1244976
accugugaccuuggacaca

SEQ ID NO: 1526831 - RNA, 19 nt, Artificial Sequence
  Description of Artificial Sequence: Synthetic oligonucleotide
  Antisense strand to SEQ ID NO: 1526830
uguguccaaggucacaggu

SEQ ID NO: 1526832 - RNA, 19 nt, Artificial Sequence
  Description of Artificial Sequence: Synthetic oligonucleotide
  Sense strand starting at position 3386 of SEQ ID NO: 1244976
auguuuguugaaugagcaa

SEQ ID NO: 1526833 - RNA, 19 nt, Artificial Sequence
  Description of Artificial Sequence: Synthetic oligonucleotide
  Antisense strand to SEQ ID NO: 1526832
uugcucauucaacaaacau

SEQ ID NO: 1526834 - RNA, 19 nt, Artificial Sequence
  Description of Artificial Sequence: Synthetic oligonucleotide
  Sense strand starting at position 3423 of SEQ ID NO: 1244976
ggaugaauucccugccuuc

SEQ ID NO: 1526835 - RNA, 19 nt, Artificial Sequence
  Description of Artificial Sequence: Synthetic oligonucleotide
  Antisense strand to SEQ ID NO: 1526834
gaaggcagggaauucaucc

SEQ ID NO: 1526836 - RNA, 19 nt, Artificial Sequence
  Description of Artificial Sequence: Synthetic oligonucleotide
  Sense strand starting at position 388 of SEQ ID NO: 1244977
uccauaguaugcucaauga

SEQ ID NO: 1526837 - RNA, 19 nt, Artificial Sequence
  Description of Artificial Sequence: Synthetic oligonucleotide
  Antisense strand to SEQ ID NO: 1526836
ucauugagcauacuaugga

SEQ ID NO: 1526838 - RNA, 19 nt, Artificial Sequence
  Description of Artificial Sequence: Synthetic oligonucleotide
  Sense strand starting at position 439 of SEQ ID NO: 1244977
caagacucucgugacucaa

SEQ ID NO: 1526839 - RNA, 19 nt, Artificial Sequence
  Description of Artificial Sequence: Synthetic oligonucleotide
  Antisense strand to SEQ ID NO: 1526838
uugagucacgagagucuug

SEQ ID NO: 1526840 - RNA, 19 nt, Artificial Sequence
  Description of Artificial Sequence: Synthetic oligonucleotide
  Sense strand starting at position 508 of SEQ ID NO: 1244977
agaaguuccaauuacguga

SEQ ID NO: 1526841 - RNA, 19 nt, Artificial Sequence
  Description of Artificial Sequence: Synthetic oligonucleotide
  Antisense strand to SEQ ID NO: 1526840
ucacguaauuggaacuucu

SEQ ID NO: 1526842 - RNA, 19 nt, Artificial Sequence
  Description of Artificial Sequence: Synthetic oligonucleotide
  Sense strand starting at position 513 of SEQ ID NO: 1244977
uuccaauuacgugaaguuu

SEQ ID NO: 1526843 - RNA, 19 nt, Artificial Sequence
  Description of Artificial Sequence: Synthetic oligonucleotide
  Antisense strand to SEQ ID NO: 1526842
aaacuucacguaauuggaa

SEQ ID NO: 1526844 - RNA, 19 nt, Artificial Sequence
  Description of Artificial Sequence: Synthetic oligonucleotide
  Sense strand starting at position 563 of SEQ ID NO: 1244977
acucaucaguagucuuuga

SEQ ID NO: 1526845 - RNA, 19 nt, Artificial Sequence
  Description of Artificial Sequence: Synthetic oligonucleotide
  Antisense strand to SEQ ID NO: 1526844
ucaaagacuacugaugagu

SEQ ID NO: 1526846 - RNA, 19 nt, Artificial Sequence
  Description of Artificial Sequence: Synthetic oligonucleotide
  Sense strand starting at position 570 of SEQ ID NO: 1244977
aguagucuuugagcuaaga

SEQ ID NO: 1526847 - RNA, 19 nt, Artificial Sequence
  Description of Artificial Sequence: Synthetic oligonucleotide
  Antisense strand to SEQ ID NO: 1526846
ucuuagcucaaagacuacu

SEQ ID NO: 1526848 - RNA, 19 nt, Artificial Sequence
  Description of Artificial Sequence: Synthetic oligonucleotide
  Sense strand starting at position 616 of SEQ ID NO: 1244977
ugcgaaagaucuccaguaa

SEQ ID NO: 1526849 - RNA, 19 nt, Artificial Sequence
  Description of Artificial Sequence: Synthetic oligonucleotide
  Antisense strand to SEQ ID NO: 1526848
uuacuggagaucuuucgca

SEQ ID NO: 1526850 - RNA, 19 nt, Artificial Sequence
  Description of Artificial Sequence: Synthetic oligonucleotide
  Sense strand starting at position 617 of SEQ ID NO: 1244977
gcgaaagaucuccaguaag

SEQ ID NO: 1526851 - RNA, 19 nt, Artificial Sequence
  Description of Artificial Sequence: Synthetic oligonucleotide
  Antisense strand to SEQ ID NO: 1526850
cuuacuggagaucuuucgc

SEQ ID NO: 1526852 - RNA, 19 nt, Artificial Sequence
  Description of Artificial Sequence: Synthetic oligonucleotide
  Sense strand starting at position 642 of SEQ ID NO: 1244977
ccaggaaagcaauguccau

SEQ ID NO: 1526853 - RNA, 19 nt, Artificial Sequence
  Description of Artificial Sequence: Synthetic oligonucleotide
  Antisense strand to SEQ ID NO: 1526852
auggacauugcuuuccugg

SEQ ID NO: 1526854 - RNA, 19 nt, Artificial Sequence
  Description of Artificial Sequence: Synthetic oligonucleotide
  Sense strand starting at position 683 of SEQ ID NO: 1244977
ugagucagacuguagucaa

SEQ ID NO: 1526855 - RNA, 19 nt, Artificial Sequence
  Description of Artificial Sequence: Synthetic oligonucleotide
  Antisense strand to SEQ ID NO: 1526854
uugacuacagucugacuca

SEQ ID NO: 1526856 - RNA, 19 nt, Artificial Sequence
  Description of Artificial Sequence: Synthetic oligonucleotide
  Sense strand starting at position 686 of SEQ ID NO: 1244977
gucagacuguagucaagaa

SEQ ID NO: 1526857 - RNA, 19 nt, Artificial Sequence
  Description of Artificial Sequence: Synthetic oligonucleotide
  Antisense strand to SEQ ID NO: 1526856
uucuugacuacagucugac

SEQ ID NO: 1526858 - RNA, 19 nt, Artificial Sequence
  Description of Artificial Sequence: Synthetic oligonucleotide
  Sense strand starting at position 690 of SEQ ID NO: 1244977
gacuguagucaagaagcuu

SEQ ID NO: 1526859 - RNA, 19 nt, Artificial Sequence
  Description of Artificial Sequence: Synthetic oligonucleotide
  Antisense strand to SEQ ID NO: 1526858
aagcuucuugacuacaguc

SEQ ID NO: 1526860 - RNA, 19 nt, Artificial Sequence
  Description of Artificial Sequence: Synthetic oligonucleotide
  Sense strand starting at position 1169 of SEQ ID NO: 1244977
ccuguagugucaguauuug

SEQ ID NO: 1526861 - RNA, 19 nt, Artificial Sequence
  Description of Artificial Sequence: Synthetic oligonucleotide
  Antisense strand to SEQ ID NO: 1526860
caaauacugacacuacagg

SEQ ID NO: 1526862 - RNA, 19 nt, Artificial Sequence
  Description of Artificial Sequence: Synthetic oligonucleotide
  Sense strand starting at position 2103 of SEQ ID NO: 1244977
cuauguccggcuggaauuu

SEQ ID NO: 1526863 - RNA, 19 nt, Artificial Sequence
  Description of Artificial Sequence: Synthetic oligonucleotide
  Antisense strand to SEQ ID NO: 1526862
aaauuccagccggacauag

SEQ ID NO: 1526864 - RNA, 19 nt, Artificial Sequence
  Description of Artificial Sequence: Synthetic oligonucleotide
  Sense strand starting at position 2274 of SEQ ID NO: 1244977
agggaagccuuuccaugaa

SEQ ID NO: 1526865 - RNA, 19 nt, Artificial Sequence
  Description of Artificial Sequence: Synthetic oligonucleotide
  Antisense strand to SEQ ID NO: 1526864
uucauggaaaggcuucccu

SEQ ID NO: 1526866 - RNA, 19 nt, Artificial Sequence
  Description of Artificial Sequence: Synthetic oligonucleotide
  Sense strand starting at position 2337 of SEQ ID NO: 1244977
uagcgauuucugcgaaaga

SEQ ID NO: 1526867 - RNA, 19 nt, Artificial Sequence
  Description of Artificial Sequence: Synthetic oligonucleotide
  Antisense strand to SEQ ID NO: 1526866
ucuuucgcagaaaucgcua

SEQ ID NO: 1526868 - RNA, 19 nt, Artificial Sequence
  Description of Artificial Sequence: Synthetic oligonucleotide
  Sense strand starting at position 2454 of SEQ ID NO: 1244977
ccaagcagggcuuaagaau

SEQ ID NO: 1526869 - RNA, 19 nt, Artificial Sequence
  Description of Artificial Sequence: Synthetic oligonucleotide
  Antisense strand to SEQ ID NO: 1526868
auucuuaagcccugcuugg

SEQ ID NO: 1526870 - RNA, 19 nt, Artificial Sequence
  Description of Artificial Sequence: Synthetic oligonucleotide
  Sense strand starting at position 2474 of SEQ ID NO: 1244977
uguguugucgguucuuagu

SEQ ID NO: 1526871 - RNA, 19 nt, Artificial Sequence
  Description of Artificial Sequence: Synthetic oligonucleotide
  Antisense strand to SEQ ID NO: 1526870
acuaagaaccgacaacaca

SEQ ID NO: 1526872 - RNA, 19 nt, Artificial Sequence
  Description of Artificial Sequence: Synthetic oligonucleotide
  Sense strand starting at position 2570 of SEQ ID NO: 1244977
uugagaaagcuuugcuaag

SEQ ID NO: 1526873 - RNA, 19 nt, Artificial Sequence
  Description of Artificial Sequence: Synthetic oligonucleotide
  Antisense strand to SEQ ID NO: 1526872
cuuagcaaagcuuucucaa

SEQ ID NO: 1526874 - RNA, 19 nt, Artificial Sequence
  Description of Artificial Sequence: Synthetic oligonucleotide
  Sense strand starting at position 2572 of SEQ ID NO: 1244977
gagaaagcuuugcuaagga

SEQ ID NO: 1526875 - RNA, 19 nt, Artificial Sequence
  Description of Artificial Sequence: Synthetic oligonucleotide
  Antisense strand to SEQ ID NO: 1526874
uccuuagcaaagcuuucuc

SEQ ID NO: 1526876 - RNA, 19 nt, Artificial Sequence
  Description of Artificial Sequence: Synthetic oligonucleotide
  Sense strand starting at position 2714 of SEQ ID NO: 1244977
acuuguuuccaguacauua

SEQ ID NO: 1526877 - RNA, 19 nt, Artificial Sequence
  Description of Artificial Sequence: Synthetic oligonucleotide
  Antisense strand to SEQ ID NO: 1526876
uaauguacuggaaacaagu

SEQ ID NO: 1526878 - RNA, 19 nt, Artificial Sequence
  Description of Artificial Sequence: Synthetic oligonucleotide
  Sense strand starting at position 2744 of SEQ ID NO: 1244977
cgaauuuaaucuccgccua

SEQ ID NO: 1526879 - RNA, 19 nt, Artificial Sequence
  Description of Artificial Sequence: Synthetic oligonucleotide
  Antisense strand to SEQ ID NO: 1526878
uaggcggagauuaaauucg

SEQ ID NO: 1526880 - RNA, 19 nt, Artificial Sequence
  Description of Artificial Sequence: Synthetic oligonucleotide
  Sense strand starting at position 2749 of SEQ ID NO: 1244977
uuaaucuccgccuagaaua

SEQ ID NO: 1526881 - RNA, 19 nt, Artificial Sequence
  Description of Artificial Sequence: Synthetic oligonucleotide
  Antisense strand to SEQ ID NO: 1526880
uauucuaggcggagauuaa

SEQ ID NO: 1526882 - RNA, 19 nt, Artificial Sequence
  Description of Artificial Sequence: Synthetic oligonucleotide
  Sense strand starting at position 2760 of SEQ ID NO: 1244977
cuagaauagucucugaggu

SEQ ID NO: 1526883 - RNA, 19 nt, Artificial Sequence
  Description of Artificial Sequence: Synthetic oligonucleotide
  Antisense strand to SEQ ID NO: 1526882
accucagagacuauucuag

SEQ ID NO: 1526884 - RNA, 19 nt, Artificial Sequence
  Description of Artificial Sequence: Synthetic oligonucleotide
  Sense strand starting at position 2761 of SEQ ID NO: 1244977
uagaauagucucugaggua

SEQ ID NO: 1526885 - RNA, 19 nt, Artificial Sequence
  Description of Artificial Sequence: Synthetic oligonucleotide
  Antisense strand to SEQ ID NO: 1526884
uaccucagagacuauucua

SEQ ID NO: 1526886 - RNA, 19 nt, Artificial Sequence
  Description of Artificial Sequence: Synthetic oligonucleotide
  Sense strand starting at position 2795 of SEQ ID NO: 1244977
aguguugagaagcaucaca

SEQ ID NO: 1526887 - RNA, 19 nt, Artificial Sequence
  Description of Artificial Sequence: Synthetic oligonucleotide
  Antisense strand to SEQ ID NO: 1526886
ugugaugcuucucaacacu

SEQ ID NO: 1526888 - RNA, 19 nt, Artificial Sequence
  Description of Artificial Sequence: Synthetic oligonucleotide
  Sense strand starting at position 2820 of SEQ ID NO: 1244977
agaggaaaggccuggguuu

SEQ ID NO: 1526889 - RNA, 19 nt, Artificial Sequence
  Description of Artificial Sequence: Synthetic oligonucleotide
  Antisense strand to SEQ ID NO: 1526888
aaacccaggccuuuccucu

SEQ ID NO: 1526890 - RNA, 19 nt, Artificial Sequence
  Description of Artificial Sequence: Synthetic oligonucleotide
  Sense strand starting at position 2987 of SEQ ID NO: 1244977
gcauuuguuucugugaguu

SEQ ID NO: 1526891 - RNA, 19 nt, Artificial Sequence
  Description of Artificial Sequence: Synthetic oligonucleotide
  Antisense strand to SEQ ID NO: 1526890
aacucacagaaacaaaugc

SEQ ID NO: 1526892 - RNA, 19 nt, Artificial Sequence
  Description of Artificial Sequence: Synthetic oligonucleotide
  Sense strand starting at position 3006 of SEQ ID NO: 1244977
uuagaauguucuccguaga

SEQ ID NO: 1526893 - RNA, 19 nt, Artificial Sequence
  Description of Artificial Sequence: Synthetic oligonucleotide
  Antisense strand to SEQ ID NO: 1526892
ucuacggagaacauucuaa

SEQ ID NO: 1526894 - RNA, 19 nt, Artificial Sequence
  Description of Artificial Sequence: Synthetic oligonucleotide
  Sense strand starting at position 3007 of SEQ ID NO: 1244977
uagaauguucuccguagau

SEQ ID NO: 1526895 - RNA, 19 nt, Artificial Sequence
  Description of Artificial Sequence: Synthetic oligonucleotide
  Antisense strand to SEQ ID NO: 1526894
aucuacggagaacauucua

SEQ ID NO: 1526896 - RNA, 19 nt, Artificial Sequence
  Description of Artificial Sequence: Synthetic oligonucleotide
  Sense strand starting at position 3009 of SEQ ID NO: 1244977
gaauguucuccguagauau

SEQ ID NO: 1526897 - RNA, 19 nt, Artificial Sequence
  Description of Artificial Sequence: Synthetic oligonucleotide
  Antisense strand to SEQ ID NO: 1526896
auaucuacggagaacauuc

SEQ ID NO: 1526898 - RNA, 19 nt, Artificial Sequence
  Description of Artificial Sequence: Synthetic oligonucleotide
  Sense strand starting at position 3196 of SEQ ID NO: 1244977
guuaauguuugagugacac

SEQ ID NO: 1526899 - RNA, 19 nt, Artificial Sequence
  Description of Artificial Sequence: Synthetic oligonucleotide
  Antisense strand to SEQ ID NO: 1526898
gugucacucaaacauuaac

SEQ ID NO: 1526900 - RNA, 19 nt, Artificial Sequence
  Description of Artificial Sequence: Synthetic oligonucleotide
  Sense strand starting at position 3393 of SEQ ID NO: 1244977
aguuacuugguuuauguua

SEQ ID NO: 1526901 - RNA, 19 nt, Artificial Sequence
  Description of Artificial Sequence: Synthetic oligonucleotide
  Antisense strand to SEQ ID NO: 1526900
uaacauaaaccaaguaacu

SEQ ID NO: 1526902 - RNA, 19 nt, Artificial Sequence
  Description of Artificial Sequence: Synthetic oligonucleotide
  Sense strand starting at position 3422 of SEQ ID NO: 1244977
acucaagugugaucugacu

SEQ ID NO: 1526903 - RNA, 19 nt, Artificial Sequence
  Description of Artificial Sequence: Synthetic oligonucleotide
  Antisense strand to SEQ ID NO: 1526902
agucagaucacacuugagu

SEQ ID NO: 1526904 - RNA, 19 nt, Artificial Sequence
  Description of Artificial Sequence: Synthetic oligonucleotide
  Sense strand starting at position 3424 of SEQ ID NO: 1244977
ucaagugugaucugacuga

SEQ ID NO: 1526905 - RNA, 19 nt, Artificial Sequence
  Description of Artificial Sequence: Synthetic oligonucleotide
  Antisense strand to SEQ ID NO: 1526904
ucagucagaucacacuuga

SEQ ID NO: 1526906 - RNA, 19 nt, Artificial Sequence
  Description of Artificial Sequence: Synthetic oligonucleotide
  Sense strand starting at position 3428 of SEQ ID NO: 1244977
gugugaucugacugaagaa

SEQ ID NO: 1526907 - RNA, 19 nt, Artificial Sequence
  Description of Artificial Sequence: Synthetic oligonucleotide
  Antisense strand to SEQ ID NO: 1526906
uucuucagucagaucacac

SEQ ID NO: 1526908 - RNA, 19 nt, Artificial Sequence
  Description of Artificial Sequence: Synthetic oligonucleotide
  Sense strand starting at position 3479 of SEQ ID NO: 1244977
gauguauaucaugagcuuc

SEQ ID NO: 1526909 - RNA, 19 nt, Artificial Sequence
  Description of Artificial Sequence: Synthetic oligonucleotide
  Antisense strand to SEQ ID NO: 1526908
gaagcucaugauauacauc

SEQ ID NO: 1526910 - RNA, 19 nt, Artificial Sequence
  Description of Artificial Sequence: Synthetic oligonucleotide
  Sense strand starting at position 3498 of SEQ ID NO: 1244977
agaauaaguguguacuggu

SEQ ID NO: 1526911 - RNA, 19 nt, Artificial Sequence
  Description of Artificial Sequence: Synthetic oligonucleotide
  Antisense strand to SEQ ID NO: 1526910
accaguacacacuuauucu

SEQ ID NO: 1526912 - RNA, 19 nt, Artificial Sequence
  Description of Artificial Sequence: Synthetic oligonucleotide
  Sense strand starting at position 3594 of SEQ ID NO: 1244977
gcacaaaguuacucagcaa

SEQ ID NO: 1526913 - RNA, 19 nt, Artificial Sequence
  Description of Artificial Sequence: Synthetic oligonucleotide
  Antisense strand to SEQ ID NO: 1526912
uugcugaguaacuuugugc

SEQ ID NO: 1526914 - RNA, 19 nt, Artificial Sequence
  Description of Artificial Sequence: Synthetic oligonucleotide
  Sense strand starting at position 3634 of SEQ ID NO: 1244977
gacaguagccuacaagacu

SEQ ID NO: 1526915 - RNA, 19 nt, Artificial Sequence
  Description of Artificial Sequence: Synthetic oligonucleotide
  Antisense strand to SEQ ID NO: 1526914
agucuuguaggcuacuguc

SEQ ID NO: 1526916 - RNA, 19 nt, Artificial Sequence
  Description of Artificial Sequence: Synthetic oligonucleotide
  Sense strand starting at position 435 of SEQ ID NO: 1244978
aauccuggucucuggagga

SEQ ID NO: 1526917 - RNA, 19 nt, Artificial Sequence
  Description of Artificial Sequence: Synthetic oligonucleotide
  Antisense strand to SEQ ID NO: 1526916
uccuccagagaccaggauu

SEQ ID NO: 1526918 - RNA, 19 nt, Artificial Sequence
  Description of Artificial Sequence: Synthetic oligonucleotide
  Sense strand starting at position 851 of SEQ ID NO: 1244978
gggaguuggucacagucau

SEQ ID NO: 1526919 - RNA, 19 nt, Artificial Sequence
  Description of Artificial Sequence: Synthetic oligonucleotide
  Antisense strand to SEQ ID NO: 1526918
augacugugaccaacuccc

SEQ ID NO: 1526920 - RNA, 19 nt, Artificial Sequence
  Description of Artificial Sequence: Synthetic oligonucleotide
  Sense strand starting at position 1097 of SEQ ID NO: 1244978
gaguuaauggaguggcuga

SEQ ID NO: 1526921 - RNA, 19 nt, Artificial Sequence
  Description of Artificial Sequence: Synthetic oligonucleotide
  Antisense strand to SEQ ID NO: 1526920
ucagccacuccauuaacuc

SEQ ID NO: 1526922 - RNA, 19 nt, Artificial Sequence
  Description of Artificial Sequence: Synthetic oligonucleotide
  Sense strand starting at position 1108 of SEQ ID NO: 1244978
guggcugaaucagugacau

SEQ ID NO: 1526923 - RNA, 19 nt, Artificial Sequence
  Description of Artificial Sequence: Synthetic oligonucleotide
  Antisense strand to SEQ ID NO: 1526922
augucacugauucagccac

SEQ ID NO: 1526924 - RNA, 19 nt, Artificial Sequence
  Description of Artificial Sequence: Synthetic oligonucleotide
  Sense strand starting at position 1134 of SEQ ID NO: 1244978
ccuggacaguguccauaaa

SEQ ID NO: 1526925 - RNA, 19 nt, Artificial Sequence
  Description of Artificial Sequence: Synthetic oligonucleotide
  Antisense strand to SEQ ID NO: 1526924
uuuauggacacuguccagg

SEQ ID NO: 1526926 - RNA, 19 nt, Artificial Sequence
  Description of Artificial Sequence: Synthetic oligonucleotide
  Sense strand starting at position 1135 of SEQ ID NO: 1244978
cuggacaguguccauaaau

SEQ ID NO: 1526927 - RNA, 19 nt, Artificial Sequence
  Description of Artificial Sequence: Synthetic oligonucleotide
  Antisense strand to SEQ ID NO: 1526926
auuuauggacacuguccag

SEQ ID NO: 1526928 - RNA, 19 nt, Artificial Sequence
  Description of Artificial Sequence: Synthetic oligonucleotide
  Sense strand starting at position 1223 of SEQ ID NO: 1244978
ggcagagcccuuuggauca

SEQ ID NO: 1526929 - RNA, 19 nt, Artificial Sequence
  Description of Artificial Sequence: Synthetic oligonucleotide
  Antisense strand to SEQ ID NO: 1526928
ugauccaaagggcucugcc

SEQ ID NO: 1526930 - RNA, 19 nt, Artificial Sequence
  Description of Artificial Sequence: Synthetic oligonucleotide
  Sense strand starting at position 1468 of SEQ ID NO: 1244978
aguguuaacaagugucaga

SEQ ID NO: 1526931 - RNA, 19 nt, Artificial Sequence
  Description of Artificial Sequence: Synthetic oligonucleotide
  Antisense strand to SEQ ID NO: 1526930
ucugacacuuguuaacacu

SEQ ID NO: 1526932 - RNA, 19 nt, Artificial Sequence
  Description of Artificial Sequence: Synthetic oligonucleotide
  Sense strand starting at position 1479 of SEQ ID NO: 1244978
gugucagaugccuccgcuu

SEQ ID NO: 1526933 - RNA, 19 nt, Artificial Sequence
  Description of Artificial Sequence: Synthetic oligonucleotide
  Antisense strand to SEQ ID NO: 1526932
aagcggaggcaucugacac

SEQ ID NO: 1526934 - RNA, 19 nt, Artificial Sequence
  Description of Artificial Sequence: Synthetic oligonucleotide
  Sense strand starting at position 1509 of SEQ ID NO: 1244978
acaugugucucucccacaa

SEQ ID NO: 1526935 - RNA, 19 nt, Artificial Sequence
  Description of Artificial Sequence: Synthetic oligonucleotide
  Antisense strand to SEQ ID NO: 1526934
uugugggagagacacaugu

SEQ ID NO: 1526936 - RNA, 19 nt, Artificial Sequence
  Description of Artificial Sequence: Synthetic oligonucleotide
  Sense strand starting at position 1792 of SEQ ID NO: 1244978
ggugguacuggucguucau

SEQ ID NO: 1526937 - RNA, 19 nt, Artificial Sequence
  Description of Artificial Sequence: Synthetic oligonucleotide
  Antisense strand to SEQ ID NO: 1526936
augaacgaccaguaccacc

SEQ ID NO: 1526938 - RNA, 19 nt, Artificial Sequence
  Description of Artificial Sequence: Synthetic oligonucleotide
  Sense strand starting at position 1875 of SEQ ID NO: 1244978
gguauuagggcugaggcau

SEQ ID NO: 1526939 - RNA, 19 nt, Artificial Sequence
  Description of Artificial Sequence: Synthetic oligonucleotide
  Antisense strand to SEQ ID NO: 1526938
augccucagcccuaauacc

SEQ ID NO: 1526940 - RNA, 19 nt, Artificial Sequence
  Description of Artificial Sequence: Synthetic oligonucleotide
  Sense strand starting at position 2031 of SEQ ID NO: 1244978
gacgaaaucucccgcuguc

SEQ ID NO: 1526941 - RNA, 19 nt, Artificial Sequence
  Description of Artificial Sequence: Synthetic oligonucleotide
  Antisense strand to SEQ ID NO: 1526940
gacagcgggagauuucguc

SEQ ID NO: 1526942 - RNA, 19 nt, Artificial Sequence
  Description of Artificial Sequence: Synthetic oligonucleotide
  Sense strand starting at position 2197 of SEQ ID NO: 1244978
agagaucuguccucacuag

SEQ ID NO: 1526943 - RNA, 19 nt, Artificial Sequence
  Description of Artificial Sequence: Synthetic oligonucleotide
  Antisense strand to SEQ ID NO: 1526942
cuagugaggacagaucucu

SEQ ID NO: 1526944 - RNA, 19 nt, Artificial Sequence
  Description of Artificial Sequence: Synthetic oligonucleotide
  Sense strand starting at position 2828 of SEQ ID NO: 1244978
ucgccucucaaaggguaaa

SEQ ID NO: 1526945 - RNA, 19 nt, Artificial Sequence
  Description of Artificial Sequence: Synthetic oligonucleotide
  Antisense strand to SEQ ID NO: 1526944
uuuacccuuugagaggcga

SEQ ID NO: 1526946 - RNA, 19 nt, Artificial Sequence
  Description of Artificial Sequence: Synthetic oligonucleotide
  Sense strand starting at position 2829 of SEQ ID NO: 1244978
cgccucucaaaggguaaau

SEQ ID NO: 1526947 - RNA, 19 nt, Artificial Sequence
  Description of Artificial Sequence: Synthetic oligonucleotide
  Antisense strand to SEQ ID NO: 1526946
auuuacccuuugagaggcg

SEQ ID NO: 1526948 - RNA, 19 nt, Artificial Sequence
  Description of Artificial Sequence: Synthetic oligonucleotide
  Sense strand starting at position 2873 of SEQ ID NO: 1244978
gcgggcucuucccuaaauu

SEQ ID NO: 1526949 - RNA, 19 nt, Artificial Sequence
  Description of Artificial Sequence: Synthetic oligonucleotide
  Antisense strand to SEQ ID NO: 1526948
aauuuagggaagagcccgc

SEQ ID NO: 1526950 - RNA, 19 nt, Artificial Sequence
  Description of Artificial Sequence: Synthetic oligonucleotide
  Sense strand starting at position 2874 of SEQ ID NO: 1244978
cgggcucuucccuaaauuc

SEQ ID NO: 1526951 - RNA, 19 nt, Artificial Sequence
  Description of Artificial Sequence: Synthetic oligonucleotide
  Antisense strand to SEQ ID NO: 1526950
gaauuuagggaagagcccg

SEQ ID NO: 1526952 - RNA, 19 nt, Artificial Sequence
  Description of Artificial Sequence: Synthetic oligonucleotide
  Sense strand starting at position 2908 of SEQ ID NO: 1244978
ggaucaugugagcgggacu

SEQ ID NO: 1526953 - RNA, 19 nt, Artificial Sequence
  Description of Artificial Sequence: Synthetic oligonucleotide
  Antisense strand to SEQ ID NO: 1526952
agucccgcucacaugaucc

SEQ ID NO: 1526954 - RNA, 19 nt, Artificial Sequence
  Description of Artificial Sequence: Synthetic oligonucleotide
  Sense strand starting at position 2966 of SEQ ID NO: 1244978
cccuguccuccuggguaua

SEQ ID NO: 1526955 - RNA, 19 nt, Artificial Sequence
  Description of Artificial Sequence: Synthetic oligonucleotide
  Antisense strand to SEQ ID NO: 1526954
uauacccaggaggacaggg

SEQ ID NO: 1526956 - RNA, 19 nt, Artificial Sequence
  Description of Artificial Sequence: Synthetic oligonucleotide
  Sense strand starting at position 2967 of SEQ ID NO: 1244978
ccuguccuccuggguauaa

SEQ ID NO: 1526957 - RNA, 19 nt, Artificial Sequence
  Description of Artificial Sequence: Synthetic oligonucleotide
  Antisense strand to SEQ ID NO: 1526956
uuauacccaggaggacagg

SEQ ID NO: 1526958 - RNA, 19 nt, Artificial Sequence
  Description of Artificial Sequence: Synthetic oligonucleotide
  Sense strand starting at position 2968 of SEQ ID NO: 1244978
cuguccuccuggguauaaa

SEQ ID NO: 1526959 - RNA, 19 nt, Artificial Sequence
  Description of Artificial Sequence: Synthetic oligonucleotide
  Antisense strand to SEQ ID NO: 1526958
uuuauacccaggaggacag

SEQ ID NO: 1526960 - RNA, 19 nt, Artificial Sequence
  Description of Artificial Sequence: Synthetic oligonucleotide
  Sense strand starting at position 2980 of SEQ ID NO: 1244978
guauaaagcgccuguccau

SEQ ID NO: 1526961 - RNA, 19 nt, Artificial Sequence
  Description of Artificial Sequence: Synthetic oligonucleotide
  Antisense strand to SEQ ID NO: 1526960
auggacaggcgcuuuauac

SEQ ID NO: 1526962 - RNA, 19 nt, Artificial Sequence
  Description of Artificial Sequence: Synthetic oligonucleotide
  Sense strand starting at position 3298 of SEQ ID NO: 1244978
caggguugaccuggaguuu

SEQ ID NO: 1526963 - RNA, 19 nt, Artificial Sequence
  Description of Artificial Sequence: Synthetic oligonucleotide
  Antisense strand to SEQ ID NO: 1526962
aaacuccaggucaacccug

SEQ ID NO: 1526964 - RNA, 19 nt, Artificial Sequence
  Description of Artificial Sequence: Synthetic oligonucleotide
  Sense strand starting at position 3756 of SEQ ID NO: 1244978
cagagugcagauugacaua

SEQ ID NO: 1526965 - RNA, 19 nt, Artificial Sequence
  Description of Artificial Sequence: Synthetic oligonucleotide
  Antisense strand to SEQ ID NO: 1526964
uaugucaaucugcacucug

SEQ ID NO: 1526966 - RNA, 19 nt, Artificial Sequence
  Description of Artificial Sequence: Synthetic oligonucleotide
  Sense strand starting at position 179 of SEQ ID NO: 1244979
gcaagacucuaacuccgau

SEQ ID NO: 1526967 - RNA, 19 nt, Artificial Sequence
  Description of Artificial Sequence: Synthetic oligonucleotide
  Antisense strand to SEQ ID NO: 1526966
aucggaguuagagucuugc

SEQ ID NO: 1526968 - RNA, 19 nt, Artificial Sequence
  Description of Artificial Sequence: Synthetic oligonucleotide
  Sense strand starting at position 608 of SEQ ID NO: 1244979
cagcgagccuguugguauu

SEQ ID NO: 1526969 - RNA, 19 nt, Artificial Sequence
  Description of Artificial Sequence: Synthetic oligonucleotide
  Antisense strand to SEQ ID NO: 1526968
aauaccaacaggcucgcug

SEQ ID NO: 1526970 - RNA, 19 nt, Artificial Sequence
  Description of Artificial Sequence: Synthetic oligonucleotide
  Sense strand starting at position 614 of SEQ ID NO: 1244979
gccuguugguauucccaua

SEQ ID NO: 1526971 - RNA, 19 nt, Artificial Sequence
  Description of Artificial Sequence: Synthetic oligonucleotide
  Antisense strand to SEQ ID NO: 1526970
uaugggaauaccaacaggc

SEQ ID NO: 1526972 - RNA, 19 nt, Artificial Sequence
  Description of Artificial Sequence: Synthetic oligonucleotide
  Sense strand starting at position 673 of SEQ ID NO: 1244979
cucccaaucucggauugua

SEQ ID NO: 1526973 - RNA, 19 nt, Artificial Sequence
  Description of Artificial Sequence: Synthetic oligonucleotide
  Antisense strand to SEQ ID NO: 1526972
uacaauccgagauugggag

SEQ ID NO: 1526974 - RNA, 19 nt, Artificial Sequence
  Description of Artificial Sequence: Synthetic oligonucleotide
  Sense strand starting at position 676 of SEQ ID NO: 1244979
ccaaucucggauuguaauc

SEQ ID NO: 1526975 - RNA, 19 nt, Artificial Sequence
  Description of Artificial Sequence: Synthetic oligonucleotide
  Antisense strand to SEQ ID NO: 1526974
gauuacaauccgagauugg

SEQ ID NO: 1526976 - RNA, 19 nt, Artificial Sequence
  Description of Artificial Sequence: Synthetic oligonucleotide
  Sense strand starting at position 678 of SEQ ID NO: 1244979
aaucucggauuguaaucua

SEQ ID NO: 1526977 - RNA, 19 nt, Artificial Sequence
  Description of Artificial Sequence: Synthetic oligonucleotide
  Antisense strand to SEQ ID NO: 1526976
uagauuacaauccgagauu

SEQ ID NO: 1526978 - RNA, 19 nt, Artificial Sequence
  Description of Artificial Sequence: Synthetic oligonucleotide
  Sense strand starting at position 681 of SEQ ID NO: 1244979
cucggauuguaaucuacaa

SEQ ID NO: 1526979 - RNA, 19 nt, Artificial Sequence
  Description of Artificial Sequence: Synthetic oligonucleotide
  Antisense strand to SEQ ID NO: 1526978
uuguagauuacaauccgag

SEQ ID NO: 1526980 - RNA, 19 nt, Artificial Sequence
  Description of Artificial Sequence: Synthetic oligonucleotide
  Sense strand starting at position 738 of SEQ ID NO: 1244979
gaagaaucacguuacguuu

SEQ ID NO: 1526981 - RNA, 19 nt, Artificial Sequence
  Description of Artificial Sequence: Synthetic oligonucleotide
  Antisense strand to SEQ ID NO: 1526980
aaacguaacgugauucuuc

SEQ ID NO: 1526982 - RNA, 19 nt, Artificial Sequence
  Description of Artificial Sequence: Synthetic oligonucleotide
  Sense strand starting at position 813 of SEQ ID NO: 1244979
gggacucacuccugguuaa

SEQ ID NO: 1526983 - RNA, 19 nt, Artificial Sequence
  Description of Artificial Sequence: Synthetic oligonucleotide
  Antisense strand to SEQ ID NO: 1526982
uuaaccaggagugaguccc

SEQ ID NO: 1526984 - RNA, 19 nt, Artificial Sequence
  Description of Artificial Sequence: Synthetic oligonucleotide
  Sense strand starting at position 1658 of SEQ ID NO: 1244979
acacgaagcacugguagau

SEQ ID NO: 1526985 - RNA, 19 nt, Artificial Sequence
  Description of Artificial Sequence: Synthetic oligonucleotide
  Antisense strand to SEQ ID NO: 1526984
aucuaccagugcuucgugu

SEQ ID NO: 1526986 - RNA, 19 nt, Artificial Sequence
  Description of Artificial Sequence: Synthetic oligonucleotide
  Sense strand starting at position 2161 of SEQ ID NO: 1244979
gcccguuaggcucugggua

SEQ ID NO: 1526987 - RNA, 19 nt, Artificial Sequence
  Description of Artificial Sequence: Synthetic oligonucleotide
  Antisense strand to SEQ ID NO: 1526986
uacccagagccuaacgggc

SEQ ID NO: 1526988 - RNA, 19 nt, Artificial Sequence
  Description of Artificial Sequence: Synthetic oligonucleotide
  Sense strand starting at position 2163 of SEQ ID NO: 1244979
ccguuaggcucuggguaga

SEQ ID NO: 1526989 - RNA, 19 nt, Artificial Sequence
  Description of Artificial Sequence: Synthetic oligonucleotide
  Antisense strand to SEQ ID NO: 1526988
ucuacccagagccuaacgg

SEQ ID NO: 1526990 - RNA, 19 nt, Artificial Sequence
  Description of Artificial Sequence: Synthetic oligonucleotide
  Sense strand starting at position 2280 of SEQ ID NO: 1244979
accuucggcuauugucaua

SEQ ID NO: 1526991 - RNA, 19 nt, Artificial Sequence
  Description of Artificial Sequence: Synthetic oligonucleotide
  Antisense strand to SEQ ID NO: 1526990
uaugacaauagccgaaggu

SEQ ID NO: 1526992 - RNA, 19 nt, Artificial Sequence
  Description of Artificial Sequence: Synthetic oligonucleotide
  Sense strand starting at position 2293 of SEQ ID NO: 1244979
gucauaggcucucaguaua

SEQ ID NO: 1526993 - RNA, 19 nt, Artificial Sequence
  Description of Artificial Sequence: Synthetic oligonucleotide
  Antisense strand to SEQ ID NO: 1526992
uauacugagagccuaugac

SEQ ID NO: 1526994 - RNA, 19 nt, Artificial Sequence
  Description of Artificial Sequence: Synthetic oligonucleotide
  Sense strand starting at position 2360 of SEQ ID NO: 1244979
cccugucucuuccagagga

SEQ ID NO: 1526995 - RNA, 19 nt, Artificial Sequence
  Description of Artificial Sequence: Synthetic oligonucleotide
  Antisense strand to SEQ ID NO: 1526994
uccucuggaagagacaggg

SEQ ID NO: 1526996 - RNA, 19 nt, Artificial Sequence
  Description of Artificial Sequence: Synthetic oligonucleotide
  Sense strand starting at position 2362 of SEQ ID NO: 1244979
cugucucuuccagaggacu

SEQ ID NO: 1526997 - RNA, 19 nt, Artificial Sequence
  Description of Artificial Sequence: Synthetic oligonucleotide
  Antisense strand to SEQ ID NO: 1526996
aguccucuggaagagacag

SEQ ID NO: 1526998 - RNA, 19 nt, Artificial Sequence
  Description of Artificial Sequence: Synthetic oligonucleotide
  Sense strand starting at position 2411 of SEQ ID NO: 1244979
gcgcgagacgucaguccua

SEQ ID NO: 1526999 - RNA, 19 nt, Artificial Sequence
  Description of Artificial Sequence: Synthetic oligonucleotide
  Antisense strand to SEQ ID NO: 1526998
uaggacugacgucucgcgc

SEQ ID NO: 1527000 - RNA, 19 nt, Artificial Sequence
  Description of Artificial Sequence: Synthetic oligonucleotide
  Sense strand starting at position 2451 of SEQ ID NO: 1244979
gccugagcucugccgcaaa

SEQ ID NO: 1527001 - RNA, 19 nt, Artificial Sequence
  Description of Artificial Sequence: Synthetic oligonucleotide
  Antisense strand to SEQ ID NO: 1527000
uuugcggcagagcucaggc

SEQ ID NO: 1527002 - RNA, 19 nt, Artificial Sequence
  Description of Artificial Sequence: Synthetic oligonucleotide
  Sense strand starting at position 2713 of SEQ ID NO: 1244979
cggcgccauccaguuuaaa

SEQ ID NO: 1527003 - RNA, 19 nt, Artificial Sequence
  Description of Artificial Sequence: Synthetic oligonucleotide
  Antisense strand to SEQ ID NO: 1527002
uuuaaacuggauggcgccg

SEQ ID NO: 1527004 - RNA, 19 nt, Artificial Sequence
  Description of Artificial Sequence: Synthetic oligonucleotide
  Sense strand starting at position 2847 of SEQ ID NO: 1244979
gcauguaggcaguauugca

SEQ ID NO: 1527005 - RNA, 19 nt, Artificial Sequence
  Description of Artificial Sequence: Synthetic oligonucleotide
  Antisense strand to SEQ ID NO: 1527004
ugcaauacugccuacaugc

SEQ ID NO: 1527006 - RNA, 19 nt, Artificial Sequence
  Description of Artificial Sequence: Synthetic oligonucleotide
  Sense strand starting at position 2897 of SEQ ID NO: 1244979
cagcaagucuuggaaaucu

SEQ ID NO: 1527007 - RNA, 19 nt, Artificial Sequence
  Description of Artificial Sequence: Synthetic oligonucleotide
  Antisense strand to SEQ ID NO: 1527006
agauuuccaagacuugcug

SEQ ID NO: 1527008 - RNA, 19 nt, Artificial Sequence
  Description of Artificial Sequence: Synthetic oligonucleotide
  Sense strand starting at position 2906 of SEQ ID NO: 1244979
uuggaaaucugguauuuac

SEQ ID NO: 1527009 - RNA, 19 nt, Artificial Sequence
  Description of Artificial Sequence: Synthetic oligonucleotide
  Antisense strand to SEQ ID NO: 1527008
guaaauaccagauuuccaa

SEQ ID NO: 1527010 - RNA, 19 nt, Artificial Sequence
  Description of Artificial Sequence: Synthetic oligonucleotide
  Sense strand starting at position 2973 of SEQ ID NO: 1244979
caggucuaaucgguauaca

SEQ ID NO: 1527011 - RNA, 19 nt, Artificial Sequence
  Description of Artificial Sequence: Synthetic oligonucleotide
  Antisense strand to SEQ ID NO: 1527010
uguauaccgauuagaccug

SEQ ID NO: 1527012 - RNA, 19 nt, Artificial Sequence
  Description of Artificial Sequence: Synthetic oligonucleotide
  Sense strand starting at position 2974 of SEQ ID NO: 1244979
aggucuaaucgguauacaa

SEQ ID NO: 1527013 - RNA, 19 nt, Artificial Sequence
  Description of Artificial Sequence: Synthetic oligonucleotide
  Antisense strand to SEQ ID NO: 1527012
uuguauaccgauuagaccu

SEQ ID NO: 1527014 - RNA, 19 nt, Artificial Sequence
  Description of Artificial Sequence: Synthetic oligonucleotide
  Sense strand starting at position 2976 of SEQ ID NO: 1244979
gucuaaucgguauacaaau

SEQ ID NO: 1527015 - RNA, 19 nt, Artificial Sequence
  Description of Artificial Sequence: Synthetic oligonucleotide
  Antisense strand to SEQ ID NO: 1527014
auuuguauaccgauuagac

SEQ ID NO: 1527016 - RNA, 19 nt, Artificial Sequence
  Description of Artificial Sequence: Synthetic oligonucleotide
  Sense strand starting at position 3130 of SEQ ID NO: 1244979
ugcuaacugcuuugcucau

SEQ ID NO: 1527017 - RNA, 19 nt, Artificial Sequence
  Description of Artificial Sequence: Synthetic oligonucleotide
  Antisense strand to SEQ ID NO: 1527016
augagcaaagcaguuagca

SEQ ID NO: 1527018 - RNA, 19 nt, Artificial Sequence
  Description of Artificial Sequence: Synthetic oligonucleotide
  Sense strand starting at position 3131 of SEQ ID NO: 1244979
gcuaacugcuuugcucauu

SEQ ID NO: 1527019 - RNA, 19 nt, Artificial Sequence
  Description of Artificial Sequence: Synthetic oligonucleotide
  Antisense strand to SEQ ID NO: 1527018
aaugagcaaagcaguuagc

SEQ ID NO: 1527020 - RNA, 19 nt, Artificial Sequence
  Description of Artificial Sequence: Synthetic oligonucleotide
  Sense strand starting at position 3247 of SEQ ID NO: 1244979
guuuaauggacugacgacu

SEQ ID NO: 1527021 - RNA, 19 nt, Artificial Sequence
  Description of Artificial Sequence: Synthetic oligonucleotide
  Antisense strand to SEQ ID NO: 1527020
agucgucaguccauuaaac

SEQ ID NO: 1527022 - RNA, 19 nt, Artificial Sequence
  Description of Artificial Sequence: Synthetic oligonucleotide
  Sense strand starting at position 3253 of SEQ ID NO: 1244979
uggacugacgacugggaua

SEQ ID NO: 1527023 - RNA, 19 nt, Artificial Sequence
  Description of Artificial Sequence: Synthetic oligonucleotide
  Antisense strand to SEQ ID NO: 1527022
uaucccagucgucagucca

SEQ ID NO: 1527024 - RNA, 19 nt, Artificial Sequence
  Description of Artificial Sequence: Synthetic oligonucleotide
  Sense strand starting at position 3287 of SEQ ID NO: 1244979
agacaaauugccgagcaca

SEQ ID NO: 1527025 - RNA, 19 nt, Artificial Sequence
  Description of Artificial Sequence: Synthetic oligonucleotide
  Antisense strand to SEQ ID NO: 1527024
ugugcucggcaauuugucu

SEQ ID NO: 1527026 - RNA, 19 nt, Artificial Sequence
  Description of Artificial Sequence: Synthetic oligonucleotide
  Sense strand starting at position 3320 of SEQ ID NO: 1244979
ggccuucgugcuugcagua

SEQ ID NO: 1527027 - RNA, 19 nt, Artificial Sequence
  Description of Artificial Sequence: Synthetic oligonucleotide
  Antisense strand to SEQ ID NO: 1527026
uacugcaagcacgaaggcc

SEQ ID NO: 1527028 - RNA, 19 nt, Artificial Sequence
  Description of Artificial Sequence: Synthetic oligonucleotide
  Sense strand starting at position 3382 of SEQ ID NO: 1244979
ccuuauauuccaugucuga

SEQ ID NO: 1527029 - RNA, 19 nt, Artificial Sequence
  Description of Artificial Sequence: Synthetic oligonucleotide
  Antisense strand to SEQ ID NO: 1527028
ucagacauggaauauaagg

SEQ ID NO: 1527030 - RNA, 19 nt, Artificial Sequence
  Description of Artificial Sequence: Synthetic oligonucleotide
  Sense strand starting at position 3534 of SEQ ID NO: 1244979
uuaucacuaucuggcguaa

SEQ ID NO: 1527031 - RNA, 19 nt, Artificial Sequence
  Description of Artificial Sequence: Synthetic oligonucleotide
  Antisense strand to SEQ ID NO: 1527030
uuacgccagauagugauaa

SEQ ID NO: 1527032 - RNA, 19 nt, Artificial Sequence
  Description of Artificial Sequence: Synthetic oligonucleotide
  Sense strand starting at position 3536 of SEQ ID NO: 1244979
aucacuaucuggcguaaug

SEQ ID NO: 1527033 - RNA, 19 nt, Artificial Sequence
  Description of Artificial Sequence: Synthetic oligonucleotide
  Antisense strand to SEQ ID NO: 1527032
cauuacgccagauagugau

SEQ ID NO: 1527034 - RNA, 19 nt, Artificial Sequence
  Description of Artificial Sequence: Synthetic oligonucleotide
  Sense strand starting at position 3538 of SEQ ID NO: 1244979
cacuaucuggcguaaugaa

SEQ ID NO: 1527035 - RNA, 19 nt, Artificial Sequence
  Description of Artificial Sequence: Synthetic oligonucleotide
  Antisense strand to SEQ ID NO: 1527034
uucauuacgccagauagug

SEQ ID NO: 1527036 - RNA, 19 nt, Artificial Sequence
  Description of Artificial Sequence: Synthetic oligonucleotide
  Sense strand starting at position 3819 of SEQ ID NO: 1244979
ucaccauguugaucuggaa

SEQ ID NO: 1527037 - RNA, 19 nt, Artificial Sequence
  Description of Artificial Sequence: Synthetic oligonucleotide
  Antisense strand to SEQ ID NO: 1527036
uuccagaucaacaugguga

SEQ ID NO: 1527038 - RNA, 19 nt, Artificial Sequence
  Description of Artificial Sequence: Synthetic oligonucleotide
  Sense strand starting at position 3955 of SEQ ID NO: 1244979
ccaagaggguaaugauauu

SEQ ID NO: 1527039 - RNA, 19 nt, Artificial Sequence
  Description of Artificial Sequence: Synthetic oligonucleotide
  Antisense strand to SEQ ID NO: 1527038
aauaucauuacccucuugg

SEQ ID NO: 1527040 - RNA, 19 nt, Artificial Sequence
  Description of Artificial Sequence: Synthetic oligonucleotide
  Sense strand starting at position 3961 of SEQ ID NO: 1244979
ggguaaugauauugugugu

SEQ ID NO: 1527041 - RNA, 19 nt, Artificial Sequence
  Description of Artificial Sequence: Synthetic oligonucleotide
  Antisense strand to SEQ ID NO: 1527040
acacacaauaucauuaccc

SEQ ID NO: 1527042 - RNA, 19 nt, Artificial Sequence
  Description of Artificial Sequence: Synthetic oligonucleotide
  Sense strand starting at position 1 of SEQ ID NO: 1244980
gcuagagcugaauacaagu

SEQ ID NO: 1527043 - RNA, 19 nt, Artificial Sequence
  Description of Artificial Sequence: Synthetic oligonucleotide
  Antisense strand to SEQ ID NO: 1527042
acuuguauucagcucuagc

SEQ ID NO: 1527044 - RNA, 19 nt, Artificial Sequence
  Description of Artificial Sequence: Synthetic oligonucleotide
  Sense strand starting at position 33 of SEQ ID NO: 1244980
uucucaaugccagguacau

SEQ ID NO: 1527045 - RNA, 19 nt, Artificial Sequence
  Description of Artificial Sequence: Synthetic oligonucleotide
  Antisense strand to SEQ ID NO: 1527044
auguaccuggcauugagaa

SEQ ID NO: 1527046 - RNA, 19 nt, Artificial Sequence
  Description of Artificial Sequence: Synthetic oligonucleotide
  Sense strand starting at position 42 of SEQ ID NO: 1244980
ccagguacaucacuaguau

SEQ ID NO: 1527047 - RNA, 19 nt, Artificial Sequence
  Description of Artificial Sequence: Synthetic oligonucleotide
  Antisense strand to SEQ ID NO: 1527046
auacuagugauguaccugg

SEQ ID NO: 1527048 - RNA, 19 nt, Artificial Sequence
  Description of Artificial Sequence: Synthetic oligonucleotide
  Sense strand starting at position 102 of SEQ ID NO: 1244980
uguaaaucaguuugacuaa

SEQ ID NO: 1527049 - RNA, 19 nt, Artificial Sequence
  Description of Artificial Sequence: Synthetic oligonucleotide
  Antisense strand to SEQ ID NO: 1527048
uuagucaaacugauuuaca

SEQ ID NO: 1527050 - RNA, 19 nt, Artificial Sequence
  Description of Artificial Sequence: Synthetic oligonucleotide
  Sense strand starting at position 186 of SEQ ID NO: 1244980
cccggaaaugacuagccua

SEQ ID NO: 1527051 - RNA, 19 nt, Artificial Sequence
  Description of Artificial Sequence: Synthetic oligonucleotide
  Antisense strand to SEQ ID NO: 1527050
uaggcuagucauuuccggg

SEQ ID NO: 1527052 - RNA, 19 nt, Artificial Sequence
  Description of Artificial Sequence: Synthetic oligonucleotide
  Sense strand starting at position 189 of SEQ ID NO: 1244980
ggaaaugacuagccuacua

SEQ ID NO: 1527053 - RNA, 19 nt, Artificial Sequence
  Description of Artificial Sequence: Synthetic oligonucleotide
  Antisense strand to SEQ ID NO: 1527052
uaguaggcuagucauuucc

SEQ ID NO: 1527054 - RNA, 19 nt, Artificial Sequence
  Description of Artificial Sequence: Synthetic oligonucleotide
  Sense strand starting at position 231 of SEQ ID NO: 1244980
uggaauauuucucauauug

SEQ ID NO: 1527055 - RNA, 19 nt, Artificial Sequence
  Description of Artificial Sequence: Synthetic oligonucleotide
  Antisense strand to SEQ ID NO: 1527054
caauaugagaaauauucca

SEQ ID NO: 1527056 - RNA, 19 nt, Artificial Sequence
  Description of Artificial Sequence: Synthetic oligonucleotide
  Sense strand starting at position 334 of SEQ ID NO: 1244980
aaaggcauaucuguguuau

SEQ ID NO: 1527057 - RNA, 19 nt, Artificial Sequence
  Description of Artificial Sequence: Synthetic oligonucleotide
  Antisense strand to SEQ ID NO: 1527056
auaacacagauaugccuuu

SEQ ID NO: 1527058 - RNA, 19 nt, Artificial Sequence
  Description of Artificial Sequence: Synthetic oligonucleotide
  Sense strand starting at position 706 of SEQ ID NO: 1244980
agacauuccggccauaaac

SEQ ID NO: 1527059 - RNA, 19 nt, Artificial Sequence
  Description of Artificial Sequence: Synthetic oligonucleotide
  Antisense strand to SEQ ID NO: 1527058
guuuauggccggaaugucu

SEQ ID NO: 1527060 - RNA, 19 nt, Artificial Sequence
  Description of Artificial Sequence: Synthetic oligonucleotide
  Sense strand starting at position 715 of SEQ ID NO: 1244980
ggccauaaacugugcaaca

SEQ ID NO: 1527061 - RNA, 19 nt, Artificial Sequence
  Description of Artificial Sequence: Synthetic oligonucleotide
  Antisense strand to SEQ ID NO: 1527060
uguugcacaguuuauggcc

SEQ ID NO: 1527062 - RNA, 19 nt, Artificial Sequence
  Description of Artificial Sequence: Synthetic oligonucleotide
  Sense strand starting at position 716 of SEQ ID NO: 1244980
gccauaaacugugcaacaa

SEQ ID NO: 1527063 - RNA, 19 nt, Artificial Sequence
  Description of Artificial Sequence: Synthetic oligonucleotide
  Antisense strand to SEQ ID NO: 1527062
uuguugcacaguuuauggc

SEQ ID NO: 1527064 - RNA, 19 nt, Artificial Sequence
  Description of Artificial Sequence: Synthetic oligonucleotide
  Sense strand starting at position 753 of SEQ ID NO: 1244980
gugcuuuagugaucaugga

SEQ ID NO: 1527065 - RNA, 19 nt, Artificial Sequence
  Description of Artificial Sequence: Synthetic oligonucleotide
  Antisense strand to SEQ ID NO: 1527064
uccaugaucacuaaagcac

SEQ ID NO: 1527066 - RNA, 19 nt, Artificial Sequence
  Description of Artificial Sequence: Synthetic oligonucleotide
  Sense strand starting at position 754 of SEQ ID NO: 1244980
ugcuuuagugaucauggac

SEQ ID NO: 1527067 - RNA, 19 nt, Artificial Sequence
  Description of Artificial Sequence: Synthetic oligonucleotide
  Antisense strand to SEQ ID NO: 1527066
guccaugaucacuaaagca

SEQ ID NO: 1527068 - RNA, 19 nt, Artificial Sequence
  Description of Artificial Sequence: Synthetic oligonucleotide
  Sense strand starting at position 890 of SEQ ID NO: 1244980
acaauaucugaaugcugga

SEQ ID NO: 1527069 - RNA, 19 nt, Artificial Sequence
  Description of Artificial Sequence: Synthetic oligonucleotide
  Antisense strand to SEQ ID NO: 1527068
uccagcauucagauauugu

SEQ ID NO: 1527070 - RNA, 19 nt, Artificial Sequence
  Description of Artificial Sequence: Synthetic oligonucleotide
  Sense strand starting at position 963 of SEQ ID NO: 1244980
agucaaaggcuuuggucaa

SEQ ID NO: 1527071 - RNA, 19 nt, Artificial Sequence
  Description of Artificial Sequence: Synthetic oligonucleotide
  Antisense strand to SEQ ID NO: 1527070
uugaccaaagccuuugacu

SEQ ID NO: 1527072 - RNA, 19 nt, Artificial Sequence
  Description of Artificial Sequence: Synthetic oligonucleotide
  Sense strand starting at position 1142 of SEQ ID NO: 1244980
aggcauaggcucugggaaa

SEQ ID NO: 1527073 - RNA, 19 nt, Artificial Sequence
  Description of Artificial Sequence: Synthetic oligonucleotide
  Antisense strand to SEQ ID NO: 1527072
uuucccagagccuaugccu

SEQ ID NO: 1527074 - RNA, 19 nt, Artificial Sequence
  Description of Artificial Sequence: Synthetic oligonucleotide
  Sense strand starting at position 1246 of SEQ ID NO: 1244980
gcuguuaggaacgagguua

SEQ ID NO: 1527075 - RNA, 19 nt, Artificial Sequence
  Description of Artificial Sequence: Synthetic oligonucleotide
  Antisense strand to SEQ ID NO: 1527074
uaaccucguuccuaacagc

SEQ ID NO: 1527076 - RNA, 19 nt, Artificial Sequence
  Description of Artificial Sequence: Synthetic oligonucleotide
  Sense strand starting at position 1259 of SEQ ID NO: 1244980
agguuaggauguuauuuga

SEQ ID NO: 1527077 - RNA, 19 nt, Artificial Sequence
  Description of Artificial Sequence: Synthetic oligonucleotide
  Antisense strand to SEQ ID NO: 1527076
ucaaauaacauccuaaccu

SEQ ID NO: 1527078 - RNA, 19 nt, Artificial Sequence
  Description of Artificial Sequence: Synthetic oligonucleotide
  Sense strand starting at position 2389 of SEQ ID NO: 1244980
cggcauauggcucagaaga

SEQ ID NO: 1527079 - RNA, 19 nt, Artificial Sequence
  Description of Artificial Sequence: Synthetic oligonucleotide
  Antisense strand to SEQ ID NO: 1527078
ucuucugagccauaugccg

SEQ ID NO: 1527080 - RNA, 19 nt, Artificial Sequence
  Description of Artificial Sequence: Synthetic oligonucleotide
  Sense strand starting at position 2456 of SEQ ID NO: 1244980
cugggagggcguugugaaa

SEQ ID NO: 1527081 - RNA, 19 nt, Artificial Sequence
  Description of Artificial Sequence: Synthetic oligonucleotide
  Antisense strand to SEQ ID NO: 1527080
uuucacaacgcccucccag

SEQ ID NO: 1527082 - RNA, 19 nt, Artificial Sequence
  Description of Artificial Sequence: Synthetic oligonucleotide
  Sense strand starting at position 2480 of SEQ ID NO: 1244980
ggagaaucucaaggcuuuc

SEQ ID NO: 1527083 - RNA, 19 nt, Artificial Sequence
  Description of Artificial Sequence: Synthetic oligonucleotide
  Antisense strand to SEQ ID NO: 1527082
gaaagccuugagauucucc

SEQ ID NO: 1527084 - RNA, 19 nt, Artificial Sequence
  Description of Artificial Sequence: Synthetic oligonucleotide
  Sense strand starting at position 2490 of SEQ ID NO: 1244980
aaggcuuuccugugacaaa

SEQ ID NO: 1527085 - RNA, 19 nt, Artificial Sequence
  Description of Artificial Sequence: Synthetic oligonucleotide
  Antisense strand to SEQ ID NO: 1527084
uuugucacaggaaagccuu

SEQ ID NO: 1527086 - RNA, 19 nt, Artificial Sequence
  Description of Artificial Sequence: Synthetic oligonucleotide
  Sense strand starting at position 2525 of SEQ ID NO: 1244980
gcgggagaucccugaggaa

SEQ ID NO: 1527087 - RNA, 19 nt, Artificial Sequence
  Description of Artificial Sequence: Synthetic oligonucleotide
  Antisense strand to SEQ ID NO: 1527086
uuccucagggaucucccgc

SEQ ID NO: 1527088 - RNA, 19 nt, Artificial Sequence
  Description of Artificial Sequence: Synthetic oligonucleotide
  Sense strand starting at position 2541 of SEQ ID NO: 1244980
gaaaguggaccuuguuaac

SEQ ID NO: 1527089 - RNA, 19 nt, Artificial Sequence
  Description of Artificial Sequence: Synthetic oligonucleotide
  Antisense strand to SEQ ID NO: 1527088
guuaacaagguccacuuuc

SEQ ID NO: 1527090 - RNA, 19 nt, Artificial Sequence
  Description of Artificial Sequence: Synthetic oligonucleotide
  Sense strand starting at position 2627 of SEQ ID NO: 1244980
uguacacauucucuggaaa

SEQ ID NO: 1527091 - RNA, 19 nt, Artificial Sequence
  Description of Artificial Sequence: Synthetic oligonucleotide
  Antisense strand to SEQ ID NO: 1527090
uuuccagagaauguguaca

SEQ ID NO: 1527092 - RNA, 19 nt, Artificial Sequence
  Description of Artificial Sequence: Synthetic oligonucleotide
  Sense strand starting at position 2628 of SEQ ID NO: 1244980
guacacauucucuggaaag

SEQ ID NO: 1527093 - RNA, 19 nt, Artificial Sequence
  Description of Artificial Sequence: Synthetic oligonucleotide
  Antisense strand to SEQ ID NO: 1527092
cuuuccagagaauguguac

SEQ ID NO: 1527094 - RNA, 19 nt, Artificial Sequence
  Description of Artificial Sequence: Synthetic oligonucleotide
  Sense strand starting at position 2781 of SEQ ID NO: 1244980
gugaguucaguggcguuaa

SEQ ID NO: 1527095 - RNA, 19 nt, Artificial Sequence
  Description of Artificial Sequence: Synthetic oligonucleotide
  Antisense strand to SEQ ID NO: 1527094
uuaacgccacugaacucac

SEQ ID NO: 1527096 - RNA, 19 nt, Artificial Sequence
  Description of Artificial Sequence: Synthetic oligonucleotide
  Sense strand starting at position 2791 of SEQ ID NO: 1244980
uggcguuaagaacauugau

SEQ ID NO: 1527097 - RNA, 19 nt, Artificial Sequence
  Description of Artificial Sequence: Synthetic oligonucleotide
  Antisense strand to SEQ ID NO: 1527096
aucaauguucuuaacgcca

SEQ ID NO: 1527098 - RNA, 19 nt, Artificial Sequence
  Description of Artificial Sequence: Synthetic oligonucleotide
  Sense strand starting at position 2794 of SEQ ID NO: 1244980
cguuaagaacauugauauu

SEQ ID NO: 1527099 - RNA, 19 nt, Artificial Sequence
  Description of Artificial Sequence: Synthetic oligonucleotide
  Antisense strand to SEQ ID NO: 1527098
aauaucaauguucuuaacg

SEQ ID NO: 1527100 - RNA, 19 nt, Artificial Sequence
  Description of Artificial Sequence: Synthetic oligonucleotide
  Sense strand starting at position 2863 of SEQ ID NO: 1244980
aagggaaacucugugccua

SEQ ID NO: 1527101 - RNA, 19 nt, Artificial Sequence
  Description of Artificial Sequence: Synthetic oligonucleotide
  Antisense strand to SEQ ID NO: 1527100
uaggcacagaguuucccuu

SEQ ID NO: 1527102 - RNA, 19 nt, Artificial Sequence
  Description of Artificial Sequence: Synthetic oligonucleotide
  Sense strand starting at position 2864 of SEQ ID NO: 1244980
agggaaacucugugccuau

SEQ ID NO: 1527103 - RNA, 19 nt, Artificial Sequence
  Description of Artificial Sequence: Synthetic oligonucleotide
  Antisense strand to SEQ ID NO: 1527102
auaggcacagaguuucccu

SEQ ID NO: 1527104 - RNA, 19 nt, Artificial Sequence
  Description of Artificial Sequence: Synthetic oligonucleotide
  Sense strand starting at position 2865 of SEQ ID NO: 1244980
gggaaacucugugccuauu

SEQ ID NO: 1527105 - RNA, 19 nt, Artificial Sequence
  Description of Artificial Sequence: Synthetic oligonucleotide
  Antisense strand to SEQ ID NO: 1527104
aauaggcacagaguuuccc

SEQ ID NO: 1527106 - RNA, 19 nt, Artificial Sequence
  Description of Artificial Sequence: Synthetic oligonucleotide
  Sense strand starting at position 2958 of SEQ ID NO: 1244980
aguauuuccucugagugga

SEQ ID NO: 1527107 - RNA, 19 nt, Artificial Sequence
  Description of Artificial Sequence: Synthetic oligonucleotide
  Antisense strand to SEQ ID NO: 1527106
uccacucagaggaaauacu

SEQ ID NO: 1527108 - RNA, 19 nt, Artificial Sequence
  Description of Artificial Sequence: Synthetic oligonucleotide
  Sense strand starting at position 2971 of SEQ ID NO: 1244980
aguggaacucugcagacuu

SEQ ID NO: 1527109 - RNA, 19 nt, Artificial Sequence
  Description of Artificial Sequence: Synthetic oligonucleotide
  Antisense strand to SEQ ID NO: 1527108
aagucugcagaguuccacu

SEQ ID NO: 1527110 - RNA, 19 nt, Artificial Sequence
  Description of Artificial Sequence: Synthetic oligonucleotide
  Sense strand starting at position 3213 of SEQ ID NO: 1244980
guauauguacaguggaauu

SEQ ID NO: 1527111 - RNA, 19 nt, Artificial Sequence
  Description of Artificial Sequence: Synthetic oligonucleotide
  Antisense strand to SEQ ID NO: 1527110
aauuccacuguacauauac

SEQ ID NO: 1527112 - RNA, 19 nt, Artificial Sequence
  Description of Artificial Sequence: Synthetic oligonucleotide
  Sense strand starting at position 3329 of SEQ ID NO: 1244980
aguaaccauuuggauuaga

SEQ ID NO: 1527113 - RNA, 19 nt, Artificial Sequence
  Description of Artificial Sequence: Synthetic oligonucleotide
  Antisense strand to SEQ ID NO: 1527112
ucuaauccaaaugguuacu

SEQ ID NO: 1527114 - RNA, 19 nt, Artificial Sequence
  Description of Artificial Sequence: Synthetic oligonucleotide
  Sense strand starting at position 3869 of SEQ ID NO: 1244980
ucagauuagcugcauuacu

SEQ ID NO: 1527115 - RNA, 19 nt, Artificial Sequence
  Description of Artificial Sequence: Synthetic oligonucleotide
  Antisense strand to SEQ ID NO: 1527114
aguaaugcagcuaaucuga

SEQ ID NO: 1527116 - RNA, 19 nt, Artificial Sequence
  Description of Artificial Sequence: Synthetic oligonucleotide
  Sense strand starting at position 3885 of SEQ ID NO: 1244980
acugaaaggccaugaauca

SEQ ID NO: 1527117 - RNA, 19 nt, Artificial Sequence
  Description of Artificial Sequence: Synthetic oligonucleotide
  Antisense strand to SEQ ID NO: 1527116
ugauucauggccuuucagu

SEQ ID NO: 1527118 - RNA, 19 nt, Artificial Sequence
  Description of Artificial Sequence: Synthetic oligonucleotide
  Sense strand starting at position 3943 of SEQ ID NO: 1244980
ucauuaguucgguauagag

SEQ ID NO: 1527119 - RNA, 19 nt, Artificial Sequence
  Description of Artificial Sequence: Synthetic oligonucleotide
  Antisense strand to SEQ ID NO: 1527118
cucuauaccgaacuaauga

SEQ ID NO: 1527120 - RNA, 19 nt, Artificial Sequence
  Description of Artificial Sequence: Synthetic oligonucleotide
  Sense strand starting at position 3945 of SEQ ID NO: 1244980
auuaguucgguauagagag

SEQ ID NO: 1527121 - RNA, 19 nt, Artificial Sequence
  Description of Artificial Sequence: Synthetic oligonucleotide
  Antisense strand to SEQ ID NO: 1527120
cucucuauaccgaacuaau

SEQ ID NO: 1527122 - RNA, 19 nt, Artificial Sequence
  Description of Artificial Sequence: Synthetic oligonucleotide
  Sense strand starting at position 40 of SEQ ID NO: 1244981
uguuguaaugcacacgaua

SEQ ID NO: 1527123 - RNA, 19 nt, Artificial Sequence
  Description of Artificial Sequence: Synthetic oligonucleotide
  Antisense strand to SEQ ID NO: 1527122
uaucgugugcauuacaaca

SEQ ID NO: 1527124 - RNA, 19 nt, Artificial Sequence
  Description of Artificial Sequence: Synthetic oligonucleotide
  Sense strand starting at position 42 of SEQ ID NO: 1244981
uuguaaugcacacgauaug

SEQ ID NO: 1527125 - RNA, 19 nt, Artificial Sequence
  Description of Artificial Sequence: Synthetic oligonucleotide
  Antisense strand to SEQ ID NO: 1527124
cauaucgugugcauuacaa

SEQ ID NO: 1527126 - RNA, 19 nt, Artificial Sequence
  Description of Artificial Sequence: Synthetic oligonucleotide
  Sense strand starting at position 43 of SEQ ID NO: 1244981
uguaaugcacacgauauga

SEQ ID NO: 1527127 - RNA, 19 nt, Artificial Sequence
  Description of Artificial Sequence: Synthetic oligonucleotide
  Antisense strand to SEQ ID NO: 1527126
ucauaucgugugcauuaca

SEQ ID NO: 1527128 - RNA, 19 nt, Artificial Sequence
  Description of Artificial Sequence: Synthetic oligonucleotide
  Sense strand starting at position 230 of SEQ ID NO: 1244981
aguaauaggaguugccaaa

SEQ ID NO: 1527129 - RNA, 19 nt, Artificial Sequence
  Description of Artificial Sequence: Synthetic oligonucleotide
  Antisense strand to SEQ ID NO: 1527128
uuuggcaacuccuauuacu

SEQ ID NO: 1527130 - RNA, 19 nt, Artificial Sequence
  Description of Artificial Sequence: Synthetic oligonucleotide
  Sense strand starting at position 255 of SEQ ID NO: 1244981
cuuugcuaaguguggauuu

SEQ ID NO: 1527131 - RNA, 19 nt, Artificial Sequence
  Description of Artificial Sequence: Synthetic oligonucleotide
  Antisense strand to SEQ ID NO: 1527130
aaauccacacuuagcaaag

SEQ ID NO: 1527132 - RNA, 19 nt, Artificial Sequence
  Description of Artificial Sequence: Synthetic oligonucleotide
  Sense strand starting at position 290 of SEQ ID NO: 1244981
cuacgaucacuaugauuac

SEQ ID NO: 1527133 - RNA, 19 nt, Artificial Sequence
  Description of Artificial Sequence: Synthetic oligonucleotide
  Antisense strand to SEQ ID NO: 1527132
guaaucauagugaucguag

SEQ ID NO: 1527134 - RNA, 19 nt, Artificial Sequence
  Description of Artificial Sequence: Synthetic oligonucleotide
  Sense strand starting at position 293 of SEQ ID NO: 1244981
cgaucacuaugauuacaua

SEQ ID NO: 1527135 - RNA, 19 nt, Artificial Sequence
  Description of Artificial Sequence: Synthetic oligonucleotide
  Antisense strand to SEQ ID NO: 1527134
uauguaaucauagugaucg

SEQ ID NO: 1527136 - RNA, 19 nt, Artificial Sequence
  Description of Artificial Sequence: Synthetic oligonucleotide
  Sense strand starting at position 525 of SEQ ID NO: 1244981
aggaaaugaucucagaaua

SEQ ID NO: 1527137 - RNA, 19 nt, Artificial Sequence
  Description of Artificial Sequence: Synthetic oligonucleotide
  Antisense strand to SEQ ID NO: 1527136
uauucugagaucauuuccu

SEQ ID NO: 1527138 - RNA, 19 nt, Artificial Sequence
  Description of Artificial Sequence: Synthetic oligonucleotide
  Sense strand starting at position 599 of SEQ ID NO: 1244981
acugcuuucgguuaggacu

SEQ ID NO: 1527139 - RNA, 19 nt, Artificial Sequence
  Description of Artificial Sequence: Synthetic oligonucleotide
  Antisense strand to SEQ ID NO: 1527138
aguccuaaccgaaagcagu

SEQ ID NO: 1527140 - RNA, 19 nt, Artificial Sequence
  Description of Artificial Sequence: Synthetic oligonucleotide
  Sense strand starting at position 633 of SEQ ID NO: 1244981
aggugagaacucugucaug

SEQ ID NO: 1527141 - RNA, 19 nt, Artificial Sequence
  Description of Artificial Sequence: Synthetic oligonucleotide
  Antisense strand to SEQ ID NO: 1527140
caugacagaguucucaccu

SEQ ID NO: 1527142 - RNA, 19 nt, Artificial Sequence
  Description of Artificial Sequence: Synthetic oligonucleotide
  Sense strand starting at position 722 of SEQ ID NO: 1244981
cgagauaaguaacuuugaa

SEQ ID NO: 1527143 - RNA, 19 nt, Artificial Sequence
  Description of Artificial Sequence: Synthetic oligonucleotide
  Antisense strand to SEQ ID NO: 1527142
uucaaaguuacuuaucucg

SEQ ID NO: 1527144 - RNA, 19 nt, Artificial Sequence
  Description of Artificial Sequence: Synthetic oligonucleotide
  Sense strand starting at position 788 of SEQ ID NO: 1244981
ucaagugggacaggucaau

SEQ ID NO: 1527145 - RNA, 19 nt, Artificial Sequence
  Description of Artificial Sequence: Synthetic oligonucleotide
  Antisense strand to SEQ ID NO: 1527144
auugaccugucccacuuga

SEQ ID NO: 1527146 - RNA, 19 nt, Artificial Sequence
  Description of Artificial Sequence: Synthetic oligonucleotide
  Sense strand starting at position 885 of SEQ ID NO: 1244981
cgagacaaguguuccugua

SEQ ID NO: 1527147 - RNA, 19 nt, Artificial Sequence
  Description of Artificial Sequence: Synthetic oligonucleotide
  Antisense strand to SEQ ID NO: 1527146
uacaggaacacuugucucg

SEQ ID NO: 1527148 - RNA, 19 nt, Artificial Sequence
  Description of Artificial Sequence: Synthetic oligonucleotide
  Sense strand starting at position 887 of SEQ ID NO: 1244981
agacaaguguuccuguaau

SEQ ID NO: 1527149 - RNA, 19 nt, Artificial Sequence
  Description of Artificial Sequence: Synthetic oligonucleotide
  Antisense strand to SEQ ID NO: 1527148
auuacaggaacacuugucu

SEQ ID NO: 1527150 - RNA, 19 nt, Artificial Sequence
  Description of Artificial Sequence: Synthetic oligonucleotide
  Sense strand starting at position 1515 of SEQ ID NO: 1244981
cuccgaaguugaccugaau

SEQ ID NO: 1527151 - RNA, 19 nt, Artificial Sequence
  Description of Artificial Sequence: Synthetic oligonucleotide
  Antisense strand to SEQ ID NO: 1527150
auucaggucaacuucggag

SEQ ID NO: 1527152 - RNA, 19 nt, Artificial Sequence
  Description of Artificial Sequence: Synthetic oligonucleotide
  Sense strand starting at position 1518 of SEQ ID NO: 1244981
cgaaguugaccugaauccu

SEQ ID NO: 1527153 - RNA, 19 nt, Artificial Sequence
  Description of Artificial Sequence: Synthetic oligonucleotide
  Antisense strand to SEQ ID NO: 1527152
aggauucaggucaacuucg

SEQ ID NO: 1527154 - RNA, 19 nt, Artificial Sequence
  Description of Artificial Sequence: Synthetic oligonucleotide
  Sense strand starting at position 2034 of SEQ ID NO: 1244981
gggcuagauuccgcuaacu

SEQ ID NO: 1527155 - RNA, 19 nt, Artificial Sequence
  Description of Artificial Sequence: Synthetic oligonucleotide
  Antisense strand to SEQ ID NO: 1527154
aguuagcggaaucuagccc

SEQ ID NO: 1527156 - RNA, 19 nt, Artificial Sequence
  Description of Artificial Sequence: Synthetic oligonucleotide
  Sense strand starting at position 2036 of SEQ ID NO: 1244981
gcuagauuccgcuaacucc

SEQ ID NO: 1527157 - RNA, 19 nt, Artificial Sequence
  Description of Artificial Sequence: Synthetic oligonucleotide
  Antisense strand to SEQ ID NO: 1527156
ggaguuagcggaaucuagc

SEQ ID NO: 1527158 - RNA, 19 nt, Artificial Sequence
  Description of Artificial Sequence: Synthetic oligonucleotide
  Sense strand starting at position 2533 of SEQ ID NO: 1244981
ggaaauggcucuucggaau

SEQ ID NO: 1527159 - RNA, 19 nt, Artificial Sequence
  Description of Artificial Sequence: Synthetic oligonucleotide
  Antisense strand to SEQ ID NO: 1527158
auuccgaagagccauuucc

SEQ ID NO: 1527160 - RNA, 19 nt, Artificial Sequence
  Description of Artificial Sequence: Synthetic oligonucleotide
  Sense strand starting at position 2554 of SEQ ID NO: 1244981
gggaucugagagugugaga

SEQ ID NO: 1527161 - RNA, 19 nt, Artificial Sequence
  Description of Artificial Sequence: Synthetic oligonucleotide
  Antisense strand to SEQ ID NO: 1527160
ucucacacucucagauccc

SEQ ID NO: 1527162 - RNA, 19 nt, Artificial Sequence
  Description of Artificial Sequence: Synthetic oligonucleotide
  Sense strand starting at position 2557 of SEQ ID NO: 1244981
aucugagagugugagauuu

SEQ ID NO: 1527163 - RNA, 19 nt, Artificial Sequence
  Description of Artificial Sequence: Synthetic oligonucleotide
  Antisense strand to SEQ ID NO: 1527162
aaaucucacacucucagau

SEQ ID NO: 1527164 - RNA, 19 nt, Artificial Sequence
  Description of Artificial Sequence: Synthetic oligonucleotide
  Sense strand starting at position 2559 of SEQ ID NO: 1244981
cugagagugugagauuuga

SEQ ID NO: 1527165 - RNA, 19 nt, Artificial Sequence
  Description of Artificial Sequence: Synthetic oligonucleotide
  Antisense strand to SEQ ID NO: 1527164
ucaaaucucacacucucag

SEQ ID NO: 1527166 - RNA, 19 nt, Artificial Sequence
  Description of Artificial Sequence: Synthetic oligonucleotide
  Sense strand starting at position 2666 of SEQ ID NO: 1244981
agcugaguauuugugagca

SEQ ID NO: 1527167 - RNA, 19 nt, Artificial Sequence
  Description of Artificial Sequence: Synthetic oligonucleotide
  Antisense strand to SEQ ID NO: 1527166
ugcucacaaauacucagcu

SEQ ID NO: 1527168 - RNA, 19 nt, Artificial Sequence
  Description of Artificial Sequence: Synthetic oligonucleotide
  Sense strand starting at position 2670 of SEQ ID NO: 1244981
gaguauuugugagcacgua

SEQ ID NO: 1527169 - RNA, 19 nt, Artificial Sequence
  Description of Artificial Sequence: Synthetic oligonucleotide
  Antisense strand to SEQ ID NO: 1527168
uacgugcucacaaauacuc

SEQ ID NO: 1527170 - RNA, 19 nt, Artificial Sequence
  Description of Artificial Sequence: Synthetic oligonucleotide
  Sense strand starting at position 2671 of SEQ ID NO: 1244981
aguauuugugagcacguau

SEQ ID NO: 1527171 - RNA, 19 nt, Artificial Sequence
  Description of Artificial Sequence: Synthetic oligonucleotide
  Antisense strand to SEQ ID NO: 1527170
auacgugcucacaaauacu

SEQ ID NO: 1527172 - RNA, 19 nt, Artificial Sequence
  Description of Artificial Sequence: Synthetic oligonucleotide
  Sense strand starting at position 2909 of SEQ ID NO: 1244981
ggugaagucacagguaaac

SEQ ID NO: 1527173 - RNA, 19 nt, Artificial Sequence
  Description of Artificial Sequence: Synthetic oligonucleotide
  Antisense strand to SEQ ID NO: 1527172
guuuaccugugacuucacc

SEQ ID NO: 1527174 - RNA, 19 nt, Artificial Sequence
  Description of Artificial Sequence: Synthetic oligonucleotide
  Sense strand starting at position 2994 of SEQ ID NO: 1244981
gcuagauguacuuggaaca

SEQ ID NO: 1527175 - RNA, 19 nt, Artificial Sequence
  Description of Artificial Sequence: Synthetic oligonucleotide
  Antisense strand to SEQ ID NO: 1527174
uguuccaaguacaucuagc

SEQ ID NO: 1527176 - RNA, 19 nt, Artificial Sequence
  Description of Artificial Sequence: Synthetic oligonucleotide
  Sense strand starting at position 2995 of SEQ ID NO: 1244981
cuagauguacuuggaacaa

SEQ ID NO: 1527177 - RNA, 19 nt, Artificial Sequence
  Description of Artificial Sequence: Synthetic oligonucleotide
  Antisense strand to SEQ ID NO: 1527176
uuguuccaaguacaucuag

SEQ ID NO: 1527178 - RNA, 19 nt, Artificial Sequence
  Description of Artificial Sequence: Synthetic oligonucleotide
  Sense strand starting at position 3073 of SEQ ID NO: 1244981
accauauuagucugaugcu

SEQ ID NO: 1527179 - RNA, 19 nt, Artificial Sequence
  Description of Artificial Sequence: Synthetic oligonucleotide
  Antisense strand to SEQ ID NO: 1527178
agcaucagacuaauauggu

SEQ ID NO: 1527180 - RNA, 19 nt, Artificial Sequence
  Description of Artificial Sequence: Synthetic oligonucleotide
  Sense strand starting at position 3080 of SEQ ID NO: 1244981
uagucugaugcugagacua

SEQ ID NO: 1527181 - RNA, 19 nt, Artificial Sequence
  Description of Artificial Sequence: Synthetic oligonucleotide
  Antisense strand to SEQ ID NO: 1527180
uagucucagcaucagacua

SEQ ID NO: 1527182 - RNA, 19 nt, Artificial Sequence
  Description of Artificial Sequence: Synthetic oligonucleotide
  Sense strand starting at position 3092 of SEQ ID NO: 1244981
gagacuaugcccuaucugu

SEQ ID NO: 1527183 - RNA, 19 nt, Artificial Sequence
  Description of Artificial Sequence: Synthetic oligonucleotide
  Antisense strand to SEQ ID NO: 1527182
acagauagggcauagucuc

SEQ ID NO: 1527184 - RNA, 19 nt, Artificial Sequence
  Description of Artificial Sequence: Synthetic oligonucleotide
  Sense strand starting at position 3098 of SEQ ID NO: 1244981
augcccuaucuguaagaau

SEQ ID NO: 1527185 - RNA, 19 nt, Artificial Sequence
  Description of Artificial Sequence: Synthetic oligonucleotide
  Antisense strand to SEQ ID NO: 1527184
auucuuacagauagggcau

SEQ ID NO: 1527186 - RNA, 19 nt, Artificial Sequence
  Description of Artificial Sequence: Synthetic oligonucleotide
  Sense strand starting at position 3107 of SEQ ID NO: 1244981
cuguaagaauccuugggcu

SEQ ID NO: 1527187 - RNA, 19 nt, Artificial Sequence
  Description of Artificial Sequence: Synthetic oligonucleotide
  Antisense strand to SEQ ID NO: 1527186
agcccaaggauucuuacag

SEQ ID NO: 1527188 - RNA, 19 nt, Artificial Sequence
  Description of Artificial Sequence: Synthetic oligonucleotide
  Sense strand starting at position 3696 of SEQ ID NO: 1244981
agagcaauacuuggucuaa

SEQ ID NO: 1527189 - RNA, 19 nt, Artificial Sequence
  Description of Artificial Sequence: Synthetic oligonucleotide
  Antisense strand to SEQ ID NO: 1527188
uuagaccaaguauugcucu

SEQ ID NO: 1527190 - RNA, 19 nt, Artificial Sequence
  Description of Artificial Sequence: Synthetic oligonucleotide
  Sense strand starting at position 3697 of SEQ ID NO: 1244981
gagcaauacuuggucuaaa

SEQ ID NO: 1527191 - RNA, 19 nt, Artificial Sequence
  Description of Artificial Sequence: Synthetic oligonucleotide
  Antisense strand to SEQ ID NO: 1527190
uuuagaccaaguauugcuc

SEQ ID NO: 1527192 - RNA, 19 nt, Artificial Sequence
  Description of Artificial Sequence: Synthetic oligonucleotide
  Sense strand starting at position 3742 of SEQ ID NO: 1244981
uaggucucucacgaaauua

SEQ ID NO: 1527193 - RNA, 19 nt, Artificial Sequence
  Description of Artificial Sequence: Synthetic oligonucleotide
  Antisense strand to SEQ ID NO: 1527192
uaauuucgugagagaccua

SEQ ID NO: 1527194 - RNA, 19 nt, Artificial Sequence
  Description of Artificial Sequence: Synthetic oligonucleotide
  Sense strand starting at position 3750 of SEQ ID NO: 1244981
ucacgaaauuagcccaaau

SEQ ID NO: 1527195 - RNA, 19 nt, Artificial Sequence
  Description of Artificial Sequence: Synthetic oligonucleotide
  Antisense strand to SEQ ID NO: 1527194
auuugggcuaauuucguga

SEQ ID NO: 1527196 - RNA, 19 nt, Artificial Sequence
  Description of Artificial Sequence: Synthetic oligonucleotide
  Sense strand starting at position 3752 of SEQ ID NO: 1244981
acgaaauuagcccaaaucu

SEQ ID NO: 1527197 - RNA, 19 nt, Artificial Sequence
  Description of Artificial Sequence: Synthetic oligonucleotide
  Antisense strand to SEQ ID NO: 1527196
agauuugggcuaauuucgu

SEQ ID NO: 1527198 - RNA, 19 nt, Artificial Sequence
  Description of Artificial Sequence: Synthetic oligonucleotide
  Sense strand starting at position 3778 of SEQ ID NO: 1244981
ucuucuacaggcugugaaa

SEQ ID NO: 1527199 - RNA, 19 nt, Artificial Sequence
  Description of Artificial Sequence: Synthetic oligonucleotide
  Antisense strand to SEQ ID NO: 1527198
uuucacagccuguagaaga

SEQ ID NO: 1527200 - RNA, 19 nt, Artificial Sequence
  Description of Artificial Sequence: Synthetic oligonucleotide
  Sense strand starting at position 3929 of SEQ ID NO: 1244981
gguuacagcuuucuauaac

SEQ ID NO: 1527201 - RNA, 19 nt, Artificial Sequence
  Description of Artificial Sequence: Synthetic oligonucleotide
  Antisense strand to SEQ ID NO: 1527200
guuauagaaagcuguaacc

SEQ ID NO: 1527202 - RNA, 19 nt, Artificial Sequence
  Description of Artificial Sequence: Synthetic oligonucleotide
  Sense strand starting at position 39 of SEQ ID NO: 1244982
guaccauuaugguucuaua

SEQ ID NO: 1527203 - RNA, 19 nt, Artificial Sequence
  Description of Artificial Sequence: Synthetic oligonucleotide
  Antisense strand to SEQ ID NO: 1527202
uauagaaccauaaugguac

SEQ ID NO: 1527204 - RNA, 19 nt, Artificial Sequence
  Description of Artificial Sequence: Synthetic oligonucleotide
  Sense strand starting at position 185 of SEQ ID NO: 1244982
agagacauuuagugacaac

SEQ ID NO: 1527205 - RNA, 19 nt, Artificial Sequence
  Description of Artificial Sequence: Synthetic oligonucleotide
  Antisense strand to SEQ ID NO: 1527204
guugucacuaaaugucucu

SEQ ID NO: 1527206 - RNA, 19 nt, Artificial Sequence
  Description of Artificial Sequence: Synthetic oligonucleotide
  Sense strand starting at position 272 of SEQ ID NO: 1244982
uggcaucucaugggucaca

SEQ ID NO: 1527207 - RNA, 19 nt, Artificial Sequence
  Description of Artificial Sequence: Synthetic oligonucleotide
  Antisense strand to SEQ ID NO: 1527206
ugugacccaugagaugcca

SEQ ID NO: 1527208 - RNA, 19 nt, Artificial Sequence
  Description of Artificial Sequence: Synthetic oligonucleotide
  Sense strand starting at position 487 of SEQ ID NO: 1244982
agccaugugcaucaauuau

SEQ ID NO: 1527209 - RNA, 19 nt, Artificial Sequence
  Description of Artificial Sequence: Synthetic oligonucleotide
  Antisense strand to SEQ ID NO: 1527208
auaauugaugcacauggcu

SEQ ID NO: 1527210 - RNA, 19 nt, Artificial Sequence
  Description of Artificial Sequence: Synthetic oligonucleotide
  Sense strand starting at position 493 of SEQ ID NO: 1244982
gugcaucaauuaucaggaa

SEQ ID NO: 1527211 - RNA, 19 nt, Artificial Sequence
  Description of Artificial Sequence: Synthetic oligonucleotide
  Antisense strand to SEQ ID NO: 1527210
uuccugauaauugaugcac

SEQ ID NO: 1527212 - RNA, 19 nt, Artificial Sequence
  Description of Artificial Sequence: Synthetic oligonucleotide
  Sense strand starting at position 505 of SEQ ID NO: 1244982
ucaggaacgcuuuaaucca

SEQ ID NO: 1527213 - RNA, 19 nt, Artificial Sequence
  Description of Artificial Sequence: Synthetic oligonucleotide
  Antisense strand to SEQ ID NO: 1527212
uggauuaaagcguuccuga

SEQ ID NO: 1527214 - RNA, 19 nt, Artificial Sequence
  Description of Artificial Sequence: Synthetic oligonucleotide
  Sense strand starting at position 610 of SEQ ID NO: 1244982
gaguaaguagaccgugauc

SEQ ID NO: 1527215 - RNA, 19 nt, Artificial Sequence
  Description of Artificial Sequence: Synthetic oligonucleotide
  Antisense strand to SEQ ID NO: 1527214
gaucacggucuacuuacuc

SEQ ID NO: 1527216 - RNA, 19 nt, Artificial Sequence
  Description of Artificial Sequence: Synthetic oligonucleotide
  Sense strand starting at position 622 of SEQ ID NO: 1244982
cgugaucuugcagacaaua

SEQ ID NO: 1527217 - RNA, 19 nt, Artificial Sequence
  Description of Artificial Sequence: Synthetic oligonucleotide
  Antisense strand to SEQ ID NO: 1527216
uauugucugcaagaucacg

SEQ ID NO: 1527218 - RNA, 19 nt, Artificial Sequence
  Description of Artificial Sequence: Synthetic oligonucleotide
  Sense strand starting at position 643 of SEQ ID NO: 1244982
augcaagcccgugcucaua

SEQ ID NO: 1527219 - RNA, 19 nt, Artificial Sequence
  Description of Artificial Sequence: Synthetic oligonucleotide
  Antisense strand to SEQ ID NO: 1527218
uaugagcacgggcuugcau

SEQ ID NO: 1527220 - RNA, 19 nt, Artificial Sequence
  Description of Artificial Sequence: Synthetic oligonucleotide
  Sense strand starting at position 670 of SEQ ID NO: 1244982
gggauugaaugcgccuuaa

SEQ ID NO: 1527221 - RNA, 19 nt, Artificial Sequence
  Description of Artificial Sequence: Synthetic oligonucleotide
  Antisense strand to SEQ ID NO: 1527220
uuaaggcgcauucaauccc

SEQ ID NO: 1527222 - RNA, 19 nt, Artificial Sequence
  Description of Artificial Sequence: Synthetic oligonucleotide
  Sense strand starting at position 674 of SEQ ID NO: 1244982
uugaaugcgccuuaaacaa

SEQ ID NO: 1527223 - RNA, 19 nt, Artificial Sequence
  Description of Artificial Sequence: Synthetic oligonucleotide
  Antisense strand to SEQ ID NO: 1527222
uuguuuaaggcgcauucaa

SEQ ID NO: 1527224 - RNA, 19 nt, Artificial Sequence
  Description of Artificial Sequence: Synthetic oligonucleotide
  Sense strand starting at position 826 of SEQ ID NO: 1244982
acgugaucuggcgaaacuc

SEQ ID NO: 1527225 - RNA, 19 nt, Artificial Sequence
  Description of Artificial Sequence: Synthetic oligonucleotide
  Antisense strand to SEQ ID NO: 1527224
gaguuucgccagaucacgu

SEQ ID NO: 1527226 - RNA, 19 nt, Artificial Sequence
  Description of Artificial Sequence: Synthetic oligonucleotide
  Sense strand starting at position 945 of SEQ ID NO: 1244982
ggauuaguccuacagcuug

SEQ ID NO: 1527227 - RNA, 19 nt, Artificial Sequence
  Description of Artificial Sequence: Synthetic oligonucleotide
  Antisense strand to SEQ ID NO: 1527226
caagcuguaggacuaaucc

SEQ ID NO: 1527228 - RNA, 19 nt, Artificial Sequence
  Description of Artificial Sequence: Synthetic oligonucleotide
  Sense strand starting at position 1080 of SEQ ID NO: 1244982
uagagcuggcauuagaaca

SEQ ID NO: 1527229 - RNA, 19 nt, Artificial Sequence
  Description of Artificial Sequence: Synthetic oligonucleotide
  Antisense strand to SEQ ID NO: 1527228
uguucuaaugccagcucua

SEQ ID NO: 1527230 - RNA, 19 nt, Artificial Sequence
  Description of Artificial Sequence: Synthetic oligonucleotide
  Sense strand starting at position 1244 of SEQ ID NO: 1244982
gcguaacacaucgacucaa

SEQ ID NO: 1527231 - RNA, 19 nt, Artificial Sequence
  Description of Artificial Sequence: Synthetic oligonucleotide
  Antisense strand to SEQ ID NO: 1527230
uugagucgauguguuacgc

SEQ ID NO: 1527232 - RNA, 19 nt, Artificial Sequence
  Description of Artificial Sequence: Synthetic oligonucleotide
  Sense strand starting at position 2282 of SEQ ID NO: 1244982
ucugaaagcgccuaguaaa

SEQ ID NO: 1527233 - RNA, 19 nt, Artificial Sequence
  Description of Artificial Sequence: Synthetic oligonucleotide
  Antisense strand to SEQ ID NO: 1527232
uuuacuaggcgcuuucaga

SEQ ID NO: 1527234 - RNA, 19 nt, Artificial Sequence
  Description of Artificial Sequence: Synthetic oligonucleotide
  Sense strand starting at position 2340 of SEQ ID NO: 1244982
caggcaucuccagagcaca

SEQ ID NO: 1527235 - RNA, 19 nt, Artificial Sequence
  Description of Artificial Sequence: Synthetic oligonucleotide
  Antisense strand to SEQ ID NO: 1527234
ugugcucuggagaugccug

SEQ ID NO: 1527236 - RNA, 19 nt, Artificial Sequence
  Description of Artificial Sequence: Synthetic oligonucleotide
  Sense strand starting at position 2548 of SEQ ID NO: 1244982
ccacguguugcccugugaa

SEQ ID NO: 1527237 - RNA, 19 nt, Artificial Sequence
  Description of Artificial Sequence: Synthetic oligonucleotide
  Antisense strand to SEQ ID NO: 1527236
uucacagggcaacacgugg

SEQ ID NO: 1527238 - RNA, 19 nt, Artificial Sequence
  Description of Artificial Sequence: Synthetic oligonucleotide
  Sense strand starting at position 2638 of SEQ ID NO: 1244982
gcaagacuugaucacccuu

SEQ ID NO: 1527239 - RNA, 19 nt, Artificial Sequence
  Description of Artificial Sequence: Synthetic oligonucleotide
  Antisense strand to SEQ ID NO: 1527238
aagggugaucaagucuugc

SEQ ID NO: 1527240 - RNA, 19 nt, Artificial Sequence
  Description of Artificial Sequence: Synthetic oligonucleotide
  Sense strand starting at position 2656 of SEQ ID NO: 1244982
ugcuuuaaucggcaaggaa

SEQ ID NO: 1527241 - RNA, 19 nt, Artificial Sequence
  Description of Artificial Sequence: Synthetic oligonucleotide
  Antisense strand to SEQ ID NO: 1527240
uuccuugccgauuaaagca

SEQ ID NO: 1527242 - RNA, 19 nt, Artificial Sequence
  Description of Artificial Sequence: Synthetic oligonucleotide
  Sense strand starting at position 2735 of SEQ ID NO: 1244982
ggaacucgaccuggaucua

SEQ ID NO: 1527243 - RNA, 19 nt, Artificial Sequence
  Description of Artificial Sequence: Synthetic oligonucleotide
  Antisense strand to SEQ ID NO: 1527242
uagauccaggucgaguucc

SEQ ID NO: 1527244 - RNA, 19 nt, Artificial Sequence
  Description of Artificial Sequence: Synthetic oligonucleotide
  Sense strand starting at position 2790 of SEQ ID NO: 1244982
uuugcuaaccaggaaguuu

SEQ ID NO: 1527245 - RNA, 19 nt, Artificial Sequence
  Description of Artificial Sequence: Synthetic oligonucleotide
  Antisense strand to SEQ ID NO: 1527244
aaacuuccugguuagcaaa

SEQ ID NO: 1527246 - RNA, 19 nt, Artificial Sequence
  Description of Artificial Sequence: Synthetic oligonucleotide
  Sense strand starting at position 2860 of SEQ ID NO: 1244982
acgauccuuguugaaugau

SEQ ID NO: 1527247 - RNA, 19 nt, Artificial Sequence
  Description of Artificial Sequence: Synthetic oligonucleotide
  Antisense strand to SEQ ID NO: 1527246
aucauucaacaaggaucgu

SEQ ID NO: 1527248 - RNA, 19 nt, Artificial Sequence
  Description of Artificial Sequence: Synthetic oligonucleotide
  Sense strand starting at position 2869 of SEQ ID NO: 1244982
guugaaugauugcccaauc

SEQ ID NO: 1527249 - RNA, 19 nt, Artificial Sequence
  Description of Artificial Sequence: Synthetic oligonucleotide
  Antisense strand to SEQ ID NO: 1527248
gauugggcaaucauucaac

SEQ ID NO: 1527250 - RNA, 19 nt, Artificial Sequence
  Description of Artificial Sequence: Synthetic oligonucleotide
  Sense strand starting at position 2870 of SEQ ID NO: 1244982
uugaaugauugcccaauca

SEQ ID NO: 1527251 - RNA, 19 nt, Artificial Sequence
  Description of Artificial Sequence: Synthetic oligonucleotide
  Antisense strand to SEQ ID NO: 1527250
ugauugggcaaucauucaa

SEQ ID NO: 1527252 - RNA, 19 nt, Artificial Sequence
  Description of Artificial Sequence: Synthetic oligonucleotide
  Sense strand starting at position 2886 of SEQ ID NO: 1244982
ucagaauuaguuuggccuu

SEQ ID NO: 1527253 - RNA, 19 nt, Artificial Sequence
  Description of Artificial Sequence: Synthetic oligonucleotide
  Antisense strand to SEQ ID NO: 1527252
aaggccaaacuaauucuga

SEQ ID NO: 1527254 - RNA, 19 nt, Artificial Sequence
  Description of Artificial Sequence: Synthetic oligonucleotide
  Sense strand starting at position 2912 of SEQ ID NO: 1244982
ccuugauucccuggguaac

SEQ ID NO: 1527255 - RNA, 19 nt, Artificial Sequence
  Description of Artificial Sequence: Synthetic oligonucleotide
  Antisense strand to SEQ ID NO: 1527254
guuacccagggaaucaagg

SEQ ID NO: 1527256 - RNA, 19 nt, Artificial Sequence
  Description of Artificial Sequence: Synthetic oligonucleotide
  Sense strand starting at position 2977 of SEQ ID NO: 1244982
guuuauaauuaaucaggca

SEQ ID NO: 1527257 - RNA, 19 nt, Artificial Sequence
  Description of Artificial Sequence: Synthetic oligonucleotide
  Antisense strand to SEQ ID NO: 1527256
ugccugauuaauuauaaac

SEQ ID NO: 1527258 - RNA, 19 nt, Artificial Sequence
  Description of Artificial Sequence: Synthetic oligonucleotide
  Sense strand starting at position 3040 of SEQ ID NO: 1244982
agaucagcaccaugugaga

SEQ ID NO: 1527259 - RNA, 19 nt, Artificial Sequence
  Description of Artificial Sequence: Synthetic oligonucleotide
  Antisense strand to SEQ ID NO: 1527258
ucucacauggugcugaucu

SEQ ID NO: 1527260 - RNA, 19 nt, Artificial Sequence
  Description of Artificial Sequence: Synthetic oligonucleotide
  Sense strand starting at position 3049 of SEQ ID NO: 1244982
ccaugugagaugcaguauu

SEQ ID NO: 1527261 - RNA, 19 nt, Artificial Sequence
  Description of Artificial Sequence: Synthetic oligonucleotide
  Antisense strand to SEQ ID NO: 1527260
aauacugcaucucacaugg

SEQ ID NO: 1527262 - RNA, 19 nt, Artificial Sequence
  Description of Artificial Sequence: Synthetic oligonucleotide
  Sense strand starting at position 3065 of SEQ ID NO: 1244982
auucuaacgcucugaaaug

SEQ ID NO: 1527263 - RNA, 19 nt, Artificial Sequence
  Description of Artificial Sequence: Synthetic oligonucleotide
  Antisense strand to SEQ ID NO: 1527262
cauuucagagcguuagaau

SEQ ID NO: 1527264 - RNA, 19 nt, Artificial Sequence
  Description of Artificial Sequence: Synthetic oligonucleotide
  Sense strand starting at position 3090 of SEQ ID NO: 1244982
guuguuuaauaagugauca

SEQ ID NO: 1527265 - RNA, 19 nt, Artificial Sequence
  Description of Artificial Sequence: Synthetic oligonucleotide
  Antisense strand to SEQ ID NO: 1527264
ugaucacuuauuaaacaac

SEQ ID NO: 1527266 - RNA, 19 nt, Artificial Sequence
  Description of Artificial Sequence: Synthetic oligonucleotide
  Sense strand starting at position 3715 of SEQ ID NO: 1244982
uuugguaauuguccugaga

SEQ ID NO: 1527267 - RNA, 19 nt, Artificial Sequence
  Description of Artificial Sequence: Synthetic oligonucleotide
  Antisense strand to SEQ ID NO: 1527266
ucucaggacaauuaccaaa

SEQ ID NO: 1527268 - RNA, 19 nt, Artificial Sequence
  Description of Artificial Sequence: Synthetic oligonucleotide
  Sense strand starting at position 3718 of SEQ ID NO: 1244982
gguaauuguccugagaucc

SEQ ID NO: 1527269 - RNA, 19 nt, Artificial Sequence
  Description of Artificial Sequence: Synthetic oligonucleotide
  Antisense strand to SEQ ID NO: 1527268
ggaucucaggacaauuacc

SEQ ID NO: 1527270 - RNA, 19 nt, Artificial Sequence
  Description of Artificial Sequence: Synthetic oligonucleotide
  Sense strand starting at position 3790 of SEQ ID NO: 1244982
aggaauucugccgaugcuu

SEQ ID NO: 1527271 - RNA, 19 nt, Artificial Sequence
  Description of Artificial Sequence: Synthetic oligonucleotide
  Antisense strand to SEQ ID NO: 1527270
aagcaucggcagaauuccu

SEQ ID NO: 1527272 - RNA, 19 nt, Artificial Sequence
  Description of Artificial Sequence: Synthetic oligonucleotide
  Sense strand starting at position 3808 of SEQ ID NO: 1244982
uuaguacauuagucacuua

SEQ ID NO: 1527273 - RNA, 19 nt, Artificial Sequence
  Description of Artificial Sequence: Synthetic oligonucleotide
  Antisense strand to SEQ ID NO: 1527272
uaagugacuaauguacuaa

SEQ ID NO: 1527274 - RNA, 19 nt, Artificial Sequence
  Description of Artificial Sequence: Synthetic oligonucleotide
  Sense strand starting at position 3811 of SEQ ID NO: 1244982
guacauuagucacuuaauu

SEQ ID NO: 1527275 - RNA, 19 nt, Artificial Sequence
  Description of Artificial Sequence: Synthetic oligonucleotide
  Antisense strand to SEQ ID NO: 1527274
aauuaagugacuaauguac

SEQ ID NO: 1527276 - RNA, 19 nt, Artificial Sequence
  Description of Artificial Sequence: Synthetic oligonucleotide
  Sense strand starting at position 3922 of SEQ ID NO: 1244982
ggauuuaaaucugagucua

SEQ ID NO: 1527277 - RNA, 19 nt, Artificial Sequence
  Description of Artificial Sequence: Synthetic oligonucleotide
  Antisense strand to SEQ ID NO: 1527276
uagacucagauuuaaaucc

SEQ ID NO: 1527278 - RNA, 19 nt, Artificial Sequence
  Description of Artificial Sequence: Synthetic oligonucleotide
  Sense strand starting at position 3930 of SEQ ID NO: 1244982
aucugagucuagucccaua

SEQ ID NO: 1527279 - RNA, 19 nt, Artificial Sequence
  Description of Artificial Sequence: Synthetic oligonucleotide
  Antisense strand to SEQ ID NO: 1527278
uaugggacuagacucagau

SEQ ID NO: 1527280 - RNA, 19 nt, Artificial Sequence
  Description of Artificial Sequence: Synthetic oligonucleotide
  Sense strand starting at position 3935 of SEQ ID NO: 1244982
agucuagucccauauagcu

SEQ ID NO: 1527281 - RNA, 19 nt, Artificial Sequence
  Description of Artificial Sequence: Synthetic oligonucleotide
  Antisense strand to SEQ ID NO: 1527280
agcuauaugggacuagacu

SEQ ID NO: 1527282 - RNA, 19 nt, Artificial Sequence
  Description of Artificial Sequence: Synthetic oligonucleotide
  Sense strand starting at position 62 of SEQ ID NO: 1244983
ccgacagcuucggagaaca

SEQ ID NO: 1527283 - RNA, 19 nt, Artificial Sequence
  Description of Artificial Sequence: Synthetic oligonucleotide
  Antisense strand to SEQ ID NO: 1527282
uguucuccgaagcugucgg

SEQ ID NO: 1527284 - RNA, 19 nt, Artificial Sequence
  Description of Artificial Sequence: Synthetic oligonucleotide
  Sense strand starting at position 2101 of SEQ ID NO: 1244983
agaggaucaugugcggaaa

SEQ ID NO: 1527285 - RNA, 19 nt, Artificial Sequence
  Description of Artificial Sequence: Synthetic oligonucleotide
  Antisense strand to SEQ ID NO: 1527284
uuuccgcacaugauccucu

SEQ ID NO: 1527286 - RNA, 19 nt, Artificial Sequence
  Description of Artificial Sequence: Synthetic oligonucleotide
  Sense strand starting at position 2103 of SEQ ID NO: 1244983
aggaucaugugcggaaagu

SEQ ID NO: 1527287 - RNA, 19 nt, Artificial Sequence
  Description of Artificial Sequence: Synthetic oligonucleotide
  Antisense strand to SEQ ID NO: 1527286
acuuuccgcacaugauccu

SEQ ID NO: 1527288 - RNA, 19 nt, Artificial Sequence
  Description of Artificial Sequence: Synthetic oligonucleotide
  Sense strand starting at position 2104 of SEQ ID NO: 1244983
ggaucaugugcggaaagug

SEQ ID NO: 1527289 - RNA, 19 nt, Artificial Sequence
  Description of Artificial Sequence: Synthetic oligonucleotide
  Antisense strand to SEQ ID NO: 1527288
cacuuuccgcacaugaucc

SEQ ID NO: 1527290 - RNA, 19 nt, Artificial Sequence
  Description of Artificial Sequence: Synthetic oligonucleotide
  Sense strand starting at position 2257 of SEQ ID NO: 1244983
gggcuuugaccugggcuua

SEQ ID NO: 1527291 - RNA, 19 nt, Artificial Sequence
  Description of Artificial Sequence: Synthetic oligonucleotide
  Antisense strand to SEQ ID NO: 1527290
uaagcccaggucaaagccc

SEQ ID NO: 1527292 - RNA, 19 nt, Artificial Sequence
  Description of Artificial Sequence: Synthetic oligonucleotide
  Sense strand starting at position 2299 of SEQ ID NO: 1244983
agucucaaguccugagaca

SEQ ID NO: 1527293 - RNA, 19 nt, Artificial Sequence
  Description of Artificial Sequence: Synthetic oligonucleotide
  Antisense strand to SEQ ID NO: 1527292
ugucucaggacuugagacu

SEQ ID NO: 1527294 - RNA, 19 nt, Artificial Sequence
  Description of Artificial Sequence: Synthetic oligonucleotide
  Sense strand starting at position 2475 of SEQ ID NO: 1244983
aaacaaaucggaugguugu

SEQ ID NO: 1527295 - RNA, 19 nt, Artificial Sequence
  Description of Artificial Sequence: Synthetic oligonucleotide
  Antisense strand to SEQ ID NO: 1527294
acaaccauccgauuuguuu

SEQ ID NO: 1527296 - RNA, 19 nt, Artificial Sequence
  Description of Artificial Sequence: Synthetic oligonucleotide
  Sense strand starting at position 2485 of SEQ ID NO: 1244983
gaugguugucucuacugaa

SEQ ID NO: 1527297 - RNA, 19 nt, Artificial Sequence
  Description of Artificial Sequence: Synthetic oligonucleotide
  Antisense strand to SEQ ID NO: 1527296
uucaguagagacaaccauc

SEQ ID NO: 1527298 - RNA, 19 nt, Artificial Sequence
  Description of Artificial Sequence: Synthetic oligonucleotide
  Sense strand starting at position 2488 of SEQ ID NO: 1244983
gguugucucuacugaacau

SEQ ID NO: 1527299 - RNA, 19 nt, Artificial Sequence
  Description of Artificial Sequence: Synthetic oligonucleotide
  Antisense strand to SEQ ID NO: 1527298
auguucaguagagacaacc

SEQ ID NO: 1527300 - RNA, 19 nt, Artificial Sequence
  Description of Artificial Sequence: Synthetic oligonucleotide
  Sense strand starting at position 2511 of SEQ ID NO: 1244983
agacguuguucuugucauc

SEQ ID NO: 1527301 - RNA, 19 nt, Artificial Sequence
  Description of Artificial Sequence: Synthetic oligonucleotide
  Antisense strand to SEQ ID NO: 1527300
gaugacaagaacaacgucu

SEQ ID NO: 1527302 - RNA, 19 nt, Artificial Sequence
  Description of Artificial Sequence: Synthetic oligonucleotide
  Sense strand starting at position 2514 of SEQ ID NO: 1244983
cguuguucuugucaucauu

SEQ ID NO: 1527303 - RNA, 19 nt, Artificial Sequence
  Description of Artificial Sequence: Synthetic oligonucleotide
  Antisense strand to SEQ ID NO: 1527302
aaugaugacaagaacaacg

SEQ ID NO: 1527304 - RNA, 19 nt, Artificial Sequence
  Description of Artificial Sequence: Synthetic oligonucleotide
  Sense strand starting at position 2603 of SEQ ID NO: 1244983
uggucuaauguauacggga

SEQ ID NO: 1527305 - RNA, 19 nt, Artificial Sequence
  Description of Artificial Sequence: Synthetic oligonucleotide
  Antisense strand to SEQ ID NO: 1527304
ucccguauacauuagacca

SEQ ID NO: 1527306 - RNA, 19 nt, Artificial Sequence
  Description of Artificial Sequence: Synthetic oligonucleotide
  Sense strand starting at position 2605 of SEQ ID NO: 1244983
gucuaauguauacgggaga

SEQ ID NO: 1527307 - RNA, 19 nt, Artificial Sequence
  Description of Artificial Sequence: Synthetic oligonucleotide
  Antisense strand to SEQ ID NO: 1527306
ucucccguauacauuagac

SEQ ID NO: 1527308 - RNA, 19 nt, Artificial Sequence
  Description of Artificial Sequence: Synthetic oligonucleotide
  Sense strand starting at position 2606 of SEQ ID NO: 1244983
ucuaauguauacgggagaa

SEQ ID NO: 1527309 - RNA, 19 nt, Artificial Sequence
  Description of Artificial Sequence: Synthetic oligonucleotide
  Antisense strand to SEQ ID NO: 1527308
uucucccguauacauuaga

SEQ ID NO: 1527310 - RNA, 19 nt, Artificial Sequence
  Description of Artificial Sequence: Synthetic oligonucleotide
  Sense strand starting at position 2626 of SEQ ID NO: 1244983
gugcauagcuuauauguaa

SEQ ID NO: 1527311 - RNA, 19 nt, Artificial Sequence
  Description of Artificial Sequence: Synthetic oligonucleotide
  Antisense strand to SEQ ID NO: 1527310
uuacauauaagcuaugcac

SEQ ID NO: 1527312 - RNA, 19 nt, Artificial Sequence
  Description of Artificial Sequence: Synthetic oligonucleotide
  Sense strand starting at position 2637 of SEQ ID NO: 1244983
auauguaaauacuagguca

SEQ ID NO: 1527313 - RNA, 19 nt, Artificial Sequence
  Description of Artificial Sequence: Synthetic oligonucleotide
  Antisense strand to SEQ ID NO: 1527312
ugaccuaguauuuacauau

SEQ ID NO: 1527314 - RNA, 19 nt, Artificial Sequence
  Description of Artificial Sequence: Synthetic oligonucleotide
  Sense strand starting at position 2639 of SEQ ID NO: 1244983
auguaaauacuaggucaug

SEQ ID NO: 1527315 - RNA, 19 nt, Artificial Sequence
  Description of Artificial Sequence: Synthetic oligonucleotide
  Antisense strand to SEQ ID NO: 1527314
caugaccuaguauuuacau

SEQ ID NO: 1527316 - RNA, 19 nt, Artificial Sequence
  Description of Artificial Sequence: Synthetic oligonucleotide
  Sense strand starting at position 2640 of SEQ ID NO: 1244983
uguaaauacuaggucaugu

SEQ ID NO: 1527317 - RNA, 19 nt, Artificial Sequence
  Description of Artificial Sequence: Synthetic oligonucleotide
  Antisense strand to SEQ ID NO: 1527316
acaugaccuaguauuuaca

SEQ ID NO: 1527318 - RNA, 19 nt, Artificial Sequence
  Description of Artificial Sequence: Synthetic oligonucleotide
  Sense strand starting at position 2644 of SEQ ID NO: 1244983
aauacuaggucauguuaug

SEQ ID NO: 1527319 - RNA, 19 nt, Artificial Sequence
  Description of Artificial Sequence: Synthetic oligonucleotide
  Antisense strand to SEQ ID NO: 1527318
cauaacaugaccuaguauu

SEQ ID NO: 1527320 - RNA, 19 nt, Artificial Sequence
  Description of Artificial Sequence: Synthetic oligonucleotide
  Sense strand starting at position 2654 of SEQ ID NO: 1244983
cauguuaugucagcgacuu

SEQ ID NO: 1527321 - RNA, 19 nt, Artificial Sequence
  Description of Artificial Sequence: Synthetic oligonucleotide
  Antisense strand to SEQ ID NO: 1527320
aagucgcugacauaacaug

SEQ ID NO: 1527322 - RNA, 19 nt, Artificial Sequence
  Description of Artificial Sequence: Synthetic oligonucleotide
  Sense strand starting at position 2655 of SEQ ID NO: 1244983
auguuaugucagcgacuug

SEQ ID NO: 1527323 - RNA, 19 nt, Artificial Sequence
  Description of Artificial Sequence: Synthetic oligonucleotide
  Antisense strand to SEQ ID NO: 1527322
caagucgcugacauaacau

SEQ ID NO: 1527324 - RNA, 19 nt, Artificial Sequence
  Description of Artificial Sequence: Synthetic oligonucleotide
  Sense strand starting at position 2656 of SEQ ID NO: 1244983
uguuaugucagcgacuuga

SEQ ID NO: 1527325 - RNA, 19 nt, Artificial Sequence
  Description of Artificial Sequence: Synthetic oligonucleotide
  Antisense strand to SEQ ID NO: 1527324
ucaagucgcugacauaaca

SEQ ID NO: 1527326 - RNA, 19 nt, Artificial Sequence
  Description of Artificial Sequence: Synthetic oligonucleotide
  Sense strand starting at position 2759 of SEQ ID NO: 1244983
aaggcuucucacuggagga

SEQ ID NO: 1527327 - RNA, 19 nt, Artificial Sequence
  Description of Artificial Sequence: Synthetic oligonucleotide
  Antisense strand to SEQ ID NO: 1527326
uccuccagugagaagccuu

SEQ ID NO: 1527328 - RNA, 19 nt, Artificial Sequence
  Description of Artificial Sequence: Synthetic oligonucleotide
  Sense strand starting at position 2760 of SEQ ID NO: 1244983
aggcuucucacuggaggaa

SEQ ID NO: 1527329 - RNA, 19 nt, Artificial Sequence
  Description of Artificial Sequence: Synthetic oligonucleotide
  Antisense strand to SEQ ID NO: 1527328
uuccuccagugagaagccu

SEQ ID NO: 1527330 - RNA, 19 nt, Artificial Sequence
  Description of Artificial Sequence: Synthetic oligonucleotide
  Sense strand starting at position 2800 of SEQ ID NO: 1244983
gggacaucucccuggacug

SEQ ID NO: 1527331 - RNA, 19 nt, Artificial Sequence
  Description of Artificial Sequence: Synthetic oligonucleotide
  Antisense strand to SEQ ID NO: 1527330
caguccagggagauguccc

SEQ ID NO: 1527332 - RNA, 19 nt, Artificial Sequence
  Description of Artificial Sequence: Synthetic oligonucleotide
  Sense strand starting at position 3097 of SEQ ID NO: 1244983
gaagauaagugacagccaa

SEQ ID NO: 1527333 - RNA, 19 nt, Artificial Sequence
  Description of Artificial Sequence: Synthetic oligonucleotide
  Antisense strand to SEQ ID NO: 1527332
uuggcugucacuuaucuuc

SEQ ID NO: 1527334 - RNA, 19 nt, Artificial Sequence
  Description of Artificial Sequence: Synthetic oligonucleotide
  Sense strand starting at position 3113 of SEQ ID NO: 1244983
caagguuugucagccugca

SEQ ID NO: 1527335 - RNA, 19 nt, Artificial Sequence
  Description of Artificial Sequence: Synthetic oligonucleotide
  Antisense strand to SEQ ID NO: 1527334
ugcaggcugacaaaccuug

SEQ ID NO: 1527336 - RNA, 19 nt, Artificial Sequence
  Description of Artificial Sequence: Synthetic oligonucleotide
  Sense strand starting at position 3402 of SEQ ID NO: 1244983
cugcuuuggccuuagcaga

SEQ ID NO: 1527337 - RNA, 19 nt, Artificial Sequence
  Description of Artificial Sequence: Synthetic oligonucleotide
  Antisense strand to SEQ ID NO: 1527336
ucugcuaaggccaaagcag

SEQ ID NO: 1527338 - RNA, 19 nt, Artificial Sequence
  Description of Artificial Sequence: Synthetic oligonucleotide
  Sense strand starting at position 3611 of SEQ ID NO: 1244983
cuaggaguccuguguccag

SEQ ID NO: 1527339 - RNA, 19 nt, Artificial Sequence
  Description of Artificial Sequence: Synthetic oligonucleotide
  Antisense strand to SEQ ID NO: 1527338
cuggacacaggacuccuag

SEQ ID NO: 1527340 - RNA, 19 nt, Artificial Sequence
  Description of Artificial Sequence: Synthetic oligonucleotide
  Sense strand starting at position 3843 of SEQ ID NO: 1244983
ugaguaggaggucgaguua

SEQ ID NO: 1527341 - RNA, 19 nt, Artificial Sequence
  Description of Artificial Sequence: Synthetic oligonucleotide
  Antisense strand to SEQ ID NO: 1527340
uaacucgaccuccuacuca

SEQ ID NO: 1527342 - RNA, 19 nt, Artificial Sequence
  Description of Artificial Sequence: Synthetic oligonucleotide
  Sense strand starting at position 3938 of SEQ ID NO: 1244983
ugcuuagagcccugagaau

SEQ ID NO: 1527343 - RNA, 19 nt, Artificial Sequence
  Description of Artificial Sequence: Synthetic oligonucleotide
  Antisense strand to SEQ ID NO: 1527342
auucucagggcucuaagca

SEQ ID NO: 1527344 - RNA, 19 nt, Artificial Sequence
  Description of Artificial Sequence: Synthetic oligonucleotide
  Sense strand starting at position 46 of SEQ ID NO: 1244984
aaaguuagaccguaucucu

SEQ ID NO: 1527345 - RNA, 19 nt, Artificial Sequence
  Description of Artificial Sequence: Synthetic oligonucleotide
  Antisense strand to SEQ ID NO: 1527344
agagauacggucuaacuuu

SEQ ID NO: 1527346 - RNA, 19 nt, Artificial Sequence
  Description of Artificial Sequence: Synthetic oligonucleotide
  Sense strand starting at position 49 of SEQ ID NO: 1244984
guuagaccguaucucuaaa

SEQ ID NO: 1527347 - RNA, 19 nt, Artificial Sequence
  Description of Artificial Sequence: Synthetic oligonucleotide
  Antisense strand to SEQ ID NO: 1527346
uuuagagauacggucuaac

SEQ ID NO: 1527348 - RNA, 19 nt, Artificial Sequence
  Description of Artificial Sequence: Synthetic oligonucleotide
  Sense strand starting at position 461 of SEQ ID NO: 1244984
cagaauaucccuugaagug

SEQ ID NO: 1527349 - RNA, 19 nt, Artificial Sequence
  Description of Artificial Sequence: Synthetic oligonucleotide
  Antisense strand to SEQ ID NO: 1527348
cacuucaagggauauucug

SEQ ID NO: 1527350 - RNA, 19 nt, Artificial Sequence
  Description of Artificial Sequence: Synthetic oligonucleotide
  Sense strand starting at position 623 of SEQ ID NO: 1244984
gcauguuuccaguaauagu

SEQ ID NO: 1527351 - RNA, 19 nt, Artificial Sequence
  Description of Artificial Sequence: Synthetic oligonucleotide
  Antisense strand to SEQ ID NO: 1527350
acuauuacuggaaacaugc

SEQ ID NO: 1527352 - RNA, 19 nt, Artificial Sequence
  Description of Artificial Sequence: Synthetic oligonucleotide
  Sense strand starting at position 633 of SEQ ID NO: 1244984
aguaauaguucuguacuuc

SEQ ID NO: 1527353 - RNA, 19 nt, Artificial Sequence
  Description of Artificial Sequence: Synthetic oligonucleotide
  Antisense strand to SEQ ID NO: 1527352
gaaguacagaacuauuacu

SEQ ID NO: 1527354 - RNA, 19 nt, Artificial Sequence
  Description of Artificial Sequence: Synthetic oligonucleotide
  Sense strand starting at position 637 of SEQ ID NO: 1244984
auaguucuguacuucccaa

SEQ ID NO: 1527355 - RNA, 19 nt, Artificial Sequence
  Description of Artificial Sequence: Synthetic oligonucleotide
  Antisense strand to SEQ ID NO: 1527354
uugggaaguacagaacuau

SEQ ID NO: 1527356 - RNA, 19 nt, Artificial Sequence
  Description of Artificial Sequence: Synthetic oligonucleotide
  Sense strand starting at position 698 of SEQ ID NO: 1244984
cugguaagcagcugacauu

SEQ ID NO: 1527357 - RNA, 19 nt, Artificial Sequence
  Description of Artificial Sequence: Synthetic oligonucleotide
  Antisense strand to SEQ ID NO: 1527356
aaugucagcugcuuaccag

SEQ ID NO: 1527358 - RNA, 19 nt, Artificial Sequence
  Description of Artificial Sequence: Synthetic oligonucleotide
  Sense strand starting at position 699 of SEQ ID NO: 1244984
ugguaagcagcugacauua

SEQ ID NO: 1527359 - RNA, 19 nt, Artificial Sequence
  Description of Artificial Sequence: Synthetic oligonucleotide
  Antisense strand to SEQ ID NO: 1527358
uaaugucagcugcuuacca

SEQ ID NO: 1527360 - RNA, 19 nt, Artificial Sequence
  Description of Artificial Sequence: Synthetic oligonucleotide
  Sense strand starting at position 711 of SEQ ID NO: 1244984
gacauuaacuaggucagca

SEQ ID NO: 1527361 - RNA, 19 nt, Artificial Sequence
  Description of Artificial Sequence: Synthetic oligonucleotide
  Antisense strand to SEQ ID NO: 1527360
ugcugaccuaguuaauguc

SEQ ID NO: 1527362 - RNA, 19 nt, Artificial Sequence
  Description of Artificial Sequence: Synthetic oligonucleotide
  Sense strand starting at position 721 of SEQ ID NO: 1244984
aggucagcauuuguguaau

SEQ ID NO: 1527363 - RNA, 19 nt, Artificial Sequence
  Description of Artificial Sequence: Synthetic oligonucleotide
  Antisense strand to SEQ ID NO: 1527362
auuacacaaaugcugaccu

SEQ ID NO: 1527364 - RNA, 19 nt, Artificial Sequence
  Description of Artificial Sequence: Synthetic oligonucleotide
  Sense strand starting at position 723 of SEQ ID NO: 1244984
gucagcauuuguguaauaa

SEQ ID NO: 1527365 - RNA, 19 nt, Artificial Sequence
  Description of Artificial Sequence: Synthetic oligonucleotide
  Antisense strand to SEQ ID NO: 1527364
uuauuacacaaaugcugac

SEQ ID NO: 1527366 - RNA, 19 nt, Artificial Sequence
  Description of Artificial Sequence: Synthetic oligonucleotide
  Sense strand starting at position 738 of SEQ ID NO: 1244984
auaaacauggccuggguaa

SEQ ID NO: 1527367 - RNA, 19 nt, Artificial Sequence
  Description of Artificial Sequence: Synthetic oligonucleotide
  Antisense strand to SEQ ID NO: 1527366
uuacccaggccauguuuau

SEQ ID NO: 1527368 - RNA, 19 nt, Artificial Sequence
  Description of Artificial Sequence: Synthetic oligonucleotide
  Sense strand starting at position 739 of SEQ ID NO: 1244984
uaaacauggccuggguaau

SEQ ID NO: 1527369 - RNA, 19 nt, Artificial Sequence
  Description of Artificial Sequence: Synthetic oligonucleotide
  Antisense strand to SEQ ID NO: 1527368
auuacccaggccauguuua

SEQ ID NO: 1527370 - RNA, 19 nt, Artificial Sequence
  Description of Artificial Sequence: Synthetic oligonucleotide
  Sense strand starting at position 740 of SEQ ID NO: 1244984
aaacauggccuggguaauu

SEQ ID NO: 1527371 - RNA, 19 nt, Artificial Sequence
  Description of Artificial Sequence: Synthetic oligonucleotide
  Antisense strand to SEQ ID NO: 1527370
aauuacccaggccauguuu

SEQ ID NO: 1527372 - RNA, 19 nt, Artificial Sequence
  Description of Artificial Sequence: Synthetic oligonucleotide
  Sense strand starting at position 753 of SEQ ID NO: 1244984
guaauucucggugagcuuu

SEQ ID NO: 1527373 - RNA, 19 nt, Artificial Sequence
  Description of Artificial Sequence: Synthetic oligonucleotide
  Antisense strand to SEQ ID NO: 1527372
aaagcucaccgagaauuac

SEQ ID NO: 1527374 - RNA, 19 nt, Artificial Sequence
  Description of Artificial Sequence: Synthetic oligonucleotide
  Sense strand starting at position 869 of SEQ ID NO: 1244984
accugaaguuuacucguuu

SEQ ID NO: 1527375 - RNA, 19 nt, Artificial Sequence
  Description of Artificial Sequence: Synthetic oligonucleotide
  Antisense strand to SEQ ID NO: 1527374
aaacgaguaaacuucaggu

SEQ ID NO: 1527376 - RNA, 19 nt, Artificial Sequence
  Description of Artificial Sequence: Synthetic oligonucleotide
  Sense strand starting at position 870 of SEQ ID NO: 1244984
ccugaaguuuacucguuua

SEQ ID NO: 1527377 - RNA, 19 nt, Artificial Sequence
  Description of Artificial Sequence: Synthetic oligonucleotide
  Antisense strand to SEQ ID NO: 1527376
uaaacgaguaaacuucagg

SEQ ID NO: 1527378 - RNA, 19 nt, Artificial Sequence
  Description of Artificial Sequence: Synthetic oligonucleotide
  Sense strand starting at position 873 of SEQ ID NO: 1244984
gaaguuuacucguuuaucu

SEQ ID NO: 1527379 - RNA, 19 nt, Artificial Sequence
  Description of Artificial Sequence: Synthetic oligonucleotide
  Antisense strand to SEQ ID NO: 1527378
agauaaacgaguaaacuuc

SEQ ID NO: 1527380 - RNA, 19 nt, Artificial Sequence
  Description of Artificial Sequence: Synthetic oligonucleotide
  Sense strand starting at position 983 of SEQ ID NO: 1244984
gaacaauguccgggacucu

SEQ ID NO: 1527381 - RNA, 19 nt, Artificial Sequence
  Description of Artificial Sequence: Synthetic oligonucleotide
  Antisense strand to SEQ ID NO: 1527380
agagucccggacauuguuc

SEQ ID NO: 1527382 - RNA, 19 nt, Artificial Sequence
  Description of Artificial Sequence: Synthetic oligonucleotide
  Sense strand starting at position 1058 of SEQ ID NO: 1244984
ugaucaaucacgcaggguu

SEQ ID NO: 1527383 - RNA, 19 nt, Artificial Sequence
  Description of Artificial Sequence: Synthetic oligonucleotide
  Antisense strand to SEQ ID NO: 1527382
aacccugcgugauugauca

SEQ ID NO: 1527384 - RNA, 19 nt, Artificial Sequence
  Description of Artificial Sequence: Synthetic oligonucleotide
  Sense strand starting at position 1071 of SEQ ID NO: 1244984
aggguuugccauugccaga

SEQ ID NO: 1527385 - RNA, 19 nt, Artificial Sequence
  Description of Artificial Sequence: Synthetic oligonucleotide
  Antisense strand to SEQ ID NO: 1527384
ucuggcaauggcaaacccu

SEQ ID NO: 1527386 - RNA, 19 nt, Artificial Sequence
  Description of Artificial Sequence: Synthetic oligonucleotide
  Sense strand starting at position 1124 of SEQ ID NO: 1244984
uugcuaaaugaacggaaua

SEQ ID NO: 1527387 - RNA, 19 nt, Artificial Sequence
  Description of Artificial Sequence: Synthetic oligonucleotide
  Antisense strand to SEQ ID NO: 1527386
uauuccguucauuuagcaa

SEQ ID NO: 1527388 - RNA, 19 nt, Artificial Sequence
  Description of Artificial Sequence: Synthetic oligonucleotide
  Sense strand starting at position 1228 of SEQ ID NO: 1244984
ugauuccaucaacgaaauc

SEQ ID NO: 1527389 - RNA, 19 nt, Artificial Sequence
  Description of Artificial Sequence: Synthetic oligonucleotide
  Antisense strand to SEQ ID NO: 1527388
gauuucguugauggaauca

SEQ ID NO: 1527390 - RNA, 19 nt, Artificial Sequence
  Description of Artificial Sequence: Synthetic oligonucleotide
  Sense strand starting at position 1249 of SEQ ID NO: 1244984
auuccugaaucacaaggaa

SEQ ID NO: 1527391 - RNA, 19 nt, Artificial Sequence
  Description of Artificial Sequence: Synthetic oligonucleotide
  Antisense strand to SEQ ID NO: 1527390
uuccuugugauucaggaau

SEQ ID NO: 1527392 - RNA, 19 nt, Artificial Sequence
  Description of Artificial Sequence: Synthetic oligonucleotide
  Sense strand starting at position 2472 of SEQ ID NO: 1244984
gagggagggcuaugcuaau

SEQ ID NO: 1527393 - RNA, 19 nt, Artificial Sequence
  Description of Artificial Sequence: Synthetic oligonucleotide
  Antisense strand to SEQ ID NO: 1527392
auuagcauagcccucccuc

SEQ ID NO: 1527394 - RNA, 19 nt, Artificial Sequence
  Description of Artificial Sequence: Synthetic oligonucleotide
  Sense strand starting at position 2483 of SEQ ID NO: 1244984
augcuaauguuguugauau

SEQ ID NO: 1527395 - RNA, 19 nt, Artificial Sequence
  Description of Artificial Sequence: Synthetic oligonucleotide
  Antisense strand to SEQ ID NO: 1527394
auaucaacaacauuagcau

SEQ ID NO: 1527396 - RNA, 19 nt, Artificial Sequence
  Description of Artificial Sequence: Synthetic oligonucleotide
  Sense strand starting at position 3215 of SEQ ID NO: 1244984
ugggagugguguuugggaa

SEQ ID NO: 1527397 - RNA, 19 nt, Artificial Sequence
  Description of Artificial Sequence: Synthetic oligonucleotide
  Antisense strand to SEQ ID NO: 1527396
uucccaaacaccacuccca

SEQ ID NO: 1527398 - RNA, 19 nt, Artificial Sequence
  Description of Artificial Sequence: Synthetic oligonucleotide
  Sense strand starting at position 3216 of SEQ ID NO: 1244984
gggagugguguuugggaag

SEQ ID NO: 1527399 - RNA, 19 nt, Artificial Sequence
  Description of Artificial Sequence: Synthetic oligonucleotide
  Antisense strand to SEQ ID NO: 1527398
cuucccaaacaccacuccc

SEQ ID NO: 1527400 - RNA, 19 nt, Artificial Sequence
  Description of Artificial Sequence: Synthetic oligonucleotide
  Sense strand starting at position 3273 of SEQ ID NO: 1244984
gguggacuucugugaccau

SEQ ID NO: 1527401 - RNA, 19 nt, Artificial Sequence
  Description of Artificial Sequence: Synthetic oligonucleotide
  Antisense strand to SEQ ID NO: 1527400
auggucacagaaguccacc

SEQ ID NO: 1527402 - RNA, 19 nt, Artificial Sequence
  Description of Artificial Sequence: Synthetic oligonucleotide
  Sense strand starting at position 3291 of SEQ ID NO: 1244984
uugcguucuccuuugugaa

SEQ ID NO: 1527403 - RNA, 19 nt, Artificial Sequence
  Description of Artificial Sequence: Synthetic oligonucleotide
  Antisense strand to SEQ ID NO: 1527402
uucacaaaggagaacgcaa

SEQ ID NO: 1527404 - RNA, 19 nt, Artificial Sequence
  Description of Artificial Sequence: Synthetic oligonucleotide
  Sense strand starting at position 3324 of SEQ ID NO: 1244984
auuucagagucggaagaga

SEQ ID NO: 1527405 - RNA, 19 nt, Artificial Sequence
  Description of Artificial Sequence: Synthetic oligonucleotide
  Antisense strand to SEQ ID NO: 1527404
ucucuuccgacucugaaau

SEQ ID NO: 1527406 - RNA, 19 nt, Artificial Sequence
  Description of Artificial Sequence: Synthetic oligonucleotide
  Sense strand starting at position 3439 of SEQ ID NO: 1244984
cucacuacugcccaggaaa

SEQ ID NO: 1527407 - RNA, 19 nt, Artificial Sequence
  Description of Artificial Sequence: Synthetic oligonucleotide
  Antisense strand to SEQ ID NO: 1527406
uuuccugggcaguagugag

SEQ ID NO: 1527408 - RNA, 19 nt, Artificial Sequence
  Description of Artificial Sequence: Synthetic oligonucleotide
  Sense strand starting at position 3704 of SEQ ID NO: 1244984
uggcuuacaugccugaaga

SEQ ID NO: 1527409 - RNA, 19 nt, Artificial Sequence
  Description of Artificial Sequence: Synthetic oligonucleotide
  Antisense strand to SEQ ID NO: 1527408
ucuucaggcauguaagcca

SEQ ID NO: 1527410 - RNA, 19 nt, Artificial Sequence
  Description of Artificial Sequence: Synthetic oligonucleotide
  Sense strand starting at position 3705 of SEQ ID NO: 1244984
ggcuuacaugccugaagau

SEQ ID NO: 1527411 - RNA, 19 nt, Artificial Sequence
  Description of Artificial Sequence: Synthetic oligonucleotide
  Antisense strand to SEQ ID NO: 1527410
aucuucaggcauguaagcc

SEQ ID NO: 1527412 - RNA, 19 nt, Artificial Sequence
  Description of Artificial Sequence: Synthetic oligonucleotide
  Sense strand starting at position 3706 of SEQ ID NO: 1244984
gcuuacaugccugaagaug

SEQ ID NO: 1527413 - RNA, 19 nt, Artificial Sequence
  Description of Artificial Sequence: Synthetic oligonucleotide
  Antisense strand to SEQ ID NO: 1527412
caucuucaggcauguaagc

SEQ ID NO: 1527414 - RNA, 19 nt, Artificial Sequence
  Description of Artificial Sequence: Synthetic oligonucleotide
  Sense strand starting at position 3899 of SEQ ID NO: 1244984
agaagcaucaccugguaga

SEQ ID NO: 1527415 - RNA, 19 nt, Artificial Sequence
  Description of Artificial Sequence: Synthetic oligonucleotide
  Antisense strand to SEQ ID NO: 1527414
ucuaccaggugaugcuucu

SEQ ID NO: 1527416 - RNA, 19 nt, Artificial Sequence
  Description of Artificial Sequence: Synthetic oligonucleotide
  Sense strand starting at position 3916 of SEQ ID NO: 1244984
gagggaugauuagaugauu

SEQ ID NO: 1527417 - RNA, 19 nt, Artificial Sequence
  Description of Artificial Sequence: Synthetic oligonucleotide
  Antisense strand to SEQ ID NO: 1527416
aaucaucuaaucaucccuc

SEQ ID NO: 1527418 - RNA, 19 nt, Artificial Sequence
  Description of Artificial Sequence: Synthetic oligonucleotide
  Sense strand starting at position 3946 of SEQ ID NO: 1244984
ccguauuugaccuguguuc

SEQ ID NO: 1527419 - RNA, 19 nt, Artificial Sequence
  Description of Artificial Sequence: Synthetic oligonucleotide
  Antisense strand to SEQ ID NO: 1527418
gaacacaggucaaauacgg

SEQ ID NO: 1527420 - RNA, 19 nt, Artificial Sequence
  Description of Artificial Sequence: Synthetic oligonucleotide
  Sense strand starting at position 3948 of SEQ ID NO: 1244984
guauuugaccuguguuccu

SEQ ID NO: 1527421 - RNA, 19 nt, Artificial Sequence
  Description of Artificial Sequence: Synthetic oligonucleotide
  Antisense strand to SEQ ID NO: 1527420
aggaacacaggucaaauac

SEQ ID NO: 1527422 - RNA, 19 nt, Artificial Sequence
  Description of Artificial Sequence: Synthetic oligonucleotide
  Sense strand starting at position 3953 of SEQ ID NO: 1244984
ugaccuguguuccucggaa

SEQ ID NO: 1527423 - RNA, 19 nt, Artificial Sequence
  Description of Artificial Sequence: Synthetic oligonucleotide
  Antisense strand to SEQ ID NO: 1527422
uuccgaggaacacagguca

SEQ ID NO: 1527424 - RNA, 19 nt, Artificial Sequence
  Description of Artificial Sequence: Synthetic oligonucleotide
  Sense strand starting at position 10 of SEQ ID NO: 1244985
uaaugauagcccugaggag

SEQ ID NO: 1527425 - RNA, 19 nt, Artificial Sequence
  Description of Artificial Sequence: Synthetic oligonucleotide
  Antisense strand to SEQ ID NO: 1527424
cuccucagggcuaucauua

SEQ ID NO: 1527426 - RNA, 19 nt, Artificial Sequence
  Description of Artificial Sequence: Synthetic oligonucleotide
  Sense strand starting at position 114 of SEQ ID NO: 1244985
acgaaauuccuagaguuau

SEQ ID NO: 1527427 - RNA, 19 nt, Artificial Sequence
  Description of Artificial Sequence: Synthetic oligonucleotide
  Antisense strand to SEQ ID NO: 1527426
auaacucuaggaauuucgu

SEQ ID NO: 1527428 - RNA, 19 nt, Artificial Sequence
  Description of Artificial Sequence: Synthetic oligonucleotide
  Sense strand starting at position 142 of SEQ ID NO: 1244985
gaaaguauuaucggccgga

SEQ ID NO: 1527429 - RNA, 19 nt, Artificial Sequence
  Description of Artificial Sequence: Synthetic oligonucleotide
  Antisense strand to SEQ ID NO: 1527428
uccggccgauaauacuuuc

SEQ ID NO: 1527430 - RNA, 19 nt, Artificial Sequence
  Description of Artificial Sequence: Synthetic oligonucleotide
  Sense strand starting at position 573 of SEQ ID NO: 1244985
accauuuauguaugguguu

SEQ ID NO: 1527431 - RNA, 19 nt, Artificial Sequence
  Description of Artificial Sequence: Synthetic oligonucleotide
  Antisense strand to SEQ ID NO: 1527430
aacaccauacauaaauggu

SEQ ID NO: 1527432 - RNA, 19 nt, Artificial Sequence
  Description of Artificial Sequence: Synthetic oligonucleotide
  Sense strand starting at position 963 of SEQ ID NO: 1244985
cugaguucucaacauguaa

SEQ ID NO: 1527433 - RNA, 19 nt, Artificial Sequence
  Description of Artificial Sequence: Synthetic oligonucleotide
  Antisense strand to SEQ ID NO: 1527432
uuacauguugagaacucag

SEQ ID NO: 1527434 - RNA, 19 nt, Artificial Sequence
  Description of Artificial Sequence: Synthetic oligonucleotide
  Sense strand starting at position 1018 of SEQ ID NO: 1244985
gacuuauuacuacgaagga

SEQ ID NO: 1527435 - RNA, 19 nt, Artificial Sequence
  Description of Artificial Sequence: Synthetic oligonucleotide
  Antisense strand to SEQ ID NO: 1527434
uccuucguaguaauaaguc

SEQ ID NO: 1527436 - RNA, 19 nt, Artificial Sequence
  Description of Artificial Sequence: Synthetic oligonucleotide
  Sense strand starting at position 1053 of SEQ ID NO: 1244985
cagaguccuuagcuaagga

SEQ ID NO: 1527437 - RNA, 19 nt, Artificial Sequence
  Description of Artificial Sequence: Synthetic oligonucleotide
  Antisense strand to SEQ ID NO: 1527436
uccuuagcuaaggacucug

SEQ ID NO: 1527438 - RNA, 19 nt, Artificial Sequence
  Description of Artificial Sequence: Synthetic oligonucleotide
  Sense strand starting at position 1096 of SEQ ID NO: 1244985
aggagaauuuaaugcaaga

SEQ ID NO: 1527439 - RNA, 19 nt, Artificial Sequence
  Description of Artificial Sequence: Synthetic oligonucleotide
  Antisense strand to SEQ ID NO: 1527438
ucuugcauuaaauucuccu

SEQ ID NO: 1527440 - RNA, 19 nt, Artificial Sequence
  Description of Artificial Sequence: Synthetic oligonucleotide
  Sense strand starting at position 1119 of SEQ ID NO: 1244985
caagacaggugucuuuagu

SEQ ID NO: 1527441 - RNA, 19 nt, Artificial Sequence
  Description of Artificial Sequence: Synthetic oligonucleotide
  Antisense strand to SEQ ID NO: 1527440
acuaaagacaccugucuug

SEQ ID NO: 1527442 - RNA, 19 nt, Artificial Sequence
  Description of Artificial Sequence: Synthetic oligonucleotide
  Sense strand starting at position 1205 of SEQ ID NO: 1244985
acgaaugcuuacuuugaag

SEQ ID NO: 1527443 - RNA, 19 nt, Artificial Sequence
  Description of Artificial Sequence: Synthetic oligonucleotide
  Antisense strand to SEQ ID NO: 1527442
cuucaaaguaagcauucgu

SEQ ID NO: 1527444 - RNA, 19 nt, Artificial Sequence
  Description of Artificial Sequence: Synthetic oligonucleotide
  Sense strand starting at position 1227 of SEQ ID NO: 1244985
ugagucacauuacuacauu

SEQ ID NO: 1527445 - RNA, 19 nt, Artificial Sequence
  Description of Artificial Sequence: Synthetic oligonucleotide
  Antisense strand to SEQ ID NO: 1527444
aauguaguaaugugacuca

SEQ ID NO: 1527446 - RNA, 19 nt, Artificial Sequence
  Description of Artificial Sequence: Synthetic oligonucleotide
  Sense strand starting at position 1343 of SEQ ID NO: 1244985
guaguuaggcucuggagua

SEQ ID NO: 1527447 - RNA, 19 nt, Artificial Sequence
  Description of Artificial Sequence: Synthetic oligonucleotide
  Antisense strand to SEQ ID NO: 1527446
uacuccagagccuaacuac

SEQ ID NO: 1527448 - RNA, 19 nt, Artificial Sequence
  Description of Artificial Sequence: Synthetic oligonucleotide
  Sense strand starting at position 1355 of SEQ ID NO: 1244985
uggaguagcauaugaaacu

SEQ ID NO: 1527449 - RNA, 19 nt, Artificial Sequence
  Description of Artificial Sequence: Synthetic oligonucleotide
  Antisense strand to SEQ ID NO: 1527448
aguuucauaugcuacucca

SEQ ID NO: 1527450 - RNA, 19 nt, Artificial Sequence
  Description of Artificial Sequence: Synthetic oligonucleotide
  Sense strand starting at position 1396 of SEQ ID NO: 1244985
aagucuaguuaggaauuua

SEQ ID NO: 1527451 - RNA, 19 nt, Artificial Sequence
  Description of Artificial Sequence: Synthetic oligonucleotide
  Antisense strand to SEQ ID NO: 1527450
uaaauuccuaacuagacuu

SEQ ID NO: 1527452 - RNA, 19 nt, Artificial Sequence
  Description of Artificial Sequence: Synthetic oligonucleotide
  Sense strand starting at position 1548 of SEQ ID NO: 1244985
gcuccuaaugagcaggaau

SEQ ID NO: 1527453 - RNA, 19 nt, Artificial Sequence
  Description of Artificial Sequence: Synthetic oligonucleotide
  Antisense strand to SEQ ID NO: 1527452
auuccugcucauuaggagc

SEQ ID NO: 1527454 - RNA, 19 nt, Artificial Sequence
  Description of Artificial Sequence: Synthetic oligonucleotide
  Sense strand starting at position 1559 of SEQ ID NO: 1244985
gcaggaauccuggguuuau

SEQ ID NO: 1527455 - RNA, 19 nt, Artificial Sequence
  Description of Artificial Sequence: Synthetic oligonucleotide
  Antisense strand to SEQ ID NO: 1527454
auaaacccaggauuccugc

SEQ ID NO: 1527456 - RNA, 19 nt, Artificial Sequence
  Description of Artificial Sequence: Synthetic oligonucleotide
  Sense strand starting at position 1560 of SEQ ID NO: 1244985
caggaauccuggguuuauc

SEQ ID NO: 1527457 - RNA, 19 nt, Artificial Sequence
  Description of Artificial Sequence: Synthetic oligonucleotide
  Antisense strand to SEQ ID NO: 1527456
gauaaacccaggauuccug

SEQ ID NO: 1527458 - RNA, 19 nt, Artificial Sequence
  Description of Artificial Sequence: Synthetic oligonucleotide
  Sense strand starting at position 1620 of SEQ ID NO: 1244985
aaacgucugauggguaagu

SEQ ID NO: 1527459 - RNA, 19 nt, Artificial Sequence
  Description of Artificial Sequence: Synthetic oligonucleotide
  Antisense strand to SEQ ID NO: 1527458
acuuacccaucagacguuu

SEQ ID NO: 1527460 - RNA, 19 nt, Artificial Sequence
  Description of Artificial Sequence: Synthetic oligonucleotide
  Sense strand starting at position 1621 of SEQ ID NO: 1244985
aacgucugauggguaagua

SEQ ID NO: 1527461 - RNA, 19 nt, Artificial Sequence
  Description of Artificial Sequence: Synthetic oligonucleotide
  Antisense strand to SEQ ID NO: 1527460
uacuuacccaucagacguu

SEQ ID NO: 1527462 - RNA, 19 nt, Artificial Sequence
  Description of Artificial Sequence: Synthetic oligonucleotide
  Sense strand starting at position 1822 of SEQ ID NO: 1244985
ucacuuaaucuccgcauga

SEQ ID NO: 1527463 - RNA, 19 nt, Artificial Sequence
  Description of Artificial Sequence: Synthetic oligonucleotide
  Antisense strand to SEQ ID NO: 1527462
ucaugcggagauuaaguga

SEQ ID NO: 1527464 - RNA, 19 nt, Artificial Sequence
  Description of Artificial Sequence: Synthetic oligonucleotide
  Sense strand starting at position 1824 of SEQ ID NO: 1244985
acuuaaucuccgcaugacu

SEQ ID NO: 1527465 - RNA, 19 nt, Artificial Sequence
  Description of Artificial Sequence: Synthetic oligonucleotide
  Antisense strand to SEQ ID NO: 1527464
agucaugcggagauuaagu

SEQ ID NO: 1527466 - RNA, 19 nt, Artificial Sequence
  Description of Artificial Sequence: Synthetic oligonucleotide
  Sense strand starting at position 1826 of SEQ ID NO: 1244985
uuaaucuccgcaugacuga

SEQ ID NO: 1527467 - RNA, 19 nt, Artificial Sequence
  Description of Artificial Sequence: Synthetic oligonucleotide
  Antisense strand to SEQ ID NO: 1527466
ucagucaugcggagauuaa

SEQ ID NO: 1527468 - RNA, 19 nt, Artificial Sequence
  Description of Artificial Sequence: Synthetic oligonucleotide
  Sense strand starting at position 1890 of SEQ ID NO: 1244985
cuaugcguuccugaauuau

SEQ ID NO: 1527469 - RNA, 19 nt, Artificial Sequence
  Description of Artificial Sequence: Synthetic oligonucleotide
  Antisense strand to SEQ ID NO: 1527468
auaauucaggaacgcauag

SEQ ID NO: 1527470 - RNA, 19 nt, Artificial Sequence
  Description of Artificial Sequence: Synthetic oligonucleotide
  Sense strand starting at position 1944 of SEQ ID NO: 1244985
guagcuucucaacagcgaa

SEQ ID NO: 1527471 - RNA, 19 nt, Artificial Sequence
  Description of Artificial Sequence: Synthetic oligonucleotide
  Antisense strand to SEQ ID NO: 1527470
uucgcuguugagaagcuac

SEQ ID NO: 1527472 - RNA, 19 nt, Artificial Sequence
  Description of Artificial Sequence: Synthetic oligonucleotide
  Sense strand starting at position 2128 of SEQ ID NO: 1244985
gugggauugcagcgagaac

SEQ ID NO: 1527473 - RNA, 19 nt, Artificial Sequence
  Description of Artificial Sequence: Synthetic oligonucleotide
  Antisense strand to SEQ ID NO: 1527472
guucucgcugcaaucccac

SEQ ID NO: 1527474 - RNA, 19 nt, Artificial Sequence
  Description of Artificial Sequence: Synthetic oligonucleotide
  Sense strand starting at position 2737 of SEQ ID NO: 1244985
ucaauauccugucuuugua

SEQ ID NO: 1527475 - RNA, 19 nt, Artificial Sequence
  Description of Artificial Sequence: Synthetic oligonucleotide
  Antisense strand to SEQ ID NO: 1527474
uacaaagacaggauauuga

SEQ ID NO: 1527476 - RNA, 19 nt, Artificial Sequence
  Description of Artificial Sequence: Synthetic oligonucleotide
  Sense strand starting at position 2745 of SEQ ID NO: 1244985
cugucuuuguaagcaauag

SEQ ID NO: 1527477 - RNA, 19 nt, Artificial Sequence
  Description of Artificial Sequence: Synthetic oligonucleotide
  Antisense strand to SEQ ID NO: 1527476
cuauugcuuacaaagacag

SEQ ID NO: 1527478 - RNA, 19 nt, Artificial Sequence
  Description of Artificial Sequence: Synthetic oligonucleotide
  Sense strand starting at position 2749 of SEQ ID NO: 1244985
cuuuguaagcaauagcuuu

SEQ ID NO: 1527479 - RNA, 19 nt, Artificial Sequence
  Description of Artificial Sequence: Synthetic oligonucleotide
  Antisense strand to SEQ ID NO: 1527478
aaagcuauugcuuacaaag

SEQ ID NO: 1527480 - RNA, 19 nt, Artificial Sequence
  Description of Artificial Sequence: Synthetic oligonucleotide
  Sense strand starting at position 2771 of SEQ ID NO: 1244985
aauauaugucccuagguga

SEQ ID NO: 1527481 - RNA, 19 nt, Artificial Sequence
  Description of Artificial Sequence: Synthetic oligonucleotide
  Antisense strand to SEQ ID NO: 1527480
ucaccuagggacauauauu

SEQ ID NO: 1527482 - RNA, 19 nt, Artificial Sequence
  Description of Artificial Sequence: Synthetic oligonucleotide
  Sense strand starting at position 2774 of SEQ ID NO: 1244985
auaugucccuaggugaaua

SEQ ID NO: 1527483 - RNA, 19 nt, Artificial Sequence
  Description of Artificial Sequence: Synthetic oligonucleotide
  Antisense strand to SEQ ID NO: 1527482
uauucaccuagggacauau

SEQ ID NO: 1527484 - RNA, 19 nt, Artificial Sequence
  Description of Artificial Sequence: Synthetic oligonucleotide
  Sense strand starting at position 2784 of SEQ ID NO: 1244985
aggugaauaucagacacua

SEQ ID NO: 1527485 - RNA, 19 nt, Artificial Sequence
  Description of Artificial Sequence: Synthetic oligonucleotide
  Antisense strand to SEQ ID NO: 1527484
uagugucugauauucaccu

SEQ ID NO: 1527486 - RNA, 19 nt, Artificial Sequence
  Description of Artificial Sequence: Synthetic oligonucleotide
  Sense strand starting at position 2937 of SEQ ID NO: 1244985
acagcuuggaggcaauauu

SEQ ID NO: 1527487 - RNA, 19 nt, Artificial Sequence
  Description of Artificial Sequence: Synthetic oligonucleotide
  Antisense strand to SEQ ID NO: 1527486
aauauugccuccaagcugu

SEQ ID NO: 1527488 - RNA, 19 nt, Artificial Sequence
  Description of Artificial Sequence: Synthetic oligonucleotide
  Sense strand starting at position 2945 of SEQ ID NO: 1244985
gaggcaauauugcugguau

SEQ ID NO: 1527489 - RNA, 19 nt, Artificial Sequence
  Description of Artificial Sequence: Synthetic oligonucleotide
  Antisense strand to SEQ ID NO: 1527488
auaccagcaauauugccuc

SEQ ID NO: 1527490 - RNA, 19 nt, Artificial Sequence
  Description of Artificial Sequence: Synthetic oligonucleotide
  Sense strand starting at position 2947 of SEQ ID NO: 1244985
ggcaauauugcugguauag

SEQ ID NO: 1527491 - RNA, 19 nt, Artificial Sequence
  Description of Artificial Sequence: Synthetic oligonucleotide
  Antisense strand to SEQ ID NO: 1527490
cuauaccagcaauauugcc

SEQ ID NO: 1527492 - RNA, 19 nt, Artificial Sequence
  Description of Artificial Sequence: Synthetic oligonucleotide
  Sense strand starting at position 3237 of SEQ ID NO: 1244985
agcuguaagacaugucaga

SEQ ID NO: 1527493 - RNA, 19 nt, Artificial Sequence
  Description of Artificial Sequence: Synthetic oligonucleotide
  Antisense strand to SEQ ID NO: 1527492
ucugacaugucuuacagcu

SEQ ID NO: 1527494 - RNA, 19 nt, Artificial Sequence
  Description of Artificial Sequence: Synthetic oligonucleotide
  Sense strand starting at position 3321 of SEQ ID NO: 1244985
cuguguuaacaguaagagu

SEQ ID NO: 1527495 - RNA, 19 nt, Artificial Sequence
  Description of Artificial Sequence: Synthetic oligonucleotide
  Antisense strand to SEQ ID NO: 1527494
acucuuacuguuaacacag

SEQ ID NO: 1527496 - RNA, 19 nt, Artificial Sequence
  Description of Artificial Sequence: Synthetic oligonucleotide
  Sense strand starting at position 3363 of SEQ ID NO: 1244985
uccauaugggcagggaauu

SEQ ID NO: 1527497 - RNA, 19 nt, Artificial Sequence
  Description of Artificial Sequence: Synthetic oligonucleotide
  Antisense strand to SEQ ID NO: 1527496
aauucccugcccauaugga

SEQ ID NO: 1527498 - RNA, 19 nt, Artificial Sequence
  Description of Artificial Sequence: Synthetic oligonucleotide
  Sense strand starting at position 3480 of SEQ ID NO: 1244985
uugcuaaauuucuuuaggu

SEQ ID NO: 1527499 - RNA, 19 nt, Artificial Sequence
  Description of Artificial Sequence: Synthetic oligonucleotide
  Antisense strand to SEQ ID NO: 1527498
accuaaagaaauuuagcaa

SEQ ID NO: 1527500 - RNA, 19 nt, Artificial Sequence
  Description of Artificial Sequence: Synthetic oligonucleotide
  Sense strand starting at position 3500 of SEQ ID NO: 1244985
caaggaagucagcaaguua

SEQ ID NO: 1527501 - RNA, 19 nt, Artificial Sequence
  Description of Artificial Sequence: Synthetic oligonucleotide
  Antisense strand to SEQ ID NO: 1527500
uaacuugcugacuuccuug

SEQ ID NO: 1527502 - RNA, 19 nt, Artificial Sequence
  Description of Artificial Sequence: Synthetic oligonucleotide
  Sense strand starting at position 3540 of SEQ ID NO: 1244985
aaguaaauuugauagagac

SEQ ID NO: 1527503 - RNA, 19 nt, Artificial Sequence
  Description of Artificial Sequence: Synthetic oligonucleotide
  Antisense strand to SEQ ID NO: 1527502
gucucuaucaaauuuacuu

SEQ ID NO: 1527504 - RNA, 19 nt, Artificial Sequence
  Description of Artificial Sequence: Synthetic oligonucleotide
  Sense strand starting at position 27 of SEQ ID NO: 1244986
uggauucccuuucugauca

SEQ ID NO: 1527505 - RNA, 19 nt, Artificial Sequence
  Description of Artificial Sequence: Synthetic oligonucleotide
  Antisense strand to SEQ ID NO: 1527504
ugaucagaaagggaaucca

SEQ ID NO: 1527506 - RNA, 19 nt, Artificial Sequence
  Description of Artificial Sequence: Synthetic oligonucleotide
  Sense strand starting at position 388 of SEQ ID NO: 1244986
caggguugauuguuccagu

SEQ ID NO: 1527507 - RNA, 19 nt, Artificial Sequence
  Description of Artificial Sequence: Synthetic oligonucleotide
  Antisense strand to SEQ ID NO: 1527506
acuggaacaaucaacccug

SEQ ID NO: 1527508 - RNA, 19 nt, Artificial Sequence
  Description of Artificial Sequence: Synthetic oligonucleotide
  Sense strand starting at position 395 of SEQ ID NO: 1244986
gauuguuccaguggcaaag

SEQ ID NO: 1527509 - RNA, 19 nt, Artificial Sequence
  Description of Artificial Sequence: Synthetic oligonucleotide
  Antisense strand to SEQ ID NO: 1527508
cuuugccacuggaacaauc

SEQ ID NO: 1527510 - RNA, 19 nt, Artificial Sequence
  Description of Artificial Sequence: Synthetic oligonucleotide
  Sense strand starting at position 654 of SEQ ID NO: 1244986
cgagcaggaucuuuccaga

SEQ ID NO: 1527511 - RNA, 19 nt, Artificial Sequence
  Description of Artificial Sequence: Synthetic oligonucleotide
  Antisense strand to SEQ ID NO: 1527510
ucuggaaagauccugcucg

SEQ ID NO: 1527512 - RNA, 19 nt, Artificial Sequence
  Description of Artificial Sequence: Synthetic oligonucleotide
  Sense strand starting at position 657 of SEQ ID NO: 1244986
gcaggaucuuuccagaagg

SEQ ID NO: 1527513 - RNA, 19 nt, Artificial Sequence
  Description of Artificial Sequence: Synthetic oligonucleotide
  Antisense strand to SEQ ID NO: 1527512
ccuucuggaaagauccugc

SEQ ID NO: 1527514 - RNA, 19 nt, Artificial Sequence
  Description of Artificial Sequence: Synthetic oligonucleotide
  Sense strand starting at position 692 of SEQ ID NO: 1244986
gggccugugauuugggagu

SEQ ID NO: 1527515 - RNA, 19 nt, Artificial Sequence
  Description of Artificial Sequence: Synthetic oligonucleotide
  Antisense strand to SEQ ID NO: 1527514
acucccaaaucacaggccc

SEQ ID NO: 1527516 - RNA, 19 nt, Artificial Sequence
  Description of Artificial Sequence: Synthetic oligonucleotide
  Sense strand starting at position 1984 of SEQ ID NO: 1244986
gguggacacucccugagau

SEQ ID NO: 1527517 - RNA, 19 nt, Artificial Sequence
  Description of Artificial Sequence: Synthetic oligonucleotide
  Antisense strand to SEQ ID NO: 1527516
aucucagggaguguccacc

SEQ ID NO: 1527518 - RNA, 19 nt, Artificial Sequence
  Description of Artificial Sequence: Synthetic oligonucleotide
  Sense strand starting at position 2432 of SEQ ID NO: 1244986
cugaguccuuucucguauu

SEQ ID NO: 1527519 - RNA, 19 nt, Artificial Sequence
  Description of Artificial Sequence: Synthetic oligonucleotide
  Antisense strand to SEQ ID NO: 1527518
aauacgagaaaggacucag

SEQ ID NO: 1527520 - RNA, 19 nt, Artificial Sequence
  Description of Artificial Sequence: Synthetic oligonucleotide
  Sense strand starting at position 2433 of SEQ ID NO: 1244986
ugaguccuuucucguauuu

SEQ ID NO: 1527521 - RNA, 19 nt, Artificial Sequence
  Description of Artificial Sequence: Synthetic oligonucleotide
  Antisense strand to SEQ ID NO: 1527520
aaauacgagaaaggacuca

SEQ ID NO: 1527522 - RNA, 19 nt, Artificial Sequence
  Description of Artificial Sequence: Synthetic oligonucleotide
  Sense strand starting at position 2435 of SEQ ID NO: 1244986
aguccuuucucguauuuau

SEQ ID NO: 1527523 - RNA, 19 nt, Artificial Sequence
  Description of Artificial Sequence: Synthetic oligonucleotide
  Antisense strand to SEQ ID NO: 1527522
auaaauacgagaaaggacu

SEQ ID NO: 1527524 - RNA, 19 nt, Artificial Sequence
  Description of Artificial Sequence: Synthetic oligonucleotide
  Sense strand starting at position 2499 of SEQ ID NO: 1244986
aguagcuacugacuuuaaa

SEQ ID NO: 1527525 - RNA, 19 nt, Artificial Sequence
  Description of Artificial Sequence: Synthetic oligonucleotide
  Antisense strand to SEQ ID NO: 1527524
uuuaaagucaguagcuacu

SEQ ID NO: 1527526 - RNA, 19 nt, Artificial Sequence
  Description of Artificial Sequence: Synthetic oligonucleotide
  Sense strand starting at position 2544 of SEQ ID NO: 1244986
gaggaaggccucugcaauc

SEQ ID NO: 1527527 - RNA, 19 nt, Artificial Sequence
  Description of Artificial Sequence: Synthetic oligonucleotide
  Antisense strand to SEQ ID NO: 1527526
gauugcagaggccuuccuc

SEQ ID NO: 1527528 - RNA, 19 nt, Artificial Sequence
  Description of Artificial Sequence: Synthetic oligonucleotide
  Sense strand starting at position 2607 of SEQ ID NO: 1244986
cuaagugugaaagguuaaa

SEQ ID NO: 1527529 - RNA, 19 nt, Artificial Sequence
  Description of Artificial Sequence: Synthetic oligonucleotide
  Antisense strand to SEQ ID NO: 1527528
uuuaaccuuucacacuuag

SEQ ID NO: 1527530 - RNA, 19 nt, Artificial Sequence
  Description of Artificial Sequence: Synthetic oligonucleotide
  Sense strand starting at position 2619 of SEQ ID NO: 1244986
gguuaaaucagucagucga

SEQ ID NO: 1527531 - RNA, 19 nt, Artificial Sequence
  Description of Artificial Sequence: Synthetic oligonucleotide
  Antisense strand to SEQ ID NO: 1527530
ucgacugacugauuuaacc

SEQ ID NO: 1527532 - RNA, 19 nt, Artificial Sequence
  Description of Artificial Sequence: Synthetic oligonucleotide
  Sense strand starting at position 2623 of SEQ ID NO: 1244986
aaaucagucagucgagguu

SEQ ID NO: 1527533 - RNA, 19 nt, Artificial Sequence
  Description of Artificial Sequence: Synthetic oligonucleotide
  Antisense strand to SEQ ID NO: 1527532
aaccucgacugacugauuu

SEQ ID NO: 1527534 - RNA, 19 nt, Artificial Sequence
  Description of Artificial Sequence: Synthetic oligonucleotide
  Sense strand starting at position 2632 of SEQ ID NO: 1244986
agucgagguucuggaagaa

SEQ ID NO: 1527535 - RNA, 19 nt, Artificial Sequence
  Description of Artificial Sequence: Synthetic oligonucleotide
  Antisense strand to SEQ ID NO: 1527534
uucuuccagaaccucgacu

SEQ ID NO: 1527536 - RNA, 19 nt, Artificial Sequence
  Description of Artificial Sequence: Synthetic oligonucleotide
  Sense strand starting at position 2663 of SEQ ID NO: 1244986
ggcauaaccuuggauggga

SEQ ID NO: 1527537 - RNA, 19 nt, Artificial Sequence
  Description of Artificial Sequence: Synthetic oligonucleotide
  Antisense strand to SEQ ID NO: 1527536
ucccauccaagguuaugcc

SEQ ID NO: 1527538 - RNA, 19 nt, Artificial Sequence
  Description of Artificial Sequence: Synthetic oligonucleotide
  Sense strand starting at position 3041 of SEQ ID NO: 1244986
gugagccaagauugagauu

SEQ ID NO: 1527539 - RNA, 19 nt, Artificial Sequence
  Description of Artificial Sequence: Synthetic oligonucleotide
  Antisense strand to SEQ ID NO: 1527538
aaucucaaucuuggcucac

SEQ ID NO: 1527540 - RNA, 19 nt, Artificial Sequence
  Description of Artificial Sequence: Synthetic oligonucleotide
  Sense strand starting at position 3164 of SEQ ID NO: 1244986
acugcaaauuaguaaggaa

SEQ ID NO: 1527541 - RNA, 19 nt, Artificial Sequence
  Description of Artificial Sequence: Synthetic oligonucleotide
  Antisense strand to SEQ ID NO: 1527540
uuccuuacuaauuugcagu

SEQ ID NO: 1527542 - RNA, 19 nt, Artificial Sequence
  Description of Artificial Sequence: Synthetic oligonucleotide
  Sense strand starting at position 3308 of SEQ ID NO: 1244986
caaggaugaacgcgugaaa

SEQ ID NO: 1527543 - RNA, 19 nt, Artificial Sequence
  Description of Artificial Sequence: Synthetic oligonucleotide
  Antisense strand to SEQ ID NO: 1527542
uuucacgcguucauccuug

SEQ ID NO: 1527544 - RNA, 19 nt, Artificial Sequence
  Description of Artificial Sequence: Synthetic oligonucleotide
  Sense strand starting at position 3328 of SEQ ID NO: 1244986
ggcagauauccuugucaac

SEQ ID NO: 1527545 - RNA, 19 nt, Artificial Sequence
  Description of Artificial Sequence: Synthetic oligonucleotide
  Antisense strand to SEQ ID NO: 1527544
guugacaaggauaucugcc

SEQ ID NO: 1527546 - RNA, 19 nt, Artificial Sequence
  Description of Artificial Sequence: Synthetic oligonucleotide
  Sense strand starting at position 3439 of SEQ ID NO: 1244986
ugcagaguugaccgccuau

SEQ ID NO: 1527547 - RNA, 19 nt, Artificial Sequence
  Description of Artificial Sequence: Synthetic oligonucleotide
  Antisense strand to SEQ ID NO: 1527546
auaggcggucaacucugca

SEQ ID NO: 1527548 - RNA, 19 nt, Artificial Sequence
  Description of Artificial Sequence: Synthetic oligonucleotide
  Sense strand starting at position 3474 of SEQ ID NO: 1244986
auucuacucucagguuagu

SEQ ID NO: 1527549 - RNA, 19 nt, Artificial Sequence
  Description of Artificial Sequence: Synthetic oligonucleotide
  Antisense strand to SEQ ID NO: 1527548
acuaaccugagaguagaau

SEQ ID NO: 1527550 - RNA, 19 nt, Artificial Sequence
  Description of Artificial Sequence: Synthetic oligonucleotide
  Sense strand starting at position 3483 of SEQ ID NO: 1244986
ucagguuaguaccuuagau

SEQ ID NO: 1527551 - RNA, 19 nt, Artificial Sequence
  Description of Artificial Sequence: Synthetic oligonucleotide
  Antisense strand to SEQ ID NO: 1527550
aucuaagguacuaaccuga

SEQ ID NO: 1527552 - RNA, 19 nt, Artificial Sequence
  Description of Artificial Sequence: Synthetic oligonucleotide
  Sense strand starting at position 3487 of SEQ ID NO: 1244986
guuaguaccuuagauaaag

SEQ ID NO: 1527553 - RNA, 19 nt, Artificial Sequence
  Description of Artificial Sequence: Synthetic oligonucleotide
  Antisense strand to SEQ ID NO: 1527552
cuuuaucuaagguacuaac

SEQ ID NO: 1527554 - RNA, 19 nt, Artificial Sequence
  Description of Artificial Sequence: Synthetic oligonucleotide
  Sense strand starting at position 3523 of SEQ ID NO: 1244986
aaaugacaagcgugcgaaa

SEQ ID NO: 1527555 - RNA, 19 nt, Artificial Sequence
  Description of Artificial Sequence: Synthetic oligonucleotide
  Antisense strand to SEQ ID NO: 1527554
uuucgcacgcuugucauuu

SEQ ID NO: 1527556 - RNA, 19 nt, Artificial Sequence
  Description of Artificial Sequence: Synthetic oligonucleotide
  Sense strand starting at position 3526 of SEQ ID NO: 1244986
ugacaagcgugcgaaaguu

SEQ ID NO: 1527557 - RNA, 19 nt, Artificial Sequence
  Description of Artificial Sequence: Synthetic oligonucleotide
  Antisense strand to SEQ ID NO: 1527556
aacuuucgcacgcuuguca

SEQ ID NO: 1527558 - RNA, 19 nt, Artificial Sequence
  Description of Artificial Sequence: Synthetic oligonucleotide
  Sense strand starting at position 3605 of SEQ ID NO: 1244986
ggcaaacugugacaugaag

SEQ ID NO: 1527559 - RNA, 19 nt, Artificial Sequence
  Description of Artificial Sequence: Synthetic oligonucleotide
  Antisense strand to SEQ ID NO: 1527558
cuucaugucacaguuugcc

SEQ ID NO: 1527560 - RNA, 19 nt, Artificial Sequence
  Description of Artificial Sequence: Synthetic oligonucleotide
  Sense strand starting at position 3647 of SEQ ID NO: 1244986
gucagcagccuggaugaaa

SEQ ID NO: 1527561 - RNA, 19 nt, Artificial Sequence
  Description of Artificial Sequence: Synthetic oligonucleotide
  Antisense strand to SEQ ID NO: 1527560
uuucauccaggcugcugac

SEQ ID NO: 1527562 - RNA, 19 nt, Artificial Sequence
  Description of Artificial Sequence: Synthetic oligonucleotide
  Sense strand starting at position 3671 of SEQ ID NO: 1244986
cgguggugggcugaagaaa

SEQ ID NO: 1527563 - RNA, 19 nt, Artificial Sequence
  Description of Artificial Sequence: Synthetic oligonucleotide
  Antisense strand to SEQ ID NO: 1527562
uuucuucagcccaccaccg

SEQ ID NO: 1527564 - RNA, 19 nt, Artificial Sequence
  Description of Artificial Sequence: Synthetic oligonucleotide
  Sense strand starting at position 139 of SEQ ID NO: 1244987
accgcaagcucucaaauaa

SEQ ID NO: 1527565 - RNA, 19 nt, Artificial Sequence
  Description of Artificial Sequence: Synthetic oligonucleotide
  Antisense strand to SEQ ID NO: 1527564
uuauuugagagcuugcggu

SEQ ID NO: 1527566 - RNA, 19 nt, Artificial Sequence
  Description of Artificial Sequence: Synthetic oligonucleotide
  Sense strand starting at position 510 of SEQ ID NO: 1244987
ugaggaugauggcgcaaau

SEQ ID NO: 1527567 - RNA, 19 nt, Artificial Sequence
  Description of Artificial Sequence: Synthetic oligonucleotide
  Antisense strand to SEQ ID NO: 1527566
auuugcgccaucauccuca

SEQ ID NO: 1527568 - RNA, 19 nt, Artificial Sequence
  Description of Artificial Sequence: Synthetic oligonucleotide
  Sense strand starting at position 523 of SEQ ID NO: 1244987
gcaaaucacucccaagaug

SEQ ID NO: 1527569 - RNA, 19 nt, Artificial Sequence
  Description of Artificial Sequence: Synthetic oligonucleotide
  Antisense strand to SEQ ID NO: 1527568
caucuugggagugauuugc

SEQ ID NO: 1527570 - RNA, 19 nt, Artificial Sequence
  Description of Artificial Sequence: Synthetic oligonucleotide
  Sense strand starting at position 650 of SEQ ID NO: 1244987
aguauuugcgcuugagcuu

SEQ ID NO: 1527571 - RNA, 19 nt, Artificial Sequence
  Description of Artificial Sequence: Synthetic oligonucleotide
  Antisense strand to SEQ ID NO: 1527570
aagcucaagcgcaaauacu

SEQ ID NO: 1527572 - RNA, 19 nt, Artificial Sequence
  Description of Artificial Sequence: Synthetic oligonucleotide
  Sense strand starting at position 891 of SEQ ID NO: 1244987
cccugauacugccagguua

SEQ ID NO: 1527573 - RNA, 19 nt, Artificial Sequence
  Description of Artificial Sequence: Synthetic oligonucleotide
  Antisense strand to SEQ ID NO: 1527572
uaaccuggcaguaucaggg

SEQ ID NO: 1527574 - RNA, 19 nt, Artificial Sequence
  Description of Artificial Sequence: Synthetic oligonucleotide
  Sense strand starting at position 893 of SEQ ID NO: 1244987
cugauacugccagguuaac

SEQ ID NO: 1527575 - RNA, 19 nt, Artificial Sequence
  Description of Artificial Sequence: Synthetic oligonucleotide
  Antisense strand to SEQ ID NO: 1527574
guuaaccuggcaguaucag

SEQ ID NO: 1527576 - RNA, 19 nt, Artificial Sequence
  Description of Artificial Sequence: Synthetic oligonucleotide
  Sense strand starting at position 982 of SEQ ID NO: 1244987
ggugacaucucagauguca

SEQ ID NO: 1527577 - RNA, 19 nt, Artificial Sequence
  Description of Artificial Sequence: Synthetic oligonucleotide
  Antisense strand to SEQ ID NO: 1527576
ugacaucugagaugucacc

SEQ ID NO: 1527578 - RNA, 19 nt, Artificial Sequence
  Description of Artificial Sequence: Synthetic oligonucleotide
  Sense strand starting at position 1149 of SEQ ID NO: 1244987
augguaucuuuguccgcaa

SEQ ID NO: 1527579 - RNA, 19 nt, Artificial Sequence
  Description of Artificial Sequence: Synthetic oligonucleotide
  Antisense strand to SEQ ID NO: 1527578
uugcggacaaagauaccau

SEQ ID NO: 1527580 - RNA, 19 nt, Artificial Sequence
  Description of Artificial Sequence: Synthetic oligonucleotide
  Sense strand starting at position 1150 of SEQ ID NO: 1244987
ugguaucuuuguccgcaaa

SEQ ID NO: 1527581 - RNA, 19 nt, Artificial Sequence
  Description of Artificial Sequence: Synthetic oligonucleotide
  Antisense strand to SEQ ID NO: 1527580
uuugcggacaaagauacca

SEQ ID NO: 1527582 - RNA, 19 nt, Artificial Sequence
  Description of Artificial Sequence: Synthetic oligonucleotide
  Sense strand starting at position 1151 of SEQ ID NO: 1244987
gguaucuuuguccgcaaac

SEQ ID NO: 1527583 - RNA, 19 nt, Artificial Sequence
  Description of Artificial Sequence: Synthetic oligonucleotide
  Antisense strand to SEQ ID NO: 1527582
guuugcggacaaagauacc

SEQ ID NO: 1527584 - RNA, 19 nt, Artificial Sequence
  Description of Artificial Sequence: Synthetic oligonucleotide
  Sense strand starting at position 1307 of SEQ ID NO: 1244987
ccuguuacuggugagguuu

SEQ ID NO: 1527585 - RNA, 19 nt, Artificial Sequence
  Description of Artificial Sequence: Synthetic oligonucleotide
  Antisense strand to SEQ ID NO: 1527584
aaaccucaccaguaacagg

SEQ ID NO: 1527586 - RNA, 19 nt, Artificial Sequence
  Description of Artificial Sequence: Synthetic oligonucleotide
  Sense strand starting at position 1552 of SEQ ID NO: 1244987
cgaugagcugcgugaccuu

SEQ ID NO: 1527587 - RNA, 19 nt, Artificial Sequence
  Description of Artificial Sequence: Synthetic oligonucleotide
  Antisense strand to SEQ ID NO: 1527586
aaggucacgcagcucaucg

SEQ ID NO: 1527588 - RNA, 19 nt, Artificial Sequence
  Description of Artificial Sequence: Synthetic oligonucleotide
  Sense strand starting at position 2325 of SEQ ID NO: 1244987
ucgugaacccaguaaacca

SEQ ID NO: 1527589 - RNA, 19 nt, Artificial Sequence
  Description of Artificial Sequence: Synthetic oligonucleotide
  Antisense strand to SEQ ID NO: 1527588
ugguuuacuggguucacga

SEQ ID NO: 1527590 - RNA, 19 nt, Artificial Sequence
  Description of Artificial Sequence: Synthetic oligonucleotide
  Sense strand starting at position 2514 of SEQ ID NO: 1244987
ggagauuggucccaaccca

SEQ ID NO: 1527591 - RNA, 19 nt, Artificial Sequence
  Description of Artificial Sequence: Synthetic oligonucleotide
  Antisense strand to SEQ ID NO: 1527590
uggguugggaccaaucucc

SEQ ID NO: 1527592 - RNA, 19 nt, Artificial Sequence
  Description of Artificial Sequence: Synthetic oligonucleotide
  Sense strand starting at position 2542 of SEQ ID NO: 1244987
guggaugucucagaggaag

SEQ ID NO: 1527593 - RNA, 19 nt, Artificial Sequence
  Description of Artificial Sequence: Synthetic oligonucleotide
  Antisense strand to SEQ ID NO: 1527592
cuuccucugagacauccac

SEQ ID NO: 1527594 - RNA, 19 nt, Artificial Sequence
  Description of Artificial Sequence: Synthetic oligonucleotide
  Sense strand starting at position 2714 of SEQ ID NO: 1244987
guacuuaaccgcuggagca

SEQ ID NO: 1527595 - RNA, 19 nt, Artificial Sequence
  Description of Artificial Sequence: Synthetic oligonucleotide
  Antisense strand to SEQ ID NO: 1527594
ugcuccagcgguuaaguac

SEQ ID NO: 1527596 - RNA, 19 nt, Artificial Sequence
  Description of Artificial Sequence: Synthetic oligonucleotide
  Sense strand starting at position 3006 of SEQ ID NO: 1244987
gcugcuuuacaugcguauu

SEQ ID NO: 1527597 - RNA, 19 nt, Artificial Sequence
  Description of Artificial Sequence: Synthetic oligonucleotide
  Antisense strand to SEQ ID NO: 1527596
aauacgcauguaaagcagc

SEQ ID NO: 1527598 - RNA, 19 nt, Artificial Sequence
  Description of Artificial Sequence: Synthetic oligonucleotide
  Sense strand starting at position 3081 of SEQ ID NO: 1244987
uugcauauguagguacuaa

SEQ ID NO: 1527599 - RNA, 19 nt, Artificial Sequence
  Description of Artificial Sequence: Synthetic oligonucleotide
  Antisense strand to SEQ ID NO: 1527598
uuaguaccuacauaugcaa

SEQ ID NO: 1527600 - RNA, 19 nt, Artificial Sequence
  Description of Artificial Sequence: Synthetic oligonucleotide
  Sense strand starting at position 3109 of SEQ ID NO: 1244987
uguuaaauggcuugaugug

SEQ ID NO: 1527601 - RNA, 19 nt, Artificial Sequence
  Description of Artificial Sequence: Synthetic oligonucleotide
  Antisense strand to SEQ ID NO: 1527600
cacaucaagccauuuaaca

SEQ ID NO: 1527602 - RNA, 19 nt, Artificial Sequence
  Description of Artificial Sequence: Synthetic oligonucleotide
  Sense strand starting at position 3116 of SEQ ID NO: 1244987
uggcuugauguggauaaca

SEQ ID NO: 1527603 - RNA, 19 nt, Artificial Sequence
  Description of Artificial Sequence: Synthetic oligonucleotide
  Antisense strand to SEQ ID NO: 1527602
uguuauccacaucaagcca

SEQ ID NO: 1527604 - RNA, 19 nt, Artificial Sequence
  Description of Artificial Sequence: Synthetic oligonucleotide
  Sense strand starting at position 3118 of SEQ ID NO: 1244987
gcuugauguggauaacaua

SEQ ID NO: 1527605 - RNA, 19 nt, Artificial Sequence
  Description of Artificial Sequence: Synthetic oligonucleotide
  Antisense strand to SEQ ID NO: 1527604
uauguuauccacaucaagc

SEQ ID NO: 1527606 - RNA, 19 nt, Artificial Sequence
  Description of Artificial Sequence: Synthetic oligonucleotide
  Sense strand starting at position 3126 of SEQ ID NO: 1244987
uggauaacauaggagauua

SEQ ID NO: 1527607 - RNA, 19 nt, Artificial Sequence
  Description of Artificial Sequence: Synthetic oligonucleotide
  Antisense strand to SEQ ID NO: 1527606
uaaucuccuauguuaucca

SEQ ID NO: 1527608 - RNA, 19 nt, Artificial Sequence
  Description of Artificial Sequence: Synthetic oligonucleotide
  Sense strand starting at position 3138 of SEQ ID NO: 1244987
gagauuaucccuggcuggu

SEQ ID NO: 1527609 - RNA, 19 nt, Artificial Sequence
  Description of Artificial Sequence: Synthetic oligonucleotide
  Antisense strand to SEQ ID NO: 1527608
accagccagggauaaucuc

SEQ ID NO: 1527610 - RNA, 19 nt, Artificial Sequence
  Description of Artificial Sequence: Synthetic oligonucleotide
  Sense strand starting at position 3201 of SEQ ID NO: 1244987
cacccagcuugucagagaa

SEQ ID NO: 1527611 - RNA, 19 nt, Artificial Sequence
  Description of Artificial Sequence: Synthetic oligonucleotide
  Antisense strand to SEQ ID NO: 1527610
uucucugacaagcugggug

SEQ ID NO: 1527612 - RNA, 19 nt, Artificial Sequence
  Description of Artificial Sequence: Synthetic oligonucleotide
  Sense strand starting at position 3203 of SEQ ID NO: 1244987
cccagcuugucagagaaga

SEQ ID NO: 1527613 - RNA, 19 nt, Artificial Sequence
  Description of Artificial Sequence: Synthetic oligonucleotide
  Antisense strand to SEQ ID NO: 1527612
ucuucucugacaagcuggg

SEQ ID NO: 1527614 - RNA, 19 nt, Artificial Sequence
  Description of Artificial Sequence: Synthetic oligonucleotide
  Sense strand starting at position 3356 of SEQ ID NO: 1244987
ggcugauggccuugaucuc

SEQ ID NO: 1527615 - RNA, 19 nt, Artificial Sequence
  Description of Artificial Sequence: Synthetic oligonucleotide
  Antisense strand to SEQ ID NO: 1527614
gagaucaaggccaucagcc

SEQ ID NO: 1527616 - RNA, 19 nt, Artificial Sequence
  Description of Artificial Sequence: Synthetic oligonucleotide
  Sense strand starting at position 3362 of SEQ ID NO: 1244987
uggccuugaucucuaagac

SEQ ID NO: 1527617 - RNA, 19 nt, Artificial Sequence
  Description of Artificial Sequence: Synthetic oligonucleotide
  Antisense strand to SEQ ID NO: 1527616
gucuuagagaucaaggcca

SEQ ID NO: 1527618 - RNA, 19 nt, Artificial Sequence
  Description of Artificial Sequence: Synthetic oligonucleotide
  Sense strand starting at position 3363 of SEQ ID NO: 1244987
ggccuugaucucuaagaca

SEQ ID NO: 1527619 - RNA, 19 nt, Artificial Sequence
  Description of Artificial Sequence: Synthetic oligonucleotide
  Antisense strand to SEQ ID NO: 1527618
ugucuuagagaucaaggcc

SEQ ID NO: 1527620 - RNA, 19 nt, Artificial Sequence
  Description of Artificial Sequence: Synthetic oligonucleotide
  Sense strand starting at position 3496 of SEQ ID NO: 1244987
ugucaccagaggugucauu

SEQ ID NO: 1527621 - RNA, 19 nt, Artificial Sequence
  Description of Artificial Sequence: Synthetic oligonucleotide
  Antisense strand to SEQ ID NO: 1527620
aaugacaccucuggugaca

SEQ ID NO: 1527622 - RNA, 19 nt, Artificial Sequence
  Description of Artificial Sequence: Synthetic oligonucleotide
  Sense strand starting at position 3506 of SEQ ID NO: 1244987
ggugucauuucccagcugu

SEQ ID NO: 1527623 - RNA, 19 nt, Artificial Sequence
  Description of Artificial Sequence: Synthetic oligonucleotide
  Antisense strand to SEQ ID NO: 1527622
acagcugggaaaugacacc

SEQ ID NO: 1527624 - RNA, 19 nt, Artificial Sequence
  Description of Artificial Sequence: Synthetic oligonucleotide
  Sense strand starting at position 3574 of SEQ ID NO: 1244987
agcccaaucuaagagaaga

SEQ ID NO: 1527625 - RNA, 19 nt, Artificial Sequence
  Description of Artificial Sequence: Synthetic oligonucleotide
  Antisense strand to SEQ ID NO: 1527624
ucuucucuuagauugggcu

SEQ ID NO: 1527626 - RNA, 19 nt, Artificial Sequence
  Description of Artificial Sequence: Synthetic oligonucleotide
  Sense strand starting at position 3587 of SEQ ID NO: 1244987
agaagauacucuuggcuuc

SEQ ID NO: 1527627 - RNA, 19 nt, Artificial Sequence
  Description of Artificial Sequence: Synthetic oligonucleotide
  Antisense strand to SEQ ID NO: 1527626
gaagccaagaguaucuucu

SEQ ID NO: 1527628 - RNA, 19 nt, Artificial Sequence
  Description of Artificial Sequence: Synthetic oligonucleotide
  Sense strand starting at position 3636 of SEQ ID NO: 1244987
guccuugugcacugacagu

SEQ ID NO: 1527629 - RNA, 19 nt, Artificial Sequence
  Description of Artificial Sequence: Synthetic oligonucleotide
  Antisense strand to SEQ ID NO: 1527628
acugucagugcacaaggac

SEQ ID NO: 1527630 - RNA, 19 nt, Artificial Sequence
  Description of Artificial Sequence: Synthetic oligonucleotide
  Sense strand starting at position 3666 of SEQ ID NO: 1244987
cagccuaugugaugagaaa

SEQ ID NO: 1527631 - RNA, 19 nt, Artificial Sequence
  Description of Artificial Sequence: Synthetic oligonucleotide
  Antisense strand to SEQ ID NO: 1527630
uuucucaucacauaggcug

SEQ ID NO: 1527632 - RNA, 19 nt, Artificial Sequence
  Description of Artificial Sequence: Synthetic oligonucleotide
  Sense strand starting at position 3709 of SEQ ID NO: 1244987
cucagaucaugcugugaga

SEQ ID NO: 1527633 - RNA, 19 nt, Artificial Sequence
  Description of Artificial Sequence: Synthetic oligonucleotide
  Antisense strand to SEQ ID NO: 1527632
ucucacagcaugaucugag

SEQ ID NO: 1527634 - RNA, 19 nt, Artificial Sequence
  Description of Artificial Sequence: Synthetic oligonucleotide
  Sense strand starting at position 3711 of SEQ ID NO: 1244987
cagaucaugcugugagaug

SEQ ID NO: 1527635 - RNA, 19 nt, Artificial Sequence
  Description of Artificial Sequence: Synthetic oligonucleotide
  Antisense strand to SEQ ID NO: 1527634
caucucacagcaugaucug

SEQ ID NO: 1527636 - RNA, 19 nt, Artificial Sequence
  Description of Artificial Sequence: Synthetic oligonucleotide
  Sense strand starting at position 3756 of SEQ ID NO: 1244987
ugauuccucuuucuaguca

SEQ ID NO: 1527637 - RNA, 19 nt, Artificial Sequence
  Description of Artificial Sequence: Synthetic oligonucleotide
  Antisense strand to SEQ ID NO: 1527636
ugacuagaaagaggaauca

SEQ ID NO: 1527638 - RNA, 19 nt, Artificial Sequence
  Description of Artificial Sequence: Synthetic oligonucleotide
  Sense strand starting at position 3760 of SEQ ID NO: 1244987
uccucuuucuagucagaga

SEQ ID NO: 1527639 - RNA, 19 nt, Artificial Sequence
  Description of Artificial Sequence: Synthetic oligonucleotide
  Antisense strand to SEQ ID NO: 1527638
ucucugacuagaaagagga

SEQ ID NO: 1527640 - RNA, 19 nt, Artificial Sequence
  Description of Artificial Sequence: Synthetic oligonucleotide
  Sense strand starting at position 3763 of SEQ ID NO: 1244987
ucuuucuagucagagaaca

SEQ ID NO: 1527641 - RNA, 19 nt, Artificial Sequence
  Description of Artificial Sequence: Synthetic oligonucleotide
  Antisense strand to SEQ ID NO: 1527640
uguucucugacuagaaaga

SEQ ID NO: 1527642 - RNA, 19 nt, Artificial Sequence
  Description of Artificial Sequence: Synthetic oligonucleotide
  Sense strand starting at position 3820 of SEQ ID NO: 1244987
agugucugucaggguauaa

SEQ ID NO: 1527643 - RNA, 19 nt, Artificial Sequence
  Description of Artificial Sequence: Synthetic oligonucleotide
  Antisense strand to SEQ ID NO: 1527642
uuauacccugacagacacu

SEQ ID NO: 1527644 - RNA, 19 nt, Artificial Sequence
  Description of Artificial Sequence: Synthetic oligonucleotide
  Sense strand starting at position 28 of SEQ ID NO: 1244988
aggagaagcuguuugcaua

SEQ ID NO: 1527645 - RNA, 19 nt, Artificial Sequence
  Description of Artificial Sequence: Synthetic oligonucleotide
  Antisense strand to SEQ ID NO: 1527644
uaugcaaacagcuucuccu

SEQ ID NO: 1527646 - RNA, 19 nt, Artificial Sequence
  Description of Artificial Sequence: Synthetic oligonucleotide
  Sense strand starting at position 29 of SEQ ID NO: 1244988
ggagaagcuguuugcauac

SEQ ID NO: 1527647 - RNA, 19 nt, Artificial Sequence
  Description of Artificial Sequence: Synthetic oligonucleotide
  Antisense strand to SEQ ID NO: 1527646
guaugcaaacagcuucucc

SEQ ID NO: 1527648 - RNA, 19 nt, Artificial Sequence
  Description of Artificial Sequence: Synthetic oligonucleotide
  Sense strand starting at position 38 of SEQ ID NO: 1244988
guuugcauacaggaugaau

SEQ ID NO: 1527649 - RNA, 19 nt, Artificial Sequence
  Description of Artificial Sequence: Synthetic oligonucleotide
  Antisense strand to SEQ ID NO: 1527648
auucauccuguaugcaaac

SEQ ID NO: 1527650 - RNA, 19 nt, Artificial Sequence
  Description of Artificial Sequence: Synthetic oligonucleotide
  Sense strand starting at position 550 of SEQ ID NO: 1244988
caggguuguggccaagauu

SEQ ID NO: 1527651 - RNA, 19 nt, Artificial Sequence
  Description of Artificial Sequence: Synthetic oligonucleotide
  Antisense strand to SEQ ID NO: 1527650
aaucuuggccacaacccug

SEQ ID NO: 1527652 - RNA, 19 nt, Artificial Sequence
  Description of Artificial Sequence: Synthetic oligonucleotide
  Sense strand starting at position 553 of SEQ ID NO: 1244988
gguuguggccaagauuaau

SEQ ID NO: 1527653 - RNA, 19 nt, Artificial Sequence
  Description of Artificial Sequence: Synthetic oligonucleotide
  Antisense strand to SEQ ID NO: 1527652
auuaaucuuggccacaacc

SEQ ID NO: 1527654 - RNA, 19 nt, Artificial Sequence
  Description of Artificial Sequence: Synthetic oligonucleotide
  Sense strand starting at position 559 of SEQ ID NO: 1244988
ggccaagauuaaugauaaa

SEQ ID NO: 1527655 - RNA, 19 nt, Artificial Sequence
  Description of Artificial Sequence: Synthetic oligonucleotide
  Antisense strand to SEQ ID NO: 1527654
uuuaucauuaaucuuggcc

SEQ ID NO: 1527656 - RNA, 19 nt, Artificial Sequence
  Description of Artificial Sequence: Synthetic oligonucleotide
  Sense strand starting at position 868 of SEQ ID NO: 1244988
aaaucagaucggcggugua

SEQ ID NO: 1527657 - RNA, 19 nt, Artificial Sequence
  Description of Artificial Sequence: Synthetic oligonucleotide
  Antisense strand to SEQ ID NO: 1527656
uacaccgccgaucugauuu

SEQ ID NO: 1527658 - RNA, 19 nt, Artificial Sequence
  Description of Artificial Sequence: Synthetic oligonucleotide
  Sense strand starting at position 932 of SEQ ID NO: 1244988
gggcgugucucgucucuuu

SEQ ID NO: 1527659 - RNA, 19 nt, Artificial Sequence
  Description of Artificial Sequence: Synthetic oligonucleotide
  Antisense strand to SEQ ID NO: 1527658
aaagagacgagacacgccc

SEQ ID NO: 1527660 - RNA, 19 nt, Artificial Sequence
  Description of Artificial Sequence: Synthetic oligonucleotide
  Sense strand starting at position 1084 of SEQ ID NO: 1244988
ggcacuaaccgucacucau

SEQ ID NO: 1527661 - RNA, 19 nt, Artificial Sequence
  Description of Artificial Sequence: Synthetic oligonucleotide
  Antisense strand to SEQ ID NO: 1527660
augagugacgguuagugcc

SEQ ID NO: 1527662 - RNA, 19 nt, Artificial Sequence
  Description of Artificial Sequence: Synthetic oligonucleotide
  Sense strand starting at position 1093 of SEQ ID NO: 1244988
cgucacucauagucacaga

SEQ ID NO: 1527663 - RNA, 19 nt, Artificial Sequence
  Description of Artificial Sequence: Synthetic oligonucleotide
  Antisense strand to SEQ ID NO: 1527662
ucugugacuaugagugacg

SEQ ID NO: 1527664 - RNA, 19 nt, Artificial Sequence
  Description of Artificial Sequence: Synthetic oligonucleotide
  Sense strand starting at position 1124 of SEQ ID NO: 1244988
agagaguguuuggugggua

SEQ ID NO: 1527665 - RNA, 19 nt, Artificial Sequence
  Description of Artificial Sequence: Synthetic oligonucleotide
  Antisense strand to SEQ ID NO: 1527664
uacccaccaaacacucucu

SEQ ID NO: 1527666 - RNA, 19 nt, Artificial Sequence
  Description of Artificial Sequence: Synthetic oligonucleotide
  Sense strand starting at position 1598 of SEQ ID NO: 1244988
ccaugaggucugcgaaguu

SEQ ID NO: 1527667 - RNA, 19 nt, Artificial Sequence
  Description of Artificial Sequence: Synthetic oligonucleotide
  Antisense strand to SEQ ID NO: 1527666
aacuucgcagaccucaugg

SEQ ID NO: 1527668 - RNA, 19 nt, Artificial Sequence
  Description of Artificial Sequence: Synthetic oligonucleotide
  Sense strand starting at position 2081 of SEQ ID NO: 1244988
gucugugcucuugggauca

SEQ ID NO: 1527669 - RNA, 19 nt, Artificial Sequence
  Description of Artificial Sequence: Synthetic oligonucleotide
  Antisense strand to SEQ ID NO: 1527668
ugaucccaagagcacagac

SEQ ID NO: 1527670 - RNA, 19 nt, Artificial Sequence
  Description of Artificial Sequence: Synthetic oligonucleotide
  Sense strand starting at position 2095 of SEQ ID NO: 1244988
gaucaagccgacugugauu

SEQ ID NO: 1527671 - RNA, 19 nt, Artificial Sequence
  Description of Artificial Sequence: Synthetic oligonucleotide
  Antisense strand to SEQ ID NO: 1527670
aaucacagucggcuugauc

SEQ ID NO: 1527672 - RNA, 19 nt, Artificial Sequence
  Description of Artificial Sequence: Synthetic oligonucleotide
  Sense strand starting at position 2097 of SEQ ID NO: 1244988
ucaagccgacugugauuua

SEQ ID NO: 1527673 - RNA, 19 nt, Artificial Sequence
  Description of Artificial Sequence: Synthetic oligonucleotide
  Antisense strand to SEQ ID NO: 1527672
uaaaucacagucggcuuga

SEQ ID NO: 1527674 - RNA, 19 nt, Artificial Sequence
  Description of Artificial Sequence: Synthetic oligonucleotide
  Sense strand starting at position 2098 of SEQ ID NO: 1244988
caagccgacugugauuuau

SEQ ID NO: 1527675 - RNA, 19 nt, Artificial Sequence
  Description of Artificial Sequence: Synthetic oligonucleotide
  Antisense strand to SEQ ID NO: 1527674
auaaaucacagucggcuug

SEQ ID NO: 1527676 - RNA, 19 nt, Artificial Sequence
  Description of Artificial Sequence: Synthetic oligonucleotide
  Sense strand starting at position 3077 of SEQ ID NO: 1244988
uacaucagauuuggaguua

SEQ ID NO: 1527677 - RNA, 19 nt, Artificial Sequence
  Description of Artificial Sequence: Synthetic oligonucleotide
  Antisense strand to SEQ ID NO: 1527676
uaacuccaaaucugaugua

SEQ ID NO: 1527678 - RNA, 19 nt, Artificial Sequence
  Description of Artificial Sequence: Synthetic oligonucleotide
  Sense strand starting at position 3089 of SEQ ID NO: 1244988
ggaguuaacucauaucaga

SEQ ID NO: 1527679 - RNA, 19 nt, Artificial Sequence
  Description of Artificial Sequence: Synthetic oligonucleotide
  Antisense strand to SEQ ID NO: 1527678
ucugauaugaguuaacucc

SEQ ID NO: 1527680 - RNA, 19 nt, Artificial Sequence
  Description of Artificial Sequence: Synthetic oligonucleotide
  Sense strand starting at position 3199 of SEQ ID NO: 1244988
guggucuugcaguggcaaa

SEQ ID NO: 1527681 - RNA, 19 nt, Artificial Sequence
  Description of Artificial Sequence: Synthetic oligonucleotide
  Antisense strand to SEQ ID NO: 1527680
uuugccacugcaagaccac

SEQ ID NO: 1527682 - RNA, 19 nt, Artificial Sequence
  Description of Artificial Sequence: Synthetic oligonucleotide
  Sense strand starting at position 3247 of SEQ ID NO: 1244988
cuuucugacuuugguguua

SEQ ID NO: 1527683 - RNA, 19 nt, Artificial Sequence
  Description of Artificial Sequence: Synthetic oligonucleotide
  Antisense strand to SEQ ID NO: 1527682
uaacaccaaagucagaaag

SEQ ID NO: 1527684 - RNA, 19 nt, Artificial Sequence
  Description of Artificial Sequence: Synthetic oligonucleotide
  Sense strand starting at position 3249 of SEQ ID NO: 1244988
uucugacuuugguguuaac

SEQ ID NO: 1527685 - RNA, 19 nt, Artificial Sequence
  Description of Artificial Sequence: Synthetic oligonucleotide
  Antisense strand to SEQ ID NO: 1527684
guuaacaccaaagucagaa

SEQ ID NO: 1527686 - RNA, 19 nt, Artificial Sequence
  Description of Artificial Sequence: Synthetic oligonucleotide
  Sense strand starting at position 3252 of SEQ ID NO: 1244988
ugacuuugguguuaacguu

SEQ ID NO: 1527687 - RNA, 19 nt, Artificial Sequence
  Description of Artificial Sequence: Synthetic oligonucleotide
  Antisense strand to SEQ ID NO: 1527686
aacguuaacaccaaaguca

SEQ ID NO: 1527688 - RNA, 19 nt, Artificial Sequence
  Description of Artificial Sequence: Synthetic oligonucleotide
  Sense strand starting at position 3289 of SEQ ID NO: 1244988
ucuguaacauagugaugau

SEQ ID NO: 1527689 - RNA, 19 nt, Artificial Sequence
  Description of Artificial Sequence: Synthetic oligonucleotide
  Antisense strand to SEQ ID NO: 1527688
aucaucacuauguuacaga

SEQ ID NO: 1527690 - RNA, 19 nt, Artificial Sequence
  Description of Artificial Sequence: Synthetic oligonucleotide
  Sense strand starting at position 3292 of SEQ ID NO: 1244988
guaacauagugaugaugcu

SEQ ID NO: 1527691 - RNA, 19 nt, Artificial Sequence
  Description of Artificial Sequence: Synthetic oligonucleotide
  Antisense strand to SEQ ID NO: 1527690
agcaucaucacuauguuac

SEQ ID NO: 1527692 - RNA, 19 nt, Artificial Sequence
  Description of Artificial Sequence: Synthetic oligonucleotide
  Sense strand starting at position 3302 of SEQ ID NO: 1244988
gaugaugcugcgugcucua

SEQ ID NO: 1527693 - RNA, 19 nt, Artificial Sequence
  Description of Artificial Sequence: Synthetic oligonucleotide
  Antisense strand to SEQ ID NO: 1527692
uagagcacgcagcaucauc

SEQ ID NO: 1527694 - RNA, 19 nt, Artificial Sequence
  Description of Artificial Sequence: Synthetic oligonucleotide
  Sense strand starting at position 3305 of SEQ ID NO: 1244988
gaugcugcgugcucuaguu

SEQ ID NO: 1527695 - RNA, 19 nt, Artificial Sequence
  Description of Artificial Sequence: Synthetic oligonucleotide
  Antisense strand to SEQ ID NO: 1527694
aacuagagcacgcagcauc

SEQ ID NO: 1527696 - RNA, 19 nt, Artificial Sequence
  Description of Artificial Sequence: Synthetic oligonucleotide
  Sense strand starting at position 3307 of SEQ ID NO: 1244988
ugcugcgugcucuaguuau

SEQ ID NO: 1527697 - RNA, 19 nt, Artificial Sequence
  Description of Artificial Sequence: Synthetic oligonucleotide
  Antisense strand to SEQ ID NO: 1527696
auaacuagagcacgcagca

SEQ ID NO: 1527698 - RNA, 19 nt, Artificial Sequence
  Description of Artificial Sequence: Synthetic oligonucleotide
  Sense strand starting at position 3309 of SEQ ID NO: 1244988
cugcgugcucuaguuauau

SEQ ID NO: 1527699 - RNA, 19 nt, Artificial Sequence
  Description of Artificial Sequence: Synthetic oligonucleotide
  Antisense strand to SEQ ID NO: 1527698
auauaacuagagcacgcag

SEQ ID NO: 1527700 - RNA, 19 nt, Artificial Sequence
  Description of Artificial Sequence: Synthetic oligonucleotide
  Sense strand starting at position 3311 of SEQ ID NO: 1244988
gcgugcucuaguuauauuu

SEQ ID NO: 1527701 - RNA, 19 nt, Artificial Sequence
  Description of Artificial Sequence: Synthetic oligonucleotide
  Antisense strand to SEQ ID NO: 1527700
aaauauaacuagagcacgc

SEQ ID NO: 1527702 - RNA, 19 nt, Artificial Sequence
  Description of Artificial Sequence: Synthetic oligonucleotide
  Sense strand starting at position 3313 of SEQ ID NO: 1244988
gugcucuaguuauauuuau

SEQ ID NO: 1527703 - RNA, 19 nt, Artificial Sequence
  Description of Artificial Sequence: Synthetic oligonucleotide
  Antisense strand to SEQ ID NO: 1527702
auaaauauaacuagagcac

SEQ ID NO: 1527704 - RNA, 19 nt, Artificial Sequence
  Description of Artificial Sequence: Synthetic oligonucleotide
  Sense strand starting at position 3553 of SEQ ID NO: 1244988
ggccaaaccuagcuaaguu

SEQ ID NO: 1527705 - RNA, 19 nt, Artificial Sequence
  Description of Artificial Sequence: Synthetic oligonucleotide
  Antisense strand to SEQ ID NO: 1527704
aacuuagcuagguuuggcc

SEQ ID NO: 1527706 - RNA, 19 nt, Artificial Sequence
  Description of Artificial Sequence: Synthetic oligonucleotide
  Sense strand starting at position 3588 of SEQ ID NO: 1244988
gagagagggucucgcuaau

SEQ ID NO: 1527707 - RNA, 19 nt, Artificial Sequence
  Description of Artificial Sequence: Synthetic oligonucleotide
  Antisense strand to SEQ ID NO: 1527706
auuagcgagacccucucuc

SEQ ID NO: 1527708 - RNA, 19 nt, Artificial Sequence
  Description of Artificial Sequence: Synthetic oligonucleotide
  Sense strand starting at position 3600 of SEQ ID NO: 1244988
cgcuaauguugcccaggau

SEQ ID NO: 1527709 - RNA, 19 nt, Artificial Sequence
  Description of Artificial Sequence: Synthetic oligonucleotide
  Antisense strand to SEQ ID NO: 1527708
auccugggcaacauuagcg

SEQ ID NO: 1527710 - RNA, 19 nt, Artificial Sequence
  Description of Artificial Sequence: Synthetic oligonucleotide
  Sense strand starting at position 3691 of SEQ ID NO: 1244988
cccagcuucuaguuaucuu

SEQ ID NO: 1527711 - RNA, 19 nt, Artificial Sequence
  Description of Artificial Sequence: Synthetic oligonucleotide
  Antisense strand to SEQ ID NO: 1527710
aagauaacuagaagcuggg

SEQ ID NO: 1527712 - RNA, 19 nt, Artificial Sequence
  Description of Artificial Sequence: Synthetic oligonucleotide
  Sense strand starting at position 3695 of SEQ ID NO: 1244988
gcuucuaguuaucuuuaca

SEQ ID NO: 1527713 - RNA, 19 nt, Artificial Sequence
  Description of Artificial Sequence: Synthetic oligonucleotide
  Antisense strand to SEQ ID NO: 1527712
uguaaagauaacuagaagc

SEQ ID NO: 1527714 - RNA, 19 nt, Artificial Sequence
  Description of Artificial Sequence: Synthetic oligonucleotide
  Sense strand starting at position 3740 of SEQ ID NO: 1244988
cucgaauugccucgauaua

SEQ ID NO: 1527715 - RNA, 19 nt, Artificial Sequence
  Description of Artificial Sequence: Synthetic oligonucleotide
  Antisense strand to SEQ ID NO: 1527714
uauaucgaggcaauucgag

SEQ ID NO: 1527716 - RNA, 19 nt, Artificial Sequence
  Description of Artificial Sequence: Synthetic oligonucleotide
  Sense strand starting at position 3741 of SEQ ID NO: 1244988
ucgaauugccucgauauaa

SEQ ID NO: 1527717 - RNA, 19 nt, Artificial Sequence
  Description of Artificial Sequence: Synthetic oligonucleotide
  Antisense strand to SEQ ID NO: 1527716
uuauaucgaggcaauucga

SEQ ID NO: 1527718 - RNA, 19 nt, Artificial Sequence
  Description of Artificial Sequence: Synthetic oligonucleotide
  Sense strand starting at position 3778 of SEQ ID NO: 1244988
ucgaaacucuauugcacaa

SEQ ID NO: 1527719 - RNA, 19 nt, Artificial Sequence
  Description of Artificial Sequence: Synthetic oligonucleotide
  Antisense strand to SEQ ID NO: 1527718
uugugcaauagaguuucga

SEQ ID NO: 1527720 - RNA, 19 nt, Artificial Sequence
  Description of Artificial Sequence: Synthetic oligonucleotide
  Sense strand starting at position 3925 of SEQ ID NO: 1244988
ccaggaugauagucucgau

SEQ ID NO: 1527721 - RNA, 19 nt, Artificial Sequence
  Description of Artificial Sequence: Synthetic oligonucleotide
  Antisense strand to SEQ ID NO: 1527720
aucgagacuaucauccugg

SEQ ID NO: 1527722 - RNA, 19 nt, Artificial Sequence
  Description of Artificial Sequence: Synthetic oligonucleotide
  Sense strand starting at position 3928 of SEQ ID NO: 1244988
ggaugauagucucgaucuc

SEQ ID NO: 1527723 - RNA, 19 nt, Artificial Sequence
  Description of Artificial Sequence: Synthetic oligonucleotide
  Antisense strand to SEQ ID NO: 1527722
gagaucgagacuaucaucc

SEQ ID NO: 1527724 - RNA, 19 nt, Artificial Sequence
  Description of Artificial Sequence: Synthetic oligonucleotide
  Sense strand starting at position 203 of SEQ ID NO: 1244989
gaugcaugcuaguuauaua

SEQ ID NO: 1527725 - RNA, 19 nt, Artificial Sequence
  Description of Artificial Sequence: Synthetic oligonucleotide
  Antisense strand to SEQ ID NO: 1527724
uauauaacuagcaugcauc

SEQ ID NO: 1527726 - RNA, 19 nt, Artificial Sequence
  Description of Artificial Sequence: Synthetic oligonucleotide
  Sense strand starting at position 251 of SEQ ID NO: 1244989
gguuuaucacauuauuagc

SEQ ID NO: 1527727 - RNA, 19 nt, Artificial Sequence
  Description of Artificial Sequence: Synthetic oligonucleotide
  Antisense strand to SEQ ID NO: 1527726
gcuaauaaugugauaaacc

SEQ ID NO: 1527728 - RNA, 19 nt, Artificial Sequence
  Description of Artificial Sequence: Synthetic oligonucleotide
  Sense strand starting at position 265 of SEQ ID NO: 1244989
uuagcaagcucaucaaagu

SEQ ID NO: 1527729 - RNA, 19 nt, Artificial Sequence
  Description of Artificial Sequence: Synthetic oligonucleotide
  Antisense strand to SEQ ID NO: 1527728
acuuugaugagcuugcuaa

SEQ ID NO: 1527730 - RNA, 19 nt, Artificial Sequence
  Description of Artificial Sequence: Synthetic oligonucleotide
  Sense strand starting at position 332 of SEQ ID NO: 1244989
uuccauaauguuggguauu

SEQ ID NO: 1527731 - RNA, 19 nt, Artificial Sequence
  Description of Artificial Sequence: Synthetic oligonucleotide
  Antisense strand to SEQ ID NO: 1527730
aauacccaacauuauggaa

SEQ ID NO: 1527732 - RNA, 19 nt, Artificial Sequence
  Description of Artificial Sequence: Synthetic oligonucleotide
  Sense strand starting at position 452 of SEQ ID NO: 1244989
uagguaauuucugaguuau

SEQ ID NO: 1527733 - RNA, 19 nt, Artificial Sequence
  Description of Artificial Sequence: Synthetic oligonucleotide
  Antisense strand to SEQ ID NO: 1527732
auaacucagaaauuaccua

SEQ ID NO: 1527734 - RNA, 19 nt, Artificial Sequence
  Description of Artificial Sequence: Synthetic oligonucleotide
  Sense strand starting at position 538 of SEQ ID NO: 1244989
gcauccguuccuguuaguu

SEQ ID NO: 1527735 - RNA, 19 nt, Artificial Sequence
  Description of Artificial Sequence: Synthetic oligonucleotide
  Antisense strand to SEQ ID NO: 1527734
aacuaacaggaacggaugc

SEQ ID NO: 1527736 - RNA, 19 nt, Artificial Sequence
  Description of Artificial Sequence: Synthetic oligonucleotide
  Sense strand starting at position 807 of SEQ ID NO: 1244989
gggcaagagaauugccaaa

SEQ ID NO: 1527737 - RNA, 19 nt, Artificial Sequence
  Description of Artificial Sequence: Synthetic oligonucleotide
  Antisense strand to SEQ ID NO: 1527736
uuuggcaauucucuugccc

SEQ ID NO: 1527738 - RNA, 19 nt, Artificial Sequence
  Description of Artificial Sequence: Synthetic oligonucleotide
  Sense strand starting at position 1120 of SEQ ID NO: 1244989
ucggcugagacuugggaaa

SEQ ID NO: 1527739 - RNA, 19 nt, Artificial Sequence
  Description of Artificial Sequence: Synthetic oligonucleotide
  Antisense strand to SEQ ID NO: 1527738
uuucccaagucucagccga

SEQ ID NO: 1527740 - RNA, 19 nt, Artificial Sequence
  Description of Artificial Sequence: Synthetic oligonucleotide
  Sense strand starting at position 2658 of SEQ ID NO: 1244989
augucauuacuggguuauu

SEQ ID NO: 1527741 - RNA, 19 nt, Artificial Sequence
  Description of Artificial Sequence: Synthetic oligonucleotide
  Antisense strand to SEQ ID NO: 1527740
aauaacccaguaaugacau

SEQ ID NO: 1527742 - RNA, 19 nt, Artificial Sequence
  Description of Artificial Sequence: Synthetic oligonucleotide
  Sense strand starting at position 2659 of SEQ ID NO: 1244989
ugucauuacuggguuauuc

SEQ ID NO: 1527743 - RNA, 19 nt, Artificial Sequence
  Description of Artificial Sequence: Synthetic oligonucleotide
  Antisense strand to SEQ ID NO: 1527742
gaauaacccaguaaugaca

SEQ ID NO: 1527744 - RNA, 19 nt, Artificial Sequence
  Description of Artificial Sequence: Synthetic oligonucleotide
  Sense strand starting at position 2661 of SEQ ID NO: 1244989
ucauuacuggguuauucuu

SEQ ID NO: 1527745 - RNA, 19 nt, Artificial Sequence
  Description of Artificial Sequence: Synthetic oligonucleotide
  Antisense strand to SEQ ID NO: 1527744
aagaauaacccaguaauga

SEQ ID NO: 1527746 - RNA, 19 nt, Artificial Sequence
  Description of Artificial Sequence: Synthetic oligonucleotide
  Sense strand starting at position 2668 of SEQ ID NO: 1244989
uggguuauucuugggugaa

SEQ ID NO: 1527747 - RNA, 19 nt, Artificial Sequence
  Description of Artificial Sequence: Synthetic oligonucleotide
  Antisense strand to SEQ ID NO: 1527746
uucacccaagaauaaccca

SEQ ID NO: 1527748 - RNA, 19 nt, Artificial Sequence
  Description of Artificial Sequence: Synthetic oligonucleotide
  Sense strand starting at position 2850 of SEQ ID NO: 1244989
ucgaacuucugguuggaca

SEQ ID NO: 1527749 - RNA, 19 nt, Artificial Sequence
  Description of Artificial Sequence: Synthetic oligonucleotide
  Antisense strand to SEQ ID NO: 1527748
uguccaaccagaaguucga

SEQ ID NO: 1527750 - RNA, 19 nt, Artificial Sequence
  Description of Artificial Sequence: Synthetic oligonucleotide
  Sense strand starting at position 2871 of SEQ ID NO: 1244989
gucagaugucacugaggug

SEQ ID NO: 1527751 - RNA, 19 nt, Artificial Sequence
  Description of Artificial Sequence: Synthetic oligonucleotide
  Antisense strand to SEQ ID NO: 1527750
caccucagugacaucugac

SEQ ID NO: 1527752 - RNA, 19 nt, Artificial Sequence
  Description of Artificial Sequence: Synthetic oligonucleotide
  Sense strand starting at position 2872 of SEQ ID NO: 1244989
ucagaugucacugagguga

SEQ ID NO: 1527753 - RNA, 19 nt, Artificial Sequence
  Description of Artificial Sequence: Synthetic oligonucleotide
  Antisense strand to SEQ ID NO: 1527752
ucaccucagugacaucuga

SEQ ID NO: 1527754 - RNA, 19 nt, Artificial Sequence
  Description of Artificial Sequence: Synthetic oligonucleotide
  Sense strand starting at position 2907 of SEQ ID NO: 1244989
guuccaagucuuccgugua

SEQ ID NO: 1527755 - RNA, 19 nt, Artificial Sequence
  Description of Artificial Sequence: Synthetic oligonucleotide
  Antisense strand to SEQ ID NO: 1527754
uacacggaagacuuggaac

SEQ ID NO: 1527756 - RNA, 19 nt, Artificial Sequence
  Description of Artificial Sequence: Synthetic oligonucleotide
  Sense strand starting at position 2951 of SEQ ID NO: 1244989
agaugaggagccuguauga

SEQ ID NO: 1527757 - RNA, 19 nt, Artificial Sequence
  Description of Artificial Sequence: Synthetic oligonucleotide
  Antisense strand to SEQ ID NO: 1527756
ucauacaggcuccucaucu

SEQ ID NO: 1527758 - RNA, 19 nt, Artificial Sequence
  Description of Artificial Sequence: Synthetic oligonucleotide
  Sense strand starting at position 2964 of SEQ ID NO: 1244989
guaugaugauguccugaac

SEQ ID NO: 1527759 - RNA, 19 nt, Artificial Sequence
  Description of Artificial Sequence: Synthetic oligonucleotide
  Antisense strand to SEQ ID NO: 1527758
guucaggacaucaucauac

SEQ ID NO: 1527760 - RNA, 19 nt, Artificial Sequence
  Description of Artificial Sequence: Synthetic oligonucleotide
  Sense strand starting at position 3016 of SEQ ID NO: 1244989
cugggaauaucagagacaa

SEQ ID NO: 1527761 - RNA, 19 nt, Artificial Sequence
  Description of Artificial Sequence: Synthetic oligonucleotide
  Antisense strand to SEQ ID NO: 1527760
uugucucugauauucccag

SEQ ID NO: 1527762 - RNA, 19 nt, Artificial Sequence
  Description of Artificial Sequence: Synthetic oligonucleotide
  Sense strand starting at position 3048 of SEQ ID NO: 1244989
aagugucucuaguccaaga

SEQ ID NO: 1527763 - RNA, 19 nt, Artificial Sequence
  Description of Artificial Sequence: Synthetic oligonucleotide
  Antisense strand to SEQ ID NO: 1527762
ucuuggacuagagacacuu

SEQ ID NO: 1527764 - RNA, 19 nt, Artificial Sequence
  Description of Artificial Sequence: Synthetic oligonucleotide
  Sense strand starting at position 3050 of SEQ ID NO: 1244989
gugucucuaguccaagaca

SEQ ID NO: 1527765 - RNA, 19 nt, Artificial Sequence
  Description of Artificial Sequence: Synthetic oligonucleotide
  Antisense strand to SEQ ID NO: 1527764
ugucuuggacuagagacac

SEQ ID NO: 1527766 - RNA, 19 nt, Artificial Sequence
  Description of Artificial Sequence: Synthetic oligonucleotide
  Sense strand starting at position 3069 of SEQ ID NO: 1244989
ucuccuguggcagggaaau

SEQ ID NO: 1527767 - RNA, 19 nt, Artificial Sequence
  Description of Artificial Sequence: Synthetic oligonucleotide
  Antisense strand to SEQ ID NO: 1527766
auuucccugccacaggaga

SEQ ID NO: 1527768 - RNA, 19 nt, Artificial Sequence
  Description of Artificial Sequence: Synthetic oligonucleotide
  Sense strand starting at position 3095 of SEQ ID NO: 1244989
caggcuguaucagugauau

SEQ ID NO: 1527769 - RNA, 19 nt, Artificial Sequence
  Description of Artificial Sequence: Synthetic oligonucleotide
  Antisense strand to SEQ ID NO: 1527768
auaucacugauacagccug

SEQ ID NO: 1527770 - RNA, 19 nt, Artificial Sequence
  Description of Artificial Sequence: Synthetic oligonucleotide
  Sense strand starting at position 3223 of SEQ ID NO: 1244989
agacacuucuaaucaaggu

SEQ ID NO: 1527771 - RNA, 19 nt, Artificial Sequence
  Description of Artificial Sequence: Synthetic oligonucleotide
  Antisense strand to SEQ ID NO: 1527770
accuugauuagaagugucu

SEQ ID NO: 1527772 - RNA, 19 nt, Artificial Sequence
  Description of Artificial Sequence: Synthetic oligonucleotide
  Sense strand starting at position 3320 of SEQ ID NO: 1244989
guaauuugacaguguguuu

SEQ ID NO: 1527773 - RNA, 19 nt, Artificial Sequence
  Description of Artificial Sequence: Synthetic oligonucleotide
  Antisense strand to SEQ ID NO: 1527772
aaacacacugucaaauuac

SEQ ID NO: 1527774 - RNA, 19 nt, Artificial Sequence
  Description of Artificial Sequence: Synthetic oligonucleotide
  Sense strand starting at position 3568 of SEQ ID NO: 1244989
augaaagaguuucugauac

SEQ ID NO: 1527775 - RNA, 19 nt, Artificial Sequence
  Description of Artificial Sequence: Synthetic oligonucleotide
  Antisense strand to SEQ ID NO: 1527774
guaucagaaacucuuucau

SEQ ID NO: 1527776 - RNA, 19 nt, Artificial Sequence
  Description of Artificial Sequence: Synthetic oligonucleotide
  Sense strand starting at position 3616 of SEQ ID NO: 1244989
ccaugucuccuguaauguc

SEQ ID NO: 1527777 - RNA, 19 nt, Artificial Sequence
  Description of Artificial Sequence: Synthetic oligonucleotide
  Antisense strand to SEQ ID NO: 1527776
gacauuacaggagacaugg

SEQ ID NO: 1527778 - RNA, 19 nt, Artificial Sequence
  Description of Artificial Sequence: Synthetic oligonucleotide
  Sense strand starting at position 3623 of SEQ ID NO: 1244989
uccuguaauguccaaaccu

SEQ ID NO: 1527779 - RNA, 19 nt, Artificial Sequence
  Description of Artificial Sequence: Synthetic oligonucleotide
  Antisense strand to SEQ ID NO: 1527778
agguuuggacauuacagga

SEQ ID NO: 1527780 - RNA, 19 nt, Artificial Sequence
  Description of Artificial Sequence: Synthetic oligonucleotide
  Sense strand starting at position 3678 of SEQ ID NO: 1244989
uugcucugaccuuggacaa

SEQ ID NO: 1527781 - RNA, 19 nt, Artificial Sequence
  Description of Artificial Sequence: Synthetic oligonucleotide
  Antisense strand to SEQ ID NO: 1527780
uuguccaaggucagagcaa

SEQ ID NO: 1527782 - RNA, 19 nt, Artificial Sequence
  Description of Artificial Sequence: Synthetic oligonucleotide
  Sense strand starting at position 3679 of SEQ ID NO: 1244989
ugcucugaccuuggacaau

SEQ ID NO: 1527783 - RNA, 19 nt, Artificial Sequence
  Description of Artificial Sequence: Synthetic oligonucleotide
  Antisense strand to SEQ ID NO: 1527782
auuguccaaggucagagca

SEQ ID NO: 1527784 - RNA, 19 nt, Artificial Sequence
  Description of Artificial Sequence: Synthetic oligonucleotide
  Sense strand starting at position 3756 of SEQ ID NO: 1244989
cacucaaggucucugugau

SEQ ID NO: 1527785 - RNA, 19 nt, Artificial Sequence
  Description of Artificial Sequence: Synthetic oligonucleotide
  Antisense strand to SEQ ID NO: 1527784
aucacagagaccuugagug

SEQ ID NO: 1527786 - RNA, 19 nt, Artificial Sequence
  Description of Artificial Sequence: Synthetic oligonucleotide
  Sense strand starting at position 3757 of SEQ ID NO: 1244989
acucaaggucucugugaug

SEQ ID NO: 1527787 - RNA, 19 nt, Artificial Sequence
  Description of Artificial Sequence: Synthetic oligonucleotide
  Antisense strand to SEQ ID NO: 1527786
caucacagagaccuugagu

SEQ ID NO: 1527788 - RNA, 19 nt, Artificial Sequence
  Description of Artificial Sequence: Synthetic oligonucleotide
  Sense strand starting at position 3769 of SEQ ID NO: 1244989
ugugaugcacuccagaguu

SEQ ID NO: 1527789 - RNA, 19 nt, Artificial Sequence
  Description of Artificial Sequence: Synthetic oligonucleotide
  Antisense strand to SEQ ID NO: 1527788
aacucuggagugcaucaca

SEQ ID NO: 1527790 - RNA, 19 nt, Artificial Sequence
  Description of Artificial Sequence: Synthetic oligonucleotide
  Sense strand starting at position 3894 of SEQ ID NO: 1244989
augacaauaucgcuggacu

SEQ ID NO: 1527791 - RNA, 19 nt, Artificial Sequence
  Description of Artificial Sequence: Synthetic oligonucleotide
  Antisense strand to SEQ ID NO: 1527790
aguccagcgauauugucau

SEQ ID NO: 1527792 - RNA, 19 nt, Artificial Sequence
  Description of Artificial Sequence: Synthetic oligonucleotide
  Sense strand starting at position 3895 of SEQ ID NO: 1244989
ugacaauaucgcuggacuc

SEQ ID NO: 1527793 - RNA, 19 nt, Artificial Sequence
  Description of Artificial Sequence: Synthetic oligonucleotide
  Antisense strand to SEQ ID NO: 1527792
gaguccagcgauauuguca

SEQ ID NO: 1527794 - RNA, 19 nt, Artificial Sequence
  Description of Artificial Sequence: Synthetic oligonucleotide
  Sense strand starting at position 3896 of SEQ ID NO: 1244989
gacaauaucgcuggacucu

SEQ ID NO: 1527795 - RNA, 19 nt, Artificial Sequence
  Description of Artificial Sequence: Synthetic oligonucleotide
  Antisense strand to SEQ ID NO: 1527794
agaguccagcgauauuguc

SEQ ID NO: 1527796 - RNA, 19 nt, Artificial Sequence
  Description of Artificial Sequence: Synthetic oligonucleotide
  Sense strand starting at position 3897 of SEQ ID NO: 1244989
acaauaucgcuggacucuu

SEQ ID NO: 1527797 - RNA, 19 nt, Artificial Sequence
  Description of Artificial Sequence: Synthetic oligonucleotide
  Antisense strand to SEQ ID NO: 1527796
aagaguccagcgauauugu

SEQ ID NO: 1527798 - RNA, 19 nt, Artificial Sequence
  Description of Artificial Sequence: Synthetic oligonucleotide
  Sense strand starting at position 3918 of SEQ ID NO: 1244989
acuuguuaugcugggaucu

SEQ ID NO: 1527799 - RNA, 19 nt, Artificial Sequence
  Description of Artificial Sequence: Synthetic oligonucleotide
  Antisense strand to SEQ ID NO: 1527798
agaucccagcauaacaagu

SEQ ID NO: 1527800 - RNA, 19 nt, Artificial Sequence
  Description of Artificial Sequence: Synthetic oligonucleotide
  Sense strand starting at position 3919 of SEQ ID NO: 1244989
cuuguuaugcugggaucua

SEQ ID NO: 1527801 - RNA, 19 nt, Artificial Sequence
  Description of Artificial Sequence: Synthetic oligonucleotide
  Antisense strand to SEQ ID NO: 1527800
uagaucccagcauaacaag

SEQ ID NO: 1527802 - RNA, 19 nt, Artificial Sequence
  Description of Artificial Sequence: Synthetic oligonucleotide
  Sense strand starting at position 3977 of SEQ ID NO: 1244989
ggaagcgguuucccacuaa

SEQ ID NO: 1527803 - RNA, 19 nt, Artificial Sequence
  Description of Artificial Sequence: Synthetic oligonucleotide
  Antisense strand to SEQ ID NO: 1527802
uuagugggaaaccgcuucc

SEQ ID NO: 1527804 - RNA, 19 nt, Artificial Sequence
  Description of Artificial Sequence: Synthetic oligonucleotide
  Sense strand starting at position 2 of SEQ ID NO: 1244990
ugcagacucucucagaaag

SEQ ID NO: 1527805 - RNA, 19 nt, Artificial Sequence
  Description of Artificial Sequence: Synthetic oligonucleotide
  Antisense strand to SEQ ID NO: 1527804
cuuucugagagagucugca

SEQ ID NO: 1527806 - RNA, 19 nt, Artificial Sequence
  Description of Artificial Sequence: Synthetic oligonucleotide
  Sense strand starting at position 434 of SEQ ID NO: 1244990
auguaugccucaccuaaug

SEQ ID NO: 1527807 - RNA, 19 nt, Artificial Sequence
  Description of Artificial Sequence: Synthetic oligonucleotide
  Antisense strand to SEQ ID NO: 1527806
cauuaggugaggcauacau

SEQ ID NO: 1527808 - RNA, 19 nt, Artificial Sequence
  Description of Artificial Sequence: Synthetic oligonucleotide
  Sense strand starting at position 1028 of SEQ ID NO: 1244990
gggcaauggucacuccagu

SEQ ID NO: 1527809 - RNA, 19 nt, Artificial Sequence
  Description of Artificial Sequence: Synthetic oligonucleotide
  Antisense strand to SEQ ID NO: 1527808
acuggagugaccauugccc

SEQ ID NO: 1527810 - RNA, 19 nt, Artificial Sequence
  Description of Artificial Sequence: Synthetic oligonucleotide
  Sense strand starting at position 1125 of SEQ ID NO: 1244990
cuguguugucaccgagggu

SEQ ID NO: 1527811 - RNA, 19 nt, Artificial Sequence
  Description of Artificial Sequence: Synthetic oligonucleotide
  Antisense strand to SEQ ID NO: 1527810
acccucggugacaacacag

SEQ ID NO: 1527812 - RNA, 19 nt, Artificial Sequence
  Description of Artificial Sequence: Synthetic oligonucleotide
  Sense strand starting at position 1269 of SEQ ID NO: 1244990
ucaccaagcccuugagacu

SEQ ID NO: 1527813 - RNA, 19 nt, Artificial Sequence
  Description of Artificial Sequence: Synthetic oligonucleotide
  Antisense strand to SEQ ID NO: 1527812
agucucaagggcuugguga

SEQ ID NO: 1527814 - RNA, 19 nt, Artificial Sequence
  Description of Artificial Sequence: Synthetic oligonucleotide
  Sense strand starting at position 1293 of SEQ ID NO: 1244990
agccaagugcuguguauau

SEQ ID NO: 1527815 - RNA, 19 nt, Artificial Sequence
  Description of Artificial Sequence: Synthetic oligonucleotide
  Antisense strand to SEQ ID NO: 1527814
auauacacagcacuuggcu

SEQ ID NO: 1527816 - RNA, 19 nt, Artificial Sequence
  Description of Artificial Sequence: Synthetic oligonucleotide
  Sense strand starting at position 1295 of SEQ ID NO: 1244990
ccaagugcuguguauauga

SEQ ID NO: 1527817 - RNA, 19 nt, Artificial Sequence
  Description of Artificial Sequence: Synthetic oligonucleotide
  Antisense strand to SEQ ID NO: 1527816
ucauauacacagcacuugg

SEQ ID NO: 1527818 - RNA, 19 nt, Artificial Sequence
  Description of Artificial Sequence: Synthetic oligonucleotide
  Sense strand starting at position 1425 of SEQ ID NO: 1244990
gccuguugcgacggaguau

SEQ ID NO: 1527819 - RNA, 19 nt, Artificial Sequence
  Description of Artificial Sequence: Synthetic oligonucleotide
  Antisense strand to SEQ ID NO: 1527818
auacuccgucgcaacaggc

SEQ ID NO: 1527820 - RNA, 19 nt, Artificial Sequence
  Description of Artificial Sequence: Synthetic oligonucleotide
  Sense strand starting at position 1429 of SEQ ID NO: 1244990
guugcgacggaguauguaa

SEQ ID NO: 1527821 - RNA, 19 nt, Artificial Sequence
  Description of Artificial Sequence: Synthetic oligonucleotide
  Antisense strand to SEQ ID NO: 1527820
uuacauacuccgucgcaac

SEQ ID NO: 1527822 - RNA, 19 nt, Artificial Sequence
  Description of Artificial Sequence: Synthetic oligonucleotide
  Sense strand starting at position 1431 of SEQ ID NO: 1244990
ugcgacggaguauguaaua

SEQ ID NO: 1527823 - RNA, 19 nt, Artificial Sequence
  Description of Artificial Sequence: Synthetic oligonucleotide
  Antisense strand to SEQ ID NO: 1527822
uauuacauacuccgucgca

SEQ ID NO: 1527824 - RNA, 19 nt, Artificial Sequence
  Description of Artificial Sequence: Synthetic oligonucleotide
  Sense strand starting at position 1582 of SEQ ID NO: 1244990
cagugucgucgccaggaau

SEQ ID NO: 1527825 - RNA, 19 nt, Artificial Sequence
  Description of Artificial Sequence: Synthetic oligonucleotide
  Antisense strand to SEQ ID NO: 1527824
auuccuggcgacgacacug

SEQ ID NO: 1527826 - RNA, 19 nt, Artificial Sequence
  Description of Artificial Sequence: Synthetic oligonucleotide
  Sense strand starting at position 1583 of SEQ ID NO: 1244990
agugucgucgccaggaaug

SEQ ID NO: 1527827 - RNA, 19 nt, Artificial Sequence
  Description of Artificial Sequence: Synthetic oligonucleotide
  Antisense strand to SEQ ID NO: 1527826
cauuccuggcgacgacacu

SEQ ID NO: 1527828 - RNA, 19 nt, Artificial Sequence
  Description of Artificial Sequence: Synthetic oligonucleotide
  Sense strand starting at position 1642 of SEQ ID NO: 1244990
gggcgagucacggaauuau

SEQ ID NO: 1527829 - RNA, 19 nt, Artificial Sequence
  Description of Artificial Sequence: Synthetic oligonucleotide
  Antisense strand to SEQ ID NO: 1527828
auaauuccgugacucgccc

SEQ ID NO: 1527830 - RNA, 19 nt, Artificial Sequence
  Description of Artificial Sequence: Synthetic oligonucleotide
  Sense strand starting at position 1744 of SEQ ID NO: 1244990
cgaagaauccaucgggaca

SEQ ID NO: 1527831 - RNA, 19 nt, Artificial Sequence
  Description of Artificial Sequence: Synthetic oligonucleotide
  Antisense strand to SEQ ID NO: 1527830
ugucccgauggauucuucg

SEQ ID NO: 1527832 - RNA, 19 nt, Artificial Sequence
  Description of Artificial Sequence: Synthetic oligonucleotide
  Sense strand starting at position 1746 of SEQ ID NO: 1244990
aagaauccaucgggacaca

SEQ ID NO: 1527833 - RNA, 19 nt, Artificial Sequence
  Description of Artificial Sequence: Synthetic oligonucleotide
  Antisense strand to SEQ ID NO: 1527832
ugugucccgauggauucuu

SEQ ID NO: 1527834 - RNA, 19 nt, Artificial Sequence
  Description of Artificial Sequence: Synthetic oligonucleotide
  Sense strand starting at position 1835 of SEQ ID NO: 1244990
gccaucugucugugcacau

SEQ ID NO: 1527835 - RNA, 19 nt, Artificial Sequence
  Description of Artificial Sequence: Synthetic oligonucleotide
  Antisense strand to SEQ ID NO: 1527834
augugcacagacagauggc

SEQ ID NO: 1527836 - RNA, 19 nt, Artificial Sequence
  Description of Artificial Sequence: Synthetic oligonucleotide
  Sense strand starting at position 1918 of SEQ ID NO: 1244990
uccuguagcgucugugaau

SEQ ID NO: 1527837 - RNA, 19 nt, Artificial Sequence
  Description of Artificial Sequence: Synthetic oligonucleotide
  Antisense strand to SEQ ID NO: 1527836
auucacagacgcuacagga

SEQ ID NO: 1527838 - RNA, 19 nt, Artificial Sequence
  Description of Artificial Sequence: Synthetic oligonucleotide
  Sense strand starting at position 1919 of SEQ ID NO: 1244990
ccuguagcgucugugaauc

SEQ ID NO: 1527839 - RNA, 19 nt, Artificial Sequence
  Description of Artificial Sequence: Synthetic oligonucleotide
  Antisense strand to SEQ ID NO: 1527838
gauucacagacgcuacagg

SEQ ID NO: 1527840 - RNA, 19 nt, Artificial Sequence
  Description of Artificial Sequence: Synthetic oligonucleotide
  Sense strand starting at position 1949 of SEQ ID NO: 1244990
gcagauuuauaucaguuug

SEQ ID NO: 1527841 - RNA, 19 nt, Artificial Sequence
  Description of Artificial Sequence: Synthetic oligonucleotide
  Antisense strand to SEQ ID NO: 1527840
caaacugauauaaaucugc

SEQ ID NO: 1527842 - RNA, 19 nt, Artificial Sequence
  Description of Artificial Sequence: Synthetic oligonucleotide
  Sense strand starting at position 2136 of SEQ ID NO: 1244990
uuuacuauaggcuacgaau

SEQ ID NO: 1527843 - RNA, 19 nt, Artificial Sequence
  Description of Artificial Sequence: Synthetic oligonucleotide
  Antisense strand to SEQ ID NO: 1527842
auucguagccuauaguaaa

SEQ ID NO: 1527844 - RNA, 19 nt, Artificial Sequence
  Description of Artificial Sequence: Synthetic oligonucleotide
  Sense strand starting at position 2139 of SEQ ID NO: 1244990
acuauaggcuacgaauuau

SEQ ID NO: 1527845 - RNA, 19 nt, Artificial Sequence
  Description of Artificial Sequence: Synthetic oligonucleotide
  Antisense strand to SEQ ID NO: 1527844
auaauucguagccuauagu

SEQ ID NO: 1527846 - RNA, 19 nt, Artificial Sequence
  Description of Artificial Sequence: Synthetic oligonucleotide
  Sense strand starting at position 2151 of SEQ ID NO: 1244990
gaauuaugguuagcgcuuu

SEQ ID NO: 1527847 - RNA, 19 nt, Artificial Sequence
  Description of Artificial Sequence: Synthetic oligonucleotide
  Antisense strand to SEQ ID NO: 1527846
aaagcgcuaaccauaauuc

SEQ ID NO: 1527848 - RNA, 19 nt, Artificial Sequence
  Description of Artificial Sequence: Synthetic oligonucleotide
  Sense strand starting at position 2285 of SEQ ID NO: 1244990
caagcaagcugggaaacau

SEQ ID NO: 1527849 - RNA, 19 nt, Artificial Sequence
  Description of Artificial Sequence: Synthetic oligonucleotide
  Antisense strand to SEQ ID NO: 1527848
auguuucccagcuugcuug

SEQ ID NO: 1527850 - RNA, 19 nt, Artificial Sequence
  Description of Artificial Sequence: Synthetic oligonucleotide
  Sense strand starting at position 2442 of SEQ ID NO: 1244990
ggacaagaauccucgaacu

SEQ ID NO: 1527851 - RNA, 19 nt, Artificial Sequence
  Description of Artificial Sequence: Synthetic oligonucleotide
  Antisense strand to SEQ ID NO: 1527850
aguucgaggauucuugucc

SEQ ID NO: 1527852 - RNA, 19 nt, Artificial Sequence
  Description of Artificial Sequence: Synthetic oligonucleotide
  Sense strand starting at position 2494 of SEQ ID NO: 1244990
gucucuuccuccucugaga

SEQ ID NO: 1527853 - RNA, 19 nt, Artificial Sequence
  Description of Artificial Sequence: Synthetic oligonucleotide
  Antisense strand to SEQ ID NO: 1527852
ucucagaggaggaagagac

SEQ ID NO: 1527854 - RNA, 19 nt, Artificial Sequence
  Description of Artificial Sequence: Synthetic oligonucleotide
  Sense strand starting at position 2511 of SEQ ID NO: 1244990
gaggucuucugagagcuca

SEQ ID NO: 1527855 - RNA, 19 nt, Artificial Sequence
  Description of Artificial Sequence: Synthetic oligonucleotide
  Antisense strand to SEQ ID NO: 1527854
ugagcucucagaagaccuc

SEQ ID NO: 1527856 - RNA, 19 nt, Artificial Sequence
  Description of Artificial Sequence: Synthetic oligonucleotide
  Sense strand starting at position 2532 of SEQ ID NO: 1244990
gcccuaacaccuugagaau

SEQ ID NO: 1527857 - RNA, 19 nt, Artificial Sequence
  Description of Artificial Sequence: Synthetic oligonucleotide
  Antisense strand to SEQ ID NO: 1527856
auucucaagguguuagggc

SEQ ID NO: 1527858 - RNA, 19 nt, Artificial Sequence
  Description of Artificial Sequence: Synthetic oligonucleotide
  Sense strand starting at position 2984 of SEQ ID NO: 1244990
ugcuuucuguauccuuaua

SEQ ID NO: 1527859 - RNA, 19 nt, Artificial Sequence
  Description of Artificial Sequence: Synthetic oligonucleotide
  Antisense strand to SEQ ID NO: 1527858
uauaaggauacagaaagca

SEQ ID NO: 1527860 - RNA, 19 nt, Artificial Sequence
  Description of Artificial Sequence: Synthetic oligonucleotide
  Sense strand starting at position 3204 of SEQ ID NO: 1244990
gcgauucucuucccuuaac

SEQ ID NO: 1527861 - RNA, 19 nt, Artificial Sequence
  Description of Artificial Sequence: Synthetic oligonucleotide
  Antisense strand to SEQ ID NO: 1527860
guuaagggaagagaaucgc

SEQ ID NO: 1527862 - RNA, 19 nt, Artificial Sequence
  Description of Artificial Sequence: Synthetic oligonucleotide
  Sense strand starting at position 3493 of SEQ ID NO: 1244990
uggcuuaagcaauauucca

SEQ ID NO: 1527863 - RNA, 19 nt, Artificial Sequence
  Description of Artificial Sequence: Synthetic oligonucleotide
  Antisense strand to SEQ ID NO: 1527862
uggaauauugcuuaagcca

SEQ ID NO: 1527864 - RNA, 19 nt, Artificial Sequence
  Description of Artificial Sequence: Synthetic oligonucleotide
  Sense strand starting at position 3514 of SEQ ID NO: 1244990
ugcuguaagcaagaauaac

SEQ ID NO: 1527865 - RNA, 19 nt, Artificial Sequence
  Description of Artificial Sequence: Synthetic oligonucleotide
  Antisense strand to SEQ ID NO: 1527864
guuauucuugcuuacagca

SEQ ID NO: 1527866 - RNA, 19 nt, Artificial Sequence
  Description of Artificial Sequence: Synthetic oligonucleotide
  Sense strand starting at position 3597 of SEQ ID NO: 1244990
gaccuugagcucugugaag

SEQ ID NO: 1527867 - RNA, 19 nt, Artificial Sequence
  Description of Artificial Sequence: Synthetic oligonucleotide
  Antisense strand to SEQ ID NO: 1527866
cuucacagagcucaagguc

SEQ ID NO: 1527868 - RNA, 19 nt, Artificial Sequence
  Description of Artificial Sequence: Synthetic oligonucleotide
  Sense strand starting at position 3645 of SEQ ID NO: 1244990
ugcggaaguacuuaauaaa

SEQ ID NO: 1527869 - RNA, 19 nt, Artificial Sequence
  Description of Artificial Sequence: Synthetic oligonucleotide
  Antisense strand to SEQ ID NO: 1527868
uuuauuaaguacuuccgca

SEQ ID NO: 1527870 - RNA, 19 nt, Artificial Sequence
  Description of Artificial Sequence: Synthetic oligonucleotide
  Sense strand starting at position 3667 of SEQ ID NO: 1244990
uggugcaaugaaugauuga

SEQ ID NO: 1527871 - RNA, 19 nt, Artificial Sequence
  Description of Artificial Sequence: Synthetic oligonucleotide
  Antisense strand to SEQ ID NO: 1527870
ucaaucauucauugcacca

SEQ ID NO: 1527872 - RNA, 19 nt, Artificial Sequence
  Description of Artificial Sequence: Synthetic oligonucleotide
  Sense strand starting at position 3729 of SEQ ID NO: 1244990
aaggauaaagccugacgua

SEQ ID NO: 1527873 - RNA, 19 nt, Artificial Sequence
  Description of Artificial Sequence: Synthetic oligonucleotide
  Antisense strand to SEQ ID NO: 1527872
uacgucaggcuuuauccuu

SEQ ID NO: 1527874 - RNA, 19 nt, Artificial Sequence
  Description of Artificial Sequence: Synthetic oligonucleotide
  Sense strand starting at position 3738 of SEQ ID NO: 1244990
gccugacguacguauauga

SEQ ID NO: 1527875 - RNA, 19 nt, Artificial Sequence
  Description of Artificial Sequence: Synthetic oligonucleotide
  Antisense strand to SEQ ID NO: 1527874
ucauauacguacgucaggc

SEQ ID NO: 1527876 - RNA, 19 nt, Artificial Sequence
  Description of Artificial Sequence: Synthetic oligonucleotide
  Sense strand starting at position 3745 of SEQ ID NO: 1244990
guacguauaugauugcaag

SEQ ID NO: 1527877 - RNA, 19 nt, Artificial Sequence
  Description of Artificial Sequence: Synthetic oligonucleotide
  Antisense strand to SEQ ID NO: 1527876
cuugcaaucauauacguac

SEQ ID NO: 1527878 - RNA, 19 nt, Artificial Sequence
  Description of Artificial Sequence: Synthetic oligonucleotide
  Sense strand starting at position 3746 of SEQ ID NO: 1244990
uacguauaugauugcaaga

SEQ ID NO: 1527879 - RNA, 19 nt, Artificial Sequence
  Description of Artificial Sequence: Synthetic oligonucleotide
  Antisense strand to SEQ ID NO: 1527878
ucuugcaaucauauacgua

SEQ ID NO: 1527880 - RNA, 19 nt, Artificial Sequence
  Description of Artificial Sequence: Synthetic oligonucleotide
  Sense strand starting at position 3756 of SEQ ID NO: 1244990
auugcaagaggucauguau

SEQ ID NO: 1527881 - RNA, 19 nt, Artificial Sequence
  Description of Artificial Sequence: Synthetic oligonucleotide
  Antisense strand to SEQ ID NO: 1527880
auacaugaccucuugcaau

SEQ ID NO: 1527882 - RNA, 19 nt, Artificial Sequence
  Description of Artificial Sequence: Synthetic oligonucleotide
  Sense strand starting at position 3764 of SEQ ID NO: 1244990
aggucauguauccagguca

SEQ ID NO: 1527883 - RNA, 19 nt, Artificial Sequence
  Description of Artificial Sequence: Synthetic oligonucleotide
  Antisense strand to SEQ ID NO: 1527882
ugaccuggauacaugaccu

SEQ ID NO: 1527884 - RNA, 19 nt, Artificial Sequence
  Description of Artificial Sequence: Synthetic oligonucleotide
  Sense strand starting at position 56 of SEQ ID NO: 1244991
ucagaauguuagguaaccu

SEQ ID NO: 1527885 - RNA, 19 nt, Artificial Sequence
  Description of Artificial Sequence: Synthetic oligonucleotide
  Antisense strand to SEQ ID NO: 1527884
agguuaccuaacauucuga

SEQ ID NO: 1527886 - RNA, 19 nt, Artificial Sequence
  Description of Artificial Sequence: Synthetic oligonucleotide
  Sense strand starting at position 67 of SEQ ID NO: 1244991
gguaaccuaucagccauua

SEQ ID NO: 1527887 - RNA, 19 nt, Artificial Sequence
  Description of Artificial Sequence: Synthetic oligonucleotide
  Antisense strand to SEQ ID NO: 1527886
uaauggcugauagguuacc

SEQ ID NO: 1527888 - RNA, 19 nt, Artificial Sequence
  Description of Artificial Sequence: Synthetic oligonucleotide
  Sense strand starting at position 257 of SEQ ID NO: 1244991
gcaguuauauaaucaagaa

SEQ ID NO: 1527889 - RNA, 19 nt, Artificial Sequence
  Description of Artificial Sequence: Synthetic oligonucleotide
  Antisense strand to SEQ ID NO: 1527888
uucuugauuauauaacugc

SEQ ID NO: 1527890 - RNA, 19 nt, Artificial Sequence
  Description of Artificial Sequence: Synthetic oligonucleotide
  Sense strand starting at position 412 of SEQ ID NO: 1244991
uuuaacuagcuauagguaa

SEQ ID NO: 1527891 - RNA, 19 nt, Artificial Sequence
  Description of Artificial Sequence: Synthetic oligonucleotide
  Antisense strand to SEQ ID NO: 1527890
uuaccuauagcuaguuaaa

SEQ ID NO: 1527892 - RNA, 19 nt, Artificial Sequence
  Description of Artificial Sequence: Synthetic oligonucleotide
  Sense strand starting at position 468 of SEQ ID NO: 1244991
ucuggaaugugacucauag

SEQ ID NO: 1527893 - RNA, 19 nt, Artificial Sequence
  Description of Artificial Sequence: Synthetic oligonucleotide
  Antisense strand to SEQ ID NO: 1527892
cuaugagucacauuccaga

SEQ ID NO: 1527894 - RNA, 19 nt, Artificial Sequence
  Description of Artificial Sequence: Synthetic oligonucleotide
  Sense strand starting at position 509 of SEQ ID NO: 1244991
uguaaucaaguaggauaua

SEQ ID NO: 1527895 - RNA, 19 nt, Artificial Sequence
  Description of Artificial Sequence: Synthetic oligonucleotide
  Antisense strand to SEQ ID NO: 1527894
uauauccuacuugauuaca

SEQ ID NO: 1527896 - RNA, 19 nt, Artificial Sequence
  Description of Artificial Sequence: Synthetic oligonucleotide
  Sense strand starting at position 562 of SEQ ID NO: 1244991
aagauaauguaggcaaagu

SEQ ID NO: 1527897 - RNA, 19 nt, Artificial Sequence
  Description of Artificial Sequence: Synthetic oligonucleotide
  Antisense strand to SEQ ID NO: 1527896
acuuugccuacauuaucuu

SEQ ID NO: 1527898 - RNA, 19 nt, Artificial Sequence
  Description of Artificial Sequence: Synthetic oligonucleotide
  Sense strand starting at position 632 of SEQ ID NO: 1244991
cagucacauuugucuaggu

SEQ ID NO: 1527899 - RNA, 19 nt, Artificial Sequence
  Description of Artificial Sequence: Synthetic oligonucleotide
  Antisense strand to SEQ ID NO: 1527898
accuagacaaaugugacug

SEQ ID NO: 1527900 - RNA, 19 nt, Artificial Sequence
  Description of Artificial Sequence: Synthetic oligonucleotide
  Sense strand starting at position 693 of SEQ ID NO: 1244991
auacaaugaugccuaguaa

SEQ ID NO: 1527901 - RNA, 19 nt, Artificial Sequence
  Description of Artificial Sequence: Synthetic oligonucleotide
  Antisense strand to SEQ ID NO: 1527900
uuacuaggcaucauuguau

SEQ ID NO: 1527902 - RNA, 19 nt, Artificial Sequence
  Description of Artificial Sequence: Synthetic oligonucleotide
  Sense strand starting at position 694 of SEQ ID NO: 1244991
uacaaugaugccuaguaag

SEQ ID NO: 1527903 - RNA, 19 nt, Artificial Sequence
  Description of Artificial Sequence: Synthetic oligonucleotide
  Antisense strand to SEQ ID NO: 1527902
cuuacuaggcaucauugua

SEQ ID NO: 1527904 - RNA, 19 nt, Artificial Sequence
  Description of Artificial Sequence: Synthetic oligonucleotide
  Sense strand starting at position 774 of SEQ ID NO: 1244991
auacaauuacuagguagua

SEQ ID NO: 1527905 - RNA, 19 nt, Artificial Sequence
  Description of Artificial Sequence: Synthetic oligonucleotide
  Antisense strand to SEQ ID NO: 1527904
uacuaccuaguaauuguau

SEQ ID NO: 1527906 - RNA, 19 nt, Artificial Sequence
  Description of Artificial Sequence: Synthetic oligonucleotide
  Sense strand starting at position 787 of SEQ ID NO: 1244991
guaguagcaacuggaauau

SEQ ID NO: 1527907 - RNA, 19 nt, Artificial Sequence
  Description of Artificial Sequence: Synthetic oligonucleotide
  Antisense strand to SEQ ID NO: 1527906
auauuccaguugcuacuac

SEQ ID NO: 1527908 - RNA, 19 nt, Artificial Sequence
  Description of Artificial Sequence: Synthetic oligonucleotide
  Sense strand starting at position 961 of SEQ ID NO: 1244991
gccagucuacguguauuau

SEQ ID NO: 1527909 - RNA, 19 nt, Artificial Sequence
  Description of Artificial Sequence: Synthetic oligonucleotide
  Antisense strand to SEQ ID NO: 1527908
auaauacacguagacuggc

SEQ ID NO: 1527910 - RNA, 19 nt, Artificial Sequence
  Description of Artificial Sequence: Synthetic oligonucleotide
  Sense strand starting at position 992 of SEQ ID NO: 1244991
uggaguugcagguaaauaa

SEQ ID NO: 1527911 - RNA, 19 nt, Artificial Sequence
  Description of Artificial Sequence: Synthetic oligonucleotide
  Antisense strand to SEQ ID NO: 1527910
uuauuuaccugcaacucca

SEQ ID NO: 1527912 - RNA, 19 nt, Artificial Sequence
  Description of Artificial Sequence: Synthetic oligonucleotide
  Sense strand starting at position 1025 of SEQ ID NO: 1244991
aaaucuucuggaggucaua

SEQ ID NO: 1527913 - RNA, 19 nt, Artificial Sequence
  Description of Artificial Sequence: Synthetic oligonucleotide
  Antisense strand to SEQ ID NO: 1527912
uaugaccuccagaagauuu

SEQ ID NO: 1527914 - RNA, 19 nt, Artificial Sequence
  Description of Artificial Sequence: Synthetic oligonucleotide
  Sense strand starting at position 1070 of SEQ ID NO: 1244991
cacauaugguuucuggaau

SEQ ID NO: 1527915 - RNA, 19 nt, Artificial Sequence
  Description of Artificial Sequence: Synthetic oligonucleotide
  Antisense strand to SEQ ID NO: 1527914
auuccagaaaccauaugug

SEQ ID NO: 1527916 - RNA, 19 nt, Artificial Sequence
  Description of Artificial Sequence: Synthetic oligonucleotide
  Sense strand starting at position 1309 of SEQ ID NO: 1244991
ucguuuaggagcgaauaca

SEQ ID NO: 1527917 - RNA, 19 nt, Artificial Sequence
  Description of Artificial Sequence: Synthetic oligonucleotide
  Antisense strand to SEQ ID NO: 1527916
uguauucgcuccuaaacga

SEQ ID NO: 1527918 - RNA, 19 nt, Artificial Sequence
  Description of Artificial Sequence: Synthetic oligonucleotide
  Sense strand starting at position 1381 of SEQ ID NO: 1244991
ugagaaauagcucagucau

SEQ ID NO: 1527919 - RNA, 19 nt, Artificial Sequence
  Description of Artificial Sequence: Synthetic oligonucleotide
  Antisense strand to SEQ ID NO: 1527918
augacugagcuauuucuca

SEQ ID NO: 1527920 - RNA, 19 nt, Artificial Sequence
  Description of Artificial Sequence: Synthetic oligonucleotide
  Sense strand starting at position 1383 of SEQ ID NO: 1244991
agaaauagcucagucauca

SEQ ID NO: 1527921 - RNA, 19 nt, Artificial Sequence
  Description of Artificial Sequence: Synthetic oligonucleotide
  Antisense strand to SEQ ID NO: 1527920
ugaugacugagcuauuucu

SEQ ID NO: 1527922 - RNA, 19 nt, Artificial Sequence
  Description of Artificial Sequence: Synthetic oligonucleotide
  Sense strand starting at position 1391 of SEQ ID NO: 1244991
cucagucaucagcagggaa

SEQ ID NO: 1527923 - RNA, 19 nt, Artificial Sequence
  Description of Artificial Sequence: Synthetic oligonucleotide
  Antisense strand to SEQ ID NO: 1527922
uucccugcugaugacugag

SEQ ID NO: 1527924 - RNA, 19 nt, Artificial Sequence
  Description of Artificial Sequence: Synthetic oligonucleotide
  Sense strand starting at position 1393 of SEQ ID NO: 1244991
cagucaucagcagggaaga

SEQ ID NO: 1527925 - RNA, 19 nt, Artificial Sequence
  Description of Artificial Sequence: Synthetic oligonucleotide
  Antisense strand to SEQ ID NO: 1527924
ucuucccugcugaugacug

SEQ ID NO: 1527926 - RNA, 19 nt, Artificial Sequence
  Description of Artificial Sequence: Synthetic oligonucleotide
  Sense strand starting at position 1406 of SEQ ID NO: 1244991
ggaagaccuucuccacuua

SEQ ID NO: 1527927 - RNA, 19 nt, Artificial Sequence
  Description of Artificial Sequence: Synthetic oligonucleotide
  Antisense strand to SEQ ID NO: 1527926
uaaguggagaaggucuucc

SEQ ID NO: 1527928 - RNA, 19 nt, Artificial Sequence
  Description of Artificial Sequence: Synthetic oligonucleotide
  Sense strand starting at position 1450 of SEQ ID NO: 1244991
cuaagagguucucuaaaga

SEQ ID NO: 1527929 - RNA, 19 nt, Artificial Sequence
  Description of Artificial Sequence: Synthetic oligonucleotide
  Antisense strand to SEQ ID NO: 1527928
ucuuuagagaaccucuuag

SEQ ID NO: 1527930 - RNA, 19 nt, Artificial Sequence
  Description of Artificial Sequence: Synthetic oligonucleotide
  Sense strand starting at position 1547 of SEQ ID NO: 1244991
augagaaggugucccaaau

SEQ ID NO: 1527931 - RNA, 19 nt, Artificial Sequence
  Description of Artificial Sequence: Synthetic oligonucleotide
  Antisense strand to SEQ ID NO: 1527930
auuugggacaccuucucau

SEQ ID NO: 1527932 - RNA, 19 nt, Artificial Sequence
  Description of Artificial Sequence: Synthetic oligonucleotide
  Sense strand starting at position 1675 of SEQ ID NO: 1244991
gugggagagcuccggaaga

SEQ ID NO: 1527933 - RNA, 19 nt, Artificial Sequence
  Description of Artificial Sequence: Synthetic oligonucleotide
  Antisense strand to SEQ ID NO: 1527932
ucuuccggagcucucccac

SEQ ID NO: 1527934 - RNA, 19 nt, Artificial Sequence
  Description of Artificial Sequence: Synthetic oligonucleotide
  Sense strand starting at position 2014 of SEQ ID NO: 1244991
ugugauucuugauccggaa

SEQ ID NO: 1527935 - RNA, 19 nt, Artificial Sequence
  Description of Artificial Sequence: Synthetic oligonucleotide
  Antisense strand to SEQ ID NO: 1527934
uuccggaucaagaaucaca

SEQ ID NO: 1527936 - RNA, 19 nt, Artificial Sequence
  Description of Artificial Sequence: Synthetic oligonucleotide
  Sense strand starting at position 2016 of SEQ ID NO: 1244991
ugauucuugauccggaacu

SEQ ID NO: 1527937 - RNA, 19 nt, Artificial Sequence
  Description of Artificial Sequence: Synthetic oligonucleotide
  Antisense strand to SEQ ID NO: 1527936
aguuccggaucaagaauca

SEQ ID NO: 1527938 - RNA, 19 nt, Artificial Sequence
  Description of Artificial Sequence: Synthetic oligonucleotide
  Sense strand starting at position 2077 of SEQ ID NO: 1244991
acguguucgcugcccagaa

SEQ ID NO: 1527939 - RNA, 19 nt, Artificial Sequence
  Description of Artificial Sequence: Synthetic oligonucleotide
  Antisense strand to SEQ ID NO: 1527938
uucugggcagcgaacacgu

SEQ ID NO: 1527940 - RNA, 19 nt, Artificial Sequence
  Description of Artificial Sequence: Synthetic oligonucleotide
  Sense strand starting at position 2390 of SEQ ID NO: 1244991
cgaugcgcucucuccgaaa

SEQ ID NO: 1527941 - RNA, 19 nt, Artificial Sequence
  Description of Artificial Sequence: Synthetic oligonucleotide
  Antisense strand to SEQ ID NO: 1527940
uuucggagagagcgcaucg

SEQ ID NO: 1527942 - RNA, 19 nt, Artificial Sequence
  Description of Artificial Sequence: Synthetic oligonucleotide
  Sense strand starting at position 2490 of SEQ ID NO: 1244991
guggaaagaauugguuucu

SEQ ID NO: 1527943 - RNA, 19 nt, Artificial Sequence
  Description of Artificial Sequence: Synthetic oligonucleotide
  Antisense strand to SEQ ID NO: 1527942
agaaaccaauucuuuccac

SEQ ID NO: 1527944 - RNA, 19 nt, Artificial Sequence
  Description of Artificial Sequence: Synthetic oligonucleotide
  Sense strand starting at position 2491 of SEQ ID NO: 1244991
uggaaagaauugguuucua

SEQ ID NO: 1527945 - RNA, 19 nt, Artificial Sequence
  Description of Artificial Sequence: Synthetic oligonucleotide
  Antisense strand to SEQ ID NO: 1527944
uagaaaccaauucuuucca

SEQ ID NO: 1527946 - RNA, 19 nt, Artificial Sequence
  Description of Artificial Sequence: Synthetic oligonucleotide
  Sense strand starting at position 2502 of SEQ ID NO: 1244991
gguuucuaagaauauaguc

SEQ ID NO: 1527947 - RNA, 19 nt, Artificial Sequence
  Description of Artificial Sequence: Synthetic oligonucleotide
  Antisense strand to SEQ ID NO: 1527946
gacuauauucuuagaaacc

SEQ ID NO: 1527948 - RNA, 19 nt, Artificial Sequence
  Description of Artificial Sequence: Synthetic oligonucleotide
  Sense strand starting at position 2875 of SEQ ID NO: 1244991
agguauuaauccuuacuga

SEQ ID NO: 1527949 - RNA, 19 nt, Artificial Sequence
  Description of Artificial Sequence: Synthetic oligonucleotide
  Antisense strand to SEQ ID NO: 1527948
ucaguaaggauuaauaccu

SEQ ID NO: 1527950 - RNA, 19 nt, Artificial Sequence
  Description of Artificial Sequence: Synthetic oligonucleotide
  Sense strand starting at position 2876 of SEQ ID NO: 1244991
gguauuaauccuuacugac

SEQ ID NO: 1527951 - RNA, 19 nt, Artificial Sequence
  Description of Artificial Sequence: Synthetic oligonucleotide
  Antisense strand to SEQ ID NO: 1527950
gucaguaaggauuaauacc

SEQ ID NO: 1527952 - RNA, 19 nt, Artificial Sequence
  Description of Artificial Sequence: Synthetic oligonucleotide
  Sense strand starting at position 2926 of SEQ ID NO: 1244991
uauguuauacagggaaagu

SEQ ID NO: 1527953 - RNA, 19 nt, Artificial Sequence
  Description of Artificial Sequence: Synthetic oligonucleotide
  Antisense strand to SEQ ID NO: 1527952
acuuucccuguauaacaua

SEQ ID NO: 1527954 - RNA, 19 nt, Artificial Sequence
  Description of Artificial Sequence: Synthetic oligonucleotide
  Sense strand starting at position 3147 of SEQ ID NO: 1244991
aagauuaacggguggagca

SEQ ID NO: 1527955 - RNA, 19 nt, Artificial Sequence
  Description of Artificial Sequence: Synthetic oligonucleotide
  Antisense strand to SEQ ID NO: 1527954
ugcuccacccguuaaucuu

SEQ ID NO: 1527956 - RNA, 19 nt, Artificial Sequence
  Description of Artificial Sequence: Synthetic oligonucleotide
  Sense strand starting at position 3195 of SEQ ID NO: 1244991
gcacuacugaaauggguuu

SEQ ID NO: 1527957 - RNA, 19 nt, Artificial Sequence
  Description of Artificial Sequence: Synthetic oligonucleotide
  Antisense strand to SEQ ID NO: 1527956
aaacccauuucaguagugc

SEQ ID NO: 1527958 - RNA, 19 nt, Artificial Sequence
  Description of Artificial Sequence: Synthetic oligonucleotide
  Sense strand starting at position 3280 of SEQ ID NO: 1244991
ugucauugcccagaauuau

SEQ ID NO: 1527959 - RNA, 19 nt, Artificial Sequence
  Description of Artificial Sequence: Synthetic oligonucleotide
  Antisense strand to SEQ ID NO: 1527958
auaauucugggcaaugaca

SEQ ID NO: 1527960 - RNA, 19 nt, Artificial Sequence
  Description of Artificial Sequence: Synthetic oligonucleotide
  Sense strand starting at position 3339 of SEQ ID NO: 1244991
aggcacuaggcuuauugau

SEQ ID NO: 1527961 - RNA, 19 nt, Artificial Sequence
  Description of Artificial Sequence: Synthetic oligonucleotide
  Antisense strand to SEQ ID NO: 1527960
aucaauaagccuagugccu

SEQ ID NO: 1527962 - RNA, 19 nt, Artificial Sequence
  Description of Artificial Sequence: Synthetic oligonucleotide
  Sense strand starting at position 3409 of SEQ ID NO: 1244991
guuagaugauaaucugauc

SEQ ID NO: 1527963 - RNA, 19 nt, Artificial Sequence
  Description of Artificial Sequence: Synthetic oligonucleotide
  Antisense strand to SEQ ID NO: 1527962
gaucagauuaucaucuaac

SEQ ID NO: 1527964 - RNA, 19 nt, Artificial Sequence
  Description of Artificial Sequence: Synthetic oligonucleotide
  Sense strand starting at position 45 of SEQ ID NO: 1244992
acucgagguucccuguaaa

SEQ ID NO: 1527965 - RNA, 19 nt, Artificial Sequence
  Description of Artificial Sequence: Synthetic oligonucleotide
  Antisense strand to SEQ ID NO: 1527964
uuuacagggaaccucgagu

SEQ ID NO: 1527966 - RNA, 19 nt, Artificial Sequence
  Description of Artificial Sequence: Synthetic oligonucleotide
  Sense strand starting at position 64 of SEQ ID NO: 1244992
acagauacuuaugaaagca

SEQ ID NO: 1527967 - RNA, 19 nt, Artificial Sequence
  Description of Artificial Sequence: Synthetic oligonucleotide
  Antisense strand to SEQ ID NO: 1527966
ugcuuucauaaguaucugu

SEQ ID NO: 1527968 - RNA, 19 nt, Artificial Sequence
  Description of Artificial Sequence: Synthetic oligonucleotide
  Sense strand starting at position 445 of SEQ ID NO: 1244992
guggaagagacucagcuuu

SEQ ID NO: 1527969 - RNA, 19 nt, Artificial Sequence
  Description of Artificial Sequence: Synthetic oligonucleotide
  Antisense strand to SEQ ID NO: 1527968
aaagcugagucucuuccac

SEQ ID NO: 1527970 - RNA, 19 nt, Artificial Sequence
  Description of Artificial Sequence: Synthetic oligonucleotide
  Sense strand starting at position 598 of SEQ ID NO: 1244992
ggcugccuacuuuacagaa

SEQ ID NO: 1527971 - RNA, 19 nt, Artificial Sequence
  Description of Artificial Sequence: Synthetic oligonucleotide
  Antisense strand to SEQ ID NO: 1527970
uucuguaaaguaggcagcc

SEQ ID NO: 1527972 - RNA, 19 nt, Artificial Sequence
  Description of Artificial Sequence: Synthetic oligonucleotide
  Sense strand starting at position 600 of SEQ ID NO: 1244992
cugccuacuuuacagaaga

SEQ ID NO: 1527973 - RNA, 19 nt, Artificial Sequence
  Description of Artificial Sequence: Synthetic oligonucleotide
  Antisense strand to SEQ ID NO: 1527972
ucuucuguaaaguaggcag

SEQ ID NO: 1527974 - RNA, 19 nt, Artificial Sequence
  Description of Artificial Sequence: Synthetic oligonucleotide
  Sense strand starting at position 782 of SEQ ID NO: 1244992
ggaagcuuuccugguuuaa

SEQ ID NO: 1527975 - RNA, 19 nt, Artificial Sequence
  Description of Artificial Sequence: Synthetic oligonucleotide
  Antisense strand to SEQ ID NO: 1527974
uuaaaccaggaaagcuucc

SEQ ID NO: 1527976 - RNA, 19 nt, Artificial Sequence
  Description of Artificial Sequence: Synthetic oligonucleotide
  Sense strand starting at position 822 of SEQ ID NO: 1244992
augaguuggguaggauaaa

SEQ ID NO: 1527977 - RNA, 19 nt, Artificial Sequence
  Description of Artificial Sequence: Synthetic oligonucleotide
  Antisense strand to SEQ ID NO: 1527976
uuuauccuacccaacucau

SEQ ID NO: 1527978 - RNA, 19 nt, Artificial Sequence
  Description of Artificial Sequence: Synthetic oligonucleotide
  Sense strand starting at position 901 of SEQ ID NO: 1244992
gugugcaauuucccaacau

SEQ ID NO: 1527979 - RNA, 19 nt, Artificial Sequence
  Description of Artificial Sequence: Synthetic oligonucleotide
  Antisense strand to SEQ ID NO: 1527978
auguugggaaauugcacac

SEQ ID NO: 1527980 - RNA, 19 nt, Artificial Sequence
  Description of Artificial Sequence: Synthetic oligonucleotide
  Sense strand starting at position 902 of SEQ ID NO: 1244992
ugugcaauuucccaacaug

SEQ ID NO: 1527981 - RNA, 19 nt, Artificial Sequence
  Description of Artificial Sequence: Synthetic oligonucleotide
  Antisense strand to SEQ ID NO: 1527980
cauguugggaaauugcaca

SEQ ID NO: 1527982 - RNA, 19 nt, Artificial Sequence
  Description of Artificial Sequence: Synthetic oligonucleotide
  Sense strand starting at position 927 of SEQ ID NO: 1244992
auuggcauuuccuggauau

SEQ ID NO: 1527983 - RNA, 19 nt, Artificial Sequence
  Description of Artificial Sequence: Synthetic oligonucleotide
  Antisense strand to SEQ ID NO: 1527982
auauccaggaaaugccaau

SEQ ID NO: 1527984 - RNA, 19 nt, Artificial Sequence
  Description of Artificial Sequence: Synthetic oligonucleotide
  Sense strand starting at position 984 of SEQ ID NO: 1244992
aggagcuuuaugugauugu

SEQ ID NO: 1527985 - RNA, 19 nt, Artificial Sequence
  Description of Artificial Sequence: Synthetic oligonucleotide
  Antisense strand to SEQ ID NO: 1527984
acaaucacauaaagcuccu

SEQ ID NO: 1527986 - RNA, 19 nt, Artificial Sequence
  Description of Artificial Sequence: Synthetic oligonucleotide
  Sense strand starting at position 988 of SEQ ID NO: 1244992
gcuuuaugugauugugcca

SEQ ID NO: 1527987 - RNA, 19 nt, Artificial Sequence
  Description of Artificial Sequence: Synthetic oligonucleotide
  Antisense strand to SEQ ID NO: 1527986
uggcacaaucacauaaagc

SEQ ID NO: 1527988 - RNA, 19 nt, Artificial Sequence
  Description of Artificial Sequence: Synthetic oligonucleotide
  Sense strand starting at position 1085 of SEQ ID NO: 1244992
aaugaaagguacugucauu

SEQ ID NO: 1527989 - RNA, 19 nt, Artificial Sequence
  Description of Artificial Sequence: Synthetic oligonucleotide
  Antisense strand to SEQ ID NO: 1527988
aaugacaguaccuuucauu

SEQ ID NO: 1527990 - RNA, 19 nt, Artificial Sequence
  Description of Artificial Sequence: Synthetic oligonucleotide
  Sense strand starting at position 1341 of SEQ ID NO: 1244992
augacauccgagcagucau

SEQ ID NO: 1527991 - RNA, 19 nt, Artificial Sequence
  Description of Artificial Sequence: Synthetic oligonucleotide
  Antisense strand to SEQ ID NO: 1527990
augacugcucggaugucau

SEQ ID NO: 1527992 - RNA, 19 nt, Artificial Sequence
  Description of Artificial Sequence: Synthetic oligonucleotide
  Sense strand starting at position 1445 of SEQ ID NO: 1244992
gugggaaucugccuaccau

SEQ ID NO: 1527993 - RNA, 19 nt, Artificial Sequence
  Description of Artificial Sequence: Synthetic oligonucleotide
  Antisense strand to SEQ ID NO: 1527992
augguaggcagauucccac

SEQ ID NO: 1527994 - RNA, 19 nt, Artificial Sequence
  Description of Artificial Sequence: Synthetic oligonucleotide
  Sense strand starting at position 1446 of SEQ ID NO: 1244992
ugggaaucugccuaccaug

SEQ ID NO: 1527995 - RNA, 19 nt, Artificial Sequence
  Description of Artificial Sequence: Synthetic oligonucleotide
  Antisense strand to SEQ ID NO: 1527994
caugguaggcagauuccca

SEQ ID NO: 1527996 - RNA, 19 nt, Artificial Sequence
  Description of Artificial Sequence: Synthetic oligonucleotide
  Sense strand starting at position 1511 of SEQ ID NO: 1244992
cgcagaagugcauguguau

SEQ ID NO: 1527997 - RNA, 19 nt, Artificial Sequence
  Description of Artificial Sequence: Synthetic oligonucleotide
  Antisense strand to SEQ ID NO: 1527996
auacacaugcacuucugcg

SEQ ID NO: 1527998 - RNA, 19 nt, Artificial Sequence
  Description of Artificial Sequence: Synthetic oligonucleotide
  Sense strand starting at position 1522 of SEQ ID NO: 1244992
auguguaugggcuguggaa

SEQ ID NO: 1527999 - RNA, 19 nt, Artificial Sequence
  Description of Artificial Sequence: Synthetic oligonucleotide
  Antisense strand to SEQ ID NO: 1527998
uuccacagcccauacacau

SEQ ID NO: 1528000 - RNA, 19 nt, Artificial Sequence
  Description of Artificial Sequence: Synthetic oligonucleotide
  Sense strand starting at position 1524 of SEQ ID NO: 1244992
guguaugggcuguggaaga

SEQ ID NO: 1528001 - RNA, 19 nt, Artificial Sequence
  Description of Artificial Sequence: Synthetic oligonucleotide
  Antisense strand to SEQ ID NO: 1528000
ucuuccacagcccauacac

SEQ ID NO: 1528002 - RNA, 19 nt, Artificial Sequence
  Description of Artificial Sequence: Synthetic oligonucleotide
  Sense strand starting at position 1762 of SEQ ID NO: 1244992
ggacgcauuucaggaagaa

SEQ ID NO: 1528003 - RNA, 19 nt, Artificial Sequence
  Description of Artificial Sequence: Synthetic oligonucleotide
  Antisense strand to SEQ ID NO: 1528002
uucuuccugaaaugcgucc

SEQ ID NO: 1528004 - RNA, 19 nt, Artificial Sequence
  Description of Artificial Sequence: Synthetic oligonucleotide
  Sense strand starting at position 1894 of SEQ ID NO: 1244992
gggucugagccucacguaa

SEQ ID NO: 1528005 - RNA, 19 nt, Artificial Sequence
  Description of Artificial Sequence: Synthetic oligonucleotide
  Antisense strand to SEQ ID NO: 1528004
uuacgugaggcucagaccc

SEQ ID NO: 1528006 - RNA, 19 nt, Artificial Sequence
  Description of Artificial Sequence: Synthetic oligonucleotide
  Sense strand starting at position 1898 of SEQ ID NO: 1244992
cugagccucacguaaagaa

SEQ ID NO: 1528007 - RNA, 19 nt, Artificial Sequence
  Description of Artificial Sequence: Synthetic oligonucleotide
  Antisense strand to SEQ ID NO: 1528006
uucuuuacgugaggcucag

SEQ ID NO: 1528008 - RNA, 19 nt, Artificial Sequence
  Description of Artificial Sequence: Synthetic oligonucleotide
  Sense strand starting at position 2052 of SEQ ID NO: 1244992
ccggaagccuuucuggaaa

SEQ ID NO: 1528009 - RNA, 19 nt, Artificial Sequence
  Description of Artificial Sequence: Synthetic oligonucleotide
  Antisense strand to SEQ ID NO: 1528008
uuuccagaaaggcuuccgg

SEQ ID NO: 1528010 - RNA, 19 nt, Artificial Sequence
  Description of Artificial Sequence: Synthetic oligonucleotide
  Sense strand starting at position 2054 of SEQ ID NO: 1244992
ggaagccuuucuggaaaga

SEQ ID NO: 1528011 - RNA, 19 nt, Artificial Sequence
  Description of Artificial Sequence: Synthetic oligonucleotide
  Antisense strand to SEQ ID NO: 1528010
ucuuuccagaaaggcuucc

SEQ ID NO: 1528012 - RNA, 19 nt, Artificial Sequence
  Description of Artificial Sequence: Synthetic oligonucleotide
  Sense strand starting at position 2147 of SEQ ID NO: 1244992
caggaagaguccugggaag

SEQ ID NO: 1528013 - RNA, 19 nt, Artificial Sequence
  Description of Artificial Sequence: Synthetic oligonucleotide
  Antisense strand to SEQ ID NO: 1528012
cuucccaggacucuuccug

SEQ ID NO: 1528014 - RNA, 19 nt, Artificial Sequence
  Description of Artificial Sequence: Synthetic oligonucleotide
  Sense strand starting at position 2149 of SEQ ID NO: 1244992
ggaagaguccugggaaguc

SEQ ID NO: 1528015 - RNA, 19 nt, Artificial Sequence
  Description of Artificial Sequence: Synthetic oligonucleotide
  Antisense strand to SEQ ID NO: 1528014
gacuucccaggacucuucc

SEQ ID NO: 1528016 - RNA, 19 nt, Artificial Sequence
  Description of Artificial Sequence: Synthetic oligonucleotide
  Sense strand starting at position 2183 of SEQ ID NO: 1244992
agagaaaggucaugucuuc

SEQ ID NO: 1528017 - RNA, 19 nt, Artificial Sequence
  Description of Artificial Sequence: Synthetic oligonucleotide
  Antisense strand to SEQ ID NO: 1528016
gaagacaugaccuuucucu

SEQ ID NO: 1528018 - RNA, 19 nt, Artificial Sequence
  Description of Artificial Sequence: Synthetic oligonucleotide
  Sense strand starting at position 2313 of SEQ ID NO: 1244992
uucugugaauugccauuua

SEQ ID NO: 1528019 - RNA, 19 nt, Artificial Sequence
  Description of Artificial Sequence: Synthetic oligonucleotide
  Antisense strand to SEQ ID NO: 1528018
uaaauggcaauucacagaa

SEQ ID NO: 1528020 - RNA, 19 nt, Artificial Sequence
  Description of Artificial Sequence: Synthetic oligonucleotide
  Sense strand starting at position 2362 of SEQ ID NO: 1244992
auuccaauguccuuuguuu

SEQ ID NO: 1528021 - RNA, 19 nt, Artificial Sequence
  Description of Artificial Sequence: Synthetic oligonucleotide
  Antisense strand to SEQ ID NO: 1528020
aaacaaaggacauuggaau

SEQ ID NO: 1528022 - RNA, 19 nt, Artificial Sequence
  Description of Artificial Sequence: Synthetic oligonucleotide
  Sense strand starting at position 2421 of SEQ ID NO: 1244992
ugagaaaggucucccuuug

SEQ ID NO: 1528023 - RNA, 19 nt, Artificial Sequence
  Description of Artificial Sequence: Synthetic oligonucleotide
  Antisense strand to SEQ ID NO: 1528022
caaagggagaccuuucuca

SEQ ID NO: 1528024 - RNA, 19 nt, Artificial Sequence
  Description of Artificial Sequence: Synthetic oligonucleotide
  Sense strand starting at position 2557 of SEQ ID NO: 1244992
cgcacccaguuauuaaaua

SEQ ID NO: 1528025 - RNA, 19 nt, Artificial Sequence
  Description of Artificial Sequence: Synthetic oligonucleotide
  Antisense strand to SEQ ID NO: 1528024
uauuuaauaacugggugcg

SEQ ID NO: 1528026 - RNA, 19 nt, Artificial Sequence
  Description of Artificial Sequence: Synthetic oligonucleotide
  Sense strand starting at position 2972 of SEQ ID NO: 1244992
cgccuuucuugucucaaga

SEQ ID NO: 1528027 - RNA, 19 nt, Artificial Sequence
  Description of Artificial Sequence: Synthetic oligonucleotide
  Antisense strand to SEQ ID NO: 1528026
ucuugagacaagaaaggcg

SEQ ID NO: 1528028 - RNA, 19 nt, Artificial Sequence
  Description of Artificial Sequence: Synthetic oligonucleotide
  Sense strand starting at position 3090 of SEQ ID NO: 1244992
caaugaucguugcuccauu

SEQ ID NO: 1528029 - RNA, 19 nt, Artificial Sequence
  Description of Artificial Sequence: Synthetic oligonucleotide
  Antisense strand to SEQ ID NO: 1528028
aauggagcaacgaucauug

SEQ ID NO: 1528030 - RNA, 19 nt, Artificial Sequence
  Description of Artificial Sequence: Synthetic oligonucleotide
  Sense strand starting at position 3091 of SEQ ID NO: 1244992
aaugaucguugcuccauuu

SEQ ID NO: 1528031 - RNA, 19 nt, Artificial Sequence
  Description of Artificial Sequence: Synthetic oligonucleotide
  Antisense strand to SEQ ID NO: 1528030
aaauggagcaacgaucauu

SEQ ID NO: 1528032 - RNA, 19 nt, Artificial Sequence
  Description of Artificial Sequence: Synthetic oligonucleotide
  Sense strand starting at position 3128 of SEQ ID NO: 1244992
acuccugggcucuggagua

SEQ ID NO: 1528033 - RNA, 19 nt, Artificial Sequence
  Description of Artificial Sequence: Synthetic oligonucleotide
  Antisense strand to SEQ ID NO: 1528032
uacuccagagcccaggagu

SEQ ID NO: 1528034 - RNA, 19 nt, Artificial Sequence
  Description of Artificial Sequence: Synthetic oligonucleotide
  Sense strand starting at position 3140 of SEQ ID NO: 1244992
uggaguauugcuggaagaa

SEQ ID NO: 1528035 - RNA, 19 nt, Artificial Sequence
  Description of Artificial Sequence: Synthetic oligonucleotide
  Antisense strand to SEQ ID NO: 1528034
uucuuccagcaauacucca

SEQ ID NO: 1528036 - RNA, 19 nt, Artificial Sequence
  Description of Artificial Sequence: Synthetic oligonucleotide
  Sense strand starting at position 3164 of SEQ ID NO: 1244992
accagaacauguuugccaa

SEQ ID NO: 1528037 - RNA, 19 nt, Artificial Sequence
  Description of Artificial Sequence: Synthetic oligonucleotide
  Antisense strand to SEQ ID NO: 1528036
uuggcaaacauguucuggu

SEQ ID NO: 1528038 - RNA, 19 nt, Artificial Sequence
  Description of Artificial Sequence: Synthetic oligonucleotide
  Sense strand starting at position 3183 of SEQ ID NO: 1244992
gcccuagauucccugacua

SEQ ID NO: 1528039 - RNA, 19 nt, Artificial Sequence
  Description of Artificial Sequence: Synthetic oligonucleotide
  Antisense strand to SEQ ID NO: 1528038
uagucagggaaucuagggc

SEQ ID NO: 1528040 - RNA, 19 nt, Artificial Sequence
  Description of Artificial Sequence: Synthetic oligonucleotide
  Sense strand starting at position 3254 of SEQ ID NO: 1244992
cuccgucacccucaagaua

SEQ ID NO: 1528041 - RNA, 19 nt, Artificial Sequence
  Description of Artificial Sequence: Synthetic oligonucleotide
  Antisense strand to SEQ ID NO: 1528040
uaucuugagggugacggag

SEQ ID NO: 1528042 - RNA, 19 nt, Artificial Sequence
  Description of Artificial Sequence: Synthetic oligonucleotide
  Sense strand starting at position 3377 of SEQ ID NO: 1244992
augugaacccuuuaaguuu

SEQ ID NO: 1528043 - RNA, 19 nt, Artificial Sequence
  Description of Artificial Sequence: Synthetic oligonucleotide
  Antisense strand to SEQ ID NO: 1528042
aaacuuaaaggguucacau

SEQ ID NO: 1528044 - RNA, 19 nt, Artificial Sequence
  Description of Artificial Sequence: Synthetic oligonucleotide
  Sense strand starting at position 135 of SEQ ID NO: 1244993
gcguucucaggcuaggaca

SEQ ID NO: 1528045 - RNA, 19 nt, Artificial Sequence
  Description of Artificial Sequence: Synthetic oligonucleotide
  Antisense strand to SEQ ID NO: 1528044
uguccuagccugagaacgc

SEQ ID NO: 1528046 - RNA, 19 nt, Artificial Sequence
  Description of Artificial Sequence: Synthetic oligonucleotide
  Sense strand starting at position 148 of SEQ ID NO: 1244993
aggacaaaguugguuguau

SEQ ID NO: 1528047 - RNA, 19 nt, Artificial Sequence
  Description of Artificial Sequence: Synthetic oligonucleotide
  Antisense strand to SEQ ID NO: 1528046
auacaaccaacuuuguccu

SEQ ID NO: 1528048 - RNA, 19 nt, Artificial Sequence
  Description of Artificial Sequence: Synthetic oligonucleotide
  Sense strand starting at position 149 of SEQ ID NO: 1244993
ggacaaaguugguuguaua

SEQ ID NO: 1528049 - RNA, 19 nt, Artificial Sequence
  Description of Artificial Sequence: Synthetic oligonucleotide
  Antisense strand to SEQ ID NO: 1528048
uauacaaccaacuuugucc

SEQ ID NO: 1528050 - RNA, 19 nt, Artificial Sequence
  Description of Artificial Sequence: Synthetic oligonucleotide
  Sense strand starting at position 150 of SEQ ID NO: 1244993
gacaaaguugguuguauaa

SEQ ID NO: 1528051 - RNA, 19 nt, Artificial Sequence
  Description of Artificial Sequence: Synthetic oligonucleotide
  Antisense strand to SEQ ID NO: 1528050
uuauacaaccaacuuuguc

SEQ ID NO: 1528052 - RNA, 19 nt, Artificial Sequence
  Description of Artificial Sequence: Synthetic oligonucleotide
  Sense strand starting at position 467 of SEQ ID NO: 1244993
uccguuuaucaggagcaau

SEQ ID NO: 1528053 - RNA, 19 nt, Artificial Sequence
  Description of Artificial Sequence: Synthetic oligonucleotide
  Antisense strand to SEQ ID NO: 1528052
auugcuccugauaaacgga

SEQ ID NO: 1528054 - RNA, 19 nt, Artificial Sequence
  Description of Artificial Sequence: Synthetic oligonucleotide
  Sense strand starting at position 478 of SEQ ID NO: 1244993
ggagcaauacccugcagua

SEQ ID NO: 1528055 - RNA, 19 nt, Artificial Sequence
  Description of Artificial Sequence: Synthetic oligonucleotide
  Antisense strand to SEQ ID NO: 1528054
uacugcaggguauugcucc

SEQ ID NO: 1528056 - RNA, 19 nt, Artificial Sequence
  Description of Artificial Sequence: Synthetic oligonucleotide
  Sense strand starting at position 480 of SEQ ID NO: 1244993
agcaauacccugcaguauu

SEQ ID NO: 1528057 - RNA, 19 nt, Artificial Sequence
  Description of Artificial Sequence: Synthetic oligonucleotide
  Antisense strand to SEQ ID NO: 1528056
aauacugcaggguauugcu

SEQ ID NO: 1528058 - RNA, 19 nt, Artificial Sequence
  Description of Artificial Sequence: Synthetic oligonucleotide
  Sense strand starting at position 1235 of SEQ ID NO: 1244993
gggaguauucuccaaccuc

SEQ ID NO: 1528059 - RNA, 19 nt, Artificial Sequence
  Description of Artificial Sequence: Synthetic oligonucleotide
  Antisense strand to SEQ ID NO: 1528058
gagguuggagaauacuccc

SEQ ID NO: 1528060 - RNA, 19 nt, Artificial Sequence
  Description of Artificial Sequence: Synthetic oligonucleotide
  Sense strand starting at position 1417 of SEQ ID NO: 1244993
uuggcacgagucugguaaa

SEQ ID NO: 1528061 - RNA, 19 nt, Artificial Sequence
  Description of Artificial Sequence: Synthetic oligonucleotide
  Antisense strand to SEQ ID NO: 1528060
uuuaccagacucgugccaa

SEQ ID NO: 1528062 - RNA, 19 nt, Artificial Sequence
  Description of Artificial Sequence: Synthetic oligonucleotide
  Sense strand starting at position 1424 of SEQ ID NO: 1244993
gagucugguaaaugcauga

SEQ ID NO: 1528063 - RNA, 19 nt, Artificial Sequence
  Description of Artificial Sequence: Synthetic oligonucleotide
  Antisense strand to SEQ ID NO: 1528062
ucaugcauuuaccagacuc

SEQ ID NO: 1528064 - RNA, 19 nt, Artificial Sequence
  Description of Artificial Sequence: Synthetic oligonucleotide
  Sense strand starting at position 2377 of SEQ ID NO: 1244993
cgaugucgccaaggacauu

SEQ ID NO: 1528065 - RNA, 19 nt, Artificial Sequence
  Description of Artificial Sequence: Synthetic oligonucleotide
  Antisense strand to SEQ ID NO: 1528064
aauguccuuggcgacaucg

SEQ ID NO: 1528066 - RNA, 19 nt, Artificial Sequence
  Description of Artificial Sequence: Synthetic oligonucleotide
  Sense strand starting at position 2410 of SEQ ID NO: 1244993
gugcccacucgauagaaau

SEQ ID NO: 1528067 - RNA, 19 nt, Artificial Sequence
  Description of Artificial Sequence: Synthetic oligonucleotide
  Antisense strand to SEQ ID NO: 1528066
auuucuaucgagugggcac

SEQ ID NO: 1528068 - RNA, 19 nt, Artificial Sequence
  Description of Artificial Sequence: Synthetic oligonucleotide
  Sense strand starting at position 2524 of SEQ ID NO: 1244993
gacggagucuuacuuguug

SEQ ID NO: 1528069 - RNA, 19 nt, Artificial Sequence
  Description of Artificial Sequence: Synthetic oligonucleotide
  Antisense strand to SEQ ID NO: 1528068
caacaaguaagacuccguc

SEQ ID NO: 1528070 - RNA, 19 nt, Artificial Sequence
  Description of Artificial Sequence: Synthetic oligonucleotide
  Sense strand starting at position 2851 of SEQ ID NO: 1244993
guuuacugagguugaauau

SEQ ID NO: 1528071 - RNA, 19 nt, Artificial Sequence
  Description of Artificial Sequence: Synthetic oligonucleotide
  Antisense strand to SEQ ID NO: 1528070
auauucaaccucaguaaac

SEQ ID NO: 1528072 - RNA, 19 nt, Artificial Sequence
  Description of Artificial Sequence: Synthetic oligonucleotide
  Sense strand starting at position 2861 of SEQ ID NO: 1244993
guugaauauccgggaucua

SEQ ID NO: 1528073 - RNA, 19 nt, Artificial Sequence
  Description of Artificial Sequence: Synthetic oligonucleotide
  Antisense strand to SEQ ID NO: 1528072
uagaucccggauauucaac

SEQ ID NO: 1528074 - RNA, 19 nt, Artificial Sequence
  Description of Artificial Sequence: Synthetic oligonucleotide
  Sense strand starting at position 2874 of SEQ ID NO: 1244993
gaucuaaguccugaauagu

SEQ ID NO: 1528075 - RNA, 19 nt, Artificial Sequence
  Description of Artificial Sequence: Synthetic oligonucleotide
  Antisense strand to SEQ ID NO: 1528074
acuauucaggacuuagauc

SEQ ID NO: 1528076 - RNA, 19 nt, Artificial Sequence
  Description of Artificial Sequence: Synthetic oligonucleotide
  Sense strand starting at position 2888 of SEQ ID NO: 1244993
auaguccaccauugauaag

SEQ ID NO: 1528077 - RNA, 19 nt, Artificial Sequence
  Description of Artificial Sequence: Synthetic oligonucleotide
  Antisense strand to SEQ ID NO: 1528076
cuuaucaaugguggacuau

SEQ ID NO: 1528078 - RNA, 19 nt, Artificial Sequence
  Description of Artificial Sequence: Synthetic oligonucleotide
  Sense strand starting at position 2899 of SEQ ID NO: 1244993
uugauaaguugugugacuu

SEQ ID NO: 1528079 - RNA, 19 nt, Artificial Sequence
  Description of Artificial Sequence: Synthetic oligonucleotide
  Antisense strand to SEQ ID NO: 1528078
aagucacacaacuuaucaa

SEQ ID NO: 1528080 - RNA, 19 nt, Artificial Sequence
  Description of Artificial Sequence: Synthetic oligonucleotide
  Sense strand starting at position 2900 of SEQ ID NO: 1244993
ugauaaguugugugacuug

SEQ ID NO: 1528081 - RNA, 19 nt, Artificial Sequence
  Description of Artificial Sequence: Synthetic oligonucleotide
  Antisense strand to SEQ ID NO: 1528080
caagucacacaacuuauca

SEQ ID NO: 1528082 - RNA, 19 nt, Artificial Sequence
  Description of Artificial Sequence: Synthetic oligonucleotide
  Sense strand starting at position 2903 of SEQ ID NO: 1244993
uaaguugugugacuuggaa

SEQ ID NO: 1528083 - RNA, 19 nt, Artificial Sequence
  Description of Artificial Sequence: Synthetic oligonucleotide
  Antisense strand to SEQ ID NO: 1528082
uuccaagucacacaacuua

SEQ ID NO: 1528084 - RNA, 19 nt, Artificial Sequence
  Description of Artificial Sequence: Synthetic oligonucleotide
  Sense strand starting at position 2905 of SEQ ID NO: 1244993
aguugugugacuuggaaca

SEQ ID NO: 1528085 - RNA, 19 nt, Artificial Sequence
  Description of Artificial Sequence: Synthetic oligonucleotide
  Antisense strand to SEQ ID NO: 1528084
uguuccaagucacacaacu

SEQ ID NO: 1528086 - RNA, 19 nt, Artificial Sequence
  Description of Artificial Sequence: Synthetic oligonucleotide
  Sense strand starting at position 2937 of SEQ ID NO: 1244993
cgucgauguggagaggauu

SEQ ID NO: 1528087 - RNA, 19 nt, Artificial Sequence
  Description of Artificial Sequence: Synthetic oligonucleotide
  Antisense strand to SEQ ID NO: 1528086
aauccucuccacaucgacg

SEQ ID NO: 1528088 - RNA, 19 nt, Artificial Sequence
  Description of Artificial Sequence: Synthetic oligonucleotide
  Sense strand starting at position 2959 of SEQ ID NO: 1244993
cauuaacagcgcgauguaa

SEQ ID NO: 1528089 - RNA, 19 nt, Artificial Sequence
  Description of Artificial Sequence: Synthetic oligonucleotide
  Antisense strand to SEQ ID NO: 1528088
uuacaucgcgcuguuaaug

SEQ ID NO: 1528090 - RNA, 19 nt, Artificial Sequence
  Description of Artificial Sequence: Synthetic oligonucleotide
  Sense strand starting at position 2984 of SEQ ID NO: 1244993
gcugguaauacaggaaaua

SEQ ID NO: 1528091 - RNA, 19 nt, Artificial Sequence
  Description of Artificial Sequence: Synthetic oligonucleotide
  Antisense strand to SEQ ID NO: 1528090
uauuuccuguauuaccagc

SEQ ID NO: 1528092 - RNA, 19 nt, Artificial Sequence
  Description of Artificial Sequence: Synthetic oligonucleotide
  Sense strand starting at position 3050 of SEQ ID NO: 1244993
caccgaucacccugugaaa

SEQ ID NO: 1528093 - RNA, 19 nt, Artificial Sequence
  Description of Artificial Sequence: Synthetic oligonucleotide
  Antisense strand to SEQ ID NO: 1528092
uuucacagggugaucggug

SEQ ID NO: 1528094 - RNA, 19 nt, Artificial Sequence
  Description of Artificial Sequence: Synthetic oligonucleotide
  Sense strand starting at position 3196 of SEQ ID NO: 1244993
uuaucagaguugcucaaag

SEQ ID NO: 1528095 - RNA, 19 nt, Artificial Sequence
  Description of Artificial Sequence: Synthetic oligonucleotide
  Antisense strand to SEQ ID NO: 1528094
cuuugagcaacucugauaa

SEQ ID NO: 1528096 - RNA, 19 nt, Artificial Sequence
  Description of Artificial Sequence: Synthetic oligonucleotide
  Sense strand starting at position 3198 of SEQ ID NO: 1244993
aucagaguugcucaaagua

SEQ ID NO: 1528097 - RNA, 19 nt, Artificial Sequence
  Description of Artificial Sequence: Synthetic oligonucleotide
  Antisense strand to SEQ ID NO: 1528096
uacuuugagcaacucugau

SEQ ID NO: 1528098 - RNA, 19 nt, Artificial Sequence
  Description of Artificial Sequence: Synthetic oligonucleotide
  Sense strand starting at position 3403 of SEQ ID NO: 1244993
ggcugaggcagggaauuau

SEQ ID NO: 1528099 - RNA, 19 nt, Artificial Sequence
  Description of Artificial Sequence: Synthetic oligonucleotide
  Antisense strand to SEQ ID NO: 1528098
auaauucccugccucagcc

SEQ ID NO: 1528100 - RNA, 19 nt, Artificial Sequence
  Description of Artificial Sequence: Synthetic oligonucleotide
  Sense strand starting at position 3413 of SEQ ID NO: 1244993
gggaauuauugacuuucug

SEQ ID NO: 1528101 - RNA, 19 nt, Artificial Sequence
  Description of Artificial Sequence: Synthetic oligonucleotide
  Antisense strand to SEQ ID NO: 1528100
cagaaagucaauaauuccc

SEQ ID NO: 1528102 - RNA, 19 nt, Artificial Sequence
  Description of Artificial Sequence: Synthetic oligonucleotide
  Sense strand starting at position 3417 of SEQ ID NO: 1244993
auuauugacuuucugagau

SEQ ID NO: 1528103 - RNA, 19 nt, Artificial Sequence
  Description of Artificial Sequence: Synthetic oligonucleotide
  Antisense strand to SEQ ID NO: 1528102
aucucagaaagucaauaau

SEQ ID NO: 1528104 - RNA, 19 nt, Artificial Sequence
  Description of Artificial Sequence: Synthetic oligonucleotide
  Sense strand starting at position 3421 of SEQ ID NO: 1244993
uugacuuucugagauugaa

SEQ ID NO: 1528105 - RNA, 19 nt, Artificial Sequence
  Description of Artificial Sequence: Synthetic oligonucleotide
  Antisense strand to SEQ ID NO: 1528104
uucaaucucagaaagucaa

SEQ ID NO: 1528106 - RNA, 19 nt, Artificial Sequence
  Description of Artificial Sequence: Synthetic oligonucleotide
  Sense strand starting at position 3424 of SEQ ID NO: 1244993
acuuucugagauugaauau

SEQ ID NO: 1528107 - RNA, 19 nt, Artificial Sequence
  Description of Artificial Sequence: Synthetic oligonucleotide
  Antisense strand to SEQ ID NO: 1528106
auauucaaucucagaaagu

SEQ ID NO: 1528108 - RNA, 19 nt, Artificial Sequence
  Description of Artificial Sequence: Synthetic oligonucleotide
  Sense strand starting at position 3509 of SEQ ID NO: 1244993
gaaugauuccuuugcgcca

SEQ ID NO: 1528109 - RNA, 19 nt, Artificial Sequence
  Description of Artificial Sequence: Synthetic oligonucleotide
  Antisense strand to SEQ ID NO: 1528108
uggcgcaaaggaaucauuc

SEQ ID NO: 1528110 - RNA, 19 nt, Artificial Sequence
  Description of Artificial Sequence: Synthetic oligonucleotide
  Sense strand starting at position 3753 of SEQ ID NO: 1244993
gcacgugaugaauguacau

SEQ ID NO: 1528111 - RNA, 19 nt, Artificial Sequence
  Description of Artificial Sequence: Synthetic oligonucleotide
  Antisense strand to SEQ ID NO: 1528110
auguacauucaucacgugc

SEQ ID NO: 1528112 - RNA, 19 nt, Artificial Sequence
  Description of Artificial Sequence: Synthetic oligonucleotide
  Sense strand starting at position 3764 of SEQ ID NO: 1244993
auguacauccuuuguacau

SEQ ID NO: 1528113 - RNA, 19 nt, Artificial Sequence
  Description of Artificial Sequence: Synthetic oligonucleotide
  Antisense strand to SEQ ID NO: 1528112
auguacaaaggauguacau

SEQ ID NO: 1528114 - RNA, 19 nt, Artificial Sequence
  Description of Artificial Sequence: Synthetic oligonucleotide
  Sense strand starting at position 3765 of SEQ ID NO: 1244993
uguacauccuuuguacauu

SEQ ID NO: 1528115 - RNA, 19 nt, Artificial Sequence
  Description of Artificial Sequence: Synthetic oligonucleotide
  Antisense strand to SEQ ID NO: 1528114
aauguacaaaggauguaca

SEQ ID NO: 1528116 - RNA, 19 nt, Artificial Sequence
  Description of Artificial Sequence: Synthetic oligonucleotide
  Sense strand starting at position 3766 of SEQ ID NO: 1244993
guacauccuuuguacauuu

SEQ ID NO: 1528117 - RNA, 19 nt, Artificial Sequence
  Description of Artificial Sequence: Synthetic oligonucleotide
  Antisense strand to SEQ ID NO: 1528116
aaauguacaaaggauguac

SEQ ID NO: 1528118 - RNA, 19 nt, Artificial Sequence
  Description of Artificial Sequence: Synthetic oligonucleotide
  Sense strand starting at position 3795 of SEQ ID NO: 1244993
cuacaaugagccuguaguu

SEQ ID NO: 1528119 - RNA, 19 nt, Artificial Sequence
  Description of Artificial Sequence: Synthetic oligonucleotide
  Antisense strand to SEQ ID NO: 1528118
aacuacaggcucauuguag

SEQ ID NO: 1528120 - RNA, 19 nt, Artificial Sequence
  Description of Artificial Sequence: Synthetic oligonucleotide
  Sense strand starting at position 3811 of SEQ ID NO: 1244993
guucucucaugcucagaaa

SEQ ID NO: 1528121 - RNA, 19 nt, Artificial Sequence
  Description of Artificial Sequence: Synthetic oligonucleotide
  Antisense strand to SEQ ID NO: 1528120
uuucugagcaugagagaac

SEQ ID NO: 1528122 - RNA, 19 nt, Artificial Sequence
  Description of Artificial Sequence: Synthetic oligonucleotide
  Sense strand starting at position 3857 of SEQ ID NO: 1244993
agguaauuauagcuacuua

SEQ ID NO: 1528123 - RNA, 19 nt, Artificial Sequence
  Description of Artificial Sequence: Synthetic oligonucleotide
  Antisense strand to SEQ ID NO: 1528122
uaaguagcuauaauuaccu

SEQ ID NO: 1528124 - RNA, 19 nt, Artificial Sequence
  Description of Artificial Sequence: Synthetic oligonucleotide
  Sense strand starting at position 34 of SEQ ID NO: 1244994
caaagucuggccugagcaa

SEQ ID NO: 1528125 - RNA, 19 nt, Artificial Sequence
  Description of Artificial Sequence: Synthetic oligonucleotide
  Antisense strand to SEQ ID NO: 1528124
uugcucaggccagacuuug

SEQ ID NO: 1528126 - RNA, 19 nt, Artificial Sequence
  Description of Artificial Sequence: Synthetic oligonucleotide
  Sense strand starting at position 35 of SEQ ID NO: 1244994
aaagucuggccugagcaaa

SEQ ID NO: 1528127 - RNA, 19 nt, Artificial Sequence
  Description of Artificial Sequence: Synthetic oligonucleotide
  Antisense strand to SEQ ID NO: 1528126
uuugcucaggccagacuuu

SEQ ID NO: 1528128 - RNA, 19 nt, Artificial Sequence
  Description of Artificial Sequence: Synthetic oligonucleotide
  Sense strand starting at position 49 of SEQ ID NO: 1244994
gcaaacagacuuugaucga

SEQ ID NO: 1528129 - RNA, 19 nt, Artificial Sequence
  Description of Artificial Sequence: Synthetic oligonucleotide
  Antisense strand to SEQ ID NO: 1528128
ucgaucaaagucuguuugc

SEQ ID NO: 1528130 - RNA, 19 nt, Artificial Sequence
  Description of Artificial Sequence: Synthetic oligonucleotide
  Sense strand starting at position 52 of SEQ ID NO: 1244994
aacagacuuugaucgauag

SEQ ID NO: 1528131 - RNA, 19 nt, Artificial Sequence
  Description of Artificial Sequence: Synthetic oligonucleotide
  Antisense strand to SEQ ID NO: 1528130
cuaucgaucaaagucuguu

SEQ ID NO: 1528132 - RNA, 19 nt, Artificial Sequence
  Description of Artificial Sequence: Synthetic oligonucleotide
  Sense strand starting at position 310 of SEQ ID NO: 1244994
aguacuguuucccugagga

SEQ ID NO: 1528133 - RNA, 19 nt, Artificial Sequence
  Description of Artificial Sequence: Synthetic oligonucleotide
  Antisense strand to SEQ ID NO: 1528132
uccucagggaaacaguacu

SEQ ID NO: 1528134 - RNA, 19 nt, Artificial Sequence
  Description of Artificial Sequence: Synthetic oligonucleotide
  Sense strand starting at position 601 of SEQ ID NO: 1244994
caucgaagccgucagagau

SEQ ID NO: 1528135 - RNA, 19 nt, Artificial Sequence
  Description of Artificial Sequence: Synthetic oligonucleotide
  Antisense strand to SEQ ID NO: 1528134
aucucugacggcuucgaug

SEQ ID NO: 1528136 - RNA, 19 nt, Artificial Sequence
  Description of Artificial Sequence: Synthetic oligonucleotide
  Sense strand starting at position 661 of SEQ ID NO: 1244994
gccaguacugacuacccua

SEQ ID NO: 1528137 - RNA, 19 nt, Artificial Sequence
  Description of Artificial Sequence: Synthetic oligonucleotide
  Antisense strand to SEQ ID NO: 1528136
uaggguagucaguacuggc

SEQ ID NO: 1528138 - RNA, 19 nt, Artificial Sequence
  Description of Artificial Sequence: Synthetic oligonucleotide
  Sense strand starting at position 664 of SEQ ID NO: 1244994
aguacugacuacccuaaga

SEQ ID NO: 1528139 - RNA, 19 nt, Artificial Sequence
  Description of Artificial Sequence: Synthetic oligonucleotide
  Antisense strand to SEQ ID NO: 1528138
ucuuaggguagucaguacu

SEQ ID NO: 1528140 - RNA, 19 nt, Artificial Sequence
  Description of Artificial Sequence: Synthetic oligonucleotide
  Sense strand starting at position 730 of SEQ ID NO: 1244994
ggcagagucccuugcccua

SEQ ID NO: 1528141 - RNA, 19 nt, Artificial Sequence
  Description of Artificial Sequence: Synthetic oligonucleotide
  Antisense strand to SEQ ID NO: 1528140
uagggcaagggacucugcc

SEQ ID NO: 1528142 - RNA, 19 nt, Artificial Sequence
  Description of Artificial Sequence: Synthetic oligonucleotide
  Sense strand starting at position 1008 of SEQ ID NO: 1244994
agacaucucggaugagcuu

SEQ ID NO: 1528143 - RNA, 19 nt, Artificial Sequence
  Description of Artificial Sequence: Synthetic oligonucleotide
  Antisense strand to SEQ ID NO: 1528142
aagcucauccgagaugucu

SEQ ID NO: 1528144 - RNA, 19 nt, Artificial Sequence
  Description of Artificial Sequence: Synthetic oligonucleotide
  Sense strand starting at position 1066 of SEQ ID NO: 1244994
gcaguacugcccuagagug

SEQ ID NO: 1528145 - RNA, 19 nt, Artificial Sequence
  Description of Artificial Sequence: Synthetic oligonucleotide
  Antisense strand to SEQ ID NO: 1528144
cacucuagggcaguacugc

SEQ ID NO: 1528146 - RNA, 19 nt, Artificial Sequence
  Description of Artificial Sequence: Synthetic oligonucleotide
  Sense strand starting at position 1241 of SEQ ID NO: 1244994
ugaggucucccuggaugaa

SEQ ID NO: 1528147 - RNA, 19 nt, Artificial Sequence
  Description of Artificial Sequence: Synthetic oligonucleotide
  Antisense strand to SEQ ID NO: 1528146
uucauccagggagaccuca

SEQ ID NO: 1528148 - RNA, 19 nt, Artificial Sequence
  Description of Artificial Sequence: Synthetic oligonucleotide
  Sense strand starting at position 1340 of SEQ ID NO: 1244994
acaggugucugcucaggau

SEQ ID NO: 1528149 - RNA, 19 nt, Artificial Sequence
  Description of Artificial Sequence: Synthetic oligonucleotide
  Antisense strand to SEQ ID NO: 1528148
auccugagcagacaccugu

SEQ ID NO: 1528150 - RNA, 19 nt, Artificial Sequence
  Description of Artificial Sequence: Synthetic oligonucleotide
  Sense strand starting at position 1459 of SEQ ID NO: 1244994
guacucauccuccggcaua

SEQ ID NO: 1528151 - RNA, 19 nt, Artificial Sequence
  Description of Artificial Sequence: Synthetic oligonucleotide
  Antisense strand to SEQ ID NO: 1528150
uaugccggaggaugaguac

SEQ ID NO: 1528152 - RNA, 19 nt, Artificial Sequence
  Description of Artificial Sequence: Synthetic oligonucleotide
  Sense strand starting at position 1581 of SEQ ID NO: 1244994
gcuugcacucagccguaua

SEQ ID NO: 1528153 - RNA, 19 nt, Artificial Sequence
  Description of Artificial Sequence: Synthetic oligonucleotide
  Antisense strand to SEQ ID NO: 1528152
uauacggcugagugcaagc

SEQ ID NO: 1528154 - RNA, 19 nt, Artificial Sequence
  Description of Artificial Sequence: Synthetic oligonucleotide
  Sense strand starting at position 1647 of SEQ ID NO: 1244994
acuucuuguccacguugaa

SEQ ID NO: 1528155 - RNA, 19 nt, Artificial Sequence
  Description of Artificial Sequence: Synthetic oligonucleotide
  Antisense strand to SEQ ID NO: 1528154
uucaacguggacaagaagu

SEQ ID NO: 1528156 - RNA, 19 nt, Artificial Sequence
  Description of Artificial Sequence: Synthetic oligonucleotide
  Sense strand starting at position 1687 of SEQ ID NO: 1244994
gcaugacucuaugaggaag

SEQ ID NO: 1528157 - RNA, 19 nt, Artificial Sequence
  Description of Artificial Sequence: Synthetic oligonucleotide
  Antisense strand to SEQ ID NO: 1528156
cuuccucauagagucaugc

SEQ ID NO: 1528158 - RNA, 19 nt, Artificial Sequence
  Description of Artificial Sequence: Synthetic oligonucleotide
  Sense strand starting at position 1897 of SEQ ID NO: 1244994
ccugaagucuccgcucuga

SEQ ID NO: 1528159 - RNA, 19 nt, Artificial Sequence
  Description of Artificial Sequence: Synthetic oligonucleotide
  Antisense strand to SEQ ID NO: 1528158
ucagagcggagacuucagg

SEQ ID NO: 1528160 - RNA, 19 nt, Artificial Sequence
  Description of Artificial Sequence: Synthetic oligonucleotide
  Sense strand starting at position 1908 of SEQ ID NO: 1244994
cgcucugaugccugaggaa

SEQ ID NO: 1528161 - RNA, 19 nt, Artificial Sequence
  Description of Artificial Sequence: Synthetic oligonucleotide
  Antisense strand to SEQ ID NO: 1528160
uuccucaggcaucagagcg

SEQ ID NO: 1528162 - RNA, 19 nt, Artificial Sequence
  Description of Artificial Sequence: Synthetic oligonucleotide
  Sense strand starting at position 2050 of SEQ ID NO: 1244994
gucacauuccuggaacacu

SEQ ID NO: 1528163 - RNA, 19 nt, Artificial Sequence
  Description of Artificial Sequence: Synthetic oligonucleotide
  Antisense strand to SEQ ID NO: 1528162
aguguuccaggaaugugac

SEQ ID NO: 1528164 - RNA, 19 nt, Artificial Sequence
  Description of Artificial Sequence: Synthetic oligonucleotide
  Sense strand starting at position 2087 of SEQ ID NO: 1244994
agauaagaccuuugccaag

SEQ ID NO: 1528165 - RNA, 19 nt, Artificial Sequence
  Description of Artificial Sequence: Synthetic oligonucleotide
  Antisense strand to SEQ ID NO: 1528164
cuuggcaaaggucuuaucu

SEQ ID NO: 1528166 - RNA, 19 nt, Artificial Sequence
  Description of Artificial Sequence: Synthetic oligonucleotide
  Sense strand starting at position 2112 of SEQ ID NO: 1244994
aucauuaggucaucggaag

SEQ ID NO: 1528167 - RNA, 19 nt, Artificial Sequence
  Description of Artificial Sequence: Synthetic oligonucleotide
  Antisense strand to SEQ ID NO: 1528166
cuuccgaugaccuaaugau

SEQ ID NO: 1528168 - RNA, 19 nt, Artificial Sequence
  Description of Artificial Sequence: Synthetic oligonucleotide
  Sense strand starting at position 2131 of SEQ ID NO: 1244994
gggaauuagcaccguggau

SEQ ID NO: 1528169 - RNA, 19 nt, Artificial Sequence
  Description of Artificial Sequence: Synthetic oligonucleotide
  Antisense strand to SEQ ID NO: 1528168
auccacggugcuaauuccc

SEQ ID NO: 1528170 - RNA, 19 nt, Artificial Sequence
  Description of Artificial Sequence: Synthetic oligonucleotide
  Sense strand starting at position 2133 of SEQ ID NO: 1244994
gaauuagcaccguggaucu

SEQ ID NO: 1528171 - RNA, 19 nt, Artificial Sequence
  Description of Artificial Sequence: Synthetic oligonucleotide
  Antisense strand to SEQ ID NO: 1528170
agauccacggugcuaauuc

SEQ ID NO: 1528172 - RNA, 19 nt, Artificial Sequence
  Description of Artificial Sequence: Synthetic oligonucleotide
  Sense strand starting at position 2182 of SEQ ID NO: 1244994
agcuuuaucucucugaguc

SEQ ID NO: 1528173 - RNA, 19 nt, Artificial Sequence
  Description of Artificial Sequence: Synthetic oligonucleotide
  Antisense strand to SEQ ID NO: 1528172
gacucagagagauaaagcu

SEQ ID NO: 1528174 - RNA, 19 nt, Artificial Sequence
  Description of Artificial Sequence: Synthetic oligonucleotide
  Sense strand starting at position 2183 of SEQ ID NO: 1244994
gcuuuaucucucugagucu

SEQ ID NO: 1528175 - RNA, 19 nt, Artificial Sequence
  Description of Artificial Sequence: Synthetic oligonucleotide
  Antisense strand to SEQ ID NO: 1528174
agacucagagagauaaagc

SEQ ID NO: 1528176 - RNA, 19 nt, Artificial Sequence
  Description of Artificial Sequence: Synthetic oligonucleotide
  Sense strand starting at position 2327 of SEQ ID NO: 1244994
gcuauugauccaugauugu

SEQ ID NO: 1528177 - RNA, 19 nt, Artificial Sequence
  Description of Artificial Sequence: Synthetic oligonucleotide
  Antisense strand to SEQ ID NO: 1528176
acaaucauggaucaauagc

SEQ ID NO: 1528178 - RNA, 19 nt, Artificial Sequence
  Description of Artificial Sequence: Synthetic oligonucleotide
  Sense strand starting at position 2333 of SEQ ID NO: 1244994
gauccaugauuguuugauc

SEQ ID NO: 1528179 - RNA, 19 nt, Artificial Sequence
  Description of Artificial Sequence: Synthetic oligonucleotide
  Antisense strand to SEQ ID NO: 1528178
gaucaaacaaucauggauc

SEQ ID NO: 1528180 - RNA, 19 nt, Artificial Sequence
  Description of Artificial Sequence: Synthetic oligonucleotide
  Sense strand starting at position 2334 of SEQ ID NO: 1244994
auccaugauuguuugauca

SEQ ID NO: 1528181 - RNA, 19 nt, Artificial Sequence
  Description of Artificial Sequence: Synthetic oligonucleotide
  Antisense strand to SEQ ID NO: 1528180
ugaucaaacaaucauggau

SEQ ID NO: 1528182 - RNA, 19 nt, Artificial Sequence
  Description of Artificial Sequence: Synthetic oligonucleotide
  Sense strand starting at position 2338 of SEQ ID NO: 1244994
augauuguuugaucagaca

SEQ ID NO: 1528183 - RNA, 19 nt, Artificial Sequence
  Description of Artificial Sequence: Synthetic oligonucleotide
  Antisense strand to SEQ ID NO: 1528182
ugucugaucaaacaaucau

SEQ ID NO: 1528184 - RNA, 19 nt, Artificial Sequence
  Description of Artificial Sequence: Synthetic oligonucleotide
  Sense strand starting at position 2384 of SEQ ID NO: 1244994
uuauuuauuuagggcagga

SEQ ID NO: 1528185 - RNA, 19 nt, Artificial Sequence
  Description of Artificial Sequence: Synthetic oligonucleotide
  Antisense strand to SEQ ID NO: 1528184
uccugcccuaaauaaauaa

SEQ ID NO: 1528186 - RNA, 19 nt, Artificial Sequence
  Description of Artificial Sequence: Synthetic oligonucleotide
  Sense strand starting at position 2418 of SEQ ID NO: 1244994
gagagauuguaagcacucu

SEQ ID NO: 1528187 - RNA, 19 nt, Artificial Sequence
  Description of Artificial Sequence: Synthetic oligonucleotide
  Antisense strand to SEQ ID NO: 1528186
agagugcuuacaaucucuc

SEQ ID NO: 1528188 - RNA, 19 nt, Artificial Sequence
  Description of Artificial Sequence: Synthetic oligonucleotide
  Sense strand starting at position 2487 of SEQ ID NO: 1244994
uucucuugggugcaucaau

SEQ ID NO: 1528189 - RNA, 19 nt, Artificial Sequence
  Description of Artificial Sequence: Synthetic oligonucleotide
  Antisense strand to SEQ ID NO: 1528188
auugaugcacccaagagaa

SEQ ID NO: 1528190 - RNA, 19 nt, Artificial Sequence
  Description of Artificial Sequence: Synthetic oligonucleotide
  Sense strand starting at position 2514 of SEQ ID NO: 1244994
gcuggaaauuuggguaaau

SEQ ID NO: 1528191 - RNA, 19 nt, Artificial Sequence
  Description of Artificial Sequence: Synthetic oligonucleotide
  Antisense strand to SEQ ID NO: 1528190
auuuacccaaauuuccagc

SEQ ID NO: 1528192 - RNA, 19 nt, Artificial Sequence
  Description of Artificial Sequence: Synthetic oligonucleotide
  Sense strand starting at position 2613 of SEQ ID NO: 1244994
uguaaagagugggcuuguu

SEQ ID NO: 1528193 - RNA, 19 nt, Artificial Sequence
  Description of Artificial Sequence: Synthetic oligonucleotide
  Antisense strand to SEQ ID NO: 1528192
aacaagcccacucuuuaca

SEQ ID NO: 1528194 - RNA, 19 nt, Artificial Sequence
  Description of Artificial Sequence: Synthetic oligonucleotide
  Sense strand starting at position 2813 of SEQ ID NO: 1244994
gacugugauuugggccaau

SEQ ID NO: 1528195 - RNA, 19 nt, Artificial Sequence
  Description of Artificial Sequence: Synthetic oligonucleotide
  Antisense strand to SEQ ID NO: 1528194
auuggcccaaaucacaguc

SEQ ID NO: 1528196 - RNA, 19 nt, Artificial Sequence
  Description of Artificial Sequence: Synthetic oligonucleotide
  Sense strand starting at position 2850 of SEQ ID NO: 1244994
aguggagucagcuguggaa

SEQ ID NO: 1528197 - RNA, 19 nt, Artificial Sequence
  Description of Artificial Sequence: Synthetic oligonucleotide
  Antisense strand to SEQ ID NO: 1528196
uuccacagcugacuccacu

SEQ ID NO: 1528198 - RNA, 19 nt, Artificial Sequence
  Description of Artificial Sequence: Synthetic oligonucleotide
  Sense strand starting at position 2852 of SEQ ID NO: 1244994
uggagucagcuguggaaug

SEQ ID NO: 1528199 - RNA, 19 nt, Artificial Sequence
  Description of Artificial Sequence: Synthetic oligonucleotide
  Antisense strand to SEQ ID NO: 1528198
cauuccacagcugacucca

SEQ ID NO: 1528200 - RNA, 19 nt, Artificial Sequence
  Description of Artificial Sequence: Synthetic oligonucleotide
  Sense strand starting at position 2899 of SEQ ID NO: 1244994
uugugagguuucgcuaaga

SEQ ID NO: 1528201 - RNA, 19 nt, Artificial Sequence
  Description of Artificial Sequence: Synthetic oligonucleotide
  Antisense strand to SEQ ID NO: 1528200
ucuuagcgaaaccucacaa

SEQ ID NO: 1528202 - RNA, 19 nt, Artificial Sequence
  Description of Artificial Sequence: Synthetic oligonucleotide
  Sense strand starting at position 2932 of SEQ ID NO: 1244994
ggccuuaagaguuaugaug

SEQ ID NO: 1528203 - RNA, 19 nt, Artificial Sequence
  Description of Artificial Sequence: Synthetic oligonucleotide
  Antisense strand to SEQ ID NO: 1528202
caucauaacucuuaaggcc

SEQ ID NO: 1528204 - RNA, 19 nt, Artificial Sequence
  Description of Artificial Sequence: Synthetic oligonucleotide
  Sense strand starting at position 215 of SEQ ID NO: 1244995
aggugucucugauuacaug

SEQ ID NO: 1528205 - RNA, 19 nt, Artificial Sequence
  Description of Artificial Sequence: Synthetic oligonucleotide
  Antisense strand to SEQ ID NO: 1528204
cauguaaucagagacaccu

SEQ ID NO: 1528206 - RNA, 19 nt, Artificial Sequence
  Description of Artificial Sequence: Synthetic oligonucleotide
  Sense strand starting at position 216 of SEQ ID NO: 1244995
ggugucucugauuacauga

SEQ ID NO: 1528207 - RNA, 19 nt, Artificial Sequence
  Description of Artificial Sequence: Synthetic oligonucleotide
  Antisense strand to SEQ ID NO: 1528206
ucauguaaucagagacacc

SEQ ID NO: 1528208 - RNA, 19 nt, Artificial Sequence
  Description of Artificial Sequence: Synthetic oligonucleotide
  Sense strand starting at position 312 of SEQ ID NO: 1244995
gugggaaacaacugguaua

SEQ ID NO: 1528209 - RNA, 19 nt, Artificial Sequence
  Description of Artificial Sequence: Synthetic oligonucleotide
  Antisense strand to SEQ ID NO: 1528208
uauaccaguuguuucccac

SEQ ID NO: 1528210 - RNA, 19 nt, Artificial Sequence
  Description of Artificial Sequence: Synthetic oligonucleotide
  Sense strand starting at position 711 of SEQ ID NO: 1244995
aaacucugagcggguaaga

SEQ ID NO: 1528211 - RNA, 19 nt, Artificial Sequence
  Description of Artificial Sequence: Synthetic oligonucleotide
  Antisense strand to SEQ ID NO: 1528210
ucuuacccgcucagaguuu

SEQ ID NO: 1528212 - RNA, 19 nt, Artificial Sequence
  Description of Artificial Sequence: Synthetic oligonucleotide
  Sense strand starting at position 721 of SEQ ID NO: 1244995
cggguaagauagagggaaa

SEQ ID NO: 1528213 - RNA, 19 nt, Artificial Sequence
  Description of Artificial Sequence: Synthetic oligonucleotide
  Antisense strand to SEQ ID NO: 1528212
uuucccucuaucuuacccg

SEQ ID NO: 1528214 - RNA, 19 nt, Artificial Sequence
  Description of Artificial Sequence: Synthetic oligonucleotide
  Sense strand starting at position 901 of SEQ ID NO: 1244995
gcaauucagggucggcaua

SEQ ID NO: 1528215 - RNA, 19 nt, Artificial Sequence
  Description of Artificial Sequence: Synthetic oligonucleotide
  Antisense strand to SEQ ID NO: 1528214
uaugccgacccugaauugc

SEQ ID NO: 1528216 - RNA, 19 nt, Artificial Sequence
  Description of Artificial Sequence: Synthetic oligonucleotide
  Sense strand starting at position 929 of SEQ ID NO: 1244995
agggcuggcuggucugauu

SEQ ID NO: 1528217 - RNA, 19 nt, Artificial Sequence
  Description of Artificial Sequence: Synthetic oligonucleotide
  Antisense strand to SEQ ID NO: 1528216
aaucagaccagccagcccu

SEQ ID NO: 1528218 - RNA, 19 nt, Artificial Sequence
  Description of Artificial Sequence: Synthetic oligonucleotide
  Sense strand starting at position 987 of SEQ ID NO: 1244995
aggcuucucuuggcagaga

SEQ ID NO: 1528219 - RNA, 19 nt, Artificial Sequence
  Description of Artificial Sequence: Synthetic oligonucleotide
  Antisense strand to SEQ ID NO: 1528218
ucucugccaagagaagccu

SEQ ID NO: 1528220 - RNA, 19 nt, Artificial Sequence
  Description of Artificial Sequence: Synthetic oligonucleotide
  Sense strand starting at position 1173 of SEQ ID NO: 1244995
ugacaaacgucaucuguuu

SEQ ID NO: 1528221 - RNA, 19 nt, Artificial Sequence
  Description of Artificial Sequence: Synthetic oligonucleotide
  Antisense strand to SEQ ID NO: 1528220
aaacagaugacguuuguca

SEQ ID NO: 1528222 - RNA, 19 nt, Artificial Sequence
  Description of Artificial Sequence: Synthetic oligonucleotide
  Sense strand starting at position 1255 of SEQ ID NO: 1244995
gccuguaugcuggugguua

SEQ ID NO: 1528223 - RNA, 19 nt, Artificial Sequence
  Description of Artificial Sequence: Synthetic oligonucleotide
  Antisense strand to SEQ ID NO: 1528222
uaaccaccagcauacaggc

SEQ ID NO: 1528224 - RNA, 19 nt, Artificial Sequence
  Description of Artificial Sequence: Synthetic oligonucleotide
  Sense strand starting at position 1263 of SEQ ID NO: 1244995
gcuggugguuaauccuauu

SEQ ID NO: 1528225 - RNA, 19 nt, Artificial Sequence
  Description of Artificial Sequence: Synthetic oligonucleotide
  Antisense strand to SEQ ID NO: 1528224
aauaggauuaaccaccagc

SEQ ID NO: 1528226 - RNA, 19 nt, Artificial Sequence
  Description of Artificial Sequence: Synthetic oligonucleotide
  Sense strand starting at position 1336 of SEQ ID NO: 1244995
uugcgaucucgggcaaguu

SEQ ID NO: 1528227 - RNA, 19 nt, Artificial Sequence
  Description of Artificial Sequence: Synthetic oligonucleotide
  Antisense strand to SEQ ID NO: 1528226
aacuugcccgagaucgcaa

SEQ ID NO: 1528228 - RNA, 19 nt, Artificial Sequence
  Description of Artificial Sequence: Synthetic oligonucleotide
  Sense strand starting at position 1386 of SEQ ID NO: 1244995
cugugaaauguggacagua

SEQ ID NO: 1528229 - RNA, 19 nt, Artificial Sequence
  Description of Artificial Sequence: Synthetic oligonucleotide
  Antisense strand to SEQ ID NO: 1528228
uacuguccacauuucacag

SEQ ID NO: 1528230 - RNA, 19 nt, Artificial Sequence
  Description of Artificial Sequence: Synthetic oligonucleotide
  Sense strand starting at position 1388 of SEQ ID NO: 1244995
gugaaauguggacaguagu

SEQ ID NO: 1528231 - RNA, 19 nt, Artificial Sequence
  Description of Artificial Sequence: Synthetic oligonucleotide
  Antisense strand to SEQ ID NO: 1528230
acuacuguccacauuucac

SEQ ID NO: 1528232 - RNA, 19 nt, Artificial Sequence
  Description of Artificial Sequence: Synthetic oligonucleotide
  Sense strand starting at position 1780 of SEQ ID NO: 1244995
gaacuuugguccuccagga

SEQ ID NO: 1528233 - RNA, 19 nt, Artificial Sequence
  Description of Artificial Sequence: Synthetic oligonucleotide
  Antisense strand to SEQ ID NO: 1528232
uccuggaggaccaaaguuc

SEQ ID NO: 1528234 - RNA, 19 nt, Artificial Sequence
  Description of Artificial Sequence: Synthetic oligonucleotide
  Sense strand starting at position 1824 of SEQ ID NO: 1244995
gguguuauugacgaucacu

SEQ ID NO: 1528235 - RNA, 19 nt, Artificial Sequence
  Description of Artificial Sequence: Synthetic oligonucleotide
  Antisense strand to SEQ ID NO: 1528234
agugaucgucaauaacacc

SEQ ID NO: 1528236 - RNA, 19 nt, Artificial Sequence
  Description of Artificial Sequence: Synthetic oligonucleotide
  Sense strand starting at position 1844 of SEQ ID NO: 1244995
cgccgcccuccgagugauu

SEQ ID NO: 1528237 - RNA, 19 nt, Artificial Sequence
  Description of Artificial Sequence: Synthetic oligonucleotide
  Antisense strand to SEQ ID NO: 1528236
aaucacucggagggcggcg

SEQ ID NO: 1528238 - RNA, 19 nt, Artificial Sequence
  Description of Artificial Sequence: Synthetic oligonucleotide
  Sense strand starting at position 1862 of SEQ ID NO: 1244995
ucuuguugagcgccauagu

SEQ ID NO: 1528239 - RNA, 19 nt, Artificial Sequence
  Description of Artificial Sequence: Synthetic oligonucleotide
  Antisense strand to SEQ ID NO: 1528238
acuauggcgcucaacaaga

SEQ ID NO: 1528240 - RNA, 19 nt, Artificial Sequence
  Description of Artificial Sequence: Synthetic oligonucleotide
  Sense strand starting at position 1942 of SEQ ID NO: 1244995
ccuaguggcgucuucuuau

SEQ ID NO: 1528241 - RNA, 19 nt, Artificial Sequence
  Description of Artificial Sequence: Synthetic oligonucleotide
  Antisense strand to SEQ ID NO: 1528240
auaagaagacgccacuagg

SEQ ID NO: 1528242 - RNA, 19 nt, Artificial Sequence
  Description of Artificial Sequence: Synthetic oligonucleotide
  Sense strand starting at position 1957 of SEQ ID NO: 1244995
uuauuagagucagccaauc

SEQ ID NO: 1528243 - RNA, 19 nt, Artificial Sequence
  Description of Artificial Sequence: Synthetic oligonucleotide
  Antisense strand to SEQ ID NO: 1528242
gauuggcugacucuaauaa

SEQ ID NO: 1528244 - RNA, 19 nt, Artificial Sequence
  Description of Artificial Sequence: Synthetic oligonucleotide
  Sense strand starting at position 2016 of SEQ ID NO: 1244995
acgucacgugguaauaguu

SEQ ID NO: 1528245 - RNA, 19 nt, Artificial Sequence
  Description of Artificial Sequence: Synthetic oligonucleotide
  Antisense strand to SEQ ID NO: 1528244
aacuauuaccacgugacgu

SEQ ID NO: 1528246 - RNA, 19 nt, Artificial Sequence
  Description of Artificial Sequence: Synthetic oligonucleotide
  Sense strand starting at position 2155 of SEQ ID NO: 1244995
uguagucuccuggaucaua

SEQ ID NO: 1528247 - RNA, 19 nt, Artificial Sequence
  Description of Artificial Sequence: Synthetic oligonucleotide
  Antisense strand to SEQ ID NO: 1528246
uaugauccaggagacuaca

SEQ ID NO: 1528248 - RNA, 19 nt, Artificial Sequence
  Description of Artificial Sequence: Synthetic oligonucleotide
  Sense strand starting at position 2166 of SEQ ID NO: 1244995
ggaucauaggccugaauug

SEQ ID NO: 1528249 - RNA, 19 nt, Artificial Sequence
  Description of Artificial Sequence: Synthetic oligonucleotide
  Antisense strand to SEQ ID NO: 1528248
caauucaggccuaugaucc

SEQ ID NO: 1528250 - RNA, 19 nt, Artificial Sequence
  Description of Artificial Sequence: Synthetic oligonucleotide
  Sense strand starting at position 2177 of SEQ ID NO: 1244995
cugaauugguuccacauuu

SEQ ID NO: 1528251 - RNA, 19 nt, Artificial Sequence
  Description of Artificial Sequence: Synthetic oligonucleotide
  Antisense strand to SEQ ID NO: 1528250
aaauguggaaccaauucag

SEQ ID NO: 1528252 - RNA, 19 nt, Artificial Sequence
  Description of Artificial Sequence: Synthetic oligonucleotide
  Sense strand starting at position 2308 of SEQ ID NO: 1244995
ggaaguccugcuggucgaa

SEQ ID NO: 1528253 - RNA, 19 nt, Artificial Sequence
  Description of Artificial Sequence: Synthetic oligonucleotide
  Antisense strand to SEQ ID NO: 1528252
uucgaccagcaggacuucc

SEQ ID NO: 1528254 - RNA, 19 nt, Artificial Sequence
  Description of Artificial Sequence: Synthetic oligonucleotide
  Sense strand starting at position 2322 of SEQ ID NO: 1244995
ucgaaugcgaccuggacau

SEQ ID NO: 1528255 - RNA, 19 nt, Artificial Sequence
  Description of Artificial Sequence: Synthetic oligonucleotide
  Antisense strand to SEQ ID NO: 1528254
auguccaggucgcauucga

SEQ ID NO: 1528256 - RNA, 19 nt, Artificial Sequence
  Description of Artificial Sequence: Synthetic oligonucleotide
  Sense strand starting at position 2722 of SEQ ID NO: 1244995
gcauccugauaacuaggau

SEQ ID NO: 1528257 - RNA, 19 nt, Artificial Sequence
  Description of Artificial Sequence: Synthetic oligonucleotide
  Antisense strand to SEQ ID NO: 1528256
auccuaguuaucaggaugc

SEQ ID NO: 1528258 - RNA, 19 nt, Artificial Sequence
  Description of Artificial Sequence: Synthetic oligonucleotide
  Sense strand starting at position 2726 of SEQ ID NO: 1244995
ccugauaacuaggauuuac

SEQ ID NO: 1528259 - RNA, 19 nt, Artificial Sequence
  Description of Artificial Sequence: Synthetic oligonucleotide
  Antisense strand to SEQ ID NO: 1528258
guaaauccuaguuaucagg

SEQ ID NO: 1528260 - RNA, 19 nt, Artificial Sequence
  Description of Artificial Sequence: Synthetic oligonucleotide
  Sense strand starting at position 3006 of SEQ ID NO: 1244995
ggaggucuccuaugugaag

SEQ ID NO: 1528261 - RNA, 19 nt, Artificial Sequence
  Description of Artificial Sequence: Synthetic oligonucleotide
  Antisense strand to SEQ ID NO: 1528260
cuucacauaggagaccucc

SEQ ID NO: 1528262 - RNA, 19 nt, Artificial Sequence
  Description of Artificial Sequence: Synthetic oligonucleotide
  Sense strand starting at position 3007 of SEQ ID NO: 1244995
gaggucuccuaugugaaga

SEQ ID NO: 1528263 - RNA, 19 nt, Artificial Sequence
  Description of Artificial Sequence: Synthetic oligonucleotide
  Antisense strand to SEQ ID NO: 1528262
ucuucacauaggagaccuc

SEQ ID NO: 1528264 - RNA, 19 nt, Artificial Sequence
  Description of Artificial Sequence: Synthetic oligonucleotide
  Sense strand starting at position 3008 of SEQ ID NO: 1244995
aggucuccuaugugaagaa

SEQ ID NO: 1528265 - RNA, 19 nt, Artificial Sequence
  Description of Artificial Sequence: Synthetic oligonucleotide
  Antisense strand to SEQ ID NO: 1528264
uucuucacauaggagaccu

SEQ ID NO: 1528266 - RNA, 19 nt, Artificial Sequence
  Description of Artificial Sequence: Synthetic oligonucleotide
  Sense strand starting at position 3106 of SEQ ID NO: 1244995
ggacaaguacaguggguua

SEQ ID NO: 1528267 - RNA, 19 nt, Artificial Sequence
  Description of Artificial Sequence: Synthetic oligonucleotide
  Antisense strand to SEQ ID NO: 1528266
uaacccacuguacuugucc

SEQ ID NO: 1528268 - RNA, 19 nt, Artificial Sequence
  Description of Artificial Sequence: Synthetic oligonucleotide
  Sense strand starting at position 3111 of SEQ ID NO: 1244995
aguacaguggguuaaggau

SEQ ID NO: 1528269 - RNA, 19 nt, Artificial Sequence
  Description of Artificial Sequence: Synthetic oligonucleotide
  Antisense strand to SEQ ID NO: 1528268
auccuuaacccacuguacu

SEQ ID NO: 1528270 - RNA, 19 nt, Artificial Sequence
  Description of Artificial Sequence: Synthetic oligonucleotide
  Sense strand starting at position 3117 of SEQ ID NO: 1244995
guggguuaaggauagucau

SEQ ID NO: 1528271 - RNA, 19 nt, Artificial Sequence
  Description of Artificial Sequence: Synthetic oligonucleotide
  Antisense strand to SEQ ID NO: 1528270
augacuauccuuaacccac

SEQ ID NO: 1528272 - RNA, 19 nt, Artificial Sequence
  Description of Artificial Sequence: Synthetic oligonucleotide
  Sense strand starting at position 3120 of SEQ ID NO: 1244995
gguuaaggauagucauaau

SEQ ID NO: 1528273 - RNA, 19 nt, Artificial Sequence
  Description of Artificial Sequence: Synthetic oligonucleotide
  Antisense strand to SEQ ID NO: 1528272
auuaugacuauccuuaacc

SEQ ID NO: 1528274 - RNA, 19 nt, Artificial Sequence
  Description of Artificial Sequence: Synthetic oligonucleotide
  Sense strand starting at position 3174 of SEQ ID NO: 1244995
cugcaaucucugcagucuu

SEQ ID NO: 1528275 - RNA, 19 nt, Artificial Sequence
  Description of Artificial Sequence: Synthetic oligonucleotide
  Antisense strand to SEQ ID NO: 1528274
aagacugcagagauugcag

SEQ ID NO: 1528276 - RNA, 19 nt, Artificial Sequence
  Description of Artificial Sequence: Synthetic oligonucleotide
  Sense strand starting at position 3198 of SEQ ID NO: 1244995
agaauuaagucagacuaug

SEQ ID NO: 1528277 - RNA, 19 nt, Artificial Sequence
  Description of Artificial Sequence: Synthetic oligonucleotide
  Antisense strand to SEQ ID NO: 1528276
cauagucugacuuaauucu

SEQ ID NO: 1528278 - RNA, 19 nt, Artificial Sequence
  Description of Artificial Sequence: Synthetic oligonucleotide
  Sense strand starting at position 3206 of SEQ ID NO: 1244995
gucagacuaugugcugaua

SEQ ID NO: 1528279 - RNA, 19 nt, Artificial Sequence
  Description of Artificial Sequence: Synthetic oligonucleotide
  Antisense strand to SEQ ID NO: 1528278
uaucagcacauagucugac

SEQ ID NO: 1528280 - RNA, 19 nt, Artificial Sequence
  Description of Artificial Sequence: Synthetic oligonucleotide
  Sense strand starting at position 3259 of SEQ ID NO: 1244995
gcuguauacauauaguugu

SEQ ID NO: 1528281 - RNA, 19 nt, Artificial Sequence
  Description of Artificial Sequence: Synthetic oligonucleotide
  Antisense strand to SEQ ID NO: 1528280
acaacuauauguauacagc

SEQ ID NO: 1528282 - RNA, 19 nt, Artificial Sequence
  Description of Artificial Sequence: Synthetic oligonucleotide
  Sense strand starting at position 3374 of SEQ ID NO: 1244995
guggauuggugacucggua

SEQ ID NO: 1528283 - RNA, 19 nt, Artificial Sequence
  Description of Artificial Sequence: Synthetic oligonucleotide
  Antisense strand to SEQ ID NO: 1528282
uaccgagucaccaauccac

SEQ ID NO: 1528284 - RNA, 19 nt, Artificial Sequence
  Description of Artificial Sequence: Synthetic oligonucleotide
  Sense strand starting at position 70 of SEQ ID NO: 1244996
gggagcauuuauuggaauc

SEQ ID NO: 1528285 - RNA, 19 nt, Artificial Sequence
  Description of Artificial Sequence: Synthetic oligonucleotide
  Antisense strand to SEQ ID NO: 1528284
gauuccaauaaaugcuccc

SEQ ID NO: 1528286 - RNA, 19 nt, Artificial Sequence
  Description of Artificial Sequence: Synthetic oligonucleotide
  Sense strand starting at position 123 of SEQ ID NO: 1244996
uagugacagguguguaguu

SEQ ID NO: 1528287 - RNA, 19 nt, Artificial Sequence
  Description of Artificial Sequence: Synthetic oligonucleotide
  Antisense strand to SEQ ID NO: 1528286
aacuacacaccugucacua

SEQ ID NO: 1528288 - RNA, 19 nt, Artificial Sequence
  Description of Artificial Sequence: Synthetic oligonucleotide
  Sense strand starting at position 128 of SEQ ID NO: 1244996
acagguguguaguuuggaa

SEQ ID NO: 1528289 - RNA, 19 nt, Artificial Sequence
  Description of Artificial Sequence: Synthetic oligonucleotide
  Antisense strand to SEQ ID NO: 1528288
uuccaaacuacacaccugu

SEQ ID NO: 1528290 - RNA, 19 nt, Artificial Sequence
  Description of Artificial Sequence: Synthetic oligonucleotide
  Sense strand starting at position 781 of SEQ ID NO: 1244996
cauguaaagccucgcagaa

SEQ ID NO: 1528291 - RNA, 19 nt, Artificial Sequence
  Description of Artificial Sequence: Synthetic oligonucleotide
  Antisense strand to SEQ ID NO: 1528290
uucugcgaggcuuuacaug

SEQ ID NO: 1528292 - RNA, 19 nt, Artificial Sequence
  Description of Artificial Sequence: Synthetic oligonucleotide
  Sense strand starting at position 794 of SEQ ID NO: 1244996
gcagaagccugucucggaa

SEQ ID NO: 1528293 - RNA, 19 nt, Artificial Sequence
  Description of Artificial Sequence: Synthetic oligonucleotide
  Antisense strand to SEQ ID NO: 1528292
uuccgagacaggcuucugc

SEQ ID NO: 1528294 - RNA, 19 nt, Artificial Sequence
  Description of Artificial Sequence: Synthetic oligonucleotide
  Sense strand starting at position 796 of SEQ ID NO: 1244996
agaagccugucucggaaua

SEQ ID NO: 1528295 - RNA, 19 nt, Artificial Sequence
  Description of Artificial Sequence: Synthetic oligonucleotide
  Antisense strand to SEQ ID NO: 1528294
uauuccgagacaggcuucu

SEQ ID NO: 1528296 - RNA, 19 nt, Artificial Sequence
  Description of Artificial Sequence: Synthetic oligonucleotide
  Sense strand starting at position 797 of SEQ ID NO: 1244996
gaagccugucucggaauaa

SEQ ID NO: 1528297 - RNA, 19 nt, Artificial Sequence
  Description of Artificial Sequence: Synthetic oligonucleotide
  Antisense strand to SEQ ID NO: 1528296
uuauuccgagacaggcuuc

SEQ ID NO: 1528298 - RNA, 19 nt, Artificial Sequence
  Description of Artificial Sequence: Synthetic oligonucleotide
  Sense strand starting at position 798 of SEQ ID NO: 1244996
aagccugucucggaauaac

SEQ ID NO: 1528299 - RNA, 19 nt, Artificial Sequence
  Description of Artificial Sequence: Synthetic oligonucleotide
  Antisense strand to SEQ ID NO: 1528298
guuauuccgagacaggcuu

SEQ ID NO: 1528300 - RNA, 19 nt, Artificial Sequence
  Description of Artificial Sequence: Synthetic oligonucleotide
  Sense strand starting at position 1736 of SEQ ID NO: 1244996
caccgugguccugguugaa

SEQ ID NO: 1528301 - RNA, 19 nt, Artificial Sequence
  Description of Artificial Sequence: Synthetic oligonucleotide
  Antisense strand to SEQ ID NO: 1528300
uucaaccaggaccacggug

SEQ ID NO: 1528302 - RNA, 19 nt, Artificial Sequence
  Description of Artificial Sequence: Synthetic oligonucleotide
  Sense strand starting at position 1770 of SEQ ID NO: 1244996
cccguugccgugaggguua

SEQ ID NO: 1528303 - RNA, 19 nt, Artificial Sequence
  Description of Artificial Sequence: Synthetic oligonucleotide
  Antisense strand to SEQ ID NO: 1528302
uaacccucacggcaacggg

SEQ ID NO: 1528304 - RNA, 19 nt, Artificial Sequence
  Description of Artificial Sequence: Synthetic oligonucleotide
  Sense strand starting at position 2501 of SEQ ID NO: 1244996
ggugcaucaucccucauga

SEQ ID NO: 1528305 - RNA, 19 nt, Artificial Sequence
  Description of Artificial Sequence: Synthetic oligonucleotide
  Antisense strand to SEQ ID NO: 1528304
ucaugagggaugaugcacc

SEQ ID NO: 1528306 - RNA, 19 nt, Artificial Sequence
  Description of Artificial Sequence: Synthetic oligonucleotide
  Sense strand starting at position 2503 of SEQ ID NO: 1244996
ugcaucaucccucaugaga

SEQ ID NO: 1528307 - RNA, 19 nt, Artificial Sequence
  Description of Artificial Sequence: Synthetic oligonucleotide
  Antisense strand to SEQ ID NO: 1528306
ucucaugagggaugaugca

SEQ ID NO: 1528308 - RNA, 19 nt, Artificial Sequence
  Description of Artificial Sequence: Synthetic oligonucleotide
  Sense strand starting at position 2867 of SEQ ID NO: 1244996
gaguccuuuccagggcaca

SEQ ID NO: 1528309 - RNA, 19 nt, Artificial Sequence
  Description of Artificial Sequence: Synthetic oligonucleotide
  Antisense strand to SEQ ID NO: 1528308
ugugcccuggaaaggacuc

SEQ ID NO: 1528310 - RNA, 19 nt, Artificial Sequence
  Description of Artificial Sequence: Synthetic oligonucleotide
  Sense strand starting at position 2868 of SEQ ID NO: 1244996
aguccuuuccagggcacau

SEQ ID NO: 1528311 - RNA, 19 nt, Artificial Sequence
  Description of Artificial Sequence: Synthetic oligonucleotide
  Antisense strand to SEQ ID NO: 1528310
augugcccuggaaaggacu

SEQ ID NO: 1528312 - RNA, 19 nt, Artificial Sequence
  Description of Artificial Sequence: Synthetic oligonucleotide
  Sense strand starting at position 3471 of SEQ ID NO: 1244996
acuguaagcugagaucacu

SEQ ID NO: 1528313 - RNA, 19 nt, Artificial Sequence
  Description of Artificial Sequence: Synthetic oligonucleotide
  Antisense strand to SEQ ID NO: 1528312
agugaucucagcuuacagu

SEQ ID NO: 1528314 - RNA, 19 nt, Artificial Sequence
  Description of Artificial Sequence: Synthetic oligonucleotide
  Sense strand starting at position 3534 of SEQ ID NO: 1244996
ccucgauucccauacgaga

SEQ ID NO: 1528315 - RNA, 19 nt, Artificial Sequence
  Description of Artificial Sequence: Synthetic oligonucleotide
  Antisense strand to SEQ ID NO: 1528314
ucucguaugggaaucgagg

SEQ ID NO: 1528316 - RNA, 19 nt, Artificial Sequence
  Description of Artificial Sequence: Synthetic oligonucleotide
  Sense strand starting at position 3735 of SEQ ID NO: 1244996
accgguaccugcugugaga

SEQ ID NO: 1528317 - RNA, 19 nt, Artificial Sequence
  Description of Artificial Sequence: Synthetic oligonucleotide
  Antisense strand to SEQ ID NO: 1528316
ucucacagcagguaccggu

SEQ ID NO: 1528318 - RNA, 19 nt, Artificial Sequence
  Description of Artificial Sequence: Synthetic oligonucleotide
  Sense strand starting at position 3738 of SEQ ID NO: 1244996
gguaccugcugugagaagu

SEQ ID NO: 1528319 - RNA, 19 nt, Artificial Sequence
  Description of Artificial Sequence: Synthetic oligonucleotide
  Antisense strand to SEQ ID NO: 1528318
acuucucacagcagguacc

SEQ ID NO: 1528320 - RNA, 19 nt, Artificial Sequence
  Description of Artificial Sequence: Synthetic oligonucleotide
  Sense strand starting at position 3915 of SEQ ID NO: 1244996
guuguauccuaaccaggaa

SEQ ID NO: 1528321 - RNA, 19 nt, Artificial Sequence
  Description of Artificial Sequence: Synthetic oligonucleotide
  Antisense strand to SEQ ID NO: 1528320
uuccugguuaggauacaac

SEQ ID NO: 1528322 - RNA, 19 nt, Artificial Sequence
  Description of Artificial Sequence: Synthetic oligonucleotide
  Sense strand starting at position 3918 of SEQ ID NO: 1244996
guauccuaaccaggaaacu

SEQ ID NO: 1528323 - RNA, 19 nt, Artificial Sequence
  Description of Artificial Sequence: Synthetic oligonucleotide
  Antisense strand to SEQ ID NO: 1528322
aguuuccugguuaggauac

SEQ ID NO: 1528324 - RNA, 19 nt, Artificial Sequence
  Description of Artificial Sequence: Synthetic oligonucleotide
  Sense strand starting at position 3963 of SEQ ID NO: 1244996
guugaauggugacccucua

SEQ ID NO: 1528325 - RNA, 19 nt, Artificial Sequence
  Description of Artificial Sequence: Synthetic oligonucleotide
  Antisense strand to SEQ ID NO: 1528324
uagagggucaccauucaac

SEQ ID NO: 1528326 - RNA, 19 nt, Artificial Sequence
  Description of Artificial Sequence: Synthetic oligonucleotide
  Sense strand starting at position 460 of SEQ ID NO: 1244997
acaccuguccauggaggaa

SEQ ID NO: 1528327 - RNA, 19 nt, Artificial Sequence
  Description of Artificial Sequence: Synthetic oligonucleotide
  Antisense strand to SEQ ID NO: 1528326
uuccuccauggacaggugu

SEQ ID NO: 1528328 - RNA, 19 nt, Artificial Sequence
  Description of Artificial Sequence: Synthetic oligonucleotide
  Sense strand starting at position 483 of SEQ ID NO: 1244997
gcaacuugaguaggaagua

SEQ ID NO: 1528329 - RNA, 19 nt, Artificial Sequence
  Description of Artificial Sequence: Synthetic oligonucleotide
  Antisense strand to SEQ ID NO: 1528328
uacuuccuacucaaguugc

SEQ ID NO: 1528330 - RNA, 19 nt, Artificial Sequence
  Description of Artificial Sequence: Synthetic oligonucleotide
  Sense strand starting at position 541 of SEQ ID NO: 1244997
guuugcuucccauagccau

SEQ ID NO: 1528331 - RNA, 19 nt, Artificial Sequence
  Description of Artificial Sequence: Synthetic oligonucleotide
  Antisense strand to SEQ ID NO: 1528330
auggcuaugggaagcaaac

SEQ ID NO: 1528332 - RNA, 19 nt, Artificial Sequence
  Description of Artificial Sequence: Synthetic oligonucleotide
  Sense strand starting at position 667 of SEQ ID NO: 1244997
accacagagucugaauuua

SEQ ID NO: 1528333 - RNA, 19 nt, Artificial Sequence
  Description of Artificial Sequence: Synthetic oligonucleotide
  Antisense strand to SEQ ID NO: 1528332
uaaauucagacucuguggu

SEQ ID NO: 1528334 - RNA, 19 nt, Artificial Sequence
  Description of Artificial Sequence: Synthetic oligonucleotide
  Sense strand starting at position 675 of SEQ ID NO: 1244997
gucugaauuuacugugcua

SEQ ID NO: 1528335 - RNA, 19 nt, Artificial Sequence
  Description of Artificial Sequence: Synthetic oligonucleotide
  Antisense strand to SEQ ID NO: 1528334
uagcacaguaaauucagac

SEQ ID NO: 1528336 - RNA, 19 nt, Artificial Sequence
  Description of Artificial Sequence: Synthetic oligonucleotide
  Sense strand starting at position 765 of SEQ ID NO: 1244997
ggagacagucuuggaguga

SEQ ID NO: 1528337 - RNA, 19 nt, Artificial Sequence
  Description of Artificial Sequence: Synthetic oligonucleotide
  Antisense strand to SEQ ID NO: 1528336
ucacuccaagacugucucc

SEQ ID NO: 1528338 - RNA, 19 nt, Artificial Sequence
  Description of Artificial Sequence: Synthetic oligonucleotide
  Sense strand starting at position 766 of SEQ ID NO: 1244997
gagacagucuuggagugau

SEQ ID NO: 1528339 - RNA, 19 nt, Artificial Sequence
  Description of Artificial Sequence: Synthetic oligonucleotide
  Antisense strand to SEQ ID NO: 1528338
aucacuccaagacugucuc

SEQ ID NO: 1528340 - RNA, 19 nt, Artificial Sequence
  Description of Artificial Sequence: Synthetic oligonucleotide
  Sense strand starting at position 952 of SEQ ID NO: 1244997
gcaggaaguuuccuuaaag

SEQ ID NO: 1528341 - RNA, 19 nt, Artificial Sequence
  Description of Artificial Sequence: Synthetic oligonucleotide
  Antisense strand to SEQ ID NO: 1528340
cuuuaaggaaacuuccugc

SEQ ID NO: 1528342 - RNA, 19 nt, Artificial Sequence
  Description of Artificial Sequence: Synthetic oligonucleotide
  Sense strand starting at position 953 of SEQ ID NO: 1244997
caggaaguuuccuuaaagg

SEQ ID NO: 1528343 - RNA, 19 nt, Artificial Sequence
  Description of Artificial Sequence: Synthetic oligonucleotide
  Antisense strand to SEQ ID NO: 1528342
ccuuuaaggaaacuuccug

SEQ ID NO: 1528344 - RNA, 19 nt, Artificial Sequence
  Description of Artificial Sequence: Synthetic oligonucleotide
  Sense strand starting at position 971 of SEQ ID NO: 1244997
gcgcaauguccugaacgca

SEQ ID NO: 1528345 - RNA, 19 nt, Artificial Sequence
  Description of Artificial Sequence: Synthetic oligonucleotide
  Antisense strand to SEQ ID NO: 1528344
ugcguucaggacauugcgc

SEQ ID NO: 1528346 - RNA, 19 nt, Artificial Sequence
  Description of Artificial Sequence: Synthetic oligonucleotide
  Sense strand starting at position 1023 of SEQ ID NO: 1244997
ucaauuaccugauggagug

SEQ ID NO: 1528347 - RNA, 19 nt, Artificial Sequence
  Description of Artificial Sequence: Synthetic oligonucleotide
  Antisense strand to SEQ ID NO: 1528346
cacuccaucagguaauuga

SEQ ID NO: 1528348 - RNA, 19 nt, Artificial Sequence
  Description of Artificial Sequence: Synthetic oligonucleotide
  Sense strand starting at position 1335 of SEQ ID NO: 1244997
ucgaaucucuucccuaagu

SEQ ID NO: 1528349 - RNA, 19 nt, Artificial Sequence
  Description of Artificial Sequence: Synthetic oligonucleotide
  Antisense strand to SEQ ID NO: 1528348
acuuagggaagagauucga

SEQ ID NO: 1528350 - RNA, 19 nt, Artificial Sequence
  Description of Artificial Sequence: Synthetic oligonucleotide
  Sense strand starting at position 1336 of SEQ ID NO: 1244997
cgaaucucuucccuaagua

SEQ ID NO: 1528351 - RNA, 19 nt, Artificial Sequence
  Description of Artificial Sequence: Synthetic oligonucleotide
  Antisense strand to SEQ ID NO: 1528350
uacuuagggaagagauucg

SEQ ID NO: 1528352 - RNA, 19 nt, Artificial Sequence
  Description of Artificial Sequence: Synthetic oligonucleotide
  Sense strand starting at position 1354 of SEQ ID NO: 1244997
aggccugagucagugaaga

SEQ ID NO: 1528353 - RNA, 19 nt, Artificial Sequence
  Description of Artificial Sequence: Synthetic oligonucleotide
  Antisense strand to SEQ ID NO: 1528352
ucuucacugacucaggccu

SEQ ID NO: 1528354 - RNA, 19 nt, Artificial Sequence
  Description of Artificial Sequence: Synthetic oligonucleotide
  Sense strand starting at position 1398 of SEQ ID NO: 1244997
gguuaaucagaggaugcga

SEQ ID NO: 1528355 - RNA, 19 nt, Artificial Sequence
  Description of Artificial Sequence: Synthetic oligonucleotide
  Antisense strand to SEQ ID NO: 1528354
ucgcauccucugauuaacc

SEQ ID NO: 1528356 - RNA, 19 nt, Artificial Sequence
  Description of Artificial Sequence: Synthetic oligonucleotide
  Sense strand starting at position 1400 of SEQ ID NO: 1244997
uuaaucagaggaugcgauu

SEQ ID NO: 1528357 - RNA, 19 nt, Artificial Sequence
  Description of Artificial Sequence: Synthetic oligonucleotide
  Antisense strand to SEQ ID NO: 1528356
aaucgcauccucugauuaa

SEQ ID NO: 1528358 - RNA, 19 nt, Artificial Sequence
  Description of Artificial Sequence: Synthetic oligonucleotide
  Sense strand starting at position 1491 of SEQ ID NO: 1244997
aggacugugcuaugaaucu

SEQ ID NO: 1528359 - RNA, 19 nt, Artificial Sequence
  Description of Artificial Sequence: Synthetic oligonucleotide
  Antisense strand to SEQ ID NO: 1528358
agauucauagcacaguccu

SEQ ID NO: 1528360 - RNA, 19 nt, Artificial Sequence
  Description of Artificial Sequence: Synthetic oligonucleotide
  Sense strand starting at position 1857 of SEQ ID NO: 1244997
ggauuccgagcucaguuua

SEQ ID NO: 1528361 - RNA, 19 nt, Artificial Sequence
  Description of Artificial Sequence: Synthetic oligonucleotide
  Antisense strand to SEQ ID NO: 1528360
uaaacugagcucggaaucc

SEQ ID NO: 1528362 - RNA, 19 nt, Artificial Sequence
  Description of Artificial Sequence: Synthetic oligonucleotide
  Sense strand starting at position 1989 of SEQ ID NO: 1244997
aggacucucguuugacgua

SEQ ID NO: 1528363 - RNA, 19 nt, Artificial Sequence
  Description of Artificial Sequence: Synthetic oligonucleotide
  Antisense strand to SEQ ID NO: 1528362
uacgucaaacgagaguccu

SEQ ID NO: 1528364 - RNA, 19 nt, Artificial Sequence
  Description of Artificial Sequence: Synthetic oligonucleotide
  Sense strand starting at position 2084 of SEQ ID NO: 1244997
gggcguggcuucgugcaau

SEQ ID NO: 1528365 - RNA, 19 nt, Artificial Sequence
  Description of Artificial Sequence: Synthetic oligonucleotide
  Antisense strand to SEQ ID NO: 1528364
auugcacgaagccacgccc

SEQ ID NO: 1528366 - RNA, 19 nt, Artificial Sequence
  Description of Artificial Sequence: Synthetic oligonucleotide
  Sense strand starting at position 2085 of SEQ ID NO: 1244997
ggcguggcuucgugcaauu

SEQ ID NO: 1528367 - RNA, 19 nt, Artificial Sequence
  Description of Artificial Sequence: Synthetic oligonucleotide
  Antisense strand to SEQ ID NO: 1528366
aauugcacgaagccacgcc

SEQ ID NO: 1528368 - RNA, 19 nt, Artificial Sequence
  Description of Artificial Sequence: Synthetic oligonucleotide
  Sense strand starting at position 2551 of SEQ ID NO: 1244997
guuagugugucaggagcua

SEQ ID NO: 1528369 - RNA, 19 nt, Artificial Sequence
  Description of Artificial Sequence: Synthetic oligonucleotide
  Antisense strand to SEQ ID NO: 1528368
uagcuccugacacacuaac

SEQ ID NO: 1528370 - RNA, 19 nt, Artificial Sequence
  Description of Artificial Sequence: Synthetic oligonucleotide
  Sense strand starting at position 3006 of SEQ ID NO: 1244997
gccgucuugggccgagaga

SEQ ID NO: 1528371 - RNA, 19 nt, Artificial Sequence
  Description of Artificial Sequence: Synthetic oligonucleotide
  Antisense strand to SEQ ID NO: 1528370
ucucucggcccaagacggc

SEQ ID NO: 1528372 - RNA, 19 nt, Artificial Sequence
  Description of Artificial Sequence: Synthetic oligonucleotide
  Sense strand starting at position 3007 of SEQ ID NO: 1244997
ccgucuugggccgagagaa

SEQ ID NO: 1528373 - RNA, 19 nt, Artificial Sequence
  Description of Artificial Sequence: Synthetic oligonucleotide
  Antisense strand to SEQ ID NO: 1528372
uucucucggcccaagacgg

SEQ ID NO: 1528374 - RNA, 19 nt, Artificial Sequence
  Description of Artificial Sequence: Synthetic oligonucleotide
  Sense strand starting at position 3256 of SEQ ID NO: 1244997
ugucauccuggcugucaga

SEQ ID NO: 1528375 - RNA, 19 nt, Artificial Sequence
  Description of Artificial Sequence: Synthetic oligonucleotide
  Antisense strand to SEQ ID NO: 1528374
ucugacagccaggaugaca

SEQ ID NO: 1528376 - RNA, 19 nt, Artificial Sequence
  Description of Artificial Sequence: Synthetic oligonucleotide
  Sense strand starting at position 3276 of SEQ ID NO: 1244997
ugggcuaggagcugucaga

SEQ ID NO: 1528377 - RNA, 19 nt, Artificial Sequence
  Description of Artificial Sequence: Synthetic oligonucleotide
  Antisense strand to SEQ ID NO: 1528376
ucugacagcuccuagccca

SEQ ID NO: 1528378 - RNA, 19 nt, Artificial Sequence
  Description of Artificial Sequence: Synthetic oligonucleotide
  Sense strand starting at position 3395 of SEQ ID NO: 1244997
ugcugaguccucuggguug

SEQ ID NO: 1528379 - RNA, 19 nt, Artificial Sequence
  Description of Artificial Sequence: Synthetic oligonucleotide
  Antisense strand to SEQ ID NO: 1528378
caacccagaggacucagca

SEQ ID NO: 1528380 - RNA, 19 nt, Artificial Sequence
  Description of Artificial Sequence: Synthetic oligonucleotide
  Sense strand starting at position 3397 of SEQ ID NO: 1244997
cugaguccucuggguugaa

SEQ ID NO: 1528381 - RNA, 19 nt, Artificial Sequence
  Description of Artificial Sequence: Synthetic oligonucleotide
  Antisense strand to SEQ ID NO: 1528380
uucaacccagaggacucag

SEQ ID NO: 1528382 - RNA, 19 nt, Artificial Sequence
  Description of Artificial Sequence: Synthetic oligonucleotide
  Sense strand starting at position 3406 of SEQ ID NO: 1244997
cuggguugaacagagcuau

SEQ ID NO: 1528383 - RNA, 19 nt, Artificial Sequence
  Description of Artificial Sequence: Synthetic oligonucleotide
  Antisense strand to SEQ ID NO: 1528382
auagcucuguucaacccag

SEQ ID NO: 1528384 - RNA, 19 nt, Artificial Sequence
  Description of Artificial Sequence: Synthetic oligonucleotide
  Sense strand starting at position 3417 of SEQ ID NO: 1244997
agagcuaucucagacagag

SEQ ID NO: 1528385 - RNA, 19 nt, Artificial Sequence
  Description of Artificial Sequence: Synthetic oligonucleotide
  Antisense strand to SEQ ID NO: 1528384
cucugucugagauagcucu

SEQ ID NO: 1528386 - RNA, 19 nt, Artificial Sequence
  Description of Artificial Sequence: Synthetic oligonucleotide
  Sense strand starting at position 3498 of SEQ ID NO: 1244997
ccaagaggguuucggaauu

SEQ ID NO: 1528387 - RNA, 19 nt, Artificial Sequence
  Description of Artificial Sequence: Synthetic oligonucleotide
  Antisense strand to SEQ ID NO: 1528386
aauuccgaaacccucuugg

SEQ ID NO: 1528388 - RNA, 19 nt, Artificial Sequence
  Description of Artificial Sequence: Synthetic oligonucleotide
  Sense strand starting at position 3543 of SEQ ID NO: 1244997
uuucuuacccucugaguau

SEQ ID NO: 1528389 - RNA, 19 nt, Artificial Sequence
  Description of Artificial Sequence: Synthetic oligonucleotide
  Antisense strand to SEQ ID NO: 1528388
auacucagaggguaagaaa

SEQ ID NO: 1528390 - RNA, 19 nt, Artificial Sequence
  Description of Artificial Sequence: Synthetic oligonucleotide
  Sense strand starting at position 3544 of SEQ ID NO: 1244997
uucuuacccucugaguaua

SEQ ID NO: 1528391 - RNA, 19 nt, Artificial Sequence
  Description of Artificial Sequence: Synthetic oligonucleotide
  Antisense strand to SEQ ID NO: 1528390
uauacucagaggguaagaa

SEQ ID NO: 1528392 - RNA, 19 nt, Artificial Sequence
  Description of Artificial Sequence: Synthetic oligonucleotide
  Sense strand starting at position 3722 of SEQ ID NO: 1244997
gcugauucaugcguuggaa

SEQ ID NO: 1528393 - RNA, 19 nt, Artificial Sequence
  Description of Artificial Sequence: Synthetic oligonucleotide
  Antisense strand to SEQ ID NO: 1528392
uuccaacgcaugaaucagc

SEQ ID NO: 1528394 - RNA, 19 nt, Artificial Sequence
  Description of Artificial Sequence: Synthetic oligonucleotide
  Sense strand starting at position 3724 of SEQ ID NO: 1244997
ugauucaugcguuggaacu

SEQ ID NO: 1528395 - RNA, 19 nt, Artificial Sequence
  Description of Artificial Sequence: Synthetic oligonucleotide
  Antisense strand to SEQ ID NO: 1528394
aguuccaacgcaugaauca

SEQ ID NO: 1528396 - RNA, 19 nt, Artificial Sequence
  Description of Artificial Sequence: Synthetic oligonucleotide
  Sense strand starting at position 2380 of SEQ ID NO: 1244998
ggaggcuguucccagagau

SEQ ID NO: 1528397 - RNA, 19 nt, Artificial Sequence
  Description of Artificial Sequence: Synthetic oligonucleotide
  Antisense strand to SEQ ID NO: 1528396
aucucugggaacagccucc

SEQ ID NO: 1528398 - RNA, 19 nt, Artificial Sequence
  Description of Artificial Sequence: Synthetic oligonucleotide
  Sense strand starting at position 2399 of SEQ ID NO: 1244998
gccagccucuuaguuaagu

SEQ ID NO: 1528399 - RNA, 19 nt, Artificial Sequence
  Description of Artificial Sequence: Synthetic oligonucleotide
  Antisense strand to SEQ ID NO: 1528398
acuuaacuaagaggcuggc

SEQ ID NO: 1528400 - RNA, 19 nt, Artificial Sequence
  Description of Artificial Sequence: Synthetic oligonucleotide
  Sense strand starting at position 2446 of SEQ ID NO: 1244998
ggacuucuguugugucuau

SEQ ID NO: 1528401 - RNA, 19 nt, Artificial Sequence
  Description of Artificial Sequence: Synthetic oligonucleotide
  Antisense strand to SEQ ID NO: 1528400
auagacacaacagaagucc

SEQ ID NO: 1528402 - RNA, 19 nt, Artificial Sequence
  Description of Artificial Sequence: Synthetic oligonucleotide
  Sense strand starting at position 2447 of SEQ ID NO: 1244998
gacuucuguugugucuauu

SEQ ID NO: 1528403 - RNA, 19 nt, Artificial Sequence
  Description of Artificial Sequence: Synthetic oligonucleotide
  Antisense strand to SEQ ID NO: 1528402
aauagacacaacagaaguc

SEQ ID NO: 1528404 - RNA, 19 nt, Artificial Sequence
  Description of Artificial Sequence: Synthetic oligonucleotide
  Sense strand starting at position 2863 of SEQ ID NO: 1244998
caacacacucugugaggua

SEQ ID NO: 1528405 - RNA, 19 nt, Artificial Sequence
  Description of Artificial Sequence: Synthetic oligonucleotide
  Antisense strand to SEQ ID NO: 1528404
uaccucacagaguguguug

SEQ ID NO: 1528406 - RNA, 19 nt, Artificial Sequence
  Description of Artificial Sequence: Synthetic oligonucleotide
  Sense strand starting at position 2883 of SEQ ID NO: 1244998
ggaggacaguuauuacugu

SEQ ID NO: 1528407 - RNA, 19 nt, Artificial Sequence
  Description of Artificial Sequence: Synthetic oligonucleotide
  Antisense strand to SEQ ID NO: 1528406
acaguaauaacuguccucc

SEQ ID NO: 1528408 - RNA, 19 nt, Artificial Sequence
  Description of Artificial Sequence: Synthetic oligonucleotide
  Sense strand starting at position 3522 of SEQ ID NO: 1244998
aagacuuccuguugaagau

SEQ ID NO: 1528409 - RNA, 19 nt, Artificial Sequence
  Description of Artificial Sequence: Synthetic oligonucleotide
  Antisense strand to SEQ ID NO: 1528408
aucuucaacaggaagucuu

SEQ ID NO: 1528410 - RNA, 19 nt, Artificial Sequence
  Description of Artificial Sequence: Synthetic oligonucleotide
  Sense strand starting at position 3536 of SEQ ID NO: 1244998
aagauuggccucugcggua

SEQ ID NO: 1528411 - RNA, 19 nt, Artificial Sequence
  Description of Artificial Sequence: Synthetic oligonucleotide
  Antisense strand to SEQ ID NO: 1528410
uaccgcagaggccaaucuu

SEQ ID NO: 1528412 - RNA, 19 nt, Artificial Sequence
  Description of Artificial Sequence: Synthetic oligonucleotide
  Sense strand starting at position 3650 of SEQ ID NO: 1244998
gcaccaaagcaacaugauu

SEQ ID NO: 1528413 - RNA, 19 nt, Artificial Sequence
  Description of Artificial Sequence: Synthetic oligonucleotide
  Antisense strand to SEQ ID NO: 1528412
aaucauguugcuuuggugc

SEQ ID NO: 1528414 - RNA, 19 nt, Artificial Sequence
  Description of Artificial Sequence: Synthetic oligonucleotide
  Sense strand starting at position 3676 of SEQ ID NO: 1244998
gggucuuaguucugacuca

SEQ ID NO: 1528415 - RNA, 19 nt, Artificial Sequence
  Description of Artificial Sequence: Synthetic oligonucleotide
  Antisense strand to SEQ ID NO: 1528414
ugagucagaacuaagaccc

SEQ ID NO: 1528416 - RNA, 19 nt, Artificial Sequence
  Description of Artificial Sequence: Synthetic oligonucleotide
  Sense strand starting at position 3677 of SEQ ID NO: 1244998
ggucuuaguucugacucau

SEQ ID NO: 1528417 - RNA, 19 nt, Artificial Sequence
  Description of Artificial Sequence: Synthetic oligonucleotide
  Antisense strand to SEQ ID NO: 1528416
augagucagaacuaagacc

SEQ ID NO: 1528418 - RNA, 19 nt, Artificial Sequence
  Description of Artificial Sequence: Synthetic oligonucleotide
  Sense strand starting at position 3687 of SEQ ID NO: 1244998
cugacucaucugcaggaca

SEQ ID NO: 1528419 - RNA, 19 nt, Artificial Sequence
  Description of Artificial Sequence: Synthetic oligonucleotide
  Antisense strand to SEQ ID NO: 1528418
uguccugcagaugagucag

SEQ ID NO: 1528420 - RNA, 19 nt, Artificial Sequence
  Description of Artificial Sequence: Synthetic oligonucleotide
  Sense strand starting at position 3689 of SEQ ID NO: 1244998
gacucaucugcaggacaga

SEQ ID NO: 1528421 - RNA, 19 nt, Artificial Sequence
  Description of Artificial Sequence: Synthetic oligonucleotide
  Antisense strand to SEQ ID NO: 1528420
ucuguccugcagaugaguc

SEQ ID NO: 1528422 - RNA, 19 nt, Artificial Sequence
  Description of Artificial Sequence: Synthetic oligonucleotide
  Sense strand starting at position 3710 of SEQ ID NO: 1244998
gaccauugucuacagugaa

SEQ ID NO: 1528423 - RNA, 19 nt, Artificial Sequence
  Description of Artificial Sequence: Synthetic oligonucleotide
  Antisense strand to SEQ ID NO: 1528422
uucacuguagacaaugguc

SEQ ID NO: 1528424 - RNA, 19 nt, Artificial Sequence
  Description of Artificial Sequence: Synthetic oligonucleotide
  Sense strand starting at position 3748 of SEQ ID NO: 1244998
uugucucccucuuaggaga

SEQ ID NO: 1528425 - RNA, 19 nt, Artificial Sequence
  Description of Artificial Sequence: Synthetic oligonucleotide
  Antisense strand to SEQ ID NO: 1528424
ucuccuaagagggagacaa

SEQ ID NO: 1528426 - RNA, 19 nt, Artificial Sequence
  Description of Artificial Sequence: Synthetic oligonucleotide
  Sense strand starting at position 3763 of SEQ ID NO: 1244998
gagagaguuugccucuuga

SEQ ID NO: 1528427 - RNA, 19 nt, Artificial Sequence
  Description of Artificial Sequence: Synthetic oligonucleotide
  Antisense strand to SEQ ID NO: 1528426
ucaagaggcaaacucucuc

SEQ ID NO: 1528428 - RNA, 19 nt, Artificial Sequence
  Description of Artificial Sequence: Synthetic oligonucleotide
  Sense strand starting at position 3767 of SEQ ID NO: 1244998
gaguuugccucuugaagga

SEQ ID NO: 1528429 - RNA, 19 nt, Artificial Sequence
  Description of Artificial Sequence: Synthetic oligonucleotide
  Antisense strand to SEQ ID NO: 1528428
uccuucaagaggcaaacuc

SEQ ID NO: 1528430 - RNA, 19 nt, Artificial Sequence
  Description of Artificial Sequence: Synthetic oligonucleotide
  Sense strand starting at position 3777 of SEQ ID NO: 1244998
cuugaaggaguuuggugua

SEQ ID NO: 1528431 - RNA, 19 nt, Artificial Sequence
  Description of Artificial Sequence: Synthetic oligonucleotide
  Antisense strand to SEQ ID NO: 1528430
uacaccaaacuccuucaag

SEQ ID NO: 1528432 - RNA, 19 nt, Artificial Sequence
  Description of Artificial Sequence: Synthetic oligonucleotide
  Sense strand starting at position 3799 of SEQ ID NO: 1244998
gugugagggucccauaaag

SEQ ID NO: 1528433 - RNA, 19 nt, Artificial Sequence
  Description of Artificial Sequence: Synthetic oligonucleotide
  Antisense strand to SEQ ID NO: 1528432
cuuuaugggacccucacac

SEQ ID NO: 1528434 - RNA, 19 nt, Artificial Sequence
  Description of Artificial Sequence: Synthetic oligonucleotide
  Sense strand starting at position 2089 of SEQ ID NO: 1244999
ggaggcuguucccagagau

SEQ ID NO: 1528435 - RNA, 19 nt, Artificial Sequence
  Description of Artificial Sequence: Synthetic oligonucleotide
  Antisense strand to SEQ ID NO: 1528434
aucucugggaacagccucc

SEQ ID NO: 1528436 - RNA, 19 nt, Artificial Sequence
  Description of Artificial Sequence: Synthetic oligonucleotide
  Sense strand starting at position 2108 of SEQ ID NO: 1244999
gccagccucuuaguuaagu

SEQ ID NO: 1528437 - RNA, 19 nt, Artificial Sequence
  Description of Artificial Sequence: Synthetic oligonucleotide
  Antisense strand to SEQ ID NO: 1528436
acuuaacuaagaggcuggc

SEQ ID NO: 1528438 - RNA, 19 nt, Artificial Sequence
  Description of Artificial Sequence: Synthetic oligonucleotide
  Sense strand starting at position 2155 of SEQ ID NO: 1244999
ggacuucuguugugucuau

SEQ ID NO: 1528439 - RNA, 19 nt, Artificial Sequence
  Description of Artificial Sequence: Synthetic oligonucleotide
  Antisense strand to SEQ ID NO: 1528438
auagacacaacagaagucc

SEQ ID NO: 1528440 - RNA, 19 nt, Artificial Sequence
  Description of Artificial Sequence: Synthetic oligonucleotide
  Sense strand starting at position 2156 of SEQ ID NO: 1244999
gacuucuguugugucuauu

SEQ ID NO: 1528441 - RNA, 19 nt, Artificial Sequence
  Description of Artificial Sequence: Synthetic oligonucleotide
  Antisense strand to SEQ ID NO: 1528440
aauagacacaacagaaguc

SEQ ID NO: 1528442 - RNA, 19 nt, Artificial Sequence
  Description of Artificial Sequence: Synthetic oligonucleotide
  Sense strand starting at position 2572 of SEQ ID NO: 1244999
caacacacucugugaggua

SEQ ID NO: 1528443 - RNA, 19 nt, Artificial Sequence
  Description of Artificial Sequence: Synthetic oligonucleotide
  Antisense strand to SEQ ID NO: 1528442
uaccucacagaguguguug

SEQ ID NO: 1528444 - RNA, 19 nt, Artificial Sequence
  Description of Artificial Sequence: Synthetic oligonucleotide
  Sense strand starting at position 2592 of SEQ ID NO: 1244999
ggaggacaguuauuacugu

SEQ ID NO: 1528445 - RNA, 19 nt, Artificial Sequence
  Description of Artificial Sequence: Synthetic oligonucleotide
  Antisense strand to SEQ ID NO: 1528444
acaguaauaacuguccucc

SEQ ID NO: 1528446 - RNA, 19 nt, Artificial Sequence
  Description of Artificial Sequence: Synthetic oligonucleotide
  Sense strand starting at position 3231 of SEQ ID NO: 1244999
aagacuuccuguugaagau

SEQ ID NO: 1528447 - RNA, 19 nt, Artificial Sequence
  Description of Artificial Sequence: Synthetic oligonucleotide
  Antisense strand to SEQ ID NO: 1528446
aucuucaacaggaagucuu

SEQ ID NO: 1528448 - RNA, 19 nt, Artificial Sequence
  Description of Artificial Sequence: Synthetic oligonucleotide
  Sense strand starting at position 3245 of SEQ ID NO: 1244999
aagauuggccucugcggua

SEQ ID NO: 1528449 - RNA, 19 nt, Artificial Sequence
  Description of Artificial Sequence: Synthetic oligonucleotide
  Antisense strand to SEQ ID NO: 1528448
uaccgcagaggccaaucuu

SEQ ID NO: 1528450 - RNA, 19 nt, Artificial Sequence
  Description of Artificial Sequence: Synthetic oligonucleotide
  Sense strand starting at position 3359 of SEQ ID NO: 1244999
gcaccaaagcaacaugauu

SEQ ID NO: 1528451 - RNA, 19 nt, Artificial Sequence
  Description of Artificial Sequence: Synthetic oligonucleotide
  Antisense strand to SEQ ID NO: 1528450
aaucauguugcuuuggugc

SEQ ID NO: 1528452 - RNA, 19 nt, Artificial Sequence
  Description of Artificial Sequence: Synthetic oligonucleotide
  Sense strand starting at position 3385 of SEQ ID NO: 1244999
gggucuuaguucugacuca

SEQ ID NO: 1528453 - RNA, 19 nt, Artificial Sequence
  Description of Artificial Sequence: Synthetic oligonucleotide
  Antisense strand to SEQ ID NO: 1528452
ugagucagaacuaagaccc

SEQ ID NO: 1528454 - RNA, 19 nt, Artificial Sequence
  Description of Artificial Sequence: Synthetic oligonucleotide
  Sense strand starting at position 3386 of SEQ ID NO: 1244999
ggucuuaguucugacucau

SEQ ID NO: 1528455 - RNA, 19 nt, Artificial Sequence
  Description of Artificial Sequence: Synthetic oligonucleotide
  Antisense strand to SEQ ID NO: 1528454
augagucagaacuaagacc

SEQ ID NO: 1528456 - RNA, 19 nt, Artificial Sequence
  Description of Artificial Sequence: Synthetic oligonucleotide
  Sense strand starting at position 3396 of SEQ ID NO: 1244999
cugacucaucugcaggaca

SEQ ID NO: 1528457 - RNA, 19 nt, Artificial Sequence
  Description of Artificial Sequence: Synthetic oligonucleotide
  Antisense strand to SEQ ID NO: 1528456
uguccugcagaugagucag

SEQ ID NO: 1528458 - RNA, 19 nt, Artificial Sequence
  Description of Artificial Sequence: Synthetic oligonucleotide
  Sense strand starting at position 3398 of SEQ ID NO: 1244999
gacucaucugcaggacaga

SEQ ID NO: 1528459 - RNA, 19 nt, Artificial Sequence
  Description of Artificial Sequence: Synthetic oligonucleotide
  Antisense strand to SEQ ID NO: 1528458
ucuguccugcagaugaguc

SEQ ID NO: 1528460 - RNA, 19 nt, Artificial Sequence
  Description of Artificial Sequence: Synthetic oligonucleotide
  Sense strand starting at position 3419 of SEQ ID NO: 1244999
gaccauugucuacagugaa

SEQ ID NO: 1528461 - RNA, 19 nt, Artificial Sequence
  Description of Artificial Sequence: Synthetic oligonucleotide
  Antisense strand to SEQ ID NO: 1528460
uucacuguagacaaugguc

SEQ ID NO: 1528462 - RNA, 19 nt, Artificial Sequence
  Description of Artificial Sequence: Synthetic oligonucleotide
  Sense strand starting at position 3457 of SEQ ID NO: 1244999
uugucucccucuuaggaga

SEQ ID NO: 1528463 - RNA, 19 nt, Artificial Sequence
  Description of Artificial Sequence: Synthetic oligonucleotide
  Antisense strand to SEQ ID NO: 1528462
ucuccuaagagggagacaa

SEQ ID NO: 1528464 - RNA, 19 nt, Artificial Sequence
  Description of Artificial Sequence: Synthetic oligonucleotide
  Sense strand starting at position 3472 of SEQ ID NO: 1244999
gagagaguuugccucuuga

SEQ ID NO: 1528465 - RNA, 19 nt, Artificial Sequence
  Description of Artificial Sequence: Synthetic oligonucleotide
  Antisense strand to SEQ ID NO: 1528464
ucaagaggcaaacucucuc

SEQ ID NO: 1528466 - RNA, 19 nt, Artificial Sequence
  Description of Artificial Sequence: Synthetic oligonucleotide
  Sense strand starting at position 3476 of SEQ ID NO: 1244999
gaguuugccucuugaagga

SEQ ID NO: 1528467 - RNA, 19 nt, Artificial Sequence
  Description of Artificial Sequence: Synthetic oligonucleotide
  Antisense strand to SEQ ID NO: 1528466
uccuucaagaggcaaacuc

SEQ ID NO: 1528468 - RNA, 19 nt, Artificial Sequence
  Description of Artificial Sequence: Synthetic oligonucleotide
  Sense strand starting at position 3486 of SEQ ID NO: 1244999
cuugaaggaguuuggugua

SEQ ID NO: 1528469 - RNA, 19 nt, Artificial Sequence
  Description of Artificial Sequence: Synthetic oligonucleotide
  Antisense strand to SEQ ID NO: 1528468
uacaccaaacuccuucaag

SEQ ID NO: 1528470 - RNA, 19 nt, Artificial Sequence
  Description of Artificial Sequence: Synthetic oligonucleotide
  Sense strand starting at position 3508 of SEQ ID NO: 1244999
gugugagggucccauaaag

SEQ ID NO: 1528471 - RNA, 19 nt, Artificial Sequence
  Description of Artificial Sequence: Synthetic oligonucleotide
  Antisense strand to SEQ ID NO: 1528470
cuuuaugggacccucacac

SEQ ID NO: 1528472 - RNA, 19 nt, Artificial Sequence
  Description of Artificial Sequence: Synthetic oligonucleotide
  Sense strand starting at position 19 of SEQ ID NO: 1245000
gcuuucuuguuagacauga

SEQ ID NO: 1528473 - RNA, 19 nt, Artificial Sequence
  Description of Artificial Sequence: Synthetic oligonucleotide
  Antisense strand to SEQ ID NO: 1528472
ucaugucuaacaagaaagc

SEQ ID NO: 1528474 - RNA, 19 nt, Artificial Sequence
  Description of Artificial Sequence: Synthetic oligonucleotide
  Sense strand starting at position 113 of SEQ ID NO: 1245000
cugugaaugggcugcugau

SEQ ID NO: 1528475 - RNA, 19 nt, Artificial Sequence
  Description of Artificial Sequence: Synthetic oligonucleotide
  Antisense strand to SEQ ID NO: 1528474
aucagcagcccauucacag

SEQ ID NO: 1528476 - RNA, 19 nt, Artificial Sequence
  Description of Artificial Sequence: Synthetic oligonucleotide
  Sense strand starting at position 215 of SEQ ID NO: 1245000
gaggaauccucgggcucca

SEQ ID NO: 1528477 - RNA, 19 nt, Artificial Sequence
  Description of Artificial Sequence: Synthetic oligonucleotide
  Antisense strand to SEQ ID NO: 1528476
uggagcccgaggauuccuc

SEQ ID NO: 1528478 - RNA, 19 nt, Artificial Sequence
  Description of Artificial Sequence: Synthetic oligonucleotide
  Sense strand starting at position 227 of SEQ ID NO: 1245000
ggcuccagucccugaugaa

SEQ ID NO: 1528479 - RNA, 19 nt, Artificial Sequence
  Description of Artificial Sequence: Synthetic oligonucleotide
  Antisense strand to SEQ ID NO: 1528478
uucaucagggacuggagcc

SEQ ID NO: 1528480 - RNA, 19 nt, Artificial Sequence
  Description of Artificial Sequence: Synthetic oligonucleotide
  Sense strand starting at position 228 of SEQ ID NO: 1245000
gcuccagucccugaugaac

SEQ ID NO: 1528481 - RNA, 19 nt, Artificial Sequence
  Description of Artificial Sequence: Synthetic oligonucleotide
  Antisense strand to SEQ ID NO: 1528480
guucaucagggacuggagc

SEQ ID NO: 1528482 - RNA, 19 nt, Artificial Sequence
  Description of Artificial Sequence: Synthetic oligonucleotide
  Sense strand starting at position 274 of SEQ ID NO: 1245000
aggcuucgguguuaauaga

SEQ ID NO: 1528483 - RNA, 19 nt, Artificial Sequence
  Description of Artificial Sequence: Synthetic oligonucleotide
  Antisense strand to SEQ ID NO: 1528482
ucuauuaacaccgaagccu

SEQ ID NO: 1528484 - RNA, 19 nt, Artificial Sequence
  Description of Artificial Sequence: Synthetic oligonucleotide
  Sense strand starting at position 304 of SEQ ID NO: 1245000
ccuguuucucuccagguga

SEQ ID NO: 1528485 - RNA, 19 nt, Artificial Sequence
  Description of Artificial Sequence: Synthetic oligonucleotide
  Antisense strand to SEQ ID NO: 1528484
ucaccuggagagaaacagg

SEQ ID NO: 1528486 - RNA, 19 nt, Artificial Sequence
  Description of Artificial Sequence: Synthetic oligonucleotide
  Sense strand starting at position 1990 of SEQ ID NO: 1245000
gauaguacauuugagagca

SEQ ID NO: 1528487 - RNA, 19 nt, Artificial Sequence
  Description of Artificial Sequence: Synthetic oligonucleotide
  Antisense strand to SEQ ID NO: 1528486
ugcucucaaauguacuauc

SEQ ID NO: 1528488 - RNA, 19 nt, Artificial Sequence
  Description of Artificial Sequence: Synthetic oligonucleotide
  Sense strand starting at position 1992 of SEQ ID NO: 1245000
uaguacauuugagagcaaa

SEQ ID NO: 1528489 - RNA, 19 nt, Artificial Sequence
  Description of Artificial Sequence: Synthetic oligonucleotide
  Antisense strand to SEQ ID NO: 1528488
uuugcucucaaauguacua

SEQ ID NO: 1528490 - RNA, 19 nt, Artificial Sequence
  Description of Artificial Sequence: Synthetic oligonucleotide
  Sense strand starting at position 2147 of SEQ ID NO: 1245000
agggcaguuugcgucuuaa

SEQ ID NO: 1528491 - RNA, 19 nt, Artificial Sequence
  Description of Artificial Sequence: Synthetic oligonucleotide
  Antisense strand to SEQ ID NO: 1528490
uuaagacgcaaacugcccu

SEQ ID NO: 1528492 - RNA, 19 nt, Artificial Sequence
  Description of Artificial Sequence: Synthetic oligonucleotide
  Sense strand starting at position 2149 of SEQ ID NO: 1245000
ggcaguuugcgucuuaagu

SEQ ID NO: 1528493 - RNA, 19 nt, Artificial Sequence
  Description of Artificial Sequence: Synthetic oligonucleotide
  Antisense strand to SEQ ID NO: 1528492
acuuaagacgcaaacugcc

SEQ ID NO: 1528494 - RNA, 19 nt, Artificial Sequence
  Description of Artificial Sequence: Synthetic oligonucleotide
  Sense strand starting at position 2150 of SEQ ID NO: 1245000
gcaguuugcgucuuaaguu

SEQ ID NO: 1528495 - RNA, 19 nt, Artificial Sequence
  Description of Artificial Sequence: Synthetic oligonucleotide
  Antisense strand to SEQ ID NO: 1528494
aacuuaagacgcaaacugc

SEQ ID NO: 1528496 - RNA, 19 nt, Artificial Sequence
  Description of Artificial Sequence: Synthetic oligonucleotide
  Sense strand starting at position 2151 of SEQ ID NO: 1245000
caguuugcgucuuaaguuc

SEQ ID NO: 1528497 - RNA, 19 nt, Artificial Sequence
  Description of Artificial Sequence: Synthetic oligonucleotide
  Antisense strand to SEQ ID NO: 1528496
gaacuuaagacgcaaacug

SEQ ID NO: 1528498 - RNA, 19 nt, Artificial Sequence
  Description of Artificial Sequence: Synthetic oligonucleotide
  Sense strand starting at position 2294 of SEQ ID NO: 1245000
gucacagugucucaggauu

SEQ ID NO: 1528499 - RNA, 19 nt, Artificial Sequence
  Description of Artificial Sequence: Synthetic oligonucleotide
  Antisense strand to SEQ ID NO: 1528498
aauccugagacacugugac

SEQ ID NO: 1528500 - RNA, 19 nt, Artificial Sequence
  Description of Artificial Sequence: Synthetic oligonucleotide
  Sense strand starting at position 2296 of SEQ ID NO: 1245000
cacagugucucaggauugu

SEQ ID NO: 1528501 - RNA, 19 nt, Artificial Sequence
  Description of Artificial Sequence: Synthetic oligonucleotide
  Antisense strand to SEQ ID NO: 1528500
acaauccugagacacugug

SEQ ID NO: 1528502 - RNA, 19 nt, Artificial Sequence
  Description of Artificial Sequence: Synthetic oligonucleotide
  Sense strand starting at position 2412 of SEQ ID NO: 1245000
ggagaaggucuguggucga

SEQ ID NO: 1528503 - RNA, 19 nt, Artificial Sequence
  Description of Artificial Sequence: Synthetic oligonucleotide
  Antisense strand to SEQ ID NO: 1528502
ucgaccacagaccuucucc

SEQ ID NO: 1528504 - RNA, 19 nt, Artificial Sequence
  Description of Artificial Sequence: Synthetic oligonucleotide
  Sense strand starting at position 2415 of SEQ ID NO: 1245000
gaaggucuguggucgaaga

SEQ ID NO: 1528505 - RNA, 19 nt, Artificial Sequence
  Description of Artificial Sequence: Synthetic oligonucleotide
  Antisense strand to SEQ ID NO: 1528504
ucuucgaccacagaccuuc

SEQ ID NO: 1528506 - RNA, 19 nt, Artificial Sequence
  Description of Artificial Sequence: Synthetic oligonucleotide
  Sense strand starting at position 2434 of SEQ ID NO: 1245000
gggcgagcgacuuguccaa

SEQ ID NO: 1528507 - RNA, 19 nt, Artificial Sequence
  Description of Artificial Sequence: Synthetic oligonucleotide
  Antisense strand to SEQ ID NO: 1528506
uuggacaagucgcucgccc

SEQ ID NO: 1528508 - RNA, 19 nt, Artificial Sequence
  Description of Artificial Sequence: Synthetic oligonucleotide
  Sense strand starting at position 2464 of SEQ ID NO: 1245000
gugagcaguccugguggua

SEQ ID NO: 1528509 - RNA, 19 nt, Artificial Sequence
  Description of Artificial Sequence: Synthetic oligonucleotide
  Antisense strand to SEQ ID NO: 1528508
uaccaccaggacugcucac

SEQ ID NO: 1528510 - RNA, 19 nt, Artificial Sequence
  Description of Artificial Sequence: Synthetic oligonucleotide
  Sense strand starting at position 2512 of SEQ ID NO: 1245000
acguguggcuucucugaac

SEQ ID NO: 1528511 - RNA, 19 nt, Artificial Sequence
  Description of Artificial Sequence: Synthetic oligonucleotide
  Antisense strand to SEQ ID NO: 1528510
guucagagaagccacacgu

SEQ ID NO: 1528512 - RNA, 19 nt, Artificial Sequence
  Description of Artificial Sequence: Synthetic oligonucleotide
  Sense strand starting at position 2525 of SEQ ID NO: 1245000
cugaacgcaucaucucauu

SEQ ID NO: 1528513 - RNA, 19 nt, Artificial Sequence
  Description of Artificial Sequence: Synthetic oligonucleotide
  Antisense strand to SEQ ID NO: 1528512
aaugagaugaugcguucag

SEQ ID NO: 1528514 - RNA, 19 nt, Artificial Sequence
  Description of Artificial Sequence: Synthetic oligonucleotide
  Sense strand starting at position 2866 of SEQ ID NO: 1245000
gcaaauggcuucuaucuaa

SEQ ID NO: 1528515 - RNA, 19 nt, Artificial Sequence
  Description of Artificial Sequence: Synthetic oligonucleotide
  Antisense strand to SEQ ID NO: 1528514
uuagauagaagccauuugc

SEQ ID NO: 1528516 - RNA, 19 nt, Artificial Sequence
  Description of Artificial Sequence: Synthetic oligonucleotide
  Sense strand starting at position 3082 of SEQ ID NO: 1245000
aagguaaucucgcuuuaca

SEQ ID NO: 1528517 - RNA, 19 nt, Artificial Sequence
  Description of Artificial Sequence: Synthetic oligonucleotide
  Antisense strand to SEQ ID NO: 1528516
uguaaagcgagauuaccuu

SEQ ID NO: 1528518 - RNA, 19 nt, Artificial Sequence
  Description of Artificial Sequence: Synthetic oligonucleotide
  Sense strand starting at position 3323 of SEQ ID NO: 1245000
uaugucaaaucgcuaauga

SEQ ID NO: 1528519 - RNA, 19 nt, Artificial Sequence
  Description of Artificial Sequence: Synthetic oligonucleotide
  Antisense strand to SEQ ID NO: 1528518
ucauuagcgauuugacaua

SEQ ID NO: 1528520 - RNA, 19 nt, Artificial Sequence
  Description of Artificial Sequence: Synthetic oligonucleotide
  Sense strand starting at position 3324 of SEQ ID NO: 1245000
augucaaaucgcuaaugaa

SEQ ID NO: 1528521 - RNA, 19 nt, Artificial Sequence
  Description of Artificial Sequence: Synthetic oligonucleotide
  Antisense strand to SEQ ID NO: 1528520
uucauuagcgauuugacau

SEQ ID NO: 1528522 - RNA, 19 nt, Artificial Sequence
  Description of Artificial Sequence: Synthetic oligonucleotide
  Sense strand starting at position 3334 of SEQ ID NO: 1245000
gcuaaugaagggugucaga

SEQ ID NO: 1528523 - RNA, 19 nt, Artificial Sequence
  Description of Artificial Sequence: Synthetic oligonucleotide
  Antisense strand to SEQ ID NO: 1528522
ucugacacccuucauuagc

SEQ ID NO: 1528524 - RNA, 19 nt, Artificial Sequence
  Description of Artificial Sequence: Synthetic oligonucleotide
  Sense strand starting at position 3344 of SEQ ID NO: 1245000
ggugucagauccuaauccu

SEQ ID NO: 1528525 - RNA, 19 nt, Artificial Sequence
  Description of Artificial Sequence: Synthetic oligonucleotide
  Antisense strand to SEQ ID NO: 1528524
aggauuaggaucugacacc

SEQ ID NO: 1528526 - RNA, 19 nt, Artificial Sequence
  Description of Artificial Sequence: Synthetic oligonucleotide
  Sense strand starting at position 3373 of SEQ ID NO: 1245000
ggaauaaacuucccuucga

SEQ ID NO: 1528527 - RNA, 19 nt, Artificial Sequence
  Description of Artificial Sequence: Synthetic oligonucleotide
  Antisense strand to SEQ ID NO: 1528526
ucgaagggaaguuuauucc

SEQ ID NO: 1528528 - RNA, 19 nt, Artificial Sequence
  Description of Artificial Sequence: Synthetic oligonucleotide
  Sense strand starting at position 3520 of SEQ ID NO: 1245000
ugcgcagccuccuuugaua

SEQ ID NO: 1528529 - RNA, 19 nt, Artificial Sequence
  Description of Artificial Sequence: Synthetic oligonucleotide
  Antisense strand to SEQ ID NO: 1528528
uaucaaaggaggcugcgca

SEQ ID NO: 1528530 - RNA, 19 nt, Artificial Sequence
  Description of Artificial Sequence: Synthetic oligonucleotide
  Sense strand starting at position 3633 of SEQ ID NO: 1245000
ggccgauuucugggcaguc

SEQ ID NO: 1528531 - RNA, 19 nt, Artificial Sequence
  Description of Artificial Sequence: Synthetic oligonucleotide
  Antisense strand to SEQ ID NO: 1528530
gacugcccagaaaucggcc

SEQ ID NO: 1528532 - RNA, 19 nt, Artificial Sequence
  Description of Artificial Sequence: Synthetic oligonucleotide
  Sense strand starting at position 3876 of SEQ ID NO: 1245000
gacguucuacucugagaac

SEQ ID NO: 1528533 - RNA, 19 nt, Artificial Sequence
  Description of Artificial Sequence: Synthetic oligonucleotide
  Antisense strand to SEQ ID NO: 1528532
guucucagaguagaacguc

SEQ ID NO: 1528534 - RNA, 19 nt, Artificial Sequence
  Description of Artificial Sequence: Synthetic oligonucleotide
  Sense strand starting at position 3877 of SEQ ID NO: 1245000
acguucuacucugagaacu

SEQ ID NO: 1528535 - RNA, 19 nt, Artificial Sequence
  Description of Artificial Sequence: Synthetic oligonucleotide
  Antisense strand to SEQ ID NO: 1528534
aguucucagaguagaacgu

SEQ ID NO: 1528536 - RNA, 19 nt, Artificial Sequence
  Description of Artificial Sequence: Synthetic oligonucleotide
  Sense strand starting at position 3879 of SEQ ID NO: 1245000
guucuacucugagaacucu

SEQ ID NO: 1528537 - RNA, 19 nt, Artificial Sequence
  Description of Artificial Sequence: Synthetic oligonucleotide
  Antisense strand to SEQ ID NO: 1528536
agaguucucagaguagaac

SEQ ID NO: 1528538 - RNA, 19 nt, Artificial Sequence
  Description of Artificial Sequence: Synthetic oligonucleotide
  Sense strand starting at position 68 of SEQ ID NO: 1245001
cccugugguucucuucuga

SEQ ID NO: 1528539 - RNA, 19 nt, Artificial Sequence
  Description of Artificial Sequence: Synthetic oligonucleotide
  Antisense strand to SEQ ID NO: 1528538
ucagaagagaaccacaggg

SEQ ID NO: 1528540 - RNA, 19 nt, Artificial Sequence
  Description of Artificial Sequence: Synthetic oligonucleotide
  Sense strand starting at position 75 of SEQ ID NO: 1245001
guucucuucugauuuguaa

SEQ ID NO: 1528541 - RNA, 19 nt, Artificial Sequence
  Description of Artificial Sequence: Synthetic oligonucleotide
  Antisense strand to SEQ ID NO: 1528540
uuacaaaucagaagagaac

SEQ ID NO: 1528542 - RNA, 19 nt, Artificial Sequence
  Description of Artificial Sequence: Synthetic oligonucleotide
  Sense strand starting at position 846 of SEQ ID NO: 1245001
gcuuuaaggagccaugauc

SEQ ID NO: 1528543 - RNA, 19 nt, Artificial Sequence
  Description of Artificial Sequence: Synthetic oligonucleotide
  Antisense strand to SEQ ID NO: 1528542
gaucauggcuccuuaaagc

SEQ ID NO: 1528544 - RNA, 19 nt, Artificial Sequence
  Description of Artificial Sequence: Synthetic oligonucleotide
  Sense strand starting at position 945 of SEQ ID NO: 1245001
auaucaguuccuugccuca

SEQ ID NO: 1528545 - RNA, 19 nt, Artificial Sequence
  Description of Artificial Sequence: Synthetic oligonucleotide
  Antisense strand to SEQ ID NO: 1528544
ugaggcaaggaacugauau

SEQ ID NO: 1528546 - RNA, 19 nt, Artificial Sequence
  Description of Artificial Sequence: Synthetic oligonucleotide
  Sense strand starting at position 1326 of SEQ ID NO: 1245001
gcaguuucccgagccaucu

SEQ ID NO: 1528547 - RNA, 19 nt, Artificial Sequence
  Description of Artificial Sequence: Synthetic oligonucleotide
  Antisense strand to SEQ ID NO: 1528546
agauggcucgggaaacugc

SEQ ID NO: 1528548 - RNA, 19 nt, Artificial Sequence
  Description of Artificial Sequence: Synthetic oligonucleotide
  Sense strand starting at position 1335 of SEQ ID NO: 1245001
cgagccaucuucccaaaca

SEQ ID NO: 1528549 - RNA, 19 nt, Artificial Sequence
  Description of Artificial Sequence: Synthetic oligonucleotide
  Antisense strand to SEQ ID NO: 1528548
uguuugggaagauggcucg

SEQ ID NO: 1528550 - RNA, 19 nt, Artificial Sequence
  Description of Artificial Sequence: Synthetic oligonucleotide
  Sense strand starting at position 1466 of SEQ ID NO: 1245001
acgauuaccucguuccuca

SEQ ID NO: 1528551 - RNA, 19 nt, Artificial Sequence
  Description of Artificial Sequence: Synthetic oligonucleotide
  Antisense strand to SEQ ID NO: 1528550
ugaggaacgagguaaucgu

SEQ ID NO: 1528552 - RNA, 19 nt, Artificial Sequence
  Description of Artificial Sequence: Synthetic oligonucleotide
  Sense strand starting at position 1470 of SEQ ID NO: 1245001
uuaccucguuccucacaga

SEQ ID NO: 1528553 - RNA, 19 nt, Artificial Sequence
  Description of Artificial Sequence: Synthetic oligonucleotide
  Antisense strand to SEQ ID NO: 1528552
ucugugaggaacgagguaa

SEQ ID NO: 1528554 - RNA, 19 nt, Artificial Sequence
  Description of Artificial Sequence: Synthetic oligonucleotide
  Sense strand starting at position 1627 of SEQ ID NO: 1245001
ccuccagguucuuccgaua

SEQ ID NO: 1528555 - RNA, 19 nt, Artificial Sequence
  Description of Artificial Sequence: Synthetic oligonucleotide
  Antisense strand to SEQ ID NO: 1528554
uaucggaagaaccuggagg

SEQ ID NO: 1528556 - RNA, 19 nt, Artificial Sequence
  Description of Artificial Sequence: Synthetic oligonucleotide
  Sense strand starting at position 2124 of SEQ ID NO: 1245001
uugaguggacgccaucuua

SEQ ID NO: 1528557 - RNA, 19 nt, Artificial Sequence
  Description of Artificial Sequence: Synthetic oligonucleotide
  Antisense strand to SEQ ID NO: 1528556
uaagauggcguccacucaa

SEQ ID NO: 1528558 - RNA, 19 nt, Artificial Sequence
  Description of Artificial Sequence: Synthetic oligonucleotide
  Sense strand starting at position 2140 of SEQ ID NO: 1245001
uuaggaaggucacaggaau

SEQ ID NO: 1528559 - RNA, 19 nt, Artificial Sequence
  Description of Artificial Sequence: Synthetic oligonucleotide
  Antisense strand to SEQ ID NO: 1528558
auuccugugaccuuccuaa

SEQ ID NO: 1528560 - RNA, 19 nt, Artificial Sequence
  Description of Artificial Sequence: Synthetic oligonucleotide
  Sense strand starting at position 2202 of SEQ ID NO: 1245001
uuggaaucaccuggcaaga

SEQ ID NO: 1528561 - RNA, 19 nt, Artificial Sequence
  Description of Artificial Sequence: Synthetic oligonucleotide
  Antisense strand to SEQ ID NO: 1528560
ucuugccaggugauuccaa

SEQ ID NO: 1528562 - RNA, 19 nt, Artificial Sequence
  Description of Artificial Sequence: Synthetic oligonucleotide
  Sense strand starting at position 2279 of SEQ ID NO: 1245001
cagccuaggcaucaggaaa

SEQ ID NO: 1528563 - RNA, 19 nt, Artificial Sequence
  Description of Artificial Sequence: Synthetic oligonucleotide
  Antisense strand to SEQ ID NO: 1528562
uuuccugaugccuaggcug

SEQ ID NO: 1528564 - RNA, 19 nt, Artificial Sequence
  Description of Artificial Sequence: Synthetic oligonucleotide
  Sense strand starting at position 2294 of SEQ ID NO: 1245001
gaaauuguugcaggugauu

SEQ ID NO: 1528565 - RNA, 19 nt, Artificial Sequence
  Description of Artificial Sequence: Synthetic oligonucleotide
  Antisense strand to SEQ ID NO: 1528564
aaucaccugcaacaauuuc

SEQ ID NO: 1528566 - RNA, 19 nt, Artificial Sequence
  Description of Artificial Sequence: Synthetic oligonucleotide
  Sense strand starting at position 2344 of SEQ ID NO: 1245001
gcuaaacagucauuguuga

SEQ ID NO: 1528567 - RNA, 19 nt, Artificial Sequence
  Description of Artificial Sequence: Synthetic oligonucleotide
  Antisense strand to SEQ ID NO: 1528566
ucaacaaugacuguuuagc

SEQ ID NO: 1528568 - RNA, 19 nt, Artificial Sequence
  Description of Artificial Sequence: Synthetic oligonucleotide
  Sense strand starting at position 2345 of SEQ ID NO: 1245001
cuaaacagucauuguugaa

SEQ ID NO: 1528569 - RNA, 19 nt, Artificial Sequence
  Description of Artificial Sequence: Synthetic oligonucleotide
  Antisense strand to SEQ ID NO: 1528568
uucaacaaugacuguuuag

SEQ ID NO: 1528570 - RNA, 19 nt, Artificial Sequence
  Description of Artificial Sequence: Synthetic oligonucleotide
  Sense strand starting at position 2349 of SEQ ID NO: 1245001
acagucauuguugaauaua

SEQ ID NO: 1528571 - RNA, 19 nt, Artificial Sequence
  Description of Artificial Sequence: Synthetic oligonucleotide
  Antisense strand to SEQ ID NO: 1528570
uauauucaacaaugacugu

SEQ ID NO: 1528572 - RNA, 19 nt, Artificial Sequence
  Description of Artificial Sequence: Synthetic oligonucleotide
  Sense strand starting at position 2376 of SEQ ID NO: 1245001
gucuuuaauccgccgcaca

SEQ ID NO: 1528573 - RNA, 19 nt, Artificial Sequence
  Description of Artificial Sequence: Synthetic oligonucleotide
  Antisense strand to SEQ ID NO: 1528572
ugugcggcggauuaaagac

SEQ ID NO: 1528574 - RNA, 19 nt, Artificial Sequence
  Description of Artificial Sequence: Synthetic oligonucleotide
  Sense strand starting at position 2422 of SEQ ID NO: 1245001
uuccuuaaucucgaguuaa

SEQ ID NO: 1528575 - RNA, 19 nt, Artificial Sequence
  Description of Artificial Sequence: Synthetic oligonucleotide
  Antisense strand to SEQ ID NO: 1528574
uuaacucgagauuaaggaa

SEQ ID NO: 1528576 - RNA, 19 nt, Artificial Sequence
  Description of Artificial Sequence: Synthetic oligonucleotide
  Sense strand starting at position 2426 of SEQ ID NO: 1245001
uuaaucucgaguuaacgaa

SEQ ID NO: 1528577 - RNA, 19 nt, Artificial Sequence
  Description of Artificial Sequence: Synthetic oligonucleotide
  Antisense strand to SEQ ID NO: 1528576
uucguuaacucgagauuaa

SEQ ID NO: 1528578 - RNA, 19 nt, Artificial Sequence
  Description of Artificial Sequence: Synthetic oligonucleotide
  Sense strand starting at position 2430 of SEQ ID NO: 1245001
ucucgaguuaacgaagaac

SEQ ID NO: 1528579 - RNA, 19 nt, Artificial Sequence
  Description of Artificial Sequence: Synthetic oligonucleotide
  Antisense strand to SEQ ID NO: 1528578
guucuucguuaacucgaga

SEQ ID NO: 1528580 - RNA, 19 nt, Artificial Sequence
  Description of Artificial Sequence: Synthetic oligonucleotide
  Sense strand starting at position 2487 of SEQ ID NO: 1245001
uccgguugucauggcaaca

SEQ ID NO: 1528581 - RNA, 19 nt, Artificial Sequence
  Description of Artificial Sequence: Synthetic oligonucleotide
  Antisense strand to SEQ ID NO: 1528580
uguugccaugacaaccgga

SEQ ID NO: 1528582 - RNA, 19 nt, Artificial Sequence
  Description of Artificial Sequence: Synthetic oligonucleotide
  Sense strand starting at position 2653 of SEQ ID NO: 1245001
agagaaauccugugcccuc

SEQ ID NO: 1528583 - RNA, 19 nt, Artificial Sequence
  Description of Artificial Sequence: Synthetic oligonucleotide
  Antisense strand to SEQ ID NO: 1528582
gagggcacaggauuucucu

SEQ ID NO: 1528584 - RNA, 19 nt, Artificial Sequence
  Description of Artificial Sequence: Synthetic oligonucleotide
  Sense strand starting at position 2654 of SEQ ID NO: 1245001
gagaaauccugugcccucu

SEQ ID NO: 1528585 - RNA, 19 nt, Artificial Sequence
  Description of Artificial Sequence: Synthetic oligonucleotide
  Antisense strand to SEQ ID NO: 1528584
agagggcacaggauuucuc

SEQ ID NO: 1528586 - RNA, 19 nt, Artificial Sequence
  Description of Artificial Sequence: Synthetic oligonucleotide
  Sense strand starting at position 2695 of SEQ ID NO: 1245001
cugacagcugacuaaguau

SEQ ID NO: 1528587 - RNA, 19 nt, Artificial Sequence
  Description of Artificial Sequence: Synthetic oligonucleotide
  Antisense strand to SEQ ID NO: 1528586
auacuuagucagcugucag

SEQ ID NO: 1528588 - RNA, 19 nt, Artificial Sequence
  Description of Artificial Sequence: Synthetic oligonucleotide
  Sense strand starting at position 2706 of SEQ ID NO: 1245001
cuaaguaucucucccuagu

SEQ ID NO: 1528589 - RNA, 19 nt, Artificial Sequence
  Description of Artificial Sequence: Synthetic oligonucleotide
  Antisense strand to SEQ ID NO: 1528588
acuagggagagauacuuag

SEQ ID NO: 1528590 - RNA, 19 nt, Artificial Sequence
  Description of Artificial Sequence: Synthetic oligonucleotide
  Sense strand starting at position 2736 of SEQ ID NO: 1245001
agcgcuuuccauuauagcu

SEQ ID NO: 1528591 - RNA, 19 nt, Artificial Sequence
  Description of Artificial Sequence: Synthetic oligonucleotide
  Antisense strand to SEQ ID NO: 1528590
agcuauaauggaaagcgcu

SEQ ID NO: 1528592 - RNA, 19 nt, Artificial Sequence
  Description of Artificial Sequence: Synthetic oligonucleotide
  Sense strand starting at position 2902 of SEQ ID NO: 1245001
gucugucucauagaguugu

SEQ ID NO: 1528593 - RNA, 19 nt, Artificial Sequence
  Description of Artificial Sequence: Synthetic oligonucleotide
  Antisense strand to SEQ ID NO: 1528592
acaacucuaugagacagac

SEQ ID NO: 1528594 - RNA, 19 nt, Artificial Sequence
  Description of Artificial Sequence: Synthetic oligonucleotide
  Sense strand starting at position 2906 of SEQ ID NO: 1245001
gucucauagaguuguugca

SEQ ID NO: 1528595 - RNA, 19 nt, Artificial Sequence
  Description of Artificial Sequence: Synthetic oligonucleotide
  Antisense strand to SEQ ID NO: 1528594
ugcaacaacucuaugagac

SEQ ID NO: 1528596 - RNA, 19 nt, Artificial Sequence
  Description of Artificial Sequence: Synthetic oligonucleotide
  Sense strand starting at position 2957 of SEQ ID NO: 1245001
gauagagcauaaguuguua

SEQ ID NO: 1528597 - RNA, 19 nt, Artificial Sequence
  Description of Artificial Sequence: Synthetic oligonucleotide
  Antisense strand to SEQ ID NO: 1528596
uaacaacuuaugcucuauc

SEQ ID NO: 1528598 - RNA, 19 nt, Artificial Sequence
  Description of Artificial Sequence: Synthetic oligonucleotide
  Sense strand starting at position 2992 of SEQ ID NO: 1245001
ucuauucugccaugaguag

SEQ ID NO: 1528599 - RNA, 19 nt, Artificial Sequence
  Description of Artificial Sequence: Synthetic oligonucleotide
  Antisense strand to SEQ ID NO: 1528598
cuacucauggcagaauaga

SEQ ID NO: 1528600 - RNA, 19 nt, Artificial Sequence
  Description of Artificial Sequence: Synthetic oligonucleotide
  Sense strand starting at position 2993 of SEQ ID NO: 1245001
cuauucugccaugaguagu

SEQ ID NO: 1528601 - RNA, 19 nt, Artificial Sequence
  Description of Artificial Sequence: Synthetic oligonucleotide
  Antisense strand to SEQ ID NO: 1528600
acuacucauggcagaauag

SEQ ID NO: 1528602 - RNA, 19 nt, Artificial Sequence
  Description of Artificial Sequence: Synthetic oligonucleotide
  Sense strand starting at position 3033 of SEQ ID NO: 1245001
aaguaaaugucacauugag

SEQ ID NO: 1528603 - RNA, 19 nt, Artificial Sequence
  Description of Artificial Sequence: Synthetic oligonucleotide
  Antisense strand to SEQ ID NO: 1528602
cucaaugugacauuuacuu

SEQ ID NO: 1528604 - RNA, 19 nt, Artificial Sequence
  Description of Artificial Sequence: Synthetic oligonucleotide
  Sense strand starting at position 3158 of SEQ ID NO: 1245001
gauacaagucagcguguga

SEQ ID NO: 1528605 - RNA, 19 nt, Artificial Sequence
  Description of Artificial Sequence: Synthetic oligonucleotide
  Antisense strand to SEQ ID NO: 1528604
ucacacgcugacuuguauc

SEQ ID NO: 1528606 - RNA, 19 nt, Artificial Sequence
  Description of Artificial Sequence: Synthetic oligonucleotide
  Sense strand starting at position 3162 of SEQ ID NO: 1245001
caagucagcgugugauuag

SEQ ID NO: 1528607 - RNA, 19 nt, Artificial Sequence
  Description of Artificial Sequence: Synthetic oligonucleotide
  Antisense strand to SEQ ID NO: 1528606
cuaaucacacgcugacuug

SEQ ID NO: 1528608 - RNA, 19 nt, Artificial Sequence
  Description of Artificial Sequence: Synthetic oligonucleotide
  Sense strand starting at position 3395 of SEQ ID NO: 1245001
gggagaugguggguccaaa

SEQ ID NO: 1528609 - RNA, 19 nt, Artificial Sequence
  Description of Artificial Sequence: Synthetic oligonucleotide
  Antisense strand to SEQ ID NO: 1528608
uuuggacccaccaucuccc

SEQ ID NO: 1528610 - RNA, 19 nt, Artificial Sequence
  Description of Artificial Sequence: Synthetic oligonucleotide
  Sense strand starting at position 3487 of SEQ ID NO: 1245001
ggaccugauuucuaucacu

SEQ ID NO: 1528611 - RNA, 19 nt, Artificial Sequence
  Description of Artificial Sequence: Synthetic oligonucleotide
  Antisense strand to SEQ ID NO: 1528610
agugauagaaaucaggucc

SEQ ID NO: 1528612 - RNA, 19 nt, Artificial Sequence
  Description of Artificial Sequence: Synthetic oligonucleotide
  Sense strand starting at position 3677 of SEQ ID NO: 1245001
agccgcugggaugaauaua

SEQ ID NO: 1528613 - RNA, 19 nt, Artificial Sequence
  Description of Artificial Sequence: Synthetic oligonucleotide
  Antisense strand to SEQ ID NO: 1528612
uauauucaucccagcggcu

SEQ ID NO: 1528614 - RNA, 19 nt, Artificial Sequence
  Description of Artificial Sequence: Synthetic oligonucleotide
  Sense strand starting at position 3685 of SEQ ID NO: 1245001
ggaugaauauagggacauc

SEQ ID NO: 1528615 - RNA, 19 nt, Artificial Sequence
  Description of Artificial Sequence: Synthetic oligonucleotide
  Antisense strand to SEQ ID NO: 1528614
gaugucccuauauucaucc

SEQ ID NO: 1528616 - RNA, 19 nt, Artificial Sequence
  Description of Artificial Sequence: Synthetic oligonucleotide
  Sense strand starting at position 3854 of SEQ ID NO: 1245001
ggugaaaucuuguuacuac

SEQ ID NO: 1528617 - RNA, 19 nt, Artificial Sequence
  Description of Artificial Sequence: Synthetic oligonucleotide
  Antisense strand to SEQ ID NO: 1528616
guaguaacaagauuucacc

SEQ ID NO: 1528618 - RNA, 19 nt, Artificial Sequence
  Description of Artificial Sequence: Synthetic oligonucleotide
  Sense strand starting at position 231 of SEQ ID NO: 1245002
uguagaaagcugggacuuu

SEQ ID NO: 1528619 - RNA, 19 nt, Artificial Sequence
  Description of Artificial Sequence: Synthetic oligonucleotide
  Antisense strand to SEQ ID NO: 1528618
aaagucccagcuuucuaca

SEQ ID NO: 1528620 - RNA, 19 nt, Artificial Sequence
  Description of Artificial Sequence: Synthetic oligonucleotide
  Sense strand starting at position 240 of SEQ ID NO: 1245002
cugggacuuugcguuauuu

SEQ ID NO: 1528621 - RNA, 19 nt, Artificial Sequence
  Description of Artificial Sequence: Synthetic oligonucleotide
  Antisense strand to SEQ ID NO: 1528620
aaauaacgcaaagucccag

SEQ ID NO: 1528622 - RNA, 19 nt, Artificial Sequence
  Description of Artificial Sequence: Synthetic oligonucleotide
  Sense strand starting at position 244 of SEQ ID NO: 1245002
gacuuugcguuauuuaaug

SEQ ID NO: 1528623 - RNA, 19 nt, Artificial Sequence
  Description of Artificial Sequence: Synthetic oligonucleotide
  Antisense strand to SEQ ID NO: 1528622
cauuaaauaacgcaaaguc

SEQ ID NO: 1528624 - RNA, 19 nt, Artificial Sequence
  Description of Artificial Sequence: Synthetic oligonucleotide
  Sense strand starting at position 250 of SEQ ID NO: 1245002
gcguuauuuaauggcuaga

SEQ ID NO: 1528625 - RNA, 19 nt, Artificial Sequence
  Description of Artificial Sequence: Synthetic oligonucleotide
  Antisense strand to SEQ ID NO: 1528624
ucuagccauuaaauaacgc

SEQ ID NO: 1528626 - RNA, 19 nt, Artificial Sequence
  Description of Artificial Sequence: Synthetic oligonucleotide
  Sense strand starting at position 484 of SEQ ID NO: 1245002
gucucaacucaugagugga

SEQ ID NO: 1528627 - RNA, 19 nt, Artificial Sequence
  Description of Artificial Sequence: Synthetic oligonucleotide
  Antisense strand to SEQ ID NO: 1528626
uccacucaugaguugagac

SEQ ID NO: 1528628 - RNA, 19 nt, Artificial Sequence
  Description of Artificial Sequence: Synthetic oligonucleotide
  Sense strand starting at position 611 of SEQ ID NO: 1245002
ugcaauacauauuucguau

SEQ ID NO: 1528629 - RNA, 19 nt, Artificial Sequence
  Description of Artificial Sequence: Synthetic oligonucleotide
  Antisense strand to SEQ ID NO: 1528628
auacgaaauauguauugca

SEQ ID NO: 1528630 - RNA, 19 nt, Artificial Sequence
  Description of Artificial Sequence: Synthetic oligonucleotide
  Sense strand starting at position 630 of SEQ ID NO: 1245002
uguggauuguggucaagaa

SEQ ID NO: 1528631 - RNA, 19 nt, Artificial Sequence
  Description of Artificial Sequence: Synthetic oligonucleotide
  Antisense strand to SEQ ID NO: 1528630
uucuugaccacaauccaca

SEQ ID NO: 1528632 - RNA, 19 nt, Artificial Sequence
  Description of Artificial Sequence: Synthetic oligonucleotide
  Sense strand starting at position 631 of SEQ ID NO: 1245002
guggauuguggucaagaaa

SEQ ID NO: 1528633 - RNA, 19 nt, Artificial Sequence
  Description of Artificial Sequence: Synthetic oligonucleotide
  Antisense strand to SEQ ID NO: 1528632
uuucuugaccacaauccac

SEQ ID NO: 1528634 - RNA, 19 nt, Artificial Sequence
  Description of Artificial Sequence: Synthetic oligonucleotide
  Sense strand starting at position 682 of SEQ ID NO: 1245002
gagcuacucgauuacauga

SEQ ID NO: 1528635 - RNA, 19 nt, Artificial Sequence
  Description of Artificial Sequence: Synthetic oligonucleotide
  Antisense strand to SEQ ID NO: 1528634
ucauguaaucgaguagcuc

SEQ ID NO: 1528636 - RNA, 19 nt, Artificial Sequence
  Description of Artificial Sequence: Synthetic oligonucleotide
  Sense strand starting at position 689 of SEQ ID NO: 1245002
ucgauuacaugauuacaca

SEQ ID NO: 1528637 - RNA, 19 nt, Artificial Sequence
  Description of Artificial Sequence: Synthetic oligonucleotide
  Antisense strand to SEQ ID NO: 1528636
uguguaaucauguaaucga

SEQ ID NO: 1528638 - RNA, 19 nt, Artificial Sequence
  Description of Artificial Sequence: Synthetic oligonucleotide
  Sense strand starting at position 795 of SEQ ID NO: 1245002
gguacauaauggccuuaau

SEQ ID NO: 1528639 - RNA, 19 nt, Artificial Sequence
  Description of Artificial Sequence: Synthetic oligonucleotide
  Antisense strand to SEQ ID NO: 1528638
auuaaggccauuauguacc

SEQ ID NO: 1528640 - RNA, 19 nt, Artificial Sequence
  Description of Artificial Sequence: Synthetic oligonucleotide
  Sense strand starting at position 998 of SEQ ID NO: 1245002
aggcguuugccuguaaguc

SEQ ID NO: 1528641 - RNA, 19 nt, Artificial Sequence
  Description of Artificial Sequence: Synthetic oligonucleotide
  Antisense strand to SEQ ID NO: 1528640
gacuuacaggcaaacgccu

SEQ ID NO: 1528642 - RNA, 19 nt, Artificial Sequence
  Description of Artificial Sequence: Synthetic oligonucleotide
  Sense strand starting at position 1072 of SEQ ID NO: 1245002
aaaugugaacaucgaagua

SEQ ID NO: 1528643 - RNA, 19 nt, Artificial Sequence
  Description of Artificial Sequence: Synthetic oligonucleotide
  Antisense strand to SEQ ID NO: 1528642
uacuucgauguucacauuu

SEQ ID NO: 1528644 - RNA, 19 nt, Artificial Sequence
  Description of Artificial Sequence: Synthetic oligonucleotide
  Sense strand starting at position 1170 of SEQ ID NO: 1245002
agucuuggacuccgagaag

SEQ ID NO: 1528645 - RNA, 19 nt, Artificial Sequence
  Description of Artificial Sequence: Synthetic oligonucleotide
  Antisense strand to SEQ ID NO: 1528644
cuucucggaguccaagacu

SEQ ID NO: 1528646 - RNA, 19 nt, Artificial Sequence
  Description of Artificial Sequence: Synthetic oligonucleotide
  Sense strand starting at position 1419 of SEQ ID NO: 1245002
uacagaguccugggucaac

SEQ ID NO: 1528647 - RNA, 19 nt, Artificial Sequence
  Description of Artificial Sequence: Synthetic oligonucleotide
  Antisense strand to SEQ ID NO: 1528646
guugacccaggacucugua

SEQ ID NO: 1528648 - RNA, 19 nt, Artificial Sequence
  Description of Artificial Sequence: Synthetic oligonucleotide
  Sense strand starting at position 2527 of SEQ ID NO: 1245002
agaguuuagcagagagcgu

SEQ ID NO: 1528649 - RNA, 19 nt, Artificial Sequence
  Description of Artificial Sequence: Synthetic oligonucleotide
  Antisense strand to SEQ ID NO: 1528648
acgcucucugcuaaacucu

SEQ ID NO: 1528650 - RNA, 19 nt, Artificial Sequence
  Description of Artificial Sequence: Synthetic oligonucleotide
  Sense strand starting at position 2613 of SEQ ID NO: 1245002
cugccucagccagagagau

SEQ ID NO: 1528651 - RNA, 19 nt, Artificial Sequence
  Description of Artificial Sequence: Synthetic oligonucleotide
  Antisense strand to SEQ ID NO: 1528650
aucucucuggcugaggcag

SEQ ID NO: 1528652 - RNA, 19 nt, Artificial Sequence
  Description of Artificial Sequence: Synthetic oligonucleotide
  Sense strand starting at position 2695 of SEQ ID NO: 1245002
cuauguaugucaucuugaa

SEQ ID NO: 1528653 - RNA, 19 nt, Artificial Sequence
  Description of Artificial Sequence: Synthetic oligonucleotide
  Antisense strand to SEQ ID NO: 1528652
uucaagaugacauacauag

SEQ ID NO: 1528654 - RNA, 19 nt, Artificial Sequence
  Description of Artificial Sequence: Synthetic oligonucleotide
  Sense strand starting at position 2699 of SEQ ID NO: 1245002
guaugucaucuugaauucu

SEQ ID NO: 1528655 - RNA, 19 nt, Artificial Sequence
  Description of Artificial Sequence: Synthetic oligonucleotide
  Antisense strand to SEQ ID NO: 1528654
agaauucaagaugacauac

SEQ ID NO: 1528656 - RNA, 19 nt, Artificial Sequence
  Description of Artificial Sequence: Synthetic oligonucleotide
  Sense strand starting at position 2738 of SEQ ID NO: 1245002
uacgauugugcucaauaua

SEQ ID NO: 1528657 - RNA, 19 nt, Artificial Sequence
  Description of Artificial Sequence: Synthetic oligonucleotide
  Antisense strand to SEQ ID NO: 1528656
uauauugagcacaaucgua

SEQ ID NO: 1528658 - RNA, 19 nt, Artificial Sequence
  Description of Artificial Sequence: Synthetic oligonucleotide
  Sense strand starting at position 2801 of SEQ ID NO: 1245002
guaacaguaaaugguagaa

SEQ ID NO: 1528659 - RNA, 19 nt, Artificial Sequence
  Description of Artificial Sequence: Synthetic oligonucleotide
  Antisense strand to SEQ ID NO: 1528658
uucuaccauuuacuguuac

SEQ ID NO: 1528660 - RNA, 19 nt, Artificial Sequence
  Description of Artificial Sequence: Synthetic oligonucleotide
  Sense strand starting at position 2837 of SEQ ID NO: 1245002
ucaagaccugugcacuaaa

SEQ ID NO: 1528661 - RNA, 19 nt, Artificial Sequence
  Description of Artificial Sequence: Synthetic oligonucleotide
  Antisense strand to SEQ ID NO: 1528660
uuuagugcacaggucuuga

SEQ ID NO: 1528662 - RNA, 19 nt, Artificial Sequence
  Description of Artificial Sequence: Synthetic oligonucleotide
  Sense strand starting at position 2840 of SEQ ID NO: 1245002
agaccugugcacuaaauaa

SEQ ID NO: 1528663 - RNA, 19 nt, Artificial Sequence
  Description of Artificial Sequence: Synthetic oligonucleotide
  Antisense strand to SEQ ID NO: 1528662
uuauuuagugcacaggucu

SEQ ID NO: 1528664 - RNA, 19 nt, Artificial Sequence
  Description of Artificial Sequence: Synthetic oligonucleotide
  Sense strand starting at position 3001 of SEQ ID NO: 1245002
ggcacaaaguaucuaaaca

SEQ ID NO: 1528665 - RNA, 19 nt, Artificial Sequence
  Description of Artificial Sequence: Synthetic oligonucleotide
  Antisense strand to SEQ ID NO: 1528664
uguuuagauacuuugugcc

SEQ ID NO: 1528666 - RNA, 19 nt, Artificial Sequence
  Description of Artificial Sequence: Synthetic oligonucleotide
  Sense strand starting at position 3064 of SEQ ID NO: 1245002
ggcaguguaguuuaugaaa

SEQ ID NO: 1528667 - RNA, 19 nt, Artificial Sequence
  Description of Artificial Sequence: Synthetic oligonucleotide
  Antisense strand to SEQ ID NO: 1528666
uuucauaaacuacacugcc

SEQ ID NO: 1528668 - RNA, 19 nt, Artificial Sequence
  Description of Artificial Sequence: Synthetic oligonucleotide
  Sense strand starting at position 3084 of SEQ ID NO: 1245002
ggguaacgucuugaagaua

SEQ ID NO: 1528669 - RNA, 19 nt, Artificial Sequence
  Description of Artificial Sequence: Synthetic oligonucleotide
  Antisense strand to SEQ ID NO: 1528668
uaucuucaagacguuaccc

SEQ ID NO: 1528670 - RNA, 19 nt, Artificial Sequence
  Description of Artificial Sequence: Synthetic oligonucleotide
  Sense strand starting at position 3089 of SEQ ID NO: 1245002
acgucuugaagauauagca

SEQ ID NO: 1528671 - RNA, 19 nt, Artificial Sequence
  Description of Artificial Sequence: Synthetic oligonucleotide
  Antisense strand to SEQ ID NO: 1528670
ugcuauaucuucaagacgu

SEQ ID NO: 1528672 - RNA, 19 nt, Artificial Sequence
  Description of Artificial Sequence: Synthetic oligonucleotide
  Sense strand starting at position 3120 of SEQ ID NO: 1245002
cacguaauucgagauaaac

SEQ ID NO: 1528673 - RNA, 19 nt, Artificial Sequence
  Description of Artificial Sequence: Synthetic oligonucleotide
  Antisense strand to SEQ ID NO: 1528672
guuuaucucgaauuacgug

SEQ ID NO: 1528674 - RNA, 19 nt, Artificial Sequence
  Description of Artificial Sequence: Synthetic oligonucleotide
  Sense strand starting at position 3122 of SEQ ID NO: 1245002
cguaauucgagauaaaccu

SEQ ID NO: 1528675 - RNA, 19 nt, Artificial Sequence
  Description of Artificial Sequence: Synthetic oligonucleotide
  Antisense strand to SEQ ID NO: 1528674
agguuuaucucgaauuacg

SEQ ID NO: 1528676 - RNA, 19 nt, Artificial Sequence
  Description of Artificial Sequence: Synthetic oligonucleotide
  Sense strand starting at position 3199 of SEQ ID NO: 1245002
gucaauacgguuuaugaag

SEQ ID NO: 1528677 - RNA, 19 nt, Artificial Sequence
  Description of Artificial Sequence: Synthetic oligonucleotide
  Antisense strand to SEQ ID NO: 1528676
cuucauaaaccguauugac

SEQ ID NO: 1528678 - RNA, 19 nt, Artificial Sequence
  Description of Artificial Sequence: Synthetic oligonucleotide
  Sense strand starting at position 3217 of SEQ ID NO: 1245002
gcaggagcucugccagcuu

SEQ ID NO: 1528679 - RNA, 19 nt, Artificial Sequence
  Description of Artificial Sequence: Synthetic oligonucleotide
  Antisense strand to SEQ ID NO: 1528678
aagcuggcagagcuccugc

SEQ ID NO: 1528680 - RNA, 19 nt, Artificial Sequence
  Description of Artificial Sequence: Synthetic oligonucleotide
  Sense strand starting at position 3241 of SEQ ID NO: 1245002
uguauaacugcugauggau

SEQ ID NO: 1528681 - RNA, 19 nt, Artificial Sequence
  Description of Artificial Sequence: Synthetic oligonucleotide
  Antisense strand to SEQ ID NO: 1528680
auccaucagcaguuauaca

SEQ ID NO: 1528682 - RNA, 19 nt, Artificial Sequence
  Description of Artificial Sequence: Synthetic oligonucleotide
  Sense strand starting at position 3490 of SEQ ID NO: 1245002
aaaccuuucugguuggauu

SEQ ID NO: 1528683 - RNA, 19 nt, Artificial Sequence
  Description of Artificial Sequence: Synthetic oligonucleotide
  Antisense strand to SEQ ID NO: 1528682
aauccaaccagaaagguuu

SEQ ID NO: 1528684 - RNA, 19 nt, Artificial Sequence
  Description of Artificial Sequence: Synthetic oligonucleotide
  Sense strand starting at position 3639 of SEQ ID NO: 1245002
ugagguguuguauaaacua

SEQ ID NO: 1528685 - RNA, 19 nt, Artificial Sequence
  Description of Artificial Sequence: Synthetic oligonucleotide
  Antisense strand to SEQ ID NO: 1528684
uaguuuauacaacaccuca

SEQ ID NO: 1528686 - RNA, 19 nt, Artificial Sequence
  Description of Artificial Sequence: Synthetic oligonucleotide
  Sense strand starting at position 3669 of SEQ ID NO: 1245002
uggaacugcuguuuagaua

SEQ ID NO: 1528687 - RNA, 19 nt, Artificial Sequence
  Description of Artificial Sequence: Synthetic oligonucleotide
  Antisense strand to SEQ ID NO: 1528686
uaucuaaacagcaguucca

SEQ ID NO: 1528688 - RNA, 19 nt, Artificial Sequence
  Description of Artificial Sequence: Synthetic oligonucleotide
  Sense strand starting at position 3670 of SEQ ID NO: 1245002
ggaacugcuguuuagauac

SEQ ID NO: 1528689 - RNA, 19 nt, Artificial Sequence
  Description of Artificial Sequence: Synthetic oligonucleotide
  Antisense strand to SEQ ID NO: 1528688
guaucuaaacagcaguucc

SEQ ID NO: 1528690 - RNA, 19 nt, Artificial Sequence
  Description of Artificial Sequence: Synthetic oligonucleotide
  Sense strand starting at position 3824 of SEQ ID NO: 1245002
uuacaugaaguguaccaua

SEQ ID NO: 1528691 - RNA, 19 nt, Artificial Sequence
  Description of Artificial Sequence: Synthetic oligonucleotide
  Antisense strand to SEQ ID NO: 1528690
uaugguacacuucauguaa

SEQ ID NO: 1528692 - RNA, 19 nt, Artificial Sequence
  Description of Artificial Sequence: Synthetic oligonucleotide
  Sense strand starting at position 3829 of SEQ ID NO: 1245002
ugaaguguaccauaaaguu

SEQ ID NO: 1528693 - RNA, 19 nt, Artificial Sequence
  Description of Artificial Sequence: Synthetic oligonucleotide
  Antisense strand to SEQ ID NO: 1528692
aacuuuaugguacacuuca

SEQ ID NO: 1528694 - RNA, 19 nt, Artificial Sequence
  Description of Artificial Sequence: Synthetic oligonucleotide
  Sense strand starting at position 3869 of SEQ ID NO: 1245002
aucaguuuguuauuaagag

SEQ ID NO: 1528695 - RNA, 19 nt, Artificial Sequence
  Description of Artificial Sequence: Synthetic oligonucleotide
  Antisense strand to SEQ ID NO: 1528694
cucuuaauaacaaacugau

SEQ ID NO: 1528696 - RNA, 19 nt, Artificial Sequence
  Description of Artificial Sequence: Synthetic oligonucleotide
  Sense strand starting at position 3878 of SEQ ID NO: 1245002
uuauuaagaguuuggacuu

SEQ ID NO: 1528697 - RNA, 19 nt, Artificial Sequence
  Description of Artificial Sequence: Synthetic oligonucleotide
  Antisense strand to SEQ ID NO: 1528696
aaguccaaacucuuaauaa

SEQ ID NO: 1528698 - RNA, 19 nt, Artificial Sequence
  Description of Artificial Sequence: Synthetic oligonucleotide
  Sense strand starting at position 142 of SEQ ID NO: 1245003
gagcccugagcucaauagu

SEQ ID NO: 1528699 - RNA, 19 nt, Artificial Sequence
  Description of Artificial Sequence: Synthetic oligonucleotide
  Antisense strand to SEQ ID NO: 1528698
acuauugagcucagggcuc

SEQ ID NO: 1528700 - RNA, 19 nt, Artificial Sequence
  Description of Artificial Sequence: Synthetic oligonucleotide
  Sense strand starting at position 298 of SEQ ID NO: 1245003
cugcuagauccagacggaa

SEQ ID NO: 1528701 - RNA, 19 nt, Artificial Sequence
  Description of Artificial Sequence: Synthetic oligonucleotide
  Antisense strand to SEQ ID NO: 1528700
uuccgucuggaucuagcag

SEQ ID NO: 1528702 - RNA, 19 nt, Artificial Sequence
  Description of Artificial Sequence: Synthetic oligonucleotide
  Sense strand starting at position 551 of SEQ ID NO: 1245003
ugaucugaaucggaagcuu

SEQ ID NO: 1528703 - RNA, 19 nt, Artificial Sequence
  Description of Artificial Sequence: Synthetic oligonucleotide
  Antisense strand to SEQ ID NO: 1528702
aagcuuccgauucagauca

SEQ ID NO: 1528704 - RNA, 19 nt, Artificial Sequence
  Description of Artificial Sequence: Synthetic oligonucleotide
  Sense strand starting at position 587 of SEQ ID NO: 1245003
ggguucuccuaacccauau

SEQ ID NO: 1528705 - RNA, 19 nt, Artificial Sequence
  Description of Artificial Sequence: Synthetic oligonucleotide
  Antisense strand to SEQ ID NO: 1528704
auauggguuaggagaaccc

SEQ ID NO: 1528706 - RNA, 19 nt, Artificial Sequence
  Description of Artificial Sequence: Synthetic oligonucleotide
  Sense strand starting at position 656 of SEQ ID NO: 1245003
ugccuuuaggucugggaag

SEQ ID NO: 1528707 - RNA, 19 nt, Artificial Sequence
  Description of Artificial Sequence: Synthetic oligonucleotide
  Antisense strand to SEQ ID NO: 1528706
cuucccagaccuaaaggca

SEQ ID NO: 1528708 - RNA, 19 nt, Artificial Sequence
  Description of Artificial Sequence: Synthetic oligonucleotide
  Sense strand starting at position 774 of SEQ ID NO: 1245003
aagucugacugcuccagaa

SEQ ID NO: 1528709 - RNA, 19 nt, Artificial Sequence
  Description of Artificial Sequence: Synthetic oligonucleotide
  Antisense strand to SEQ ID NO: 1528708
uucuggagcagucagacuu

SEQ ID NO: 1528710 - RNA, 19 nt, Artificial Sequence
  Description of Artificial Sequence: Synthetic oligonucleotide
  Sense strand starting at position 824 of SEQ ID NO: 1245003
cccuaaaucuucuggaguu

SEQ ID NO: 1528711 - RNA, 19 nt, Artificial Sequence
  Description of Artificial Sequence: Synthetic oligonucleotide
  Antisense strand to SEQ ID NO: 1528710
aacuccagaagauuuaggg

SEQ ID NO: 1528712 - RNA, 19 nt, Artificial Sequence
  Description of Artificial Sequence: Synthetic oligonucleotide
  Sense strand starting at position 825 of SEQ ID NO: 1245003
ccuaaaucuucuggaguug

SEQ ID NO: 1528713 - RNA, 19 nt, Artificial Sequence
  Description of Artificial Sequence: Synthetic oligonucleotide
  Antisense strand to SEQ ID NO: 1528712
caacuccagaagauuuagg

SEQ ID NO: 1528714 - RNA, 19 nt, Artificial Sequence
  Description of Artificial Sequence: Synthetic oligonucleotide
  Sense strand starting at position 830 of SEQ ID NO: 1245003
aucuucuggaguuggagau

SEQ ID NO: 1528715 - RNA, 19 nt, Artificial Sequence
  Description of Artificial Sequence: Synthetic oligonucleotide
  Antisense strand to SEQ ID NO: 1528714
aucuccaacuccagaagau

SEQ ID NO: 1528716 - RNA, 19 nt, Artificial Sequence
  Description of Artificial Sequence: Synthetic oligonucleotide
  Sense strand starting at position 883 of SEQ ID NO: 1245003
gccuccuggucugcaaaua

SEQ ID NO: 1528717 - RNA, 19 nt, Artificial Sequence
  Description of Artificial Sequence: Synthetic oligonucleotide
  Antisense strand to SEQ ID NO: 1528716
uauuugcagaccaggaggc

SEQ ID NO: 1528718 - RNA, 19 nt, Artificial Sequence
  Description of Artificial Sequence: Synthetic oligonucleotide
  Sense strand starting at position 934 of SEQ ID NO: 1245003
ggaccagggucauaacuga

SEQ ID NO: 1528719 - RNA, 19 nt, Artificial Sequence
  Description of Artificial Sequence: Synthetic oligonucleotide
  Antisense strand to SEQ ID NO: 1528718
ucaguuaugacccuggucc

SEQ ID NO: 1528720 - RNA, 19 nt, Artificial Sequence
  Description of Artificial Sequence: Synthetic oligonucleotide
  Sense strand starting at position 1052 of SEQ ID NO: 1245003
accucucaggguugaguau

SEQ ID NO: 1528721 - RNA, 19 nt, Artificial Sequence
  Description of Artificial Sequence: Synthetic oligonucleotide
  Antisense strand to SEQ ID NO: 1528720
auacucaacccugagaggu

SEQ ID NO: 1528722 - RNA, 19 nt, Artificial Sequence
  Description of Artificial Sequence: Synthetic oligonucleotide
  Sense strand starting at position 1075 of SEQ ID NO: 1245003
acuuuaaagugagaauguu

SEQ ID NO: 1528723 - RNA, 19 nt, Artificial Sequence
  Description of Artificial Sequence: Synthetic oligonucleotide
  Antisense strand to SEQ ID NO: 1528722
aacauucucacuuuaaagu

SEQ ID NO: 1528724 - RNA, 19 nt, Artificial Sequence
  Description of Artificial Sequence: Synthetic oligonucleotide
  Sense strand starting at position 1150 of SEQ ID NO: 1245003
cagagucagccagaucauu

SEQ ID NO: 1528725 - RNA, 19 nt, Artificial Sequence
  Description of Artificial Sequence: Synthetic oligonucleotide
  Antisense strand to SEQ ID NO: 1528724
aaugaucuggcugacucug

SEQ ID NO: 1528726 - RNA, 19 nt, Artificial Sequence
  Description of Artificial Sequence: Synthetic oligonucleotide
  Sense strand starting at position 1181 of SEQ ID NO: 1245003
agcagaggugucuauagac

SEQ ID NO: 1528727 - RNA, 19 nt, Artificial Sequence
  Description of Artificial Sequence: Synthetic oligonucleotide
  Antisense strand to SEQ ID NO: 1528726
gucuauagacaccucugcu

SEQ ID NO: 1528728 - RNA, 19 nt, Artificial Sequence
  Description of Artificial Sequence: Synthetic oligonucleotide
  Sense strand starting at position 2261 of SEQ ID NO: 1245003
cgcacuaagagugagcaaa

SEQ ID NO: 1528729 - RNA, 19 nt, Artificial Sequence
  Description of Artificial Sequence: Synthetic oligonucleotide
  Antisense strand to SEQ ID NO: 1528728
uuugcucacucuuagugcg

SEQ ID NO: 1528730 - RNA, 19 nt, Artificial Sequence
  Description of Artificial Sequence: Synthetic oligonucleotide
  Sense strand starting at position 2393 of SEQ ID NO: 1245003
cuccuaacuguccggagua

SEQ ID NO: 1528731 - RNA, 19 nt, Artificial Sequence
  Description of Artificial Sequence: Synthetic oligonucleotide
  Antisense strand to SEQ ID NO: 1528730
uacuccggacaguuaggag

SEQ ID NO: 1528732 - RNA, 19 nt, Artificial Sequence
  Description of Artificial Sequence: Synthetic oligonucleotide
  Sense strand starting at position 2424 of SEQ ID NO: 1245003
acggagaggucaguggaaa

SEQ ID NO: 1528733 - RNA, 19 nt, Artificial Sequence
  Description of Artificial Sequence: Synthetic oligonucleotide
  Antisense strand to SEQ ID NO: 1528732
uuuccacugaccucuccgu

SEQ ID NO: 1528734 - RNA, 19 nt, Artificial Sequence
  Description of Artificial Sequence: Synthetic oligonucleotide
  Sense strand starting at position 2425 of SEQ ID NO: 1245003
cggagaggucaguggaaag

SEQ ID NO: 1528735 - RNA, 19 nt, Artificial Sequence
  Description of Artificial Sequence: Synthetic oligonucleotide
  Antisense strand to SEQ ID NO: 1528734
cuuuccacugaccucuccg

SEQ ID NO: 1528736 - RNA, 19 nt, Artificial Sequence
  Description of Artificial Sequence: Synthetic oligonucleotide
  Sense strand starting at position 2435 of SEQ ID NO: 1245003
aguggaaaggucugacguu

SEQ ID NO: 1528737 - RNA, 19 nt, Artificial Sequence
  Description of Artificial Sequence: Synthetic oligonucleotide
  Antisense strand to SEQ ID NO: 1528736
aacgucagaccuuuccacu

SEQ ID NO: 1528738 - RNA, 19 nt, Artificial Sequence
  Description of Artificial Sequence: Synthetic oligonucleotide
  Sense strand starting at position 2619 of SEQ ID NO: 1245003
guuugccagucuccaauaa

SEQ ID NO: 1528739 - RNA, 19 nt, Artificial Sequence
  Description of Artificial Sequence: Synthetic oligonucleotide
  Antisense strand to SEQ ID NO: 1528738
uuauuggagacuggcaaac

SEQ ID NO: 1528740 - RNA, 19 nt, Artificial Sequence
  Description of Artificial Sequence: Synthetic oligonucleotide
  Sense strand starting at position 2736 of SEQ ID NO: 1245003
ggacuuccaugagggagau

SEQ ID NO: 1528741 - RNA, 19 nt, Artificial Sequence
  Description of Artificial Sequence: Synthetic oligonucleotide
  Antisense strand to SEQ ID NO: 1528740
aucucccucauggaagucc

SEQ ID NO: 1528742 - RNA, 19 nt, Artificial Sequence
  Description of Artificial Sequence: Synthetic oligonucleotide
  Sense strand starting at position 2771 of SEQ ID NO: 1245003
gcccuuaagugacuccaau

SEQ ID NO: 1528743 - RNA, 19 nt, Artificial Sequence
  Description of Artificial Sequence: Synthetic oligonucleotide
  Antisense strand to SEQ ID NO: 1528742
auuggagucacuuaagggc

SEQ ID NO: 1528744 - RNA, 19 nt, Artificial Sequence
  Description of Artificial Sequence: Synthetic oligonucleotide
  Sense strand starting at position 2955 of SEQ ID NO: 1245003
gggauuuacucagguggca

SEQ ID NO: 1528745 - RNA, 19 nt, Artificial Sequence
  Description of Artificial Sequence: Synthetic oligonucleotide
  Antisense strand to SEQ ID NO: 1528744
ugccaccugaguaaauccc

SEQ ID NO: 1528746 - RNA, 19 nt, Artificial Sequence
  Description of Artificial Sequence: Synthetic oligonucleotide
  Sense strand starting at position 2999 of SEQ ID NO: 1245003
auuccaguacuguaguaau

SEQ ID NO: 1528747 - RNA, 19 nt, Artificial Sequence
  Description of Artificial Sequence: Synthetic oligonucleotide
  Antisense strand to SEQ ID NO: 1528746
auuacuacaguacuggaau

SEQ ID NO: 1528748 - RNA, 19 nt, Artificial Sequence
  Description of Artificial Sequence: Synthetic oligonucleotide
  Sense strand starting at position 3002 of SEQ ID NO: 1245003
ccaguacuguaguaauuua

SEQ ID NO: 1528749 - RNA, 19 nt, Artificial Sequence
  Description of Artificial Sequence: Synthetic oligonucleotide
  Antisense strand to SEQ ID NO: 1528748
uaaauuacuacaguacugg

SEQ ID NO: 1528750 - RNA, 19 nt, Artificial Sequence
  Description of Artificial Sequence: Synthetic oligonucleotide
  Sense strand starting at position 3028 of SEQ ID NO: 1245003
ggcagugggaguugagauu

SEQ ID NO: 1528751 - RNA, 19 nt, Artificial Sequence
  Description of Artificial Sequence: Synthetic oligonucleotide
  Antisense strand to SEQ ID NO: 1528750
aaucucaacucccacugcc

SEQ ID NO: 1528752 - RNA, 19 nt, Artificial Sequence
  Description of Artificial Sequence: Synthetic oligonucleotide
  Sense strand starting at position 3820 of SEQ ID NO: 1245003
aggcacuccuuaggaguaa

SEQ ID NO: 1528753 - RNA, 19 nt, Artificial Sequence
  Description of Artificial Sequence: Synthetic oligonucleotide
  Antisense strand to SEQ ID NO: 1528752
uuacuccuaaggagugccu

SEQ ID NO: 1528754 - RNA, 19 nt, Artificial Sequence
  Description of Artificial Sequence: Synthetic oligonucleotide
  Sense strand starting at position 3853 of SEQ ID NO: 1245003
ccugaaucagcaugaaaug

SEQ ID NO: 1528755 - RNA, 19 nt, Artificial Sequence
  Description of Artificial Sequence: Synthetic oligonucleotide
  Antisense strand to SEQ ID NO: 1528754
cauuucaugcugauucagg

SEQ ID NO: 1528756 - RNA, 19 nt, Artificial Sequence
  Description of Artificial Sequence: Synthetic oligonucleotide
  Sense strand starting at position 3864 of SEQ ID NO: 1245003
augaaaugaguuugugcuu

SEQ ID NO: 1528757 - RNA, 19 nt, Artificial Sequence
  Description of Artificial Sequence: Synthetic oligonucleotide
  Antisense strand to SEQ ID NO: 1528756
aagcacaaacucauuucau

SEQ ID NO: 1528758 - RNA, 19 nt, Artificial Sequence
  Description of Artificial Sequence: Synthetic oligonucleotide
  Sense strand starting at position 3865 of SEQ ID NO: 1245003
ugaaaugaguuugugcuua

SEQ ID NO: 1528759 - RNA, 19 nt, Artificial Sequence
  Description of Artificial Sequence: Synthetic oligonucleotide
  Antisense strand to SEQ ID NO: 1528758
uaagcacaaacucauuuca

SEQ ID NO: 1528760 - RNA, 19 nt, Artificial Sequence
  Description of Artificial Sequence: Synthetic oligonucleotide
  Sense strand starting at position 3867 of SEQ ID NO: 1245003
aaaugaguuugugcuuauu

SEQ ID NO: 1528761 - RNA, 19 nt, Artificial Sequence
  Description of Artificial Sequence: Synthetic oligonucleotide
  Antisense strand to SEQ ID NO: 1528760
aauaagcacaaacucauuu

SEQ ID NO: 1528762 - RNA, 19 nt, Artificial Sequence
  Description of Artificial Sequence: Synthetic oligonucleotide
  Sense strand starting at position 3869 of SEQ ID NO: 1245003
augaguuugugcuuauuuc

SEQ ID NO: 1528763 - RNA, 19 nt, Artificial Sequence
  Description of Artificial Sequence: Synthetic oligonucleotide
  Antisense strand to SEQ ID NO: 1528762
gaaauaagcacaaacucau

SEQ ID NO: 1528764 - RNA, 19 nt, Artificial Sequence
  Description of Artificial Sequence: Synthetic oligonucleotide
  Sense strand starting at position 3928 of SEQ ID NO: 1245003
ccuagcauuugugucugau

SEQ ID NO: 1528765 - RNA, 19 nt, Artificial Sequence
  Description of Artificial Sequence: Synthetic oligonucleotide
  Antisense strand to SEQ ID NO: 1528764
aucagacacaaaugcuagg

SEQ ID NO: 1528766 - RNA, 19 nt, Artificial Sequence
  Description of Artificial Sequence: Synthetic oligonucleotide
  Sense strand starting at position 3932 of SEQ ID NO: 1245003
gcauuugugucugaugcac

SEQ ID NO: 1528767 - RNA, 19 nt, Artificial Sequence
  Description of Artificial Sequence: Synthetic oligonucleotide
  Antisense strand to SEQ ID NO: 1528766
gugcaucagacacaaaugc

SEQ ID NO: 1528768 - RNA, 19 nt, Artificial Sequence
  Description of Artificial Sequence: Synthetic oligonucleotide
  Sense strand starting at position 3934 of SEQ ID NO: 1245003
auuugugucugaugcacga

SEQ ID NO: 1528769 - RNA, 19 nt, Artificial Sequence
  Description of Artificial Sequence: Synthetic oligonucleotide
  Antisense strand to SEQ ID NO: 1528768
ucgugcaucagacacaaau

SEQ ID NO: 1528770 - RNA, 19 nt, Artificial Sequence
  Description of Artificial Sequence: Synthetic oligonucleotide
  Sense strand starting at position 3936 of SEQ ID NO: 1245003
uugugucugaugcacgaga

SEQ ID NO: 1528771 - RNA, 19 nt, Artificial Sequence
  Description of Artificial Sequence: Synthetic oligonucleotide
  Antisense strand to SEQ ID NO: 1528770
ucucgugcaucagacacaa

SEQ ID NO: 1528772 - RNA, 19 nt, Artificial Sequence
  Description of Artificial Sequence: Synthetic oligonucleotide
  Sense strand starting at position 3938 of SEQ ID NO: 1245003
gugucugaugcacgagaau

SEQ ID NO: 1528773 - RNA, 19 nt, Artificial Sequence
  Description of Artificial Sequence: Synthetic oligonucleotide
  Antisense strand to SEQ ID NO: 1528772
auucucgugcaucagacac

SEQ ID NO: 1528774 - RNA, 19 nt, Artificial Sequence
  Description of Artificial Sequence: Synthetic oligonucleotide
  Sense strand starting at position 52 of SEQ ID NO: 1245004
accagagucucugcgaaag

SEQ ID NO: 1528775 - RNA, 19 nt, Artificial Sequence
  Description of Artificial Sequence: Synthetic oligonucleotide
  Antisense strand to SEQ ID NO: 1528774
cuuucgcagagacucuggu

SEQ ID NO: 1528776 - RNA, 19 nt, Artificial Sequence
  Description of Artificial Sequence: Synthetic oligonucleotide
  Sense strand starting at position 54 of SEQ ID NO: 1245004
cagagucucugcgaaagca

SEQ ID NO: 1528777 - RNA, 19 nt, Artificial Sequence
  Description of Artificial Sequence: Synthetic oligonucleotide
  Antisense strand to SEQ ID NO: 1528776
ugcuuucgcagagacucug

SEQ ID NO: 1528778 - RNA, 19 nt, Artificial Sequence
  Description of Artificial Sequence: Synthetic oligonucleotide
  Sense strand starting at position 219 of SEQ ID NO: 1245004
acuucuuuaugugcuggaa

SEQ ID NO: 1528779 - RNA, 19 nt, Artificial Sequence
  Description of Artificial Sequence: Synthetic oligonucleotide
  Antisense strand to SEQ ID NO: 1528778
uuccagcacauaaagaagu

SEQ ID NO: 1528780 - RNA, 19 nt, Artificial Sequence
  Description of Artificial Sequence: Synthetic oligonucleotide
  Sense strand starting at position 301 of SEQ ID NO: 1245004
cuggcuguccugggagcaa

SEQ ID NO: 1528781 - RNA, 19 nt, Artificial Sequence
  Description of Artificial Sequence: Synthetic oligonucleotide
  Antisense strand to SEQ ID NO: 1528780
uugcucccaggacagccag

SEQ ID NO: 1528782 - RNA, 19 nt, Artificial Sequence
  Description of Artificial Sequence: Synthetic oligonucleotide
  Sense strand starting at position 534 of SEQ ID NO: 1245004
ggcacuucuuucugacuuu

SEQ ID NO: 1528783 - RNA, 19 nt, Artificial Sequence
  Description of Artificial Sequence: Synthetic oligonucleotide
  Antisense strand to SEQ ID NO: 1528782
aaagucagaaagaagugcc

SEQ ID NO: 1528784 - RNA, 19 nt, Artificial Sequence
  Description of Artificial Sequence: Synthetic oligonucleotide
  Sense strand starting at position 700 of SEQ ID NO: 1245004
ggagaggcggaguguaauu

SEQ ID NO: 1528785 - RNA, 19 nt, Artificial Sequence
  Description of Artificial Sequence: Synthetic oligonucleotide
  Antisense strand to SEQ ID NO: 1528784
aauuacacuccgccucucc

SEQ ID NO: 1528786 - RNA, 19 nt, Artificial Sequence
  Description of Artificial Sequence: Synthetic oligonucleotide
  Sense strand starting at position 709 of SEQ ID NO: 1245004
gaguguaauuuagagaacu

SEQ ID NO: 1528787 - RNA, 19 nt, Artificial Sequence
  Description of Artificial Sequence: Synthetic oligonucleotide
  Antisense strand to SEQ ID NO: 1528786
aguucucuaaauuacacuc

SEQ ID NO: 1528788 - RNA, 19 nt, Artificial Sequence
  Description of Artificial Sequence: Synthetic oligonucleotide
  Sense strand starting at position 825 of SEQ ID NO: 1245004
cucccaaagcgauguuuau

SEQ ID NO: 1528789 - RNA, 19 nt, Artificial Sequence
  Description of Artificial Sequence: Synthetic oligonucleotide
  Antisense strand to SEQ ID NO: 1528788
auaaacaucgcuuugggag

SEQ ID NO: 1528790 - RNA, 19 nt, Artificial Sequence
  Description of Artificial Sequence: Synthetic oligonucleotide
  Sense strand starting at position 831 of SEQ ID NO: 1245004
aagcgauguuuauuccuca

SEQ ID NO: 1528791 - RNA, 19 nt, Artificial Sequence
  Description of Artificial Sequence: Synthetic oligonucleotide
  Antisense strand to SEQ ID NO: 1528790
ugaggaauaaacaucgcuu

SEQ ID NO: 1528792 - RNA, 19 nt, Artificial Sequence
  Description of Artificial Sequence: Synthetic oligonucleotide
  Sense strand starting at position 1196 of SEQ ID NO: 1245004
gggagaaucugaugaaauc

SEQ ID NO: 1528793 - RNA, 19 nt, Artificial Sequence
  Description of Artificial Sequence: Synthetic oligonucleotide
  Antisense strand to SEQ ID NO: 1528792
gauuucaucagauucuccc

SEQ ID NO: 1528794 - RNA, 19 nt, Artificial Sequence
  Description of Artificial Sequence: Synthetic oligonucleotide
  Sense strand starting at position 1400 of SEQ ID NO: 1245004
cagggacagugcuggauuu

SEQ ID NO: 1528795 - RNA, 19 nt, Artificial Sequence
  Description of Artificial Sequence: Synthetic oligonucleotide
  Antisense strand to SEQ ID NO: 1528794
aaauccagcacugucccug

SEQ ID NO: 1528796 - RNA, 19 nt, Artificial Sequence
  Description of Artificial Sequence: Synthetic oligonucleotide
  Sense strand starting at position 1501 of SEQ ID NO: 1245004
gaaaccuucugagauggga

SEQ ID NO: 1528797 - RNA, 19 nt, Artificial Sequence
  Description of Artificial Sequence: Synthetic oligonucleotide
  Antisense strand to SEQ ID NO: 1528796
ucccaucucagaagguuuc

SEQ ID NO: 1528798 - RNA, 19 nt, Artificial Sequence
  Description of Artificial Sequence: Synthetic oligonucleotide
  Sense strand starting at position 1559 of SEQ ID NO: 1245004
gugauuaucagaggagcca

SEQ ID NO: 1528799 - RNA, 19 nt, Artificial Sequence
  Description of Artificial Sequence: Synthetic oligonucleotide
  Antisense strand to SEQ ID NO: 1528798
uggcuccucugauaaucac

SEQ ID NO: 1528800 - RNA, 19 nt, Artificial Sequence
  Description of Artificial Sequence: Synthetic oligonucleotide
  Sense strand starting at position 1582 of SEQ ID NO: 1245004
uuggauucugaaggcgaca

SEQ ID NO: 1528801 - RNA, 19 nt, Artificial Sequence
  Description of Artificial Sequence: Synthetic oligonucleotide
  Antisense strand to SEQ ID NO: 1528800
ugucgccuucagaauccaa

SEQ ID NO: 1528802 - RNA, 19 nt, Artificial Sequence
  Description of Artificial Sequence: Synthetic oligonucleotide
  Sense strand starting at position 1745 of SEQ ID NO: 1245004
aggcgagucuuaccaccaa

SEQ ID NO: 1528803 - RNA, 19 nt, Artificial Sequence
  Description of Artificial Sequence: Synthetic oligonucleotide
  Antisense strand to SEQ ID NO: 1528802
uuggugguaagacucgccu

SEQ ID NO: 1528804 - RNA, 19 nt, Artificial Sequence
  Description of Artificial Sequence: Synthetic oligonucleotide
  Sense strand starting at position 1857 of SEQ ID NO: 1245004
gaaguuugcccgcgaccau

SEQ ID NO: 1528805 - RNA, 19 nt, Artificial Sequence
  Description of Artificial Sequence: Synthetic oligonucleotide
  Antisense strand to SEQ ID NO: 1528804
auggucgcgggcaaacuuc

SEQ ID NO: 1528806 - RNA, 19 nt, Artificial Sequence
  Description of Artificial Sequence: Synthetic oligonucleotide
  Sense strand starting at position 1927 of SEQ ID NO: 1245004
ggaaaugacuuucgggcuu

SEQ ID NO: 1528807 - RNA, 19 nt, Artificial Sequence
  Description of Artificial Sequence: Synthetic oligonucleotide
  Antisense strand to SEQ ID NO: 1528806
aagcccgaaagucauuucc

SEQ ID NO: 1528808 - RNA, 19 nt, Artificial Sequence
  Description of Artificial Sequence: Synthetic oligonucleotide
  Sense strand starting at position 1933 of SEQ ID NO: 1245004
gacuuucgggcuugucaga

SEQ ID NO: 1528809 - RNA, 19 nt, Artificial Sequence
  Description of Artificial Sequence: Synthetic oligonucleotide
  Antisense strand to SEQ ID NO: 1528808
ucugacaagcccgaaaguc

SEQ ID NO: 1528810 - RNA, 19 nt, Artificial Sequence
  Description of Artificial Sequence: Synthetic oligonucleotide
  Sense strand starting at position 2053 of SEQ ID NO: 1245004
aagagaugagucuguaguu

SEQ ID NO: 1528811 - RNA, 19 nt, Artificial Sequence
  Description of Artificial Sequence: Synthetic oligonucleotide
  Antisense strand to SEQ ID NO: 1528810
aacuacagacucaucucuu

SEQ ID NO: 1528812 - RNA, 19 nt, Artificial Sequence
  Description of Artificial Sequence: Synthetic oligonucleotide
  Sense strand starting at position 2054 of SEQ ID NO: 1245004
agagaugagucuguaguuc

SEQ ID NO: 1528813 - RNA, 19 nt, Artificial Sequence
  Description of Artificial Sequence: Synthetic oligonucleotide
  Antisense strand to SEQ ID NO: 1528812
gaacuacagacucaucucu

SEQ ID NO: 1528814 - RNA, 19 nt, Artificial Sequence
  Description of Artificial Sequence: Synthetic oligonucleotide
  Sense strand starting at position 2348 of SEQ ID NO: 1245004
gcgaggaaucgaggguaga

SEQ ID NO: 1528815 - RNA, 19 nt, Artificial Sequence
  Description of Artificial Sequence: Synthetic oligonucleotide
  Antisense strand to SEQ ID NO: 1528814
ucuacccucgauuccucgc

SEQ ID NO: 1528816 - RNA, 19 nt, Artificial Sequence
  Description of Artificial Sequence: Synthetic oligonucleotide
  Sense strand starting at position 2349 of SEQ ID NO: 1245004
cgaggaaucgaggguagaa

SEQ ID NO: 1528817 - RNA, 19 nt, Artificial Sequence
  Description of Artificial Sequence: Synthetic oligonucleotide
  Antisense strand to SEQ ID NO: 1528816
uucuacccucgauuccucg

SEQ ID NO: 1528818 - RNA, 19 nt, Artificial Sequence
  Description of Artificial Sequence: Synthetic oligonucleotide
  Sense strand starting at position 2573 of SEQ ID NO: 1245004
gacggagccgagugucauu

SEQ ID NO: 1528819 - RNA, 19 nt, Artificial Sequence
  Description of Artificial Sequence: Synthetic oligonucleotide
  Antisense strand to SEQ ID NO: 1528818
aaugacacucggcuccguc

SEQ ID NO: 1528820 - RNA, 19 nt, Artificial Sequence
  Description of Artificial Sequence: Synthetic oligonucleotide
  Sense strand starting at position 2578 of SEQ ID NO: 1245004
agccgagugucauuugagu

SEQ ID NO: 1528821 - RNA, 19 nt, Artificial Sequence
  Description of Artificial Sequence: Synthetic oligonucleotide
  Antisense strand to SEQ ID NO: 1528820
acucaaaugacacucggcu

SEQ ID NO: 1528822 - RNA, 19 nt, Artificial Sequence
  Description of Artificial Sequence: Synthetic oligonucleotide
  Sense strand starting at position 2580 of SEQ ID NO: 1245004
ccgagugucauuugagucu

SEQ ID NO: 1528823 - RNA, 19 nt, Artificial Sequence
  Description of Artificial Sequence: Synthetic oligonucleotide
  Antisense strand to SEQ ID NO: 1528822
agacucaaaugacacucgg

SEQ ID NO: 1528824 - RNA, 19 nt, Artificial Sequence
  Description of Artificial Sequence: Synthetic oligonucleotide
  Sense strand starting at position 2697 of SEQ ID NO: 1245004
gucacuuucuccuccuuga

SEQ ID NO: 1528825 - RNA, 19 nt, Artificial Sequence
  Description of Artificial Sequence: Synthetic oligonucleotide
  Antisense strand to SEQ ID NO: 1528824
ucaaggaggagaaagugac

SEQ ID NO: 1528826 - RNA, 19 nt, Artificial Sequence
  Description of Artificial Sequence: Synthetic oligonucleotide
  Sense strand starting at position 2767 of SEQ ID NO: 1245004
agugggauucucgguugga

SEQ ID NO: 1528827 - RNA, 19 nt, Artificial Sequence
  Description of Artificial Sequence: Synthetic oligonucleotide
  Antisense strand to SEQ ID NO: 1528826
uccaaccgagaaucccacu

SEQ ID NO: 1528828 - RNA, 19 nt, Artificial Sequence
  Description of Artificial Sequence: Synthetic oligonucleotide
  Sense strand starting at position 2768 of SEQ ID NO: 1245004
gugggauucucgguuggac

SEQ ID NO: 1528829 - RNA, 19 nt, Artificial Sequence
  Description of Artificial Sequence: Synthetic oligonucleotide
  Antisense strand to SEQ ID NO: 1528828
guccaaccgagaaucccac

SEQ ID NO: 1528830 - RNA, 19 nt, Artificial Sequence
  Description of Artificial Sequence: Synthetic oligonucleotide
  Sense strand starting at position 2770 of SEQ ID NO: 1245004
gggauucucgguuggacca

SEQ ID NO: 1528831 - RNA, 19 nt, Artificial Sequence
  Description of Artificial Sequence: Synthetic oligonucleotide
  Antisense strand to SEQ ID NO: 1528830
ugguccaaccgagaauccc

SEQ ID NO: 1528832 - RNA, 19 nt, Artificial Sequence
  Description of Artificial Sequence: Synthetic oligonucleotide
  Sense strand starting at position 2786 of SEQ ID NO: 1245004
ccaucagggaccggugaaa

SEQ ID NO: 1528833 - RNA, 19 nt, Artificial Sequence
  Description of Artificial Sequence: Synthetic oligonucleotide
  Antisense strand to SEQ ID NO: 1528832
uuucaccggucccugaugg

SEQ ID NO: 1528834 - RNA, 19 nt, Artificial Sequence
  Description of Artificial Sequence: Synthetic oligonucleotide
  Sense strand starting at position 2826 of SEQ ID NO: 1245004
ggcccagguccuuggaaga

SEQ ID NO: 1528835 - RNA, 19 nt, Artificial Sequence
  Description of Artificial Sequence: Synthetic oligonucleotide
  Antisense strand to SEQ ID NO: 1528834
ucuuccaaggaccugggcc

SEQ ID NO: 1528836 - RNA, 19 nt, Artificial Sequence
  Description of Artificial Sequence: Synthetic oligonucleotide
  Sense strand starting at position 3046 of SEQ ID NO: 1245004
ucuccagagcgaggaauua

SEQ ID NO: 1528837 - RNA, 19 nt, Artificial Sequence
  Description of Artificial Sequence: Synthetic oligonucleotide
  Antisense strand to SEQ ID NO: 1528836
uaauuccucgcucuggaga

SEQ ID NO: 1528838 - RNA, 19 nt, Artificial Sequence
  Description of Artificial Sequence: Synthetic oligonucleotide
  Sense strand starting at position 3085 of SEQ ID NO: 1245004
uugacaucauggucagguu

SEQ ID NO: 1528839 - RNA, 19 nt, Artificial Sequence
  Description of Artificial Sequence: Synthetic oligonucleotide
  Antisense strand to SEQ ID NO: 1528838
aaccugaccaugaugucaa

SEQ ID NO: 1528840 - RNA, 19 nt, Artificial Sequence
  Description of Artificial Sequence: Synthetic oligonucleotide
  Sense strand starting at position 3353 of SEQ ID NO: 1245004
gccagacauuccuggccuu

SEQ ID NO: 1528841 - RNA, 19 nt, Artificial Sequence
  Description of Artificial Sequence: Synthetic oligonucleotide
  Antisense strand to SEQ ID NO: 1528840
aaggccaggaaugucuggc

SEQ ID NO: 1528842 - RNA, 19 nt, Artificial Sequence
  Description of Artificial Sequence: Synthetic oligonucleotide
  Sense strand starting at position 3354 of SEQ ID NO: 1245004
ccagacauuccuggccuuu

SEQ ID NO: 1528843 - RNA, 19 nt, Artificial Sequence
  Description of Artificial Sequence: Synthetic oligonucleotide
  Antisense strand to SEQ ID NO: 1528842
aaaggccaggaaugucugg

SEQ ID NO: 1528844 - RNA, 19 nt, Artificial Sequence
  Description of Artificial Sequence: Synthetic oligonucleotide
  Sense strand starting at position 3356 of SEQ ID NO: 1245004
agacauuccuggccuuuga

SEQ ID NO: 1528845 - RNA, 19 nt, Artificial Sequence
  Description of Artificial Sequence: Synthetic oligonucleotide
  Antisense strand to SEQ ID NO: 1528844
ucaaaggccaggaaugucu

SEQ ID NO: 1528846 - RNA, 19 nt, Artificial Sequence
  Description of Artificial Sequence: Synthetic oligonucleotide
  Sense strand starting at position 3882 of SEQ ID NO: 1245004
gaggguuaccauugccaug

SEQ ID NO: 1528847 - RNA, 19 nt, Artificial Sequence
  Description of Artificial Sequence: Synthetic oligonucleotide
  Antisense strand to SEQ ID NO: 1528846
cauggcaaugguaacccuc

SEQ ID NO: 1528848 - RNA, 19 nt, Artificial Sequence
  Description of Artificial Sequence: Synthetic oligonucleotide
  Sense strand starting at position 3884 of SEQ ID NO: 1245004
ggguuaccauugccaugaa

SEQ ID NO: 1528849 - RNA, 19 nt, Artificial Sequence
  Description of Artificial Sequence: Synthetic oligonucleotide
  Antisense strand to SEQ ID NO: 1528848
uucauggcaaugguaaccc

SEQ ID NO: 1528850 - RNA, 19 nt, Artificial Sequence
  Description of Artificial Sequence: Synthetic oligonucleotide
  Sense strand starting at position 3885 of SEQ ID NO: 1245004
gguuaccauugccaugaau

SEQ ID NO: 1528851 - RNA, 19 nt, Artificial Sequence
  Description of Artificial Sequence: Synthetic oligonucleotide
  Antisense strand to SEQ ID NO: 1528850
auucauggcaaugguaacc

SEQ ID NO: 1528852 - RNA, 19 nt, Artificial Sequence
  Description of Artificial Sequence: Synthetic oligonucleotide
  Sense strand starting at position 3933 of SEQ ID NO: 1245004
uggagagcuuuccacauac

SEQ ID NO: 1528853 - RNA, 19 nt, Artificial Sequence
  Description of Artificial Sequence: Synthetic oligonucleotide
  Antisense strand to SEQ ID NO: 1528852
guauguggaaagcucucca

SEQ ID NO: 1528854 - RNA, 19 nt, Artificial Sequence
  Description of Artificial Sequence: Synthetic oligonucleotide
  Sense strand starting at position 271 of SEQ ID NO: 1245005
gcuagacacuguccuaagu

SEQ ID NO: 1528855 - RNA, 19 nt, Artificial Sequence
  Description of Artificial Sequence: Synthetic oligonucleotide
  Antisense strand to SEQ ID NO: 1528854
acuuaggacagugucuagc

SEQ ID NO: 1528856 - RNA, 19 nt, Artificial Sequence
  Description of Artificial Sequence: Synthetic oligonucleotide
  Sense strand starting at position 367 of SEQ ID NO: 1245005
cagagagguuaaguuaagu

SEQ ID NO: 1528857 - RNA, 19 nt, Artificial Sequence
  Description of Artificial Sequence: Synthetic oligonucleotide
  Antisense strand to SEQ ID NO: 1528856
acuuaacuuaaccucucug

SEQ ID NO: 1528858 - RNA, 19 nt, Artificial Sequence
  Description of Artificial Sequence: Synthetic oligonucleotide
  Sense strand starting at position 373 of SEQ ID NO: 1245005
gguuaaguuaagugacuug

SEQ ID NO: 1528859 - RNA, 19 nt, Artificial Sequence
  Description of Artificial Sequence: Synthetic oligonucleotide
  Antisense strand to SEQ ID NO: 1528858
caagucacuuaacuuaacc

SEQ ID NO: 1528860 - RNA, 19 nt, Artificial Sequence
  Description of Artificial Sequence: Synthetic oligonucleotide
  Sense strand starting at position 437 of SEQ ID NO: 1245005
ugcccuagugaugaugaca

SEQ ID NO: 1528861 - RNA, 19 nt, Artificial Sequence
  Description of Artificial Sequence: Synthetic oligonucleotide
  Antisense strand to SEQ ID NO: 1528860
ugucaucaucacuagggca

SEQ ID NO: 1528862 - RNA, 19 nt, Artificial Sequence
  Description of Artificial Sequence: Synthetic oligonucleotide
  Sense strand starting at position 489 of SEQ ID NO: 1245005
gccugaaaucuucggaaac

SEQ ID NO: 1528863 - RNA, 19 nt, Artificial Sequence
  Description of Artificial Sequence: Synthetic oligonucleotide
  Antisense strand to SEQ ID NO: 1528862
guuuccgaagauuucaggc

SEQ ID NO: 1528864 - RNA, 19 nt, Artificial Sequence
  Description of Artificial Sequence: Synthetic oligonucleotide
  Sense strand starting at position 611 of SEQ ID NO: 1245005
guggucuucccauaucauu

SEQ ID NO: 1528865 - RNA, 19 nt, Artificial Sequence
  Description of Artificial Sequence: Synthetic oligonucleotide
  Antisense strand to SEQ ID NO: 1528864
aaugauaugggaagaccac

SEQ ID NO: 1528866 - RNA, 19 nt, Artificial Sequence
  Description of Artificial Sequence: Synthetic oligonucleotide
  Sense strand starting at position 699 of SEQ ID NO: 1245005
gggucaugaccuggaaauu

SEQ ID NO: 1528867 - RNA, 19 nt, Artificial Sequence
  Description of Artificial Sequence: Synthetic oligonucleotide
  Antisense strand to SEQ ID NO: 1528866
aauuuccaggucaugaccc

SEQ ID NO: 1528868 - RNA, 19 nt, Artificial Sequence
  Description of Artificial Sequence: Synthetic oligonucleotide
  Sense strand starting at position 834 of SEQ ID NO: 1245005
ugcuguauauacucagacu

SEQ ID NO: 1528869 - RNA, 19 nt, Artificial Sequence
  Description of Artificial Sequence: Synthetic oligonucleotide
  Antisense strand to SEQ ID NO: 1528868
agucugaguauauacagca

SEQ ID NO: 1528870 - RNA, 19 nt, Artificial Sequence
  Description of Artificial Sequence: Synthetic oligonucleotide
  Sense strand starting at position 890 of SEQ ID NO: 1245005
ggaggcaaggcuuaaagua

SEQ ID NO: 1528871 - RNA, 19 nt, Artificial Sequence
  Description of Artificial Sequence: Synthetic oligonucleotide
  Antisense strand to SEQ ID NO: 1528870
uacuuuaagccuugccucc

SEQ ID NO: 1528872 - RNA, 19 nt, Artificial Sequence
  Description of Artificial Sequence: Synthetic oligonucleotide
  Sense strand starting at position 946 of SEQ ID NO: 1245005
gugggaaggugccuucuua

SEQ ID NO: 1528873 - RNA, 19 nt, Artificial Sequence
  Description of Artificial Sequence: Synthetic oligonucleotide
  Antisense strand to SEQ ID NO: 1528872
uaagaaggcaccuucccac

SEQ ID NO: 1528874 - RNA, 19 nt, Artificial Sequence
  Description of Artificial Sequence: Synthetic oligonucleotide
  Sense strand starting at position 1029 of SEQ ID NO: 1245005
ggaaacaauugcccuauaa

SEQ ID NO: 1528875 - RNA, 19 nt, Artificial Sequence
  Description of Artificial Sequence: Synthetic oligonucleotide
  Antisense strand to SEQ ID NO: 1528874
uuauagggcaauuguuucc

SEQ ID NO: 1528876 - RNA, 19 nt, Artificial Sequence
  Description of Artificial Sequence: Synthetic oligonucleotide
  Sense strand starting at position 1233 of SEQ ID NO: 1245005
caguguucuccugagaaau

SEQ ID NO: 1528877 - RNA, 19 nt, Artificial Sequence
  Description of Artificial Sequence: Synthetic oligonucleotide
  Antisense strand to SEQ ID NO: 1528876
auuucucaggagaacacug

SEQ ID NO: 1528878 - RNA, 19 nt, Artificial Sequence
  Description of Artificial Sequence: Synthetic oligonucleotide
  Sense strand starting at position 1267 of SEQ ID NO: 1245005
cugagauguggucgcauuu

SEQ ID NO: 1528879 - RNA, 19 nt, Artificial Sequence
  Description of Artificial Sequence: Synthetic oligonucleotide
  Antisense strand to SEQ ID NO: 1528878
aaaugcgaccacaucucag

SEQ ID NO: 1528880 - RNA, 19 nt, Artificial Sequence
  Description of Artificial Sequence: Synthetic oligonucleotide
  Sense strand starting at position 2375 of SEQ ID NO: 1245005
gcuucuccgagguagagaa

SEQ ID NO: 1528881 - RNA, 19 nt, Artificial Sequence
  Description of Artificial Sequence: Synthetic oligonucleotide
  Antisense strand to SEQ ID NO: 1528880
uucucuaccucggagaagc

SEQ ID NO: 1528882 - RNA, 19 nt, Artificial Sequence
  Description of Artificial Sequence: Synthetic oligonucleotide
  Sense strand starting at position 2774 of SEQ ID NO: 1245005
cuuuccaagguguguagau

SEQ ID NO: 1528883 - RNA, 19 nt, Artificial Sequence
  Description of Artificial Sequence: Synthetic oligonucleotide
  Antisense strand to SEQ ID NO: 1528882
aucuacacaccuuggaaag

SEQ ID NO: 1528884 - RNA, 19 nt, Artificial Sequence
  Description of Artificial Sequence: Synthetic oligonucleotide
  Sense strand starting at position 2879 of SEQ ID NO: 1245005
caauuucugcugcgaaggu

SEQ ID NO: 1528885 - RNA, 19 nt, Artificial Sequence
  Description of Artificial Sequence: Synthetic oligonucleotide
  Antisense strand to SEQ ID NO: 1528884
accuucgcagcagaaauug

SEQ ID NO: 1528886 - RNA, 19 nt, Artificial Sequence
  Description of Artificial Sequence: Synthetic oligonucleotide
  Sense strand starting at position 2917 of SEQ ID NO: 1245005
gugguaccugucuagaaag

SEQ ID NO: 1528887 - RNA, 19 nt, Artificial Sequence
  Description of Artificial Sequence: Synthetic oligonucleotide
  Antisense strand to SEQ ID NO: 1528886
cuuucuagacagguaccac

SEQ ID NO: 1528888 - RNA, 19 nt, Artificial Sequence
  Description of Artificial Sequence: Synthetic oligonucleotide
  Sense strand starting at position 2951 of SEQ ID NO: 1245005
ugacccaagugagauuuaa

SEQ ID NO: 1528889 - RNA, 19 nt, Artificial Sequence
  Description of Artificial Sequence: Synthetic oligonucleotide
  Antisense strand to SEQ ID NO: 1528888
uuaaaucucacuuggguca

SEQ ID NO: 1528890 - RNA, 19 nt, Artificial Sequence
  Description of Artificial Sequence: Synthetic oligonucleotide
  Sense strand starting at position 3033 of SEQ ID NO: 1245005
augucaagaucugcaugua

SEQ ID NO: 1528891 - RNA, 19 nt, Artificial Sequence
  Description of Artificial Sequence: Synthetic oligonucleotide
  Antisense strand to SEQ ID NO: 1528890
uacaugcagaucuugacau

SEQ ID NO: 1528892 - RNA, 19 nt, Artificial Sequence
  Description of Artificial Sequence: Synthetic oligonucleotide
  Sense strand starting at position 3034 of SEQ ID NO: 1245005
ugucaagaucugcauguaa

SEQ ID NO: 1528893 - RNA, 19 nt, Artificial Sequence
  Description of Artificial Sequence: Synthetic oligonucleotide
  Antisense strand to SEQ ID NO: 1528892
uuacaugcagaucuugaca

SEQ ID NO: 1528894 - RNA, 19 nt, Artificial Sequence
  Description of Artificial Sequence: Synthetic oligonucleotide
  Sense strand starting at position 3036 of SEQ ID NO: 1245005
ucaagaucugcauguaaag

SEQ ID NO: 1528895 - RNA, 19 nt, Artificial Sequence
  Description of Artificial Sequence: Synthetic oligonucleotide
  Antisense strand to SEQ ID NO: 1528894
cuuuacaugcagaucuuga

SEQ ID NO: 1528896 - RNA, 19 nt, Artificial Sequence
  Description of Artificial Sequence: Synthetic oligonucleotide
  Sense strand starting at position 3244 of SEQ ID NO: 1245005
gucaaaugagcgcagugau

SEQ ID NO: 1528897 - RNA, 19 nt, Artificial Sequence
  Description of Artificial Sequence: Synthetic oligonucleotide
  Antisense strand to SEQ ID NO: 1528896
aucacugcgcucauuugac

SEQ ID NO: 1528898 - RNA, 19 nt, Artificial Sequence
  Description of Artificial Sequence: Synthetic oligonucleotide
  Sense strand starting at position 3251 of SEQ ID NO: 1245005
gagcgcagugauuacauga

SEQ ID NO: 1528899 - RNA, 19 nt, Artificial Sequence
  Description of Artificial Sequence: Synthetic oligonucleotide
  Antisense strand to SEQ ID NO: 1528898
ucauguaaucacugcgcuc

SEQ ID NO: 1528900 - RNA, 19 nt, Artificial Sequence
  Description of Artificial Sequence: Synthetic oligonucleotide
  Sense strand starting at position 3258 of SEQ ID NO: 1245005
gugauuacaugaucugaug

SEQ ID NO: 1528901 - RNA, 19 nt, Artificial Sequence
  Description of Artificial Sequence: Synthetic oligonucleotide
  Antisense strand to SEQ ID NO: 1528900
caucagaucauguaaucac

SEQ ID NO: 1528902 - RNA, 19 nt, Artificial Sequence
  Description of Artificial Sequence: Synthetic oligonucleotide
  Sense strand starting at position 3395 of SEQ ID NO: 1245005
aaauauggaugaugagaaa

SEQ ID NO: 1528903 - RNA, 19 nt, Artificial Sequence
  Description of Artificial Sequence: Synthetic oligonucleotide
  Antisense strand to SEQ ID NO: 1528902
uuucucaucauccauauuu

SEQ ID NO: 1528904 - RNA, 19 nt, Artificial Sequence
  Description of Artificial Sequence: Synthetic oligonucleotide
  Sense strand starting at position 3398 of SEQ ID NO: 1245005
uauggaugaugagaaauau

SEQ ID NO: 1528905 - RNA, 19 nt, Artificial Sequence
  Description of Artificial Sequence: Synthetic oligonucleotide
  Antisense strand to SEQ ID NO: 1528904
auauuucucaucauccaua

SEQ ID NO: 1528906 - RNA, 19 nt, Artificial Sequence
  Description of Artificial Sequence: Synthetic oligonucleotide
  Sense strand starting at position 3409 of SEQ ID NO: 1245005
agaaauaucuaacaggauu

SEQ ID NO: 1528907 - RNA, 19 nt, Artificial Sequence
  Description of Artificial Sequence: Synthetic oligonucleotide
  Antisense strand to SEQ ID NO: 1528906
aauccuguuagauauuucu

SEQ ID NO: 1528908 - RNA, 19 nt, Artificial Sequence
  Description of Artificial Sequence: Synthetic oligonucleotide
  Sense strand starting at position 3781 of SEQ ID NO: 1245005
accuaauaucagugaucgu

SEQ ID NO: 1528909 - RNA, 19 nt, Artificial Sequence
  Description of Artificial Sequence: Synthetic oligonucleotide
  Antisense strand to SEQ ID NO: 1528908
acgaucacugauauuaggu

SEQ ID NO: 1528910 - RNA, 19 nt, Artificial Sequence
  Description of Artificial Sequence: Synthetic oligonucleotide
  Sense strand starting at position 3784 of SEQ ID NO: 1245005
uaauaucagugaucguuau

SEQ ID NO: 1528911 - RNA, 19 nt, Artificial Sequence
  Description of Artificial Sequence: Synthetic oligonucleotide
  Antisense strand to SEQ ID NO: 1528910
auaacgaucacugauauua

SEQ ID NO: 1528912 - RNA, 19 nt, Artificial Sequence
  Description of Artificial Sequence: Synthetic oligonucleotide
  Sense strand starting at position 3785 of SEQ ID NO: 1245005
aauaucagugaucguuaua

SEQ ID NO: 1528913 - RNA, 19 nt, Artificial Sequence
  Description of Artificial Sequence: Synthetic oligonucleotide
  Antisense strand to SEQ ID NO: 1528912
uauaacgaucacugauauu

SEQ ID NO: 1528914 - RNA, 19 nt, Artificial Sequence
  Description of Artificial Sequence: Synthetic oligonucleotide
  Sense strand starting at position 3788 of SEQ ID NO: 1245005
aucagugaucguuauaccu

SEQ ID NO: 1528915 - RNA, 19 nt, Artificial Sequence
  Description of Artificial Sequence: Synthetic oligonucleotide
  Antisense strand to SEQ ID NO: 1528914
agguauaacgaucacugau

SEQ ID NO: 1528916 - RNA, 19 nt, Artificial Sequence
  Description of Artificial Sequence: Synthetic oligonucleotide
  Sense strand starting at position 3823 of SEQ ID NO: 1245005
ugugaugguguuuacaacu

SEQ ID NO: 1528917 - RNA, 19 nt, Artificial Sequence
  Description of Artificial Sequence: Synthetic oligonucleotide
  Antisense strand to SEQ ID NO: 1528916
aguuguaaacaccaucaca

SEQ ID NO: 1528918 - RNA, 19 nt, Artificial Sequence
  Description of Artificial Sequence: Synthetic oligonucleotide
  Sense strand starting at position 3832 of SEQ ID NO: 1245005
guuuacaacugguucucaa

SEQ ID NO: 1528919 - RNA, 19 nt, Artificial Sequence
  Description of Artificial Sequence: Synthetic oligonucleotide
  Antisense strand to SEQ ID NO: 1528918
uugagaaccaguuguaaac

SEQ ID NO: 1528920 - RNA, 19 nt, Artificial Sequence
  Description of Artificial Sequence: Synthetic oligonucleotide
  Sense strand starting at position 3855 of SEQ ID NO: 1245005
gguugaugguggucugauu

SEQ ID NO: 1528921 - RNA, 19 nt, Artificial Sequence
  Description of Artificial Sequence: Synthetic oligonucleotide
  Antisense strand to SEQ ID NO: 1528920
aaucagaccaccaucaacc

SEQ ID NO: 1528922 - RNA, 19 nt, Artificial Sequence
  Description of Artificial Sequence: Synthetic oligonucleotide
  Sense strand starting at position 3862 of SEQ ID NO: 1245005
gguggucugauuuguauca

SEQ ID NO: 1528923 - RNA, 19 nt, Artificial Sequence
  Description of Artificial Sequence: Synthetic oligonucleotide
  Antisense strand to SEQ ID NO: 1528922
ugauacaaaucagaccacc

SEQ ID NO: 1528924 - RNA, 19 nt, Artificial Sequence
  Description of Artificial Sequence: Synthetic oligonucleotide
  Sense strand starting at position 3863 of SEQ ID NO: 1245005
guggucugauuuguaucau

SEQ ID NO: 1528925 - RNA, 19 nt, Artificial Sequence
  Description of Artificial Sequence: Synthetic oligonucleotide
  Antisense strand to SEQ ID NO: 1528924
augauacaaaucagaccac

SEQ ID NO: 1528926 - RNA, 19 nt, Artificial Sequence
  Description of Artificial Sequence: Synthetic oligonucleotide
  Sense strand starting at position 3872 of SEQ ID NO: 1245005
uuuguaucaucuguugauc

SEQ ID NO: 1528927 - RNA, 19 nt, Artificial Sequence
  Description of Artificial Sequence: Synthetic oligonucleotide
  Antisense strand to SEQ ID NO: 1528926
gaucaacagaugauacaaa

SEQ ID NO: 1528928 - RNA, 19 nt, Artificial Sequence
  Description of Artificial Sequence: Synthetic oligonucleotide
  Sense strand starting at position 3875 of SEQ ID NO: 1245005
guaucaucuguugaucucu

SEQ ID NO: 1528929 - RNA, 19 nt, Artificial Sequence
  Description of Artificial Sequence: Synthetic oligonucleotide
  Antisense strand to SEQ ID NO: 1528928
agagaucaacagaugauac

SEQ ID NO: 1528930 - RNA, 19 nt, Artificial Sequence
  Description of Artificial Sequence: Synthetic oligonucleotide
  Sense strand starting at position 3886 of SEQ ID NO: 1245005
ugaucucugugccuuaaau

SEQ ID NO: 1528931 - RNA, 19 nt, Artificial Sequence
  Description of Artificial Sequence: Synthetic oligonucleotide
  Antisense strand to SEQ ID NO: 1528930
auuuaaggcacagagauca

SEQ ID NO: 1528932 - RNA, 19 nt, Artificial Sequence
  Description of Artificial Sequence: Synthetic oligonucleotide
  Sense strand starting at position 3945 of SEQ ID NO: 1245005
guuucugaucacuggaguu

SEQ ID NO: 1528933 - RNA, 19 nt, Artificial Sequence
  Description of Artificial Sequence: Synthetic oligonucleotide
  Antisense strand to SEQ ID NO: 1528932
aacuccagugaucagaaac

SEQ ID NO: 1528934 - RNA, 19 nt, Artificial Sequence
  Description of Artificial Sequence: Synthetic oligonucleotide
  Sense strand starting at position 101 of SEQ ID NO: 1245006
aucuuaucagagugauaag

SEQ ID NO: 1528935 - RNA, 19 nt, Artificial Sequence
  Description of Artificial Sequence: Synthetic oligonucleotide
  Antisense strand to SEQ ID NO: 1528934
cuuaucacucugauaagau

SEQ ID NO: 1528936 - RNA, 19 nt, Artificial Sequence
  Description of Artificial Sequence: Synthetic oligonucleotide
  Sense strand starting at position 111 of SEQ ID NO: 1245006
agugauaaggguugugaag

SEQ ID NO: 1528937 - RNA, 19 nt, Artificial Sequence
  Description of Artificial Sequence: Synthetic oligonucleotide
  Antisense strand to SEQ ID NO: 1528936
cuucacaacccuuaucacu

SEQ ID NO: 1528938 - RNA, 19 nt, Artificial Sequence
  Description of Artificial Sequence: Synthetic oligonucleotide
  Sense strand starting at position 117 of SEQ ID NO: 1245006
aaggguugugaaggagauu

SEQ ID NO: 1528939 - RNA, 19 nt, Artificial Sequence
  Description of Artificial Sequence: Synthetic oligonucleotide
  Antisense strand to SEQ ID NO: 1528938
aaucuccuucacaacccuu

SEQ ID NO: 1528940 - RNA, 19 nt, Artificial Sequence
  Description of Artificial Sequence: Synthetic oligonucleotide
  Sense strand starting at position 142 of SEQ ID NO: 1245006
gauggugugauauaaagua

SEQ ID NO: 1528941 - RNA, 19 nt, Artificial Sequence
  Description of Artificial Sequence: Synthetic oligonucleotide
  Antisense strand to SEQ ID NO: 1528940
uacuuuauaucacaccauc

SEQ ID NO: 1528942 - RNA, 19 nt, Artificial Sequence
  Description of Artificial Sequence: Synthetic oligonucleotide
  Sense strand starting at position 217 of SEQ ID NO: 1245006
uuuaacugaugagaagaaa

SEQ ID NO: 1528943 - RNA, 19 nt, Artificial Sequence
  Description of Artificial Sequence: Synthetic oligonucleotide
  Antisense strand to SEQ ID NO: 1528942
uuucuucucaucaguuaaa

SEQ ID NO: 1528944 - RNA, 19 nt, Artificial Sequence
  Description of Artificial Sequence: Synthetic oligonucleotide
  Sense strand starting at position 397 of SEQ ID NO: 1245006
cgagaauccugacucugca

SEQ ID NO: 1528945 - RNA, 19 nt, Artificial Sequence
  Description of Artificial Sequence: Synthetic oligonucleotide
  Antisense strand to SEQ ID NO: 1528944
ugcagagucaggauucucg

SEQ ID NO: 1528946 - RNA, 19 nt, Artificial Sequence
  Description of Artificial Sequence: Synthetic oligonucleotide
  Sense strand starting at position 694 of SEQ ID NO: 1245006
ggguaagcuccugacugaa

SEQ ID NO: 1528947 - RNA, 19 nt, Artificial Sequence
  Description of Artificial Sequence: Synthetic oligonucleotide
  Antisense strand to SEQ ID NO: 1528946
uucagucaggagcuuaccc

SEQ ID NO: 1528948 - RNA, 19 nt, Artificial Sequence
  Description of Artificial Sequence: Synthetic oligonucleotide
  Sense strand starting at position 696 of SEQ ID NO: 1245006
guaagcuccugacugaacu

SEQ ID NO: 1528949 - RNA, 19 nt, Artificial Sequence
  Description of Artificial Sequence: Synthetic oligonucleotide
  Antisense strand to SEQ ID NO: 1528948
aguucagucaggagcuuac

SEQ ID NO: 1528950 - RNA, 19 nt, Artificial Sequence
  Description of Artificial Sequence: Synthetic oligonucleotide
  Sense strand starting at position 713 of SEQ ID NO: 1245006
cuugaugaguccucucuga

SEQ ID NO: 1528951 - RNA, 19 nt, Artificial Sequence
  Description of Artificial Sequence: Synthetic oligonucleotide
  Antisense strand to SEQ ID NO: 1528950
ucagagaggacucaucaag

SEQ ID NO: 1528952 - RNA, 19 nt, Artificial Sequence
  Description of Artificial Sequence: Synthetic oligonucleotide
  Sense strand starting at position 717 of SEQ ID NO: 1245006
augaguccucucugaguca

SEQ ID NO: 1528953 - RNA, 19 nt, Artificial Sequence
  Description of Artificial Sequence: Synthetic oligonucleotide
  Antisense strand to SEQ ID NO: 1528952
ugacucagagaggacucau

SEQ ID NO: 1528954 - RNA, 19 nt, Artificial Sequence
  Description of Artificial Sequence: Synthetic oligonucleotide
  Sense strand starting at position 831 of SEQ ID NO: 1245006
gaagcuuggcuagagggau

SEQ ID NO: 1528955 - RNA, 19 nt, Artificial Sequence
  Description of Artificial Sequence: Synthetic oligonucleotide
  Antisense strand to SEQ ID NO: 1528954
aucccucuagccaagcuuc

SEQ ID NO: 1528956 - RNA, 19 nt, Artificial Sequence
  Description of Artificial Sequence: Synthetic oligonucleotide
  Sense strand starting at position 871 of SEQ ID NO: 1245006
gggagaccuggguguagau

SEQ ID NO: 1528957 - RNA, 19 nt, Artificial Sequence
  Description of Artificial Sequence: Synthetic oligonucleotide
  Antisense strand to SEQ ID NO: 1528956
aucuacacccaggucuccc

SEQ ID NO: 1528958 - RNA, 19 nt, Artificial Sequence
  Description of Artificial Sequence: Synthetic oligonucleotide
  Sense strand starting at position 1040 of SEQ ID NO: 1245006
agcauugaggucugagacu

SEQ ID NO: 1528959 - RNA, 19 nt, Artificial Sequence
  Description of Artificial Sequence: Synthetic oligonucleotide
  Antisense strand to SEQ ID NO: 1528958
agucucagaccucaaugcu

SEQ ID NO: 1528960 - RNA, 19 nt, Artificial Sequence
  Description of Artificial Sequence: Synthetic oligonucleotide
  Sense strand starting at position 1077 of SEQ ID NO: 1245006
gagaacucauagcuguaua

SEQ ID NO: 1528961 - RNA, 19 nt, Artificial Sequence
  Description of Artificial Sequence: Synthetic oligonucleotide
  Antisense strand to SEQ ID NO: 1528960
uauacagcuaugaguucuc

SEQ ID NO: 1528962 - RNA, 19 nt, Artificial Sequence
  Description of Artificial Sequence: Synthetic oligonucleotide
  Sense strand starting at position 1284 of SEQ ID NO: 1245006
ggaagugagaagugcuaaa

SEQ ID NO: 1528963 - RNA, 19 nt, Artificial Sequence
  Description of Artificial Sequence: Synthetic oligonucleotide
  Antisense strand to SEQ ID NO: 1528962
uuuagcacuucucacuucc

SEQ ID NO: 1528964 - RNA, 19 nt, Artificial Sequence
  Description of Artificial Sequence: Synthetic oligonucleotide
  Sense strand starting at position 1518 of SEQ ID NO: 1245006
gcuauucuccgccugcauu

SEQ ID NO: 1528965 - RNA, 19 nt, Artificial Sequence
  Description of Artificial Sequence: Synthetic oligonucleotide
  Antisense strand to SEQ ID NO: 1528964
aaugcaggcggagaauagc

SEQ ID NO: 1528966 - RNA, 19 nt, Artificial Sequence
  Description of Artificial Sequence: Synthetic oligonucleotide
  Sense strand starting at position 1688 of SEQ ID NO: 1245006
gggaaagaagugugcagaa

SEQ ID NO: 1528967 - RNA, 19 nt, Artificial Sequence
  Description of Artificial Sequence: Synthetic oligonucleotide
  Antisense strand to SEQ ID NO: 1528966
uucugcacacuucuuuccc

SEQ ID NO: 1528968 - RNA, 19 nt, Artificial Sequence
  Description of Artificial Sequence: Synthetic oligonucleotide
  Sense strand starting at position 1741 of SEQ ID NO: 1245006
ucucaucuucccggaggaa

SEQ ID NO: 1528969 - RNA, 19 nt, Artificial Sequence
  Description of Artificial Sequence: Synthetic oligonucleotide
  Antisense strand to SEQ ID NO: 1528968
uuccuccgggaagaugaga

SEQ ID NO: 1528970 - RNA, 19 nt, Artificial Sequence
  Description of Artificial Sequence: Synthetic oligonucleotide
  Sense strand starting at position 1807 of SEQ ID NO: 1245006
aaugaugggucguuugaua

SEQ ID NO: 1528971 - RNA, 19 nt, Artificial Sequence
  Description of Artificial Sequence: Synthetic oligonucleotide
  Antisense strand to SEQ ID NO: 1528970
uaucaaacgacccaucauu

SEQ ID NO: 1528972 - RNA, 19 nt, Artificial Sequence
  Description of Artificial Sequence: Synthetic oligonucleotide
  Sense strand starting at position 2088 of SEQ ID NO: 1245006
gccguacuuacgucaucuu

SEQ ID NO: 1528973 - RNA, 19 nt, Artificial Sequence
  Description of Artificial Sequence: Synthetic oligonucleotide
  Antisense strand to SEQ ID NO: 1528972
aagaugacguaaguacggc

SEQ ID NO: 1528974 - RNA, 19 nt, Artificial Sequence
  Description of Artificial Sequence: Synthetic oligonucleotide
  Sense strand starting at position 2246 of SEQ ID NO: 1245006
cgucucuucccagucgauu

SEQ ID NO: 1528975 - RNA, 19 nt, Artificial Sequence
  Description of Artificial Sequence: Synthetic oligonucleotide
  Antisense strand to SEQ ID NO: 1528974
aaucgacugggaagagacg

SEQ ID NO: 1528976 - RNA, 19 nt, Artificial Sequence
  Description of Artificial Sequence: Synthetic oligonucleotide
  Sense strand starting at position 2381 of SEQ ID NO: 1245006
ggcggauuacuugaggaua

SEQ ID NO: 1528977 - RNA, 19 nt, Artificial Sequence
  Description of Artificial Sequence: Synthetic oligonucleotide
  Antisense strand to SEQ ID NO: 1528976
uauccucaaguaauccgcc

SEQ ID NO: 1528978 - RNA, 19 nt, Artificial Sequence
  Description of Artificial Sequence: Synthetic oligonucleotide
  Sense strand starting at position 2721 of SEQ ID NO: 1245006
uuuaguauaguccaucgau

SEQ ID NO: 1528979 - RNA, 19 nt, Artificial Sequence
  Description of Artificial Sequence: Synthetic oligonucleotide
  Antisense strand to SEQ ID NO: 1528978
aucgauggacuauacuaaa

SEQ ID NO: 1528980 - RNA, 19 nt, Artificial Sequence
  Description of Artificial Sequence: Synthetic oligonucleotide
  Sense strand starting at position 2784 of SEQ ID NO: 1245006
gcgguuaugaaauaaagcu

SEQ ID NO: 1528981 - RNA, 19 nt, Artificial Sequence
  Description of Artificial Sequence: Synthetic oligonucleotide
  Antisense strand to SEQ ID NO: 1528980
agcuuuauuucauaaccgc

SEQ ID NO: 1528982 - RNA, 19 nt, Artificial Sequence
  Description of Artificial Sequence: Synthetic oligonucleotide
  Sense strand starting at position 2848 of SEQ ID NO: 1245006
guguuucuuggagaaauac

SEQ ID NO: 1528983 - RNA, 19 nt, Artificial Sequence
  Description of Artificial Sequence: Synthetic oligonucleotide
  Antisense strand to SEQ ID NO: 1528982
guauuucuccaagaaacac

SEQ ID NO: 1528984 - RNA, 19 nt, Artificial Sequence
  Description of Artificial Sequence: Synthetic oligonucleotide
  Sense strand starting at position 2970 of SEQ ID NO: 1245006
uagcaagguaugggaguua

SEQ ID NO: 1528985 - RNA, 19 nt, Artificial Sequence
  Description of Artificial Sequence: Synthetic oligonucleotide
  Antisense strand to SEQ ID NO: 1528984
uaacucccauaccuugcua

SEQ ID NO: 1528986 - RNA, 19 nt, Artificial Sequence
  Description of Artificial Sequence: Synthetic oligonucleotide
  Sense strand starting at position 3001 of SEQ ID NO: 1245006
cacagccuuccggacauua

SEQ ID NO: 1528987 - RNA, 19 nt, Artificial Sequence
  Description of Artificial Sequence: Synthetic oligonucleotide
  Antisense strand to SEQ ID NO: 1528986
uaauguccggaaggcugug

SEQ ID NO: 1528988 - RNA, 19 nt, Artificial Sequence
  Description of Artificial Sequence: Synthetic oligonucleotide
  Sense strand starting at position 3070 of SEQ ID NO: 1245006
guucucuauugacuaagga

SEQ ID NO: 1528989 - RNA, 19 nt, Artificial Sequence
  Description of Artificial Sequence: Synthetic oligonucleotide
  Antisense strand to SEQ ID NO: 1528988
uccuuagucaauagagaac

SEQ ID NO: 1528990 - RNA, 19 nt, Artificial Sequence
  Description of Artificial Sequence: Synthetic oligonucleotide
  Sense strand starting at position 3200 of SEQ ID NO: 1245006
gugggacugcuuuauacau

SEQ ID NO: 1528991 - RNA, 19 nt, Artificial Sequence
  Description of Artificial Sequence: Synthetic oligonucleotide
  Antisense strand to SEQ ID NO: 1528990
auguauaaagcagucccac

SEQ ID NO: 1528992 - RNA, 19 nt, Artificial Sequence
  Description of Artificial Sequence: Synthetic oligonucleotide
  Sense strand starting at position 3280 of SEQ ID NO: 1245006
ugccuauuuguuugcuuua

SEQ ID NO: 1528993 - RNA, 19 nt, Artificial Sequence
  Description of Artificial Sequence: Synthetic oligonucleotide
  Antisense strand to SEQ ID NO: 1528992
uaaagcaaacaaauaggca

SEQ ID NO: 1528994 - RNA, 19 nt, Artificial Sequence
  Description of Artificial Sequence: Synthetic oligonucleotide
  Sense strand starting at position 3294 of SEQ ID NO: 1245006
cuuuacagaguuuacagua

SEQ ID NO: 1528995 - RNA, 19 nt, Artificial Sequence
  Description of Artificial Sequence: Synthetic oligonucleotide
  Antisense strand to SEQ ID NO: 1528994
uacuguaaacucuguaaag

SEQ ID NO: 1528996 - RNA, 19 nt, Artificial Sequence
  Description of Artificial Sequence: Synthetic oligonucleotide
  Sense strand starting at position 3302 of SEQ ID NO: 1245006
aguuuacaguaucuuaaga

SEQ ID NO: 1528997 - RNA, 19 nt, Artificial Sequence
  Description of Artificial Sequence: Synthetic oligonucleotide
  Antisense strand to SEQ ID NO: 1528996
ucuuaagauacuguaaacu

SEQ ID NO: 1528998 - RNA, 19 nt, Artificial Sequence
  Description of Artificial Sequence: Synthetic oligonucleotide
  Sense strand starting at position 3355 of SEQ ID NO: 1245006
ccuuguccuguuuaggaca

SEQ ID NO: 1528999 - RNA, 19 nt, Artificial Sequence
  Description of Artificial Sequence: Synthetic oligonucleotide
  Antisense strand to SEQ ID NO: 1528998
uguccuaaacaggacaagg

SEQ ID NO: 1529000 - RNA, 19 nt, Artificial Sequence
  Description of Artificial Sequence: Synthetic oligonucleotide
  Sense strand starting at position 3459 of SEQ ID NO: 1245006
uaagguccuugagccauua

SEQ ID NO: 1529001 - RNA, 19 nt, Artificial Sequence
  Description of Artificial Sequence: Synthetic oligonucleotide
  Antisense strand to SEQ ID NO: 1529000
uaauggcucaaggaccuua

SEQ ID NO: 1529002 - RNA, 19 nt, Artificial Sequence
  Description of Artificial Sequence: Synthetic oligonucleotide
  Sense strand starting at position 3498 of SEQ ID NO: 1245006
guuuauggugugaggugua

SEQ ID NO: 1529003 - RNA, 19 nt, Artificial Sequence
  Description of Artificial Sequence: Synthetic oligonucleotide
  Antisense strand to SEQ ID NO: 1529002
uacaccucacaccauaaac

SEQ ID NO: 1529004 - RNA, 19 nt, Artificial Sequence
  Description of Artificial Sequence: Synthetic oligonucleotide
  Sense strand starting at position 3516 of SEQ ID NO: 1245006
aggagucagucucugguau

SEQ ID NO: 1529005 - RNA, 19 nt, Artificial Sequence
  Description of Artificial Sequence: Synthetic oligonucleotide
  Antisense strand to SEQ ID NO: 1529004
auaccagagacugacuccu

SEQ ID NO: 1529006 - RNA, 19 nt, Artificial Sequence
  Description of Artificial Sequence: Synthetic oligonucleotide
  Sense strand starting at position 3531 of SEQ ID NO: 1245006
guaucuuuccuguauggaa

SEQ ID NO: 1529007 - RNA, 19 nt, Artificial Sequence
  Description of Artificial Sequence: Synthetic oligonucleotide
  Antisense strand to SEQ ID NO: 1529006
uuccauacaggaaagauac

SEQ ID NO: 1529008 - RNA, 19 nt, Artificial Sequence
  Description of Artificial Sequence: Synthetic oligonucleotide
  Sense strand starting at position 3533 of SEQ ID NO: 1245006
aucuuuccuguauggaaau

SEQ ID NO: 1529009 - RNA, 19 nt, Artificial Sequence
  Description of Artificial Sequence: Synthetic oligonucleotide
  Antisense strand to SEQ ID NO: 1529008
auuuccauacaggaaagau

SEQ ID NO: 1529010 - RNA, 19 nt, Artificial Sequence
  Description of Artificial Sequence: Synthetic oligonucleotide
  Sense strand starting at position 3562 of SEQ ID NO: 1245006
ugucuccacuuguugaaau

SEQ ID NO: 1529011 - RNA, 19 nt, Artificial Sequence
  Description of Artificial Sequence: Synthetic oligonucleotide
  Antisense strand to SEQ ID NO: 1529010
auuucaacaaguggagaca

SEQ ID NO: 1529012 - RNA, 19 nt, Artificial Sequence
  Description of Artificial Sequence: Synthetic oligonucleotide
  Sense strand starting at position 3630 of SEQ ID NO: 1245006
ggaguauagggcuaccauu

SEQ ID NO: 1529013 - RNA, 19 nt, Artificial Sequence
  Description of Artificial Sequence: Synthetic oligonucleotide
  Antisense strand to SEQ ID NO: 1529012
aaugguagcccuauacucc

SEQ ID NO: 1529014 - RNA, 19 nt, Artificial Sequence
  Description of Artificial Sequence: Synthetic oligonucleotide
  Sense strand starting at position 35 of SEQ ID NO: 1245007
gggcaucccucuccuagaa

SEQ ID NO: 1529015 - RNA, 19 nt, Artificial Sequence
  Description of Artificial Sequence: Synthetic oligonucleotide
  Antisense strand to SEQ ID NO: 1529014
uucuaggagagggaugccc

SEQ ID NO: 1529016 - RNA, 19 nt, Artificial Sequence
  Description of Artificial Sequence: Synthetic oligonucleotide
  Sense strand starting at position 104 of SEQ ID NO: 1245007
cguuguuauccuuaccacu

SEQ ID NO: 1529017 - RNA, 19 nt, Artificial Sequence
  Description of Artificial Sequence: Synthetic oligonucleotide
  Antisense strand to SEQ ID NO: 1529016
agugguaaggauaacaacg

SEQ ID NO: 1529018 - RNA, 19 nt, Artificial Sequence
  Description of Artificial Sequence: Synthetic oligonucleotide
  Sense strand starting at position 1141 of SEQ ID NO: 1245007
guggcugcugggaguugua

SEQ ID NO: 1529019 - RNA, 19 nt, Artificial Sequence
  Description of Artificial Sequence: Synthetic oligonucleotide
  Antisense strand to SEQ ID NO: 1529018
uacaacucccagcagccac

SEQ ID NO: 1529020 - RNA, 19 nt, Artificial Sequence
  Description of Artificial Sequence: Synthetic oligonucleotide
  Sense strand starting at position 1168 of SEQ ID NO: 1245007
gcuucuaucuuggcgagaa

SEQ ID NO: 1529021 - RNA, 19 nt, Artificial Sequence
  Description of Artificial Sequence: Synthetic oligonucleotide
  Antisense strand to SEQ ID NO: 1529020
uucucgccaagauagaagc

SEQ ID NO: 1529022 - RNA, 19 nt, Artificial Sequence
  Description of Artificial Sequence: Synthetic oligonucleotide
  Sense strand starting at position 1356 of SEQ ID NO: 1245007
gcuacccagcacugauaua

SEQ ID NO: 1529023 - RNA, 19 nt, Artificial Sequence
  Description of Artificial Sequence: Synthetic oligonucleotide
  Antisense strand to SEQ ID NO: 1529022
uauaucagugcuggguagc

SEQ ID NO: 1529024 - RNA, 19 nt, Artificial Sequence
  Description of Artificial Sequence: Synthetic oligonucleotide
  Sense strand starting at position 1470 of SEQ ID NO: 1245007
aucuuaucagagugauaag

SEQ ID NO: 1529025 - RNA, 19 nt, Artificial Sequence
  Description of Artificial Sequence: Synthetic oligonucleotide
  Antisense strand to SEQ ID NO: 1529024
cuuaucacucugauaagau

SEQ ID NO: 1529026 - RNA, 19 nt, Artificial Sequence
  Description of Artificial Sequence: Synthetic oligonucleotide
  Sense strand starting at position 1480 of SEQ ID NO: 1245007
agugauaaggguugugaag

SEQ ID NO: 1529027 - RNA, 19 nt, Artificial Sequence
  Description of Artificial Sequence: Synthetic oligonucleotide
  Antisense strand to SEQ ID NO: 1529026
cuucacaacccuuaucacu

SEQ ID NO: 1529028 - RNA, 19 nt, Artificial Sequence
  Description of Artificial Sequence: Synthetic oligonucleotide
  Sense strand starting at position 1486 of SEQ ID NO: 1245007
aaggguugugaaggagauu

SEQ ID NO: 1529029 - RNA, 19 nt, Artificial Sequence
  Description of Artificial Sequence: Synthetic oligonucleotide
  Antisense strand to SEQ ID NO: 1529028
aaucuccuucacaacccuu

SEQ ID NO: 1529030 - RNA, 19 nt, Artificial Sequence
  Description of Artificial Sequence: Synthetic oligonucleotide
  Sense strand starting at position 1507 of SEQ ID NO: 1245007
auaagauggugugauauaa

SEQ ID NO: 1529031 - RNA, 19 nt, Artificial Sequence
  Description of Artificial Sequence: Synthetic oligonucleotide
  Antisense strand to SEQ ID NO: 1529030
uuauaucacaccaucuuau

SEQ ID NO: 1529032 - RNA, 19 nt, Artificial Sequence
  Description of Artificial Sequence: Synthetic oligonucleotide
  Sense strand starting at position 1511 of SEQ ID NO: 1245007
gauggugugauauaaagua

SEQ ID NO: 1529033 - RNA, 19 nt, Artificial Sequence
  Description of Artificial Sequence: Synthetic oligonucleotide
  Antisense strand to SEQ ID NO: 1529032
uacuuuauaucacaccauc

SEQ ID NO: 1529034 - RNA, 19 nt, Artificial Sequence
  Description of Artificial Sequence: Synthetic oligonucleotide
  Sense strand starting at position 1540 of SEQ ID NO: 1245007
aacguuagggugugauauu

SEQ ID NO: 1529035 - RNA, 19 nt, Artificial Sequence
  Description of Artificial Sequence: Synthetic oligonucleotide
  Antisense strand to SEQ ID NO: 1529034
aauaucacacccuaacguu

SEQ ID NO: 1529036 - RNA, 19 nt, Artificial Sequence
  Description of Artificial Sequence: Synthetic oligonucleotide
  Sense strand starting at position 1586 of SEQ ID NO: 1245007
uuuaacugaugagaagaaa

SEQ ID NO: 1529037 - RNA, 19 nt, Artificial Sequence
  Description of Artificial Sequence: Synthetic oligonucleotide
  Antisense strand to SEQ ID NO: 1529036
uuucuucucaucaguuaaa

SEQ ID NO: 1529038 - RNA, 19 nt, Artificial Sequence
  Description of Artificial Sequence: Synthetic oligonucleotide
  Sense strand starting at position 1706 of SEQ ID NO: 1245007
acagcucuggcuugcagaa

SEQ ID NO: 1529039 - RNA, 19 nt, Artificial Sequence
  Description of Artificial Sequence: Synthetic oligonucleotide
  Antisense strand to SEQ ID NO: 1529038
uucugcaagccagagcugu

SEQ ID NO: 1529040 - RNA, 19 nt, Artificial Sequence
  Description of Artificial Sequence: Synthetic oligonucleotide
  Sense strand starting at position 1766 of SEQ ID NO: 1245007
cgagaauccugacucugca

SEQ ID NO: 1529041 - RNA, 19 nt, Artificial Sequence
  Description of Artificial Sequence: Synthetic oligonucleotide
  Antisense strand to SEQ ID NO: 1529040
ugcagagucaggauucucg

SEQ ID NO: 1529042 - RNA, 19 nt, Artificial Sequence
  Description of Artificial Sequence: Synthetic oligonucleotide
  Sense strand starting at position 1826 of SEQ ID NO: 1245007
cggauuacuugcccuuacu

SEQ ID NO: 1529043 - RNA, 19 nt, Artificial Sequence
  Description of Artificial Sequence: Synthetic oligonucleotide
  Antisense strand to SEQ ID NO: 1529042
aguaagggcaaguaauccg

SEQ ID NO: 1529044 - RNA, 19 nt, Artificial Sequence
  Description of Artificial Sequence: Synthetic oligonucleotide
  Sense strand starting at position 2063 of SEQ ID NO: 1245007
ggguaagcuccugacugaa

SEQ ID NO: 1529045 - RNA, 19 nt, Artificial Sequence
  Description of Artificial Sequence: Synthetic oligonucleotide
  Antisense strand to SEQ ID NO: 1529044
uucagucaggagcuuaccc

SEQ ID NO: 1529046 - RNA, 19 nt, Artificial Sequence
  Description of Artificial Sequence: Synthetic oligonucleotide
  Sense strand starting at position 2065 of SEQ ID NO: 1245007
guaagcuccugacugaacu

SEQ ID NO: 1529047 - RNA, 19 nt, Artificial Sequence
  Description of Artificial Sequence: Synthetic oligonucleotide
  Antisense strand to SEQ ID NO: 1529046
aguucagucaggagcuuac

SEQ ID NO: 1529048 - RNA, 19 nt, Artificial Sequence
  Description of Artificial Sequence: Synthetic oligonucleotide
  Sense strand starting at position 2082 of SEQ ID NO: 1245007
cuugaugaguccucucuga

SEQ ID NO: 1529049 - RNA, 19 nt, Artificial Sequence
  Description of Artificial Sequence: Synthetic oligonucleotide
  Antisense strand to SEQ ID NO: 1529048
ucagagaggacucaucaag

SEQ ID NO: 1529050 - RNA, 19 nt, Artificial Sequence
  Description of Artificial Sequence: Synthetic oligonucleotide
  Sense strand starting at position 2086 of SEQ ID NO: 1245007
augaguccucucugaguca

SEQ ID NO: 1529051 - RNA, 19 nt, Artificial Sequence
  Description of Artificial Sequence: Synthetic oligonucleotide
  Antisense strand to SEQ ID NO: 1529050
ugacucagagaggacucau

SEQ ID NO: 1529052 - RNA, 19 nt, Artificial Sequence
  Description of Artificial Sequence: Synthetic oligonucleotide
  Sense strand starting at position 2200 of SEQ ID NO: 1245007
gaagcuuggcuagagggau

SEQ ID NO: 1529053 - RNA, 19 nt, Artificial Sequence
  Description of Artificial Sequence: Synthetic oligonucleotide
  Antisense strand to SEQ ID NO: 1529052
aucccucuagccaagcuuc

SEQ ID NO: 1529054 - RNA, 19 nt, Artificial Sequence
  Description of Artificial Sequence: Synthetic oligonucleotide
  Sense strand starting at position 2212 of SEQ ID NO: 1245007
gagggaucaucauaggagu

SEQ ID NO: 1529055 - RNA, 19 nt, Artificial Sequence
  Description of Artificial Sequence: Synthetic oligonucleotide
  Antisense strand to SEQ ID NO: 1529054
acuccuaugaugaucccuc

SEQ ID NO: 1529056 - RNA, 19 nt, Artificial Sequence
  Description of Artificial Sequence: Synthetic oligonucleotide
  Sense strand starting at position 2240 of SEQ ID NO: 1245007
gggagaccuggguguagau

SEQ ID NO: 1529057 - RNA, 19 nt, Artificial Sequence
  Description of Artificial Sequence: Synthetic oligonucleotide
  Antisense strand to SEQ ID NO: 1529056
aucuacacccaggucuccc

SEQ ID NO: 1529058 - RNA, 19 nt, Artificial Sequence
  Description of Artificial Sequence: Synthetic oligonucleotide
  Sense strand starting at position 2409 of SEQ ID NO: 1245007
agcauugaggucugagacu

SEQ ID NO: 1529059 - RNA, 19 nt, Artificial Sequence
  Description of Artificial Sequence: Synthetic oligonucleotide
  Antisense strand to SEQ ID NO: 1529058
agucucagaccucaaugcu

SEQ ID NO: 1529060 - RNA, 19 nt, Artificial Sequence
  Description of Artificial Sequence: Synthetic oligonucleotide
  Sense strand starting at position 2436 of SEQ ID NO: 1245007
ucgaaacauugagaacuca

SEQ ID NO: 1529061 - RNA, 19 nt, Artificial Sequence
  Description of Artificial Sequence: Synthetic oligonucleotide
  Antisense strand to SEQ ID NO: 1529060
ugaguucucaauguuucga

SEQ ID NO: 1529062 - RNA, 19 nt, Artificial Sequence
  Description of Artificial Sequence: Synthetic oligonucleotide
  Sense strand starting at position 2446 of SEQ ID NO: 1245007
gagaacucauagcuguaua

SEQ ID NO: 1529063 - RNA, 19 nt, Artificial Sequence
  Description of Artificial Sequence: Synthetic oligonucleotide
  Antisense strand to SEQ ID NO: 1529062
uauacagcuaugaguucuc

SEQ ID NO: 1529064 - RNA, 19 nt, Artificial Sequence
  Description of Artificial Sequence: Synthetic oligonucleotide
  Sense strand starting at position 2638 of SEQ ID NO: 1245007
aaggcugucagucguggaa

SEQ ID NO: 1529065 - RNA, 19 nt, Artificial Sequence
  Description of Artificial Sequence: Synthetic oligonucleotide
  Antisense strand to SEQ ID NO: 1529064
uuccacgacugacagccuu

SEQ ID NO: 1529066 - RNA, 19 nt, Artificial Sequence
  Description of Artificial Sequence: Synthetic oligonucleotide
  Sense strand starting at position 2642 of SEQ ID NO: 1245007
cugucagucguggaaguga

SEQ ID NO: 1529067 - RNA, 19 nt, Artificial Sequence
  Description of Artificial Sequence: Synthetic oligonucleotide
  Antisense strand to SEQ ID NO: 1529066
ucacuuccacgacugacag

SEQ ID NO: 1529068 - RNA, 19 nt, Artificial Sequence
  Description of Artificial Sequence: Synthetic oligonucleotide
  Sense strand starting at position 2653 of SEQ ID NO: 1245007
ggaagugagaagugcuaaa

SEQ ID NO: 1529069 - RNA, 19 nt, Artificial Sequence
  Description of Artificial Sequence: Synthetic oligonucleotide
  Antisense strand to SEQ ID NO: 1529068
uuuagcacuucucacuucc

SEQ ID NO: 1529070 - RNA, 19 nt, Artificial Sequence
  Description of Artificial Sequence: Synthetic oligonucleotide
  Sense strand starting at position 2732 of SEQ ID NO: 1245007
guuauuguuuggcuccaca

SEQ ID NO: 1529071 - RNA, 19 nt, Artificial Sequence
  Description of Artificial Sequence: Synthetic oligonucleotide
  Antisense strand to SEQ ID NO: 1529070
uguggagccaaacaauaac

SEQ ID NO: 1529072 - RNA, 19 nt, Artificial Sequence
  Description of Artificial Sequence: Synthetic oligonucleotide
  Sense strand starting at position 2794 of SEQ ID NO: 1245007
gccggagcagcucacuauu

SEQ ID NO: 1529073 - RNA, 19 nt, Artificial Sequence
  Description of Artificial Sequence: Synthetic oligonucleotide
  Antisense strand to SEQ ID NO: 1529072
aauagugagcugcuccggc

SEQ ID NO: 1529074 - RNA, 19 nt, Artificial Sequence
  Description of Artificial Sequence: Synthetic oligonucleotide
  Sense strand starting at position 2887 of SEQ ID NO: 1245007
gcuauucuccgccugcauu

SEQ ID NO: 1529075 - RNA, 19 nt, Artificial Sequence
  Description of Artificial Sequence: Synthetic oligonucleotide
  Antisense strand to SEQ ID NO: 1529074
aaugcaggcggagaauagc

SEQ ID NO: 1529076 - RNA, 19 nt, Artificial Sequence
  Description of Artificial Sequence: Synthetic oligonucleotide
  Sense strand starting at position 2924 of SEQ ID NO: 1245007
aguuauggccuuugcaaag

SEQ ID NO: 1529077 - RNA, 19 nt, Artificial Sequence
  Description of Artificial Sequence: Synthetic oligonucleotide
  Antisense strand to SEQ ID NO: 1529076
cuuugcaaaggccauaacu

SEQ ID NO: 1529078 - RNA, 19 nt, Artificial Sequence
  Description of Artificial Sequence: Synthetic oligonucleotide
  Sense strand starting at position 3057 of SEQ ID NO: 1245007
gggaaagaagugugcagaa

SEQ ID NO: 1529079 - RNA, 19 nt, Artificial Sequence
  Description of Artificial Sequence: Synthetic oligonucleotide
  Antisense strand to SEQ ID NO: 1529078
uucugcacacuucuuuccc

SEQ ID NO: 1529080 - RNA, 19 nt, Artificial Sequence
  Description of Artificial Sequence: Synthetic oligonucleotide
  Sense strand starting at position 3110 of SEQ ID NO: 1245007
ucucaucuucccggaggaa

SEQ ID NO: 1529081 - RNA, 19 nt, Artificial Sequence
  Description of Artificial Sequence: Synthetic oligonucleotide
  Antisense strand to SEQ ID NO: 1529080
uuccuccgggaagaugaga

SEQ ID NO: 1529082 - RNA, 19 nt, Artificial Sequence
  Description of Artificial Sequence: Synthetic oligonucleotide
  Sense strand starting at position 3176 of SEQ ID NO: 1245007
aaugaugggucguuugaua

SEQ ID NO: 1529083 - RNA, 19 nt, Artificial Sequence
  Description of Artificial Sequence: Synthetic oligonucleotide
  Antisense strand to SEQ ID NO: 1529082
uaucaaacgacccaucauu

SEQ ID NO: 1529084 - RNA, 19 nt, Artificial Sequence
  Description of Artificial Sequence: Synthetic oligonucleotide
  Sense strand starting at position 3457 of SEQ ID NO: 1245007
gccguacuuacgucaucuu

SEQ ID NO: 1529085 - RNA, 19 nt, Artificial Sequence
  Description of Artificial Sequence: Synthetic oligonucleotide
  Antisense strand to SEQ ID NO: 1529084
aagaugacguaaguacggc

SEQ ID NO: 1529086 - RNA, 19 nt, Artificial Sequence
  Description of Artificial Sequence: Synthetic oligonucleotide
  Sense strand starting at position 3458 of SEQ ID NO: 1245007
ccguacuuacgucaucuuu

SEQ ID NO: 1529087 - RNA, 19 nt, Artificial Sequence
  Description of Artificial Sequence: Synthetic oligonucleotide
  Antisense strand to SEQ ID NO: 1529086
aaagaugacguaaguacgg

SEQ ID NO: 1529088 - RNA, 19 nt, Artificial Sequence
  Description of Artificial Sequence: Synthetic oligonucleotide
  Sense strand starting at position 3479 of SEQ ID NO: 1245007
ccuaaaucgagguggcauu

SEQ ID NO: 1529089 - RNA, 19 nt, Artificial Sequence
  Description of Artificial Sequence: Synthetic oligonucleotide
  Antisense strand to SEQ ID NO: 1529088
aaugccaccucgauuuagg

SEQ ID NO: 1529090 - RNA, 19 nt, Artificial Sequence
  Description of Artificial Sequence: Synthetic oligonucleotide
  Sense strand starting at position 3615 of SEQ ID NO: 1245007
cgucucuucccagucgauu

SEQ ID NO: 1529091 - RNA, 19 nt, Artificial Sequence
  Description of Artificial Sequence: Synthetic oligonucleotide
  Antisense strand to SEQ ID NO: 1529090
aaucgacugggaagagacg

SEQ ID NO: 1529092 - RNA, 19 nt, Artificial Sequence
  Description of Artificial Sequence: Synthetic oligonucleotide
  Sense strand starting at position 3750 of SEQ ID NO: 1245007
ggcggauuacuugaggaua

SEQ ID NO: 1529093 - RNA, 19 nt, Artificial Sequence
  Description of Artificial Sequence: Synthetic oligonucleotide
  Antisense strand to SEQ ID NO: 1529092
uauccucaaguaauccgcc

SEQ ID NO: 1529094 - RNA, 19 nt, Artificial Sequence
  Description of Artificial Sequence: Synthetic oligonucleotide
  Sense strand starting at position 32 of SEQ ID NO: 1245008
ugucuuguccaccacuuua

SEQ ID NO: 1529095 - RNA, 19 nt, Artificial Sequence
  Description of Artificial Sequence: Synthetic oligonucleotide
  Antisense strand to SEQ ID NO: 1529094
uaaagugguggacaagaca

SEQ ID NO: 1529096 - RNA, 19 nt, Artificial Sequence
  Description of Artificial Sequence: Synthetic oligonucleotide
  Sense strand starting at position 70 of SEQ ID NO: 1245008
auauaucaguagucaauca

SEQ ID NO: 1529097 - RNA, 19 nt, Artificial Sequence
  Description of Artificial Sequence: Synthetic oligonucleotide
  Antisense strand to SEQ ID NO: 1529096
ugauugacuacugauauau

SEQ ID NO: 1529098 - RNA, 19 nt, Artificial Sequence
  Description of Artificial Sequence: Synthetic oligonucleotide
  Sense strand starting at position 180 of SEQ ID NO: 1245008
uugauaucagccugcccaa

SEQ ID NO: 1529099 - RNA, 19 nt, Artificial Sequence
  Description of Artificial Sequence: Synthetic oligonucleotide
  Antisense strand to SEQ ID NO: 1529098
uugggcaggcugauaucaa

SEQ ID NO: 1529100 - RNA, 19 nt, Artificial Sequence
  Description of Artificial Sequence: Synthetic oligonucleotide
  Sense strand starting at position 522 of SEQ ID NO: 1245008
uguggaaacucgucuugaa

SEQ ID NO: 1529101 - RNA, 19 nt, Artificial Sequence
  Description of Artificial Sequence: Synthetic oligonucleotide
  Antisense strand to SEQ ID NO: 1529100
uucaagacgaguuuccaca

SEQ ID NO: 1529102 - RNA, 19 nt, Artificial Sequence
  Description of Artificial Sequence: Synthetic oligonucleotide
  Sense strand starting at position 548 of SEQ ID NO: 1245008
cccguuugugaacaggaaa

SEQ ID NO: 1529103 - RNA, 19 nt, Artificial Sequence
  Description of Artificial Sequence: Synthetic oligonucleotide
  Antisense strand to SEQ ID NO: 1529102
uuuccuguucacaaacggg

SEQ ID NO: 1529104 - RNA, 19 nt, Artificial Sequence
  Description of Artificial Sequence: Synthetic oligonucleotide
  Sense strand starting at position 599 of SEQ ID NO: 1245008
ggacuuaaaugugcagcau

SEQ ID NO: 1529105 - RNA, 19 nt, Artificial Sequence
  Description of Artificial Sequence: Synthetic oligonucleotide
  Antisense strand to SEQ ID NO: 1529104
augcugcacauuuaagucc

SEQ ID NO: 1529106 - RNA, 19 nt, Artificial Sequence
  Description of Artificial Sequence: Synthetic oligonucleotide
  Sense strand starting at position 600 of SEQ ID NO: 1245008
gacuuaaaugugcagcauu

SEQ ID NO: 1529107 - RNA, 19 nt, Artificial Sequence
  Description of Artificial Sequence: Synthetic oligonucleotide
  Antisense strand to SEQ ID NO: 1529106
aaugcugcacauuuaaguc

SEQ ID NO: 1529108 - RNA, 19 nt, Artificial Sequence
  Description of Artificial Sequence: Synthetic oligonucleotide
  Sense strand starting at position 603 of SEQ ID NO: 1245008
uuaaaugugcagcauugau

SEQ ID NO: 1529109 - RNA, 19 nt, Artificial Sequence
  Description of Artificial Sequence: Synthetic oligonucleotide
  Antisense strand to SEQ ID NO: 1529108
aucaaugcugcacauuuaa

SEQ ID NO: 1529110 - RNA, 19 nt, Artificial Sequence
  Description of Artificial Sequence: Synthetic oligonucleotide
  Sense strand starting at position 944 of SEQ ID NO: 1245008
gggcaucccucuccuagaa

SEQ ID NO: 1529111 - RNA, 19 nt, Artificial Sequence
  Description of Artificial Sequence: Synthetic oligonucleotide
  Antisense strand to SEQ ID NO: 1529110
uucuaggagagggaugccc

SEQ ID NO: 1529112 - RNA, 19 nt, Artificial Sequence
  Description of Artificial Sequence: Synthetic oligonucleotide
  Sense strand starting at position 1013 of SEQ ID NO: 1245008
cguuguuauccuuaccacu

SEQ ID NO: 1529113 - RNA, 19 nt, Artificial Sequence
  Description of Artificial Sequence: Synthetic oligonucleotide
  Antisense strand to SEQ ID NO: 1529112
agugguaaggauaacaacg

SEQ ID NO: 1529114 - RNA, 19 nt, Artificial Sequence
  Description of Artificial Sequence: Synthetic oligonucleotide
  Sense strand starting at position 2050 of SEQ ID NO: 1245008
guggcugcugggaguugua

SEQ ID NO: 1529115 - RNA, 19 nt, Artificial Sequence
  Description of Artificial Sequence: Synthetic oligonucleotide
  Antisense strand to SEQ ID NO: 1529114
uacaacucccagcagccac

SEQ ID NO: 1529116 - RNA, 19 nt, Artificial Sequence
  Description of Artificial Sequence: Synthetic oligonucleotide
  Sense strand starting at position 2077 of SEQ ID NO: 1245008
gcuucuaucuuggcgagaa

SEQ ID NO: 1529117 - RNA, 19 nt, Artificial Sequence
  Description of Artificial Sequence: Synthetic oligonucleotide
  Antisense strand to SEQ ID NO: 1529116
uucucgccaagauagaagc

SEQ ID NO: 1529118 - RNA, 19 nt, Artificial Sequence
  Description of Artificial Sequence: Synthetic oligonucleotide
  Sense strand starting at position 2265 of SEQ ID NO: 1245008
gcuacccagcacugauaua

SEQ ID NO: 1529119 - RNA, 19 nt, Artificial Sequence
  Description of Artificial Sequence: Synthetic oligonucleotide
  Antisense strand to SEQ ID NO: 1529118
uauaucagugcuggguagc

SEQ ID NO: 1529120 - RNA, 19 nt, Artificial Sequence
  Description of Artificial Sequence: Synthetic oligonucleotide
  Sense strand starting at position 2379 of SEQ ID NO: 1245008
aucuuaucagagugauaag

SEQ ID NO: 1529121 - RNA, 19 nt, Artificial Sequence
  Description of Artificial Sequence: Synthetic oligonucleotide
  Antisense strand to SEQ ID NO: 1529120
cuuaucacucugauaagau

SEQ ID NO: 1529122 - RNA, 19 nt, Artificial Sequence
  Description of Artificial Sequence: Synthetic oligonucleotide
  Sense strand starting at position 2389 of SEQ ID NO: 1245008
agugauaaggguugugaag

SEQ ID NO: 1529123 - RNA, 19 nt, Artificial Sequence
  Description of Artificial Sequence: Synthetic oligonucleotide
  Antisense strand to SEQ ID NO: 1529122
cuucacaacccuuaucacu

SEQ ID NO: 1529124 - RNA, 19 nt, Artificial Sequence
  Description of Artificial Sequence: Synthetic oligonucleotide
  Sense strand starting at position 2395 of SEQ ID NO: 1245008
aaggguugugaaggagauu

SEQ ID NO: 1529125 - RNA, 19 nt, Artificial Sequence
  Description of Artificial Sequence: Synthetic oligonucleotide
  Antisense strand to SEQ ID NO: 1529124
aaucuccuucacaacccuu

SEQ ID NO: 1529126 - RNA, 19 nt, Artificial Sequence
  Description of Artificial Sequence: Synthetic oligonucleotide
  Sense strand starting at position 2420 of SEQ ID NO: 1245008
gauggugugauauaaagua

SEQ ID NO: 1529127 - RNA, 19 nt, Artificial Sequence
  Description of Artificial Sequence: Synthetic oligonucleotide
  Antisense strand to SEQ ID NO: 1529126
uacuuuauaucacaccauc

SEQ ID NO: 1529128 - RNA, 19 nt, Artificial Sequence
  Description of Artificial Sequence: Synthetic oligonucleotide
  Sense strand starting at position 2449 of SEQ ID NO: 1245008
aacguuagggugugauauu

SEQ ID NO: 1529129 - RNA, 19 nt, Artificial Sequence
  Description of Artificial Sequence: Synthetic oligonucleotide
  Antisense strand to SEQ ID NO: 1529128
aauaucacacccuaacguu

SEQ ID NO: 1529130 - RNA, 19 nt, Artificial Sequence
  Description of Artificial Sequence: Synthetic oligonucleotide
  Sense strand starting at position 2495 of SEQ ID NO: 1245008
uuuaacugaugagaagaaa

SEQ ID NO: 1529131 - RNA, 19 nt, Artificial Sequence
  Description of Artificial Sequence: Synthetic oligonucleotide
  Antisense strand to SEQ ID NO: 1529130
uuucuucucaucaguuaaa

SEQ ID NO: 1529132 - RNA, 19 nt, Artificial Sequence
  Description of Artificial Sequence: Synthetic oligonucleotide
  Sense strand starting at position 2615 of SEQ ID NO: 1245008
acagcucuggcuugcagaa

SEQ ID NO: 1529133 - RNA, 19 nt, Artificial Sequence
  Description of Artificial Sequence: Synthetic oligonucleotide
  Antisense strand to SEQ ID NO: 1529132
uucugcaagccagagcugu

SEQ ID NO: 1529134 - RNA, 19 nt, Artificial Sequence
  Description of Artificial Sequence: Synthetic oligonucleotide
  Sense strand starting at position 2675 of SEQ ID NO: 1245008
cgagaauccugacucugca

SEQ ID NO: 1529135 - RNA, 19 nt, Artificial Sequence
  Description of Artificial Sequence: Synthetic oligonucleotide
  Antisense strand to SEQ ID NO: 1529134
ugcagagucaggauucucg

SEQ ID NO: 1529136 - RNA, 19 nt, Artificial Sequence
  Description of Artificial Sequence: Synthetic oligonucleotide
  Sense strand starting at position 2735 of SEQ ID NO: 1245008
cggauuacuugcccuuacu

SEQ ID NO: 1529137 - RNA, 19 nt, Artificial Sequence
  Description of Artificial Sequence: Synthetic oligonucleotide
  Antisense strand to SEQ ID NO: 1529136
aguaagggcaaguaauccg

SEQ ID NO: 1529138 - RNA, 19 nt, Artificial Sequence
  Description of Artificial Sequence: Synthetic oligonucleotide
  Sense strand starting at position 2972 of SEQ ID NO: 1245008
ggguaagcuccugacugaa

SEQ ID NO: 1529139 - RNA, 19 nt, Artificial Sequence
  Description of Artificial Sequence: Synthetic oligonucleotide
  Antisense strand to SEQ ID NO: 1529138
uucagucaggagcuuaccc

SEQ ID NO: 1529140 - RNA, 19 nt, Artificial Sequence
  Description of Artificial Sequence: Synthetic oligonucleotide
  Sense strand starting at position 2974 of SEQ ID NO: 1245008
guaagcuccugacugaacu

SEQ ID NO: 1529141 - RNA, 19 nt, Artificial Sequence
  Description of Artificial Sequence: Synthetic oligonucleotide
  Antisense strand to SEQ ID NO: 1529140
aguucagucaggagcuuac

SEQ ID NO: 1529142 - RNA, 19 nt, Artificial Sequence
  Description of Artificial Sequence: Synthetic oligonucleotide
  Sense strand starting at position 2991 of SEQ ID NO: 1245008
cuugaugaguccucucuga

SEQ ID NO: 1529143 - RNA, 19 nt, Artificial Sequence
  Description of Artificial Sequence: Synthetic oligonucleotide
  Antisense strand to SEQ ID NO: 1529142
ucagagaggacucaucaag

SEQ ID NO: 1529144 - RNA, 19 nt, Artificial Sequence
  Description of Artificial Sequence: Synthetic oligonucleotide
  Sense strand starting at position 2995 of SEQ ID NO: 1245008
augaguccucucugaguca

SEQ ID NO: 1529145 - RNA, 19 nt, Artificial Sequence
  Description of Artificial Sequence: Synthetic oligonucleotide
  Antisense strand to SEQ ID NO: 1529144
ugacucagagaggacucau

SEQ ID NO: 1529146 - RNA, 19 nt, Artificial Sequence
  Description of Artificial Sequence: Synthetic oligonucleotide
  Sense strand starting at position 3109 of SEQ ID NO: 1245008
gaagcuuggcuagagggau

SEQ ID NO: 1529147 - RNA, 19 nt, Artificial Sequence
  Description of Artificial Sequence: Synthetic oligonucleotide
  Antisense strand to SEQ ID NO: 1529146
aucccucuagccaagcuuc

SEQ ID NO: 1529148 - RNA, 19 nt, Artificial Sequence
  Description of Artificial Sequence: Synthetic oligonucleotide
  Sense strand starting at position 3121 of SEQ ID NO: 1245008
gagggaucaucauaggagu

SEQ ID NO: 1529149 - RNA, 19 nt, Artificial Sequence
  Description of Artificial Sequence: Synthetic oligonucleotide
  Antisense strand to SEQ ID NO: 1529148
acuccuaugaugaucccuc

SEQ ID NO: 1529150 - RNA, 19 nt, Artificial Sequence
  Description of Artificial Sequence: Synthetic oligonucleotide
  Sense strand starting at position 3149 of SEQ ID NO: 1245008
gggagaccuggguguagau

SEQ ID NO: 1529151 - RNA, 19 nt, Artificial Sequence
  Description of Artificial Sequence: Synthetic oligonucleotide
  Antisense strand to SEQ ID NO: 1529150
aucuacacccaggucuccc

SEQ ID NO: 1529152 - RNA, 19 nt, Artificial Sequence
  Description of Artificial Sequence: Synthetic oligonucleotide
  Sense strand starting at position 3318 of SEQ ID NO: 1245008
agcauugaggucugagacu

SEQ ID NO: 1529153 - RNA, 19 nt, Artificial Sequence
  Description of Artificial Sequence: Synthetic oligonucleotide
  Antisense strand to SEQ ID NO: 1529152
agucucagaccucaaugcu

SEQ ID NO: 1529154 - RNA, 19 nt, Artificial Sequence
  Description of Artificial Sequence: Synthetic oligonucleotide
  Sense strand starting at position 3345 of SEQ ID NO: 1245008
ucgaaacauugagaacuca

SEQ ID NO: 1529155 - RNA, 19 nt, Artificial Sequence
  Description of Artificial Sequence: Synthetic oligonucleotide
  Antisense strand to SEQ ID NO: 1529154
ugaguucucaauguuucga

SEQ ID NO: 1529156 - RNA, 19 nt, Artificial Sequence
  Description of Artificial Sequence: Synthetic oligonucleotide
  Sense strand starting at position 3355 of SEQ ID NO: 1245008
gagaacucauagcuguaua

SEQ ID NO: 1529157 - RNA, 19 nt, Artificial Sequence
  Description of Artificial Sequence: Synthetic oligonucleotide
  Antisense strand to SEQ ID NO: 1529156
uauacagcuaugaguucuc

SEQ ID NO: 1529158 - RNA, 19 nt, Artificial Sequence
  Description of Artificial Sequence: Synthetic oligonucleotide
  Sense strand starting at position 3547 of SEQ ID NO: 1245008
aaggcugucagucguggaa

SEQ ID NO: 1529159 - RNA, 19 nt, Artificial Sequence
  Description of Artificial Sequence: Synthetic oligonucleotide
  Antisense strand to SEQ ID NO: 1529158
uuccacgacugacagccuu

SEQ ID NO: 1529160 - RNA, 19 nt, Artificial Sequence
  Description of Artificial Sequence: Synthetic oligonucleotide
  Sense strand starting at position 3551 of SEQ ID NO: 1245008
cugucagucguggaaguga

SEQ ID NO: 1529161 - RNA, 19 nt, Artificial Sequence
  Description of Artificial Sequence: Synthetic oligonucleotide
  Antisense strand to SEQ ID NO: 1529160
ucacuuccacgacugacag

SEQ ID NO: 1529162 - RNA, 19 nt, Artificial Sequence
  Description of Artificial Sequence: Synthetic oligonucleotide
  Sense strand starting at position 3562 of SEQ ID NO: 1245008
ggaagugagaagugcuaaa

SEQ ID NO: 1529163 - RNA, 19 nt, Artificial Sequence
  Description of Artificial Sequence: Synthetic oligonucleotide
  Antisense strand to SEQ ID NO: 1529162
uuuagcacuucucacuucc

SEQ ID NO: 1529164 - RNA, 19 nt, Artificial Sequence
  Description of Artificial Sequence: Synthetic oligonucleotide
  Sense strand starting at position 3641 of SEQ ID NO: 1245008
guuauuguuuggcuccaca

SEQ ID NO: 1529165 - RNA, 19 nt, Artificial Sequence
  Description of Artificial Sequence: Synthetic oligonucleotide
  Antisense strand to SEQ ID NO: 1529164
uguggagccaaacaauaac

SEQ ID NO: 1529166 - RNA, 19 nt, Artificial Sequence
  Description of Artificial Sequence: Synthetic oligonucleotide
  Sense strand starting at position 3703 of SEQ ID NO: 1245008
gccggagcagcucacuauu

SEQ ID NO: 1529167 - RNA, 19 nt, Artificial Sequence
  Description of Artificial Sequence: Synthetic oligonucleotide
  Antisense strand to SEQ ID NO: 1529166
aauagugagcugcuccggc

SEQ ID NO: 1529168 - RNA, 19 nt, Artificial Sequence
  Description of Artificial Sequence: Synthetic oligonucleotide
  Sense strand starting at position 3796 of SEQ ID NO: 1245008
gcuauucuccgccugcauu

SEQ ID NO: 1529169 - RNA, 19 nt, Artificial Sequence
  Description of Artificial Sequence: Synthetic oligonucleotide
  Antisense strand to SEQ ID NO: 1529168
aaugcaggcggagaauagc

SEQ ID NO: 1529170 - RNA, 19 nt, Artificial Sequence
  Description of Artificial Sequence: Synthetic oligonucleotide
  Sense strand starting at position 3833 of SEQ ID NO: 1245008
aguuauggccuuugcaaag

SEQ ID NO: 1529171 - RNA, 19 nt, Artificial Sequence
  Description of Artificial Sequence: Synthetic oligonucleotide
  Antisense strand to SEQ ID NO: 1529170
cuuugcaaaggccauaacu

SEQ ID NO: 1529172 - RNA, 19 nt, Artificial Sequence
  Description of Artificial Sequence: Synthetic oligonucleotide
  Sense strand starting at position 3966 of SEQ ID NO: 1245008
gggaaagaagugugcagaa

SEQ ID NO: 1529173 - RNA, 19 nt, Artificial Sequence
  Description of Artificial Sequence: Synthetic oligonucleotide
  Antisense strand to SEQ ID NO: 1529172
uucugcacacuucuuuccc

SEQ ID NO: 1529174 - RNA, 19 nt, Artificial Sequence
  Description of Artificial Sequence: Synthetic oligonucleotide
  Sense strand starting at position 276 of SEQ ID NO: 1245009
gguuuaucaggaugaagua

SEQ ID NO: 1529175 - RNA, 19 nt, Artificial Sequence
  Description of Artificial Sequence: Synthetic oligonucleotide
  Antisense strand to SEQ ID NO: 1529174
uacuucauccugauaaacc

SEQ ID NO: 1529176 - RNA, 19 nt, Artificial Sequence
  Description of Artificial Sequence: Synthetic oligonucleotide
  Sense strand starting at position 316 of SEQ ID NO: 1245009
gcagaucacucgucuauaa

SEQ ID NO: 1529177 - RNA, 19 nt, Artificial Sequence
  Description of Artificial Sequence: Synthetic oligonucleotide
  Antisense strand to SEQ ID NO: 1529176
uuauagacgagugaucugc

SEQ ID NO: 1529178 - RNA, 19 nt, Artificial Sequence
  Description of Artificial Sequence: Synthetic oligonucleotide
  Sense strand starting at position 318 of SEQ ID NO: 1245009
agaucacucgucuauaaca

SEQ ID NO: 1529179 - RNA, 19 nt, Artificial Sequence
  Description of Artificial Sequence: Synthetic oligonucleotide
  Antisense strand to SEQ ID NO: 1529178
uguuauagacgagugaucu

SEQ ID NO: 1529180 - RNA, 19 nt, Artificial Sequence
  Description of Artificial Sequence: Synthetic oligonucleotide
  Sense strand starting at position 386 of SEQ ID NO: 1245009
uugaguucuuugucccacu

SEQ ID NO: 1529181 - RNA, 19 nt, Artificial Sequence
  Description of Artificial Sequence: Synthetic oligonucleotide
  Antisense strand to SEQ ID NO: 1529180
agugggacaaagaacucaa

SEQ ID NO: 1529182 - RNA, 19 nt, Artificial Sequence
  Description of Artificial Sequence: Synthetic oligonucleotide
  Sense strand starting at position 387 of SEQ ID NO: 1245009
ugaguucuuugucccacuu

SEQ ID NO: 1529183 - RNA, 19 nt, Artificial Sequence
  Description of Artificial Sequence: Synthetic oligonucleotide
  Antisense strand to SEQ ID NO: 1529182
aagugggacaaagaacuca

SEQ ID NO: 1529184 - RNA, 19 nt, Artificial Sequence
  Description of Artificial Sequence: Synthetic oligonucleotide
  Sense strand starting at position 399 of SEQ ID NO: 1245009
cccacuucgcgacauacuu

SEQ ID NO: 1529185 - RNA, 19 nt, Artificial Sequence
  Description of Artificial Sequence: Synthetic oligonucleotide
  Antisense strand to SEQ ID NO: 1529184
aaguaugucgcgaaguggg

SEQ ID NO: 1529186 - RNA, 19 nt, Artificial Sequence
  Description of Artificial Sequence: Synthetic oligonucleotide
  Sense strand starting at position 452 of SEQ ID NO: 1245009
acacaaauucuguguucuu

SEQ ID NO: 1529187 - RNA, 19 nt, Artificial Sequence
  Description of Artificial Sequence: Synthetic oligonucleotide
  Antisense strand to SEQ ID NO: 1529186
aagaacacagaauuugugu

SEQ ID NO: 1529188 - RNA, 19 nt, Artificial Sequence
  Description of Artificial Sequence: Synthetic oligonucleotide
  Sense strand starting at position 493 of SEQ ID NO: 1245009
cugugugaacucugcuaca

SEQ ID NO: 1529189 - RNA, 19 nt, Artificial Sequence
  Description of Artificial Sequence: Synthetic oligonucleotide
  Antisense strand to SEQ ID NO: 1529188
uguagcagaguucacacag

SEQ ID NO: 1529190 - RNA, 19 nt, Artificial Sequence
  Description of Artificial Sequence: Synthetic oligonucleotide
  Sense strand starting at position 530 of SEQ ID NO: 1245009
cuguguuuguaucuuuaaa

SEQ ID NO: 1529191 - RNA, 19 nt, Artificial Sequence
  Description of Artificial Sequence: Synthetic oligonucleotide
  Antisense strand to SEQ ID NO: 1529190
uuuaaagauacaaacacag

SEQ ID NO: 1529192 - RNA, 19 nt, Artificial Sequence
  Description of Artificial Sequence: Synthetic oligonucleotide
  Sense strand starting at position 566 of SEQ ID NO: 1245009
ggguuaaagucccuuccua

SEQ ID NO: 1529193 - RNA, 19 nt, Artificial Sequence
  Description of Artificial Sequence: Synthetic oligonucleotide
  Antisense strand to SEQ ID NO: 1529192
uaggaagggacuuuaaccc

SEQ ID NO: 1529194 - RNA, 19 nt, Artificial Sequence
  Description of Artificial Sequence: Synthetic oligonucleotide
  Sense strand starting at position 807 of SEQ ID NO: 1245009
acaguaagaucaguguuug

SEQ ID NO: 1529195 - RNA, 19 nt, Artificial Sequence
  Description of Artificial Sequence: Synthetic oligonucleotide
  Antisense strand to SEQ ID NO: 1529194
caaacacugaucuuacugu

SEQ ID NO: 1529196 - RNA, 19 nt, Artificial Sequence
  Description of Artificial Sequence: Synthetic oligonucleotide
  Sense strand starting at position 811 of SEQ ID NO: 1245009
uaagaucaguguuugcuaa

SEQ ID NO: 1529197 - RNA, 19 nt, Artificial Sequence
  Description of Artificial Sequence: Synthetic oligonucleotide
  Antisense strand to SEQ ID NO: 1529196
uuagcaaacacugaucuua

SEQ ID NO: 1529198 - RNA, 19 nt, Artificial Sequence
  Description of Artificial Sequence: Synthetic oligonucleotide
  Sense strand starting at position 813 of SEQ ID NO: 1245009
agaucaguguuugcuaagu

SEQ ID NO: 1529199 - RNA, 19 nt, Artificial Sequence
  Description of Artificial Sequence: Synthetic oligonucleotide
  Antisense strand to SEQ ID NO: 1529198
acuuagcaaacacugaucu

SEQ ID NO: 1529200 - RNA, 19 nt, Artificial Sequence
  Description of Artificial Sequence: Synthetic oligonucleotide
  Sense strand starting at position 829 of SEQ ID NO: 1245009
aguguuaucagccaaugua

SEQ ID NO: 1529201 - RNA, 19 nt, Artificial Sequence
  Description of Artificial Sequence: Synthetic oligonucleotide
  Antisense strand to SEQ ID NO: 1529200
uacauuggcugauaacacu

SEQ ID NO: 1529202 - RNA, 19 nt, Artificial Sequence
  Description of Artificial Sequence: Synthetic oligonucleotide
  Sense strand starting at position 1085 of SEQ ID NO: 1245009
ucccuuaaguguuugaaag

SEQ ID NO: 1529203 - RNA, 19 nt, Artificial Sequence
  Description of Artificial Sequence: Synthetic oligonucleotide
  Antisense strand to SEQ ID NO: 1529202
cuuucaaacacuuaaggga

SEQ ID NO: 1529204 - RNA, 19 nt, Artificial Sequence
  Description of Artificial Sequence: Synthetic oligonucleotide
  Sense strand starting at position 1086 of SEQ ID NO: 1245009
cccuuaaguguuugaaaga

SEQ ID NO: 1529205 - RNA, 19 nt, Artificial Sequence
  Description of Artificial Sequence: Synthetic oligonucleotide
  Antisense strand to SEQ ID NO: 1529204
ucuuucaaacacuuaaggg

SEQ ID NO: 1529206 - RNA, 19 nt, Artificial Sequence
  Description of Artificial Sequence: Synthetic oligonucleotide
  Sense strand starting at position 1209 of SEQ ID NO: 1245009
auuucuaucuaagaguggu

SEQ ID NO: 1529207 - RNA, 19 nt, Artificial Sequence
  Description of Artificial Sequence: Synthetic oligonucleotide
  Antisense strand to SEQ ID NO: 1529206
accacucuuagauagaaau

SEQ ID NO: 1529208 - RNA, 19 nt, Artificial Sequence
  Description of Artificial Sequence: Synthetic oligonucleotide
  Sense strand starting at position 1334 of SEQ ID NO: 1245009
acagucaugcccugagcca

SEQ ID NO: 1529209 - RNA, 19 nt, Artificial Sequence
  Description of Artificial Sequence: Synthetic oligonucleotide
  Antisense strand to SEQ ID NO: 1529208
uggcucagggcaugacugu

SEQ ID NO: 1529210 - RNA, 19 nt, Artificial Sequence
  Description of Artificial Sequence: Synthetic oligonucleotide
  Sense strand starting at position 1335 of SEQ ID NO: 1245009
cagucaugcccugagccaa

SEQ ID NO: 1529211 - RNA, 19 nt, Artificial Sequence
  Description of Artificial Sequence: Synthetic oligonucleotide
  Antisense strand to SEQ ID NO: 1529210
uuggcucagggcaugacug

SEQ ID NO: 1529212 - RNA, 19 nt, Artificial Sequence
  Description of Artificial Sequence: Synthetic oligonucleotide
  Sense strand starting at position 1562 of SEQ ID NO: 1245009
ggagucgcuuccucccaaa

SEQ ID NO: 1529213 - RNA, 19 nt, Artificial Sequence
  Description of Artificial Sequence: Synthetic oligonucleotide
  Antisense strand to SEQ ID NO: 1529212
uuugggaggaagcgacucc

SEQ ID NO: 1529214 - RNA, 19 nt, Artificial Sequence
  Description of Artificial Sequence: Synthetic oligonucleotide
  Sense strand starting at position 1991 of SEQ ID NO: 1245009
cggagauaucugggcggca

SEQ ID NO: 1529215 - RNA, 19 nt, Artificial Sequence
  Description of Artificial Sequence: Synthetic oligonucleotide
  Antisense strand to SEQ ID NO: 1529214
ugccgcccagauaucuccg

SEQ ID NO: 1529216 - RNA, 19 nt, Artificial Sequence
  Description of Artificial Sequence: Synthetic oligonucleotide
  Sense strand starting at position 2170 of SEQ ID NO: 1245009
gggccuggauggucuaaua

SEQ ID NO: 1529217 - RNA, 19 nt, Artificial Sequence
  Description of Artificial Sequence: Synthetic oligonucleotide
  Antisense strand to SEQ ID NO: 1529216
uauuagaccauccaggccc

SEQ ID NO: 1529218 - RNA, 19 nt, Artificial Sequence
  Description of Artificial Sequence: Synthetic oligonucleotide
  Sense strand starting at position 2177 of SEQ ID NO: 1245009
gauggucuaauauggaguu

SEQ ID NO: 1529219 - RNA, 19 nt, Artificial Sequence
  Description of Artificial Sequence: Synthetic oligonucleotide
  Antisense strand to SEQ ID NO: 1529218
aacuccauauuagaccauc

SEQ ID NO: 1529220 - RNA, 19 nt, Artificial Sequence
  Description of Artificial Sequence: Synthetic oligonucleotide
  Sense strand starting at position 2179 of SEQ ID NO: 1245009
uggucuaauauggaguuua

SEQ ID NO: 1529221 - RNA, 19 nt, Artificial Sequence
  Description of Artificial Sequence: Synthetic oligonucleotide
  Antisense strand to SEQ ID NO: 1529220
uaaacuccauauuagacca

SEQ ID NO: 1529222 - RNA, 19 nt, Artificial Sequence
  Description of Artificial Sequence: Synthetic oligonucleotide
  Sense strand starting at position 2247 of SEQ ID NO: 1245009
agccuccuagcuuaaagau

SEQ ID NO: 1529223 - RNA, 19 nt, Artificial Sequence
  Description of Artificial Sequence: Synthetic oligonucleotide
  Antisense strand to SEQ ID NO: 1529222
aucuuuaagcuaggaggcu

SEQ ID NO: 1529224 - RNA, 19 nt, Artificial Sequence
  Description of Artificial Sequence: Synthetic oligonucleotide
  Sense strand starting at position 2395 of SEQ ID NO: 1245009
aaauuaacaucguugugca

SEQ ID NO: 1529225 - RNA, 19 nt, Artificial Sequence
  Description of Artificial Sequence: Synthetic oligonucleotide
  Antisense strand to SEQ ID NO: 1529224
ugcacaacgauguuaauuu

SEQ ID NO: 1529226 - RNA, 19 nt, Artificial Sequence
  Description of Artificial Sequence: Synthetic oligonucleotide
  Sense strand starting at position 2575 of SEQ ID NO: 1245009
gauggaucccacuguguca

SEQ ID NO: 1529227 - RNA, 19 nt, Artificial Sequence
  Description of Artificial Sequence: Synthetic oligonucleotide
  Antisense strand to SEQ ID NO: 1529226
ugacacagugggauccauc

SEQ ID NO: 1529228 - RNA, 19 nt, Artificial Sequence
  Description of Artificial Sequence: Synthetic oligonucleotide
  Sense strand starting at position 2640 of SEQ ID NO: 1245009
gcaccuaguuguccacaca

SEQ ID NO: 1529229 - RNA, 19 nt, Artificial Sequence
  Description of Artificial Sequence: Synthetic oligonucleotide
  Antisense strand to SEQ ID NO: 1529228
uguguggacaacuaggugc

SEQ ID NO: 1529230 - RNA, 19 nt, Artificial Sequence
  Description of Artificial Sequence: Synthetic oligonucleotide
  Sense strand starting at position 2643 of SEQ ID NO: 1245009
ccuaguuguccacacauca

SEQ ID NO: 1529231 - RNA, 19 nt, Artificial Sequence
  Description of Artificial Sequence: Synthetic oligonucleotide
  Antisense strand to SEQ ID NO: 1529230
ugauguguggacaacuagg

SEQ ID NO: 1529232 - RNA, 19 nt, Artificial Sequence
  Description of Artificial Sequence: Synthetic oligonucleotide
  Sense strand starting at position 2663 of SEQ ID NO: 1245009
acugauaaaugugucagua

SEQ ID NO: 1529233 - RNA, 19 nt, Artificial Sequence
  Description of Artificial Sequence: Synthetic oligonucleotide
  Antisense strand to SEQ ID NO: 1529232
uacugacacauuuaucagu

SEQ ID NO: 1529234 - RNA, 19 nt, Artificial Sequence
  Description of Artificial Sequence: Synthetic oligonucleotide
  Sense strand starting at position 2698 of SEQ ID NO: 1245009
uugguucccggucacagau

SEQ ID NO: 1529235 - RNA, 19 nt, Artificial Sequence
  Description of Artificial Sequence: Synthetic oligonucleotide
  Antisense strand to SEQ ID NO: 1529234
aucugugaccgggaaccaa

SEQ ID NO: 1529236 - RNA, 19 nt, Artificial Sequence
  Description of Artificial Sequence: Synthetic oligonucleotide
  Sense strand starting at position 2742 of SEQ ID NO: 1245009
ucguguggacccuaaacau

SEQ ID NO: 1529237 - RNA, 19 nt, Artificial Sequence
  Description of Artificial Sequence: Synthetic oligonucleotide
  Antisense strand to SEQ ID NO: 1529236
auguuuaggguccacacga

SEQ ID NO: 1529238 - RNA, 19 nt, Artificial Sequence
  Description of Artificial Sequence: Synthetic oligonucleotide
  Sense strand starting at position 2774 of SEQ ID NO: 1245009
ggcguauaagacugggaau

SEQ ID NO: 1529239 - RNA, 19 nt, Artificial Sequence
  Description of Artificial Sequence: Synthetic oligonucleotide
  Antisense strand to SEQ ID NO: 1529238
auucccagucuuauacgcc

SEQ ID NO: 1529240 - RNA, 19 nt, Artificial Sequence
  Description of Artificial Sequence: Synthetic oligonucleotide
  Sense strand starting at position 2775 of SEQ ID NO: 1245009
gcguauaagacugggaauu

SEQ ID NO: 1529241 - RNA, 19 nt, Artificial Sequence
  Description of Artificial Sequence: Synthetic oligonucleotide
  Antisense strand to SEQ ID NO: 1529240
aauucccagucuuauacgc

SEQ ID NO: 1529242 - RNA, 19 nt, Artificial Sequence
  Description of Artificial Sequence: Synthetic oligonucleotide
  Sense strand starting at position 2776 of SEQ ID NO: 1245009
cguauaagacugggaauuc

SEQ ID NO: 1529243 - RNA, 19 nt, Artificial Sequence
  Description of Artificial Sequence: Synthetic oligonucleotide
  Antisense strand to SEQ ID NO: 1529242
gaauucccagucuuauacg

SEQ ID NO: 1529244 - RNA, 19 nt, Artificial Sequence
  Description of Artificial Sequence: Synthetic oligonucleotide
  Sense strand starting at position 2795 of SEQ ID NO: 1245009
aaauauguggcagauauuc

SEQ ID NO: 1529245 - RNA, 19 nt, Artificial Sequence
  Description of Artificial Sequence: Synthetic oligonucleotide
  Antisense strand to SEQ ID NO: 1529244
gaauaucugccacauauuu

SEQ ID NO: 1529246 - RNA, 19 nt, Artificial Sequence
  Description of Artificial Sequence: Synthetic oligonucleotide
  Sense strand starting at position 3216 of SEQ ID NO: 1245009
uuugcaugaguguauuaau

SEQ ID NO: 1529247 - RNA, 19 nt, Artificial Sequence
  Description of Artificial Sequence: Synthetic oligonucleotide
  Antisense strand to SEQ ID NO: 1529246
auuaauacacucaugcaaa

SEQ ID NO: 1529248 - RNA, 19 nt, Artificial Sequence
  Description of Artificial Sequence: Synthetic oligonucleotide
  Sense strand starting at position 3563 of SEQ ID NO: 1245009
uaggauuagaggcguuaag

SEQ ID NO: 1529249 - RNA, 19 nt, Artificial Sequence
  Description of Artificial Sequence: Synthetic oligonucleotide
  Antisense strand to SEQ ID NO: 1529248
cuuaacgccucuaauccua

SEQ ID NO: 1529250 - RNA, 19 nt, Artificial Sequence
  Description of Artificial Sequence: Synthetic oligonucleotide
  Sense strand starting at position 3682 of SEQ ID NO: 1245009
gcgggugucaggaguucga

SEQ ID NO: 1529251 - RNA, 19 nt, Artificial Sequence
  Description of Artificial Sequence: Synthetic oligonucleotide
  Antisense strand to SEQ ID NO: 1529250
ucgaacuccugacacccgc

SEQ ID NO: 1529252 - RNA, 19 nt, Artificial Sequence
  Description of Artificial Sequence: Synthetic oligonucleotide
  Sense strand starting at position 3949 of SEQ ID NO: 1245009
gaggacucacucuguauca

SEQ ID NO: 1529253 - RNA, 19 nt, Artificial Sequence
  Description of Artificial Sequence: Synthetic oligonucleotide
  Antisense strand to SEQ ID NO: 1529252
ugauacagagugaguccuc

SEQ ID NO: 1529254 - RNA, 19 nt, Artificial Sequence
  Description of Artificial Sequence: Synthetic oligonucleotide
  Sense strand starting at position 255 of SEQ ID NO: 1245010
gaaccagcucugugacuca

SEQ ID NO: 1529255 - RNA, 19 nt, Artificial Sequence
  Description of Artificial Sequence: Synthetic oligonucleotide
  Antisense strand to SEQ ID NO: 1529254
ugagucacagagcugguuc

SEQ ID NO: 1529256 - RNA, 19 nt, Artificial Sequence
  Description of Artificial Sequence: Synthetic oligonucleotide
  Sense strand starting at position 287 of SEQ ID NO: 1245010
uggccaaacugaucagguu

SEQ ID NO: 1529257 - RNA, 19 nt, Artificial Sequence
  Description of Artificial Sequence: Synthetic oligonucleotide
  Antisense strand to SEQ ID NO: 1529256
aaccugaucaguuuggcca

SEQ ID NO: 1529258 - RNA, 19 nt, Artificial Sequence
  Description of Artificial Sequence: Synthetic oligonucleotide
  Sense strand starting at position 349 of SEQ ID NO: 1245010
auccacuucugcucgguua

SEQ ID NO: 1529259 - RNA, 19 nt, Artificial Sequence
  Description of Artificial Sequence: Synthetic oligonucleotide
  Antisense strand to SEQ ID NO: 1529258
uaaccgagcagaaguggau

SEQ ID NO: 1529260 - RNA, 19 nt, Artificial Sequence
  Description of Artificial Sequence: Synthetic oligonucleotide
  Sense strand starting at position 352 of SEQ ID NO: 1245010
cacuucugcucgguuagga

SEQ ID NO: 1529261 - RNA, 19 nt, Artificial Sequence
  Description of Artificial Sequence: Synthetic oligonucleotide
  Antisense strand to SEQ ID NO: 1529260
uccuaaccgagcagaagug

SEQ ID NO: 1529262 - RNA, 19 nt, Artificial Sequence
  Description of Artificial Sequence: Synthetic oligonucleotide
  Sense strand starting at position 579 of SEQ ID NO: 1245010
agagccuucuggcggagaa

SEQ ID NO: 1529263 - RNA, 19 nt, Artificial Sequence
  Description of Artificial Sequence: Synthetic oligonucleotide
  Antisense strand to SEQ ID NO: 1529262
uucuccgccagaaggcucu

SEQ ID NO: 1529264 - RNA, 19 nt, Artificial Sequence
  Description of Artificial Sequence: Synthetic oligonucleotide
  Sense strand starting at position 850 of SEQ ID NO: 1245010
aggagugggugauugcaaa

SEQ ID NO: 1529265 - RNA, 19 nt, Artificial Sequence
  Description of Artificial Sequence: Synthetic oligonucleotide
  Antisense strand to SEQ ID NO: 1529264
uuugcaaucacccacuccu

SEQ ID NO: 1529266 - RNA, 19 nt, Artificial Sequence
  Description of Artificial Sequence: Synthetic oligonucleotide
  Sense strand starting at position 1044 of SEQ ID NO: 1245010
gagggaugcggguaucuca

SEQ ID NO: 1529267 - RNA, 19 nt, Artificial Sequence
  Description of Artificial Sequence: Synthetic oligonucleotide
  Antisense strand to SEQ ID NO: 1529266
ugagauacccgcaucccuc

SEQ ID NO: 1529268 - RNA, 19 nt, Artificial Sequence
  Description of Artificial Sequence: Synthetic oligonucleotide
  Sense strand starting at position 1051 of SEQ ID NO: 1245010
gcggguaucucauguuaga

SEQ ID NO: 1529269 - RNA, 19 nt, Artificial Sequence
  Description of Artificial Sequence: Synthetic oligonucleotide
  Antisense strand to SEQ ID NO: 1529268
ucuaacaugagauacccgc

SEQ ID NO: 1529270 - RNA, 19 nt, Artificial Sequence
  Description of Artificial Sequence: Synthetic oligonucleotide
  Sense strand starting at position 1153 of SEQ ID NO: 1245010
gggcuaugaggcuagaacu

SEQ ID NO: 1529271 - RNA, 19 nt, Artificial Sequence
  Description of Artificial Sequence: Synthetic oligonucleotide
  Antisense strand to SEQ ID NO: 1529270
aguucuagccucauagccc

SEQ ID NO: 1529272 - RNA, 19 nt, Artificial Sequence
  Description of Artificial Sequence: Synthetic oligonucleotide
  Sense strand starting at position 1263 of SEQ ID NO: 1245010
cgcacaaaugcucaggaaa

SEQ ID NO: 1529273 - RNA, 19 nt, Artificial Sequence
  Description of Artificial Sequence: Synthetic oligonucleotide
  Antisense strand to SEQ ID NO: 1529272
uuuccugagcauuugugcg

SEQ ID NO: 1529274 - RNA, 19 nt, Artificial Sequence
  Description of Artificial Sequence: Synthetic oligonucleotide
  Sense strand starting at position 1322 of SEQ ID NO: 1245010
guacguacgcuccugagua

SEQ ID NO: 1529275 - RNA, 19 nt, Artificial Sequence
  Description of Artificial Sequence: Synthetic oligonucleotide
  Antisense strand to SEQ ID NO: 1529274
uacucaggagcguacguac

SEQ ID NO: 1529276 - RNA, 19 nt, Artificial Sequence
  Description of Artificial Sequence: Synthetic oligonucleotide
  Sense strand starting at position 1372 of SEQ ID NO: 1245010
ucgugagucuccguccaca

SEQ ID NO: 1529277 - RNA, 19 nt, Artificial Sequence
  Description of Artificial Sequence: Synthetic oligonucleotide
  Antisense strand to SEQ ID NO: 1529276
uguggacggagacucacga

SEQ ID NO: 1529278 - RNA, 19 nt, Artificial Sequence
  Description of Artificial Sequence: Synthetic oligonucleotide
  Sense strand starting at position 1406 of SEQ ID NO: 1245010
agcucuacacuagguaauu

SEQ ID NO: 1529279 - RNA, 19 nt, Artificial Sequence
  Description of Artificial Sequence: Synthetic oligonucleotide
  Antisense strand to SEQ ID NO: 1529278
aauuaccuaguguagagcu

SEQ ID NO: 1529280 - RNA, 19 nt, Artificial Sequence
  Description of Artificial Sequence: Synthetic oligonucleotide
  Sense strand starting at position 1506 of SEQ ID NO: 1245010
ccggaagccucucuuggua

SEQ ID NO: 1529281 - RNA, 19 nt, Artificial Sequence
  Description of Artificial Sequence: Synthetic oligonucleotide
  Antisense strand to SEQ ID NO: 1529280
uaccaagagaggcuuccgg

SEQ ID NO: 1529282 - RNA, 19 nt, Artificial Sequence
  Description of Artificial Sequence: Synthetic oligonucleotide
  Sense strand starting at position 1536 of SEQ ID NO: 1245010
gggagcugcuucuggguaa

SEQ ID NO: 1529283 - RNA, 19 nt, Artificial Sequence
  Description of Artificial Sequence: Synthetic oligonucleotide
  Antisense strand to SEQ ID NO: 1529282
uuacccagaagcagcuccc

SEQ ID NO: 1529284 - RNA, 19 nt, Artificial Sequence
  Description of Artificial Sequence: Synthetic oligonucleotide
  Sense strand starting at position 1537 of SEQ ID NO: 1245010
ggagcugcuucuggguaaa

SEQ ID NO: 1529285 - RNA, 19 nt, Artificial Sequence
  Description of Artificial Sequence: Synthetic oligonucleotide
  Antisense strand to SEQ ID NO: 1529284
uuuacccagaagcagcucc

SEQ ID NO: 1529286 - RNA, 19 nt, Artificial Sequence
  Description of Artificial Sequence: Synthetic oligonucleotide
  Sense strand starting at position 1540 of SEQ ID NO: 1245010
gcugcuucuggguaaacgu

SEQ ID NO: 1529287 - RNA, 19 nt, Artificial Sequence
  Description of Artificial Sequence: Synthetic oligonucleotide
  Antisense strand to SEQ ID NO: 1529286
acguuuacccagaagcagc

SEQ ID NO: 1529288 - RNA, 19 nt, Artificial Sequence
  Description of Artificial Sequence: Synthetic oligonucleotide
  Sense strand starting at position 1881 of SEQ ID NO: 1245010
acuuguuugcccgcggcaa

SEQ ID NO: 1529289 - RNA, 19 nt, Artificial Sequence
  Description of Artificial Sequence: Synthetic oligonucleotide
  Antisense strand to SEQ ID NO: 1529288
uugccgcgggcaaacaagu

SEQ ID NO: 1529290 - RNA, 19 nt, Artificial Sequence
  Description of Artificial Sequence: Synthetic oligonucleotide
  Sense strand starting at position 3074 of SEQ ID NO: 1245010
ugacauaguugcccacaga

SEQ ID NO: 1529291 - RNA, 19 nt, Artificial Sequence
  Description of Artificial Sequence: Synthetic oligonucleotide
  Antisense strand to SEQ ID NO: 1529290
ucugugggcaacuauguca

SEQ ID NO: 1529292 - RNA, 19 nt, Artificial Sequence
  Description of Artificial Sequence: Synthetic oligonucleotide
  Sense strand starting at position 3075 of SEQ ID NO: 1245010
gacauaguugcccacagaa

SEQ ID NO: 1529293 - RNA, 19 nt, Artificial Sequence
  Description of Artificial Sequence: Synthetic oligonucleotide
  Antisense strand to SEQ ID NO: 1529292
uucugugggcaacuauguc

SEQ ID NO: 1529294 - RNA, 19 nt, Artificial Sequence
  Description of Artificial Sequence: Synthetic oligonucleotide
  Sense strand starting at position 3102 of SEQ ID NO: 1245010
acacacuggugucuacuaa

SEQ ID NO: 1529295 - RNA, 19 nt, Artificial Sequence
  Description of Artificial Sequence: Synthetic oligonucleotide
  Antisense strand to SEQ ID NO: 1529294
uuaguagacaccagugugu

SEQ ID NO: 1529296 - RNA, 19 nt, Artificial Sequence
  Description of Artificial Sequence: Synthetic oligonucleotide
  Sense strand starting at position 3106 of SEQ ID NO: 1245010
acuggugucuacuaacaga

SEQ ID NO: 1529297 - RNA, 19 nt, Artificial Sequence
  Description of Artificial Sequence: Synthetic oligonucleotide
  Antisense strand to SEQ ID NO: 1529296
ucuguuaguagacaccagu

SEQ ID NO: 1529298 - RNA, 19 nt, Artificial Sequence
  Description of Artificial Sequence: Synthetic oligonucleotide
  Sense strand starting at position 3669 of SEQ ID NO: 1245010
gcaguuugcauagcuaugu

SEQ ID NO: 1529299 - RNA, 19 nt, Artificial Sequence
  Description of Artificial Sequence: Synthetic oligonucleotide
  Antisense strand to SEQ ID NO: 1529298
acauagcuaugcaaacugc

SEQ ID NO: 1529300 - RNA, 19 nt, Artificial Sequence
  Description of Artificial Sequence: Synthetic oligonucleotide
  Sense strand starting at position 3677 of SEQ ID NO: 1245010
cauagcuaugucuggccaa

SEQ ID NO: 1529301 - RNA, 19 nt, Artificial Sequence
  Description of Artificial Sequence: Synthetic oligonucleotide
  Antisense strand to SEQ ID NO: 1529300
uuggccagacauagcuaug

SEQ ID NO: 1529302 - RNA, 19 nt, Artificial Sequence
  Description of Artificial Sequence: Synthetic oligonucleotide
  Sense strand starting at position 3734 of SEQ ID NO: 1245010
ggcagaaugcucugaaggu

SEQ ID NO: 1529303 - RNA, 19 nt, Artificial Sequence
  Description of Artificial Sequence: Synthetic oligonucleotide
  Antisense strand to SEQ ID NO: 1529302
accuucagagcauucugcc

SEQ ID NO: 1529304 - RNA, 19 nt, Artificial Sequence
  Description of Artificial Sequence: Synthetic oligonucleotide
  Sense strand starting at position 3735 of SEQ ID NO: 1245010
gcagaaugcucugaagguc

SEQ ID NO: 1529305 - RNA, 19 nt, Artificial Sequence
  Description of Artificial Sequence: Synthetic oligonucleotide
  Antisense strand to SEQ ID NO: 1529304
gaccuucagagcauucugc

SEQ ID NO: 1529306 - RNA, 19 nt, Artificial Sequence
  Description of Artificial Sequence: Synthetic oligonucleotide
  Sense strand starting at position 3812 of SEQ ID NO: 1245010
cgaauucugugcugccuca

SEQ ID NO: 1529307 - RNA, 19 nt, Artificial Sequence
  Description of Artificial Sequence: Synthetic oligonucleotide
  Antisense strand to SEQ ID NO: 1529306
ugaggcagcacagaauucg

SEQ ID NO: 1529308 - RNA, 19 nt, Artificial Sequence
  Description of Artificial Sequence: Synthetic oligonucleotide
  Sense strand starting at position 3816 of SEQ ID NO: 1245010
uucugugcugccucagagu

SEQ ID NO: 1529309 - RNA, 19 nt, Artificial Sequence
  Description of Artificial Sequence: Synthetic oligonucleotide
  Antisense strand to SEQ ID NO: 1529308
acucugaggcagcacagaa

SEQ ID NO: 1529310 - RNA, 19 nt, Artificial Sequence
  Description of Artificial Sequence: Synthetic oligonucleotide
  Sense strand starting at position 3870 of SEQ ID NO: 1245010
uccuuuacagaaugugaau

SEQ ID NO: 1529311 - RNA, 19 nt, Artificial Sequence
  Description of Artificial Sequence: Synthetic oligonucleotide
  Antisense strand to SEQ ID NO: 1529310
auucacauucuguaaagga

SEQ ID NO: 1529312 - RNA, 19 nt, Artificial Sequence
  Description of Artificial Sequence: Synthetic oligonucleotide
  Sense strand starting at position 3891 of SEQ ID NO: 1245010
gugugucguuacgauuuau

SEQ ID NO: 1529313 - RNA, 19 nt, Artificial Sequence
  Description of Artificial Sequence: Synthetic oligonucleotide
  Antisense strand to SEQ ID NO: 1529312
auaaaucguaacgacacac

SEQ ID NO: 1529314 - RNA, 19 nt, Artificial Sequence
  Description of Artificial Sequence: Synthetic oligonucleotide
  Sense strand starting at position 3932 of SEQ ID NO: 1245010
ucgcaaugcuguuugguuu

SEQ ID NO: 1529315 - RNA, 19 nt, Artificial Sequence
  Description of Artificial Sequence: Synthetic oligonucleotide
  Antisense strand to SEQ ID NO: 1529314
aaaccaaacagcauugcga

SEQ ID NO: 1529316 - RNA, 19 nt, Artificial Sequence
  Description of Artificial Sequence: Synthetic oligonucleotide
  Sense strand starting at position 3936 of SEQ ID NO: 1245010
aaugcuguuugguuugcaa

SEQ ID NO: 1529317 - RNA, 19 nt, Artificial Sequence
  Description of Artificial Sequence: Synthetic oligonucleotide
  Antisense strand to SEQ ID NO: 1529316
uugcaaaccaaacagcauu

SEQ ID NO: 1529318 - RNA, 19 nt, Artificial Sequence
  Description of Artificial Sequence: Synthetic oligonucleotide
  Sense strand starting at position 3938 of SEQ ID NO: 1245010
ugcuguuugguuugcaaag

SEQ ID NO: 1529319 - RNA, 19 nt, Artificial Sequence
  Description of Artificial Sequence: Synthetic oligonucleotide
  Antisense strand to SEQ ID NO: 1529318
cuuugcaaaccaaacagca

SEQ ID NO: 1529320 - RNA, 19 nt, Artificial Sequence
  Description of Artificial Sequence: Synthetic oligonucleotide
  Sense strand starting at position 125 of SEQ ID NO: 1245011
aaaugugagguuuauugua

SEQ ID NO: 1529321 - RNA, 19 nt, Artificial Sequence
  Description of Artificial Sequence: Synthetic oligonucleotide
  Antisense strand to SEQ ID NO: 1529320
uacaauaaaccucacauuu

SEQ ID NO: 1529322 - RNA, 19 nt, Artificial Sequence
  Description of Artificial Sequence: Synthetic oligonucleotide
  Sense strand starting at position 132 of SEQ ID NO: 1245011
agguuuauuguaggucaau

SEQ ID NO: 1529323 - RNA, 19 nt, Artificial Sequence
  Description of Artificial Sequence: Synthetic oligonucleotide
  Antisense strand to SEQ ID NO: 1529322
auugaccuacaauaaaccu

SEQ ID NO: 1529324 - RNA, 19 nt, Artificial Sequence
  Description of Artificial Sequence: Synthetic oligonucleotide
  Sense strand starting at position 133 of SEQ ID NO: 1245011
gguuuauuguaggucaauu

SEQ ID NO: 1529325 - RNA, 19 nt, Artificial Sequence
  Description of Artificial Sequence: Synthetic oligonucleotide
  Antisense strand to SEQ ID NO: 1529324
aauugaccuacaauaaacc

SEQ ID NO: 1529326 - RNA, 19 nt, Artificial Sequence
  Description of Artificial Sequence: Synthetic oligonucleotide
  Sense strand starting at position 241 of SEQ ID NO: 1245011
agugccaaauucucuugaa

SEQ ID NO: 1529327 - RNA, 19 nt, Artificial Sequence
  Description of Artificial Sequence: Synthetic oligonucleotide
  Antisense strand to SEQ ID NO: 1529326
uucaagagaauuuggcacu

SEQ ID NO: 1529328 - RNA, 19 nt, Artificial Sequence
  Description of Artificial Sequence: Synthetic oligonucleotide
  Sense strand starting at position 242 of SEQ ID NO: 1245011
gugccaaauucucuugaau

SEQ ID NO: 1529329 - RNA, 19 nt, Artificial Sequence
  Description of Artificial Sequence: Synthetic oligonucleotide
  Antisense strand to SEQ ID NO: 1529328
auucaagagaauuuggcac

SEQ ID NO: 1529330 - RNA, 19 nt, Artificial Sequence
  Description of Artificial Sequence: Synthetic oligonucleotide
  Sense strand starting at position 285 of SEQ ID NO: 1245011
cuguuugguccacaguguu

SEQ ID NO: 1529331 - RNA, 19 nt, Artificial Sequence
  Description of Artificial Sequence: Synthetic oligonucleotide
  Antisense strand to SEQ ID NO: 1529330
aacacuguggaccaaacag

SEQ ID NO: 1529332 - RNA, 19 nt, Artificial Sequence
  Description of Artificial Sequence: Synthetic oligonucleotide
  Sense strand starting at position 420 of SEQ ID NO: 1245011
cagagacuccgagguucuu

SEQ ID NO: 1529333 - RNA, 19 nt, Artificial Sequence
  Description of Artificial Sequence: Synthetic oligonucleotide
  Antisense strand to SEQ ID NO: 1529332
aagaaccucggagucucug

SEQ ID NO: 1529334 - RNA, 19 nt, Artificial Sequence
  Description of Artificial Sequence: Synthetic oligonucleotide
  Sense strand starting at position 955 of SEQ ID NO: 1245011
agaguuacaugcccauguu

SEQ ID NO: 1529335 - RNA, 19 nt, Artificial Sequence
  Description of Artificial Sequence: Synthetic oligonucleotide
  Antisense strand to SEQ ID NO: 1529334
aacaugggcauguaacucu

SEQ ID NO: 1529336 - RNA, 19 nt, Artificial Sequence
  Description of Artificial Sequence: Synthetic oligonucleotide
  Sense strand starting at position 1329 of SEQ ID NO: 1245011
gggugagaguaguccugga

SEQ ID NO: 1529337 - RNA, 19 nt, Artificial Sequence
  Description of Artificial Sequence: Synthetic oligonucleotide
  Antisense strand to SEQ ID NO: 1529336
uccaggacuacucucaccc

SEQ ID NO: 1529338 - RNA, 19 nt, Artificial Sequence
  Description of Artificial Sequence: Synthetic oligonucleotide
  Sense strand starting at position 1344 of SEQ ID NO: 1245011
uggagaaucuccgugggac

SEQ ID NO: 1529339 - RNA, 19 nt, Artificial Sequence
  Description of Artificial Sequence: Synthetic oligonucleotide
  Antisense strand to SEQ ID NO: 1529338
gucccacggagauucucca

SEQ ID NO: 1529340 - RNA, 19 nt, Artificial Sequence
  Description of Artificial Sequence: Synthetic oligonucleotide
  Sense strand starting at position 1345 of SEQ ID NO: 1245011
ggagaaucuccgugggaca

SEQ ID NO: 1529341 - RNA, 19 nt, Artificial Sequence
  Description of Artificial Sequence: Synthetic oligonucleotide
  Antisense strand to SEQ ID NO: 1529340
ugucccacggagauucucc

SEQ ID NO: 1529342 - RNA, 19 nt, Artificial Sequence
  Description of Artificial Sequence: Synthetic oligonucleotide
  Sense strand starting at position 1379 of SEQ ID NO: 1245011
gggugugaaggucauagua

SEQ ID NO: 1529343 - RNA, 19 nt, Artificial Sequence
  Description of Artificial Sequence: Synthetic oligonucleotide
  Antisense strand to SEQ ID NO: 1529342
uacuaugaccuucacaccc

SEQ ID NO: 1529344 - RNA, 19 nt, Artificial Sequence
  Description of Artificial Sequence: Synthetic oligonucleotide
  Sense strand starting at position 1421 of SEQ ID NO: 1245011
aggucucacaaguaugagu

SEQ ID NO: 1529345 - RNA, 19 nt, Artificial Sequence
  Description of Artificial Sequence: Synthetic oligonucleotide
  Antisense strand to SEQ ID NO: 1529344
acucauacuugugagaccu

SEQ ID NO: 1529346 - RNA, 19 nt, Artificial Sequence
  Description of Artificial Sequence: Synthetic oligonucleotide
  Sense strand starting at position 1461 of SEQ ID NO: 1245011
cgggcuauuuggcuucaga

SEQ ID NO: 1529347 - RNA, 19 nt, Artificial Sequence
  Description of Artificial Sequence: Synthetic oligonucleotide
  Antisense strand to SEQ ID NO: 1529346
ucugaagccaaauagcccg

SEQ ID NO: 1529348 - RNA, 19 nt, Artificial Sequence
  Description of Artificial Sequence: Synthetic oligonucleotide
  Sense strand starting at position 1475 of SEQ ID NO: 1245011
ucagaacugucccagaaag

SEQ ID NO: 1529349 - RNA, 19 nt, Artificial Sequence
  Description of Artificial Sequence: Synthetic oligonucleotide
  Antisense strand to SEQ ID NO: 1529348
cuuucugggacaguucuga

SEQ ID NO: 1529350 - RNA, 19 nt, Artificial Sequence
  Description of Artificial Sequence: Synthetic oligonucleotide
  Sense strand starting at position 1603 of SEQ ID NO: 1245011
gcugcuuguccuccuaagu

SEQ ID NO: 1529351 - RNA, 19 nt, Artificial Sequence
  Description of Artificial Sequence: Synthetic oligonucleotide
  Antisense strand to SEQ ID NO: 1529350
acuuaggaggacaagcagc

SEQ ID NO: 1529352 - RNA, 19 nt, Artificial Sequence
  Description of Artificial Sequence: Synthetic oligonucleotide
  Sense strand starting at position 1612 of SEQ ID NO: 1245011
ccuccuaaguguucuuaug

SEQ ID NO: 1529353 - RNA, 19 nt, Artificial Sequence
  Description of Artificial Sequence: Synthetic oligonucleotide
  Antisense strand to SEQ ID NO: 1529352
cauaagaacacuuaggagg

SEQ ID NO: 1529354 - RNA, 19 nt, Artificial Sequence
  Description of Artificial Sequence: Synthetic oligonucleotide
  Sense strand starting at position 1614 of SEQ ID NO: 1245011
uccuaaguguucuuaugca

SEQ ID NO: 1529355 - RNA, 19 nt, Artificial Sequence
  Description of Artificial Sequence: Synthetic oligonucleotide
  Antisense strand to SEQ ID NO: 1529354
ugcauaagaacacuuagga

SEQ ID NO: 1529356 - RNA, 19 nt, Artificial Sequence
  Description of Artificial Sequence: Synthetic oligonucleotide
  Sense strand starting at position 1618 of SEQ ID NO: 1245011
aaguguucuuaugcaggaa

SEQ ID NO: 1529357 - RNA, 19 nt, Artificial Sequence
  Description of Artificial Sequence: Synthetic oligonucleotide
  Antisense strand to SEQ ID NO: 1529356
uuccugcauaagaacacuu

SEQ ID NO: 1529358 - RNA, 19 nt, Artificial Sequence
  Description of Artificial Sequence: Synthetic oligonucleotide
  Sense strand starting at position 1621 of SEQ ID NO: 1245011
uguucuuaugcaggaacca

SEQ ID NO: 1529359 - RNA, 19 nt, Artificial Sequence
  Description of Artificial Sequence: Synthetic oligonucleotide
  Antisense strand to SEQ ID NO: 1529358
ugguuccugcauaagaaca

SEQ ID NO: 1529360 - RNA, 19 nt, Artificial Sequence
  Description of Artificial Sequence: Synthetic oligonucleotide
  Sense strand starting at position 1697 of SEQ ID NO: 1245011
gggucugccgcuggagaaa

SEQ ID NO: 1529361 - RNA, 19 nt, Artificial Sequence
  Description of Artificial Sequence: Synthetic oligonucleotide
  Antisense strand to SEQ ID NO: 1529360
uuucuccagcggcagaccc

SEQ ID NO: 1529362 - RNA, 19 nt, Artificial Sequence
  Description of Artificial Sequence: Synthetic oligonucleotide
  Sense strand starting at position 2183 of SEQ ID NO: 1245011
uugccauguugagcuugaa

SEQ ID NO: 1529363 - RNA, 19 nt, Artificial Sequence
  Description of Artificial Sequence: Synthetic oligonucleotide
  Antisense strand to SEQ ID NO: 1529362
uucaagcucaacauggcaa

SEQ ID NO: 1529364 - RNA, 19 nt, Artificial Sequence
  Description of Artificial Sequence: Synthetic oligonucleotide
  Sense strand starting at position 2196 of SEQ ID NO: 1245011
cuugaaugcuguucccuaa

SEQ ID NO: 1529365 - RNA, 19 nt, Artificial Sequence
  Description of Artificial Sequence: Synthetic oligonucleotide
  Antisense strand to SEQ ID NO: 1529364
uuagggaacagcauucaag

SEQ ID NO: 1529366 - RNA, 19 nt, Artificial Sequence
  Description of Artificial Sequence: Synthetic oligonucleotide
  Sense strand starting at position 2402 of SEQ ID NO: 1245011
caagcaggcccagagaauu

SEQ ID NO: 1529367 - RNA, 19 nt, Artificial Sequence
  Description of Artificial Sequence: Synthetic oligonucleotide
  Antisense strand to SEQ ID NO: 1529366
aauucucugggccugcuug

SEQ ID NO: 1529368 - RNA, 19 nt, Artificial Sequence
  Description of Artificial Sequence: Synthetic oligonucleotide
  Sense strand starting at position 2450 of SEQ ID NO: 1245011
cgccucucugaggaggaua

SEQ ID NO: 1529369 - RNA, 19 nt, Artificial Sequence
  Description of Artificial Sequence: Synthetic oligonucleotide
  Antisense strand to SEQ ID NO: 1529368
uauccuccucagagaggcg

SEQ ID NO: 1529370 - RNA, 19 nt, Artificial Sequence
  Description of Artificial Sequence: Synthetic oligonucleotide
  Sense strand starting at position 2458 of SEQ ID NO: 1245011
ugaggaggauaacaagauu

SEQ ID NO: 1529371 - RNA, 19 nt, Artificial Sequence
  Description of Artificial Sequence: Synthetic oligonucleotide
  Antisense strand to SEQ ID NO: 1529370
aaucuuguuauccuccuca

SEQ ID NO: 1529372 - RNA, 19 nt, Artificial Sequence
  Description of Artificial Sequence: Synthetic oligonucleotide
  Sense strand starting at position 2552 of SEQ ID NO: 1245011
ggugguacugaugaucaca

SEQ ID NO: 1529373 - RNA, 19 nt, Artificial Sequence
  Description of Artificial Sequence: Synthetic oligonucleotide
  Antisense strand to SEQ ID NO: 1529372
ugugaucaucaguaccacc

SEQ ID NO: 1529374 - RNA, 19 nt, Artificial Sequence
  Description of Artificial Sequence: Synthetic oligonucleotide
  Sense strand starting at position 2557 of SEQ ID NO: 1245011
uacugaugaucacagugau

SEQ ID NO: 1529375 - RNA, 19 nt, Artificial Sequence
  Description of Artificial Sequence: Synthetic oligonucleotide
  Antisense strand to SEQ ID NO: 1529374
aucacugugaucaucagua

SEQ ID NO: 1529376 - RNA, 19 nt, Artificial Sequence
  Description of Artificial Sequence: Synthetic oligonucleotide
  Sense strand starting at position 2600 of SEQ ID NO: 1245011
ucaacauuguuccuauguu

SEQ ID NO: 1529377 - RNA, 19 nt, Artificial Sequence
  Description of Artificial Sequence: Synthetic oligonucleotide
  Antisense strand to SEQ ID NO: 1529376
aacauaggaacaauguuga

SEQ ID NO: 1529378 - RNA, 19 nt, Artificial Sequence
  Description of Artificial Sequence: Synthetic oligonucleotide
  Sense strand starting at position 2623 of SEQ ID NO: 1245011
gcaccauucuaagcauuag

SEQ ID NO: 1529379 - RNA, 19 nt, Artificial Sequence
  Description of Artificial Sequence: Synthetic oligonucleotide
  Antisense strand to SEQ ID NO: 1529378
cuaaugcuuagaauggugc

SEQ ID NO: 1529380 - RNA, 19 nt, Artificial Sequence
  Description of Artificial Sequence: Synthetic oligonucleotide
  Sense strand starting at position 2642 of SEQ ID NO: 1245011
guaggcauugucuucguuu

SEQ ID NO: 1529381 - RNA, 19 nt, Artificial Sequence
  Description of Artificial Sequence: Synthetic oligonucleotide
  Antisense strand to SEQ ID NO: 1529380
aaacgaagacaaugccuac

SEQ ID NO: 1529382 - RNA, 19 nt, Artificial Sequence
  Description of Artificial Sequence: Synthetic oligonucleotide
  Sense strand starting at position 2826 of SEQ ID NO: 1245011
guugauaugacucaggugu

SEQ ID NO: 1529383 - RNA, 19 nt, Artificial Sequence
  Description of Artificial Sequence: Synthetic oligonucleotide
  Antisense strand to SEQ ID NO: 1529382
acaccugagucauaucaac

SEQ ID NO: 1529384 - RNA, 19 nt, Artificial Sequence
  Description of Artificial Sequence: Synthetic oligonucleotide
  Sense strand starting at position 2833 of SEQ ID NO: 1245011
ugacucaggugucuaugua

SEQ ID NO: 1529385 - RNA, 19 nt, Artificial Sequence
  Description of Artificial Sequence: Synthetic oligonucleotide
  Antisense strand to SEQ ID NO: 1529384
uacauagacaccugaguca

SEQ ID NO: 1529386 - RNA, 19 nt, Artificial Sequence
  Description of Artificial Sequence: Synthetic oligonucleotide
  Sense strand starting at position 2837 of SEQ ID NO: 1245011
ucaggugucuauguaccua

SEQ ID NO: 1529387 - RNA, 19 nt, Artificial Sequence
  Description of Artificial Sequence: Synthetic oligonucleotide
  Antisense strand to SEQ ID NO: 1529386
uagguacauagacaccuga

SEQ ID NO: 1529388 - RNA, 19 nt, Artificial Sequence
  Description of Artificial Sequence: Synthetic oligonucleotide
  Sense strand starting at position 2898 of SEQ ID NO: 1245011
ugagcacuuggcugagagu

SEQ ID NO: 1529389 - RNA, 19 nt, Artificial Sequence
  Description of Artificial Sequence: Synthetic oligonucleotide
  Antisense strand to SEQ ID NO: 1529388
acucucagccaagugcuca

SEQ ID NO: 1529390 - RNA, 19 nt, Artificial Sequence
  Description of Artificial Sequence: Synthetic oligonucleotide
  Sense strand starting at position 2928 of SEQ ID NO: 1245011
guuugcaucuuaucuuguu

SEQ ID NO: 1529391 - RNA, 19 nt, Artificial Sequence
  Description of Artificial Sequence: Synthetic oligonucleotide
  Antisense strand to SEQ ID NO: 1529390
aacaagauaagaugcaaac

SEQ ID NO: 1529392 - RNA, 19 nt, Artificial Sequence
  Description of Artificial Sequence: Synthetic oligonucleotide
  Sense strand starting at position 3017 of SEQ ID NO: 1245011
gcagucugucaauaucaag

SEQ ID NO: 1529393 - RNA, 19 nt, Artificial Sequence
  Description of Artificial Sequence: Synthetic oligonucleotide
  Antisense strand to SEQ ID NO: 1529392
cuugauauugacagacugc

SEQ ID NO: 1529394 - RNA, 19 nt, Artificial Sequence
  Description of Artificial Sequence: Synthetic oligonucleotide
  Sense strand starting at position 3194 of SEQ ID NO: 1245011
gguagugcuugccuauaau

SEQ ID NO: 1529395 - RNA, 19 nt, Artificial Sequence
  Description of Artificial Sequence: Synthetic oligonucleotide
  Antisense strand to SEQ ID NO: 1529394
auuauaggcaagcacuacc

SEQ ID NO: 1529396 - RNA, 19 nt, Artificial Sequence
  Description of Artificial Sequence: Synthetic oligonucleotide
  Sense strand starting at position 3821 of SEQ ID NO: 1245011
aguugcuucucaucuacau

SEQ ID NO: 1529397 - RNA, 19 nt, Artificial Sequence
  Description of Artificial Sequence: Synthetic oligonucleotide
  Antisense strand to SEQ ID NO: 1529396
auguagaugagaagcaacu

SEQ ID NO: 1529398 - RNA, 19 nt, Artificial Sequence
  Description of Artificial Sequence: Synthetic oligonucleotide
  Sense strand starting at position 3942 of SEQ ID NO: 1245011
ugccaacacugaucuagaa

SEQ ID NO: 1529399 - RNA, 19 nt, Artificial Sequence
  Description of Artificial Sequence: Synthetic oligonucleotide
  Antisense strand to SEQ ID NO: 1529398
uucuagaucaguguuggca

SEQ ID NO: 1529400 - RNA, 19 nt, Artificial Sequence
  Description of Artificial Sequence: Synthetic oligonucleotide
  Sense strand starting at position 92 of SEQ ID NO: 1245012
gagggauacugauaaggau

SEQ ID NO: 1529401 - RNA, 19 nt, Artificial Sequence
  Description of Artificial Sequence: Synthetic oligonucleotide
  Antisense strand to SEQ ID NO: 1529400
auccuuaucaguaucccuc

SEQ ID NO: 1529402 - RNA, 19 nt, Artificial Sequence
  Description of Artificial Sequence: Synthetic oligonucleotide
  Sense strand starting at position 124 of SEQ ID NO: 1245012
aagugauuugcuggugguc

SEQ ID NO: 1529403 - RNA, 19 nt, Artificial Sequence
  Description of Artificial Sequence: Synthetic oligonucleotide
  Antisense strand to SEQ ID NO: 1529402
gaccaccagcaaaucacuu

SEQ ID NO: 1529404 - RNA, 19 nt, Artificial Sequence
  Description of Artificial Sequence: Synthetic oligonucleotide
  Sense strand starting at position 138 of SEQ ID NO: 1245012
uggucuucucagggucaga

SEQ ID NO: 1529405 - RNA, 19 nt, Artificial Sequence
  Description of Artificial Sequence: Synthetic oligonucleotide
  Antisense strand to SEQ ID NO: 1529404
ucugacccugagaagacca

SEQ ID NO: 1529406 - RNA, 19 nt, Artificial Sequence
  Description of Artificial Sequence: Synthetic oligonucleotide
  Sense strand starting at position 383 of SEQ ID NO: 1245012
agcccagaguggucacaua

SEQ ID NO: 1529407 - RNA, 19 nt, Artificial Sequence
  Description of Artificial Sequence: Synthetic oligonucleotide
  Antisense strand to SEQ ID NO: 1529406
uaugugaccacucugggcu

SEQ ID NO: 1529408 - RNA, 19 nt, Artificial Sequence
  Description of Artificial Sequence: Synthetic oligonucleotide
  Sense strand starting at position 396 of SEQ ID NO: 1245012
cacauauuccagggucaga

SEQ ID NO: 1529409 - RNA, 19 nt, Artificial Sequence
  Description of Artificial Sequence: Synthetic oligonucleotide
  Antisense strand to SEQ ID NO: 1529408
ucugacccuggaauaugug

SEQ ID NO: 1529410 - RNA, 19 nt, Artificial Sequence
  Description of Artificial Sequence: Synthetic oligonucleotide
  Sense strand starting at position 480 of SEQ ID NO: 1245012
uuacacugggccugaaaca

SEQ ID NO: 1529411 - RNA, 19 nt, Artificial Sequence
  Description of Artificial Sequence: Synthetic oligonucleotide
  Antisense strand to SEQ ID NO: 1529410
uguuucaggcccaguguaa

SEQ ID NO: 1529412 - RNA, 19 nt, Artificial Sequence
  Description of Artificial Sequence: Synthetic oligonucleotide
  Sense strand starting at position 1165 of SEQ ID NO: 1245012
aagccacaccucgggaaua

SEQ ID NO: 1529413 - RNA, 19 nt, Artificial Sequence
  Description of Artificial Sequence: Synthetic oligonucleotide
  Antisense strand to SEQ ID NO: 1529412
uauucccgagguguggcuu

SEQ ID NO: 1529414 - RNA, 19 nt, Artificial Sequence
  Description of Artificial Sequence: Synthetic oligonucleotide
  Sense strand starting at position 1167 of SEQ ID NO: 1245012
gccacaccucgggaauacu

SEQ ID NO: 1529415 - RNA, 19 nt, Artificial Sequence
  Description of Artificial Sequence: Synthetic oligonucleotide
  Antisense strand to SEQ ID NO: 1529414
aguauucccgagguguggc

SEQ ID NO: 1529416 - RNA, 19 nt, Artificial Sequence
  Description of Artificial Sequence: Synthetic oligonucleotide
  Sense strand starting at position 1175 of SEQ ID NO: 1245012
ucgggaauacuccaguucu

SEQ ID NO: 1529417 - RNA, 19 nt, Artificial Sequence
  Description of Artificial Sequence: Synthetic oligonucleotide
  Antisense strand to SEQ ID NO: 1529416
agaacuggaguauucccga

SEQ ID NO: 1529418 - RNA, 19 nt, Artificial Sequence
  Description of Artificial Sequence: Synthetic oligonucleotide
  Sense strand starting at position 2611 of SEQ ID NO: 1245012
gguagugaggccuaagcau

SEQ ID NO: 1529419 - RNA, 19 nt, Artificial Sequence
  Description of Artificial Sequence: Synthetic oligonucleotide
  Antisense strand to SEQ ID NO: 1529418
augcuuaggccucacuacc

SEQ ID NO: 1529420 - RNA, 19 nt, Artificial Sequence
  Description of Artificial Sequence: Synthetic oligonucleotide
  Sense strand starting at position 2618 of SEQ ID NO: 1245012
aggccuaagcauuagaauu

SEQ ID NO: 1529421 - RNA, 19 nt, Artificial Sequence
  Description of Artificial Sequence: Synthetic oligonucleotide
  Antisense strand to SEQ ID NO: 1529420
aauucuaaugcuuaggccu

SEQ ID NO: 1529422 - RNA, 19 nt, Artificial Sequence
  Description of Artificial Sequence: Synthetic oligonucleotide
  Sense strand starting at position 2664 of SEQ ID NO: 1245012
gccuuugcucugggaccaa

SEQ ID NO: 1529423 - RNA, 19 nt, Artificial Sequence
  Description of Artificial Sequence: Synthetic oligonucleotide
  Antisense strand to SEQ ID NO: 1529422
uuggucccagagcaaaggc

SEQ ID NO: 1529424 - RNA, 19 nt, Artificial Sequence
  Description of Artificial Sequence: Synthetic oligonucleotide
  Sense strand starting at position 2692 of SEQ ID NO: 1245012
accaguagaccucgacaca

SEQ ID NO: 1529425 - RNA, 19 nt, Artificial Sequence
  Description of Artificial Sequence: Synthetic oligonucleotide
  Antisense strand to SEQ ID NO: 1529424
ugugucgaggucuacuggu

SEQ ID NO: 1529426 - RNA, 19 nt, Artificial Sequence
  Description of Artificial Sequence: Synthetic oligonucleotide
  Sense strand starting at position 2693 of SEQ ID NO: 1245012
ccaguagaccucgacacau

SEQ ID NO: 1529427 - RNA, 19 nt, Artificial Sequence
  Description of Artificial Sequence: Synthetic oligonucleotide
  Antisense strand to SEQ ID NO: 1529426
augugucgaggucuacugg

SEQ ID NO: 1529428 - RNA, 19 nt, Artificial Sequence
  Description of Artificial Sequence: Synthetic oligonucleotide
  Sense strand starting at position 2782 of SEQ ID NO: 1245012
ugcagugagcaccaaucau

SEQ ID NO: 1529429 - RNA, 19 nt, Artificial Sequence
  Description of Artificial Sequence: Synthetic oligonucleotide
  Antisense strand to SEQ ID NO: 1529428
augauuggugcucacugca

SEQ ID NO: 1529430 - RNA, 19 nt, Artificial Sequence
  Description of Artificial Sequence: Synthetic oligonucleotide
  Sense strand starting at position 2845 of SEQ ID NO: 1245012
cccagcaaugcucaagaaa

SEQ ID NO: 1529431 - RNA, 19 nt, Artificial Sequence
  Description of Artificial Sequence: Synthetic oligonucleotide
  Antisense strand to SEQ ID NO: 1529430
uuucuugagcauugcuggg

SEQ ID NO: 1529432 - RNA, 19 nt, Artificial Sequence
  Description of Artificial Sequence: Synthetic oligonucleotide
  Sense strand starting at position 2848 of SEQ ID NO: 1245012
agcaaugcucaagaaaugu

SEQ ID NO: 1529433 - RNA, 19 nt, Artificial Sequence
  Description of Artificial Sequence: Synthetic oligonucleotide
  Antisense strand to SEQ ID NO: 1529432
acauuucuugagcauugcu

SEQ ID NO: 1529434 - RNA, 19 nt, Artificial Sequence
  Description of Artificial Sequence: Synthetic oligonucleotide
  Sense strand starting at position 2859 of SEQ ID NO: 1245012
agaaauguugcggaaagca

SEQ ID NO: 1529435 - RNA, 19 nt, Artificial Sequence
  Description of Artificial Sequence: Synthetic oligonucleotide
  Antisense strand to SEQ ID NO: 1529434
ugcuuuccgcaacauuucu

SEQ ID NO: 1529436 - RNA, 19 nt, Artificial Sequence
  Description of Artificial Sequence: Synthetic oligonucleotide
  Sense strand starting at position 2955 of SEQ ID NO: 1245012
cgcauuggacaaggucuaa

SEQ ID NO: 1529437 - RNA, 19 nt, Artificial Sequence
  Description of Artificial Sequence: Synthetic oligonucleotide
  Antisense strand to SEQ ID NO: 1529436
uuagaccuuguccaaugcg

SEQ ID NO: 1529438 - RNA, 19 nt, Artificial Sequence
  Description of Artificial Sequence: Synthetic oligonucleotide
  Sense strand starting at position 3205 of SEQ ID NO: 1245012
guuagaaggccaugaugga

SEQ ID NO: 1529439 - RNA, 19 nt, Artificial Sequence
  Description of Artificial Sequence: Synthetic oligonucleotide
  Antisense strand to SEQ ID NO: 1529438
uccaucauggccuucuaac

SEQ ID NO: 1529440 - RNA, 19 nt, Artificial Sequence
  Description of Artificial Sequence: Synthetic oligonucleotide
  Sense strand starting at position 3255 of SEQ ID NO: 1245012
augagagaauucuaaacug

SEQ ID NO: 1529441 - RNA, 19 nt, Artificial Sequence
  Description of Artificial Sequence: Synthetic oligonucleotide
  Antisense strand to SEQ ID NO: 1529440
caguuuagaauucucucau

SEQ ID NO: 1529442 - RNA, 19 nt, Artificial Sequence
  Description of Artificial Sequence: Synthetic oligonucleotide
  Sense strand starting at position 3292 of SEQ ID NO: 1245012
agcauuugaugguacauaa

SEQ ID NO: 1529443 - RNA, 19 nt, Artificial Sequence
  Description of Artificial Sequence: Synthetic oligonucleotide
  Antisense strand to SEQ ID NO: 1529442
uuauguaccaucaaaugcu

SEQ ID NO: 1529444 - RNA, 19 nt, Artificial Sequence
  Description of Artificial Sequence: Synthetic oligonucleotide
  Sense strand starting at position 3326 of SEQ ID NO: 1245012
cgucuucugcgcuuuagca

SEQ ID NO: 1529445 - RNA, 19 nt, Artificial Sequence
  Description of Artificial Sequence: Synthetic oligonucleotide
  Antisense strand to SEQ ID NO: 1529444
ugcuaaagcgcagaagacg

SEQ ID NO: 1529446 - RNA, 19 nt, Artificial Sequence
  Description of Artificial Sequence: Synthetic oligonucleotide
  Sense strand starting at position 3327 of SEQ ID NO: 1245012
gucuucugcgcuuuagcau

SEQ ID NO: 1529447 - RNA, 19 nt, Artificial Sequence
  Description of Artificial Sequence: Synthetic oligonucleotide
  Antisense strand to SEQ ID NO: 1529446
augcuaaagcgcagaagac

SEQ ID NO: 1529448 - RNA, 19 nt, Artificial Sequence
  Description of Artificial Sequence: Synthetic oligonucleotide
  Sense strand starting at position 3336 of SEQ ID NO: 1245012
gcuuuagcauuuguaauca

SEQ ID NO: 1529449 - RNA, 19 nt, Artificial Sequence
  Description of Artificial Sequence: Synthetic oligonucleotide
  Antisense strand to SEQ ID NO: 1529448
ugauuacaaaugcuaaagc

SEQ ID NO: 1529450 - RNA, 19 nt, Artificial Sequence
  Description of Artificial Sequence: Synthetic oligonucleotide
  Sense strand starting at position 3358 of SEQ ID NO: 1245012
uguuccuccgcguuuguua

SEQ ID NO: 1529451 - RNA, 19 nt, Artificial Sequence
  Description of Artificial Sequence: Synthetic oligonucleotide
  Antisense strand to SEQ ID NO: 1529450
uaacaaacgcggaggaaca

SEQ ID NO: 1529452 - RNA, 19 nt, Artificial Sequence
  Description of Artificial Sequence: Synthetic oligonucleotide
  Sense strand starting at position 3359 of SEQ ID NO: 1245012
guuccuccgcguuuguuaa

SEQ ID NO: 1529453 - RNA, 19 nt, Artificial Sequence
  Description of Artificial Sequence: Synthetic oligonucleotide
  Antisense strand to SEQ ID NO: 1529452
uuaacaaacgcggaggaac

SEQ ID NO: 1529454 - RNA, 19 nt, Artificial Sequence
  Description of Artificial Sequence: Synthetic oligonucleotide
  Sense strand starting at position 3367 of SEQ ID NO: 1245012
gcguuuguuaaaugggaga

SEQ ID NO: 1529455 - RNA, 19 nt, Artificial Sequence
  Description of Artificial Sequence: Synthetic oligonucleotide
  Antisense strand to SEQ ID NO: 1529454
ucucccauuuaacaaacgc

SEQ ID NO: 1529456 - RNA, 19 nt, Artificial Sequence
  Description of Artificial Sequence: Synthetic oligonucleotide
  Sense strand starting at position 3369 of SEQ ID NO: 1245012
guuuguuaaaugggagaau

SEQ ID NO: 1529457 - RNA, 19 nt, Artificial Sequence
  Description of Artificial Sequence: Synthetic oligonucleotide
  Antisense strand to SEQ ID NO: 1529456
auucucccauuuaacaaac

SEQ ID NO: 1529458 - RNA, 19 nt, Artificial Sequence
  Description of Artificial Sequence: Synthetic oligonucleotide
  Sense strand starting at position 3378 of SEQ ID NO: 1245012
augggagaauuguaaacua

SEQ ID NO: 1529459 - RNA, 19 nt, Artificial Sequence
  Description of Artificial Sequence: Synthetic oligonucleotide
  Antisense strand to SEQ ID NO: 1529458
uaguuuacaauucucccau

SEQ ID NO: 1529460 - RNA, 19 nt, Artificial Sequence
  Description of Artificial Sequence: Synthetic oligonucleotide
  Sense strand starting at position 3390 of SEQ ID NO: 1245012
uaaacuauguuuccgacga

SEQ ID NO: 1529461 - RNA, 19 nt, Artificial Sequence
  Description of Artificial Sequence: Synthetic oligonucleotide
  Antisense strand to SEQ ID NO: 1529460
ucgucggaaacauaguuua

SEQ ID NO: 1529462 - RNA, 19 nt, Artificial Sequence
  Description of Artificial Sequence: Synthetic oligonucleotide
  Sense strand starting at position 3395 of SEQ ID NO: 1245012
uauguuuccgacgacaguu

SEQ ID NO: 1529463 - RNA, 19 nt, Artificial Sequence
  Description of Artificial Sequence: Synthetic oligonucleotide
  Antisense strand to SEQ ID NO: 1529462
aacugucgucggaaacaua

SEQ ID NO: 1529464 - RNA, 19 nt, Artificial Sequence
  Description of Artificial Sequence: Synthetic oligonucleotide
  Sense strand starting at position 3405 of SEQ ID NO: 1245012
acgacaguuuggcuacuua

SEQ ID NO: 1529465 - RNA, 19 nt, Artificial Sequence
  Description of Artificial Sequence: Synthetic oligonucleotide
  Antisense strand to SEQ ID NO: 1529464
uaaguagccaaacugucgu

SEQ ID NO: 1529466 - RNA, 19 nt, Artificial Sequence
  Description of Artificial Sequence: Synthetic oligonucleotide
  Sense strand starting at position 3459 of SEQ ID NO: 1245012
aguugacaucccggcaauu

SEQ ID NO: 1529467 - RNA, 19 nt, Artificial Sequence
  Description of Artificial Sequence: Synthetic oligonucleotide
  Antisense strand to SEQ ID NO: 1529466
aauugccgggaugucaacu

SEQ ID NO: 1529468 - RNA, 19 nt, Artificial Sequence
  Description of Artificial Sequence: Synthetic oligonucleotide
  Sense strand starting at position 3461 of SEQ ID NO: 1245012
uugacaucccggcaauuga

SEQ ID NO: 1529469 - RNA, 19 nt, Artificial Sequence
  Description of Artificial Sequence: Synthetic oligonucleotide
  Antisense strand to SEQ ID NO: 1529468
ucaauugccgggaugucaa

SEQ ID NO: 1529470 - RNA, 19 nt, Artificial Sequence
  Description of Artificial Sequence: Synthetic oligonucleotide
  Sense strand starting at position 3470 of SEQ ID NO: 1245012
cggcaauugauauguuaau

SEQ ID NO: 1529471 - RNA, 19 nt, Artificial Sequence
  Description of Artificial Sequence: Synthetic oligonucleotide
  Antisense strand to SEQ ID NO: 1529470
auuaacauaucaauugccg

SEQ ID NO: 1529472 - RNA, 19 nt, Artificial Sequence
  Description of Artificial Sequence: Synthetic oligonucleotide
  Sense strand starting at position 3471 of SEQ ID NO: 1245012
ggcaauugauauguuaauu

SEQ ID NO: 1529473 - RNA, 19 nt, Artificial Sequence
  Description of Artificial Sequence: Synthetic oligonucleotide
  Antisense strand to SEQ ID NO: 1529472
aauuaacauaucaauugcc

SEQ ID NO: 1529474 - RNA, 19 nt, Artificial Sequence
  Description of Artificial Sequence: Synthetic oligonucleotide
  Sense strand starting at position 3501 of SEQ ID NO: 1245012
uugugugcucauuaaauca

SEQ ID NO: 1529475 - RNA, 19 nt, Artificial Sequence
  Description of Artificial Sequence: Synthetic oligonucleotide
  Antisense strand to SEQ ID NO: 1529474
ugauuuaaugagcacacaa

SEQ ID NO: 1529476 - RNA, 19 nt, Artificial Sequence
  Description of Artificial Sequence: Synthetic oligonucleotide
  Sense strand starting at position 3528 of SEQ ID NO: 1245012
agggacuucuaccugccaa

SEQ ID NO: 1529477 - RNA, 19 nt, Artificial Sequence
  Description of Artificial Sequence: Synthetic oligonucleotide
  Antisense strand to SEQ ID NO: 1529476
uuggcagguagaagucccu

SEQ ID NO: 1529478 - RNA, 19 nt, Artificial Sequence
  Description of Artificial Sequence: Synthetic oligonucleotide
  Sense strand starting at position 3529 of SEQ ID NO: 1245012
gggacuucuaccugccaag

SEQ ID NO: 1529479 - RNA, 19 nt, Artificial Sequence
  Description of Artificial Sequence: Synthetic oligonucleotide
  Antisense strand to SEQ ID NO: 1529478
cuuggcagguagaaguccc

SEQ ID NO: 1529480 - RNA, 19 nt, Artificial Sequence
  Description of Artificial Sequence: Synthetic oligonucleotide
  Sense strand starting at position 190 of SEQ ID NO: 1245013
gucugccauuuccagaauu

SEQ ID NO: 1529481 - RNA, 19 nt, Artificial Sequence
  Description of Artificial Sequence: Synthetic oligonucleotide
  Antisense strand to SEQ ID NO: 1529480
aauucuggaaauggcagac

SEQ ID NO: 1529482 - RNA, 19 nt, Artificial Sequence
  Description of Artificial Sequence: Synthetic oligonucleotide
  Sense strand starting at position 250 of SEQ ID NO: 1245013
gcacuuggaucugcacaaa

SEQ ID NO: 1529483 - RNA, 19 nt, Artificial Sequence
  Description of Artificial Sequence: Synthetic oligonucleotide
  Antisense strand to SEQ ID NO: 1529482
uuugugcagauccaagugc

SEQ ID NO: 1529484 - RNA, 19 nt, Artificial Sequence
  Description of Artificial Sequence: Synthetic oligonucleotide
  Sense strand starting at position 253 of SEQ ID NO: 1245013
cuuggaucugcacaaaggu

SEQ ID NO: 1529485 - RNA, 19 nt, Artificial Sequence
  Description of Artificial Sequence: Synthetic oligonucleotide
  Antisense strand to SEQ ID NO: 1529484
accuuugugcagauccaag

SEQ ID NO: 1529486 - RNA, 19 nt, Artificial Sequence
  Description of Artificial Sequence: Synthetic oligonucleotide
  Sense strand starting at position 502 of SEQ ID NO: 1245013
gccacagcucuuuaaggga

SEQ ID NO: 1529487 - RNA, 19 nt, Artificial Sequence
  Description of Artificial Sequence: Synthetic oligonucleotide
  Antisense strand to SEQ ID NO: 1529486
ucccuuaaagagcuguggc

SEQ ID NO: 1529488 - RNA, 19 nt, Artificial Sequence
  Description of Artificial Sequence: Synthetic oligonucleotide
  Sense strand starting at position 507 of SEQ ID NO: 1245013
agcucuuuaagggaguuga

SEQ ID NO: 1529489 - RNA, 19 nt, Artificial Sequence
  Description of Artificial Sequence: Synthetic oligonucleotide
  Antisense strand to SEQ ID NO: 1529488
ucaacucccuuaaagagcu

SEQ ID NO: 1529490 - RNA, 19 nt, Artificial Sequence
  Description of Artificial Sequence: Synthetic oligonucleotide
  Sense strand starting at position 525 of SEQ ID NO: 1245013
aguugugagugcugccaua

SEQ ID NO: 1529491 - RNA, 19 nt, Artificial Sequence
  Description of Artificial Sequence: Synthetic oligonucleotide
  Antisense strand to SEQ ID NO: 1529490
uauggcagcacucacaacu

SEQ ID NO: 1529492 - RNA, 19 nt, Artificial Sequence
  Description of Artificial Sequence: Synthetic oligonucleotide
  Sense strand starting at position 614 of SEQ ID NO: 1245013
aaaggcaugucagaguaaa

SEQ ID NO: 1529493 - RNA, 19 nt, Artificial Sequence
  Description of Artificial Sequence: Synthetic oligonucleotide
  Antisense strand to SEQ ID NO: 1529492
uuuacucugacaugccuuu

SEQ ID NO: 1529494 - RNA, 19 nt, Artificial Sequence
  Description of Artificial Sequence: Synthetic oligonucleotide
  Sense strand starting at position 689 of SEQ ID NO: 1245013
uugccaaguuccugaauca

SEQ ID NO: 1529495 - RNA, 19 nt, Artificial Sequence
  Description of Artificial Sequence: Synthetic oligonucleotide
  Antisense strand to SEQ ID NO: 1529494
ugauucaggaacuuggcaa

SEQ ID NO: 1529496 - RNA, 19 nt, Artificial Sequence
  Description of Artificial Sequence: Synthetic oligonucleotide
  Sense strand starting at position 690 of SEQ ID NO: 1245013
ugccaaguuccugaaucau

SEQ ID NO: 1529497 - RNA, 19 nt, Artificial Sequence
  Description of Artificial Sequence: Synthetic oligonucleotide
  Antisense strand to SEQ ID NO: 1529496
augauucaggaacuuggca

SEQ ID NO: 1529498 - RNA, 19 nt, Artificial Sequence
  Description of Artificial Sequence: Synthetic oligonucleotide
  Sense strand starting at position 714 of SEQ ID NO: 1245013
cuccgcuacccuugaagau

SEQ ID NO: 1529499 - RNA, 19 nt, Artificial Sequence
  Description of Artificial Sequence: Synthetic oligonucleotide
  Antisense strand to SEQ ID NO: 1529498
aucuucaaggguagcggag

SEQ ID NO: 1529500 - RNA, 19 nt, Artificial Sequence
  Description of Artificial Sequence: Synthetic oligonucleotide
  Sense strand starting at position 741 of SEQ ID NO: 1245013
ggcuuccucuugucacgaa

SEQ ID NO: 1529501 - RNA, 19 nt, Artificial Sequence
  Description of Artificial Sequence: Synthetic oligonucleotide
  Antisense strand to SEQ ID NO: 1529500
uucgugacaagaggaagcc

SEQ ID NO: 1529502 - RNA, 19 nt, Artificial Sequence
  Description of Artificial Sequence: Synthetic oligonucleotide
  Sense strand starting at position 764 of SEQ ID NO: 1245013
acauuugugcugcgguuaa

SEQ ID NO: 1529503 - RNA, 19 nt, Artificial Sequence
  Description of Artificial Sequence: Synthetic oligonucleotide
  Antisense strand to SEQ ID NO: 1529502
uuaaccgcagcacaaaugu

SEQ ID NO: 1529504 - RNA, 19 nt, Artificial Sequence
  Description of Artificial Sequence: Synthetic oligonucleotide
  Sense strand starting at position 793 of SEQ ID NO: 1245013
ccagcaucagcuggacauu

SEQ ID NO: 1529505 - RNA, 19 nt, Artificial Sequence
  Description of Artificial Sequence: Synthetic oligonucleotide
  Antisense strand to SEQ ID NO: 1529504
aauguccagcugaugcugg

SEQ ID NO: 1529506 - RNA, 19 nt, Artificial Sequence
  Description of Artificial Sequence: Synthetic oligonucleotide
  Sense strand starting at position 910 of SEQ ID NO: 1245013
uuggauaccuguugaugaa

SEQ ID NO: 1529507 - RNA, 19 nt, Artificial Sequence
  Description of Artificial Sequence: Synthetic oligonucleotide
  Antisense strand to SEQ ID NO: 1529506
uucaucaacagguauccaa

SEQ ID NO: 1529508 - RNA, 19 nt, Artificial Sequence
  Description of Artificial Sequence: Synthetic oligonucleotide
  Sense strand starting at position 920 of SEQ ID NO: 1245013
guugaugaauccguaacca

SEQ ID NO: 1529509 - RNA, 19 nt, Artificial Sequence
  Description of Artificial Sequence: Synthetic oligonucleotide
  Antisense strand to SEQ ID NO: 1529508
ugguuacggauucaucaac

SEQ ID NO: 1529510 - RNA, 19 nt, Artificial Sequence
  Description of Artificial Sequence: Synthetic oligonucleotide
  Sense strand starting at position 1263 of SEQ ID NO: 1245013
guacucaccuggucugcaa

SEQ ID NO: 1529511 - RNA, 19 nt, Artificial Sequence
  Description of Artificial Sequence: Synthetic oligonucleotide
  Antisense strand to SEQ ID NO: 1529510
uugcagaccaggugaguac

SEQ ID NO: 1529512 - RNA, 19 nt, Artificial Sequence
  Description of Artificial Sequence: Synthetic oligonucleotide
  Sense strand starting at position 1360 of SEQ ID NO: 1245013
cucagagguuugccuaguu

SEQ ID NO: 1529513 - RNA, 19 nt, Artificial Sequence
  Description of Artificial Sequence: Synthetic oligonucleotide
  Antisense strand to SEQ ID NO: 1529512
aacuaggcaaaccucugag

SEQ ID NO: 1529514 - RNA, 19 nt, Artificial Sequence
  Description of Artificial Sequence: Synthetic oligonucleotide
  Sense strand starting at position 1365 of SEQ ID NO: 1245013
agguuugccuaguucuaac

SEQ ID NO: 1529515 - RNA, 19 nt, Artificial Sequence
  Description of Artificial Sequence: Synthetic oligonucleotide
  Antisense strand to SEQ ID NO: 1529514
guuagaacuaggcaaaccu

SEQ ID NO: 1529516 - RNA, 19 nt, Artificial Sequence
  Description of Artificial Sequence: Synthetic oligonucleotide
  Sense strand starting at position 2447 of SEQ ID NO: 1245013
cucgguucuggcagugagu

SEQ ID NO: 1529517 - RNA, 19 nt, Artificial Sequence
  Description of Artificial Sequence: Synthetic oligonucleotide
  Antisense strand to SEQ ID NO: 1529516
acucacugccagaaccgag

SEQ ID NO: 1529518 - RNA, 19 nt, Artificial Sequence
  Description of Artificial Sequence: Synthetic oligonucleotide
  Sense strand starting at position 2856 of SEQ ID NO: 1245013
uaccuauguuuguauugga

SEQ ID NO: 1529519 - RNA, 19 nt, Artificial Sequence
  Description of Artificial Sequence: Synthetic oligonucleotide
  Antisense strand to SEQ ID NO: 1529518
uccaauacaaacauaggua

SEQ ID NO: 1529520 - RNA, 19 nt, Artificial Sequence
  Description of Artificial Sequence: Synthetic oligonucleotide
  Sense strand starting at position 2861 of SEQ ID NO: 1245013
auguuuguauuggaaacaa

SEQ ID NO: 1529521 - RNA, 19 nt, Artificial Sequence
  Description of Artificial Sequence: Synthetic oligonucleotide
  Antisense strand to SEQ ID NO: 1529520
uuguuuccaauacaaacau

SEQ ID NO: 1529522 - RNA, 19 nt, Artificial Sequence
  Description of Artificial Sequence: Synthetic oligonucleotide
  Sense strand starting at position 2900 of SEQ ID NO: 1245013
cgcaauucuucuucgcuga

SEQ ID NO: 1529523 - RNA, 19 nt, Artificial Sequence
  Description of Artificial Sequence: Synthetic oligonucleotide
  Antisense strand to SEQ ID NO: 1529522
ucagcgaagaagaauugcg

SEQ ID NO: 1529524 - RNA, 19 nt, Artificial Sequence
  Description of Artificial Sequence: Synthetic oligonucleotide
  Sense strand starting at position 2902 of SEQ ID NO: 1245013
caauucuucuucgcugagu

SEQ ID NO: 1529525 - RNA, 19 nt, Artificial Sequence
  Description of Artificial Sequence: Synthetic oligonucleotide
  Antisense strand to SEQ ID NO: 1529524
acucagcgaagaagaauug

SEQ ID NO: 1529526 - RNA, 19 nt, Artificial Sequence
  Description of Artificial Sequence: Synthetic oligonucleotide
  Sense strand starting at position 2903 of SEQ ID NO: 1245013
aauucuucuucgcugaguu

SEQ ID NO: 1529527 - RNA, 19 nt, Artificial Sequence
  Description of Artificial Sequence: Synthetic oligonucleotide
  Antisense strand to SEQ ID NO: 1529526
aacucagcgaagaagaauu

SEQ ID NO: 1529528 - RNA, 19 nt, Artificial Sequence
  Description of Artificial Sequence: Synthetic oligonucleotide
  Sense strand starting at position 2904 of SEQ ID NO: 1245013
auucuucuucgcugaguuu

SEQ ID NO: 1529529 - RNA, 19 nt, Artificial Sequence
  Description of Artificial Sequence: Synthetic oligonucleotide
  Antisense strand to SEQ ID NO: 1529528
aaacucagcgaagaagaau

SEQ ID NO: 1529530 - RNA, 19 nt, Artificial Sequence
  Description of Artificial Sequence: Synthetic oligonucleotide
  Sense strand starting at position 3387 of SEQ ID NO: 1245013
ugcgguuuccucugccgaa

SEQ ID NO: 1529531 - RNA, 19 nt, Artificial Sequence
  Description of Artificial Sequence: Synthetic oligonucleotide
  Antisense strand to SEQ ID NO: 1529530
uucggcagaggaaaccgca

SEQ ID NO: 1529532 - RNA, 19 nt, Artificial Sequence
  Description of Artificial Sequence: Synthetic oligonucleotide
  Sense strand starting at position 3388 of SEQ ID NO: 1245013
gcgguuuccucugccgaaa

SEQ ID NO: 1529533 - RNA, 19 nt, Artificial Sequence
  Description of Artificial Sequence: Synthetic oligonucleotide
  Antisense strand to SEQ ID NO: 1529532
uuucggcagaggaaaccgc

SEQ ID NO: 1529534 - RNA, 19 nt, Artificial Sequence
  Description of Artificial Sequence: Synthetic oligonucleotide
  Sense strand starting at position 3455 of SEQ ID NO: 1245013
gccacucuucgccaucaca

SEQ ID NO: 1529535 - RNA, 19 nt, Artificial Sequence
  Description of Artificial Sequence: Synthetic oligonucleotide
  Antisense strand to SEQ ID NO: 1529534
ugugauggcgaagaguggc

SEQ ID NO: 1529536 - RNA, 19 nt, Artificial Sequence
  Description of Artificial Sequence: Synthetic oligonucleotide
  Sense strand starting at position 3509 of SEQ ID NO: 1245013
augacaugauccugaccau

SEQ ID NO: 1529537 - RNA, 19 nt, Artificial Sequence
  Description of Artificial Sequence: Synthetic oligonucleotide
  Antisense strand to SEQ ID NO: 1529536
auggucaggaucaugucau

SEQ ID NO: 1529538 - RNA, 19 nt, Artificial Sequence
  Description of Artificial Sequence: Synthetic oligonucleotide
  Sense strand starting at position 3574 of SEQ ID NO: 1245013
caguaagagccuuguaguu

SEQ ID NO: 1529539 - RNA, 19 nt, Artificial Sequence
  Description of Artificial Sequence: Synthetic oligonucleotide
  Antisense strand to SEQ ID NO: 1529538
aacuacaaggcucuuacug

SEQ ID NO: 1529540 - RNA, 19 nt, Artificial Sequence
  Description of Artificial Sequence: Synthetic oligonucleotide
  Sense strand starting at position 3576 of SEQ ID NO: 1245013
guaagagccuuguaguuaa

SEQ ID NO: 1529541 - RNA, 19 nt, Artificial Sequence
  Description of Artificial Sequence: Synthetic oligonucleotide
  Antisense strand to SEQ ID NO: 1529540
uuaacuacaaggcucuuac

SEQ ID NO: 1529542 - RNA, 19 nt, Artificial Sequence
  Description of Artificial Sequence: Synthetic oligonucleotide
  Sense strand starting at position 3606 of SEQ ID NO: 1245013
gcagcagugccugguacaa

SEQ ID NO: 1529543 - RNA, 19 nt, Artificial Sequence
  Description of Artificial Sequence: Synthetic oligonucleotide
  Antisense strand to SEQ ID NO: 1529542
uuguaccaggcacugcugc

SEQ ID NO: 1529544 - RNA, 19 nt, Artificial Sequence
  Description of Artificial Sequence: Synthetic oligonucleotide
  Sense strand starting at position 3707 of SEQ ID NO: 1245013
ccagguuucucgggagccu

SEQ ID NO: 1529545 - RNA, 19 nt, Artificial Sequence
  Description of Artificial Sequence: Synthetic oligonucleotide
  Antisense strand to SEQ ID NO: 1529544
aggcucccgagaaaccugg

SEQ ID NO: 1529546 - RNA, 19 nt, Artificial Sequence
  Description of Artificial Sequence: Synthetic oligonucleotide
  Sense strand starting at position 3716 of SEQ ID NO: 1245013
ucgggagccugggaagauu

SEQ ID NO: 1529547 - RNA, 19 nt, Artificial Sequence
  Description of Artificial Sequence: Synthetic oligonucleotide
  Antisense strand to SEQ ID NO: 1529546
aaucuucccaggcucccga

SEQ ID NO: 1529548 - RNA, 19 nt, Artificial Sequence
  Description of Artificial Sequence: Synthetic oligonucleotide
  Sense strand starting at position 3836 of SEQ ID NO: 1245013
gcgggugcgcguuguauuu

SEQ ID NO: 1529549 - RNA, 19 nt, Artificial Sequence
  Description of Artificial Sequence: Synthetic oligonucleotide
  Antisense strand to SEQ ID NO: 1529548
aaauacaacgcgcacccgc

SEQ ID NO: 1529550 - RNA, 19 nt, Artificial Sequence
  Description of Artificial Sequence: Synthetic oligonucleotide
  Sense strand starting at position 6 of SEQ ID NO: 1245014
ggaccugcuuggucaggaa

SEQ ID NO: 1529551 - RNA, 19 nt, Artificial Sequence
  Description of Artificial Sequence: Synthetic oligonucleotide
  Antisense strand to SEQ ID NO: 1529550
uuccugaccaagcaggucc

SEQ ID NO: 1529552 - RNA, 19 nt, Artificial Sequence
  Description of Artificial Sequence: Synthetic oligonucleotide
  Sense strand starting at position 10 of SEQ ID NO: 1245014
cugcuuggucaggaaauca

SEQ ID NO: 1529553 - RNA, 19 nt, Artificial Sequence
  Description of Artificial Sequence: Synthetic oligonucleotide
  Antisense strand to SEQ ID NO: 1529552
ugauuuccugaccaagcag

SEQ ID NO: 1529554 - RNA, 19 nt, Artificial Sequence
  Description of Artificial Sequence: Synthetic oligonucleotide
  Sense strand starting at position 37 of SEQ ID NO: 1245014
ggucauaaccagcaguuga

SEQ ID NO: 1529555 - RNA, 19 nt, Artificial Sequence
  Description of Artificial Sequence: Synthetic oligonucleotide
  Antisense strand to SEQ ID NO: 1529554
ucaacugcugguuaugacc

SEQ ID NO: 1529556 - RNA, 19 nt, Artificial Sequence
  Description of Artificial Sequence: Synthetic oligonucleotide
  Sense strand starting at position 108 of SEQ ID NO: 1245014
gaguaaggguaauuauugu

SEQ ID NO: 1529557 - RNA, 19 nt, Artificial Sequence
  Description of Artificial Sequence: Synthetic oligonucleotide
  Antisense strand to SEQ ID NO: 1529556
acaauaauuacccuuacuc

SEQ ID NO: 1529558 - RNA, 19 nt, Artificial Sequence
  Description of Artificial Sequence: Synthetic oligonucleotide
  Sense strand starting at position 114 of SEQ ID NO: 1245014
ggguaauuauuguucucug

SEQ ID NO: 1529559 - RNA, 19 nt, Artificial Sequence
  Description of Artificial Sequence: Synthetic oligonucleotide
  Antisense strand to SEQ ID NO: 1529558
cagagaacaauaauuaccc

SEQ ID NO: 1529560 - RNA, 19 nt, Artificial Sequence
  Description of Artificial Sequence: Synthetic oligonucleotide
  Sense strand starting at position 115 of SEQ ID NO: 1245014
gguaauuauuguucucuga

SEQ ID NO: 1529561 - RNA, 19 nt, Artificial Sequence
  Description of Artificial Sequence: Synthetic oligonucleotide
  Antisense strand to SEQ ID NO: 1529560
ucagagaacaauaauuacc

SEQ ID NO: 1529562 - RNA, 19 nt, Artificial Sequence
  Description of Artificial Sequence: Synthetic oligonucleotide
  Sense strand starting at position 663 of SEQ ID NO: 1245014
ucuuuaaugcucugugagg

SEQ ID NO: 1529563 - RNA, 19 nt, Artificial Sequence
  Description of Artificial Sequence: Synthetic oligonucleotide
  Antisense strand to SEQ ID NO: 1529562
ccucacagagcauuaaaga

SEQ ID NO: 1529564 - RNA, 19 nt, Artificial Sequence
  Description of Artificial Sequence: Synthetic oligonucleotide
  Sense strand starting at position 709 of SEQ ID NO: 1245014
ugcccaaugcuuuggaaca

SEQ ID NO: 1529565 - RNA, 19 nt, Artificial Sequence
  Description of Artificial Sequence: Synthetic oligonucleotide
  Antisense strand to SEQ ID NO: 1529564
uguuccaaagcauugggca

SEQ ID NO: 1529566 - RNA, 19 nt, Artificial Sequence
  Description of Artificial Sequence: Synthetic oligonucleotide
  Sense strand starting at position 1020 of SEQ ID NO: 1245014
agcaaucuuccggacaaga

SEQ ID NO: 1529567 - RNA, 19 nt, Artificial Sequence
  Description of Artificial Sequence: Synthetic oligonucleotide
  Antisense strand to SEQ ID NO: 1529566
ucuuguccggaagauugcu

SEQ ID NO: 1529568 - RNA, 19 nt, Artificial Sequence
  Description of Artificial Sequence: Synthetic oligonucleotide
  Sense strand starting at position 1332 of SEQ ID NO: 1245014
cgacgcgcuccgagaaauu

SEQ ID NO: 1529569 - RNA, 19 nt, Artificial Sequence
  Description of Artificial Sequence: Synthetic oligonucleotide
  Antisense strand to SEQ ID NO: 1529568
aauuucucggagcgcgucg

SEQ ID NO: 1529570 - RNA, 19 nt, Artificial Sequence
  Description of Artificial Sequence: Synthetic oligonucleotide
  Sense strand starting at position 2369 of SEQ ID NO: 1245014
cccagaaccuggguuguau

SEQ ID NO: 1529571 - RNA, 19 nt, Artificial Sequence
  Description of Artificial Sequence: Synthetic oligonucleotide
  Antisense strand to SEQ ID NO: 1529570
auacaacccagguucuggg

SEQ ID NO: 1529572 - RNA, 19 nt, Artificial Sequence
  Description of Artificial Sequence: Synthetic oligonucleotide
  Sense strand starting at position 2722 of SEQ ID NO: 1245014
acccaugccuugcucagaa

SEQ ID NO: 1529573 - RNA, 19 nt, Artificial Sequence
  Description of Artificial Sequence: Synthetic oligonucleotide
  Antisense strand to SEQ ID NO: 1529572
uucugagcaaggcaugggu

SEQ ID NO: 1529574 - RNA, 19 nt, Artificial Sequence
  Description of Artificial Sequence: Synthetic oligonucleotide
  Sense strand starting at position 2772 of SEQ ID NO: 1245014
cuaguaauuucggcgaauu

SEQ ID NO: 1529575 - RNA, 19 nt, Artificial Sequence
  Description of Artificial Sequence: Synthetic oligonucleotide
  Antisense strand to SEQ ID NO: 1529574
aauucgccgaaauuacuag

SEQ ID NO: 1529576 - RNA, 19 nt, Artificial Sequence
  Description of Artificial Sequence: Synthetic oligonucleotide
  Sense strand starting at position 2773 of SEQ ID NO: 1245014
uaguaauuucggcgaauua

SEQ ID NO: 1529577 - RNA, 19 nt, Artificial Sequence
  Description of Artificial Sequence: Synthetic oligonucleotide
  Antisense strand to SEQ ID NO: 1529576
uaauucgccgaaauuacua

SEQ ID NO: 1529578 - RNA, 19 nt, Artificial Sequence
  Description of Artificial Sequence: Synthetic oligonucleotide
  Sense strand starting at position 2858 of SEQ ID NO: 1245014
gaggcagaugacgguaauu

SEQ ID NO: 1529579 - RNA, 19 nt, Artificial Sequence
  Description of Artificial Sequence: Synthetic oligonucleotide
  Antisense strand to SEQ ID NO: 1529578
aauuaccgucaucugccuc

SEQ ID NO: 1529580 - RNA, 19 nt, Artificial Sequence
  Description of Artificial Sequence: Synthetic oligonucleotide
  Sense strand starting at position 2860 of SEQ ID NO: 1245014
ggcagaugacgguaauuag

SEQ ID NO: 1529581 - RNA, 19 nt, Artificial Sequence
  Description of Artificial Sequence: Synthetic oligonucleotide
  Antisense strand to SEQ ID NO: 1529580
cuaauuaccgucaucugcc

SEQ ID NO: 1529582 - RNA, 19 nt, Artificial Sequence
  Description of Artificial Sequence: Synthetic oligonucleotide
  Sense strand starting at position 2863 of SEQ ID NO: 1245014
agaugacgguaauuagagu

SEQ ID NO: 1529583 - RNA, 19 nt, Artificial Sequence
  Description of Artificial Sequence: Synthetic oligonucleotide
  Antisense strand to SEQ ID NO: 1529582
acucuaauuaccgucaucu

SEQ ID NO: 1529584 - RNA, 19 nt, Artificial Sequence
  Description of Artificial Sequence: Synthetic oligonucleotide
  Sense strand starting at position 2869 of SEQ ID NO: 1245014
cgguaauuagagugggaug

SEQ ID NO: 1529585 - RNA, 19 nt, Artificial Sequence
  Description of Artificial Sequence: Synthetic oligonucleotide
  Antisense strand to SEQ ID NO: 1529584
caucccacucuaauuaccg

SEQ ID NO: 1529586 - RNA, 19 nt, Artificial Sequence
  Description of Artificial Sequence: Synthetic oligonucleotide
  Sense strand starting at position 2969 of SEQ ID NO: 1245014
ccucguggcagucaggaaa

SEQ ID NO: 1529587 - RNA, 19 nt, Artificial Sequence
  Description of Artificial Sequence: Synthetic oligonucleotide
  Antisense strand to SEQ ID NO: 1529586
uuuccugacugccacgagg

SEQ ID NO: 1529588 - RNA, 19 nt, Artificial Sequence
  Description of Artificial Sequence: Synthetic oligonucleotide
  Sense strand starting at position 3017 of SEQ ID NO: 1245014
gcaguuucccagcaggaaa

SEQ ID NO: 1529589 - RNA, 19 nt, Artificial Sequence
  Description of Artificial Sequence: Synthetic oligonucleotide
  Antisense strand to SEQ ID NO: 1529588
uuuccugcugggaaacugc

SEQ ID NO: 1529590 - RNA, 19 nt, Artificial Sequence
  Description of Artificial Sequence: Synthetic oligonucleotide
  Sense strand starting at position 3089 of SEQ ID NO: 1245014
cugccuuucgcucaagaca

SEQ ID NO: 1529591 - RNA, 19 nt, Artificial Sequence
  Description of Artificial Sequence: Synthetic oligonucleotide
  Antisense strand to SEQ ID NO: 1529590
ugucuugagcgaaaggcag

SEQ ID NO: 1529592 - RNA, 19 nt, Artificial Sequence
  Description of Artificial Sequence: Synthetic oligonucleotide
  Sense strand starting at position 3318 of SEQ ID NO: 1245014
auaucuauugcaugugaau

SEQ ID NO: 1529593 - RNA, 19 nt, Artificial Sequence
  Description of Artificial Sequence: Synthetic oligonucleotide
  Antisense strand to SEQ ID NO: 1529592
auucacaugcaauagauau

SEQ ID NO: 1529594 - RNA, 19 nt, Artificial Sequence
  Description of Artificial Sequence: Synthetic oligonucleotide
  Sense strand starting at position 3372 of SEQ ID NO: 1245014
ccaaauaccucaguauugu

SEQ ID NO: 1529595 - RNA, 19 nt, Artificial Sequence
  Description of Artificial Sequence: Synthetic oligonucleotide
  Antisense strand to SEQ ID NO: 1529594
acaauacugagguauuugg

SEQ ID NO: 1529596 - RNA, 19 nt, Artificial Sequence
  Description of Artificial Sequence: Synthetic oligonucleotide
  Sense strand starting at position 3526 of SEQ ID NO: 1245014
agaacuguuuagcauuuaa

SEQ ID NO: 1529597 - RNA, 19 nt, Artificial Sequence
  Description of Artificial Sequence: Synthetic oligonucleotide
  Antisense strand to SEQ ID NO: 1529596
uuaaaugcuaaacaguucu

SEQ ID NO: 1529598 - RNA, 19 nt, Artificial Sequence
  Description of Artificial Sequence: Synthetic oligonucleotide
  Sense strand starting at position 3553 of SEQ ID NO: 1245014
cuaagaugugauggauucu

SEQ ID NO: 1529599 - RNA, 19 nt, Artificial Sequence
  Description of Artificial Sequence: Synthetic oligonucleotide
  Antisense strand to SEQ ID NO: 1529598
agaauccaucacaucuuag

SEQ ID NO: 1529600 - RNA, 19 nt, Artificial Sequence
  Description of Artificial Sequence: Synthetic oligonucleotide
  Sense strand starting at position 3559 of SEQ ID NO: 1245014
ugugauggauucuuuagau

SEQ ID NO: 1529601 - RNA, 19 nt, Artificial Sequence
  Description of Artificial Sequence: Synthetic oligonucleotide
  Antisense strand to SEQ ID NO: 1529600
aucuaaagaauccaucaca

SEQ ID NO: 1529602 - RNA, 19 nt, Artificial Sequence
  Description of Artificial Sequence: Synthetic oligonucleotide
  Sense strand starting at position 3568 of SEQ ID NO: 1245014
uucuuuagauuaguaagag

SEQ ID NO: 1529603 - RNA, 19 nt, Artificial Sequence
  Description of Artificial Sequence: Synthetic oligonucleotide
  Antisense strand to SEQ ID NO: 1529602
cucuuacuaaucuaaagaa

SEQ ID NO: 1529604 - RNA, 19 nt, Artificial Sequence
  Description of Artificial Sequence: Synthetic oligonucleotide
  Sense strand starting at position 3606 of SEQ ID NO: 1245014
cugcuucuugagcaaguuu

SEQ ID NO: 1529605 - RNA, 19 nt, Artificial Sequence
  Description of Artificial Sequence: Synthetic oligonucleotide
  Antisense strand to SEQ ID NO: 1529604
aaacuugcucaagaagcag

SEQ ID NO: 1529606 - RNA, 19 nt, Artificial Sequence
  Description of Artificial Sequence: Synthetic oligonucleotide
  Sense strand starting at position 3719 of SEQ ID NO: 1245014
gggccagaaagucauguuu

SEQ ID NO: 1529607 - RNA, 19 nt, Artificial Sequence
  Description of Artificial Sequence: Synthetic oligonucleotide
  Antisense strand to SEQ ID NO: 1529606
aaacaugacuuucuggccc

SEQ ID NO: 1529608 - RNA, 19 nt, Artificial Sequence
  Description of Artificial Sequence: Synthetic oligonucleotide
  Sense strand starting at position 3725 of SEQ ID NO: 1245014
gaaagucauguuuguuaca

SEQ ID NO: 1529609 - RNA, 19 nt, Artificial Sequence
  Description of Artificial Sequence: Synthetic oligonucleotide
  Antisense strand to SEQ ID NO: 1529608
uguaacaaacaugacuuuc

SEQ ID NO: 1529610 - RNA, 19 nt, Artificial Sequence
  Description of Artificial Sequence: Synthetic oligonucleotide
  Sense strand starting at position 3754 of SEQ ID NO: 1245014
aauauugugugagcgaaua

SEQ ID NO: 1529611 - RNA, 19 nt, Artificial Sequence
  Description of Artificial Sequence: Synthetic oligonucleotide
  Antisense strand to SEQ ID NO: 1529610
uauucgcucacacaauauu

SEQ ID NO: 1529612 - RNA, 19 nt, Artificial Sequence
  Description of Artificial Sequence: Synthetic oligonucleotide
  Sense strand starting at position 3756 of SEQ ID NO: 1245014
uauugugugagcgaauauu

SEQ ID NO: 1529613 - RNA, 19 nt, Artificial Sequence
  Description of Artificial Sequence: Synthetic oligonucleotide
  Antisense strand to SEQ ID NO: 1529612
aauauucgcucacacaaua

SEQ ID NO: 1529614 - RNA, 19 nt, Artificial Sequence
  Description of Artificial Sequence: Synthetic oligonucleotide
  Sense strand starting at position 3766 of SEQ ID NO: 1245014
gcgaauauuuguguugcca

SEQ ID NO: 1529615 - RNA, 19 nt, Artificial Sequence
  Description of Artificial Sequence: Synthetic oligonucleotide
  Antisense strand to SEQ ID NO: 1529614
uggcaacacaaauauucgc

SEQ ID NO: 1529616 - RNA, 19 nt, Artificial Sequence
  Description of Artificial Sequence: Synthetic oligonucleotide
  Sense strand starting at position 3830 of SEQ ID NO: 1245014
aggauauugguauguuaug

SEQ ID NO: 1529617 - RNA, 19 nt, Artificial Sequence
  Description of Artificial Sequence: Synthetic oligonucleotide
  Antisense strand to SEQ ID NO: 1529616
cauaacauaccaauauccu

SEQ ID NO: 1529618 - RNA, 19 nt, Artificial Sequence
  Description of Artificial Sequence: Synthetic oligonucleotide
  Sense strand starting at position 3831 of SEQ ID NO: 1245014
ggauauugguauguuaugu

SEQ ID NO: 1529619 - RNA, 19 nt, Artificial Sequence
  Description of Artificial Sequence: Synthetic oligonucleotide
  Antisense strand to SEQ ID NO: 1529618
acauaacauaccaauaucc

SEQ ID NO: 1529620 - RNA, 19 nt, Artificial Sequence
  Description of Artificial Sequence: Synthetic oligonucleotide
  Sense strand starting at position 3836 of SEQ ID NO: 1245014
uugguauguuauguaacaa

SEQ ID NO: 1529621 - RNA, 19 nt, Artificial Sequence
  Description of Artificial Sequence: Synthetic oligonucleotide
  Antisense strand to SEQ ID NO: 1529620
uuguuacauaacauaccaa

SEQ ID NO: 1529622 - RNA, 19 nt, Artificial Sequence
  Description of Artificial Sequence: Synthetic oligonucleotide
  Sense strand starting at position 3837 of SEQ ID NO: 1245014
ugguauguuauguaacaag

SEQ ID NO: 1529623 - RNA, 19 nt, Artificial Sequence
  Description of Artificial Sequence: Synthetic oligonucleotide
  Antisense strand to SEQ ID NO: 1529622
cuuguuacauaacauacca

SEQ ID NO: 1529624 - RNA, 19 nt, Artificial Sequence
  Description of Artificial Sequence: Synthetic oligonucleotide
  Sense strand starting at position 3885 of SEQ ID NO: 1245014
aagauaacguuagcuaaag

SEQ ID NO: 1529625 - RNA, 19 nt, Artificial Sequence
  Description of Artificial Sequence: Synthetic oligonucleotide
  Antisense strand to SEQ ID NO: 1529624
cuuuagcuaacguuaucuu

SEQ ID NO: 1529626 - RNA, 19 nt, Artificial Sequence
  Description of Artificial Sequence: Synthetic oligonucleotide
  Sense strand starting at position 3886 of SEQ ID NO: 1245014
agauaacguuagcuaaaga

SEQ ID NO: 1529627 - RNA, 19 nt, Artificial Sequence
  Description of Artificial Sequence: Synthetic oligonucleotide
  Antisense strand to SEQ ID NO: 1529626
ucuuuagcuaacguuaucu

SEQ ID NO: 1529628 - RNA, 19 nt, Artificial Sequence
  Description of Artificial Sequence: Synthetic oligonucleotide
  Sense strand starting at position 3902 of SEQ ID NO: 1245014
agaagacuagccugauaca

SEQ ID NO: 1529629 - RNA, 19 nt, Artificial Sequence
  Description of Artificial Sequence: Synthetic oligonucleotide
  Antisense strand to SEQ ID NO: 1529628
uguaucaggcuagucuucu

SEQ ID NO: 1529630 - RNA, 19 nt, Artificial Sequence
  Description of Artificial Sequence: Synthetic oligonucleotide
  Sense strand starting at position 84 of SEQ ID NO: 1245015
acaggaaccuuguugaaua

SEQ ID NO: 1529631 - RNA, 19 nt, Artificial Sequence
  Description of Artificial Sequence: Synthetic oligonucleotide
  Antisense strand to SEQ ID NO: 1529630
uauucaacaagguuccugu

SEQ ID NO: 1529632 - RNA, 19 nt, Artificial Sequence
  Description of Artificial Sequence: Synthetic oligonucleotide
  Sense strand starting at position 151 of SEQ ID NO: 1245015
uccuaaauaugaguucuag

SEQ ID NO: 1529633 - RNA, 19 nt, Artificial Sequence
  Description of Artificial Sequence: Synthetic oligonucleotide
  Antisense strand to SEQ ID NO: 1529632
cuagaacucauauuuagga

SEQ ID NO: 1529634 - RNA, 19 nt, Artificial Sequence
  Description of Artificial Sequence: Synthetic oligonucleotide
  Sense strand starting at position 157 of SEQ ID NO: 1245015
auaugaguucuagaggccu

SEQ ID NO: 1529635 - RNA, 19 nt, Artificial Sequence
  Description of Artificial Sequence: Synthetic oligonucleotide
  Antisense strand to SEQ ID NO: 1529634
aggccucuagaacucauau

SEQ ID NO: 1529636 - RNA, 19 nt, Artificial Sequence
  Description of Artificial Sequence: Synthetic oligonucleotide
  Sense strand starting at position 199 of SEQ ID NO: 1245015
ucuuauuucugaugauaag

SEQ ID NO: 1529637 - RNA, 19 nt, Artificial Sequence
  Description of Artificial Sequence: Synthetic oligonucleotide
  Antisense strand to SEQ ID NO: 1529636
cuuaucaucagaaauaaga

SEQ ID NO: 1529638 - RNA, 19 nt, Artificial Sequence
  Description of Artificial Sequence: Synthetic oligonucleotide
  Sense strand starting at position 221 of SEQ ID NO: 1245015
gacuaacccugagguuauu

SEQ ID NO: 1529639 - RNA, 19 nt, Artificial Sequence
  Description of Artificial Sequence: Synthetic oligonucleotide
  Antisense strand to SEQ ID NO: 1529638
aauaaccucaggguuaguc

SEQ ID NO: 1529640 - RNA, 19 nt, Artificial Sequence
  Description of Artificial Sequence: Synthetic oligonucleotide
  Sense strand starting at position 400 of SEQ ID NO: 1245015
acaugaccuuucguuuaau

SEQ ID NO: 1529641 - RNA, 19 nt, Artificial Sequence
  Description of Artificial Sequence: Synthetic oligonucleotide
  Antisense strand to SEQ ID NO: 1529640
auuaaacgaaaggucaugu

SEQ ID NO: 1529642 - RNA, 19 nt, Artificial Sequence
  Description of Artificial Sequence: Synthetic oligonucleotide
  Sense strand starting at position 403 of SEQ ID NO: 1245015
ugaccuuucguuuaauacu

SEQ ID NO: 1529643 - RNA, 19 nt, Artificial Sequence
  Description of Artificial Sequence: Synthetic oligonucleotide
  Antisense strand to SEQ ID NO: 1529642
aguauuaaacgaaagguca

SEQ ID NO: 1529644 - RNA, 19 nt, Artificial Sequence
  Description of Artificial Sequence: Synthetic oligonucleotide
  Sense strand starting at position 409 of SEQ ID NO: 1245015
uucguuuaauacuacagua

SEQ ID NO: 1529645 - RNA, 19 nt, Artificial Sequence
  Description of Artificial Sequence: Synthetic oligonucleotide
  Antisense strand to SEQ ID NO: 1529644
uacuguaguauuaaacgaa

SEQ ID NO: 1529646 - RNA, 19 nt, Artificial Sequence
  Description of Artificial Sequence: Synthetic oligonucleotide
  Sense strand starting at position 411 of SEQ ID NO: 1245015
cguuuaauacuacaguauc

SEQ ID NO: 1529647 - RNA, 19 nt, Artificial Sequence
  Description of Artificial Sequence: Synthetic oligonucleotide
  Antisense strand to SEQ ID NO: 1529646
gauacuguaguauuaaacg

SEQ ID NO: 1529648 - RNA, 19 nt, Artificial Sequence
  Description of Artificial Sequence: Synthetic oligonucleotide
  Sense strand starting at position 419 of SEQ ID NO: 1245015
acuacaguaucgcacaauu

SEQ ID NO: 1529649 - RNA, 19 nt, Artificial Sequence
  Description of Artificial Sequence: Synthetic oligonucleotide
  Antisense strand to SEQ ID NO: 1529648
aauugugcgauacuguagu

SEQ ID NO: 1529650 - RNA, 19 nt, Artificial Sequence
  Description of Artificial Sequence: Synthetic oligonucleotide
  Sense strand starting at position 434 of SEQ ID NO: 1245015
aauuauaaaugugugggua

SEQ ID NO: 1529651 - RNA, 19 nt, Artificial Sequence
  Description of Artificial Sequence: Synthetic oligonucleotide
  Antisense strand to SEQ ID NO: 1529650
uacccacacauuuauaauu

SEQ ID NO: 1529652 - RNA, 19 nt, Artificial Sequence
  Description of Artificial Sequence: Synthetic oligonucleotide
  Sense strand starting at position 435 of SEQ ID NO: 1245015
auuauaaauguguggguau

SEQ ID NO: 1529653 - RNA, 19 nt, Artificial Sequence
  Description of Artificial Sequence: Synthetic oligonucleotide
  Antisense strand to SEQ ID NO: 1529652
auacccacacauuuauaau

SEQ ID NO: 1529654 - RNA, 19 nt, Artificial Sequence
  Description of Artificial Sequence: Synthetic oligonucleotide
  Sense strand starting at position 436 of SEQ ID NO: 1245015
uuauaaauguguggguauu

SEQ ID NO: 1529655 - RNA, 19 nt, Artificial Sequence
  Description of Artificial Sequence: Synthetic oligonucleotide
  Antisense strand to SEQ ID NO: 1529654
aauacccacacauuuauaa

SEQ ID NO: 1529656 - RNA, 19 nt, Artificial Sequence
  Description of Artificial Sequence: Synthetic oligonucleotide
  Sense strand starting at position 530 of SEQ ID NO: 1245015
auggacauucgaugaaguu

SEQ ID NO: 1529657 - RNA, 19 nt, Artificial Sequence
  Description of Artificial Sequence: Synthetic oligonucleotide
  Antisense strand to SEQ ID NO: 1529656
aacuucaucgaauguccau

SEQ ID NO: 1529658 - RNA, 19 nt, Artificial Sequence
  Description of Artificial Sequence: Synthetic oligonucleotide
  Sense strand starting at position 780 of SEQ ID NO: 1245015
acugaacacuauuggaaau

SEQ ID NO: 1529659 - RNA, 19 nt, Artificial Sequence
  Description of Artificial Sequence: Synthetic oligonucleotide
  Antisense strand to SEQ ID NO: 1529658
auuuccaauaguguucagu

SEQ ID NO: 1529660 - RNA, 19 nt, Artificial Sequence
  Description of Artificial Sequence: Synthetic oligonucleotide
  Sense strand starting at position 782 of SEQ ID NO: 1245015
ugaacacuauuggaaauaa

SEQ ID NO: 1529661 - RNA, 19 nt, Artificial Sequence
  Description of Artificial Sequence: Synthetic oligonucleotide
  Antisense strand to SEQ ID NO: 1529660
uuauuuccaauaguguuca

SEQ ID NO: 1529662 - RNA, 19 nt, Artificial Sequence
  Description of Artificial Sequence: Synthetic oligonucleotide
  Sense strand starting at position 819 of SEQ ID NO: 1245015
ucccauuugucaucacggu

SEQ ID NO: 1529663 - RNA, 19 nt, Artificial Sequence
  Description of Artificial Sequence: Synthetic oligonucleotide
  Antisense strand to SEQ ID NO: 1529662
accgugaugacaaauggga

SEQ ID NO: 1529664 - RNA, 19 nt, Artificial Sequence
  Description of Artificial Sequence: Synthetic oligonucleotide
  Sense strand starting at position 1238 of SEQ ID NO: 1245015
aagguccuccuuugugaga

SEQ ID NO: 1529665 - RNA, 19 nt, Artificial Sequence
  Description of Artificial Sequence: Synthetic oligonucleotide
  Antisense strand to SEQ ID NO: 1529664
ucucacaaaggaggaccuu

SEQ ID NO: 1529666 - RNA, 19 nt, Artificial Sequence
  Description of Artificial Sequence: Synthetic oligonucleotide
  Sense strand starting at position 1566 of SEQ ID NO: 1245015
ccgcgaguuguuugcaguu

SEQ ID NO: 1529667 - RNA, 19 nt, Artificial Sequence
  Description of Artificial Sequence: Synthetic oligonucleotide
  Antisense strand to SEQ ID NO: 1529666
aacugcaaacaacucgcgg

SEQ ID NO: 1529668 - RNA, 19 nt, Artificial Sequence
  Description of Artificial Sequence: Synthetic oligonucleotide
  Sense strand starting at position 1572 of SEQ ID NO: 1245015
guuguuugcaguuaaggac

SEQ ID NO: 1529669 - RNA, 19 nt, Artificial Sequence
  Description of Artificial Sequence: Synthetic oligonucleotide
  Antisense strand to SEQ ID NO: 1529668
guccuuaacugcaaacaac

SEQ ID NO: 1529670 - RNA, 19 nt, Artificial Sequence
  Description of Artificial Sequence: Synthetic oligonucleotide
  Sense strand starting at position 1599 of SEQ ID NO: 1245015
ggucacauuccagggcaua

SEQ ID NO: 1529671 - RNA, 19 nt, Artificial Sequence
  Description of Artificial Sequence: Synthetic oligonucleotide
  Antisense strand to SEQ ID NO: 1529670
uaugcccuggaaugugacc

SEQ ID NO: 1529672 - RNA, 19 nt, Artificial Sequence
  Description of Artificial Sequence: Synthetic oligonucleotide
  Sense strand starting at position 1738 of SEQ ID NO: 1245015
ggcagaggguccgagaauu

SEQ ID NO: 1529673 - RNA, 19 nt, Artificial Sequence
  Description of Artificial Sequence: Synthetic oligonucleotide
  Antisense strand to SEQ ID NO: 1529672
aauucucggacccucugcc

SEQ ID NO: 1529674 - RNA, 19 nt, Artificial Sequence
  Description of Artificial Sequence: Synthetic oligonucleotide
  Sense strand starting at position 2213 of SEQ ID NO: 1245015
gcgagagaccugggucaga

SEQ ID NO: 1529675 - RNA, 19 nt, Artificial Sequence
  Description of Artificial Sequence: Synthetic oligonucleotide
  Antisense strand to SEQ ID NO: 1529674
ucugacccaggucucucgc

SEQ ID NO: 1529676 - RNA, 19 nt, Artificial Sequence
  Description of Artificial Sequence: Synthetic oligonucleotide
  Sense strand starting at position 2272 of SEQ ID NO: 1245015
gcuguaacgguuucuguca

SEQ ID NO: 1529677 - RNA, 19 nt, Artificial Sequence
  Description of Artificial Sequence: Synthetic oligonucleotide
  Antisense strand to SEQ ID NO: 1529676
ugacagaaaccguuacagc

SEQ ID NO: 1529678 - RNA, 19 nt, Artificial Sequence
  Description of Artificial Sequence: Synthetic oligonucleotide
  Sense strand starting at position 2294 of SEQ ID NO: 1245015
caggucuucuuucccgaaa

SEQ ID NO: 1529679 - RNA, 19 nt, Artificial Sequence
  Description of Artificial Sequence: Synthetic oligonucleotide
  Antisense strand to SEQ ID NO: 1529678
uuucgggaaagaagaccug

SEQ ID NO: 1529680 - RNA, 19 nt, Artificial Sequence
  Description of Artificial Sequence: Synthetic oligonucleotide
  Sense strand starting at position 2295 of SEQ ID NO: 1245015
aggucuucuuucccgaaau

SEQ ID NO: 1529681 - RNA, 19 nt, Artificial Sequence
  Description of Artificial Sequence: Synthetic oligonucleotide
  Antisense strand to SEQ ID NO: 1529680
auuucgggaaagaagaccu

SEQ ID NO: 1529682 - RNA, 19 nt, Artificial Sequence
  Description of Artificial Sequence: Synthetic oligonucleotide
  Sense strand starting at position 2297 of SEQ ID NO: 1245015
gucuucuuucccgaaaucu

SEQ ID NO: 1529683 - RNA, 19 nt, Artificial Sequence
  Description of Artificial Sequence: Synthetic oligonucleotide
  Antisense strand to SEQ ID NO: 1529682
agauuucgggaaagaagac

SEQ ID NO: 1529684 - RNA, 19 nt, Artificial Sequence
  Description of Artificial Sequence: Synthetic oligonucleotide
  Sense strand starting at position 2309 of SEQ ID NO: 1245015
gaaaucugaggcugucacu

SEQ ID NO: 1529685 - RNA, 19 nt, Artificial Sequence
  Description of Artificial Sequence: Synthetic oligonucleotide
  Antisense strand to SEQ ID NO: 1529684
agugacagccucagauuuc

SEQ ID NO: 1529686 - RNA, 19 nt, Artificial Sequence
  Description of Artificial Sequence: Synthetic oligonucleotide
  Sense strand starting at position 2420 of SEQ ID NO: 1245015
gcgaucucggguuaccaca

SEQ ID NO: 1529687 - RNA, 19 nt, Artificial Sequence
  Description of Artificial Sequence: Synthetic oligonucleotide
  Antisense strand to SEQ ID NO: 1529686
ugugguaacccgagaucgc

SEQ ID NO: 1529688 - RNA, 19 nt, Artificial Sequence
  Description of Artificial Sequence: Synthetic oligonucleotide
  Sense strand starting at position 2965 of SEQ ID NO: 1245015
ccgagauccucccauugca

SEQ ID NO: 1529689 - RNA, 19 nt, Artificial Sequence
  Description of Artificial Sequence: Synthetic oligonucleotide
  Antisense strand to SEQ ID NO: 1529688
ugcaaugggaggaucucgg

SEQ ID NO: 1529690 - RNA, 19 nt, Artificial Sequence
  Description of Artificial Sequence: Synthetic oligonucleotide
  Sense strand starting at position 3001 of SEQ ID NO: 1245015
gugugagacuguguuucaa

SEQ ID NO: 1529691 - RNA, 19 nt, Artificial Sequence
  Description of Artificial Sequence: Synthetic oligonucleotide
  Antisense strand to SEQ ID NO: 1529690
uugaaacacagucucacac

SEQ ID NO: 1529692 - RNA, 19 nt, Artificial Sequence
  Description of Artificial Sequence: Synthetic oligonucleotide
  Sense strand starting at position 3231 of SEQ ID NO: 1245015
cuguuacaguugucaggga

SEQ ID NO: 1529693 - RNA, 19 nt, Artificial Sequence
  Description of Artificial Sequence: Synthetic oligonucleotide
  Antisense strand to SEQ ID NO: 1529692
ucccugacaacuguaacag

SEQ ID NO: 1529694 - RNA, 19 nt, Artificial Sequence
  Description of Artificial Sequence: Synthetic oligonucleotide
  Sense strand starting at position 3300 of SEQ ID NO: 1245015
gucuucuccuguuuaaccu

SEQ ID NO: 1529695 - RNA, 19 nt, Artificial Sequence
  Description of Artificial Sequence: Synthetic oligonucleotide
  Antisense strand to SEQ ID NO: 1529694
agguuaaacaggagaagac

SEQ ID NO: 1529696 - RNA, 19 nt, Artificial Sequence
  Description of Artificial Sequence: Synthetic oligonucleotide
  Sense strand starting at position 3351 of SEQ ID NO: 1245015
cagggaauuuguuagauga

SEQ ID NO: 1529697 - RNA, 19 nt, Artificial Sequence
  Description of Artificial Sequence: Synthetic oligonucleotide
  Antisense strand to SEQ ID NO: 1529696
ucaucuaacaaauucccug

SEQ ID NO: 1529698 - RNA, 19 nt, Artificial Sequence
  Description of Artificial Sequence: Synthetic oligonucleotide
  Sense strand starting at position 3353 of SEQ ID NO: 1245015
gggaauuuguuagaugagg

SEQ ID NO: 1529699 - RNA, 19 nt, Artificial Sequence
  Description of Artificial Sequence: Synthetic oligonucleotide
  Antisense strand to SEQ ID NO: 1529698
ccucaucuaacaaauuccc

SEQ ID NO: 1529700 - RNA, 19 nt, Artificial Sequence
  Description of Artificial Sequence: Synthetic oligonucleotide
  Sense strand starting at position 3382 of SEQ ID NO: 1245015
guacaugguacagaagagu

SEQ ID NO: 1529701 - RNA, 19 nt, Artificial Sequence
  Description of Artificial Sequence: Synthetic oligonucleotide
  Antisense strand to SEQ ID NO: 1529700
acucuucuguaccauguac

SEQ ID NO: 1529702 - RNA, 19 nt, Artificial Sequence
  Description of Artificial Sequence: Synthetic oligonucleotide
  Sense strand starting at position 3820 of SEQ ID NO: 1245015
aggccugagccauaucuua

SEQ ID NO: 1529703 - RNA, 19 nt, Artificial Sequence
  Description of Artificial Sequence: Synthetic oligonucleotide
  Antisense strand to SEQ ID NO: 1529702
uaagauauggcucaggccu

SEQ ID NO: 1529704 - RNA, 19 nt, Artificial Sequence
  Description of Artificial Sequence: Synthetic oligonucleotide
  Sense strand starting at position 3825 of SEQ ID NO: 1245015
ugagccauaucuuagcagu

SEQ ID NO: 1529705 - RNA, 19 nt, Artificial Sequence
  Description of Artificial Sequence: Synthetic oligonucleotide
  Antisense strand to SEQ ID NO: 1529704
acugcuaagauauggcuca

SEQ ID NO: 1529706 - RNA, 19 nt, Artificial Sequence
  Description of Artificial Sequence: Synthetic oligonucleotide
  Sense strand starting at position 3827 of SEQ ID NO: 1245015
agccauaucuuagcaguuu

SEQ ID NO: 1529707 - RNA, 19 nt, Artificial Sequence
  Description of Artificial Sequence: Synthetic oligonucleotide
  Antisense strand to SEQ ID NO: 1529706
aaacugcuaagauauggcu

SEQ ID NO: 1529708 - RNA, 19 nt, Artificial Sequence
  Description of Artificial Sequence: Synthetic oligonucleotide
  Sense strand starting at position 3900 of SEQ ID NO: 1245015
cugugauugcaccagugga

SEQ ID NO: 1529709 - RNA, 19 nt, Artificial Sequence
  Description of Artificial Sequence: Synthetic oligonucleotide
  Antisense strand to SEQ ID NO: 1529708
uccacuggugcaaucacag

SEQ ID NO: 1529710 - RNA, 19 nt, Artificial Sequence
  Description of Artificial Sequence: Synthetic oligonucleotide
  Sense strand starting at position 80 of SEQ ID NO: 1245016
cccaaauugucuccaguug

SEQ ID NO: 1529711 - RNA, 19 nt, Artificial Sequence
  Description of Artificial Sequence: Synthetic oligonucleotide
  Antisense strand to SEQ ID NO: 1529710
caacuggagacaauuuggg

SEQ ID NO: 1529712 - RNA, 19 nt, Artificial Sequence
  Description of Artificial Sequence: Synthetic oligonucleotide
  Sense strand starting at position 85 of SEQ ID NO: 1245016
auugucuccaguugaagga

SEQ ID NO: 1529713 - RNA, 19 nt, Artificial Sequence
  Description of Artificial Sequence: Synthetic oligonucleotide
  Antisense strand to SEQ ID NO: 1529712
uccuucaacuggagacaau

SEQ ID NO: 1529714 - RNA, 19 nt, Artificial Sequence
  Description of Artificial Sequence: Synthetic oligonucleotide
  Sense strand starting at position 196 of SEQ ID NO: 1245016
gucagucuaucaucucaca

SEQ ID NO: 1529715 - RNA, 19 nt, Artificial Sequence
  Description of Artificial Sequence: Synthetic oligonucleotide
  Antisense strand to SEQ ID NO: 1529714
ugugagaugauagacugac

SEQ ID NO: 1529716 - RNA, 19 nt, Artificial Sequence
  Description of Artificial Sequence: Synthetic oligonucleotide
  Sense strand starting at position 266 of SEQ ID NO: 1245016
guaggacuucucugccaag

SEQ ID NO: 1529717 - RNA, 19 nt, Artificial Sequence
  Description of Artificial Sequence: Synthetic oligonucleotide
  Antisense strand to SEQ ID NO: 1529716
cuuggcagagaaguccuac

SEQ ID NO: 1529718 - RNA, 19 nt, Artificial Sequence
  Description of Artificial Sequence: Synthetic oligonucleotide
  Sense strand starting at position 267 of SEQ ID NO: 1245016
uaggacuucucugccaagu

SEQ ID NO: 1529719 - RNA, 19 nt, Artificial Sequence
  Description of Artificial Sequence: Synthetic oligonucleotide
  Antisense strand to SEQ ID NO: 1529718
acuuggcagagaaguccua

SEQ ID NO: 1529720 - RNA, 19 nt, Artificial Sequence
  Description of Artificial Sequence: Synthetic oligonucleotide
  Sense strand starting at position 269 of SEQ ID NO: 1245016
ggacuucucugccaaguua

SEQ ID NO: 1529721 - RNA, 19 nt, Artificial Sequence
  Description of Artificial Sequence: Synthetic oligonucleotide
  Antisense strand to SEQ ID NO: 1529720
uaacuuggcagagaagucc

SEQ ID NO: 1529722 - RNA, 19 nt, Artificial Sequence
  Description of Artificial Sequence: Synthetic oligonucleotide
  Sense strand starting at position 281 of SEQ ID NO: 1245016
caaguuagaugucaccuga

SEQ ID NO: 1529723 - RNA, 19 nt, Artificial Sequence
  Description of Artificial Sequence: Synthetic oligonucleotide
  Antisense strand to SEQ ID NO: 1529722
ucaggugacaucuaacuug

SEQ ID NO: 1529724 - RNA, 19 nt, Artificial Sequence
  Description of Artificial Sequence: Synthetic oligonucleotide
  Sense strand starting at position 291 of SEQ ID NO: 1245016
gucaccugauggguuuaua

SEQ ID NO: 1529725 - RNA, 19 nt, Artificial Sequence
  Description of Artificial Sequence: Synthetic oligonucleotide
  Antisense strand to SEQ ID NO: 1529724
uauaaacccaucaggugac

SEQ ID NO: 1529726 - RNA, 19 nt, Artificial Sequence
  Description of Artificial Sequence: Synthetic oligonucleotide
  Sense strand starting at position 326 of SEQ ID NO: 1245016
ucaggugguuuccaggagu

SEQ ID NO: 1529727 - RNA, 19 nt, Artificial Sequence
  Description of Artificial Sequence: Synthetic oligonucleotide
  Antisense strand to SEQ ID NO: 1529726
acuccuggaaaccaccuga

SEQ ID NO: 1529728 - RNA, 19 nt, Artificial Sequence
  Description of Artificial Sequence: Synthetic oligonucleotide
  Sense strand starting at position 329 of SEQ ID NO: 1245016
ggugguuuccaggagugag

SEQ ID NO: 1529729 - RNA, 19 nt, Artificial Sequence
  Description of Artificial Sequence: Synthetic oligonucleotide
  Antisense strand to SEQ ID NO: 1529728
cucacuccuggaaaccacc

SEQ ID NO: 1529730 - RNA, 19 nt, Artificial Sequence
  Description of Artificial Sequence: Synthetic oligonucleotide
  Sense strand starting at position 442 of SEQ ID NO: 1245016
gacugaugugcucggaccu

SEQ ID NO: 1529731 - RNA, 19 nt, Artificial Sequence
  Description of Artificial Sequence: Synthetic oligonucleotide
  Antisense strand to SEQ ID NO: 1529730
agguccgagcacaucaguc

SEQ ID NO: 1529732 - RNA, 19 nt, Artificial Sequence
  Description of Artificial Sequence: Synthetic oligonucleotide
  Sense strand starting at position 488 of SEQ ID NO: 1245016
uugagucugucacccuaga

SEQ ID NO: 1529733 - RNA, 19 nt, Artificial Sequence
  Description of Artificial Sequence: Synthetic oligonucleotide
  Antisense strand to SEQ ID NO: 1529732
ucuagggugacagacucaa

SEQ ID NO: 1529734 - RNA, 19 nt, Artificial Sequence
  Description of Artificial Sequence: Synthetic oligonucleotide
  Sense strand starting at position 600 of SEQ ID NO: 1245016
gguagacugcucugaacac

SEQ ID NO: 1529735 - RNA, 19 nt, Artificial Sequence
  Description of Artificial Sequence: Synthetic oligonucleotide
  Antisense strand to SEQ ID NO: 1529734
guguucagagcagucuacc

SEQ ID NO: 1529736 - RNA, 19 nt, Artificial Sequence
  Description of Artificial Sequence: Synthetic oligonucleotide
  Sense strand starting at position 601 of SEQ ID NO: 1245016
guagacugcucugaacaca

SEQ ID NO: 1529737 - RNA, 19 nt, Artificial Sequence
  Description of Artificial Sequence: Synthetic oligonucleotide
  Antisense strand to SEQ ID NO: 1529736
uguguucagagcagucuac

SEQ ID NO: 1529738 - RNA, 19 nt, Artificial Sequence
  Description of Artificial Sequence: Synthetic oligonucleotide
  Sense strand starting at position 1043 of SEQ ID NO: 1245016
gggaauucgaggcagugaa

SEQ ID NO: 1529739 - RNA, 19 nt, Artificial Sequence
  Description of Artificial Sequence: Synthetic oligonucleotide
  Antisense strand to SEQ ID NO: 1529738
uucacugccucgaauuccc

SEQ ID NO: 1529740 - RNA, 19 nt, Artificial Sequence
  Description of Artificial Sequence: Synthetic oligonucleotide
  Sense strand starting at position 1142 of SEQ ID NO: 1245016
gagggcuaugcauggcaga

SEQ ID NO: 1529741 - RNA, 19 nt, Artificial Sequence
  Description of Artificial Sequence: Synthetic oligonucleotide
  Antisense strand to SEQ ID NO: 1529740
ucugccaugcauagcccuc

SEQ ID NO: 1529742 - RNA, 19 nt, Artificial Sequence
  Description of Artificial Sequence: Synthetic oligonucleotide
  Sense strand starting at position 1320 of SEQ ID NO: 1245016
ggcuccugcucuccacaua

SEQ ID NO: 1529743 - RNA, 19 nt, Artificial Sequence
  Description of Artificial Sequence: Synthetic oligonucleotide
  Antisense strand to SEQ ID NO: 1529742
uauguggagagcaggagcc

SEQ ID NO: 1529744 - RNA, 19 nt, Artificial Sequence
  Description of Artificial Sequence: Synthetic oligonucleotide
  Sense strand starting at position 1509 of SEQ ID NO: 1245016
gggugagcgcuguguugaa

SEQ ID NO: 1529745 - RNA, 19 nt, Artificial Sequence
  Description of Artificial Sequence: Synthetic oligonucleotide
  Antisense strand to SEQ ID NO: 1529744
uucaacacagcgcucaccc

SEQ ID NO: 1529746 - RNA, 19 nt, Artificial Sequence
  Description of Artificial Sequence: Synthetic oligonucleotide
  Sense strand starting at position 1510 of SEQ ID NO: 1245016
ggugagcgcuguguugaaa

SEQ ID NO: 1529747 - RNA, 19 nt, Artificial Sequence
  Description of Artificial Sequence: Synthetic oligonucleotide
  Antisense strand to SEQ ID NO: 1529746
uuucaacacagcgcucacc

SEQ ID NO: 1529748 - RNA, 19 nt, Artificial Sequence
  Description of Artificial Sequence: Synthetic oligonucleotide
  Sense strand starting at position 1513 of SEQ ID NO: 1245016
gagcgcuguguugaaagaa

SEQ ID NO: 1529749 - RNA, 19 nt, Artificial Sequence
  Description of Artificial Sequence: Synthetic oligonucleotide
  Antisense strand to SEQ ID NO: 1529748
uucuuucaacacagcgcuc

SEQ ID NO: 1529750 - RNA, 19 nt, Artificial Sequence
  Description of Artificial Sequence: Synthetic oligonucleotide
  Sense strand starting at position 2066 of SEQ ID NO: 1245016
uccgcaaacgcucaaagau

SEQ ID NO: 1529751 - RNA, 19 nt, Artificial Sequence
  Description of Artificial Sequence: Synthetic oligonucleotide
  Antisense strand to SEQ ID NO: 1529750
aucuuugagcguuugcgga

SEQ ID NO: 1529752 - RNA, 19 nt, Artificial Sequence
  Description of Artificial Sequence: Synthetic oligonucleotide
  Sense strand starting at position 2260 of SEQ ID NO: 1245016
ccugcauuucgguggcuga

SEQ ID NO: 1529753 - RNA, 19 nt, Artificial Sequence
  Description of Artificial Sequence: Synthetic oligonucleotide
  Antisense strand to SEQ ID NO: 1529752
ucagccaccgaaaugcagg

SEQ ID NO: 1529754 - RNA, 19 nt, Artificial Sequence
  Description of Artificial Sequence: Synthetic oligonucleotide
  Sense strand starting at position 2310 of SEQ ID NO: 1245016
cagaguguucugugcuuaa

SEQ ID NO: 1529755 - RNA, 19 nt, Artificial Sequence
  Description of Artificial Sequence: Synthetic oligonucleotide
  Antisense strand to SEQ ID NO: 1529754
uuaagcacagaacacucug

SEQ ID NO: 1529756 - RNA, 19 nt, Artificial Sequence
  Description of Artificial Sequence: Synthetic oligonucleotide
  Sense strand starting at position 2313 of SEQ ID NO: 1245016
aguguucugugcuuaacga

SEQ ID NO: 1529757 - RNA, 19 nt, Artificial Sequence
  Description of Artificial Sequence: Synthetic oligonucleotide
  Antisense strand to SEQ ID NO: 1529756
ucguuaagcacagaacacu

SEQ ID NO: 1529758 - RNA, 19 nt, Artificial Sequence
  Description of Artificial Sequence: Synthetic oligonucleotide
  Sense strand starting at position 2314 of SEQ ID NO: 1245016
guguucugugcuuaacgau

SEQ ID NO: 1529759 - RNA, 19 nt, Artificial Sequence
  Description of Artificial Sequence: Synthetic oligonucleotide
  Antisense strand to SEQ ID NO: 1529758
aucguuaagcacagaacac

SEQ ID NO: 1529760 - RNA, 19 nt, Artificial Sequence
  Description of Artificial Sequence: Synthetic oligonucleotide
  Sense strand starting at position 2320 of SEQ ID NO: 1245016
ugugcuuaacgaugugaga

SEQ ID NO: 1529761 - RNA, 19 nt, Artificial Sequence
  Description of Artificial Sequence: Synthetic oligonucleotide
  Antisense strand to SEQ ID NO: 1529760
ucucacaucguuaagcaca

SEQ ID NO: 1529762 - RNA, 19 nt, Artificial Sequence
  Description of Artificial Sequence: Synthetic oligonucleotide
  Sense strand starting at position 2322 of SEQ ID NO: 1245016
ugcuuaacgaugugagaug

SEQ ID NO: 1529763 - RNA, 19 nt, Artificial Sequence
  Description of Artificial Sequence: Synthetic oligonucleotide
  Antisense strand to SEQ ID NO: 1529762
caucucacaucguuaagca

SEQ ID NO: 1529764 - RNA, 19 nt, Artificial Sequence
  Description of Artificial Sequence: Synthetic oligonucleotide
  Sense strand starting at position 2350 of SEQ ID NO: 1245016
uugagagucuccuugcucu

SEQ ID NO: 1529765 - RNA, 19 nt, Artificial Sequence
  Description of Artificial Sequence: Synthetic oligonucleotide
  Antisense strand to SEQ ID NO: 1529764
agagcaaggagacucucaa

SEQ ID NO: 1529766 - RNA, 19 nt, Artificial Sequence
  Description of Artificial Sequence: Synthetic oligonucleotide
  Sense strand starting at position 2512 of SEQ ID NO: 1245016
gggagacucugucucuauc

SEQ ID NO: 1529767 - RNA, 19 nt, Artificial Sequence
  Description of Artificial Sequence: Synthetic oligonucleotide
  Antisense strand to SEQ ID NO: 1529766
gauagagacagagucuccc

SEQ ID NO: 1529768 - RNA, 19 nt, Artificial Sequence
  Description of Artificial Sequence: Synthetic oligonucleotide
  Sense strand starting at position 2675 of SEQ ID NO: 1245016
gcgagauucugccuuccac

SEQ ID NO: 1529769 - RNA, 19 nt, Artificial Sequence
  Description of Artificial Sequence: Synthetic oligonucleotide
  Antisense strand to SEQ ID NO: 1529768
guggaaggcagaaucucgc

SEQ ID NO: 1529770 - RNA, 19 nt, Artificial Sequence
  Description of Artificial Sequence: Synthetic oligonucleotide
  Sense strand starting at position 2823 of SEQ ID NO: 1245016
uacagaaauuagccguauu

SEQ ID NO: 1529771 - RNA, 19 nt, Artificial Sequence
  Description of Artificial Sequence: Synthetic oligonucleotide
  Antisense strand to SEQ ID NO: 1529770
aauacggcuaauuucugua

SEQ ID NO: 1529772 - RNA, 19 nt, Artificial Sequence
  Description of Artificial Sequence: Synthetic oligonucleotide
  Sense strand starting at position 2826 of SEQ ID NO: 1245016
agaaauuagccguauuagc

SEQ ID NO: 1529773 - RNA, 19 nt, Artificial Sequence
  Description of Artificial Sequence: Synthetic oligonucleotide
  Antisense strand to SEQ ID NO: 1529772
gcuaauacggcuaauuucu

SEQ ID NO: 1529774 - RNA, 19 nt, Artificial Sequence
  Description of Artificial Sequence: Synthetic oligonucleotide
  Sense strand starting at position 3086 of SEQ ID NO: 1245016
aggccaacucaugagcaaa

SEQ ID NO: 1529775 - RNA, 19 nt, Artificial Sequence
  Description of Artificial Sequence: Synthetic oligonucleotide
  Antisense strand to SEQ ID NO: 1529774
uuugcucaugaguuggccu

SEQ ID NO: 1529776 - RNA, 19 nt, Artificial Sequence
  Description of Artificial Sequence: Synthetic oligonucleotide
  Sense strand starting at position 3099 of SEQ ID NO: 1245016
agcaaagcccugggacauu

SEQ ID NO: 1529777 - RNA, 19 nt, Artificial Sequence
  Description of Artificial Sequence: Synthetic oligonucleotide
  Antisense strand to SEQ ID NO: 1529776
aaugucccagggcuuugcu

SEQ ID NO: 1529778 - RNA, 19 nt, Artificial Sequence
  Description of Artificial Sequence: Synthetic oligonucleotide
  Sense strand starting at position 3110 of SEQ ID NO: 1245016
gggacauucuuguccugaa

SEQ ID NO: 1529779 - RNA, 19 nt, Artificial Sequence
  Description of Artificial Sequence: Synthetic oligonucleotide
  Antisense strand to SEQ ID NO: 1529778
uucaggacaagaauguccc

SEQ ID NO: 1529780 - RNA, 19 nt, Artificial Sequence
  Description of Artificial Sequence: Synthetic oligonucleotide
  Sense strand starting at position 3125 of SEQ ID NO: 1245016
ugaaguggauucucagcuu

SEQ ID NO: 1529781 - RNA, 19 nt, Artificial Sequence
  Description of Artificial Sequence: Synthetic oligonucleotide
  Antisense strand to SEQ ID NO: 1529780
aagcugagaauccacuuca

SEQ ID NO: 1529782 - RNA, 19 nt, Artificial Sequence
  Description of Artificial Sequence: Synthetic oligonucleotide
  Sense strand starting at position 3243 of SEQ ID NO: 1245016
acuugauccuggcccagau

SEQ ID NO: 1529783 - RNA, 19 nt, Artificial Sequence
  Description of Artificial Sequence: Synthetic oligonucleotide
  Antisense strand to SEQ ID NO: 1529782
aucugggccaggaucaagu

SEQ ID NO: 1529784 - RNA, 19 nt, Artificial Sequence
  Description of Artificial Sequence: Synthetic oligonucleotide
  Sense strand starting at position 3400 of SEQ ID NO: 1245016
acaucugugucugucauca

SEQ ID NO: 1529785 - RNA, 19 nt, Artificial Sequence
  Description of Artificial Sequence: Synthetic oligonucleotide
  Antisense strand to SEQ ID NO: 1529784
ugaugacagacacagaugu

SEQ ID NO: 1529786 - RNA, 19 nt, Artificial Sequence
  Description of Artificial Sequence: Synthetic oligonucleotide
  Sense strand starting at position 3422 of SEQ ID NO: 1245016
gacuuuaucgaacgccuua

SEQ ID NO: 1529787 - RNA, 19 nt, Artificial Sequence
  Description of Artificial Sequence: Synthetic oligonucleotide
  Antisense strand to SEQ ID NO: 1529786
uaaggcguucgauaaaguc

SEQ ID NO: 1529788 - RNA, 19 nt, Artificial Sequence
  Description of Artificial Sequence: Synthetic oligonucleotide
  Sense strand starting at position 3628 of SEQ ID NO: 1245016
gcgaaacagcgcugucacu

SEQ ID NO: 1529789 - RNA, 19 nt, Artificial Sequence
  Description of Artificial Sequence: Synthetic oligonucleotide
  Antisense strand to SEQ ID NO: 1529788
agugacagcgcuguuucgc

SEQ ID NO: 1529790 - RNA, 19 nt, Artificial Sequence
  Description of Artificial Sequence: Synthetic oligonucleotide
  Sense strand starting at position 1 of SEQ ID NO: 1245017
gaggaaucugccuagugag

SEQ ID NO: 1529791 - RNA, 19 nt, Artificial Sequence
  Description of Artificial Sequence: Synthetic oligonucleotide
  Antisense strand to SEQ ID NO: 1529790
cucacuaggcagauuccuc

SEQ ID NO: 1529792 - RNA, 19 nt, Artificial Sequence
  Description of Artificial Sequence: Synthetic oligonucleotide
  Sense strand starting at position 18 of SEQ ID NO: 1245017
agcgaauucuguucugagg

SEQ ID NO: 1529793 - RNA, 19 nt, Artificial Sequence
  Description of Artificial Sequence: Synthetic oligonucleotide
  Antisense strand to SEQ ID NO: 1529792
ccucagaacagaauucgcu

SEQ ID NO: 1529794 - RNA, 19 nt, Artificial Sequence
  Description of Artificial Sequence: Synthetic oligonucleotide
  Sense strand starting at position 62 of SEQ ID NO: 1245017
cccagugugcgucagagau

SEQ ID NO: 1529795 - RNA, 19 nt, Artificial Sequence
  Description of Artificial Sequence: Synthetic oligonucleotide
  Antisense strand to SEQ ID NO: 1529794
aucucugacgcacacuggg

SEQ ID NO: 1529796 - RNA, 19 nt, Artificial Sequence
  Description of Artificial Sequence: Synthetic oligonucleotide
  Sense strand starting at position 64 of SEQ ID NO: 1245017
cagugugcgucagagauac

SEQ ID NO: 1529797 - RNA, 19 nt, Artificial Sequence
  Description of Artificial Sequence: Synthetic oligonucleotide
  Antisense strand to SEQ ID NO: 1529796
guaucucugacgcacacug

SEQ ID NO: 1529798 - RNA, 19 nt, Artificial Sequence
  Description of Artificial Sequence: Synthetic oligonucleotide
  Sense strand starting at position 305 of SEQ ID NO: 1245017
caaagauuagcugggccau

SEQ ID NO: 1529799 - RNA, 19 nt, Artificial Sequence
  Description of Artificial Sequence: Synthetic oligonucleotide
  Antisense strand to SEQ ID NO: 1529798
auggcccagcuaaucuuug

SEQ ID NO: 1529800 - RNA, 19 nt, Artificial Sequence
  Description of Artificial Sequence: Synthetic oligonucleotide
  Sense strand starting at position 356 of SEQ ID NO: 1245017
ugcgcuacccugcauuuau

SEQ ID NO: 1529801 - RNA, 19 nt, Artificial Sequence
  Description of Artificial Sequence: Synthetic oligonucleotide
  Antisense strand to SEQ ID NO: 1529800
auaaaugcaggguagcgca

SEQ ID NO: 1529802 - RNA, 19 nt, Artificial Sequence
  Description of Artificial Sequence: Synthetic oligonucleotide
  Sense strand starting at position 588 of SEQ ID NO: 1245017
aaagaauccuguggagaau

SEQ ID NO: 1529803 - RNA, 19 nt, Artificial Sequence
  Description of Artificial Sequence: Synthetic oligonucleotide
  Antisense strand to SEQ ID NO: 1529802
auucuccacaggauucuuu

SEQ ID NO: 1529804 - RNA, 19 nt, Artificial Sequence
  Description of Artificial Sequence: Synthetic oligonucleotide
  Sense strand starting at position 591 of SEQ ID NO: 1245017
gaauccuguggagaauguu

SEQ ID NO: 1529805 - RNA, 19 nt, Artificial Sequence
  Description of Artificial Sequence: Synthetic oligonucleotide
  Antisense strand to SEQ ID NO: 1529804
aacauucuccacaggauuc

SEQ ID NO: 1529806 - RNA, 19 nt, Artificial Sequence
  Description of Artificial Sequence: Synthetic oligonucleotide
  Sense strand starting at position 599 of SEQ ID NO: 1245017
uggagaauguugcaaacac

SEQ ID NO: 1529807 - RNA, 19 nt, Artificial Sequence
  Description of Artificial Sequence: Synthetic oligonucleotide
  Antisense strand to SEQ ID NO: 1529806
guguuugcaacauucucca

SEQ ID NO: 1529808 - RNA, 19 nt, Artificial Sequence
  Description of Artificial Sequence: Synthetic oligonucleotide
  Sense strand starting at position 744 of SEQ ID NO: 1245017
cucucaugaucuuugggau

SEQ ID NO: 1529809 - RNA, 19 nt, Artificial Sequence
  Description of Artificial Sequence: Synthetic oligonucleotide
  Antisense strand to SEQ ID NO: 1529808
aucccaaagaucaugagag

SEQ ID NO: 1529810 - RNA, 19 nt, Artificial Sequence
  Description of Artificial Sequence: Synthetic oligonucleotide
  Sense strand starting at position 745 of SEQ ID NO: 1245017
ucucaugaucuuugggauc

SEQ ID NO: 1529811 - RNA, 19 nt, Artificial Sequence
  Description of Artificial Sequence: Synthetic oligonucleotide
  Antisense strand to SEQ ID NO: 1529810
gaucccaaagaucaugaga

SEQ ID NO: 1529812 - RNA, 19 nt, Artificial Sequence
  Description of Artificial Sequence: Synthetic oligonucleotide
  Sense strand starting at position 747 of SEQ ID NO: 1245017
ucaugaucuuugggaucug

SEQ ID NO: 1529813 - RNA, 19 nt, Artificial Sequence
  Description of Artificial Sequence: Synthetic oligonucleotide
  Antisense strand to SEQ ID NO: 1529812
cagaucccaaagaucauga

SEQ ID NO: 1529814 - RNA, 19 nt, Artificial Sequence
  Description of Artificial Sequence: Synthetic oligonucleotide
  Sense strand starting at position 748 of SEQ ID NO: 1245017
caugaucuuugggaucuga

SEQ ID NO: 1529815 - RNA, 19 nt, Artificial Sequence
  Description of Artificial Sequence: Synthetic oligonucleotide
  Antisense strand to SEQ ID NO: 1529814
ucagaucccaaagaucaug

SEQ ID NO: 1529816 - RNA, 19 nt, Artificial Sequence
  Description of Artificial Sequence: Synthetic oligonucleotide
  Sense strand starting at position 1091 of SEQ ID NO: 1245017
ugcugugcccugcucagaa

SEQ ID NO: 1529817 - RNA, 19 nt, Artificial Sequence
  Description of Artificial Sequence: Synthetic oligonucleotide
  Antisense strand to SEQ ID NO: 1529816
uucugagcagggcacagca

SEQ ID NO: 1529818 - RNA, 19 nt, Artificial Sequence
  Description of Artificial Sequence: Synthetic oligonucleotide
  Sense strand starting at position 1093 of SEQ ID NO: 1245017
cugugcccugcucagaaua

SEQ ID NO: 1529819 - RNA, 19 nt, Artificial Sequence
  Description of Artificial Sequence: Synthetic oligonucleotide
  Antisense strand to SEQ ID NO: 1529818
uauucugagcagggcacag

SEQ ID NO: 1529820 - RNA, 19 nt, Artificial Sequence
  Description of Artificial Sequence: Synthetic oligonucleotide
  Sense strand starting at position 1133 of SEQ ID NO: 1245017
cagggcucgucuuguaacu

SEQ ID NO: 1529821 - RNA, 19 nt, Artificial Sequence
  Description of Artificial Sequence: Synthetic oligonucleotide
  Antisense strand to SEQ ID NO: 1529820
aguuacaagacgagcccug

SEQ ID NO: 1529822 - RNA, 19 nt, Artificial Sequence
  Description of Artificial Sequence: Synthetic oligonucleotide
  Sense strand starting at position 1513 of SEQ ID NO: 1245017
gggccauuaggcugcagaa

SEQ ID NO: 1529823 - RNA, 19 nt, Artificial Sequence
  Description of Artificial Sequence: Synthetic oligonucleotide
  Antisense strand to SEQ ID NO: 1529822
uucugcagccuaauggccc

SEQ ID NO: 1529824 - RNA, 19 nt, Artificial Sequence
  Description of Artificial Sequence: Synthetic oligonucleotide
  Sense strand starting at position 1515 of SEQ ID NO: 1245017
gccauuaggcugcagaauu

SEQ ID NO: 1529825 - RNA, 19 nt, Artificial Sequence
  Description of Artificial Sequence: Synthetic oligonucleotide
  Antisense strand to SEQ ID NO: 1529824
aauucugcagccuaauggc

SEQ ID NO: 1529826 - RNA, 19 nt, Artificial Sequence
  Description of Artificial Sequence: Synthetic oligonucleotide
  Sense strand starting at position 2597 of SEQ ID NO: 1245017
uccacaucuguauacuuga

SEQ ID NO: 1529827 - RNA, 19 nt, Artificial Sequence
  Description of Artificial Sequence: Synthetic oligonucleotide
  Antisense strand to SEQ ID NO: 1529826
ucaaguauacagaugugga

SEQ ID NO: 1529828 - RNA, 19 nt, Artificial Sequence
  Description of Artificial Sequence: Synthetic oligonucleotide
  Sense strand starting at position 3198 of SEQ ID NO: 1245017
cagacaaacuuuggaguca

SEQ ID NO: 1529829 - RNA, 19 nt, Artificial Sequence
  Description of Artificial Sequence: Synthetic oligonucleotide
  Antisense strand to SEQ ID NO: 1529828
ugacuccaaaguuugucug

SEQ ID NO: 1529830 - RNA, 19 nt, Artificial Sequence
  Description of Artificial Sequence: Synthetic oligonucleotide
  Sense strand starting at position 3199 of SEQ ID NO: 1245017
agacaaacuuuggagucau

SEQ ID NO: 1529831 - RNA, 19 nt, Artificial Sequence
  Description of Artificial Sequence: Synthetic oligonucleotide
  Antisense strand to SEQ ID NO: 1529830
augacuccaaaguuugucu

SEQ ID NO: 1529832 - RNA, 19 nt, Artificial Sequence
  Description of Artificial Sequence: Synthetic oligonucleotide
  Sense strand starting at position 3563 of SEQ ID NO: 1245017
gguguaguggcacauucuu

SEQ ID NO: 1529833 - RNA, 19 nt, Artificial Sequence
  Description of Artificial Sequence: Synthetic oligonucleotide
  Antisense strand to SEQ ID NO: 1529832
aagaaugugccacuacacc

SEQ ID NO: 1529834 - RNA, 19 nt, Artificial Sequence
  Description of Artificial Sequence: Synthetic oligonucleotide
  Sense strand starting at position 3568 of SEQ ID NO: 1245017
aguggcacauucuuguaau

SEQ ID NO: 1529835 - RNA, 19 nt, Artificial Sequence
  Description of Artificial Sequence: Synthetic oligonucleotide
  Antisense strand to SEQ ID NO: 1529834
auuacaagaaugugccacu

SEQ ID NO: 1529836 - RNA, 19 nt, Artificial Sequence
  Description of Artificial Sequence: Synthetic oligonucleotide
  Sense strand starting at position 3690 of SEQ ID NO: 1245017
aguggaaacuucgucgcaa

SEQ ID NO: 1529837 - RNA, 19 nt, Artificial Sequence
  Description of Artificial Sequence: Synthetic oligonucleotide
  Antisense strand to SEQ ID NO: 1529836
uugcgacgaaguuuccacu

SEQ ID NO: 1529838 - RNA, 19 nt, Artificial Sequence
  Description of Artificial Sequence: Synthetic oligonucleotide
  Sense strand starting at position 3691 of SEQ ID NO: 1245017
guggaaacuucgucgcaaa

SEQ ID NO: 1529839 - RNA, 19 nt, Artificial Sequence
  Description of Artificial Sequence: Synthetic oligonucleotide
  Antisense strand to SEQ ID NO: 1529838
uuugcgacgaaguuuccac

SEQ ID NO: 1529840 - RNA, 19 nt, Artificial Sequence
  Description of Artificial Sequence: Synthetic oligonucleotide
  Sense strand starting at position 3692 of SEQ ID NO: 1245017
uggaaacuucgucgcaaac

SEQ ID NO: 1529841 - RNA, 19 nt, Artificial Sequence
  Description of Artificial Sequence: Synthetic oligonucleotide
  Antisense strand to SEQ ID NO: 1529840
guuugcgacgaaguuucca

SEQ ID NO: 1529842 - RNA, 19 nt, Artificial Sequence
  Description of Artificial Sequence: Synthetic oligonucleotide
  Sense strand starting at position 3694 of SEQ ID NO: 1245017
gaaacuucgucgcaaacaa

SEQ ID NO: 1529843 - RNA, 19 nt, Artificial Sequence
  Description of Artificial Sequence: Synthetic oligonucleotide
  Antisense strand to SEQ ID NO: 1529842
uuguuugcgacgaaguuuc

SEQ ID NO: 1529844 - RNA, 19 nt, Artificial Sequence
  Description of Artificial Sequence: Synthetic oligonucleotide
  Sense strand starting at position 3972 of SEQ ID NO: 1245017
uuagcugucucagagauac

SEQ ID NO: 1529845 - RNA, 19 nt, Artificial Sequence
  Description of Artificial Sequence: Synthetic oligonucleotide
  Antisense strand to SEQ ID NO: 1529844
guaucucugagacagcuaa

SEQ ID NO: 1529846 - RNA, 19 nt, Artificial Sequence
  Description of Artificial Sequence: Synthetic oligonucleotide
  Sense strand starting at position 1228 of SEQ ID NO: 1245018
caaggauuacucugaaugu

SEQ ID NO: 1529847 - RNA, 19 nt, Artificial Sequence
  Description of Artificial Sequence: Synthetic oligonucleotide
  Antisense strand to SEQ ID NO: 1529846
acauucagaguaauccuug

SEQ ID NO: 1529848 - RNA, 19 nt, Artificial Sequence
  Description of Artificial Sequence: Synthetic oligonucleotide
  Sense strand starting at position 1229 of SEQ ID NO: 1245018
aaggauuacucugaaugug

SEQ ID NO: 1529849 - RNA, 19 nt, Artificial Sequence
  Description of Artificial Sequence: Synthetic oligonucleotide
  Antisense strand to SEQ ID NO: 1529848
cacauucagaguaauccuu

SEQ ID NO: 1529850 - RNA, 19 nt, Artificial Sequence
  Description of Artificial Sequence: Synthetic oligonucleotide
  Sense strand starting at position 1297 of SEQ ID NO: 1245018
gaccguucucauuggagaa

SEQ ID NO: 1529851 - RNA, 19 nt, Artificial Sequence
  Description of Artificial Sequence: Synthetic oligonucleotide
  Antisense strand to SEQ ID NO: 1529850
uucuccaaugagaacgguc

SEQ ID NO: 1529852 - RNA, 19 nt, Artificial Sequence
  Description of Artificial Sequence: Synthetic oligonucleotide
  Sense strand starting at position 1298 of SEQ ID NO: 1245018
accguucucauuggagaac

SEQ ID NO: 1529853 - RNA, 19 nt, Artificial Sequence
  Description of Artificial Sequence: Synthetic oligonucleotide
  Antisense strand to SEQ ID NO: 1529852
guucuccaaugagaacggu

SEQ ID NO: 1529854 - RNA, 19 nt, Artificial Sequence
  Description of Artificial Sequence: Synthetic oligonucleotide
  Sense strand starting at position 1466 of SEQ ID NO: 1245018
gugaucucucccggacagu

SEQ ID NO: 1529855 - RNA, 19 nt, Artificial Sequence
  Description of Artificial Sequence: Synthetic oligonucleotide
  Antisense strand to SEQ ID NO: 1529854
acuguccgggagagaucac

SEQ ID NO: 1529856 - RNA, 19 nt, Artificial Sequence
  Description of Artificial Sequence: Synthetic oligonucleotide
  Sense strand starting at position 1515 of SEQ ID NO: 1245018
gcugaagucucuucgagag

SEQ ID NO: 1529857 - RNA, 19 nt, Artificial Sequence
  Description of Artificial Sequence: Synthetic oligonucleotide
  Antisense strand to SEQ ID NO: 1529856
cucucgaagagacuucagc

SEQ ID NO: 1529858 - RNA, 19 nt, Artificial Sequence
  Description of Artificial Sequence: Synthetic oligonucleotide
  Sense strand starting at position 1618 of SEQ ID NO: 1245018
ugacaaacaucggcuacuu

SEQ ID NO: 1529859 - RNA, 19 nt, Artificial Sequence
  Description of Artificial Sequence: Synthetic oligonucleotide
  Antisense strand to SEQ ID NO: 1529858
aaguagccgauguuuguca

SEQ ID NO: 1529860 - RNA, 19 nt, Artificial Sequence
  Description of Artificial Sequence: Synthetic oligonucleotide
  Sense strand starting at position 1685 of SEQ ID NO: 1245018
gcaagagaacugcauauuc

SEQ ID NO: 1529861 - RNA, 19 nt, Artificial Sequence
  Description of Artificial Sequence: Synthetic oligonucleotide
  Antisense strand to SEQ ID NO: 1529860
gaauaugcaguucucuugc

SEQ ID NO: 1529862 - RNA, 19 nt, Artificial Sequence
  Description of Artificial Sequence: Synthetic oligonucleotide
  Sense strand starting at position 1752 of SEQ ID NO: 1245018
uaccgauucgcagagcaga

SEQ ID NO: 1529863 - RNA, 19 nt, Artificial Sequence
  Description of Artificial Sequence: Synthetic oligonucleotide
  Antisense strand to SEQ ID NO: 1529862
ucugcucugcgaaucggua

SEQ ID NO: 1529864 - RNA, 19 nt, Artificial Sequence
  Description of Artificial Sequence: Synthetic oligonucleotide
  Sense strand starting at position 1816 of SEQ ID NO: 1245018
agaugaaaccguuguccaa

SEQ ID NO: 1529865 - RNA, 19 nt, Artificial Sequence
  Description of Artificial Sequence: Synthetic oligonucleotide
  Antisense strand to SEQ ID NO: 1529864
uuggacaacgguuucaucu

SEQ ID NO: 1529866 - RNA, 19 nt, Artificial Sequence
  Description of Artificial Sequence: Synthetic oligonucleotide
  Sense strand starting at position 1820 of SEQ ID NO: 1245018
gaaaccguuguccaaacua

SEQ ID NO: 1529867 - RNA, 19 nt, Artificial Sequence
  Description of Artificial Sequence: Synthetic oligonucleotide
  Antisense strand to SEQ ID NO: 1529866
uaguuuggacaacgguuuc

SEQ ID NO: 1529868 - RNA, 19 nt, Artificial Sequence
  Description of Artificial Sequence: Synthetic oligonucleotide
  Sense strand starting at position 1877 of SEQ ID NO: 1245018
ccuuaagccucagugcaaa

SEQ ID NO: 1529869 - RNA, 19 nt, Artificial Sequence
  Description of Artificial Sequence: Synthetic oligonucleotide
  Antisense strand to SEQ ID NO: 1529868
uuugcacugaggcuuaagg

SEQ ID NO: 1529870 - RNA, 19 nt, Artificial Sequence
  Description of Artificial Sequence: Synthetic oligonucleotide
  Sense strand starting at position 2106 of SEQ ID NO: 1245018
gcgaguucgcugcucagaa

SEQ ID NO: 1529871 - RNA, 19 nt, Artificial Sequence
  Description of Artificial Sequence: Synthetic oligonucleotide
  Antisense strand to SEQ ID NO: 1529870
uucugagcagcgaacucgc

SEQ ID NO: 1529872 - RNA, 19 nt, Artificial Sequence
  Description of Artificial Sequence: Synthetic oligonucleotide
  Sense strand starting at position 2107 of SEQ ID NO: 1245018
cgaguucgcugcucagaag

SEQ ID NO: 1529873 - RNA, 19 nt, Artificial Sequence
  Description of Artificial Sequence: Synthetic oligonucleotide
  Antisense strand to SEQ ID NO: 1529872
cuucugagcagcgaacucg

SEQ ID NO: 1529874 - RNA, 19 nt, Artificial Sequence
  Description of Artificial Sequence: Synthetic oligonucleotide
  Sense strand starting at position 2871 of SEQ ID NO: 1245018
uccagaguuaccgacguua

SEQ ID NO: 1529875 - RNA, 19 nt, Artificial Sequence
  Description of Artificial Sequence: Synthetic oligonucleotide
  Antisense strand to SEQ ID NO: 1529874
uaacgucgguaacucugga

SEQ ID NO: 1529876 - RNA, 19 nt, Artificial Sequence
  Description of Artificial Sequence: Synthetic oligonucleotide
  Sense strand starting at position 2873 of SEQ ID NO: 1245018
cagaguuaccgacguuaaa

SEQ ID NO: 1529877 - RNA, 19 nt, Artificial Sequence
  Description of Artificial Sequence: Synthetic oligonucleotide
  Antisense strand to SEQ ID NO: 1529876
uuuaacgucgguaacucug

SEQ ID NO: 1529878 - RNA, 19 nt, Artificial Sequence
  Description of Artificial Sequence: Synthetic oligonucleotide
  Sense strand starting at position 2899 of SEQ ID NO: 1245018
cgacgaauccuagggaguc

SEQ ID NO: 1529879 - RNA, 19 nt, Artificial Sequence
  Description of Artificial Sequence: Synthetic oligonucleotide
  Antisense strand to SEQ ID NO: 1529878
gacucccuaggauucgucg

SEQ ID NO: 1529880 - RNA, 19 nt, Artificial Sequence
  Description of Artificial Sequence: Synthetic oligonucleotide
  Sense strand starting at position 2916 of SEQ ID NO: 1245018
ucuuuacaaguuugguuaa

SEQ ID NO: 1529881 - RNA, 19 nt, Artificial Sequence
  Description of Artificial Sequence: Synthetic oligonucleotide
  Antisense strand to SEQ ID NO: 1529880
uuaaccaaacuuguaaaga

SEQ ID NO: 1529882 - RNA, 19 nt, Artificial Sequence
  Description of Artificial Sequence: Synthetic oligonucleotide
  Sense strand starting at position 2918 of SEQ ID NO: 1245018
uuuacaaguuugguuaaga

SEQ ID NO: 1529883 - RNA, 19 nt, Artificial Sequence
  Description of Artificial Sequence: Synthetic oligonucleotide
  Antisense strand to SEQ ID NO: 1529882
ucuuaaccaaacuuguaaa

SEQ ID NO: 1529884 - RNA, 19 nt, Artificial Sequence
  Description of Artificial Sequence: Synthetic oligonucleotide
  Sense strand starting at position 2919 of SEQ ID NO: 1245018
uuacaaguuugguuaagaa

SEQ ID NO: 1529885 - RNA, 19 nt, Artificial Sequence
  Description of Artificial Sequence: Synthetic oligonucleotide
  Antisense strand to SEQ ID NO: 1529884
uucuuaaccaaacuuguaa

SEQ ID NO: 1529886 - RNA, 19 nt, Artificial Sequence
  Description of Artificial Sequence: Synthetic oligonucleotide
  Sense strand starting at position 2985 of SEQ ID NO: 1245018
gagcaccugcucuguugaa

SEQ ID NO: 1529887 - RNA, 19 nt, Artificial Sequence
  Description of Artificial Sequence: Synthetic oligonucleotide
  Antisense strand to SEQ ID NO: 1529886
uucaacagagcaggugcuc

SEQ ID NO: 1529888 - RNA, 19 nt, Artificial Sequence
  Description of Artificial Sequence: Synthetic oligonucleotide
  Sense strand starting at position 2989 of SEQ ID NO: 1245018
accugcucuguugaagaca

SEQ ID NO: 1529889 - RNA, 19 nt, Artificial Sequence
  Description of Artificial Sequence: Synthetic oligonucleotide
  Antisense strand to SEQ ID NO: 1529888
ugucuucaacagagcaggu

SEQ ID NO: 1529890 - RNA, 19 nt, Artificial Sequence
  Description of Artificial Sequence: Synthetic oligonucleotide
  Sense strand starting at position 3060 of SEQ ID NO: 1245018
agagcacugucugugggaa

SEQ ID NO: 1529891 - RNA, 19 nt, Artificial Sequence
  Description of Artificial Sequence: Synthetic oligonucleotide
  Antisense strand to SEQ ID NO: 1529890
uucccacagacagugcucu

SEQ ID NO: 1529892 - RNA, 19 nt, Artificial Sequence
  Description of Artificial Sequence: Synthetic oligonucleotide
  Sense strand starting at position 3061 of SEQ ID NO: 1245018
gagcacugucugugggaaa

SEQ ID NO: 1529893 - RNA, 19 nt, Artificial Sequence
  Description of Artificial Sequence: Synthetic oligonucleotide
  Antisense strand to SEQ ID NO: 1529892
uuucccacagacagugcuc

SEQ ID NO: 1529894 - RNA, 19 nt, Artificial Sequence
  Description of Artificial Sequence: Synthetic oligonucleotide
  Sense strand starting at position 3128 of SEQ ID NO: 1245018
aauggcauuugucucgaau

SEQ ID NO: 1529895 - RNA, 19 nt, Artificial Sequence
  Description of Artificial Sequence: Synthetic oligonucleotide
  Antisense strand to SEQ ID NO: 1529894
auucgagacaaaugccauu

SEQ ID NO: 1529896 - RNA, 19 nt, Artificial Sequence
  Description of Artificial Sequence: Synthetic oligonucleotide
  Sense strand starting at position 3158 of SEQ ID NO: 1245018
ggguaaucccauggagagu

SEQ ID NO: 1529897 - RNA, 19 nt, Artificial Sequence
  Description of Artificial Sequence: Synthetic oligonucleotide
  Antisense strand to SEQ ID NO: 1529896
acucuccaugggauuaccc

SEQ ID NO: 1529898 - RNA, 19 nt, Artificial Sequence
  Description of Artificial Sequence: Synthetic oligonucleotide
  Sense strand starting at position 3649 of SEQ ID NO: 1245018
gaaggccuaucuuagaaga

SEQ ID NO: 1529899 - RNA, 19 nt, Artificial Sequence
  Description of Artificial Sequence: Synthetic oligonucleotide
  Antisense strand to SEQ ID NO: 1529898
ucuucuaagauaggccuuc

SEQ ID NO: 1529900 - RNA, 19 nt, Artificial Sequence
  Description of Artificial Sequence: Synthetic oligonucleotide
  Sense strand starting at position 3651 of SEQ ID NO: 1245018
aggccuaucuuagaagaca

SEQ ID NO: 1529901 - RNA, 19 nt, Artificial Sequence
  Description of Artificial Sequence: Synthetic oligonucleotide
  Antisense strand to SEQ ID NO: 1529900
ugucuucuaagauaggccu

SEQ ID NO: 1529902 - RNA, 19 nt, Artificial Sequence
  Description of Artificial Sequence: Synthetic oligonucleotide
  Sense strand starting at position 3706 of SEQ ID NO: 1245018
cauaguuuggauggcgaga

SEQ ID NO: 1529903 - RNA, 19 nt, Artificial Sequence
  Description of Artificial Sequence: Synthetic oligonucleotide
  Antisense strand to SEQ ID NO: 1529902
ucucgccauccaaacuaug

SEQ ID NO: 1529904 - RNA, 19 nt, Artificial Sequence
  Description of Artificial Sequence: Synthetic oligonucleotide
  Sense strand starting at position 3782 of SEQ ID NO: 1245018
gcuuguccuacagggugaa

SEQ ID NO: 1529905 - RNA, 19 nt, Artificial Sequence
  Description of Artificial Sequence: Synthetic oligonucleotide
  Antisense strand to SEQ ID NO: 1529904
uucacccuguaggacaagc

SEQ ID NO: 1529906 - RNA, 19 nt, Artificial Sequence
  Description of Artificial Sequence: Synthetic oligonucleotide
  Sense strand starting at position 3819 of SEQ ID NO: 1245018
agguuuaguggaugagaga

SEQ ID NO: 1529907 - RNA, 19 nt, Artificial Sequence
  Description of Artificial Sequence: Synthetic oligonucleotide
  Antisense strand to SEQ ID NO: 1529906
ucucucauccacuaaaccu

SEQ ID NO: 1529908 - RNA, 19 nt, Artificial Sequence
  Description of Artificial Sequence: Synthetic oligonucleotide
  Sense strand starting at position 3833 of SEQ ID NO: 1245018
agagaagaguguuacagaa

SEQ ID NO: 1529909 - RNA, 19 nt, Artificial Sequence
  Description of Artificial Sequence: Synthetic oligonucleotide
  Antisense strand to SEQ ID NO: 1529908
uucuguaacacucuucucu

SEQ ID NO: 1529910 - RNA, 19 nt, Artificial Sequence
  Description of Artificial Sequence: Synthetic oligonucleotide
  Sense strand starting at position 3835 of SEQ ID NO: 1245018
agaagaguguuacagaaau

SEQ ID NO: 1529911 - RNA, 19 nt, Artificial Sequence
  Description of Artificial Sequence: Synthetic oligonucleotide
  Antisense strand to SEQ ID NO: 1529910
auuucuguaacacucuucu

SEQ ID NO: 1529912 - RNA, 19 nt, Artificial Sequence
  Description of Artificial Sequence: Synthetic oligonucleotide
  Sense strand starting at position 3856 of SEQ ID NO: 1245018
gcuggagaagcaugggaua

SEQ ID NO: 1529913 - RNA, 19 nt, Artificial Sequence
  Description of Artificial Sequence: Synthetic oligonucleotide
  Antisense strand to SEQ ID NO: 1529912
uaucccaugcuucuccagc

SEQ ID NO: 1529914 - RNA, 19 nt, Artificial Sequence
  Description of Artificial Sequence: Synthetic oligonucleotide
  Sense strand starting at position 3858 of SEQ ID NO: 1245018
uggagaagcaugggauauu

SEQ ID NO: 1529915 - RNA, 19 nt, Artificial Sequence
  Description of Artificial Sequence: Synthetic oligonucleotide
  Antisense strand to SEQ ID NO: 1529914
aauaucccaugcuucucca

SEQ ID NO: 1529916 - RNA, 19 nt, Artificial Sequence
  Description of Artificial Sequence: Synthetic oligonucleotide
  Sense strand starting at position 3876 of SEQ ID NO: 1245018
uguauauuaugguaaggag

SEQ ID NO: 1529917 - RNA, 19 nt, Artificial Sequence
  Description of Artificial Sequence: Synthetic oligonucleotide
  Antisense strand to SEQ ID NO: 1529916
cuccuuaccauaauauaca

SEQ ID NO: 1529918 - RNA, 19 nt, Artificial Sequence
  Description of Artificial Sequence: Synthetic oligonucleotide
  Sense strand starting at position 3917 of SEQ ID NO: 1245018
guagguagucguugacaau

SEQ ID NO: 1529919 - RNA, 19 nt, Artificial Sequence
  Description of Artificial Sequence: Synthetic oligonucleotide
  Antisense strand to SEQ ID NO: 1529918
auugucaacgacuaccuac

SEQ ID NO: 1529920 - RNA, 19 nt, Artificial Sequence
  Description of Artificial Sequence: Synthetic oligonucleotide
  Sense strand starting at position 3918 of SEQ ID NO: 1245018
uagguagucguugacaauu

SEQ ID NO: 1529921 - RNA, 19 nt, Artificial Sequence
  Description of Artificial Sequence: Synthetic oligonucleotide
  Antisense strand to SEQ ID NO: 1529920
aauugucaacgacuaccua

SEQ ID NO: 1529922 - RNA, 19 nt, Artificial Sequence
  Description of Artificial Sequence: Synthetic oligonucleotide
  Sense strand starting at position 3971 of SEQ ID NO: 1245018
ugcuguaguugcucuauga

SEQ ID NO: 1529923 - RNA, 19 nt, Artificial Sequence
  Description of Artificial Sequence: Synthetic oligonucleotide
  Antisense strand to SEQ ID NO: 1529922
ucauagagcaacuacagca

SEQ ID NO: 1529924 - RNA, 19 nt, Artificial Sequence
  Description of Artificial Sequence: Synthetic oligonucleotide
  Sense strand starting at position 3975 of SEQ ID NO: 1245018
guaguugcucuaugaagaa

SEQ ID NO: 1529925 - RNA, 19 nt, Artificial Sequence
  Description of Artificial Sequence: Synthetic oligonucleotide
  Antisense strand to SEQ ID NO: 1529924
uucuucauagagcaacuac

SEQ ID NO: 1529926 - RNA, 19 nt, Artificial Sequence
  Description of Artificial Sequence: Synthetic oligonucleotide
  Sense strand starting at position 30 of SEQ ID NO: 1245019
cuuuccuugccagagaucu

SEQ ID NO: 1529927 - RNA, 19 nt, Artificial Sequence
  Description of Artificial Sequence: Synthetic oligonucleotide
  Antisense strand to SEQ ID NO: 1529926
agaucucuggcaaggaaag

SEQ ID NO: 1529928 - RNA, 19 nt, Artificial Sequence
  Description of Artificial Sequence: Synthetic oligonucleotide
  Sense strand starting at position 138 of SEQ ID NO: 1245019
acagcaaggauucgggaau

SEQ ID NO: 1529929 - RNA, 19 nt, Artificial Sequence
  Description of Artificial Sequence: Synthetic oligonucleotide
  Antisense strand to SEQ ID NO: 1529928
auucccgaauccuugcugu

SEQ ID NO: 1529930 - RNA, 19 nt, Artificial Sequence
  Description of Artificial Sequence: Synthetic oligonucleotide
  Sense strand starting at position 159 of SEQ ID NO: 1245019
cugguuuggaaauggacau

SEQ ID NO: 1529931 - RNA, 19 nt, Artificial Sequence
  Description of Artificial Sequence: Synthetic oligonucleotide
  Antisense strand to SEQ ID NO: 1529930
auguccauuuccaaaccag

SEQ ID NO: 1529932 - RNA, 19 nt, Artificial Sequence
  Description of Artificial Sequence: Synthetic oligonucleotide
  Sense strand starting at position 226 of SEQ ID NO: 1245019
gggaauaguuuccugccau

SEQ ID NO: 1529933 - RNA, 19 nt, Artificial Sequence
  Description of Artificial Sequence: Synthetic oligonucleotide
  Antisense strand to SEQ ID NO: 1529932
auggcaggaaacuauuccc

SEQ ID NO: 1529934 - RNA, 19 nt, Artificial Sequence
  Description of Artificial Sequence: Synthetic oligonucleotide
  Sense strand starting at position 236 of SEQ ID NO: 1245019
uccugccauccugagagaa

SEQ ID NO: 1529935 - RNA, 19 nt, Artificial Sequence
  Description of Artificial Sequence: Synthetic oligonucleotide
  Antisense strand to SEQ ID NO: 1529934
uucucucaggauggcagga

SEQ ID NO: 1529936 - RNA, 19 nt, Artificial Sequence
  Description of Artificial Sequence: Synthetic oligonucleotide
  Sense strand starting at position 371 of SEQ ID NO: 1245019
cuggauuaaucaguccuga

SEQ ID NO: 1529937 - RNA, 19 nt, Artificial Sequence
  Description of Artificial Sequence: Synthetic oligonucleotide
  Antisense strand to SEQ ID NO: 1529936
ucaggacugauuaauccag

SEQ ID NO: 1529938 - RNA, 19 nt, Artificial Sequence
  Description of Artificial Sequence: Synthetic oligonucleotide
  Sense strand starting at position 848 of SEQ ID NO: 1245019
cugguauucugaguaccua

SEQ ID NO: 1529939 - RNA, 19 nt, Artificial Sequence
  Description of Artificial Sequence: Synthetic oligonucleotide
  Antisense strand to SEQ ID NO: 1529938
uagguacucagaauaccag

SEQ ID NO: 1529940 - RNA, 19 nt, Artificial Sequence
  Description of Artificial Sequence: Synthetic oligonucleotide
  Sense strand starting at position 884 of SEQ ID NO: 1245019
gguaaauguuaagugaauu

SEQ ID NO: 1529941 - RNA, 19 nt, Artificial Sequence
  Description of Artificial Sequence: Synthetic oligonucleotide
  Antisense strand to SEQ ID NO: 1529940
aauucacuuaacauuuacc

SEQ ID NO: 1529942 - RNA, 19 nt, Artificial Sequence
  Description of Artificial Sequence: Synthetic oligonucleotide
  Sense strand starting at position 898 of SEQ ID NO: 1245019
gaauuuguguaacugucuu

SEQ ID NO: 1529943 - RNA, 19 nt, Artificial Sequence
  Description of Artificial Sequence: Synthetic oligonucleotide
  Antisense strand to SEQ ID NO: 1529942
aagacaguuacacaaauuc

SEQ ID NO: 1529944 - RNA, 19 nt, Artificial Sequence
  Description of Artificial Sequence: Synthetic oligonucleotide
  Sense strand starting at position 1223 of SEQ ID NO: 1245019
uguaauacucuugauggcu

SEQ ID NO: 1529945 - RNA, 19 nt, Artificial Sequence
  Description of Artificial Sequence: Synthetic oligonucleotide
  Antisense strand to SEQ ID NO: 1529944
agccaucaagaguauuaca

SEQ ID NO: 1529946 - RNA, 19 nt, Artificial Sequence
  Description of Artificial Sequence: Synthetic oligonucleotide
  Sense strand starting at position 1232 of SEQ ID NO: 1245019
cuugauggcuaacuggaua

SEQ ID NO: 1529947 - RNA, 19 nt, Artificial Sequence
  Description of Artificial Sequence: Synthetic oligonucleotide
  Antisense strand to SEQ ID NO: 1529946
uauccaguuagccaucaag

SEQ ID NO: 1529948 - RNA, 19 nt, Artificial Sequence
  Description of Artificial Sequence: Synthetic oligonucleotide
  Sense strand starting at position 1279 of SEQ ID NO: 1245019
uaggauagugucugacaca

SEQ ID NO: 1529949 - RNA, 19 nt, Artificial Sequence
  Description of Artificial Sequence: Synthetic oligonucleotide
  Antisense strand to SEQ ID NO: 1529948
ugugucagacacuauccua

SEQ ID NO: 1529950 - RNA, 19 nt, Artificial Sequence
  Description of Artificial Sequence: Synthetic oligonucleotide
  Sense strand starting at position 1297 of SEQ ID NO: 1245019
auagcuggugucgauaacu

SEQ ID NO: 1529951 - RNA, 19 nt, Artificial Sequence
  Description of Artificial Sequence: Synthetic oligonucleotide
  Antisense strand to SEQ ID NO: 1529950
aguuaucgacaccagcuau

SEQ ID NO: 1529952 - RNA, 19 nt, Artificial Sequence
  Description of Artificial Sequence: Synthetic oligonucleotide
  Sense strand starting at position 1306 of SEQ ID NO: 1245019
gucgauaacuguuuguaaa

SEQ ID NO: 1529953 - RNA, 19 nt, Artificial Sequence
  Description of Artificial Sequence: Synthetic oligonucleotide
  Antisense strand to SEQ ID NO: 1529952
uuuacaaacaguuaucgac

SEQ ID NO: 1529954 - RNA, 19 nt, Artificial Sequence
  Description of Artificial Sequence: Synthetic oligonucleotide
  Sense strand starting at position 1336 of SEQ ID NO: 1245019
uuucccaaucugggugaua

SEQ ID NO: 1529955 - RNA, 19 nt, Artificial Sequence
  Description of Artificial Sequence: Synthetic oligonucleotide
  Antisense strand to SEQ ID NO: 1529954
uaucacccagauugggaaa

SEQ ID NO: 1529956 - RNA, 19 nt, Artificial Sequence
  Description of Artificial Sequence: Synthetic oligonucleotide
  Sense strand starting at position 1337 of SEQ ID NO: 1245019
uucccaaucugggugauau

SEQ ID NO: 1529957 - RNA, 19 nt, Artificial Sequence
  Description of Artificial Sequence: Synthetic oligonucleotide
  Antisense strand to SEQ ID NO: 1529956
auaucacccagauugggaa

SEQ ID NO: 1529958 - RNA, 19 nt, Artificial Sequence
  Description of Artificial Sequence: Synthetic oligonucleotide
  Sense strand starting at position 1338 of SEQ ID NO: 1245019
ucccaaucugggugauauu

SEQ ID NO: 1529959 - RNA, 19 nt, Artificial Sequence
  Description of Artificial Sequence: Synthetic oligonucleotide
  Antisense strand to SEQ ID NO: 1529958
aauaucacccagauuggga

SEQ ID NO: 1529960 - RNA, 19 nt, Artificial Sequence
  Description of Artificial Sequence: Synthetic oligonucleotide
  Sense strand starting at position 1341 of SEQ ID NO: 1245019
caaucugggugauauuuaa

SEQ ID NO: 1529961 - RNA, 19 nt, Artificial Sequence
  Description of Artificial Sequence: Synthetic oligonucleotide
  Antisense strand to SEQ ID NO: 1529960
uuaaauaucacccagauug

SEQ ID NO: 1529962 - RNA, 19 nt, Artificial Sequence
  Description of Artificial Sequence: Synthetic oligonucleotide
  Sense strand starting at position 1405 of SEQ ID NO: 1245019
acaauagggcucuaucuuu

SEQ ID NO: 1529963 - RNA, 19 nt, Artificial Sequence
  Description of Artificial Sequence: Synthetic oligonucleotide
  Antisense strand to SEQ ID NO: 1529962
aaagauagagcccuauugu

SEQ ID NO: 1529964 - RNA, 19 nt, Artificial Sequence
  Description of Artificial Sequence: Synthetic oligonucleotide
  Sense strand starting at position 1501 of SEQ ID NO: 1245019
ccacuagggcguuaaguuu

SEQ ID NO: 1529965 - RNA, 19 nt, Artificial Sequence
  Description of Artificial Sequence: Synthetic oligonucleotide
  Antisense strand to SEQ ID NO: 1529964
aaacuuaacgcccuagugg

SEQ ID NO: 1529966 - RNA, 19 nt, Artificial Sequence
  Description of Artificial Sequence: Synthetic oligonucleotide
  Sense strand starting at position 2318 of SEQ ID NO: 1245019
ggcucaagaacucgagaau

SEQ ID NO: 1529967 - RNA, 19 nt, Artificial Sequence
  Description of Artificial Sequence: Synthetic oligonucleotide
  Antisense strand to SEQ ID NO: 1529966
auucucgaguucuugagcc

SEQ ID NO: 1529968 - RNA, 19 nt, Artificial Sequence
  Description of Artificial Sequence: Synthetic oligonucleotide
  Sense strand starting at position 2319 of SEQ ID NO: 1245019
gcucaagaacucgagaauc

SEQ ID NO: 1529969 - RNA, 19 nt, Artificial Sequence
  Description of Artificial Sequence: Synthetic oligonucleotide
  Antisense strand to SEQ ID NO: 1529968
gauucucgaguucuugagc

SEQ ID NO: 1529970 - RNA, 19 nt, Artificial Sequence
  Description of Artificial Sequence: Synthetic oligonucleotide
  Sense strand starting at position 2329 of SEQ ID NO: 1245019
ucgagaauccgcuucgcau

SEQ ID NO: 1529971 - RNA, 19 nt, Artificial Sequence
  Description of Artificial Sequence: Synthetic oligonucleotide
  Antisense strand to SEQ ID NO: 1529970
augcgaagcggauucucga

SEQ ID NO: 1529972 - RNA, 19 nt, Artificial Sequence
  Description of Artificial Sequence: Synthetic oligonucleotide
  Sense strand starting at position 2330 of SEQ ID NO: 1245019
cgagaauccgcuucgcauu

SEQ ID NO: 1529973 - RNA, 19 nt, Artificial Sequence
  Description of Artificial Sequence: Synthetic oligonucleotide
  Antisense strand to SEQ ID NO: 1529972
aaugcgaagcggauucucg

SEQ ID NO: 1529974 - RNA, 19 nt, Artificial Sequence
  Description of Artificial Sequence: Synthetic oligonucleotide
  Sense strand starting at position 2493 of SEQ ID NO: 1245019
ggagacaugcuuugaguuc

SEQ ID NO: 1529975 - RNA, 19 nt, Artificial Sequence
  Description of Artificial Sequence: Synthetic oligonucleotide
  Antisense strand to SEQ ID NO: 1529974
gaacucaaagcaugucucc

SEQ ID NO: 1529976 - RNA, 19 nt, Artificial Sequence
  Description of Artificial Sequence: Synthetic oligonucleotide
  Sense strand starting at position 2531 of SEQ ID NO: 1245019
gacguuuggccugaaaucu

SEQ ID NO: 1529977 - RNA, 19 nt, Artificial Sequence
  Description of Artificial Sequence: Synthetic oligonucleotide
  Antisense strand to SEQ ID NO: 1529976
agauuucaggccaaacguc

SEQ ID NO: 1529978 - RNA, 19 nt, Artificial Sequence
  Description of Artificial Sequence: Synthetic oligonucleotide
  Sense strand starting at position 2547 of SEQ ID NO: 1245019
ucucaagauugcgugggaa

SEQ ID NO: 1529979 - RNA, 19 nt, Artificial Sequence
  Description of Artificial Sequence: Synthetic oligonucleotide
  Antisense strand to SEQ ID NO: 1529978
uucccacgcaaucuugaga

SEQ ID NO: 1529980 - RNA, 19 nt, Artificial Sequence
  Description of Artificial Sequence: Synthetic oligonucleotide
  Sense strand starting at position 2549 of SEQ ID NO: 1245019
ucaagauugcgugggaauu

SEQ ID NO: 1529981 - RNA, 19 nt, Artificial Sequence
  Description of Artificial Sequence: Synthetic oligonucleotide
  Antisense strand to SEQ ID NO: 1529980
aauucccacgcaaucuuga

SEQ ID NO: 1529982 - RNA, 19 nt, Artificial Sequence
  Description of Artificial Sequence: Synthetic oligonucleotide
  Sense strand starting at position 2550 of SEQ ID NO: 1245019
caagauugcgugggaauua

SEQ ID NO: 1529983 - RNA, 19 nt, Artificial Sequence
  Description of Artificial Sequence: Synthetic oligonucleotide
  Antisense strand to SEQ ID NO: 1529982
uaauucccacgcaaucuug

SEQ ID NO: 1529984 - RNA, 19 nt, Artificial Sequence
  Description of Artificial Sequence: Synthetic oligonucleotide
  Sense strand starting at position 2578 of SEQ ID NO: 1245019
agaguaaaggccuagguua

SEQ ID NO: 1529985 - RNA, 19 nt, Artificial Sequence
  Description of Artificial Sequence: Synthetic oligonucleotide
  Antisense strand to SEQ ID NO: 1529984
uaaccuaggccuuuacucu

SEQ ID NO: 1529986 - RNA, 19 nt, Artificial Sequence
  Description of Artificial Sequence: Synthetic oligonucleotide
  Sense strand starting at position 2660 of SEQ ID NO: 1245019
ggcccauucucaccucaga

SEQ ID NO: 1529987 - RNA, 19 nt, Artificial Sequence
  Description of Artificial Sequence: Synthetic oligonucleotide
  Antisense strand to SEQ ID NO: 1529986
ucugaggugagaaugggcc

SEQ ID NO: 1529988 - RNA, 19 nt, Artificial Sequence
  Description of Artificial Sequence: Synthetic oligonucleotide
  Sense strand starting at position 2689 of SEQ ID NO: 1245019
guuacuuccucuguaauuu

SEQ ID NO: 1529989 - RNA, 19 nt, Artificial Sequence
  Description of Artificial Sequence: Synthetic oligonucleotide
  Antisense strand to SEQ ID NO: 1529988
aaauuacagaggaaguaac

SEQ ID NO: 1529990 - RNA, 19 nt, Artificial Sequence
  Description of Artificial Sequence: Synthetic oligonucleotide
  Sense strand starting at position 3398 of SEQ ID NO: 1245019
auauaauguugccucagag

SEQ ID NO: 1529991 - RNA, 19 nt, Artificial Sequence
  Description of Artificial Sequence: Synthetic oligonucleotide
  Antisense strand to SEQ ID NO: 1529990
cucugaggcaacauuauau

SEQ ID NO: 1529992 - RNA, 19 nt, Artificial Sequence
  Description of Artificial Sequence: Synthetic oligonucleotide
  Sense strand starting at position 3410 of SEQ ID NO: 1245019
cucagaguacacuauccuu

SEQ ID NO: 1529993 - RNA, 19 nt, Artificial Sequence
  Description of Artificial Sequence: Synthetic oligonucleotide
  Antisense strand to SEQ ID NO: 1529992
aaggauaguguacucugag

SEQ ID NO: 1529994 - RNA, 19 nt, Artificial Sequence
  Description of Artificial Sequence: Synthetic oligonucleotide
  Sense strand starting at position 3469 of SEQ ID NO: 1245019
gggucuggugcucaaccau

SEQ ID NO: 1529995 - RNA, 19 nt, Artificial Sequence
  Description of Artificial Sequence: Synthetic oligonucleotide
  Antisense strand to SEQ ID NO: 1529994
augguugagcaccagaccc

SEQ ID NO: 1529996 - RNA, 19 nt, Artificial Sequence
  Description of Artificial Sequence: Synthetic oligonucleotide
  Sense strand starting at position 3501 of SEQ ID NO: 1245019
gggaaaggaccgugugauu

SEQ ID NO: 1529997 - RNA, 19 nt, Artificial Sequence
  Description of Artificial Sequence: Synthetic oligonucleotide
  Antisense strand to SEQ ID NO: 1529996
aaucacacgguccuuuccc

SEQ ID NO: 1529998 - RNA, 19 nt, Artificial Sequence
  Description of Artificial Sequence: Synthetic oligonucleotide
  Sense strand starting at position 3622 of SEQ ID NO: 1245019
agggaauauuguguuugua

SEQ ID NO: 1529999 - RNA, 19 nt, Artificial Sequence
  Description of Artificial Sequence: Synthetic oligonucleotide
  Antisense strand to SEQ ID NO: 1529998
uacaaacacaauauucccu

SEQ ID NO: 1530000 - RNA, 19 nt, Artificial Sequence
  Description of Artificial Sequence: Synthetic oligonucleotide
  Sense strand starting at position 3624 of SEQ ID NO: 1245019
ggaauauuguguuuguaug

SEQ ID NO: 1530001 - RNA, 19 nt, Artificial Sequence
  Description of Artificial Sequence: Synthetic oligonucleotide
  Antisense strand to SEQ ID NO: 1530000
cauacaaacacaauauucc

SEQ ID NO: 1530002 - RNA, 19 nt, Artificial Sequence
  Description of Artificial Sequence: Synthetic oligonucleotide
  Sense strand starting at position 3778 of SEQ ID NO: 1245019
augggaaguuuguuaacuc

SEQ ID NO: 1530003 - RNA, 19 nt, Artificial Sequence
  Description of Artificial Sequence: Synthetic oligonucleotide
  Antisense strand to SEQ ID NO: 1530002
gaguuaacaaacuucccau

SEQ ID NO: 1530004 - RNA, 19 nt, Artificial Sequence
  Description of Artificial Sequence: Synthetic oligonucleotide
  Sense strand starting at position 3782 of SEQ ID NO: 1245019
gaaguuuguuaacucugau

SEQ ID NO: 1530005 - RNA, 19 nt, Artificial Sequence
  Description of Artificial Sequence: Synthetic oligonucleotide
  Antisense strand to SEQ ID NO: 1530004
aucagaguuaacaaacuuc

SEQ ID NO: 1530006 - RNA, 19 nt, Artificial Sequence
  Description of Artificial Sequence: Synthetic oligonucleotide
  Sense strand starting at position 136 of SEQ ID NO: 1245020
ggaggaggugcuugggaau

SEQ ID NO: 1530007 - RNA, 19 nt, Artificial Sequence
  Description of Artificial Sequence: Synthetic oligonucleotide
  Antisense strand to SEQ ID NO: 1530006
auucccaagcaccuccucc

SEQ ID NO: 1530008 - RNA, 19 nt, Artificial Sequence
  Description of Artificial Sequence: Synthetic oligonucleotide
  Sense strand starting at position 188 of SEQ ID NO: 1245020
agauuucuauaccgaugca

SEQ ID NO: 1530009 - RNA, 19 nt, Artificial Sequence
  Description of Artificial Sequence: Synthetic oligonucleotide
  Antisense strand to SEQ ID NO: 1530008
ugcaucgguauagaaaucu

SEQ ID NO: 1530010 - RNA, 19 nt, Artificial Sequence
  Description of Artificial Sequence: Synthetic oligonucleotide
  Sense strand starting at position 477 of SEQ ID NO: 1245020
agacaaauguggucagggu

SEQ ID NO: 1530011 - RNA, 19 nt, Artificial Sequence
  Description of Artificial Sequence: Synthetic oligonucleotide
  Antisense strand to SEQ ID NO: 1530010
acccugaccacauuugucu

SEQ ID NO: 1530012 - RNA, 19 nt, Artificial Sequence
  Description of Artificial Sequence: Synthetic oligonucleotide
  Sense strand starting at position 567 of SEQ ID NO: 1245020
agggcacgcuccuucuaaa

SEQ ID NO: 1530013 - RNA, 19 nt, Artificial Sequence
  Description of Artificial Sequence: Synthetic oligonucleotide
  Antisense strand to SEQ ID NO: 1530012
uuuagaaggagcgugcccu

SEQ ID NO: 1530014 - RNA, 19 nt, Artificial Sequence
  Description of Artificial Sequence: Synthetic oligonucleotide
  Sense strand starting at position 613 of SEQ ID NO: 1245020
ugcgcugccaugcagaaau

SEQ ID NO: 1530015 - RNA, 19 nt, Artificial Sequence
  Description of Artificial Sequence: Synthetic oligonucleotide
  Antisense strand to SEQ ID NO: 1530014
auuucugcauggcagcgca

SEQ ID NO: 1530016 - RNA, 19 nt, Artificial Sequence
  Description of Artificial Sequence: Synthetic oligonucleotide
  Sense strand starting at position 640 of SEQ ID NO: 1245020
acugucagagcuugagauu

SEQ ID NO: 1530017 - RNA, 19 nt, Artificial Sequence
  Description of Artificial Sequence: Synthetic oligonucleotide
  Antisense strand to SEQ ID NO: 1530016
aaucucaagcucugacagu

SEQ ID NO: 1530018 - RNA, 19 nt, Artificial Sequence
  Description of Artificial Sequence: Synthetic oligonucleotide
  Sense strand starting at position 670 of SEQ ID NO: 1245020
uguguaaauccagacuucu

SEQ ID NO: 1530019 - RNA, 19 nt, Artificial Sequence
  Description of Artificial Sequence: Synthetic oligonucleotide
  Antisense strand to SEQ ID NO: 1530018
agaagucuggauuuacaca

SEQ ID NO: 1530020 - RNA, 19 nt, Artificial Sequence
  Description of Artificial Sequence: Synthetic oligonucleotide
  Sense strand starting at position 738 of SEQ ID NO: 1245020
cccacugugggucaauaaa

SEQ ID NO: 1530021 - RNA, 19 nt, Artificial Sequence
  Description of Artificial Sequence: Synthetic oligonucleotide
  Antisense strand to SEQ ID NO: 1530020
uuuauugacccacaguggg

SEQ ID NO: 1530022 - RNA, 19 nt, Artificial Sequence
  Description of Artificial Sequence: Synthetic oligonucleotide
  Sense strand starting at position 1510 of SEQ ID NO: 1245020
agggauauauggugaggga

SEQ ID NO: 1530023 - RNA, 19 nt, Artificial Sequence
  Description of Artificial Sequence: Synthetic oligonucleotide
  Antisense strand to SEQ ID NO: 1530022
ucccucaccauauaucccu

SEQ ID NO: 1530024 - RNA, 19 nt, Artificial Sequence
  Description of Artificial Sequence: Synthetic oligonucleotide
  Sense strand starting at position 1532 of SEQ ID NO: 1245020
gagagcaaugauggaguuu

SEQ ID NO: 1530025 - RNA, 19 nt, Artificial Sequence
  Description of Artificial Sequence: Synthetic oligonucleotide
  Antisense strand to SEQ ID NO: 1530024
aaacuccaucauugcucuc

SEQ ID NO: 1530026 - RNA, 19 nt, Artificial Sequence
  Description of Artificial Sequence: Synthetic oligonucleotide
  Sense strand starting at position 1574 of SEQ ID NO: 1245020
agaggguagguuugagagu

SEQ ID NO: 1530027 - RNA, 19 nt, Artificial Sequence
  Description of Artificial Sequence: Synthetic oligonucleotide
  Antisense strand to SEQ ID NO: 1530026
acucucaaaccuacccucu

SEQ ID NO: 1530028 - RNA, 19 nt, Artificial Sequence
  Description of Artificial Sequence: Synthetic oligonucleotide
  Sense strand starting at position 1576 of SEQ ID NO: 1245020
aggguagguuugagaguca

SEQ ID NO: 1530029 - RNA, 19 nt, Artificial Sequence
  Description of Artificial Sequence: Synthetic oligonucleotide
  Antisense strand to SEQ ID NO: 1530028
ugacucucaaaccuacccu

SEQ ID NO: 1530030 - RNA, 19 nt, Artificial Sequence
  Description of Artificial Sequence: Synthetic oligonucleotide
  Sense strand starting at position 1585 of SEQ ID NO: 1245020
uugagagucacuuaggguu

SEQ ID NO: 1530031 - RNA, 19 nt, Artificial Sequence
  Description of Artificial Sequence: Synthetic oligonucleotide
  Antisense strand to SEQ ID NO: 1530030
aacccuaagugacucucaa

SEQ ID NO: 1530032 - RNA, 19 nt, Artificial Sequence
  Description of Artificial Sequence: Synthetic oligonucleotide
  Sense strand starting at position 1598 of SEQ ID NO: 1245020
aggguuggauccguggaua

SEQ ID NO: 1530033 - RNA, 19 nt, Artificial Sequence
  Description of Artificial Sequence: Synthetic oligonucleotide
  Antisense strand to SEQ ID NO: 1530032
uauccacggauccaacccu

SEQ ID NO: 1530034 - RNA, 19 nt, Artificial Sequence
  Description of Artificial Sequence: Synthetic oligonucleotide
  Sense strand starting at position 1599 of SEQ ID NO: 1245020
ggguuggauccguggauau

SEQ ID NO: 1530035 - RNA, 19 nt, Artificial Sequence
  Description of Artificial Sequence: Synthetic oligonucleotide
  Antisense strand to SEQ ID NO: 1530034
auauccacggauccaaccc

SEQ ID NO: 1530036 - RNA, 19 nt, Artificial Sequence
  Description of Artificial Sequence: Synthetic oligonucleotide
  Sense strand starting at position 1600 of SEQ ID NO: 1245020
gguuggauccguggauaug

SEQ ID NO: 1530037 - RNA, 19 nt, Artificial Sequence
  Description of Artificial Sequence: Synthetic oligonucleotide
  Antisense strand to SEQ ID NO: 1530036
cauauccacggauccaacc

SEQ ID NO: 1530038 - RNA, 19 nt, Artificial Sequence
  Description of Artificial Sequence: Synthetic oligonucleotide
  Sense strand starting at position 1712 of SEQ ID NO: 1245020
gaagacuacucagggauga

SEQ ID NO: 1530039 - RNA, 19 nt, Artificial Sequence
  Description of Artificial Sequence: Synthetic oligonucleotide
  Antisense strand to SEQ ID NO: 1530038
ucaucccugaguagucuuc

SEQ ID NO: 1530040 - RNA, 19 nt, Artificial Sequence
  Description of Artificial Sequence: Synthetic oligonucleotide
  Sense strand starting at position 2367 of SEQ ID NO: 1245020
gguuucuuccaagauuccu

SEQ ID NO: 1530041 - RNA, 19 nt, Artificial Sequence
  Description of Artificial Sequence: Synthetic oligonucleotide
  Antisense strand to SEQ ID NO: 1530040
aggaaucuuggaagaaacc

SEQ ID NO: 1530042 - RNA, 19 nt, Artificial Sequence
  Description of Artificial Sequence: Synthetic oligonucleotide
  Sense strand starting at position 2576 of SEQ ID NO: 1245020
ggcgaaagccauugagaca

SEQ ID NO: 1530043 - RNA, 19 nt, Artificial Sequence
  Description of Artificial Sequence: Synthetic oligonucleotide
  Antisense strand to SEQ ID NO: 1530042
ugucucaauggcuuucgcc

SEQ ID NO: 1530044 - RNA, 19 nt, Artificial Sequence
  Description of Artificial Sequence: Synthetic oligonucleotide
  Sense strand starting at position 2951 of SEQ ID NO: 1245020
gcgugaugauguguggguu

SEQ ID NO: 1530045 - RNA, 19 nt, Artificial Sequence
  Description of Artificial Sequence: Synthetic oligonucleotide
  Antisense strand to SEQ ID NO: 1530044
aacccacacaucaucacgc

SEQ ID NO: 1530046 - RNA, 19 nt, Artificial Sequence
  Description of Artificial Sequence: Synthetic oligonucleotide
  Sense strand starting at position 3116 of SEQ ID NO: 1245020
gucacuggaaguuguuauu

SEQ ID NO: 1530047 - RNA, 19 nt, Artificial Sequence
  Description of Artificial Sequence: Synthetic oligonucleotide
  Antisense strand to SEQ ID NO: 1530046
aauaacaacuuccagugac

SEQ ID NO: 1530048 - RNA, 19 nt, Artificial Sequence
  Description of Artificial Sequence: Synthetic oligonucleotide
  Sense strand starting at position 3178 of SEQ ID NO: 1245020
caugaaucgucuccggaaa

SEQ ID NO: 1530049 - RNA, 19 nt, Artificial Sequence
  Description of Artificial Sequence: Synthetic oligonucleotide
  Antisense strand to SEQ ID NO: 1530048
uuuccggagacgauucaug

SEQ ID NO: 1530050 - RNA, 19 nt, Artificial Sequence
  Description of Artificial Sequence: Synthetic oligonucleotide
  Sense strand starting at position 3179 of SEQ ID NO: 1245020
augaaucgucuccggaaac

SEQ ID NO: 1530051 - RNA, 19 nt, Artificial Sequence
  Description of Artificial Sequence: Synthetic oligonucleotide
  Antisense strand to SEQ ID NO: 1530050
guuuccggagacgauucau

SEQ ID NO: 1530052 - RNA, 19 nt, Artificial Sequence
  Description of Artificial Sequence: Synthetic oligonucleotide
  Sense strand starting at position 3192 of SEQ ID NO: 1245020
ggaaacaccugagagcuua

SEQ ID NO: 1530053 - RNA, 19 nt, Artificial Sequence
  Description of Artificial Sequence: Synthetic oligonucleotide
  Antisense strand to SEQ ID NO: 1530052
uaagcucucagguguuucc

SEQ ID NO: 1530054 - RNA, 19 nt, Artificial Sequence
  Description of Artificial Sequence: Synthetic oligonucleotide
  Sense strand starting at position 3206 of SEQ ID NO: 1245020
gcuuaccaucggugucuau

SEQ ID NO: 1530055 - RNA, 19 nt, Artificial Sequence
  Description of Artificial Sequence: Synthetic oligonucleotide
  Antisense strand to SEQ ID NO: 1530054
auagacaccgaugguaagc

SEQ ID NO: 1530056 - RNA, 19 nt, Artificial Sequence
  Description of Artificial Sequence: Synthetic oligonucleotide
  Sense strand starting at position 3219 of SEQ ID NO: 1245020
gucuauacuacacgaggua

SEQ ID NO: 1530057 - RNA, 19 nt, Artificial Sequence
  Description of Artificial Sequence: Synthetic oligonucleotide
  Antisense strand to SEQ ID NO: 1530056
uaccucguguaguauagac

SEQ ID NO: 1530058 - RNA, 19 nt, Artificial Sequence
  Description of Artificial Sequence: Synthetic oligonucleotide
  Sense strand starting at position 3222 of SEQ ID NO: 1245020
uauacuacacgagguaauu

SEQ ID NO: 1530059 - RNA, 19 nt, Artificial Sequence
  Description of Artificial Sequence: Synthetic oligonucleotide
  Antisense strand to SEQ ID NO: 1530058
aauuaccucguguaguaua

SEQ ID NO: 1530060 - RNA, 19 nt, Artificial Sequence
  Description of Artificial Sequence: Synthetic oligonucleotide
  Sense strand starting at position 3351 of SEQ ID NO: 1245020
gguuccguuugcucucauu

SEQ ID NO: 1530061 - RNA, 19 nt, Artificial Sequence
  Description of Artificial Sequence: Synthetic oligonucleotide
  Antisense strand to SEQ ID NO: 1530060
aaugagagcaaacggaacc

SEQ ID NO: 1530062 - RNA, 19 nt, Artificial Sequence
  Description of Artificial Sequence: Synthetic oligonucleotide
  Sense strand starting at position 3409 of SEQ ID NO: 1245020
uucccagucccaggagaaa

SEQ ID NO: 1530063 - RNA, 19 nt, Artificial Sequence
  Description of Artificial Sequence: Synthetic oligonucleotide
  Antisense strand to SEQ ID NO: 1530062
uuucuccugggacugggaa

SEQ ID NO: 1530064 - RNA, 19 nt, Artificial Sequence
  Description of Artificial Sequence: Synthetic oligonucleotide
  Sense strand starting at position 3429 of SEQ ID NO: 1245020
ggcucuuucuugguggcaa

SEQ ID NO: 1530065 - RNA, 19 nt, Artificial Sequence
  Description of Artificial Sequence: Synthetic oligonucleotide
  Antisense strand to SEQ ID NO: 1530064
uugccaccaagaaagagcc

SEQ ID NO: 1530066 - RNA, 19 nt, Artificial Sequence
  Description of Artificial Sequence: Synthetic oligonucleotide
  Sense strand starting at position 3587 of SEQ ID NO: 1245020
augagcugucuugaucuca

SEQ ID NO: 1530067 - RNA, 19 nt, Artificial Sequence
  Description of Artificial Sequence: Synthetic oligonucleotide
  Antisense strand to SEQ ID NO: 1530066
ugagaucaagacagcucau

SEQ ID NO: 1530068 - RNA, 19 nt, Artificial Sequence
  Description of Artificial Sequence: Synthetic oligonucleotide
  Sense strand starting at position 3596 of SEQ ID NO: 1245020
cuugaucucaaaggugaga

SEQ ID NO: 1530069 - RNA, 19 nt, Artificial Sequence
  Description of Artificial Sequence: Synthetic oligonucleotide
  Antisense strand to SEQ ID NO: 1530068
ucucaccuuugagaucaag

SEQ ID NO: 1530070 - RNA, 19 nt, Artificial Sequence
  Description of Artificial Sequence: Synthetic oligonucleotide
  Sense strand starting at position 3598 of SEQ ID NO: 1245020
ugaucucaaaggugagacu

SEQ ID NO: 1530071 - RNA, 19 nt, Artificial Sequence
  Description of Artificial Sequence: Synthetic oligonucleotide
  Antisense strand to SEQ ID NO: 1530070
agucucaccuuugagauca

SEQ ID NO: 1530072 - RNA, 19 nt, Artificial Sequence
  Description of Artificial Sequence: Synthetic oligonucleotide
  Sense strand starting at position 3702 of SEQ ID NO: 1245020
cgcacauuccuagaaccuu

SEQ ID NO: 1530073 - RNA, 19 nt, Artificial Sequence
  Description of Artificial Sequence: Synthetic oligonucleotide
  Antisense strand to SEQ ID NO: 1530072
aagguucuaggaaugugcg

SEQ ID NO: 1530074 - RNA, 19 nt, Artificial Sequence
  Description of Artificial Sequence: Synthetic oligonucleotide
  Sense strand starting at position 3722 of SEQ ID NO: 1245020
uucugauccuguccaaagu

SEQ ID NO: 1530075 - RNA, 19 nt, Artificial Sequence
  Description of Artificial Sequence: Synthetic oligonucleotide
  Antisense strand to SEQ ID NO: 1530074
acuuuggacaggaucagaa

SEQ ID NO: 1530076 - RNA, 19 nt, Artificial Sequence
  Description of Artificial Sequence: Synthetic oligonucleotide
  Sense strand starting at position 3723 of SEQ ID NO: 1245020
ucugauccuguccaaagua

SEQ ID NO: 1530077 - RNA, 19 nt, Artificial Sequence
  Description of Artificial Sequence: Synthetic oligonucleotide
  Antisense strand to SEQ ID NO: 1530076
uacuuuggacaggaucaga

SEQ ID NO: 1530078 - RNA, 19 nt, Artificial Sequence
  Description of Artificial Sequence: Synthetic oligonucleotide
  Sense strand starting at position 3731 of SEQ ID NO: 1245020
uguccaaaguacuuagacu

SEQ ID NO: 1530079 - RNA, 19 nt, Artificial Sequence
  Description of Artificial Sequence: Synthetic oligonucleotide
  Antisense strand to SEQ ID NO: 1530078
agucuaaguacuuuggaca

SEQ ID NO: 1530080 - RNA, 19 nt, Artificial Sequence
  Description of Artificial Sequence: Synthetic oligonucleotide
  Sense strand starting at position 3818 of SEQ ID NO: 1245020
ccacgugugcuauugucua

SEQ ID NO: 1530081 - RNA, 19 nt, Artificial Sequence
  Description of Artificial Sequence: Synthetic oligonucleotide
  Antisense strand to SEQ ID NO: 1530080
uagacaauagcacacgugg

SEQ ID NO: 1530082 - RNA, 19 nt, Artificial Sequence
  Description of Artificial Sequence: Synthetic oligonucleotide
  Sense strand starting at position 3822 of SEQ ID NO: 1245020
gugugcuauugucuacuua

SEQ ID NO: 1530083 - RNA, 19 nt, Artificial Sequence
  Description of Artificial Sequence: Synthetic oligonucleotide
  Antisense strand to SEQ ID NO: 1530082
uaaguagacaauagcacac

SEQ ID NO: 1530084 - RNA, 19 nt, Artificial Sequence
  Description of Artificial Sequence: Synthetic oligonucleotide
  Sense strand starting at position 3823 of SEQ ID NO: 1245020
ugugcuauugucuacuuau

SEQ ID NO: 1530085 - RNA, 19 nt, Artificial Sequence
  Description of Artificial Sequence: Synthetic oligonucleotide
  Antisense strand to SEQ ID NO: 1530084
auaaguagacaauagcaca

SEQ ID NO: 1530086 - RNA, 19 nt, Artificial Sequence
  Description of Artificial Sequence: Synthetic oligonucleotide
  Sense strand starting at position 362 of SEQ ID NO: 1245021
accgacuugcucuaauuga

SEQ ID NO: 1530087 - RNA, 19 nt, Artificial Sequence
  Description of Artificial Sequence: Synthetic oligonucleotide
  Antisense strand to SEQ ID NO: 1530086
ucaauuagagcaagucggu

SEQ ID NO: 1530088 - RNA, 19 nt, Artificial Sequence
  Description of Artificial Sequence: Synthetic oligonucleotide
  Sense strand starting at position 658 of SEQ ID NO: 1245021
cugaucauagugcaauuaa

SEQ ID NO: 1530089 - RNA, 19 nt, Artificial Sequence
  Description of Artificial Sequence: Synthetic oligonucleotide
  Antisense strand to SEQ ID NO: 1530088
uuaauugcacuaugaucag

SEQ ID NO: 1530090 - RNA, 19 nt, Artificial Sequence
  Description of Artificial Sequence: Synthetic oligonucleotide
  Sense strand starting at position 830 of SEQ ID NO: 1245021
gcagcuuuagcucagaggu

SEQ ID NO: 1530091 - RNA, 19 nt, Artificial Sequence
  Description of Artificial Sequence: Synthetic oligonucleotide
  Antisense strand to SEQ ID NO: 1530090
accucugagcuaaagcugc

SEQ ID NO: 1530092 - RNA, 19 nt, Artificial Sequence
  Description of Artificial Sequence: Synthetic oligonucleotide
  Sense strand starting at position 976 of SEQ ID NO: 1245021
gauaccgaccuguaaacuu

SEQ ID NO: 1530093 - RNA, 19 nt, Artificial Sequence
  Description of Artificial Sequence: Synthetic oligonucleotide
  Antisense strand to SEQ ID NO: 1530092
aaguuuacaggucgguauc

SEQ ID NO: 1530094 - RNA, 19 nt, Artificial Sequence
  Description of Artificial Sequence: Synthetic oligonucleotide
  Sense strand starting at position 1118 of SEQ ID NO: 1245021
ccagguaguguguaagaaa

SEQ ID NO: 1530095 - RNA, 19 nt, Artificial Sequence
  Description of Artificial Sequence: Synthetic oligonucleotide
  Antisense strand to SEQ ID NO: 1530094
uuucuuacacacuaccugg

SEQ ID NO: 1530096 - RNA, 19 nt, Artificial Sequence
  Description of Artificial Sequence: Synthetic oligonucleotide
  Sense strand starting at position 1189 of SEQ ID NO: 1245021
uagaguuuauauuccgaua

SEQ ID NO: 1530097 - RNA, 19 nt, Artificial Sequence
  Description of Artificial Sequence: Synthetic oligonucleotide
  Antisense strand to SEQ ID NO: 1530096
uaucggaauauaaacucua

SEQ ID NO: 1530098 - RNA, 19 nt, Artificial Sequence
  Description of Artificial Sequence: Synthetic oligonucleotide
  Sense strand starting at position 1245 of SEQ ID NO: 1245021
aaauaagguugucuguuau

SEQ ID NO: 1530099 - RNA, 19 nt, Artificial Sequence
  Description of Artificial Sequence: Synthetic oligonucleotide
  Antisense strand to SEQ ID NO: 1530098
auaacagacaaccuuauuu

SEQ ID NO: 1530100 - RNA, 19 nt, Artificial Sequence
  Description of Artificial Sequence: Synthetic oligonucleotide
  Sense strand starting at position 1304 of SEQ ID NO: 1245021
aagugcauucuagguguaa

SEQ ID NO: 1530101 - RNA, 19 nt, Artificial Sequence
  Description of Artificial Sequence: Synthetic oligonucleotide
  Antisense strand to SEQ ID NO: 1530100
uuacaccuagaaugcacuu

SEQ ID NO: 1530102 - RNA, 19 nt, Artificial Sequence
  Description of Artificial Sequence: Synthetic oligonucleotide
  Sense strand starting at position 1308 of SEQ ID NO: 1245021
gcauucuagguguaauaua

SEQ ID NO: 1530103 - RNA, 19 nt, Artificial Sequence
  Description of Artificial Sequence: Synthetic oligonucleotide
  Antisense strand to SEQ ID NO: 1530102
uauauuacaccuagaaugc

SEQ ID NO: 1530104 - RNA, 19 nt, Artificial Sequence
  Description of Artificial Sequence: Synthetic oligonucleotide
  Sense strand starting at position 1324 of SEQ ID NO: 1245021
auacacaagugguuacaua

SEQ ID NO: 1530105 - RNA, 19 nt, Artificial Sequence
  Description of Artificial Sequence: Synthetic oligonucleotide
  Antisense strand to SEQ ID NO: 1530104
uauguaaccacuuguguau

SEQ ID NO: 1530106 - RNA, 19 nt, Artificial Sequence
  Description of Artificial Sequence: Synthetic oligonucleotide
  Sense strand starting at position 1334 of SEQ ID NO: 1245021
gguuacauacaugguuaca

SEQ ID NO: 1530107 - RNA, 19 nt, Artificial Sequence
  Description of Artificial Sequence: Synthetic oligonucleotide
  Antisense strand to SEQ ID NO: 1530106
uguaaccauguauguaacc

SEQ ID NO: 1530108 - RNA, 19 nt, Artificial Sequence
  Description of Artificial Sequence: Synthetic oligonucleotide
  Sense strand starting at position 1336 of SEQ ID NO: 1245021
uuacauacaugguuacaua

SEQ ID NO: 1530109 - RNA, 19 nt, Artificial Sequence
  Description of Artificial Sequence: Synthetic oligonucleotide
  Antisense strand to SEQ ID NO: 1530108
uauguaaccauguauguaa

SEQ ID NO: 1530110 - RNA, 19 nt, Artificial Sequence
  Description of Artificial Sequence: Synthetic oligonucleotide
  Sense strand starting at position 1428 of SEQ ID NO: 1245021
ccacaauuacccuggugua

SEQ ID NO: 1530111 - RNA, 19 nt, Artificial Sequence
  Description of Artificial Sequence: Synthetic oligonucleotide
  Antisense strand to SEQ ID NO: 1530110
uacaccaggguaauugugg

SEQ ID NO: 1530112 - RNA, 19 nt, Artificial Sequence
  Description of Artificial Sequence: Synthetic oligonucleotide
  Sense strand starting at position 1615 of SEQ ID NO: 1245021
cugcucauuggauauguau

SEQ ID NO: 1530113 - RNA, 19 nt, Artificial Sequence
  Description of Artificial Sequence: Synthetic oligonucleotide
  Antisense strand to SEQ ID NO: 1530112
auacauauccaaugagcag

SEQ ID NO: 1530114 - RNA, 19 nt, Artificial Sequence
  Description of Artificial Sequence: Synthetic oligonucleotide
  Sense strand starting at position 1624 of SEQ ID NO: 1245021
ggauauguauucuccacca

SEQ ID NO: 1530115 - RNA, 19 nt, Artificial Sequence
  Description of Artificial Sequence: Synthetic oligonucleotide
  Antisense strand to SEQ ID NO: 1530114
ugguggagaauacauaucc

SEQ ID NO: 1530116 - RNA, 19 nt, Artificial Sequence
  Description of Artificial Sequence: Synthetic oligonucleotide
  Sense strand starting at position 1626 of SEQ ID NO: 1245021
auauguauucuccaccaug

SEQ ID NO: 1530117 - RNA, 19 nt, Artificial Sequence
  Description of Artificial Sequence: Synthetic oligonucleotide
  Antisense strand to SEQ ID NO: 1530116
caugguggagaauacauau

SEQ ID NO: 1530118 - RNA, 19 nt, Artificial Sequence
  Description of Artificial Sequence: Synthetic oligonucleotide
  Sense strand starting at position 2344 of SEQ ID NO: 1245021
ucauuuauugcgcaccuau

SEQ ID NO: 1530119 - RNA, 19 nt, Artificial Sequence
  Description of Artificial Sequence: Synthetic oligonucleotide
  Antisense strand to SEQ ID NO: 1530118
auaggugcgcaauaaauga

SEQ ID NO: 1530120 - RNA, 19 nt, Artificial Sequence
  Description of Artificial Sequence: Synthetic oligonucleotide
  Sense strand starting at position 2754 of SEQ ID NO: 1245021
auggcugaauccucugauu

SEQ ID NO: 1530121 - RNA, 19 nt, Artificial Sequence
  Description of Artificial Sequence: Synthetic oligonucleotide
  Antisense strand to SEQ ID NO: 1530120
aaucagaggauucagccau

SEQ ID NO: 1530122 - RNA, 19 nt, Artificial Sequence
  Description of Artificial Sequence: Synthetic oligonucleotide
  Sense strand starting at position 2757 of SEQ ID NO: 1245021
gcugaauccucugauuuga

SEQ ID NO: 1530123 - RNA, 19 nt, Artificial Sequence
  Description of Artificial Sequence: Synthetic oligonucleotide
  Antisense strand to SEQ ID NO: 1530122
ucaaaucagaggauucagc

SEQ ID NO: 1530124 - RNA, 19 nt, Artificial Sequence
  Description of Artificial Sequence: Synthetic oligonucleotide
  Sense strand starting at position 2830 of SEQ ID NO: 1245021
ggcucaguuccacaccauu

SEQ ID NO: 1530125 - RNA, 19 nt, Artificial Sequence
  Description of Artificial Sequence: Synthetic oligonucleotide
  Antisense strand to SEQ ID NO: 1530124
aaugguguggaacugagcc

SEQ ID NO: 1530126 - RNA, 19 nt, Artificial Sequence
  Description of Artificial Sequence: Synthetic oligonucleotide
  Sense strand starting at position 2935 of SEQ ID NO: 1245021
uugugauacuaaguugcau

SEQ ID NO: 1530127 - RNA, 19 nt, Artificial Sequence
  Description of Artificial Sequence: Synthetic oligonucleotide
  Antisense strand to SEQ ID NO: 1530126
augcaacuuaguaucacaa

SEQ ID NO: 1530128 - RNA, 19 nt, Artificial Sequence
  Description of Artificial Sequence: Synthetic oligonucleotide
  Sense strand starting at position 2946 of SEQ ID NO: 1245021
aguugcauuaauggaagua

SEQ ID NO: 1530129 - RNA, 19 nt, Artificial Sequence
  Description of Artificial Sequence: Synthetic oligonucleotide
  Antisense strand to SEQ ID NO: 1530128
uacuuccauuaaugcaacu

SEQ ID NO: 1530130 - RNA, 19 nt, Artificial Sequence
  Description of Artificial Sequence: Synthetic oligonucleotide
  Sense strand starting at position 2947 of SEQ ID NO: 1245021
guugcauuaauggaaguau

SEQ ID NO: 1530131 - RNA, 19 nt, Artificial Sequence
  Description of Artificial Sequence: Synthetic oligonucleotide
  Antisense strand to SEQ ID NO: 1530130
auacuuccauuaaugcaac

SEQ ID NO: 1530132 - RNA, 19 nt, Artificial Sequence
  Description of Artificial Sequence: Synthetic oligonucleotide
  Sense strand starting at position 3112 of SEQ ID NO: 1245021
cuguaccugucauuaucau

SEQ ID NO: 1530133 - RNA, 19 nt, Artificial Sequence
  Description of Artificial Sequence: Synthetic oligonucleotide
  Antisense strand to SEQ ID NO: 1530132
augauaaugacagguacag

SEQ ID NO: 1530134 - RNA, 19 nt, Artificial Sequence
  Description of Artificial Sequence: Synthetic oligonucleotide
  Sense strand starting at position 3113 of SEQ ID NO: 1245021
uguaccugucauuaucaua

SEQ ID NO: 1530135 - RNA, 19 nt, Artificial Sequence
  Description of Artificial Sequence: Synthetic oligonucleotide
  Antisense strand to SEQ ID NO: 1530134
uaugauaaugacagguaca

SEQ ID NO: 1530136 - RNA, 19 nt, Artificial Sequence
  Description of Artificial Sequence: Synthetic oligonucleotide
  Sense strand starting at position 3356 of SEQ ID NO: 1245021
agggauucgacauguucuc

SEQ ID NO: 1530137 - RNA, 19 nt, Artificial Sequence
  Description of Artificial Sequence: Synthetic oligonucleotide
  Antisense strand to SEQ ID NO: 1530136
gagaacaugucgaaucccu

SEQ ID NO: 1530138 - RNA, 19 nt, Artificial Sequence
  Description of Artificial Sequence: Synthetic oligonucleotide
  Sense strand starting at position 3361 of SEQ ID NO: 1245021
uucgacauguucucuuaag

SEQ ID NO: 1530139 - RNA, 19 nt, Artificial Sequence
  Description of Artificial Sequence: Synthetic oligonucleotide
  Antisense strand to SEQ ID NO: 1530138
cuuaagagaacaugucgaa

SEQ ID NO: 1530140 - RNA, 19 nt, Artificial Sequence
  Description of Artificial Sequence: Synthetic oligonucleotide
  Sense strand starting at position 3396 of SEQ ID NO: 1245021
agauccuaugugugaaacu

SEQ ID NO: 1530141 - RNA, 19 nt, Artificial Sequence
  Description of Artificial Sequence: Synthetic oligonucleotide
  Antisense strand to SEQ ID NO: 1530140
aguuucacacauaggaucu

SEQ ID NO: 1530142 - RNA, 19 nt, Artificial Sequence
  Description of Artificial Sequence: Synthetic oligonucleotide
  Sense strand starting at position 3424 of SEQ ID NO: 1245021
gccugacauagguggaagu

SEQ ID NO: 1530143 - RNA, 19 nt, Artificial Sequence
  Description of Artificial Sequence: Synthetic oligonucleotide
  Antisense strand to SEQ ID NO: 1530142
acuuccaccuaugucaggc

SEQ ID NO: 1530144 - RNA, 19 nt, Artificial Sequence
  Description of Artificial Sequence: Synthetic oligonucleotide
  Sense strand starting at position 3426 of SEQ ID NO: 1245021
cugacauagguggaaguuu

SEQ ID NO: 1530145 - RNA, 19 nt, Artificial Sequence
  Description of Artificial Sequence: Synthetic oligonucleotide
  Antisense strand to SEQ ID NO: 1530144
aaacuuccaccuaugucag

SEQ ID NO: 1530146 - RNA, 19 nt, Artificial Sequence
  Description of Artificial Sequence: Synthetic oligonucleotide
  Sense strand starting at position 3634 of SEQ ID NO: 1245021
cgcugcuuugaguuccuga

SEQ ID NO: 1530147 - RNA, 19 nt, Artificial Sequence
  Description of Artificial Sequence: Synthetic oligonucleotide
  Antisense strand to SEQ ID NO: 1530146
ucaggaacucaaagcagcg

SEQ ID NO: 1530148 - RNA, 19 nt, Artificial Sequence
  Description of Artificial Sequence: Synthetic oligonucleotide
  Sense strand starting at position 3637 of SEQ ID NO: 1245021
ugcuuugaguuccugagga

SEQ ID NO: 1530149 - RNA, 19 nt, Artificial Sequence
  Description of Artificial Sequence: Synthetic oligonucleotide
  Antisense strand to SEQ ID NO: 1530148
uccucaggaacucaaagca

SEQ ID NO: 1530150 - RNA, 19 nt, Artificial Sequence
  Description of Artificial Sequence: Synthetic oligonucleotide
  Sense strand starting at position 3690 of SEQ ID NO: 1245021
gggacaccuucauugggua

SEQ ID NO: 1530151 - RNA, 19 nt, Artificial Sequence
  Description of Artificial Sequence: Synthetic oligonucleotide
  Antisense strand to SEQ ID NO: 1530150
uacccaaugaagguguccc

SEQ ID NO: 1530152 - RNA, 19 nt, Artificial Sequence
  Description of Artificial Sequence: Synthetic oligonucleotide
  Sense strand starting at position 3750 of SEQ ID NO: 1245021
gagauaaggugguuuagag

SEQ ID NO: 1530153 - RNA, 19 nt, Artificial Sequence
  Description of Artificial Sequence: Synthetic oligonucleotide
  Antisense strand to SEQ ID NO: 1530152
cucuaaaccaccuuaucuc

SEQ ID NO: 1530154 - RNA, 19 nt, Artificial Sequence
  Description of Artificial Sequence: Synthetic oligonucleotide
  Sense strand starting at position 3848 of SEQ ID NO: 1245021
accauuaauuggguucuga

SEQ ID NO: 1530155 - RNA, 19 nt, Artificial Sequence
  Description of Artificial Sequence: Synthetic oligonucleotide
  Antisense strand to SEQ ID NO: 1530154
ucagaacccaauuaauggu

SEQ ID NO: 1530156 - RNA, 19 nt, Artificial Sequence
  Description of Artificial Sequence: Synthetic oligonucleotide
  Sense strand starting at position 3859 of SEQ ID NO: 1245021
gguucugacuccuuuguga

SEQ ID NO: 1530157 - RNA, 19 nt, Artificial Sequence
  Description of Artificial Sequence: Synthetic oligonucleotide
  Antisense strand to SEQ ID NO: 1530156
ucacaaaggagucagaacc

SEQ ID NO: 1530158 - RNA, 19 nt, Artificial Sequence
  Description of Artificial Sequence: Synthetic oligonucleotide
  Sense strand starting at position 3861 of SEQ ID NO: 1245021
uucugacuccuuugugaau

SEQ ID NO: 1530159 - RNA, 19 nt, Artificial Sequence
  Description of Artificial Sequence: Synthetic oligonucleotide
  Antisense strand to SEQ ID NO: 1530158
auucacaaaggagucagaa

SEQ ID NO: 1530160 - RNA, 19 nt, Artificial Sequence
  Description of Artificial Sequence: Synthetic oligonucleotide
  Sense strand starting at position 3862 of SEQ ID NO: 1245021
ucugacuccuuugugaauc

SEQ ID NO: 1530161 - RNA, 19 nt, Artificial Sequence
  Description of Artificial Sequence: Synthetic oligonucleotide
  Antisense strand to SEQ ID NO: 1530160
gauucacaaaggagucaga

SEQ ID NO: 1530162 - RNA, 19 nt, Artificial Sequence
  Description of Artificial Sequence: Synthetic oligonucleotide
  Sense strand starting at position 3873 of SEQ ID NO: 1245021
ugugaaucugauggaaggu

SEQ ID NO: 1530163 - RNA, 19 nt, Artificial Sequence
  Description of Artificial Sequence: Synthetic oligonucleotide
  Antisense strand to SEQ ID NO: 1530162
accuuccaucagauucaca

SEQ ID NO: 1530164 - RNA, 19 nt, Artificial Sequence
  Description of Artificial Sequence: Synthetic oligonucleotide
  Sense strand starting at position 3943 of SEQ ID NO: 1245021
acucaaauccagggagcua

SEQ ID NO: 1530165 - RNA, 19 nt, Artificial Sequence
  Description of Artificial Sequence: Synthetic oligonucleotide
  Antisense strand to SEQ ID NO: 1530164
uagcucccuggauuugagu

SEQ ID NO: 1530166 - RNA, 19 nt, Artificial Sequence
  Description of Artificial Sequence: Synthetic oligonucleotide
  Sense strand starting at position 389 of SEQ ID NO: 1245022
ugaugacacugccuauaau

SEQ ID NO: 1530167 - RNA, 19 nt, Artificial Sequence
  Description of Artificial Sequence: Synthetic oligonucleotide
  Antisense strand to SEQ ID NO: 1530166
auuauaggcagugucauca

SEQ ID NO: 1530168 - RNA, 19 nt, Artificial Sequence
  Description of Artificial Sequence: Synthetic oligonucleotide
  Sense strand starting at position 501 of SEQ ID NO: 1245022
ggacuacacuugccauguu

SEQ ID NO: 1530169 - RNA, 19 nt, Artificial Sequence
  Description of Artificial Sequence: Synthetic oligonucleotide
  Antisense strand to SEQ ID NO: 1530168
aacauggcaaguguagucc

SEQ ID NO: 1530170 - RNA, 19 nt, Artificial Sequence
  Description of Artificial Sequence: Synthetic oligonucleotide
  Sense strand starting at position 603 of SEQ ID NO: 1245022
ucaaauuccuguguuuaac

SEQ ID NO: 1530171 - RNA, 19 nt, Artificial Sequence
  Description of Artificial Sequence: Synthetic oligonucleotide
  Antisense strand to SEQ ID NO: 1530170
guuaaacacaggaauuuga

SEQ ID NO: 1530172 - RNA, 19 nt, Artificial Sequence
  Description of Artificial Sequence: Synthetic oligonucleotide
  Sense strand starting at position 611 of SEQ ID NO: 1245022
cuguguuuaacagagaugu

SEQ ID NO: 1530173 - RNA, 19 nt, Artificial Sequence
  Description of Artificial Sequence: Synthetic oligonucleotide
  Antisense strand to SEQ ID NO: 1530172
acaucucuguuaaacacag

SEQ ID NO: 1530174 - RNA, 19 nt, Artificial Sequence
  Description of Artificial Sequence: Synthetic oligonucleotide
  Sense strand starting at position 619 of SEQ ID NO: 1245022
aacagagaugucggugaaa

SEQ ID NO: 1530175 - RNA, 19 nt, Artificial Sequence
  Description of Artificial Sequence: Synthetic oligonucleotide
  Antisense strand to SEQ ID NO: 1530174
uuucaccgacaucucuguu

SEQ ID NO: 1530176 - RNA, 19 nt, Artificial Sequence
  Description of Artificial Sequence: Synthetic oligonucleotide
  Sense strand starting at position 621 of SEQ ID NO: 1245022
cagagaugucggugaaacu

SEQ ID NO: 1530177 - RNA, 19 nt, Artificial Sequence
  Description of Artificial Sequence: Synthetic oligonucleotide
  Antisense strand to SEQ ID NO: 1530176
aguuucaccgacaucucug

SEQ ID NO: 1530178 - RNA, 19 nt, Artificial Sequence
  Description of Artificial Sequence: Synthetic oligonucleotide
  Sense strand starting at position 622 of SEQ ID NO: 1245022
agagaugucggugaaacuu

SEQ ID NO: 1530179 - RNA, 19 nt, Artificial Sequence
  Description of Artificial Sequence: Synthetic oligonucleotide
  Antisense strand to SEQ ID NO: 1530178
aaguuucaccgacaucucu

SEQ ID NO: 1530180 - RNA, 19 nt, Artificial Sequence
  Description of Artificial Sequence: Synthetic oligonucleotide
  Sense strand starting at position 706 of SEQ ID NO: 1245022
cccuaagguucugucaaga

SEQ ID NO: 1530181 - RNA, 19 nt, Artificial Sequence
  Description of Artificial Sequence: Synthetic oligonucleotide
  Antisense strand to SEQ ID NO: 1530180
ucuugacagaaccuuaggg

SEQ ID NO: 1530182 - RNA, 19 nt, Artificial Sequence
  Description of Artificial Sequence: Synthetic oligonucleotide
  Sense strand starting at position 711 of SEQ ID NO: 1245022
agguucugucaagacaauu

SEQ ID NO: 1530183 - RNA, 19 nt, Artificial Sequence
  Description of Artificial Sequence: Synthetic oligonucleotide
  Antisense strand to SEQ ID NO: 1530182
aauugucuugacagaaccu

SEQ ID NO: 1530184 - RNA, 19 nt, Artificial Sequence
  Description of Artificial Sequence: Synthetic oligonucleotide
  Sense strand starting at position 794 of SEQ ID NO: 1245022
agaguaacuauauggugaa

SEQ ID NO: 1530185 - RNA, 19 nt, Artificial Sequence
  Description of Artificial Sequence: Synthetic oligonucleotide
  Antisense strand to SEQ ID NO: 1530184
uucaccauauaguuacucu

SEQ ID NO: 1530186 - RNA, 19 nt, Artificial Sequence
  Description of Artificial Sequence: Synthetic oligonucleotide
  Sense strand starting at position 818 of SEQ ID NO: 1245022
aucacauaauuucgaauga

SEQ ID NO: 1530187 - RNA, 19 nt, Artificial Sequence
  Description of Artificial Sequence: Synthetic oligonucleotide
  Antisense strand to SEQ ID NO: 1530186
ucauucgaaauuaugugau

SEQ ID NO: 1530188 - RNA, 19 nt, Artificial Sequence
  Description of Artificial Sequence: Synthetic oligonucleotide
  Sense strand starting at position 819 of SEQ ID NO: 1245022
ucacauaauuucgaaugaa

SEQ ID NO: 1530189 - RNA, 19 nt, Artificial Sequence
  Description of Artificial Sequence: Synthetic oligonucleotide
  Antisense strand to SEQ ID NO: 1530188
uucauucgaaauuauguga

SEQ ID NO: 1530190 - RNA, 19 nt, Artificial Sequence
  Description of Artificial Sequence: Synthetic oligonucleotide
  Sense strand starting at position 841 of SEQ ID NO: 1245022
uccauaaaguuguuuccaa

SEQ ID NO: 1530191 - RNA, 19 nt, Artificial Sequence
  Description of Artificial Sequence: Synthetic oligonucleotide
  Antisense strand to SEQ ID NO: 1530190
uuggaaacaacuuuaugga

SEQ ID NO: 1530192 - RNA, 19 nt, Artificial Sequence
  Description of Artificial Sequence: Synthetic oligonucleotide
  Sense strand starting at position 842 of SEQ ID NO: 1245022
ccauaaaguuguuuccaau

SEQ ID NO: 1530193 - RNA, 19 nt, Artificial Sequence
  Description of Artificial Sequence: Synthetic oligonucleotide
  Antisense strand to SEQ ID NO: 1530192
auuggaaacaacuuuaugg

SEQ ID NO: 1530194 - RNA, 19 nt, Artificial Sequence
  Description of Artificial Sequence: Synthetic oligonucleotide
  Sense strand starting at position 852 of SEQ ID NO: 1245022
guuuccaauuccguaugaa

SEQ ID NO: 1530195 - RNA, 19 nt, Artificial Sequence
  Description of Artificial Sequence: Synthetic oligonucleotide
  Antisense strand to SEQ ID NO: 1530194
uucauacggaauuggaaac

SEQ ID NO: 1530196 - RNA, 19 nt, Artificial Sequence
  Description of Artificial Sequence: Synthetic oligonucleotide
  Sense strand starting at position 853 of SEQ ID NO: 1245022
uuuccaauuccguaugaau

SEQ ID NO: 1530197 - RNA, 19 nt, Artificial Sequence
  Description of Artificial Sequence: Synthetic oligonucleotide
  Antisense strand to SEQ ID NO: 1530196
auucauacggaauuggaaa

SEQ ID NO: 1530198 - RNA, 19 nt, Artificial Sequence
  Description of Artificial Sequence: Synthetic oligonucleotide
  Sense strand starting at position 864 of SEQ ID NO: 1245022
guaugaauuuauguugcca

SEQ ID NO: 1530199 - RNA, 19 nt, Artificial Sequence
  Description of Artificial Sequence: Synthetic oligonucleotide
  Antisense strand to SEQ ID NO: 1530198
uggcaacauaaauucauac

SEQ ID NO: 1530200 - RNA, 19 nt, Artificial Sequence
  Description of Artificial Sequence: Synthetic oligonucleotide
  Sense strand starting at position 868 of SEQ ID NO: 1245022
gaauuuauguugccaagca

SEQ ID NO: 1530201 - RNA, 19 nt, Artificial Sequence
  Description of Artificial Sequence: Synthetic oligonucleotide
  Antisense strand to SEQ ID NO: 1530200
ugcuuggcaacauaaauuc

SEQ ID NO: 1530202 - RNA, 19 nt, Artificial Sequence
  Description of Artificial Sequence: Synthetic oligonucleotide
  Sense strand starting at position 1197 of SEQ ID NO: 1245022
gaaacuccgcccugugaga

SEQ ID NO: 1530203 - RNA, 19 nt, Artificial Sequence
  Description of Artificial Sequence: Synthetic oligonucleotide
  Antisense strand to SEQ ID NO: 1530202
ucucacagggcggaguuuc

SEQ ID NO: 1530204 - RNA, 19 nt, Artificial Sequence
  Description of Artificial Sequence: Synthetic oligonucleotide
  Sense strand starting at position 1211 of SEQ ID NO: 1245022
ugagaacgcuuccugaaga

SEQ ID NO: 1530205 - RNA, 19 nt, Artificial Sequence
  Description of Artificial Sequence: Synthetic oligonucleotide
  Antisense strand to SEQ ID NO: 1530204
ucuucaggaagcguucuca

SEQ ID NO: 1530206 - RNA, 19 nt, Artificial Sequence
  Description of Artificial Sequence: Synthetic oligonucleotide
  Sense strand starting at position 1216 of SEQ ID NO: 1245022
acgcuuccugaagauuaag

SEQ ID NO: 1530207 - RNA, 19 nt, Artificial Sequence
  Description of Artificial Sequence: Synthetic oligonucleotide
  Antisense strand to SEQ ID NO: 1530206
cuuaaucuucaggaagcgu

SEQ ID NO: 1530208 - RNA, 19 nt, Artificial Sequence
  Description of Artificial Sequence: Synthetic oligonucleotide
  Sense strand starting at position 1317 of SEQ ID NO: 1245022
ugacuaacuugguucuuua

SEQ ID NO: 1530209 - RNA, 19 nt, Artificial Sequence
  Description of Artificial Sequence: Synthetic oligonucleotide
  Antisense strand to SEQ ID NO: 1530208
uaaagaaccaaguuaguca

SEQ ID NO: 1530210 - RNA, 19 nt, Artificial Sequence
  Description of Artificial Sequence: Synthetic oligonucleotide
  Sense strand starting at position 1448 of SEQ ID NO: 1245022
ccuaucgcacucgaagaaa

SEQ ID NO: 1530211 - RNA, 19 nt, Artificial Sequence
  Description of Artificial Sequence: Synthetic oligonucleotide
  Antisense strand to SEQ ID NO: 1530210
uuucuucgagugcgauagg

SEQ ID NO: 1530212 - RNA, 19 nt, Artificial Sequence
  Description of Artificial Sequence: Synthetic oligonucleotide
  Sense strand starting at position 1472 of SEQ ID NO: 1245022
cuuguugaaucgucaccaa

SEQ ID NO: 1530213 - RNA, 19 nt, Artificial Sequence
  Description of Artificial Sequence: Synthetic oligonucleotide
  Antisense strand to SEQ ID NO: 1530212
uuggugacgauucaacaag

SEQ ID NO: 1530214 - RNA, 19 nt, Artificial Sequence
  Description of Artificial Sequence: Synthetic oligonucleotide
  Sense strand starting at position 2156 of SEQ ID NO: 1245022
ggagcacuuuggguuucau

SEQ ID NO: 1530215 - RNA, 19 nt, Artificial Sequence
  Description of Artificial Sequence: Synthetic oligonucleotide
  Antisense strand to SEQ ID NO: 1530214
augaaacccaaagugcucc

SEQ ID NO: 1530216 - RNA, 19 nt, Artificial Sequence
  Description of Artificial Sequence: Synthetic oligonucleotide
  Sense strand starting at position 2166 of SEQ ID NO: 1245022
ggguuucauuuguaaagga

SEQ ID NO: 1530217 - RNA, 19 nt, Artificial Sequence
  Description of Artificial Sequence: Synthetic oligonucleotide
  Antisense strand to SEQ ID NO: 1530216
uccuuuacaaaugaaaccc

SEQ ID NO: 1530218 - RNA, 19 nt, Artificial Sequence
  Description of Artificial Sequence: Synthetic oligonucleotide
  Sense strand starting at position 2502 of SEQ ID NO: 1245022
guggucguuggguugucaa

SEQ ID NO: 1530219 - RNA, 19 nt, Artificial Sequence
  Description of Artificial Sequence: Synthetic oligonucleotide
  Antisense strand to SEQ ID NO: 1530218
uugacaacccaacgaccac

SEQ ID NO: 1530220 - RNA, 19 nt, Artificial Sequence
  Description of Artificial Sequence: Synthetic oligonucleotide
  Sense strand starting at position 2504 of SEQ ID NO: 1245022
ggucguuggguugucaagu

SEQ ID NO: 1530221 - RNA, 19 nt, Artificial Sequence
  Description of Artificial Sequence: Synthetic oligonucleotide
  Antisense strand to SEQ ID NO: 1530220
acuugacaacccaacgacc

SEQ ID NO: 1530222 - RNA, 19 nt, Artificial Sequence
  Description of Artificial Sequence: Synthetic oligonucleotide
  Sense strand starting at position 2510 of SEQ ID NO: 1245022
uggguugucaaguaaaguu

SEQ ID NO: 1530223 - RNA, 19 nt, Artificial Sequence
  Description of Artificial Sequence: Synthetic oligonucleotide
  Antisense strand to SEQ ID NO: 1530222
aacuuuacuugacaaccca

SEQ ID NO: 1530224 - RNA, 19 nt, Artificial Sequence
  Description of Artificial Sequence: Synthetic oligonucleotide
  Sense strand starting at position 2845 of SEQ ID NO: 1245022
agguuucuugaggagucaa

SEQ ID NO: 1530225 - RNA, 19 nt, Artificial Sequence
  Description of Artificial Sequence: Synthetic oligonucleotide
  Antisense strand to SEQ ID NO: 1530224
uugacuccucaagaaaccu

SEQ ID NO: 1530226 - RNA, 19 nt, Artificial Sequence
  Description of Artificial Sequence: Synthetic oligonucleotide
  Sense strand starting at position 2887 of SEQ ID NO: 1245022
aggguaucuccguaaggga

SEQ ID NO: 1530227 - RNA, 19 nt, Artificial Sequence
  Description of Artificial Sequence: Synthetic oligonucleotide
  Antisense strand to SEQ ID NO: 1530226
ucccuuacggagauacccu

SEQ ID NO: 1530228 - RNA, 19 nt, Artificial Sequence
  Description of Artificial Sequence: Synthetic oligonucleotide
  Sense strand starting at position 2904 of SEQ ID NO: 1245022
gagcaaagaguuuaagucu

SEQ ID NO: 1530229 - RNA, 19 nt, Artificial Sequence
  Description of Artificial Sequence: Synthetic oligonucleotide
  Antisense strand to SEQ ID NO: 1530228
agacuuaaacucuuugcuc

SEQ ID NO: 1530230 - RNA, 19 nt, Artificial Sequence
  Description of Artificial Sequence: Synthetic oligonucleotide
  Sense strand starting at position 3288 of SEQ ID NO: 1245022
gaaggugcuggucacaaga

SEQ ID NO: 1530231 - RNA, 19 nt, Artificial Sequence
  Description of Artificial Sequence: Synthetic oligonucleotide
  Antisense strand to SEQ ID NO: 1530230
ucuugugaccagcaccuuc

SEQ ID NO: 1530232 - RNA, 19 nt, Artificial Sequence
  Description of Artificial Sequence: Synthetic oligonucleotide
  Sense strand starting at position 3303 of SEQ ID NO: 1245022
aagagauaauccuagggag

SEQ ID NO: 1530233 - RNA, 19 nt, Artificial Sequence
  Description of Artificial Sequence: Synthetic oligonucleotide
  Antisense strand to SEQ ID NO: 1530232
cucccuaggauuaucucuu

SEQ ID NO: 1530234 - RNA, 19 nt, Artificial Sequence
  Description of Artificial Sequence: Synthetic oligonucleotide
  Sense strand starting at position 3340 of SEQ ID NO: 1245022
uggcgaacccuagaagcau

SEQ ID NO: 1530235 - RNA, 19 nt, Artificial Sequence
  Description of Artificial Sequence: Synthetic oligonucleotide
  Antisense strand to SEQ ID NO: 1530234
augcuucuaggguucgcca

SEQ ID NO: 1530236 - RNA, 19 nt, Artificial Sequence
  Description of Artificial Sequence: Synthetic oligonucleotide
  Sense strand starting at position 3349 of SEQ ID NO: 1245022
cuagaagcauucucagaag

SEQ ID NO: 1530237 - RNA, 19 nt, Artificial Sequence
  Description of Artificial Sequence: Synthetic oligonucleotide
  Antisense strand to SEQ ID NO: 1530236
cuucugagaaugcuucuag

SEQ ID NO: 1530238 - RNA, 19 nt, Artificial Sequence
  Description of Artificial Sequence: Synthetic oligonucleotide
  Sense strand starting at position 3377 of SEQ ID NO: 1245022
agcugaagucucugagaag

SEQ ID NO: 1530239 - RNA, 19 nt, Artificial Sequence
  Description of Artificial Sequence: Synthetic oligonucleotide
  Antisense strand to SEQ ID NO: 1530238
cuucucagagacuucagcu

SEQ ID NO: 1530240 - RNA, 19 nt, Artificial Sequence
  Description of Artificial Sequence: Synthetic oligonucleotide
  Sense strand starting at position 3431 of SEQ ID NO: 1245022
gcaagugagaggugguuaa

SEQ ID NO: 1530241 - RNA, 19 nt, Artificial Sequence
  Description of Artificial Sequence: Synthetic oligonucleotide
  Antisense strand to SEQ ID NO: 1530240
uuaaccaccucucacuugc

SEQ ID NO: 1530242 - RNA, 19 nt, Artificial Sequence
  Description of Artificial Sequence: Synthetic oligonucleotide
  Sense strand starting at position 3698 of SEQ ID NO: 1245022
auugucaacuuguuaauag

SEQ ID NO: 1530243 - RNA, 19 nt, Artificial Sequence
  Description of Artificial Sequence: Synthetic oligonucleotide
  Antisense strand to SEQ ID NO: 1530242
cuauuaacaaguugacaau

SEQ ID NO: 1530244 - RNA, 19 nt, Artificial Sequence
  Description of Artificial Sequence: Synthetic oligonucleotide
  Sense strand starting at position 3773 of SEQ ID NO: 1245022
auguguggagcugaauuaa

SEQ ID NO: 1530245 - RNA, 19 nt, Artificial Sequence
  Description of Artificial Sequence: Synthetic oligonucleotide
  Antisense strand to SEQ ID NO: 1530244
uuaauucagcuccacacau

SEQ ID NO: 1530246 - RNA, 19 nt, Artificial Sequence
  Description of Artificial Sequence: Synthetic oligonucleotide
  Sense strand starting at position 453 of SEQ ID NO: 1245023
ccugcuuggagguguguua

SEQ ID NO: 1530247 - RNA, 19 nt, Artificial Sequence
  Description of Artificial Sequence: Synthetic oligonucleotide
  Antisense strand to SEQ ID NO: 1530246
uaacacaccuccaagcagg

SEQ ID NO: 1530248 - RNA, 19 nt, Artificial Sequence
  Description of Artificial Sequence: Synthetic oligonucleotide
  Sense strand starting at position 713 of SEQ ID NO: 1245023
gugucugagcaccagugaa

SEQ ID NO: 1530249 - RNA, 19 nt, Artificial Sequence
  Description of Artificial Sequence: Synthetic oligonucleotide
  Antisense strand to SEQ ID NO: 1530248
uucacuggugcucagacac

SEQ ID NO: 1530250 - RNA, 19 nt, Artificial Sequence
  Description of Artificial Sequence: Synthetic oligonucleotide
  Sense strand starting at position 1215 of SEQ ID NO: 1245023
gacugugugaguggugaca

SEQ ID NO: 1530251 - RNA, 19 nt, Artificial Sequence
  Description of Artificial Sequence: Synthetic oligonucleotide
  Antisense strand to SEQ ID NO: 1530250
ugucaccacucacacaguc

SEQ ID NO: 1530252 - RNA, 19 nt, Artificial Sequence
  Description of Artificial Sequence: Synthetic oligonucleotide
  Sense strand starting at position 1757 of SEQ ID NO: 1245023
ggguuaugccaaggaagaa

SEQ ID NO: 1530253 - RNA, 19 nt, Artificial Sequence
  Description of Artificial Sequence: Synthetic oligonucleotide
  Antisense strand to SEQ ID NO: 1530252
uucuuccuuggcauaaccc

SEQ ID NO: 1530254 - RNA, 19 nt, Artificial Sequence
  Description of Artificial Sequence: Synthetic oligonucleotide
  Sense strand starting at position 1862 of SEQ ID NO: 1245023
guuggaaacuuacugcaau

SEQ ID NO: 1530255 - RNA, 19 nt, Artificial Sequence
  Description of Artificial Sequence: Synthetic oligonucleotide
  Antisense strand to SEQ ID NO: 1530254
auugcaguaaguuuccaac

SEQ ID NO: 1530256 - RNA, 19 nt, Artificial Sequence
  Description of Artificial Sequence: Synthetic oligonucleotide
  Sense strand starting at position 1865 of SEQ ID NO: 1245023
ggaaacuuacugcaaucgu

SEQ ID NO: 1530257 - RNA, 19 nt, Artificial Sequence
  Description of Artificial Sequence: Synthetic oligonucleotide
  Antisense strand to SEQ ID NO: 1530256
acgauugcaguaaguuucc

SEQ ID NO: 1530258 - RNA, 19 nt, Artificial Sequence
  Description of Artificial Sequence: Synthetic oligonucleotide
  Sense strand starting at position 1874 of SEQ ID NO: 1245023
cugcaaucguccucucgua

SEQ ID NO: 1530259 - RNA, 19 nt, Artificial Sequence
  Description of Artificial Sequence: Synthetic oligonucleotide
  Antisense strand to SEQ ID NO: 1530258
uacgagaggacgauugcag

SEQ ID NO: 1530260 - RNA, 19 nt, Artificial Sequence
  Description of Artificial Sequence: Synthetic oligonucleotide
  Sense strand starting at position 1961 of SEQ ID NO: 1245023
uccuuaggcuccgaagaga

SEQ ID NO: 1530261 - RNA, 19 nt, Artificial Sequence
  Description of Artificial Sequence: Synthetic oligonucleotide
  Antisense strand to SEQ ID NO: 1530260
ucucuucggagccuaagga

SEQ ID NO: 1530262 - RNA, 19 nt, Artificial Sequence
  Description of Artificial Sequence: Synthetic oligonucleotide
  Sense strand starting at position 2151 of SEQ ID NO: 1245023
gccacaugcuccuggauac

SEQ ID NO: 1530263 - RNA, 19 nt, Artificial Sequence
  Description of Artificial Sequence: Synthetic oligonucleotide
  Antisense strand to SEQ ID NO: 1530262
guauccaggagcauguggc

SEQ ID NO: 1530264 - RNA, 19 nt, Artificial Sequence
  Description of Artificial Sequence: Synthetic oligonucleotide
  Sense strand starting at position 2152 of SEQ ID NO: 1245023
ccacaugcuccuggauaca

SEQ ID NO: 1530265 - RNA, 19 nt, Artificial Sequence
  Description of Artificial Sequence: Synthetic oligonucleotide
  Antisense strand to SEQ ID NO: 1530264
uguauccaggagcaugugg

SEQ ID NO: 1530266 - RNA, 19 nt, Artificial Sequence
  Description of Artificial Sequence: Synthetic oligonucleotide
  Sense strand starting at position 2165 of SEQ ID NO: 1245023
gauacaaauggucgccuuu

SEQ ID NO: 1530267 - RNA, 19 nt, Artificial Sequence
  Description of Artificial Sequence: Synthetic oligonucleotide
  Antisense strand to SEQ ID NO: 1530266
aaaggcgaccauuuguauc

SEQ ID NO: 1530268 - RNA, 19 nt, Artificial Sequence
  Description of Artificial Sequence: Synthetic oligonucleotide
  Sense strand starting at position 2620 of SEQ ID NO: 1245023
gcaggugugcaaggacaau

SEQ ID NO: 1530269 - RNA, 19 nt, Artificial Sequence
  Description of Artificial Sequence: Synthetic oligonucleotide
  Antisense strand to SEQ ID NO: 1530268
auuguccuugcacaccugc

SEQ ID NO: 1530270 - RNA, 19 nt, Artificial Sequence
  Description of Artificial Sequence: Synthetic oligonucleotide
  Sense strand starting at position 2739 of SEQ ID NO: 1245023
gguugaggaugcuguuaac

SEQ ID NO: 1530271 - RNA, 19 nt, Artificial Sequence
  Description of Artificial Sequence: Synthetic oligonucleotide
  Antisense strand to SEQ ID NO: 1530270
guuaacagcauccucaacc

SEQ ID NO: 1530272 - RNA, 19 nt, Artificial Sequence
  Description of Artificial Sequence: Synthetic oligonucleotide
  Sense strand starting at position 3229 of SEQ ID NO: 1245023
cccacauaaucgggucacu

SEQ ID NO: 1530273 - RNA, 19 nt, Artificial Sequence
  Description of Artificial Sequence: Synthetic oligonucleotide
  Antisense strand to SEQ ID NO: 1530272
agugacccgauuauguggg

SEQ ID NO: 1530274 - RNA, 19 nt, Artificial Sequence
  Description of Artificial Sequence: Synthetic oligonucleotide
  Sense strand starting at position 3357 of SEQ ID NO: 1245023
auggauggauuccugucua

SEQ ID NO: 1530275 - RNA, 19 nt, Artificial Sequence
  Description of Artificial Sequence: Synthetic oligonucleotide
  Antisense strand to SEQ ID NO: 1530274
uagacaggaauccauccau

SEQ ID NO: 1530276 - RNA, 19 nt, Artificial Sequence
  Description of Artificial Sequence: Synthetic oligonucleotide
  Sense strand starting at position 3556 of SEQ ID NO: 1245023
caccuugaucuuggacuga

SEQ ID NO: 1530277 - RNA, 19 nt, Artificial Sequence
  Description of Artificial Sequence: Synthetic oligonucleotide
  Antisense strand to SEQ ID NO: 1530276
ucaguccaagaucaaggug

SEQ ID NO: 1530278 - RNA, 19 nt, Artificial Sequence
  Description of Artificial Sequence: Synthetic oligonucleotide
  Sense strand starting at position 3600 of SEQ ID NO: 1245023
acaguaacauucuguuguu

SEQ ID NO: 1530279 - RNA, 19 nt, Artificial Sequence
  Description of Artificial Sequence: Synthetic oligonucleotide
  Antisense strand to SEQ ID NO: 1530278
aacaacagaauguuacugu

SEQ ID NO: 1530280 - RNA, 19 nt, Artificial Sequence
  Description of Artificial Sequence: Synthetic oligonucleotide
  Sense strand starting at position 3603 of SEQ ID NO: 1245023
guaacauucuguuguugaa

SEQ ID NO: 1530281 - RNA, 19 nt, Artificial Sequence
  Description of Artificial Sequence: Synthetic oligonucleotide
  Antisense strand to SEQ ID NO: 1530280
uucaacaacagaauguuac

SEQ ID NO: 1530282 - RNA, 19 nt, Artificial Sequence
  Description of Artificial Sequence: Synthetic oligonucleotide
  Sense strand starting at position 3713 of SEQ ID NO: 1245023
gcuccaggcuuacuaucua

SEQ ID NO: 1530283 - RNA, 19 nt, Artificial Sequence
  Description of Artificial Sequence: Synthetic oligonucleotide
  Antisense strand to SEQ ID NO: 1530282
uagauaguaagccuggagc

SEQ ID NO: 1530284 - RNA, 19 nt, Artificial Sequence
  Description of Artificial Sequence: Synthetic oligonucleotide
  Sense strand starting at position 3792 of SEQ ID NO: 1245023
gugguucaaggugaauaau

SEQ ID NO: 1530285 - RNA, 19 nt, Artificial Sequence
  Description of Artificial Sequence: Synthetic oligonucleotide
  Antisense strand to SEQ ID NO: 1530284
auuauucaccuugaaccac

SEQ ID NO: 1530286 - RNA, 19 nt, Artificial Sequence
  Description of Artificial Sequence: Synthetic oligonucleotide
  Sense strand starting at position 20 of SEQ ID NO: 1245024
agguauguaccacauuaua

SEQ ID NO: 1530287 - RNA, 19 nt, Artificial Sequence
  Description of Artificial Sequence: Synthetic oligonucleotide
  Antisense strand to SEQ ID NO: 1530286
uauaaugugguacauaccu

SEQ ID NO: 1530288 - RNA, 19 nt, Artificial Sequence
  Description of Artificial Sequence: Synthetic oligonucleotide
  Sense strand starting at position 96 of SEQ ID NO: 1245024
ggaaaugcugcuuaccuau

SEQ ID NO: 1530289 - RNA, 19 nt, Artificial Sequence
  Description of Artificial Sequence: Synthetic oligonucleotide
  Antisense strand to SEQ ID NO: 1530288
auagguaagcagcauuucc

SEQ ID NO: 1530290 - RNA, 19 nt, Artificial Sequence
  Description of Artificial Sequence: Synthetic oligonucleotide
  Sense strand starting at position 111 of SEQ ID NO: 1245024
cuaucuguugagggacaau

SEQ ID NO: 1530291 - RNA, 19 nt, Artificial Sequence
  Description of Artificial Sequence: Synthetic oligonucleotide
  Antisense strand to SEQ ID NO: 1530290
auugucccucaacagauag

SEQ ID NO: 1530292 - RNA, 19 nt, Artificial Sequence
  Description of Artificial Sequence: Synthetic oligonucleotide
  Sense strand starting at position 180 of SEQ ID NO: 1245024
uucuucugaguccauuagu

SEQ ID NO: 1530293 - RNA, 19 nt, Artificial Sequence
  Description of Artificial Sequence: Synthetic oligonucleotide
  Antisense strand to SEQ ID NO: 1530292
acuaauggacucagaagaa

SEQ ID NO: 1530294 - RNA, 19 nt, Artificial Sequence
  Description of Artificial Sequence: Synthetic oligonucleotide
  Sense strand starting at position 201 of SEQ ID NO: 1245024
ccugacuagucucuuagau

SEQ ID NO: 1530295 - RNA, 19 nt, Artificial Sequence
  Description of Artificial Sequence: Synthetic oligonucleotide
  Antisense strand to SEQ ID NO: 1530294
aucuaagagacuagucagg

SEQ ID NO: 1530296 - RNA, 19 nt, Artificial Sequence
  Description of Artificial Sequence: Synthetic oligonucleotide
  Sense strand starting at position 239 of SEQ ID NO: 1245024
augggcuuuaguggauaaa

SEQ ID NO: 1530297 - RNA, 19 nt, Artificial Sequence
  Description of Artificial Sequence: Synthetic oligonucleotide
  Antisense strand to SEQ ID NO: 1530296
uuuauccacuaaagcccau

SEQ ID NO: 1530298 - RNA, 19 nt, Artificial Sequence
  Description of Artificial Sequence: Synthetic oligonucleotide
  Sense strand starting at position 240 of SEQ ID NO: 1245024
ugggcuuuaguggauaaag

SEQ ID NO: 1530299 - RNA, 19 nt, Artificial Sequence
  Description of Artificial Sequence: Synthetic oligonucleotide
  Antisense strand to SEQ ID NO: 1530298
cuuuauccacuaaagccca

SEQ ID NO: 1530300 - RNA, 19 nt, Artificial Sequence
  Description of Artificial Sequence: Synthetic oligonucleotide
  Sense strand starting at position 285 of SEQ ID NO: 1245024
gcaucuguacucuaagaaa

SEQ ID NO: 1530301 - RNA, 19 nt, Artificial Sequence
  Description of Artificial Sequence: Synthetic oligonucleotide
  Antisense strand to SEQ ID NO: 1530300
uuucuuagaguacagaugc

SEQ ID NO: 1530302 - RNA, 19 nt, Artificial Sequence
  Description of Artificial Sequence: Synthetic oligonucleotide
  Sense strand starting at position 308 of SEQ ID NO: 1245024
guguaauuccaauaaucag

SEQ ID NO: 1530303 - RNA, 19 nt, Artificial Sequence
  Description of Artificial Sequence: Synthetic oligonucleotide
  Antisense strand to SEQ ID NO: 1530302
cugauuauuggaauuacac

SEQ ID NO: 1530304 - RNA, 19 nt, Artificial Sequence
  Description of Artificial Sequence: Synthetic oligonucleotide
  Sense strand starting at position 448 of SEQ ID NO: 1245024
ugaugagaccuaggcuuaa

SEQ ID NO: 1530305 - RNA, 19 nt, Artificial Sequence
  Description of Artificial Sequence: Synthetic oligonucleotide
  Antisense strand to SEQ ID NO: 1530304
uuaagccuaggucucauca

SEQ ID NO: 1530306 - RNA, 19 nt, Artificial Sequence
  Description of Artificial Sequence: Synthetic oligonucleotide
  Sense strand starting at position 583 of SEQ ID NO: 1245024
cgggauaugcgggaauauu

SEQ ID NO: 1530307 - RNA, 19 nt, Artificial Sequence
  Description of Artificial Sequence: Synthetic oligonucleotide
  Antisense strand to SEQ ID NO: 1530306
aauauucccgcauaucccg

SEQ ID NO: 1530308 - RNA, 19 nt, Artificial Sequence
  Description of Artificial Sequence: Synthetic oligonucleotide
  Sense strand starting at position 651 of SEQ ID NO: 1245024
gauggcauccucugaucua

SEQ ID NO: 1530309 - RNA, 19 nt, Artificial Sequence
  Description of Artificial Sequence: Synthetic oligonucleotide
  Antisense strand to SEQ ID NO: 1530308
uagaucagaggaugccauc

SEQ ID NO: 1530310 - RNA, 19 nt, Artificial Sequence
  Description of Artificial Sequence: Synthetic oligonucleotide
  Sense strand starting at position 654 of SEQ ID NO: 1245024
ggcauccucugaucuagaa

SEQ ID NO: 1530311 - RNA, 19 nt, Artificial Sequence
  Description of Artificial Sequence: Synthetic oligonucleotide
  Antisense strand to SEQ ID NO: 1530310
uucuagaucagaggaugcc

SEQ ID NO: 1530312 - RNA, 19 nt, Artificial Sequence
  Description of Artificial Sequence: Synthetic oligonucleotide
  Sense strand starting at position 683 of SEQ ID NO: 1245024
gucaguaaauuucccaguu

SEQ ID NO: 1530313 - RNA, 19 nt, Artificial Sequence
  Description of Artificial Sequence: Synthetic oligonucleotide
  Antisense strand to SEQ ID NO: 1530312
aacugggaaauuuacugac

SEQ ID NO: 1530314 - RNA, 19 nt, Artificial Sequence
  Description of Artificial Sequence: Synthetic oligonucleotide
  Sense strand starting at position 770 of SEQ ID NO: 1245024
aguaauaagcauuaguuga

SEQ ID NO: 1530315 - RNA, 19 nt, Artificial Sequence
  Description of Artificial Sequence: Synthetic oligonucleotide
  Antisense strand to SEQ ID NO: 1530314
ucaacuaaugcuuauuacu

SEQ ID NO: 1530316 - RNA, 19 nt, Artificial Sequence
  Description of Artificial Sequence: Synthetic oligonucleotide
  Sense strand starting at position 862 of SEQ ID NO: 1245024
ucaugaaacuggucaggua

SEQ ID NO: 1530317 - RNA, 19 nt, Artificial Sequence
  Description of Artificial Sequence: Synthetic oligonucleotide
  Antisense strand to SEQ ID NO: 1530316
uaccugaccaguuucauga

SEQ ID NO: 1530318 - RNA, 19 nt, Artificial Sequence
  Description of Artificial Sequence: Synthetic oligonucleotide
  Sense strand starting at position 885 of SEQ ID NO: 1245024
ggaagucagucauuaacua

SEQ ID NO: 1530319 - RNA, 19 nt, Artificial Sequence
  Description of Artificial Sequence: Synthetic oligonucleotide
  Antisense strand to SEQ ID NO: 1530318
uaguuaaugacugacuucc

SEQ ID NO: 1530320 - RNA, 19 nt, Artificial Sequence
  Description of Artificial Sequence: Synthetic oligonucleotide
  Sense strand starting at position 951 of SEQ ID NO: 1245024
agaggugaauucuugccau

SEQ ID NO: 1530321 - RNA, 19 nt, Artificial Sequence
  Description of Artificial Sequence: Synthetic oligonucleotide
  Antisense strand to SEQ ID NO: 1530320
auggcaagaauucaccucu

SEQ ID NO: 1530322 - RNA, 19 nt, Artificial Sequence
  Description of Artificial Sequence: Synthetic oligonucleotide
  Sense strand starting at position 954 of SEQ ID NO: 1245024
ggugaauucuugccauaga

SEQ ID NO: 1530323 - RNA, 19 nt, Artificial Sequence
  Description of Artificial Sequence: Synthetic oligonucleotide
  Antisense strand to SEQ ID NO: 1530322
ucuauggcaagaauucacc

SEQ ID NO: 1530324 - RNA, 19 nt, Artificial Sequence
  Description of Artificial Sequence: Synthetic oligonucleotide
  Sense strand starting at position 957 of SEQ ID NO: 1245024
gaauucuugccauagaagu

SEQ ID NO: 1530325 - RNA, 19 nt, Artificial Sequence
  Description of Artificial Sequence: Synthetic oligonucleotide
  Antisense strand to SEQ ID NO: 1530324
acuucuauggcaagaauuc

SEQ ID NO: 1530326 - RNA, 19 nt, Artificial Sequence
  Description of Artificial Sequence: Synthetic oligonucleotide
  Sense strand starting at position 1551 of SEQ ID NO: 1245024
gcaucaggaguuuggacaa

SEQ ID NO: 1530327 - RNA, 19 nt, Artificial Sequence
  Description of Artificial Sequence: Synthetic oligonucleotide
  Antisense strand to SEQ ID NO: 1530326
uuguccaaacuccugaugc

SEQ ID NO: 1530328 - RNA, 19 nt, Artificial Sequence
  Description of Artificial Sequence: Synthetic oligonucleotide
  Sense strand starting at position 1777 of SEQ ID NO: 1245024
gcgacaucaccacaagcaa

SEQ ID NO: 1530329 - RNA, 19 nt, Artificial Sequence
  Description of Artificial Sequence: Synthetic oligonucleotide
  Antisense strand to SEQ ID NO: 1530328
uugcuuguggugaugucgc

SEQ ID NO: 1530330 - RNA, 19 nt, Artificial Sequence
  Description of Artificial Sequence: Synthetic oligonucleotide
  Sense strand starting at position 2030 of SEQ ID NO: 1245024
gcagcaucuccugugucua

SEQ ID NO: 1530331 - RNA, 19 nt, Artificial Sequence
  Description of Artificial Sequence: Synthetic oligonucleotide
  Antisense strand to SEQ ID NO: 1530330
uagacacaggagaugcugc

SEQ ID NO: 1530332 - RNA, 19 nt, Artificial Sequence
  Description of Artificial Sequence: Synthetic oligonucleotide
  Sense strand starting at position 2042 of SEQ ID NO: 1245024
gugucuaauccucagagca

SEQ ID NO: 1530333 - RNA, 19 nt, Artificial Sequence
  Description of Artificial Sequence: Synthetic oligonucleotide
  Antisense strand to SEQ ID NO: 1530332
ugcucugaggauuagacac

SEQ ID NO: 1530334 - RNA, 19 nt, Artificial Sequence
  Description of Artificial Sequence: Synthetic oligonucleotide
  Sense strand starting at position 2168 of SEQ ID NO: 1245024
aaauuacuccgguguaaga

SEQ ID NO: 1530335 - RNA, 19 nt, Artificial Sequence
  Description of Artificial Sequence: Synthetic oligonucleotide
  Antisense strand to SEQ ID NO: 1530334
ucuuacaccggaguaauuu

SEQ ID NO: 1530336 - RNA, 19 nt, Artificial Sequence
  Description of Artificial Sequence: Synthetic oligonucleotide
  Sense strand starting at position 2170 of SEQ ID NO: 1245024
auuacuccgguguaagaua

SEQ ID NO: 1530337 - RNA, 19 nt, Artificial Sequence
  Description of Artificial Sequence: Synthetic oligonucleotide
  Antisense strand to SEQ ID NO: 1530336
uaucuuacaccggaguaau

SEQ ID NO: 1530338 - RNA, 19 nt, Artificial Sequence
  Description of Artificial Sequence: Synthetic oligonucleotide
  Sense strand starting at position 2400 of SEQ ID NO: 1245024
agguucuuugcagacauaa

SEQ ID NO: 1530339 - RNA, 19 nt, Artificial Sequence
  Description of Artificial Sequence: Synthetic oligonucleotide
  Antisense strand to SEQ ID NO: 1530338
uuaugucugcaaagaaccu

SEQ ID NO: 1530340 - RNA, 19 nt, Artificial Sequence
  Description of Artificial Sequence: Synthetic oligonucleotide
  Sense strand starting at position 2411 of SEQ ID NO: 1245024
agacauaagcauuaguuua

SEQ ID NO: 1530341 - RNA, 19 nt, Artificial Sequence
  Description of Artificial Sequence: Synthetic oligonucleotide
  Antisense strand to SEQ ID NO: 1530340
uaaacuaaugcuuaugucu

SEQ ID NO: 1530342 - RNA, 19 nt, Artificial Sequence
  Description of Artificial Sequence: Synthetic oligonucleotide
  Sense strand starting at position 3004 of SEQ ID NO: 1245024
gugcaauaaaggugacaua

SEQ ID NO: 1530343 - RNA, 19 nt, Artificial Sequence
  Description of Artificial Sequence: Synthetic oligonucleotide
  Antisense strand to SEQ ID NO: 1530342
uaugucaccuuuauugcac

SEQ ID NO: 1530344 - RNA, 19 nt, Artificial Sequence
  Description of Artificial Sequence: Synthetic oligonucleotide
  Sense strand starting at position 3203 of SEQ ID NO: 1245024
gugcuuggaagugaaucau

SEQ ID NO: 1530345 - RNA, 19 nt, Artificial Sequence
  Description of Artificial Sequence: Synthetic oligonucleotide
  Antisense strand to SEQ ID NO: 1530344
augauucacuuccaagcac

SEQ ID NO: 1530346 - RNA, 19 nt, Artificial Sequence
  Description of Artificial Sequence: Synthetic oligonucleotide
  Sense strand starting at position 3207 of SEQ ID NO: 1245024
uuggaagugaaucauuguu

SEQ ID NO: 1530347 - RNA, 19 nt, Artificial Sequence
  Description of Artificial Sequence: Synthetic oligonucleotide
  Antisense strand to SEQ ID NO: 1530346
aacaaugauucacuuccaa

SEQ ID NO: 1530348 - RNA, 19 nt, Artificial Sequence
  Description of Artificial Sequence: Synthetic oligonucleotide
  Sense strand starting at position 3209 of SEQ ID NO: 1245024
ggaagugaaucauuguuug

SEQ ID NO: 1530349 - RNA, 19 nt, Artificial Sequence
  Description of Artificial Sequence: Synthetic oligonucleotide
  Antisense strand to SEQ ID NO: 1530348
caaacaaugauucacuucc

SEQ ID NO: 1530350 - RNA, 19 nt, Artificial Sequence
  Description of Artificial Sequence: Synthetic oligonucleotide
  Sense strand starting at position 3214 of SEQ ID NO: 1245024
ugaaucauuguuuguagag

SEQ ID NO: 1530351 - RNA, 19 nt, Artificial Sequence
  Description of Artificial Sequence: Synthetic oligonucleotide
  Antisense strand to SEQ ID NO: 1530350
cucuacaaacaaugauuca

SEQ ID NO: 1530352 - RNA, 19 nt, Artificial Sequence
  Description of Artificial Sequence: Synthetic oligonucleotide
  Sense strand starting at position 3229 of SEQ ID NO: 1245024
agagucuucccaugagaac

SEQ ID NO: 1530353 - RNA, 19 nt, Artificial Sequence
  Description of Artificial Sequence: Synthetic oligonucleotide
  Antisense strand to SEQ ID NO: 1530352
guucucaugggaagacucu

SEQ ID NO: 1530354 - RNA, 19 nt, Artificial Sequence
  Description of Artificial Sequence: Synthetic oligonucleotide
  Sense strand starting at position 3256 of SEQ ID NO: 1245024
gccugacaucuugauagcu

SEQ ID NO: 1530355 - RNA, 19 nt, Artificial Sequence
  Description of Artificial Sequence: Synthetic oligonucleotide
  Antisense strand to SEQ ID NO: 1530354
agcuaucaagaugucaggc

SEQ ID NO: 1530356 - RNA, 19 nt, Artificial Sequence
  Description of Artificial Sequence: Synthetic oligonucleotide
  Sense strand starting at position 3359 of SEQ ID NO: 1245024
ugaguauguggucauauug

SEQ ID NO: 1530357 - RNA, 19 nt, Artificial Sequence
  Description of Artificial Sequence: Synthetic oligonucleotide
  Antisense strand to SEQ ID NO: 1530356
caauaugaccacauacuca

SEQ ID NO: 1530358 - RNA, 19 nt, Artificial Sequence
  Description of Artificial Sequence: Synthetic oligonucleotide
  Sense strand starting at position 3370 of SEQ ID NO: 1245024
ucauauuguuaugcaggaa

SEQ ID NO: 1530359 - RNA, 19 nt, Artificial Sequence
  Description of Artificial Sequence: Synthetic oligonucleotide
  Antisense strand to SEQ ID NO: 1530358
uuccugcauaacaauauga

SEQ ID NO: 1530360 - RNA, 19 nt, Artificial Sequence
  Description of Artificial Sequence: Synthetic oligonucleotide
  Sense strand starting at position 3419 of SEQ ID NO: 1245024
acaggaucuucuuugucaa

SEQ ID NO: 1530361 - RNA, 19 nt, Artificial Sequence
  Description of Artificial Sequence: Synthetic oligonucleotide
  Antisense strand to SEQ ID NO: 1530360
uugacaaagaagauccugu

SEQ ID NO: 1530362 - RNA, 19 nt, Artificial Sequence
  Description of Artificial Sequence: Synthetic oligonucleotide
  Sense strand starting at position 3446 of SEQ ID NO: 1245024
cugggaauugucuggaaga

SEQ ID NO: 1530363 - RNA, 19 nt, Artificial Sequence
  Description of Artificial Sequence: Synthetic oligonucleotide
  Antisense strand to SEQ ID NO: 1530362
ucuuccagacaauucccag

SEQ ID NO: 1530364 - RNA, 19 nt, Artificial Sequence
  Description of Artificial Sequence: Synthetic oligonucleotide
  Sense strand starting at position 3685 of SEQ ID NO: 1245024
uggauagcagaauguguaa

SEQ ID NO: 1530365 - RNA, 19 nt, Artificial Sequence
  Description of Artificial Sequence: Synthetic oligonucleotide
  Antisense strand to SEQ ID NO: 1530364
uuacacauucugcuaucca

SEQ ID NO: 1530366 - RNA, 19 nt, Artificial Sequence
  Description of Artificial Sequence: Synthetic oligonucleotide
  Sense strand starting at position 88 of SEQ ID NO: 1245025
gcauuuaagugcuuucuua

SEQ ID NO: 1530367 - RNA, 19 nt, Artificial Sequence
  Description of Artificial Sequence: Synthetic oligonucleotide
  Antisense strand to SEQ ID NO: 1530366
uaagaaagcacuuaaaugc

SEQ ID NO: 1530368 - RNA, 19 nt, Artificial Sequence
  Description of Artificial Sequence: Synthetic oligonucleotide
  Sense strand starting at position 133 of SEQ ID NO: 1245025
cuguuuccucuagagaaac

SEQ ID NO: 1530369 - RNA, 19 nt, Artificial Sequence
  Description of Artificial Sequence: Synthetic oligonucleotide
  Antisense strand to SEQ ID NO: 1530368
guuucucuagaggaaacag

SEQ ID NO: 1530370 - RNA, 19 nt, Artificial Sequence
  Description of Artificial Sequence: Synthetic oligonucleotide
  Sense strand starting at position 162 of SEQ ID NO: 1245025
agguaugugccacauuaua

SEQ ID NO: 1530371 - RNA, 19 nt, Artificial Sequence
  Description of Artificial Sequence: Synthetic oligonucleotide
  Antisense strand to SEQ ID NO: 1530370
uauaauguggcacauaccu

SEQ ID NO: 1530372 - RNA, 19 nt, Artificial Sequence
  Description of Artificial Sequence: Synthetic oligonucleotide
  Sense strand starting at position 238 of SEQ ID NO: 1245025
ggaaaugcugcuuaccuau

SEQ ID NO: 1530373 - RNA, 19 nt, Artificial Sequence
  Description of Artificial Sequence: Synthetic oligonucleotide
  Antisense strand to SEQ ID NO: 1530372
auagguaagcagcauuucc

SEQ ID NO: 1530374 - RNA, 19 nt, Artificial Sequence
  Description of Artificial Sequence: Synthetic oligonucleotide
  Sense strand starting at position 253 of SEQ ID NO: 1245025
cuaucuguugagggacaau

SEQ ID NO: 1530375 - RNA, 19 nt, Artificial Sequence
  Description of Artificial Sequence: Synthetic oligonucleotide
  Antisense strand to SEQ ID NO: 1530374
auugucccucaacagauag

SEQ ID NO: 1530376 - RNA, 19 nt, Artificial Sequence
  Description of Artificial Sequence: Synthetic oligonucleotide
  Sense strand starting at position 343 of SEQ ID NO: 1245025
ccugacuagucucuuagau

SEQ ID NO: 1530377 - RNA, 19 nt, Artificial Sequence
  Description of Artificial Sequence: Synthetic oligonucleotide
  Antisense strand to SEQ ID NO: 1530376
aucuaagagacuagucagg

SEQ ID NO: 1530378 - RNA, 19 nt, Artificial Sequence
  Description of Artificial Sequence: Synthetic oligonucleotide
  Sense strand starting at position 381 of SEQ ID NO: 1245025
augggcuuuaguggauaaa

SEQ ID NO: 1530379 - RNA, 19 nt, Artificial Sequence
  Description of Artificial Sequence: Synthetic oligonucleotide
  Antisense strand to SEQ ID NO: 1530378
uuuauccacuaaagcccau

SEQ ID NO: 1530380 - RNA, 19 nt, Artificial Sequence
  Description of Artificial Sequence: Synthetic oligonucleotide
  Sense strand starting at position 382 of SEQ ID NO: 1245025
ugggcuuuaguggauaaag

SEQ ID NO: 1530381 - RNA, 19 nt, Artificial Sequence
  Description of Artificial Sequence: Synthetic oligonucleotide
  Antisense strand to SEQ ID NO: 1530380
cuuuauccacuaaagccca

SEQ ID NO: 1530382 - RNA, 19 nt, Artificial Sequence
  Description of Artificial Sequence: Synthetic oligonucleotide
  Sense strand starting at position 427 of SEQ ID NO: 1245025
gcaucuguacucuaagaaa

SEQ ID NO: 1530383 - RNA, 19 nt, Artificial Sequence
  Description of Artificial Sequence: Synthetic oligonucleotide
  Antisense strand to SEQ ID NO: 1530382
uuucuuagaguacagaugc

SEQ ID NO: 1530384 - RNA, 19 nt, Artificial Sequence
  Description of Artificial Sequence: Synthetic oligonucleotide
  Sense strand starting at position 450 of SEQ ID NO: 1245025
guguaauuccaauaaucag

SEQ ID NO: 1530385 - RNA, 19 nt, Artificial Sequence
  Description of Artificial Sequence: Synthetic oligonucleotide
  Antisense strand to SEQ ID NO: 1530384
cugauuauuggaauuacac

SEQ ID NO: 1530386 - RNA, 19 nt, Artificial Sequence
  Description of Artificial Sequence: Synthetic oligonucleotide
  Sense strand starting at position 592 of SEQ ID NO: 1245025
ugaugagaccuaggcuuaa

SEQ ID NO: 1530387 - RNA, 19 nt, Artificial Sequence
  Description of Artificial Sequence: Synthetic oligonucleotide
  Antisense strand to SEQ ID NO: 1530386
uuaagccuaggucucauca

SEQ ID NO: 1530388 - RNA, 19 nt, Artificial Sequence
  Description of Artificial Sequence: Synthetic oligonucleotide
  Sense strand starting at position 727 of SEQ ID NO: 1245025
cgggauaugcgggaauauu

SEQ ID NO: 1530389 - RNA, 19 nt, Artificial Sequence
  Description of Artificial Sequence: Synthetic oligonucleotide
  Antisense strand to SEQ ID NO: 1530388
aauauucccgcauaucccg

SEQ ID NO: 1530390 - RNA, 19 nt, Artificial Sequence
  Description of Artificial Sequence: Synthetic oligonucleotide
  Sense strand starting at position 798 of SEQ ID NO: 1245025
ggcauccucugaucuagaa

SEQ ID NO: 1530391 - RNA, 19 nt, Artificial Sequence
  Description of Artificial Sequence: Synthetic oligonucleotide
  Antisense strand to SEQ ID NO: 1530390
uucuagaucagaggaugcc

SEQ ID NO: 1530392 - RNA, 19 nt, Artificial Sequence
  Description of Artificial Sequence: Synthetic oligonucleotide
  Sense strand starting at position 914 of SEQ ID NO: 1245025
aguaauaagcauuaguuga

SEQ ID NO: 1530393 - RNA, 19 nt, Artificial Sequence
  Description of Artificial Sequence: Synthetic oligonucleotide
  Antisense strand to SEQ ID NO: 1530392
ucaacuaaugcuuauuacu

SEQ ID NO: 1530394 - RNA, 19 nt, Artificial Sequence
  Description of Artificial Sequence: Synthetic oligonucleotide
  Sense strand starting at position 1029 of SEQ ID NO: 1245025
ggaagucagucauuaacua

SEQ ID NO: 1530395 - RNA, 19 nt, Artificial Sequence
  Description of Artificial Sequence: Synthetic oligonucleotide
  Antisense strand to SEQ ID NO: 1530394
uaguuaaugacugacuucc

SEQ ID NO: 1530396 - RNA, 19 nt, Artificial Sequence
  Description of Artificial Sequence: Synthetic oligonucleotide
  Sense strand starting at position 1101 of SEQ ID NO: 1245025
gaauucuugccauagaagu

SEQ ID NO: 1530397 - RNA, 19 nt, Artificial Sequence
  Description of Artificial Sequence: Synthetic oligonucleotide
  Antisense strand to SEQ ID NO: 1530396
acuucuauggcaagaauuc

SEQ ID NO: 1530398 - RNA, 19 nt, Artificial Sequence
  Description of Artificial Sequence: Synthetic oligonucleotide
  Sense strand starting at position 1516 of SEQ ID NO: 1245025
ugaugaaaggccuggguua

SEQ ID NO: 1530399 - RNA, 19 nt, Artificial Sequence
  Description of Artificial Sequence: Synthetic oligonucleotide
  Antisense strand to SEQ ID NO: 1530398
uaacccaggccuuucauca

SEQ ID NO: 1530400 - RNA, 19 nt, Artificial Sequence
  Description of Artificial Sequence: Synthetic oligonucleotide
  Sense strand starting at position 1518 of SEQ ID NO: 1245025
augaaaggccuggguuaga

SEQ ID NO: 1530401 - RNA, 19 nt, Artificial Sequence
  Description of Artificial Sequence: Synthetic oligonucleotide
  Antisense strand to SEQ ID NO: 1530400
ucuaacccaggccuuucau

SEQ ID NO: 1530402 - RNA, 19 nt, Artificial Sequence
  Description of Artificial Sequence: Synthetic oligonucleotide
  Sense strand starting at position 1695 of SEQ ID NO: 1245025
gcaucaggaguuuggacaa

SEQ ID NO: 1530403 - RNA, 19 nt, Artificial Sequence
  Description of Artificial Sequence: Synthetic oligonucleotide
  Antisense strand to SEQ ID NO: 1530402
uuguccaaacuccugaugc

SEQ ID NO: 1530404 - RNA, 19 nt, Artificial Sequence
  Description of Artificial Sequence: Synthetic oligonucleotide
  Sense strand starting at position 2126 of SEQ ID NO: 1245025
ggagaaucggccgaucgaa

SEQ ID NO: 1530405 - RNA, 19 nt, Artificial Sequence
  Description of Artificial Sequence: Synthetic oligonucleotide
  Antisense strand to SEQ ID NO: 1530404
uucgaucggccgauucucc

SEQ ID NO: 1530406 - RNA, 19 nt, Artificial Sequence
  Description of Artificial Sequence: Synthetic oligonucleotide
  Sense strand starting at position 2174 of SEQ ID NO: 1245025
gcagcaucuccugugucua

SEQ ID NO: 1530407 - RNA, 19 nt, Artificial Sequence
  Description of Artificial Sequence: Synthetic oligonucleotide
  Antisense strand to SEQ ID NO: 1530406
uagacacaggagaugcugc

SEQ ID NO: 1530408 - RNA, 19 nt, Artificial Sequence
  Description of Artificial Sequence: Synthetic oligonucleotide
  Sense strand starting at position 2314 of SEQ ID NO: 1245025
auuacuccgguguaagaua

SEQ ID NO: 1530409 - RNA, 19 nt, Artificial Sequence
  Description of Artificial Sequence: Synthetic oligonucleotide
  Antisense strand to SEQ ID NO: 1530408
uaucuuacaccggaguaau

SEQ ID NO: 1530410 - RNA, 19 nt, Artificial Sequence
  Description of Artificial Sequence: Synthetic oligonucleotide
  Sense strand starting at position 2544 of SEQ ID NO: 1245025
agguucuuugcagacauaa

SEQ ID NO: 1530411 - RNA, 19 nt, Artificial Sequence
  Description of Artificial Sequence: Synthetic oligonucleotide
  Antisense strand to SEQ ID NO: 1530410
uuaugucugcaaagaaccu

SEQ ID NO: 1530412 - RNA, 19 nt, Artificial Sequence
  Description of Artificial Sequence: Synthetic oligonucleotide
  Sense strand starting at position 2555 of SEQ ID NO: 1245025
agacauaagcauuaguuua

SEQ ID NO: 1530413 - RNA, 19 nt, Artificial Sequence
  Description of Artificial Sequence: Synthetic oligonucleotide
  Antisense strand to SEQ ID NO: 1530412
uaaacuaaugcuuaugucu

SEQ ID NO: 1530414 - RNA, 19 nt, Artificial Sequence
  Description of Artificial Sequence: Synthetic oligonucleotide
  Sense strand starting at position 2595 of SEQ ID NO: 1245025
cuuucaagggaggguuauu

SEQ ID NO: 1530415 - RNA, 19 nt, Artificial Sequence
  Description of Artificial Sequence: Synthetic oligonucleotide
  Antisense strand to SEQ ID NO: 1530414
aauaacccucccuugaaag

SEQ ID NO: 1530416 - RNA, 19 nt, Artificial Sequence
  Description of Artificial Sequence: Synthetic oligonucleotide
  Sense strand starting at position 2681 of SEQ ID NO: 1245025
uuucucagugaaugacauu

SEQ ID NO: 1530417 - RNA, 19 nt, Artificial Sequence
  Description of Artificial Sequence: Synthetic oligonucleotide
  Antisense strand to SEQ ID NO: 1530416
aaugucauucacugagaaa

SEQ ID NO: 1530418 - RNA, 19 nt, Artificial Sequence
  Description of Artificial Sequence: Synthetic oligonucleotide
  Sense strand starting at position 3148 of SEQ ID NO: 1245025
gugcaauaaaggugacaua

SEQ ID NO: 1530419 - RNA, 19 nt, Artificial Sequence
  Description of Artificial Sequence: Synthetic oligonucleotide
  Antisense strand to SEQ ID NO: 1530418
uaugucaccuuuauugcac

SEQ ID NO: 1530420 - RNA, 19 nt, Artificial Sequence
  Description of Artificial Sequence: Synthetic oligonucleotide
  Sense strand starting at position 3347 of SEQ ID NO: 1245025
gugcuuggaagugaaucau

SEQ ID NO: 1530421 - RNA, 19 nt, Artificial Sequence
  Description of Artificial Sequence: Synthetic oligonucleotide
  Antisense strand to SEQ ID NO: 1530420
augauucacuuccaagcac

SEQ ID NO: 1530422 - RNA, 19 nt, Artificial Sequence
  Description of Artificial Sequence: Synthetic oligonucleotide
  Sense strand starting at position 3353 of SEQ ID NO: 1245025
ggaagugaaucauucuuug

SEQ ID NO: 1530423 - RNA, 19 nt, Artificial Sequence
  Description of Artificial Sequence: Synthetic oligonucleotide
  Antisense strand to SEQ ID NO: 1530422
caaagaaugauucacuucc

SEQ ID NO: 1530424 - RNA, 19 nt, Artificial Sequence
  Description of Artificial Sequence: Synthetic oligonucleotide
  Sense strand starting at position 3357 of SEQ ID NO: 1245025
gugaaucauucuuuguaga

SEQ ID NO: 1530425 - RNA, 19 nt, Artificial Sequence
  Description of Artificial Sequence: Synthetic oligonucleotide
  Antisense strand to SEQ ID NO: 1530424
ucuacaaagaaugauucac

SEQ ID NO: 1530426 - RNA, 19 nt, Artificial Sequence
  Description of Artificial Sequence: Synthetic oligonucleotide
  Sense strand starting at position 3358 of SEQ ID NO: 1245025
ugaaucauucuuuguagag

SEQ ID NO: 1530427 - RNA, 19 nt, Artificial Sequence
  Description of Artificial Sequence: Synthetic oligonucleotide
  Antisense strand to SEQ ID NO: 1530426
cucuacaaagaaugauuca

SEQ ID NO: 1530428 - RNA, 19 nt, Artificial Sequence
  Description of Artificial Sequence: Synthetic oligonucleotide
  Sense strand starting at position 3373 of SEQ ID NO: 1245025
agagccuucccaugagaac

SEQ ID NO: 1530429 - RNA, 19 nt, Artificial Sequence
  Description of Artificial Sequence: Synthetic oligonucleotide
  Antisense strand to SEQ ID NO: 1530428
guucucaugggaaggcucu

SEQ ID NO: 1530430 - RNA, 19 nt, Artificial Sequence
  Description of Artificial Sequence: Synthetic oligonucleotide
  Sense strand starting at position 3382 of SEQ ID NO: 1245025
ccaugagaacccugucuug

SEQ ID NO: 1530431 - RNA, 19 nt, Artificial Sequence
  Description of Artificial Sequence: Synthetic oligonucleotide
  Antisense strand to SEQ ID NO: 1530430
caagacaggguucucaugg

SEQ ID NO: 1530432 - RNA, 19 nt, Artificial Sequence
  Description of Artificial Sequence: Synthetic oligonucleotide
  Sense strand starting at position 3476 of SEQ ID NO: 1245025
uaauaaacgugugcuauuu

SEQ ID NO: 1530433 - RNA, 19 nt, Artificial Sequence
  Description of Artificial Sequence: Synthetic oligonucleotide
  Antisense strand to SEQ ID NO: 1530432
aaauagcacacguuuauua

SEQ ID NO: 1530434 - RNA, 19 nt, Artificial Sequence
  Description of Artificial Sequence: Synthetic oligonucleotide
  Sense strand starting at position 3503 of SEQ ID NO: 1245025
ugaguauguggucauauug

SEQ ID NO: 1530435 - RNA, 19 nt, Artificial Sequence
  Description of Artificial Sequence: Synthetic oligonucleotide
  Antisense strand to SEQ ID NO: 1530434
caauaugaccacauacuca

SEQ ID NO: 1530436 - RNA, 19 nt, Artificial Sequence
  Description of Artificial Sequence: Synthetic oligonucleotide
  Sense strand starting at position 3514 of SEQ ID NO: 1245025
ucauauuguuaugcaggaa

SEQ ID NO: 1530437 - RNA, 19 nt, Artificial Sequence
  Description of Artificial Sequence: Synthetic oligonucleotide
  Antisense strand to SEQ ID NO: 1530436
uuccugcauaacaauauga

SEQ ID NO: 1530438 - RNA, 19 nt, Artificial Sequence
  Description of Artificial Sequence: Synthetic oligonucleotide
  Sense strand starting at position 3559 of SEQ ID NO: 1245025
agaggaucuucuuugucaa

SEQ ID NO: 1530439 - RNA, 19 nt, Artificial Sequence
  Description of Artificial Sequence: Synthetic oligonucleotide
  Antisense strand to SEQ ID NO: 1530438
uugacaaagaagauccucu

SEQ ID NO: 1530440 - RNA, 19 nt, Artificial Sequence
  Description of Artificial Sequence: Synthetic oligonucleotide
  Sense strand starting at position 3560 of SEQ ID NO: 1245025
gaggaucuucuuugucaaa

SEQ ID NO: 1530441 - RNA, 19 nt, Artificial Sequence
  Description of Artificial Sequence: Synthetic oligonucleotide
  Antisense strand to SEQ ID NO: 1530440
uuugacaaagaagauccuc

SEQ ID NO: 1530442 - RNA, 19 nt, Artificial Sequence
  Description of Artificial Sequence: Synthetic oligonucleotide
  Sense strand starting at position 3586 of SEQ ID NO: 1245025
cugggaauugucuggaaga

SEQ ID NO: 1530443 - RNA, 19 nt, Artificial Sequence
  Description of Artificial Sequence: Synthetic oligonucleotide
  Antisense strand to SEQ ID NO: 1530442
ucuuccagacaauucccag

SEQ ID NO: 1530444 - RNA, 19 nt, Artificial Sequence
  Description of Artificial Sequence: Synthetic oligonucleotide
  Sense strand starting at position 3826 of SEQ ID NO: 1245025
uggauagcagaauguguaa

SEQ ID NO: 1530445 - RNA, 19 nt, Artificial Sequence
  Description of Artificial Sequence: Synthetic oligonucleotide
  Antisense strand to SEQ ID NO: 1530444
uuacacauucugcuaucca

SEQ ID NO: 1530446 - RNA, 19 nt, Artificial Sequence
  Description of Artificial Sequence: Synthetic oligonucleotide
  Sense strand starting at position 62 of SEQ ID NO: 1245026
gugcuaguugucuucuuua

SEQ ID NO: 1530447 - RNA, 19 nt, Artificial Sequence
  Description of Artificial Sequence: Synthetic oligonucleotide
  Antisense strand to SEQ ID NO: 1530446
uaaagaagacaacuagcac

SEQ ID NO: 1530448 - RNA, 19 nt, Artificial Sequence
  Description of Artificial Sequence: Synthetic oligonucleotide
  Sense strand starting at position 131 of SEQ ID NO: 1245026
ucuagaaucugagucaaau

SEQ ID NO: 1530449 - RNA, 19 nt, Artificial Sequence
  Description of Artificial Sequence: Synthetic oligonucleotide
  Antisense strand to SEQ ID NO: 1530448
auuugacucagauucuaga

SEQ ID NO: 1530450 - RNA, 19 nt, Artificial Sequence
  Description of Artificial Sequence: Synthetic oligonucleotide
  Sense strand starting at position 388 of SEQ ID NO: 1245026
cucagugucacgcaagaau

SEQ ID NO: 1530451 - RNA, 19 nt, Artificial Sequence
  Description of Artificial Sequence: Synthetic oligonucleotide
  Antisense strand to SEQ ID NO: 1530450
auucuugcgugacacugag

SEQ ID NO: 1530452 - RNA, 19 nt, Artificial Sequence
  Description of Artificial Sequence: Synthetic oligonucleotide
  Sense strand starting at position 391 of SEQ ID NO: 1245026
agugucacgcaagaaucuu

SEQ ID NO: 1530453 - RNA, 19 nt, Artificial Sequence
  Description of Artificial Sequence: Synthetic oligonucleotide
  Antisense strand to SEQ ID NO: 1530452
aagauucuugcgugacacu

SEQ ID NO: 1530454 - RNA, 19 nt, Artificial Sequence
  Description of Artificial Sequence: Synthetic oligonucleotide
  Sense strand starting at position 508 of SEQ ID NO: 1245026
cuugcuugaggcuaacauu

SEQ ID NO: 1530455 - RNA, 19 nt, Artificial Sequence
  Description of Artificial Sequence: Synthetic oligonucleotide
  Antisense strand to SEQ ID NO: 1530454
aauguuagccucaagcaag

SEQ ID NO: 1530456 - RNA, 19 nt, Artificial Sequence
  Description of Artificial Sequence: Synthetic oligonucleotide
  Sense strand starting at position 516 of SEQ ID NO: 1245026
aggcuaacauugcuacaga

SEQ ID NO: 1530457 - RNA, 19 nt, Artificial Sequence
  Description of Artificial Sequence: Synthetic oligonucleotide
  Antisense strand to SEQ ID NO: 1530456
ucuguagcaauguuagccu

SEQ ID NO: 1530458 - RNA, 19 nt, Artificial Sequence
  Description of Artificial Sequence: Synthetic oligonucleotide
  Sense strand starting at position 750 of SEQ ID NO: 1245026
ucaagaaucccugguguac

SEQ ID NO: 1530459 - RNA, 19 nt, Artificial Sequence
  Description of Artificial Sequence: Synthetic oligonucleotide
  Antisense strand to SEQ ID NO: 1530458
guacaccagggauucuuga

SEQ ID NO: 1530460 - RNA, 19 nt, Artificial Sequence
  Description of Artificial Sequence: Synthetic oligonucleotide
  Sense strand starting at position 759 of SEQ ID NO: 1245026
ccugguguacucuacuaua

SEQ ID NO: 1530461 - RNA, 19 nt, Artificial Sequence
  Description of Artificial Sequence: Synthetic oligonucleotide
  Antisense strand to SEQ ID NO: 1530460
uauaguagaguacaccagg

SEQ ID NO: 1530462 - RNA, 19 nt, Artificial Sequence
  Description of Artificial Sequence: Synthetic oligonucleotide
  Sense strand starting at position 922 of SEQ ID NO: 1245026
gguagugucagaggcaaug

SEQ ID NO: 1530463 - RNA, 19 nt, Artificial Sequence
  Description of Artificial Sequence: Synthetic oligonucleotide
  Antisense strand to SEQ ID NO: 1530462
cauugccucugacacuacc

SEQ ID NO: 1530464 - RNA, 19 nt, Artificial Sequence
  Description of Artificial Sequence: Synthetic oligonucleotide
  Sense strand starting at position 933 of SEQ ID NO: 1245026
aggcaaugacucgaaucua

SEQ ID NO: 1530465 - RNA, 19 nt, Artificial Sequence
  Description of Artificial Sequence: Synthetic oligonucleotide
  Antisense strand to SEQ ID NO: 1530464
uagauucgagucauugccu

SEQ ID NO: 1530466 - RNA, 19 nt, Artificial Sequence
  Description of Artificial Sequence: Synthetic oligonucleotide
  Sense strand starting at position 1050 of SEQ ID NO: 1245026
gcuguaaugacugaacgga

SEQ ID NO: 1530467 - RNA, 19 nt, Artificial Sequence
  Description of Artificial Sequence: Synthetic oligonucleotide
  Antisense strand to SEQ ID NO: 1530466
uccguucagucauuacagc

SEQ ID NO: 1530468 - RNA, 19 nt, Artificial Sequence
  Description of Artificial Sequence: Synthetic oligonucleotide
  Sense strand starting at position 1086 of SEQ ID NO: 1245026
gugaaucuguuacuuggaa

SEQ ID NO: 1530469 - RNA, 19 nt, Artificial Sequence
  Description of Artificial Sequence: Synthetic oligonucleotide
  Antisense strand to SEQ ID NO: 1530468
uuccaaguaacagauucac

SEQ ID NO: 1530470 - RNA, 19 nt, Artificial Sequence
  Description of Artificial Sequence: Synthetic oligonucleotide
  Sense strand starting at position 1101 of SEQ ID NO: 1245026
ggaagaaacuaggagaauu

SEQ ID NO: 1530471 - RNA, 19 nt, Artificial Sequence
  Description of Artificial Sequence: Synthetic oligonucleotide
  Antisense strand to SEQ ID NO: 1530470
aauucuccuaguuucuucc

SEQ ID NO: 1530472 - RNA, 19 nt, Artificial Sequence
  Description of Artificial Sequence: Synthetic oligonucleotide
  Sense strand starting at position 1126 of SEQ ID NO: 1245026
uaauacagugcucaagguu

SEQ ID NO: 1530473 - RNA, 19 nt, Artificial Sequence
  Description of Artificial Sequence: Synthetic oligonucleotide
  Antisense strand to SEQ ID NO: 1530472
aaccuugagcacuguauua

SEQ ID NO: 1530474 - RNA, 19 nt, Artificial Sequence
  Description of Artificial Sequence: Synthetic oligonucleotide
  Sense strand starting at position 1175 of SEQ ID NO: 1245026
ccauuuaucugcguugcau

SEQ ID NO: 1530475 - RNA, 19 nt, Artificial Sequence
  Description of Artificial Sequence: Synthetic oligonucleotide
  Antisense strand to SEQ ID NO: 1530474
augcaacgcagauaaaugg

SEQ ID NO: 1530476 - RNA, 19 nt, Artificial Sequence
  Description of Artificial Sequence: Synthetic oligonucleotide
  Sense strand starting at position 1297 of SEQ ID NO: 1245026
agugcuucuauaggagaca

SEQ ID NO: 1530477 - RNA, 19 nt, Artificial Sequence
  Description of Artificial Sequence: Synthetic oligonucleotide
  Antisense strand to SEQ ID NO: 1530476
ugucuccuauagaagcacu

SEQ ID NO: 1530478 - RNA, 19 nt, Artificial Sequence
  Description of Artificial Sequence: Synthetic oligonucleotide
  Sense strand starting at position 1300 of SEQ ID NO: 1245026
gcuucuauaggagacaguu

SEQ ID NO: 1530479 - RNA, 19 nt, Artificial Sequence
  Description of Artificial Sequence: Synthetic oligonucleotide
  Antisense strand to SEQ ID NO: 1530478
aacugucuccuauagaagc

SEQ ID NO: 1530480 - RNA, 19 nt, Artificial Sequence
  Description of Artificial Sequence: Synthetic oligonucleotide
  Sense strand starting at position 1316 of SEQ ID NO: 1245026
guucuuuagggauauauuc

SEQ ID NO: 1530481 - RNA, 19 nt, Artificial Sequence
  Description of Artificial Sequence: Synthetic oligonucleotide
  Antisense strand to SEQ ID NO: 1530480
gaauauaucccuaaagaac

SEQ ID NO: 1530482 - RNA, 19 nt, Artificial Sequence
  Description of Artificial Sequence: Synthetic oligonucleotide
  Sense strand starting at position 1367 of SEQ ID NO: 1245026
cggccugaucuggaggaga

SEQ ID NO: 1530483 - RNA, 19 nt, Artificial Sequence
  Description of Artificial Sequence: Synthetic oligonucleotide
  Antisense strand to SEQ ID NO: 1530482
ucuccuccagaucaggccg

SEQ ID NO: 1530484 - RNA, 19 nt, Artificial Sequence
  Description of Artificial Sequence: Synthetic oligonucleotide
  Sense strand starting at position 1369 of SEQ ID NO: 1245026
gccugaucuggaggagaac

SEQ ID NO: 1530485 - RNA, 19 nt, Artificial Sequence
  Description of Artificial Sequence: Synthetic oligonucleotide
  Antisense strand to SEQ ID NO: 1530484
guucuccuccagaucaggc

SEQ ID NO: 1530486 - RNA, 19 nt, Artificial Sequence
  Description of Artificial Sequence: Synthetic oligonucleotide
  Sense strand starting at position 2307 of SEQ ID NO: 1245026
agggaagaugugggucuaa

SEQ ID NO: 1530487 - RNA, 19 nt, Artificial Sequence
  Description of Artificial Sequence: Synthetic oligonucleotide
  Antisense strand to SEQ ID NO: 1530486
uuagacccacaucuucccu

SEQ ID NO: 1530488 - RNA, 19 nt, Artificial Sequence
  Description of Artificial Sequence: Synthetic oligonucleotide
  Sense strand starting at position 2354 of SEQ ID NO: 1245026
ggcuuuacugugcauacau

SEQ ID NO: 1530489 - RNA, 19 nt, Artificial Sequence
  Description of Artificial Sequence: Synthetic oligonucleotide
  Antisense strand to SEQ ID NO: 1530488
auguaugcacaguaaagcc

SEQ ID NO: 1530490 - RNA, 19 nt, Artificial Sequence
  Description of Artificial Sequence: Synthetic oligonucleotide
  Sense strand starting at position 2405 of SEQ ID NO: 1245026
ggaauuugauucugagacu

SEQ ID NO: 1530491 - RNA, 19 nt, Artificial Sequence
  Description of Artificial Sequence: Synthetic oligonucleotide
  Antisense strand to SEQ ID NO: 1530490
agucucagaaucaaauucc

SEQ ID NO: 1530492 - RNA, 19 nt, Artificial Sequence
  Description of Artificial Sequence: Synthetic oligonucleotide
  Sense strand starting at position 2623 of SEQ ID NO: 1245026
uguuauuucuaagagacac

SEQ ID NO: 1530493 - RNA, 19 nt, Artificial Sequence
  Description of Artificial Sequence: Synthetic oligonucleotide
  Antisense strand to SEQ ID NO: 1530492
gugucucuuagaaauaaca

SEQ ID NO: 1530494 - RNA, 19 nt, Artificial Sequence
  Description of Artificial Sequence: Synthetic oligonucleotide
  Sense strand starting at position 2753 of SEQ ID NO: 1245026
gaaggacaaucaccguauu

SEQ ID NO: 1530495 - RNA, 19 nt, Artificial Sequence
  Description of Artificial Sequence: Synthetic oligonucleotide
  Antisense strand to SEQ ID NO: 1530494
aauacggugauuguccuuc

SEQ ID NO: 1530496 - RNA, 19 nt, Artificial Sequence
  Description of Artificial Sequence: Synthetic oligonucleotide
  Sense strand starting at position 2754 of SEQ ID NO: 1245026
aaggacaaucaccguauua

SEQ ID NO: 1530497 - RNA, 19 nt, Artificial Sequence
  Description of Artificial Sequence: Synthetic oligonucleotide
  Antisense strand to SEQ ID NO: 1530496
uaauacggugauuguccuu

SEQ ID NO: 1530498 - RNA, 19 nt, Artificial Sequence
  Description of Artificial Sequence: Synthetic oligonucleotide
  Sense strand starting at position 2756 of SEQ ID NO: 1245026
ggacaaucaccguauuaug

SEQ ID NO: 1530499 - RNA, 19 nt, Artificial Sequence
  Description of Artificial Sequence: Synthetic oligonucleotide
  Antisense strand to SEQ ID NO: 1530498
cauaauacggugauugucc

SEQ ID NO: 1530500 - RNA, 19 nt, Artificial Sequence
  Description of Artificial Sequence: Synthetic oligonucleotide
  Sense strand starting at position 2764 of SEQ ID NO: 1245026
accguauuaugcucauaaa

SEQ ID NO: 1530501 - RNA, 19 nt, Artificial Sequence
  Description of Artificial Sequence: Synthetic oligonucleotide
  Antisense strand to SEQ ID NO: 1530500
uuuaugagcauaauacggu

SEQ ID NO: 1530502 - RNA, 19 nt, Artificial Sequence
  Description of Artificial Sequence: Synthetic oligonucleotide
  Sense strand starting at position 2765 of SEQ ID NO: 1245026
ccguauuaugcucauaaau

SEQ ID NO: 1530503 - RNA, 19 nt, Artificial Sequence
  Description of Artificial Sequence: Synthetic oligonucleotide
  Antisense strand to SEQ ID NO: 1530502
auuuaugagcauaauacgg

SEQ ID NO: 1530504 - RNA, 19 nt, Artificial Sequence
  Description of Artificial Sequence: Synthetic oligonucleotide
  Sense strand starting at position 2821 of SEQ ID NO: 1245026
gggccuuugccucauuaug

SEQ ID NO: 1530505 - RNA, 19 nt, Artificial Sequence
  Description of Artificial Sequence: Synthetic oligonucleotide
  Antisense strand to SEQ ID NO: 1530504
cauaaugaggcaaaggccc

SEQ ID NO: 1530506 - RNA, 19 nt, Artificial Sequence
  Description of Artificial Sequence: Synthetic oligonucleotide
  Sense strand starting at position 3027 of SEQ ID NO: 1245026
ggcucugggcuccaagagu

SEQ ID NO: 1530507 - RNA, 19 nt, Artificial Sequence
  Description of Artificial Sequence: Synthetic oligonucleotide
  Antisense strand to SEQ ID NO: 1530506
acucuuggagcccagagcc

SEQ ID NO: 1530508 - RNA, 19 nt, Artificial Sequence
  Description of Artificial Sequence: Synthetic oligonucleotide
  Sense strand starting at position 3045 of SEQ ID NO: 1245026
ugagcauuccagugaacaa

SEQ ID NO: 1530509 - RNA, 19 nt, Artificial Sequence
  Description of Artificial Sequence: Synthetic oligonucleotide
  Antisense strand to SEQ ID NO: 1530508
uuguucacuggaaugcuca

SEQ ID NO: 1530510 - RNA, 19 nt, Artificial Sequence
  Description of Artificial Sequence: Synthetic oligonucleotide
  Sense strand starting at position 3086 of SEQ ID NO: 1245026
auaacauggccuuggaagu

SEQ ID NO: 1530511 - RNA, 19 nt, Artificial Sequence
  Description of Artificial Sequence: Synthetic oligonucleotide
  Antisense strand to SEQ ID NO: 1530510
acuuccaaggccauguuau

SEQ ID NO: 1530512 - RNA, 19 nt, Artificial Sequence
  Description of Artificial Sequence: Synthetic oligonucleotide
  Sense strand starting at position 3122 of SEQ ID NO: 1245026
gucagacucuuggucaaag

SEQ ID NO: 1530513 - RNA, 19 nt, Artificial Sequence
  Description of Artificial Sequence: Synthetic oligonucleotide
  Antisense strand to SEQ ID NO: 1530512
cuuugaccaagagucugac

SEQ ID NO: 1530514 - RNA, 19 nt, Artificial Sequence
  Description of Artificial Sequence: Synthetic oligonucleotide
  Sense strand starting at position 3124 of SEQ ID NO: 1245026
cagacucuuggucaaagca

SEQ ID NO: 1530515 - RNA, 19 nt, Artificial Sequence
  Description of Artificial Sequence: Synthetic oligonucleotide
  Antisense strand to SEQ ID NO: 1530514
ugcuuugaccaagagucug

SEQ ID NO: 1530516 - RNA, 19 nt, Artificial Sequence
  Description of Artificial Sequence: Synthetic oligonucleotide
  Sense strand starting at position 3614 of SEQ ID NO: 1245026
gucucuugcuauuuaagua

SEQ ID NO: 1530517 - RNA, 19 nt, Artificial Sequence
  Description of Artificial Sequence: Synthetic oligonucleotide
  Antisense strand to SEQ ID NO: 1530516
uacuuaaauagcaagagac

SEQ ID NO: 1530518 - RNA, 19 nt, Artificial Sequence
  Description of Artificial Sequence: Synthetic oligonucleotide
  Sense strand starting at position 3699 of SEQ ID NO: 1245026
gacuaaguagcaugggaga

SEQ ID NO: 1530519 - RNA, 19 nt, Artificial Sequence
  Description of Artificial Sequence: Synthetic oligonucleotide
  Antisense strand to SEQ ID NO: 1530518
ucucccaugcuacuuaguc

SEQ ID NO: 1530520 - RNA, 19 nt, Artificial Sequence
  Description of Artificial Sequence: Synthetic oligonucleotide
  Sense strand starting at position 3701 of SEQ ID NO: 1245026
cuaaguagcaugggagauu

SEQ ID NO: 1530521 - RNA, 19 nt, Artificial Sequence
  Description of Artificial Sequence: Synthetic oligonucleotide
  Antisense strand to SEQ ID NO: 1530520
aaucucccaugcuacuuag

SEQ ID NO: 1530522 - RNA, 19 nt, Artificial Sequence
  Description of Artificial Sequence: Synthetic oligonucleotide
  Sense strand starting at position 3732 of SEQ ID NO: 1245026
uugggugggccugauucaa

SEQ ID NO: 1530523 - RNA, 19 nt, Artificial Sequence
  Description of Artificial Sequence: Synthetic oligonucleotide
  Antisense strand to SEQ ID NO: 1530522
uugaaucaggcccacccaa

SEQ ID NO: 1530524 - RNA, 19 nt, Artificial Sequence
  Description of Artificial Sequence: Synthetic oligonucleotide
  Sense strand starting at position 3880 of SEQ ID NO: 1245026
cccucaaucgaguaagcca

SEQ ID NO: 1530525 - RNA, 19 nt, Artificial Sequence
  Description of Artificial Sequence: Synthetic oligonucleotide
  Antisense strand to SEQ ID NO: 1530524
uggcuuacucgauugaggg

SEQ ID NO: 1530526 - RNA, 19 nt, Artificial Sequence
  Description of Artificial Sequence: Synthetic oligonucleotide
  Sense strand starting at position 309 of SEQ ID NO: 1245027
gaauuaaggcuuuauguuc

SEQ ID NO: 1530527 - RNA, 19 nt, Artificial Sequence
  Description of Artificial Sequence: Synthetic oligonucleotide
  Antisense strand to SEQ ID NO: 1530526
gaacauaaagccuuaauuc

SEQ ID NO: 1530528 - RNA, 19 nt, Artificial Sequence
  Description of Artificial Sequence: Synthetic oligonucleotide
  Sense strand starting at position 347 of SEQ ID NO: 1245027
gccaaaugcagcugucuga

SEQ ID NO: 1530529 - RNA, 19 nt, Artificial Sequence
  Description of Artificial Sequence: Synthetic oligonucleotide
  Antisense strand to SEQ ID NO: 1530528
ucagacagcugcauuuggc

SEQ ID NO: 1530530 - RNA, 19 nt, Artificial Sequence
  Description of Artificial Sequence: Synthetic oligonucleotide
  Sense strand starting at position 351 of SEQ ID NO: 1245027
aaugcagcugucugaacuu

SEQ ID NO: 1530531 - RNA, 19 nt, Artificial Sequence
  Description of Artificial Sequence: Synthetic oligonucleotide
  Antisense strand to SEQ ID NO: 1530530
aaguucagacagcugcauu

SEQ ID NO: 1530532 - RNA, 19 nt, Artificial Sequence
  Description of Artificial Sequence: Synthetic oligonucleotide
  Sense strand starting at position 357 of SEQ ID NO: 1245027
gcugucugaacuugucaag

SEQ ID NO: 1530533 - RNA, 19 nt, Artificial Sequence
  Description of Artificial Sequence: Synthetic oligonucleotide
  Antisense strand to SEQ ID NO: 1530532
cuugacaaguucagacagc

SEQ ID NO: 1530534 - RNA, 19 nt, Artificial Sequence
  Description of Artificial Sequence: Synthetic oligonucleotide
  Sense strand starting at position 360 of SEQ ID NO: 1245027
gucugaacuugucaagaac

SEQ ID NO: 1530535 - RNA, 19 nt, Artificial Sequence
  Description of Artificial Sequence: Synthetic oligonucleotide
  Antisense strand to SEQ ID NO: 1530534
guucuugacaaguucagac

SEQ ID NO: 1530536 - RNA, 19 nt, Artificial Sequence
  Description of Artificial Sequence: Synthetic oligonucleotide
  Sense strand starting at position 589 of SEQ ID NO: 1245027
ugcagaaacuucccugaga

SEQ ID NO: 1530537 - RNA, 19 nt, Artificial Sequence
  Description of Artificial Sequence: Synthetic oligonucleotide
  Antisense strand to SEQ ID NO: 1530536
ucucagggaaguuucugca

SEQ ID NO: 1530538 - RNA, 19 nt, Artificial Sequence
  Description of Artificial Sequence: Synthetic oligonucleotide
  Sense strand starting at position 590 of SEQ ID NO: 1245027
gcagaaacuucccugagaa

SEQ ID NO: 1530539 - RNA, 19 nt, Artificial Sequence
  Description of Artificial Sequence: Synthetic oligonucleotide
  Antisense strand to SEQ ID NO: 1530538
uucucagggaaguuucugc

SEQ ID NO: 1530540 - RNA, 19 nt, Artificial Sequence
  Description of Artificial Sequence: Synthetic oligonucleotide
  Sense strand starting at position 831 of SEQ ID NO: 1245027
gggauuccuaagugugacu

SEQ ID NO: 1530541 - RNA, 19 nt, Artificial Sequence
  Description of Artificial Sequence: Synthetic oligonucleotide
  Antisense strand to SEQ ID NO: 1530540
agucacacuuaggaauccc

SEQ ID NO: 1530542 - RNA, 19 nt, Artificial Sequence
  Description of Artificial Sequence: Synthetic oligonucleotide
  Sense strand starting at position 833 of SEQ ID NO: 1245027
gauuccuaagugugacuga

SEQ ID NO: 1530543 - RNA, 19 nt, Artificial Sequence
  Description of Artificial Sequence: Synthetic oligonucleotide
  Antisense strand to SEQ ID NO: 1530542
ucagucacacuuaggaauc

SEQ ID NO: 1530544 - RNA, 19 nt, Artificial Sequence
  Description of Artificial Sequence: Synthetic oligonucleotide
  Sense strand starting at position 842 of SEQ ID NO: 1245027
gugugacugagguggaguu

SEQ ID NO: 1530545 - RNA, 19 nt, Artificial Sequence
  Description of Artificial Sequence: Synthetic oligonucleotide
  Antisense strand to SEQ ID NO: 1530544
aacuccaccucagucacac

SEQ ID NO: 1530546 - RNA, 19 nt, Artificial Sequence
  Description of Artificial Sequence: Synthetic oligonucleotide
  Sense strand starting at position 929 of SEQ ID NO: 1245027
aacagagaugguugcugau

SEQ ID NO: 1530547 - RNA, 19 nt, Artificial Sequence
  Description of Artificial Sequence: Synthetic oligonucleotide
  Antisense strand to SEQ ID NO: 1530546
aucagcaaccaucucuguu

SEQ ID NO: 1530548 - RNA, 19 nt, Artificial Sequence
  Description of Artificial Sequence: Synthetic oligonucleotide
  Sense strand starting at position 938 of SEQ ID NO: 1245027
gguugcugaucccucauau

SEQ ID NO: 1530549 - RNA, 19 nt, Artificial Sequence
  Description of Artificial Sequence: Synthetic oligonucleotide
  Antisense strand to SEQ ID NO: 1530548
auaugagggaucagcaacc

SEQ ID NO: 1530550 - RNA, 19 nt, Artificial Sequence
  Description of Artificial Sequence: Synthetic oligonucleotide
  Sense strand starting at position 942 of SEQ ID NO: 1245027
gcugaucccucauauagug

SEQ ID NO: 1530551 - RNA, 19 nt, Artificial Sequence
  Description of Artificial Sequence: Synthetic oligonucleotide
  Antisense strand to SEQ ID NO: 1530550
cacuauaugagggaucagc

SEQ ID NO: 1530552 - RNA, 19 nt, Artificial Sequence
  Description of Artificial Sequence: Synthetic oligonucleotide
  Sense strand starting at position 1045 of SEQ ID NO: 1245027
aguuacaaaugcucagaca

SEQ ID NO: 1530553 - RNA, 19 nt, Artificial Sequence
  Description of Artificial Sequence: Synthetic oligonucleotide
  Antisense strand to SEQ ID NO: 1530552
ugucugagcauuuguaacu

SEQ ID NO: 1530554 - RNA, 19 nt, Artificial Sequence
  Description of Artificial Sequence: Synthetic oligonucleotide
  Sense strand starting at position 1046 of SEQ ID NO: 1245027
guuacaaaugcucagacaa

SEQ ID NO: 1530555 - RNA, 19 nt, Artificial Sequence
  Description of Artificial Sequence: Synthetic oligonucleotide
  Antisense strand to SEQ ID NO: 1530554
uugucugagcauuuguaac

SEQ ID NO: 1530556 - RNA, 19 nt, Artificial Sequence
  Description of Artificial Sequence: Synthetic oligonucleotide
  Sense strand starting at position 1205 of SEQ ID NO: 1245027
ucagauugugcaggcacau

SEQ ID NO: 1530557 - RNA, 19 nt, Artificial Sequence
  Description of Artificial Sequence: Synthetic oligonucleotide
  Antisense strand to SEQ ID NO: 1530556
augugccugcacaaucuga

SEQ ID NO: 1530558 - RNA, 19 nt, Artificial Sequence
  Description of Artificial Sequence: Synthetic oligonucleotide
  Sense strand starting at position 1416 of SEQ ID NO: 1245027
acagaagcuuaaguggaau

SEQ ID NO: 1530559 - RNA, 19 nt, Artificial Sequence
  Description of Artificial Sequence: Synthetic oligonucleotide
  Antisense strand to SEQ ID NO: 1530558
auuccacuuaagcuucugu

SEQ ID NO: 1530560 - RNA, 19 nt, Artificial Sequence
  Description of Artificial Sequence: Synthetic oligonucleotide
  Sense strand starting at position 1763 of SEQ ID NO: 1245027
gcgagcaagugcuugaagu

SEQ ID NO: 1530561 - RNA, 19 nt, Artificial Sequence
  Description of Artificial Sequence: Synthetic oligonucleotide
  Antisense strand to SEQ ID NO: 1530560
acuucaagcacuugcucgc

SEQ ID NO: 1530562 - RNA, 19 nt, Artificial Sequence
  Description of Artificial Sequence: Synthetic oligonucleotide
  Sense strand starting at position 1764 of SEQ ID NO: 1245027
cgagcaagugcuugaaguc

SEQ ID NO: 1530563 - RNA, 19 nt, Artificial Sequence
  Description of Artificial Sequence: Synthetic oligonucleotide
  Antisense strand to SEQ ID NO: 1530562
gacuucaagcacuugcucg

SEQ ID NO: 1530564 - RNA, 19 nt, Artificial Sequence
  Description of Artificial Sequence: Synthetic oligonucleotide
  Sense strand starting at position 1885 of SEQ ID NO: 1245027
ugaaaugggcucuguccua

SEQ ID NO: 1530565 - RNA, 19 nt, Artificial Sequence
  Description of Artificial Sequence: Synthetic oligonucleotide
  Antisense strand to SEQ ID NO: 1530564
uaggacagagcccauuuca

SEQ ID NO: 1530566 - RNA, 19 nt, Artificial Sequence
  Description of Artificial Sequence: Synthetic oligonucleotide
  Sense strand starting at position 1953 of SEQ ID NO: 1245027
ggcagaaaccugugucucu

SEQ ID NO: 1530567 - RNA, 19 nt, Artificial Sequence
  Description of Artificial Sequence: Synthetic oligonucleotide
  Antisense strand to SEQ ID NO: 1530566
agagacacagguuucugcc

SEQ ID NO: 1530568 - RNA, 19 nt, Artificial Sequence
  Description of Artificial Sequence: Synthetic oligonucleotide
  Sense strand starting at position 1988 of SEQ ID NO: 1245027
cagccagacccauagugau

SEQ ID NO: 1530569 - RNA, 19 nt, Artificial Sequence
  Description of Artificial Sequence: Synthetic oligonucleotide
  Antisense strand to SEQ ID NO: 1530568
aucacuaugggucuggcug

SEQ ID NO: 1530570 - RNA, 19 nt, Artificial Sequence
  Description of Artificial Sequence: Synthetic oligonucleotide
  Sense strand starting at position 2203 of SEQ ID NO: 1245027
gcaugaugugcugggauuc

SEQ ID NO: 1530571 - RNA, 19 nt, Artificial Sequence
  Description of Artificial Sequence: Synthetic oligonucleotide
  Antisense strand to SEQ ID NO: 1530570
gaaucccagcacaucaugc

SEQ ID NO: 1530572 - RNA, 19 nt, Artificial Sequence
  Description of Artificial Sequence: Synthetic oligonucleotide
  Sense strand starting at position 2496 of SEQ ID NO: 1245027
ugcagucuuuggucuuaaa

SEQ ID NO: 1530573 - RNA, 19 nt, Artificial Sequence
  Description of Artificial Sequence: Synthetic oligonucleotide
  Antisense strand to SEQ ID NO: 1530572
uuuaagaccaaagacugca

SEQ ID NO: 1530574 - RNA, 19 nt, Artificial Sequence
  Description of Artificial Sequence: Synthetic oligonucleotide
  Sense strand starting at position 2499 of SEQ ID NO: 1245027
agucuuuggucuuaaaggu

SEQ ID NO: 1530575 - RNA, 19 nt, Artificial Sequence
  Description of Artificial Sequence: Synthetic oligonucleotide
  Antisense strand to SEQ ID NO: 1530574
accuuuaagaccaaagacu

SEQ ID NO: 1530576 - RNA, 19 nt, Artificial Sequence
  Description of Artificial Sequence: Synthetic oligonucleotide
  Sense strand starting at position 2507 of SEQ ID NO: 1245027
gucuuaaaggucugaggca

SEQ ID NO: 1530577 - RNA, 19 nt, Artificial Sequence
  Description of Artificial Sequence: Synthetic oligonucleotide
  Antisense strand to SEQ ID NO: 1530576
ugccucagaccuuuaagac

SEQ ID NO: 1530578 - RNA, 19 nt, Artificial Sequence
  Description of Artificial Sequence: Synthetic oligonucleotide
  Sense strand starting at position 2508 of SEQ ID NO: 1245027
ucuuaaaggucugaggcaa

SEQ ID NO: 1530579 - RNA, 19 nt, Artificial Sequence
  Description of Artificial Sequence: Synthetic oligonucleotide
  Antisense strand to SEQ ID NO: 1530578
uugccucagaccuuuaaga

SEQ ID NO: 1530580 - RNA, 19 nt, Artificial Sequence
  Description of Artificial Sequence: Synthetic oligonucleotide
  Sense strand starting at position 2555 of SEQ ID NO: 1245027
gcaacuggacuuugaggaa

SEQ ID NO: 1530581 - RNA, 19 nt, Artificial Sequence
  Description of Artificial Sequence: Synthetic oligonucleotide
  Antisense strand to SEQ ID NO: 1530580
uuccucaaaguccaguugc

SEQ ID NO: 1530582 - RNA, 19 nt, Artificial Sequence
  Description of Artificial Sequence: Synthetic oligonucleotide
  Sense strand starting at position 2620 of SEQ ID NO: 1245027
ucgacccugucauugcaaa

SEQ ID NO: 1530583 - RNA, 19 nt, Artificial Sequence
  Description of Artificial Sequence: Synthetic oligonucleotide
  Antisense strand to SEQ ID NO: 1530582
uuugcaaugacagggucga

SEQ ID NO: 1530584 - RNA, 19 nt, Artificial Sequence
  Description of Artificial Sequence: Synthetic oligonucleotide
  Sense strand starting at position 2655 of SEQ ID NO: 1245027
uuagauguuugugugguaa

SEQ ID NO: 1530585 - RNA, 19 nt, Artificial Sequence
  Description of Artificial Sequence: Synthetic oligonucleotide
  Antisense strand to SEQ ID NO: 1530584
uuaccacacaaacaucuaa

SEQ ID NO: 1530586 - RNA, 19 nt, Artificial Sequence
  Description of Artificial Sequence: Synthetic oligonucleotide
  Sense strand starting at position 2667 of SEQ ID NO: 1245027
gugguaacacuaugaaaga

SEQ ID NO: 1530587 - RNA, 19 nt, Artificial Sequence
  Description of Artificial Sequence: Synthetic oligonucleotide
  Antisense strand to SEQ ID NO: 1530586
ucuuucauaguguuaccac

SEQ ID NO: 1530588 - RNA, 19 nt, Artificial Sequence
  Description of Artificial Sequence: Synthetic oligonucleotide
  Sense strand starting at position 2668 of SEQ ID NO: 1245027
ugguaacacuaugaaagau

SEQ ID NO: 1530589 - RNA, 19 nt, Artificial Sequence
  Description of Artificial Sequence: Synthetic oligonucleotide
  Antisense strand to SEQ ID NO: 1530588
aucuuucauaguguuacca

SEQ ID NO: 1530590 - RNA, 19 nt, Artificial Sequence
  Description of Artificial Sequence: Synthetic oligonucleotide
  Sense strand starting at position 2760 of SEQ ID NO: 1245027
gccuauuggugaggaggga

SEQ ID NO: 1530591 - RNA, 19 nt, Artificial Sequence
  Description of Artificial Sequence: Synthetic oligonucleotide
  Antisense strand to SEQ ID NO: 1530590
ucccuccucaccaauaggc

SEQ ID NO: 1530592 - RNA, 19 nt, Artificial Sequence
  Description of Artificial Sequence: Synthetic oligonucleotide
  Sense strand starting at position 2845 of SEQ ID NO: 1245027
cacugugcugugugucaga

SEQ ID NO: 1530593 - RNA, 19 nt, Artificial Sequence
  Description of Artificial Sequence: Synthetic oligonucleotide
  Antisense strand to SEQ ID NO: 1530592
ucugacacacagcacagug

SEQ ID NO: 1530594 - RNA, 19 nt, Artificial Sequence
  Description of Artificial Sequence: Synthetic oligonucleotide
  Sense strand starting at position 2885 of SEQ ID NO: 1245027
cccagucauagcugaagag

SEQ ID NO: 1530595 - RNA, 19 nt, Artificial Sequence
  Description of Artificial Sequence: Synthetic oligonucleotide
  Antisense strand to SEQ ID NO: 1530594
cucuucagcuaugacuggg

SEQ ID NO: 1530596 - RNA, 19 nt, Artificial Sequence
  Description of Artificial Sequence: Synthetic oligonucleotide
  Sense strand starting at position 3392 of SEQ ID NO: 1245027
gugagcuacuccucaucua

SEQ ID NO: 1530597 - RNA, 19 nt, Artificial Sequence
  Description of Artificial Sequence: Synthetic oligonucleotide
  Antisense strand to SEQ ID NO: 1530596
uagaugaggaguagcucac

SEQ ID NO: 1530598 - RNA, 19 nt, Artificial Sequence
  Description of Artificial Sequence: Synthetic oligonucleotide
  Sense strand starting at position 3400 of SEQ ID NO: 1245027
cuccucaucuaacugugua

SEQ ID NO: 1530599 - RNA, 19 nt, Artificial Sequence
  Description of Artificial Sequence: Synthetic oligonucleotide
  Antisense strand to SEQ ID NO: 1530598
uacacaguuagaugaggag

SEQ ID NO: 1530600 - RNA, 19 nt, Artificial Sequence
  Description of Artificial Sequence: Synthetic oligonucleotide
  Sense strand starting at position 3403 of SEQ ID NO: 1245027
cucaucuaacuguguaaag

SEQ ID NO: 1530601 - RNA, 19 nt, Artificial Sequence
  Description of Artificial Sequence: Synthetic oligonucleotide
  Antisense strand to SEQ ID NO: 1530600
cuuuacacaguuagaugag

SEQ ID NO: 1530602 - RNA, 19 nt, Artificial Sequence
  Description of Artificial Sequence: Synthetic oligonucleotide
  Sense strand starting at position 3412 of SEQ ID NO: 1245027
cuguguaaaggccaggaau

SEQ ID NO: 1530603 - RNA, 19 nt, Artificial Sequence
  Description of Artificial Sequence: Synthetic oligonucleotide
  Antisense strand to SEQ ID NO: 1530602
auuccuggccuuuacacag

SEQ ID NO: 1530604 - RNA, 19 nt, Artificial Sequence
  Description of Artificial Sequence: Synthetic oligonucleotide
  Sense strand starting at position 3414 of SEQ ID NO: 1245027
guguaaaggccaggaauga

SEQ ID NO: 1530605 - RNA, 19 nt, Artificial Sequence
  Description of Artificial Sequence: Synthetic oligonucleotide
  Antisense strand to SEQ ID NO: 1530604
ucauuccuggccuuuacac

SEQ ID NO: 1530606 - RNA, 19 nt, Artificial Sequence
  Description of Artificial Sequence: Synthetic oligonucleotide
  Sense strand starting at position 304 of SEQ ID NO: 1245028
agagaaauccugugucuac

SEQ ID NO: 1530607 - RNA, 19 nt, Artificial Sequence
  Description of Artificial Sequence: Synthetic oligonucleotide
  Antisense strand to SEQ ID NO: 1530606
guagacacaggauuucucu

SEQ ID NO: 1530608 - RNA, 19 nt, Artificial Sequence
  Description of Artificial Sequence: Synthetic oligonucleotide
  Sense strand starting at position 448 of SEQ ID NO: 1245028
gcacucuagucuguugaca

SEQ ID NO: 1530609 - RNA, 19 nt, Artificial Sequence
  Description of Artificial Sequence: Synthetic oligonucleotide
  Antisense strand to SEQ ID NO: 1530608
ugucaacagacuagagugc

SEQ ID NO: 1530610 - RNA, 19 nt, Artificial Sequence
  Description of Artificial Sequence: Synthetic oligonucleotide
  Sense strand starting at position 492 of SEQ ID NO: 1245028
aaaggaaguuggccauuaa

SEQ ID NO: 1530611 - RNA, 19 nt, Artificial Sequence
  Description of Artificial Sequence: Synthetic oligonucleotide
  Antisense strand to SEQ ID NO: 1530610
uuaauggccaacuuccuuu

SEQ ID NO: 1530612 - RNA, 19 nt, Artificial Sequence
  Description of Artificial Sequence: Synthetic oligonucleotide
  Sense strand starting at position 705 of SEQ ID NO: 1245028
gaggaagacucacacauga

SEQ ID NO: 1530613 - RNA, 19 nt, Artificial Sequence
  Description of Artificial Sequence: Synthetic oligonucleotide
  Antisense strand to SEQ ID NO: 1530612
ucaugugugagucuuccuc

SEQ ID NO: 1530614 - RNA, 19 nt, Artificial Sequence
  Description of Artificial Sequence: Synthetic oligonucleotide
  Sense strand starting at position 730 of SEQ ID NO: 1245028
guaguaagagccuaugaau

SEQ ID NO: 1530615 - RNA, 19 nt, Artificial Sequence
  Description of Artificial Sequence: Synthetic oligonucleotide
  Antisense strand to SEQ ID NO: 1530614
auucauaggcucuuacuac

SEQ ID NO: 1530616 - RNA, 19 nt, Artificial Sequence
  Description of Artificial Sequence: Synthetic oligonucleotide
  Sense strand starting at position 733 of SEQ ID NO: 1245028
guaagagccuaugaauuag

SEQ ID NO: 1530617 - RNA, 19 nt, Artificial Sequence
  Description of Artificial Sequence: Synthetic oligonucleotide
  Antisense strand to SEQ ID NO: 1530616
cuaauucauaggcucuuac

SEQ ID NO: 1530618 - RNA, 19 nt, Artificial Sequence
  Description of Artificial Sequence: Synthetic oligonucleotide
  Sense strand starting at position 1063 of SEQ ID NO: 1245028
auaguuuaagcccgugcaa

SEQ ID NO: 1530619 - RNA, 19 nt, Artificial Sequence
  Description of Artificial Sequence: Synthetic oligonucleotide
  Antisense strand to SEQ ID NO: 1530618
uugcacgggcuuaaacuau

SEQ ID NO: 1530620 - RNA, 19 nt, Artificial Sequence
  Description of Artificial Sequence: Synthetic oligonucleotide
  Sense strand starting at position 1064 of SEQ ID NO: 1245028
uaguuuaagcccgugcaau

SEQ ID NO: 1530621 - RNA, 19 nt, Artificial Sequence
  Description of Artificial Sequence: Synthetic oligonucleotide
  Antisense strand to SEQ ID NO: 1530620
auugcacgggcuuaaacua

SEQ ID NO: 1530622 - RNA, 19 nt, Artificial Sequence
  Description of Artificial Sequence: Synthetic oligonucleotide
  Sense strand starting at position 1318 of SEQ ID NO: 1245028
uaacucgcuuggucacaau

SEQ ID NO: 1530623 - RNA, 19 nt, Artificial Sequence
  Description of Artificial Sequence: Synthetic oligonucleotide
  Antisense strand to SEQ ID NO: 1530622
auugugaccaagcgaguua

SEQ ID NO: 1530624 - RNA, 19 nt, Artificial Sequence
  Description of Artificial Sequence: Synthetic oligonucleotide
  Sense strand starting at position 1400 of SEQ ID NO: 1245028
uuguuugaacucuaacagu

SEQ ID NO: 1530625 - RNA, 19 nt, Artificial Sequence
  Description of Artificial Sequence: Synthetic oligonucleotide
  Antisense strand to SEQ ID NO: 1530624
acuguuagaguucaaacaa

SEQ ID NO: 1530626 - RNA, 19 nt, Artificial Sequence
  Description of Artificial Sequence: Synthetic oligonucleotide
  Sense strand starting at position 1429 of SEQ ID NO: 1245028
uagacugaguaguagaaca

SEQ ID NO: 1530627 - RNA, 19 nt, Artificial Sequence
  Description of Artificial Sequence: Synthetic oligonucleotide
  Antisense strand to SEQ ID NO: 1530626
uguucuacuacucagucua

SEQ ID NO: 1530628 - RNA, 19 nt, Artificial Sequence
  Description of Artificial Sequence: Synthetic oligonucleotide
  Sense strand starting at position 1553 of SEQ ID NO: 1245028
cacagaugugggcgaggaa

SEQ ID NO: 1530629 - RNA, 19 nt, Artificial Sequence
  Description of Artificial Sequence: Synthetic oligonucleotide
  Antisense strand to SEQ ID NO: 1530628
uuccucgcccacaucugug

SEQ ID NO: 1530630 - RNA, 19 nt, Artificial Sequence
  Description of Artificial Sequence: Synthetic oligonucleotide
  Sense strand starting at position 1554 of SEQ ID NO: 1245028
acagaugugggcgaggaau

SEQ ID NO: 1530631 - RNA, 19 nt, Artificial Sequence
  Description of Artificial Sequence: Synthetic oligonucleotide
  Antisense strand to SEQ ID NO: 1530630
auuccucgcccacaucugu

SEQ ID NO: 1530632 - RNA, 19 nt, Artificial Sequence
  Description of Artificial Sequence: Synthetic oligonucleotide
  Sense strand starting at position 1556 of SEQ ID NO: 1245028
agaugugggcgaggaauaa

SEQ ID NO: 1530633 - RNA, 19 nt, Artificial Sequence
  Description of Artificial Sequence: Synthetic oligonucleotide
  Antisense strand to SEQ ID NO: 1530632
uuauuccucgcccacaucu

SEQ ID NO: 1530634 - RNA, 19 nt, Artificial Sequence
  Description of Artificial Sequence: Synthetic oligonucleotide
  Sense strand starting at position 1575 of SEQ ID NO: 1245028
ucaauuuaugccugacggu

SEQ ID NO: 1530635 - RNA, 19 nt, Artificial Sequence
  Description of Artificial Sequence: Synthetic oligonucleotide
  Antisense strand to SEQ ID NO: 1530634
accgucaggcauaaauuga

SEQ ID NO: 1530636 - RNA, 19 nt, Artificial Sequence
  Description of Artificial Sequence: Synthetic oligonucleotide
  Sense strand starting at position 1781 of SEQ ID NO: 1245028
gcauaugagcucugcucca

SEQ ID NO: 1530637 - RNA, 19 nt, Artificial Sequence
  Description of Artificial Sequence: Synthetic oligonucleotide
  Antisense strand to SEQ ID NO: 1530636
uggagcagagcucauaugc

SEQ ID NO: 1530638 - RNA, 19 nt, Artificial Sequence
  Description of Artificial Sequence: Synthetic oligonucleotide
  Sense strand starting at position 2571 of SEQ ID NO: 1245028
uuguuauuguucccugcau

SEQ ID NO: 1530639 - RNA, 19 nt, Artificial Sequence
  Description of Artificial Sequence: Synthetic oligonucleotide
  Antisense strand to SEQ ID NO: 1530638
augcagggaacaauaacaa

SEQ ID NO: 1530640 - RNA, 19 nt, Artificial Sequence
  Description of Artificial Sequence: Synthetic oligonucleotide
  Sense strand starting at position 2572 of SEQ ID NO: 1245028
uguuauuguucccugcaug

SEQ ID NO: 1530641 - RNA, 19 nt, Artificial Sequence
  Description of Artificial Sequence: Synthetic oligonucleotide
  Antisense strand to SEQ ID NO: 1530640
caugcagggaacaauaaca

SEQ ID NO: 1530642 - RNA, 19 nt, Artificial Sequence
  Description of Artificial Sequence: Synthetic oligonucleotide
  Sense strand starting at position 2588 of SEQ ID NO: 1245028
augcauuuguggucucauu

SEQ ID NO: 1530643 - RNA, 19 nt, Artificial Sequence
  Description of Artificial Sequence: Synthetic oligonucleotide
  Antisense strand to SEQ ID NO: 1530642
aaugagaccacaaaugcau

SEQ ID NO: 1530644 - RNA, 19 nt, Artificial Sequence
  Description of Artificial Sequence: Synthetic oligonucleotide
  Sense strand starting at position 2622 of SEQ ID NO: 1245028
uuugcaaugcccggucaaa

SEQ ID NO: 1530645 - RNA, 19 nt, Artificial Sequence
  Description of Artificial Sequence: Synthetic oligonucleotide
  Antisense strand to SEQ ID NO: 1530644
uuugaccgggcauugcaaa

SEQ ID NO: 1530646 - RNA, 19 nt, Artificial Sequence
  Description of Artificial Sequence: Synthetic oligonucleotide
  Sense strand starting at position 2826 of SEQ ID NO: 1245028
gaccgaccucacugacaua

SEQ ID NO: 1530647 - RNA, 19 nt, Artificial Sequence
  Description of Artificial Sequence: Synthetic oligonucleotide
  Antisense strand to SEQ ID NO: 1530646
uaugucagugaggucgguc

SEQ ID NO: 1530648 - RNA, 19 nt, Artificial Sequence
  Description of Artificial Sequence: Synthetic oligonucleotide
  Sense strand starting at position 2837 of SEQ ID NO: 1245028
cugacauauguaugugaag

SEQ ID NO: 1530649 - RNA, 19 nt, Artificial Sequence
  Description of Artificial Sequence: Synthetic oligonucleotide
  Antisense strand to SEQ ID NO: 1530648
cuucacauacauaugucag

SEQ ID NO: 1530650 - RNA, 19 nt, Artificial Sequence
  Description of Artificial Sequence: Synthetic oligonucleotide
  Sense strand starting at position 2838 of SEQ ID NO: 1245028
ugacauauguaugugaagu

SEQ ID NO: 1530651 - RNA, 19 nt, Artificial Sequence
  Description of Artificial Sequence: Synthetic oligonucleotide
  Antisense strand to SEQ ID NO: 1530650
acuucacauacauauguca

SEQ ID NO: 1530652 - RNA, 19 nt, Artificial Sequence
  Description of Artificial Sequence: Synthetic oligonucleotide
  Sense strand starting at position 2852 of SEQ ID NO: 1245028
gaaguuugcauguggcgaa

SEQ ID NO: 1530653 - RNA, 19 nt, Artificial Sequence
  Description of Artificial Sequence: Synthetic oligonucleotide
  Antisense strand to SEQ ID NO: 1530652
uucgccacaugcaaacuuc

SEQ ID NO: 1530654 - RNA, 19 nt, Artificial Sequence
  Description of Artificial Sequence: Synthetic oligonucleotide
  Sense strand starting at position 2864 of SEQ ID NO: 1245028
uggcgaaggccagauacau

SEQ ID NO: 1530655 - RNA, 19 nt, Artificial Sequence
  Description of Artificial Sequence: Synthetic oligonucleotide
  Antisense strand to SEQ ID NO: 1530654
auguaucuggccuucgcca

SEQ ID NO: 1530656 - RNA, 19 nt, Artificial Sequence
  Description of Artificial Sequence: Synthetic oligonucleotide
  Sense strand starting at position 2885 of SEQ ID NO: 1245028
uaguuauuacuauggagau

SEQ ID NO: 1530657 - RNA, 19 nt, Artificial Sequence
  Description of Artificial Sequence: Synthetic oligonucleotide
  Antisense strand to SEQ ID NO: 1530656
aucuccauaguaauaacua

SEQ ID NO: 1530658 - RNA, 19 nt, Artificial Sequence
  Description of Artificial Sequence: Synthetic oligonucleotide
  Sense strand starting at position 2891 of SEQ ID NO: 1245028
uuacuauggagaugauguu

SEQ ID NO: 1530659 - RNA, 19 nt, Artificial Sequence
  Description of Artificial Sequence: Synthetic oligonucleotide
  Antisense strand to SEQ ID NO: 1530658
aacaucaucuccauaguaa

SEQ ID NO: 1530660 - RNA, 19 nt, Artificial Sequence
  Description of Artificial Sequence: Synthetic oligonucleotide
  Sense strand starting at position 2901 of SEQ ID NO: 1245028
gaugauguugguucgcgua

SEQ ID NO: 1530661 - RNA, 19 nt, Artificial Sequence
  Description of Artificial Sequence: Synthetic oligonucleotide
  Antisense strand to SEQ ID NO: 1530660
uacgcgaaccaacaucauc

SEQ ID NO: 1530662 - RNA, 19 nt, Artificial Sequence
  Description of Artificial Sequence: Synthetic oligonucleotide
  Sense strand starting at position 2926 of SEQ ID NO: 1245028
gaucgugguaaggguuaua

SEQ ID NO: 1530663 - RNA, 19 nt, Artificial Sequence
  Description of Artificial Sequence: Synthetic oligonucleotide
  Antisense strand to SEQ ID NO: 1530662
uauaacccuuaccacgauc

SEQ ID NO: 1530664 - RNA, 19 nt, Artificial Sequence
  Description of Artificial Sequence: Synthetic oligonucleotide
  Sense strand starting at position 2929 of SEQ ID NO: 1245028
cgugguaaggguuauauau

SEQ ID NO: 1530665 - RNA, 19 nt, Artificial Sequence
  Description of Artificial Sequence: Synthetic oligonucleotide
  Antisense strand to SEQ ID NO: 1530664
auauauaacccuuaccacg

SEQ ID NO: 1530666 - RNA, 19 nt, Artificial Sequence
  Description of Artificial Sequence: Synthetic oligonucleotide
  Sense strand starting at position 2936 of SEQ ID NO: 1245028
aggguuauauauguaugua

SEQ ID NO: 1530667 - RNA, 19 nt, Artificial Sequence
  Description of Artificial Sequence: Synthetic oligonucleotide
  Antisense strand to SEQ ID NO: 1530666
uacauacauauauaacccu

SEQ ID NO: 1530668 - RNA, 19 nt, Artificial Sequence
  Description of Artificial Sequence: Synthetic oligonucleotide
  Sense strand starting at position 2937 of SEQ ID NO: 1245028
ggguuauauauguauguaa

SEQ ID NO: 1530669 - RNA, 19 nt, Artificial Sequence
  Description of Artificial Sequence: Synthetic oligonucleotide
  Antisense strand to SEQ ID NO: 1530668
uuacauacauauauaaccc

SEQ ID NO: 1530670 - RNA, 19 nt, Artificial Sequence
  Description of Artificial Sequence: Synthetic oligonucleotide
  Sense strand starting at position 3053 of SEQ ID NO: 1245028
gcacgaauuaugcacguuu

SEQ ID NO: 1530671 - RNA, 19 nt, Artificial Sequence
  Description of Artificial Sequence: Synthetic oligonucleotide
  Antisense strand to SEQ ID NO: 1530670
aaacgugcauaauucgugc

SEQ ID NO: 1530672 - RNA, 19 nt, Artificial Sequence
  Description of Artificial Sequence: Synthetic oligonucleotide
  Sense strand starting at position 3167 of SEQ ID NO: 1245028
uugaaauacugagccaugu

SEQ ID NO: 1530673 - RNA, 19 nt, Artificial Sequence
  Description of Artificial Sequence: Synthetic oligonucleotide
  Antisense strand to SEQ ID NO: 1530672
acauggcucaguauuucaa

SEQ ID NO: 1530674 - RNA, 19 nt, Artificial Sequence
  Description of Artificial Sequence: Synthetic oligonucleotide
  Sense strand starting at position 3238 of SEQ ID NO: 1245028
ucuuaauaagagugcacua

SEQ ID NO: 1530675 - RNA, 19 nt, Artificial Sequence
  Description of Artificial Sequence: Synthetic oligonucleotide
  Antisense strand to SEQ ID NO: 1530674
uagugcacucuuauuaaga

SEQ ID NO: 1530676 - RNA, 19 nt, Artificial Sequence
  Description of Artificial Sequence: Synthetic oligonucleotide
  Sense strand starting at position 3240 of SEQ ID NO: 1245028
uuaauaagagugcacuaau

SEQ ID NO: 1530677 - RNA, 19 nt, Artificial Sequence
  Description of Artificial Sequence: Synthetic oligonucleotide
  Antisense strand to SEQ ID NO: 1530676
auuagugcacucuuauuaa

SEQ ID NO: 1530678 - RNA, 19 nt, Artificial Sequence
  Description of Artificial Sequence: Synthetic oligonucleotide
  Sense strand starting at position 3259 of SEQ ID NO: 1245028
agaaguuacucuuuggaau

SEQ ID NO: 1530679 - RNA, 19 nt, Artificial Sequence
  Description of Artificial Sequence: Synthetic oligonucleotide
  Antisense strand to SEQ ID NO: 1530678
auuccaaagaguaacuucu

SEQ ID NO: 1530680 - RNA, 19 nt, Artificial Sequence
  Description of Artificial Sequence: Synthetic oligonucleotide
  Sense strand starting at position 3260 of SEQ ID NO: 1245028
gaaguuacucuuuggaauu

SEQ ID NO: 1530681 - RNA, 19 nt, Artificial Sequence
  Description of Artificial Sequence: Synthetic oligonucleotide
  Antisense strand to SEQ ID NO: 1530680
aauuccaaagaguaacuuc

SEQ ID NO: 1530682 - RNA, 19 nt, Artificial Sequence
  Description of Artificial Sequence: Synthetic oligonucleotide
  Sense strand starting at position 3262 of SEQ ID NO: 1245028
aguuacucuuuggaauuua

SEQ ID NO: 1530683 - RNA, 19 nt, Artificial Sequence
  Description of Artificial Sequence: Synthetic oligonucleotide
  Antisense strand to SEQ ID NO: 1530682
uaaauuccaaagaguaacu

SEQ ID NO: 1530684 - RNA, 19 nt, Artificial Sequence
  Description of Artificial Sequence: Synthetic oligonucleotide
  Sense strand starting at position 3428 of SEQ ID NO: 1245028
acaauuaacuggcaugaug

SEQ ID NO: 1530685 - RNA, 19 nt, Artificial Sequence
  Description of Artificial Sequence: Synthetic oligonucleotide
  Antisense strand to SEQ ID NO: 1530684
caucaugccaguuaauugu

SEQ ID NO: 1530686 - RNA, 19 nt, Artificial Sequence
  Description of Artificial Sequence: Synthetic oligonucleotide
  Sense strand starting at position 220 of SEQ ID NO: 1245029
cguuauucuagggacagau

SEQ ID NO: 1530687 - RNA, 19 nt, Artificial Sequence
  Description of Artificial Sequence: Synthetic oligonucleotide
  Antisense strand to SEQ ID NO: 1530686
aucugucccuagaauaacg

SEQ ID NO: 1530688 - RNA, 19 nt, Artificial Sequence
  Description of Artificial Sequence: Synthetic oligonucleotide
  Sense strand starting at position 241 of SEQ ID NO: 1245029
ccugaaagcccugaucuca

SEQ ID NO: 1530689 - RNA, 19 nt, Artificial Sequence
  Description of Artificial Sequence: Synthetic oligonucleotide
  Antisense strand to SEQ ID NO: 1530688
ugagaucagggcuuucagg

SEQ ID NO: 1530690 - RNA, 19 nt, Artificial Sequence
  Description of Artificial Sequence: Synthetic oligonucleotide
  Sense strand starting at position 318 of SEQ ID NO: 1245029
cugagaaucugaccuuguc

SEQ ID NO: 1530691 - RNA, 19 nt, Artificial Sequence
  Description of Artificial Sequence: Synthetic oligonucleotide
  Antisense strand to SEQ ID NO: 1530690
gacaaggucagauucucag

SEQ ID NO: 1530692 - RNA, 19 nt, Artificial Sequence
  Description of Artificial Sequence: Synthetic oligonucleotide
  Sense strand starting at position 538 of SEQ ID NO: 1245029
uccgaaggucuagaguaau

SEQ ID NO: 1530693 - RNA, 19 nt, Artificial Sequence
  Description of Artificial Sequence: Synthetic oligonucleotide
  Antisense strand to SEQ ID NO: 1530692
auuacucuagaccuucgga

SEQ ID NO: 1530694 - RNA, 19 nt, Artificial Sequence
  Description of Artificial Sequence: Synthetic oligonucleotide
  Sense strand starting at position 541 of SEQ ID NO: 1245029
gaaggucuagaguaauggu

SEQ ID NO: 1530695 - RNA, 19 nt, Artificial Sequence
  Description of Artificial Sequence: Synthetic oligonucleotide
  Antisense strand to SEQ ID NO: 1530694
accauuacucuagaccuuc

SEQ ID NO: 1530696 - RNA, 19 nt, Artificial Sequence
  Description of Artificial Sequence: Synthetic oligonucleotide
  Sense strand starting at position 910 of SEQ ID NO: 1245029
uauacauaggaguguggaa

SEQ ID NO: 1530697 - RNA, 19 nt, Artificial Sequence
  Description of Artificial Sequence: Synthetic oligonucleotide
  Antisense strand to SEQ ID NO: 1530696
uuccacacuccuauguaua

SEQ ID NO: 1530698 - RNA, 19 nt, Artificial Sequence
  Description of Artificial Sequence: Synthetic oligonucleotide
  Sense strand starting at position 912 of SEQ ID NO: 1245029
uacauaggaguguggaaua

SEQ ID NO: 1530699 - RNA, 19 nt, Artificial Sequence
  Description of Artificial Sequence: Synthetic oligonucleotide
  Antisense strand to SEQ ID NO: 1530698
uauuccacacuccuaugua

SEQ ID NO: 1530700 - RNA, 19 nt, Artificial Sequence
  Description of Artificial Sequence: Synthetic oligonucleotide
  Sense strand starting at position 1035 of SEQ ID NO: 1245029
cuauuaguacaugacagua

SEQ ID NO: 1530701 - RNA, 19 nt, Artificial Sequence
  Description of Artificial Sequence: Synthetic oligonucleotide
  Antisense strand to SEQ ID NO: 1530700
uacugucauguacuaauag

SEQ ID NO: 1530702 - RNA, 19 nt, Artificial Sequence
  Description of Artificial Sequence: Synthetic oligonucleotide
  Sense strand starting at position 1083 of SEQ ID NO: 1245029
ugucauuaugcagaagaua

SEQ ID NO: 1530703 - RNA, 19 nt, Artificial Sequence
  Description of Artificial Sequence: Synthetic oligonucleotide
  Antisense strand to SEQ ID NO: 1530702
uaucuucugcauaaugaca

SEQ ID NO: 1530704 - RNA, 19 nt, Artificial Sequence
  Description of Artificial Sequence: Synthetic oligonucleotide
  Sense strand starting at position 1092 of SEQ ID NO: 1245029
gcagaagauaucuaggcca

SEQ ID NO: 1530705 - RNA, 19 nt, Artificial Sequence
  Description of Artificial Sequence: Synthetic oligonucleotide
  Antisense strand to SEQ ID NO: 1530704
uggccuagauaucuucugc

SEQ ID NO: 1530706 - RNA, 19 nt, Artificial Sequence
  Description of Artificial Sequence: Synthetic oligonucleotide
  Sense strand starting at position 1094 of SEQ ID NO: 1245029
agaagauaucuaggccacu

SEQ ID NO: 1530707 - RNA, 19 nt, Artificial Sequence
  Description of Artificial Sequence: Synthetic oligonucleotide
  Antisense strand to SEQ ID NO: 1530706
aguggccuagauaucuucu

SEQ ID NO: 1530708 - RNA, 19 nt, Artificial Sequence
  Description of Artificial Sequence: Synthetic oligonucleotide
  Sense strand starting at position 1097 of SEQ ID NO: 1245029
agauaucuaggccacuauu

SEQ ID NO: 1530709 - RNA, 19 nt, Artificial Sequence
  Description of Artificial Sequence: Synthetic oligonucleotide
  Antisense strand to SEQ ID NO: 1530708
aauaguggccuagauaucu

SEQ ID NO: 1530710 - RNA, 19 nt, Artificial Sequence
  Description of Artificial Sequence: Synthetic oligonucleotide
  Sense strand starting at position 1185 of SEQ ID NO: 1245029
ggagaaacuuuacuuguuu

SEQ ID NO: 1530711 - RNA, 19 nt, Artificial Sequence
  Description of Artificial Sequence: Synthetic oligonucleotide
  Antisense strand to SEQ ID NO: 1530710
aaacaaguaaaguuucucc

SEQ ID NO: 1530712 - RNA, 19 nt, Artificial Sequence
  Description of Artificial Sequence: Synthetic oligonucleotide
  Sense strand starting at position 1326 of SEQ ID NO: 1245029
gggagugacaagugauuaa

SEQ ID NO: 1530713 - RNA, 19 nt, Artificial Sequence
  Description of Artificial Sequence: Synthetic oligonucleotide
  Antisense strand to SEQ ID NO: 1530712
uuaaucacuugucacuccc

SEQ ID NO: 1530714 - RNA, 19 nt, Artificial Sequence
  Description of Artificial Sequence: Synthetic oligonucleotide
  Sense strand starting at position 2037 of SEQ ID NO: 1245029
gaacuacagugcccagaau

SEQ ID NO: 1530715 - RNA, 19 nt, Artificial Sequence
  Description of Artificial Sequence: Synthetic oligonucleotide
  Antisense strand to SEQ ID NO: 1530714
auucugggcacuguaguuc

SEQ ID NO: 1530716 - RNA, 19 nt, Artificial Sequence
  Description of Artificial Sequence: Synthetic oligonucleotide
  Sense strand starting at position 2137 of SEQ ID NO: 1245029
ggauacacuucuguugaga

SEQ ID NO: 1530717 - RNA, 19 nt, Artificial Sequence
  Description of Artificial Sequence: Synthetic oligonucleotide
  Antisense strand to SEQ ID NO: 1530716
ucucaacagaaguguaucc

SEQ ID NO: 1530718 - RNA, 19 nt, Artificial Sequence
  Description of Artificial Sequence: Synthetic oligonucleotide
  Sense strand starting at position 2240 of SEQ ID NO: 1245029
aagaaagccgucgagagaa

SEQ ID NO: 1530719 - RNA, 19 nt, Artificial Sequence
  Description of Artificial Sequence: Synthetic oligonucleotide
  Antisense strand to SEQ ID NO: 1530718
uucucucgacggcuuucuu

SEQ ID NO: 1530720 - RNA, 19 nt, Artificial Sequence
  Description of Artificial Sequence: Synthetic oligonucleotide
  Sense strand starting at position 2286 of SEQ ID NO: 1245029
ugaacaagugcuuggaaac

SEQ ID NO: 1530721 - RNA, 19 nt, Artificial Sequence
  Description of Artificial Sequence: Synthetic oligonucleotide
  Antisense strand to SEQ ID NO: 1530720
guuuccaagcacuuguuca

SEQ ID NO: 1530722 - RNA, 19 nt, Artificial Sequence
  Description of Artificial Sequence: Synthetic oligonucleotide
  Sense strand starting at position 2287 of SEQ ID NO: 1245029
gaacaagugcuuggaaaca

SEQ ID NO: 1530723 - RNA, 19 nt, Artificial Sequence
  Description of Artificial Sequence: Synthetic oligonucleotide
  Antisense strand to SEQ ID NO: 1530722
uguuuccaagcacuuguuc

SEQ ID NO: 1530724 - RNA, 19 nt, Artificial Sequence
  Description of Artificial Sequence: Synthetic oligonucleotide
  Sense strand starting at position 2330 of SEQ ID NO: 1245029
ugacaauucccucagaguu

SEQ ID NO: 1530725 - RNA, 19 nt, Artificial Sequence
  Description of Artificial Sequence: Synthetic oligonucleotide
  Antisense strand to SEQ ID NO: 1530724
aacucugagggaauuguca

SEQ ID NO: 1530726 - RNA, 19 nt, Artificial Sequence
  Description of Artificial Sequence: Synthetic oligonucleotide
  Sense strand starting at position 2336 of SEQ ID NO: 1245029
uucccucagaguuggaaga

SEQ ID NO: 1530727 - RNA, 19 nt, Artificial Sequence
  Description of Artificial Sequence: Synthetic oligonucleotide
  Antisense strand to SEQ ID NO: 1530726
ucuuccaacucugagggaa

SEQ ID NO: 1530728 - RNA, 19 nt, Artificial Sequence
  Description of Artificial Sequence: Synthetic oligonucleotide
  Sense strand starting at position 2386 of SEQ ID NO: 1245029
guagaauggauaugaaugu

SEQ ID NO: 1530729 - RNA, 19 nt, Artificial Sequence
  Description of Artificial Sequence: Synthetic oligonucleotide
  Antisense strand to SEQ ID NO: 1530728
acauucauauccauucuac

SEQ ID NO: 1530730 - RNA, 19 nt, Artificial Sequence
  Description of Artificial Sequence: Synthetic oligonucleotide
  Sense strand starting at position 2470 of SEQ ID NO: 1245029
gacaaauagcuguagaagu

SEQ ID NO: 1530731 - RNA, 19 nt, Artificial Sequence
  Description of Artificial Sequence: Synthetic oligonucleotide
  Antisense strand to SEQ ID NO: 1530730
acuucuacagcuauuuguc

SEQ ID NO: 1530732 - RNA, 19 nt, Artificial Sequence
  Description of Artificial Sequence: Synthetic oligonucleotide
  Sense strand starting at position 2483 of SEQ ID NO: 1245029
agaaguucuccucaaugca

SEQ ID NO: 1530733 - RNA, 19 nt, Artificial Sequence
  Description of Artificial Sequence: Synthetic oligonucleotide
  Antisense strand to SEQ ID NO: 1530732
ugcauugaggagaacuucu

SEQ ID NO: 1530734 - RNA, 19 nt, Artificial Sequence
  Description of Artificial Sequence: Synthetic oligonucleotide
  Sense strand starting at position 2585 of SEQ ID NO: 1245029
guccaagagcuauauuaag

SEQ ID NO: 1530735 - RNA, 19 nt, Artificial Sequence
  Description of Artificial Sequence: Synthetic oligonucleotide
  Antisense strand to SEQ ID NO: 1530734
cuuaauauagcucuuggac

SEQ ID NO: 1530736 - RNA, 19 nt, Artificial Sequence
  Description of Artificial Sequence: Synthetic oligonucleotide
  Sense strand starting at position 2652 of SEQ ID NO: 1245029
acuacaucucauggaguuu

SEQ ID NO: 1530737 - RNA, 19 nt, Artificial Sequence
  Description of Artificial Sequence: Synthetic oligonucleotide
  Antisense strand to SEQ ID NO: 1530736
aaacuccaugagauguagu

SEQ ID NO: 1530738 - RNA, 19 nt, Artificial Sequence
  Description of Artificial Sequence: Synthetic oligonucleotide
  Sense strand starting at position 2663 of SEQ ID NO: 1245029
uggaguuuaucacucagag

SEQ ID NO: 1530739 - RNA, 19 nt, Artificial Sequence
  Description of Artificial Sequence: Synthetic oligonucleotide
  Antisense strand to SEQ ID NO: 1530738
cucugagugauaaacucca

SEQ ID NO: 1530740 - RNA, 19 nt, Artificial Sequence
  Description of Artificial Sequence: Synthetic oligonucleotide
  Sense strand starting at position 2809 of SEQ ID NO: 1245029
gagaguggcauugaagagu

SEQ ID NO: 1530741 - RNA, 19 nt, Artificial Sequence
  Description of Artificial Sequence: Synthetic oligonucleotide
  Antisense strand to SEQ ID NO: 1530740
acucuucaaugccacucuc

SEQ ID NO: 1530742 - RNA, 19 nt, Artificial Sequence
  Description of Artificial Sequence: Synthetic oligonucleotide
  Sense strand starting at position 2812 of SEQ ID NO: 1245029
aguggcauugaagaguaau

SEQ ID NO: 1530743 - RNA, 19 nt, Artificial Sequence
  Description of Artificial Sequence: Synthetic oligonucleotide
  Antisense strand to SEQ ID NO: 1530742
auuacucuucaaugccacu

SEQ ID NO: 1530744 - RNA, 19 nt, Artificial Sequence
  Description of Artificial Sequence: Synthetic oligonucleotide
  Sense strand starting at position 3283 of SEQ ID NO: 1245029
gguagauuauuacuucuac

SEQ ID NO: 1530745 - RNA, 19 nt, Artificial Sequence
  Description of Artificial Sequence: Synthetic oligonucleotide
  Antisense strand to SEQ ID NO: 1530744
guagaaguaauaaucuacc

SEQ ID NO: 1530746 - RNA, 19 nt, Artificial Sequence
  Description of Artificial Sequence: Synthetic oligonucleotide
  Sense strand starting at position 3284 of SEQ ID NO: 1245029
guagauuauuacuucuaca

SEQ ID NO: 1530747 - RNA, 19 nt, Artificial Sequence
  Description of Artificial Sequence: Synthetic oligonucleotide
  Antisense strand to SEQ ID NO: 1530746
uguagaaguaauaaucuac

SEQ ID NO: 1530748 - RNA, 19 nt, Artificial Sequence
  Description of Artificial Sequence: Synthetic oligonucleotide
  Sense strand starting at position 3466 of SEQ ID NO: 1245029
cucuucugugaaggaagaa

SEQ ID NO: 1530749 - RNA, 19 nt, Artificial Sequence
  Description of Artificial Sequence: Synthetic oligonucleotide
  Antisense strand to SEQ ID NO: 1530748
uucuuccuucacagaagag

SEQ ID NO: 1530750 - RNA, 19 nt, Artificial Sequence
  Description of Artificial Sequence: Synthetic oligonucleotide
  Sense strand starting at position 3658 of SEQ ID NO: 1245029
augaauccuugcuuagaau

SEQ ID NO: 1530751 - RNA, 19 nt, Artificial Sequence
  Description of Artificial Sequence: Synthetic oligonucleotide
  Antisense strand to SEQ ID NO: 1530750
auucuaagcaaggauucau

SEQ ID NO: 1530752 - RNA, 19 nt, Artificial Sequence
  Description of Artificial Sequence: Synthetic oligonucleotide
  Sense strand starting at position 3659 of SEQ ID NO: 1245029
ugaauccuugcuuagaauu

SEQ ID NO: 1530753 - RNA, 19 nt, Artificial Sequence
  Description of Artificial Sequence: Synthetic oligonucleotide
  Antisense strand to SEQ ID NO: 1530752
aauucuaagcaaggauuca

SEQ ID NO: 1530754 - RNA, 19 nt, Artificial Sequence
  Description of Artificial Sequence: Synthetic oligonucleotide
  Sense strand starting at position 3681 of SEQ ID NO: 1245029
aaauguccucuugggaauu

SEQ ID NO: 1530755 - RNA, 19 nt, Artificial Sequence
  Description of Artificial Sequence: Synthetic oligonucleotide
  Antisense strand to SEQ ID NO: 1530754
aauucccaagaggacauuu

SEQ ID NO: 1530756 - RNA, 19 nt, Artificial Sequence
  Description of Artificial Sequence: Synthetic oligonucleotide
  Sense strand starting at position 3822 of SEQ ID NO: 1245029
uguguuauggaauacuuag

SEQ ID NO: 1530757 - RNA, 19 nt, Artificial Sequence
  Description of Artificial Sequence: Synthetic oligonucleotide
  Antisense strand to SEQ ID NO: 1530756
cuaaguauuccauaacaca

SEQ ID NO: 1530758 - RNA, 19 nt, Artificial Sequence
  Description of Artificial Sequence: Synthetic oligonucleotide
  Sense strand starting at position 3859 of SEQ ID NO: 1245029
gaugacuucgucugggaag

SEQ ID NO: 1530759 - RNA, 19 nt, Artificial Sequence
  Description of Artificial Sequence: Synthetic oligonucleotide
  Antisense strand to SEQ ID NO: 1530758
cuucccagacgaagucauc

SEQ ID NO: 1530760 - RNA, 19 nt, Artificial Sequence
  Description of Artificial Sequence: Synthetic oligonucleotide
  Sense strand starting at position 3861 of SEQ ID NO: 1245029
ugacuucgucugggaagag

SEQ ID NO: 1530761 - RNA, 19 nt, Artificial Sequence
  Description of Artificial Sequence: Synthetic oligonucleotide
  Antisense strand to SEQ ID NO: 1530760
cucuucccagacgaaguca

SEQ ID NO: 1530762 - RNA, 19 nt, Artificial Sequence
  Description of Artificial Sequence: Synthetic oligonucleotide
  Sense strand starting at position 3917 of SEQ ID NO: 1245029
gggugugauauugggaaac

SEQ ID NO: 1530763 - RNA, 19 nt, Artificial Sequence
  Description of Artificial Sequence: Synthetic oligonucleotide
  Antisense strand to SEQ ID NO: 1530762
guuucccaauaucacaccc

SEQ ID NO: 1530764 - RNA, 19 nt, Artificial Sequence
  Description of Artificial Sequence: Synthetic oligonucleotide
  Sense strand starting at position 3947 of SEQ ID NO: 1245029
ggucucucuggguaagaag

SEQ ID NO: 1530765 - RNA, 19 nt, Artificial Sequence
  Description of Artificial Sequence: Synthetic oligonucleotide
  Antisense strand to SEQ ID NO: 1530764
cuucuuacccagagagacc

SEQ ID NO: 1530766 - RNA, 19 nt, Artificial Sequence
  Description of Artificial Sequence: Synthetic oligonucleotide
  Sense strand starting at position 75 of SEQ ID NO: 1245030
agguuacaugcauaagcua

SEQ ID NO: 1530767 - RNA, 19 nt, Artificial Sequence
  Description of Artificial Sequence: Synthetic oligonucleotide
  Antisense strand to SEQ ID NO: 1530766
uagcuuaugcauguaaccu

SEQ ID NO: 1530768 - RNA, 19 nt, Artificial Sequence
  Description of Artificial Sequence: Synthetic oligonucleotide
  Sense strand starting at position 102 of SEQ ID NO: 1245030
uuuauugcucagggccaga

SEQ ID NO: 1530769 - RNA, 19 nt, Artificial Sequence
  Description of Artificial Sequence: Synthetic oligonucleotide
  Antisense strand to SEQ ID NO: 1530768
ucuggcccugagcaauaaa

SEQ ID NO: 1530770 - RNA, 19 nt, Artificial Sequence
  Description of Artificial Sequence: Synthetic oligonucleotide
  Sense strand starting at position 391 of SEQ ID NO: 1245030
gguauuaccuaucugaaua

SEQ ID NO: 1530771 - RNA, 19 nt, Artificial Sequence
  Description of Artificial Sequence: Synthetic oligonucleotide
  Antisense strand to SEQ ID NO: 1530770
uauucagauagguaauacc

SEQ ID NO: 1530772 - RNA, 19 nt, Artificial Sequence
  Description of Artificial Sequence: Synthetic oligonucleotide
  Sense strand starting at position 412 of SEQ ID NO: 1245030
gugcacgguccugauauaa

SEQ ID NO: 1530773 - RNA, 19 nt, Artificial Sequence
  Description of Artificial Sequence: Synthetic oligonucleotide
  Antisense strand to SEQ ID NO: 1530772
uuauaucaggaccgugcac

SEQ ID NO: 1530774 - RNA, 19 nt, Artificial Sequence
  Description of Artificial Sequence: Synthetic oligonucleotide
  Sense strand starting at position 454 of SEQ ID NO: 1245030
ugacaaucacagugucaag

SEQ ID NO: 1530775 - RNA, 19 nt, Artificial Sequence
  Description of Artificial Sequence: Synthetic oligonucleotide
  Antisense strand to SEQ ID NO: 1530774
cuugacacugugauuguca

SEQ ID NO: 1530776 - RNA, 19 nt, Artificial Sequence
  Description of Artificial Sequence: Synthetic oligonucleotide
  Sense strand starting at position 566 of SEQ ID NO: 1245030
acacacauguugucaacaa

SEQ ID NO: 1530777 - RNA, 19 nt, Artificial Sequence
  Description of Artificial Sequence: Synthetic oligonucleotide
  Antisense strand to SEQ ID NO: 1530776
uuguugacaacaugugugu

SEQ ID NO: 1530778 - RNA, 19 nt, Artificial Sequence
  Description of Artificial Sequence: Synthetic oligonucleotide
  Sense strand starting at position 570 of SEQ ID NO: 1245030
acauguugucaacaaagca

SEQ ID NO: 1530779 - RNA, 19 nt, Artificial Sequence
  Description of Artificial Sequence: Synthetic oligonucleotide
  Antisense strand to SEQ ID NO: 1530778
ugcuuuguugacaacaugu

SEQ ID NO: 1530780 - RNA, 19 nt, Artificial Sequence
  Description of Artificial Sequence: Synthetic oligonucleotide
  Sense strand starting at position 683 of SEQ ID NO: 1245030
uuaugccuugaucauagau

SEQ ID NO: 1530781 - RNA, 19 nt, Artificial Sequence
  Description of Artificial Sequence: Synthetic oligonucleotide
  Antisense strand to SEQ ID NO: 1530780
aucuaugaucaaggcauaa

SEQ ID NO: 1530782 - RNA, 19 nt, Artificial Sequence
  Description of Artificial Sequence: Synthetic oligonucleotide
  Sense strand starting at position 795 of SEQ ID NO: 1245030
ggagaugcauguaagggau

SEQ ID NO: 1530783 - RNA, 19 nt, Artificial Sequence
  Description of Artificial Sequence: Synthetic oligonucleotide
  Antisense strand to SEQ ID NO: 1530782
aucccuuacaugcaucucc

SEQ ID NO: 1530784 - RNA, 19 nt, Artificial Sequence
  Description of Artificial Sequence: Synthetic oligonucleotide
  Sense strand starting at position 820 of SEQ ID NO: 1245030
ugauaaugaugcuugaaca

SEQ ID NO: 1530785 - RNA, 19 nt, Artificial Sequence
  Description of Artificial Sequence: Synthetic oligonucleotide
  Antisense strand to SEQ ID NO: 1530784
uguucaagcaucauuauca

SEQ ID NO: 1530786 - RNA, 19 nt, Artificial Sequence
  Description of Artificial Sequence: Synthetic oligonucleotide
  Sense strand starting at position 927 of SEQ ID NO: 1245030
acauuccuuugauuggcaa

SEQ ID NO: 1530787 - RNA, 19 nt, Artificial Sequence
  Description of Artificial Sequence: Synthetic oligonucleotide
  Antisense strand to SEQ ID NO: 1530786
uugccaaucaaaggaaugu

SEQ ID NO: 1530788 - RNA, 19 nt, Artificial Sequence
  Description of Artificial Sequence: Synthetic oligonucleotide
  Sense strand starting at position 947 of SEQ ID NO: 1245030
agccauuucugacaaugga

SEQ ID NO: 1530789 - RNA, 19 nt, Artificial Sequence
  Description of Artificial Sequence: Synthetic oligonucleotide
  Antisense strand to SEQ ID NO: 1530788
uccauugucagaaauggcu

SEQ ID NO: 1530790 - RNA, 19 nt, Artificial Sequence
  Description of Artificial Sequence: Synthetic oligonucleotide
  Sense strand starting at position 1044 of SEQ ID NO: 1245030
ucuaguugugaucaaagcu

SEQ ID NO: 1530791 - RNA, 19 nt, Artificial Sequence
  Description of Artificial Sequence: Synthetic oligonucleotide
  Antisense strand to SEQ ID NO: 1530790
agcuuugaucacaacuaga

SEQ ID NO: 1530792 - RNA, 19 nt, Artificial Sequence
  Description of Artificial Sequence: Synthetic oligonucleotide
  Sense strand starting at position 1126 of SEQ ID NO: 1245030
ucauuucuauuggagacau

SEQ ID NO: 1530793 - RNA, 19 nt, Artificial Sequence
  Description of Artificial Sequence: Synthetic oligonucleotide
  Antisense strand to SEQ ID NO: 1530792
augucuccaauagaaauga

SEQ ID NO: 1530794 - RNA, 19 nt, Artificial Sequence
  Description of Artificial Sequence: Synthetic oligonucleotide
  Sense strand starting at position 1137 of SEQ ID NO: 1245030
ggagacaucccucgacaau

SEQ ID NO: 1530795 - RNA, 19 nt, Artificial Sequence
  Description of Artificial Sequence: Synthetic oligonucleotide
  Antisense strand to SEQ ID NO: 1530794
auugucgagggaugucucc

SEQ ID NO: 1530796 - RNA, 19 nt, Artificial Sequence
  Description of Artificial Sequence: Synthetic oligonucleotide
  Sense strand starting at position 1155 of SEQ ID NO: 1245030
ugaacauguuacguggaga

SEQ ID NO: 1530797 - RNA, 19 nt, Artificial Sequence
  Description of Artificial Sequence: Synthetic oligonucleotide
  Antisense strand to SEQ ID NO: 1530796
ucuccacguaacauguuca

SEQ ID NO: 1530798 - RNA, 19 nt, Artificial Sequence
  Description of Artificial Sequence: Synthetic oligonucleotide
  Sense strand starting at position 1156 of SEQ ID NO: 1245030
gaacauguuacguggagau

SEQ ID NO: 1530799 - RNA, 19 nt, Artificial Sequence
  Description of Artificial Sequence: Synthetic oligonucleotide
  Antisense strand to SEQ ID NO: 1530798
aucuccacguaacauguuc

SEQ ID NO: 1530800 - RNA, 19 nt, Artificial Sequence
  Description of Artificial Sequence: Synthetic oligonucleotide
  Sense strand starting at position 1158 of SEQ ID NO: 1245030
acauguuacguggagaugu

SEQ ID NO: 1530801 - RNA, 19 nt, Artificial Sequence
  Description of Artificial Sequence: Synthetic oligonucleotide
  Antisense strand to SEQ ID NO: 1530800
acaucuccacguaacaugu

SEQ ID NO: 1530802 - RNA, 19 nt, Artificial Sequence
  Description of Artificial Sequence: Synthetic oligonucleotide
  Sense strand starting at position 1160 of SEQ ID NO: 1245030
auguuacguggagauguaa

SEQ ID NO: 1530803 - RNA, 19 nt, Artificial Sequence
  Description of Artificial Sequence: Synthetic oligonucleotide
  Antisense strand to SEQ ID NO: 1530802
uuacaucuccacguaacau

SEQ ID NO: 1530804 - RNA, 19 nt, Artificial Sequence
  Description of Artificial Sequence: Synthetic oligonucleotide
  Sense strand starting at position 1199 of SEQ ID NO: 1245030
gugucucggaucuaagaau

SEQ ID NO: 1530805 - RNA, 19 nt, Artificial Sequence
  Description of Artificial Sequence: Synthetic oligonucleotide
  Antisense strand to SEQ ID NO: 1530804
auucuuagauccgagacac

SEQ ID NO: 1530806 - RNA, 19 nt, Artificial Sequence
  Description of Artificial Sequence: Synthetic oligonucleotide
  Sense strand starting at position 2581 of SEQ ID NO: 1245030
gugggucgacgugagauuu

SEQ ID NO: 1530807 - RNA, 19 nt, Artificial Sequence
  Description of Artificial Sequence: Synthetic oligonucleotide
  Antisense strand to SEQ ID NO: 1530806
aaaucucacgucgacccac

SEQ ID NO: 1530808 - RNA, 19 nt, Artificial Sequence
  Description of Artificial Sequence: Synthetic oligonucleotide
  Sense strand starting at position 2589 of SEQ ID NO: 1245030
acgugagauuuggaaguaa

SEQ ID NO: 1530809 - RNA, 19 nt, Artificial Sequence
  Description of Artificial Sequence: Synthetic oligonucleotide
  Antisense strand to SEQ ID NO: 1530808
uuacuuccaaaucucacgu

SEQ ID NO: 1530810 - RNA, 19 nt, Artificial Sequence
  Description of Artificial Sequence: Synthetic oligonucleotide
  Sense strand starting at position 2729 of SEQ ID NO: 1245030
uaugaaugggaccgcuaaa

SEQ ID NO: 1530811 - RNA, 19 nt, Artificial Sequence
  Description of Artificial Sequence: Synthetic oligonucleotide
  Antisense strand to SEQ ID NO: 1530810
uuuagcggucccauucaua

SEQ ID NO: 1530812 - RNA, 19 nt, Artificial Sequence
  Description of Artificial Sequence: Synthetic oligonucleotide
  Sense strand starting at position 2766 of SEQ ID NO: 1245030
uugccagggugcucagaaa

SEQ ID NO: 1530813 - RNA, 19 nt, Artificial Sequence
  Description of Artificial Sequence: Synthetic oligonucleotide
  Antisense strand to SEQ ID NO: 1530812
uuucugagcacccuggcaa

SEQ ID NO: 1530814 - RNA, 19 nt, Artificial Sequence
  Description of Artificial Sequence: Synthetic oligonucleotide
  Sense strand starting at position 2839 of SEQ ID NO: 1245030
guguuugagaccuacagca

SEQ ID NO: 1530815 - RNA, 19 nt, Artificial Sequence
  Description of Artificial Sequence: Synthetic oligonucleotide
  Antisense strand to SEQ ID NO: 1530814
ugcuguaggucucaaacac

SEQ ID NO: 1530816 - RNA, 19 nt, Artificial Sequence
  Description of Artificial Sequence: Synthetic oligonucleotide
  Sense strand starting at position 2866 of SEQ ID NO: 1245030
aaaggaagccuccauugua

SEQ ID NO: 1530817 - RNA, 19 nt, Artificial Sequence
  Description of Artificial Sequence: Synthetic oligonucleotide
  Antisense strand to SEQ ID NO: 1530816
uacaauggaggcuuccuuu

SEQ ID NO: 1530818 - RNA, 19 nt, Artificial Sequence
  Description of Artificial Sequence: Synthetic oligonucleotide
  Sense strand starting at position 2869 of SEQ ID NO: 1245030
ggaagccuccauuguauua

SEQ ID NO: 1530819 - RNA, 19 nt, Artificial Sequence
  Description of Artificial Sequence: Synthetic oligonucleotide
  Antisense strand to SEQ ID NO: 1530818
uaauacaauggaggcuucc

SEQ ID NO: 1530820 - RNA, 19 nt, Artificial Sequence
  Description of Artificial Sequence: Synthetic oligonucleotide
  Sense strand starting at position 2917 of SEQ ID NO: 1245030
uuaauauacucagugguac

SEQ ID NO: 1530821 - RNA, 19 nt, Artificial Sequence
  Description of Artificial Sequence: Synthetic oligonucleotide
  Antisense strand to SEQ ID NO: 1530820
guaccacugaguauauuaa

SEQ ID NO: 1530822 - RNA, 19 nt, Artificial Sequence
  Description of Artificial Sequence: Synthetic oligonucleotide
  Sense strand starting at position 2929 of SEQ ID NO: 1245030
gugguacuauuaguuaaca

SEQ ID NO: 1530823 - RNA, 19 nt, Artificial Sequence
  Description of Artificial Sequence: Synthetic oligonucleotide
  Antisense strand to SEQ ID NO: 1530822
uguuaacuaauaguaccac

SEQ ID NO: 1530824 - RNA, 19 nt, Artificial Sequence
  Description of Artificial Sequence: Synthetic oligonucleotide
  Sense strand starting at position 2930 of SEQ ID NO: 1245030
ugguacuauuaguuaacaa

SEQ ID NO: 1530825 - RNA, 19 nt, Artificial Sequence
  Description of Artificial Sequence: Synthetic oligonucleotide
  Antisense strand to SEQ ID NO: 1530824
uuguuaacuaauaguacca

SEQ ID NO: 1530826 - RNA, 19 nt, Artificial Sequence
  Description of Artificial Sequence: Synthetic oligonucleotide
  Sense strand starting at position 2949 of SEQ ID NO: 1245030
gguagcauuuauccgaguu

SEQ ID NO: 1530827 - RNA, 19 nt, Artificial Sequence
  Description of Artificial Sequence: Synthetic oligonucleotide
  Antisense strand to SEQ ID NO: 1530826
aacucggauaaaugcuacc

SEQ ID NO: 1530828 - RNA, 19 nt, Artificial Sequence
  Description of Artificial Sequence: Synthetic oligonucleotide
  Sense strand starting at position 2950 of SEQ ID NO: 1245030
guagcauuuauccgaguuc

SEQ ID NO: 1530829 - RNA, 19 nt, Artificial Sequence
  Description of Artificial Sequence: Synthetic oligonucleotide
  Antisense strand to SEQ ID NO: 1530828
gaacucggauaaaugcuac

SEQ ID NO: 1530830 - RNA, 19 nt, Artificial Sequence
  Description of Artificial Sequence: Synthetic oligonucleotide
  Sense strand starting at position 2973 of SEQ ID NO: 1245030
acaagagaguguccauaau

SEQ ID NO: 1530831 - RNA, 19 nt, Artificial Sequence
  Description of Artificial Sequence: Synthetic oligonucleotide
  Antisense strand to SEQ ID NO: 1530830
auuauggacacucucuugu

SEQ ID NO: 1530832 - RNA, 19 nt, Artificial Sequence
  Description of Artificial Sequence: Synthetic oligonucleotide
  Sense strand starting at position 2979 of SEQ ID NO: 1245030
gaguguccauaauugaaag

SEQ ID NO: 1530833 - RNA, 19 nt, Artificial Sequence
  Description of Artificial Sequence: Synthetic oligonucleotide
  Antisense strand to SEQ ID NO: 1530832
cuuucaauuauggacacuc

SEQ ID NO: 1530834 - RNA, 19 nt, Artificial Sequence
  Description of Artificial Sequence: Synthetic oligonucleotide
  Sense strand starting at position 2989 of SEQ ID NO: 1245030
aauugaaaguguuuagggu

SEQ ID NO: 1530835 - RNA, 19 nt, Artificial Sequence
  Description of Artificial Sequence: Synthetic oligonucleotide
  Antisense strand to SEQ ID NO: 1530834
acccuaaacacuuucaauu

SEQ ID NO: 1530836 - RNA, 19 nt, Artificial Sequence
  Description of Artificial Sequence: Synthetic oligonucleotide
  Sense strand starting at position 2990 of SEQ ID NO: 1245030
auugaaaguguuuagggua

SEQ ID NO: 1530837 - RNA, 19 nt, Artificial Sequence
  Description of Artificial Sequence: Synthetic oligonucleotide
  Antisense strand to SEQ ID NO: 1530836
uacccuaaacacuuucaau

SEQ ID NO: 1530838 - RNA, 19 nt, Artificial Sequence
  Description of Artificial Sequence: Synthetic oligonucleotide
  Sense strand starting at position 3112 of SEQ ID NO: 1245030
cccugaaguuguccaaauc

SEQ ID NO: 1530839 - RNA, 19 nt, Artificial Sequence
  Description of Artificial Sequence: Synthetic oligonucleotide
  Antisense strand to SEQ ID NO: 1530838
gauuuggacaacuucaggg

SEQ ID NO: 1530840 - RNA, 19 nt, Artificial Sequence
  Description of Artificial Sequence: Synthetic oligonucleotide
  Sense strand starting at position 3380 of SEQ ID NO: 1245030
cugccucaccuggauaauu

SEQ ID NO: 1530841 - RNA, 19 nt, Artificial Sequence
  Description of Artificial Sequence: Synthetic oligonucleotide
  Antisense strand to SEQ ID NO: 1530840
aauuauccaggugaggcag

SEQ ID NO: 1530842 - RNA, 19 nt, Artificial Sequence
  Description of Artificial Sequence: Synthetic oligonucleotide
  Sense strand starting at position 3516 of SEQ ID NO: 1245030
acuguaccuggcugacauu

SEQ ID NO: 1530843 - RNA, 19 nt, Artificial Sequence
  Description of Artificial Sequence: Synthetic oligonucleotide
  Antisense strand to SEQ ID NO: 1530842
aaugucagccagguacagu

SEQ ID NO: 1530844 - RNA, 19 nt, Artificial Sequence
  Description of Artificial Sequence: Synthetic oligonucleotide
  Sense strand starting at position 3660 of SEQ ID NO: 1245030
agaguuuauuaggucauga

SEQ ID NO: 1530845 - RNA, 19 nt, Artificial Sequence
  Description of Artificial Sequence: Synthetic oligonucleotide
  Antisense strand to SEQ ID NO: 1530844
ucaugaccuaauaaacucu

SEQ ID NO: 1530846 - RNA, 19 nt, Artificial Sequence
  Description of Artificial Sequence: Synthetic oligonucleotide
  Sense strand starting at position 32 of SEQ ID NO: 1245031
gguauuaccuaucugaaua

SEQ ID NO: 1530847 - RNA, 19 nt, Artificial Sequence
  Description of Artificial Sequence: Synthetic oligonucleotide
  Antisense strand to SEQ ID NO: 1530846
uauucagauagguaauacc

SEQ ID NO: 1530848 - RNA, 19 nt, Artificial Sequence
  Description of Artificial Sequence: Synthetic oligonucleotide
  Sense strand starting at position 53 of SEQ ID NO: 1245031
gugcacgguccugauauaa

SEQ ID NO: 1530849 - RNA, 19 nt, Artificial Sequence
  Description of Artificial Sequence: Synthetic oligonucleotide
  Antisense strand to SEQ ID NO: 1530848
uuauaucaggaccgugcac

SEQ ID NO: 1530850 - RNA, 19 nt, Artificial Sequence
  Description of Artificial Sequence: Synthetic oligonucleotide
  Sense strand starting at position 95 of SEQ ID NO: 1245031
ugacaaucacagugucaag

SEQ ID NO: 1530851 - RNA, 19 nt, Artificial Sequence
  Description of Artificial Sequence: Synthetic oligonucleotide
  Antisense strand to SEQ ID NO: 1530850
cuugacacugugauuguca

SEQ ID NO: 1530852 - RNA, 19 nt, Artificial Sequence
  Description of Artificial Sequence: Synthetic oligonucleotide
  Sense strand starting at position 207 of SEQ ID NO: 1245031
acacacauguugucaacaa

SEQ ID NO: 1530853 - RNA, 19 nt, Artificial Sequence
  Description of Artificial Sequence: Synthetic oligonucleotide
  Antisense strand to SEQ ID NO: 1530852
uuguugacaacaugugugu

SEQ ID NO: 1530854 - RNA, 19 nt, Artificial Sequence
  Description of Artificial Sequence: Synthetic oligonucleotide
  Sense strand starting at position 211 of SEQ ID NO: 1245031
acauguugucaacaaagca

SEQ ID NO: 1530855 - RNA, 19 nt, Artificial Sequence
  Description of Artificial Sequence: Synthetic oligonucleotide
  Antisense strand to SEQ ID NO: 1530854
ugcuuuguugacaacaugu

SEQ ID NO: 1530856 - RNA, 19 nt, Artificial Sequence
  Description of Artificial Sequence: Synthetic oligonucleotide
  Sense strand starting at position 324 of SEQ ID NO: 1245031
uuaugccuugaucauagau

SEQ ID NO: 1530857 - RNA, 19 nt, Artificial Sequence
  Description of Artificial Sequence: Synthetic oligonucleotide
  Antisense strand to SEQ ID NO: 1530856
aucuaugaucaaggcauaa

SEQ ID NO: 1530858 - RNA, 19 nt, Artificial Sequence
  Description of Artificial Sequence: Synthetic oligonucleotide
  Sense strand starting at position 436 of SEQ ID NO: 1245031
ggagaugcauguaagggau

SEQ ID NO: 1530859 - RNA, 19 nt, Artificial Sequence
  Description of Artificial Sequence: Synthetic oligonucleotide
  Antisense strand to SEQ ID NO: 1530858
aucccuuacaugcaucucc

SEQ ID NO: 1530860 - RNA, 19 nt, Artificial Sequence
  Description of Artificial Sequence: Synthetic oligonucleotide
  Sense strand starting at position 450 of SEQ ID NO: 1245031
gggauacacuaugauaaug

SEQ ID NO: 1530861 - RNA, 19 nt, Artificial Sequence
  Description of Artificial Sequence: Synthetic oligonucleotide
  Antisense strand to SEQ ID NO: 1530860
cauuaucauaguguauccc

SEQ ID NO: 1530862 - RNA, 19 nt, Artificial Sequence
  Description of Artificial Sequence: Synthetic oligonucleotide
  Sense strand starting at position 461 of SEQ ID NO: 1245031
ugauaaugaugcuugaaca

SEQ ID NO: 1530863 - RNA, 19 nt, Artificial Sequence
  Description of Artificial Sequence: Synthetic oligonucleotide
  Antisense strand to SEQ ID NO: 1530862
uguucaagcaucauuauca

SEQ ID NO: 1530864 - RNA, 19 nt, Artificial Sequence
  Description of Artificial Sequence: Synthetic oligonucleotide
  Sense strand starting at position 568 of SEQ ID NO: 1245031
acauuccuuugauuggcaa

SEQ ID NO: 1530865 - RNA, 19 nt, Artificial Sequence
  Description of Artificial Sequence: Synthetic oligonucleotide
  Antisense strand to SEQ ID NO: 1530864
uugccaaucaaaggaaugu

SEQ ID NO: 1530866 - RNA, 19 nt, Artificial Sequence
  Description of Artificial Sequence: Synthetic oligonucleotide
  Sense strand starting at position 588 of SEQ ID NO: 1245031
agccauuucugacaaugga

SEQ ID NO: 1530867 - RNA, 19 nt, Artificial Sequence
  Description of Artificial Sequence: Synthetic oligonucleotide
  Antisense strand to SEQ ID NO: 1530866
uccauugucagaaauggcu

SEQ ID NO: 1530868 - RNA, 19 nt, Artificial Sequence
  Description of Artificial Sequence: Synthetic oligonucleotide
  Sense strand starting at position 685 of SEQ ID NO: 1245031
ucuaguugugaucaaagcu

SEQ ID NO: 1530869 - RNA, 19 nt, Artificial Sequence
  Description of Artificial Sequence: Synthetic oligonucleotide
  Antisense strand to SEQ ID NO: 1530868
agcuuugaucacaacuaga

SEQ ID NO: 1530870 - RNA, 19 nt, Artificial Sequence
  Description of Artificial Sequence: Synthetic oligonucleotide
  Sense strand starting at position 767 of SEQ ID NO: 1245031
ucauuucuauuggagacau

SEQ ID NO: 1530871 - RNA, 19 nt, Artificial Sequence
  Description of Artificial Sequence: Synthetic oligonucleotide
  Antisense strand to SEQ ID NO: 1530870
augucuccaauagaaauga

SEQ ID NO: 1530872 - RNA, 19 nt, Artificial Sequence
  Description of Artificial Sequence: Synthetic oligonucleotide
  Sense strand starting at position 778 of SEQ ID NO: 1245031
ggagacaucccucgacaau

SEQ ID NO: 1530873 - RNA, 19 nt, Artificial Sequence
  Description of Artificial Sequence: Synthetic oligonucleotide
  Antisense strand to SEQ ID NO: 1530872
auugucgagggaugucucc

SEQ ID NO: 1530874 - RNA, 19 nt, Artificial Sequence
  Description of Artificial Sequence: Synthetic oligonucleotide
  Sense strand starting at position 796 of SEQ ID NO: 1245031
ugaacauguuacguggaga

SEQ ID NO: 1530875 - RNA, 19 nt, Artificial Sequence
  Description of Artificial Sequence: Synthetic oligonucleotide
  Antisense strand to SEQ ID NO: 1530874
ucuccacguaacauguuca

SEQ ID NO: 1530876 - RNA, 19 nt, Artificial Sequence
  Description of Artificial Sequence: Synthetic oligonucleotide
  Sense strand starting at position 797 of SEQ ID NO: 1245031
gaacauguuacguggagau

SEQ ID NO: 1530877 - RNA, 19 nt, Artificial Sequence
  Description of Artificial Sequence: Synthetic oligonucleotide
  Antisense strand to SEQ ID NO: 1530876
aucuccacguaacauguuc

SEQ ID NO: 1530878 - RNA, 19 nt, Artificial Sequence
  Description of Artificial Sequence: Synthetic oligonucleotide
  Sense strand starting at position 799 of SEQ ID NO: 1245031
acauguuacguggagaugu

SEQ ID NO: 1530879 - RNA, 19 nt, Artificial Sequence
  Description of Artificial Sequence: Synthetic oligonucleotide
  Antisense strand to SEQ ID NO: 1530878
acaucuccacguaacaugu

SEQ ID NO: 1530880 - RNA, 19 nt, Artificial Sequence
  Description of Artificial Sequence: Synthetic oligonucleotide
  Sense strand starting at position 801 of SEQ ID NO: 1245031
auguuacguggagauguaa

SEQ ID NO: 1530881 - RNA, 19 nt, Artificial Sequence
  Description of Artificial Sequence: Synthetic oligonucleotide
  Antisense strand to SEQ ID NO: 1530880
uuacaucuccacguaacau

SEQ ID NO: 1530882 - RNA, 19 nt, Artificial Sequence
  Description of Artificial Sequence: Synthetic oligonucleotide
  Sense strand starting at position 840 of SEQ ID NO: 1245031
gugucucggaucuaagaau

SEQ ID NO: 1530883 - RNA, 19 nt, Artificial Sequence
  Description of Artificial Sequence: Synthetic oligonucleotide
  Antisense strand to SEQ ID NO: 1530882
auucuuagauccgagacac

SEQ ID NO: 1530884 - RNA, 19 nt, Artificial Sequence
  Description of Artificial Sequence: Synthetic oligonucleotide
  Sense strand starting at position 2222 of SEQ ID NO: 1245031
gugggucgacgugagauuu

SEQ ID NO: 1530885 - RNA, 19 nt, Artificial Sequence
  Description of Artificial Sequence: Synthetic oligonucleotide
  Antisense strand to SEQ ID NO: 1530884
aaaucucacgucgacccac

SEQ ID NO: 1530886 - RNA, 19 nt, Artificial Sequence
  Description of Artificial Sequence: Synthetic oligonucleotide
  Sense strand starting at position 2230 of SEQ ID NO: 1245031
acgugagauuuggaaguaa

SEQ ID NO: 1530887 - RNA, 19 nt, Artificial Sequence
  Description of Artificial Sequence: Synthetic oligonucleotide
  Antisense strand to SEQ ID NO: 1530886
uuacuuccaaaucucacgu

SEQ ID NO: 1530888 - RNA, 19 nt, Artificial Sequence
  Description of Artificial Sequence: Synthetic oligonucleotide
  Sense strand starting at position 2370 of SEQ ID NO: 1245031
uaugaaugggaccgcuaaa

SEQ ID NO: 1530889 - RNA, 19 nt, Artificial Sequence
  Description of Artificial Sequence: Synthetic oligonucleotide
  Antisense strand to SEQ ID NO: 1530888
uuuagcggucccauucaua

SEQ ID NO: 1530890 - RNA, 19 nt, Artificial Sequence
  Description of Artificial Sequence: Synthetic oligonucleotide
  Sense strand starting at position 2407 of SEQ ID NO: 1245031
uugccagggugcucagaaa

SEQ ID NO: 1530891 - RNA, 19 nt, Artificial Sequence
  Description of Artificial Sequence: Synthetic oligonucleotide
  Antisense strand to SEQ ID NO: 1530890
uuucugagcacccuggcaa

SEQ ID NO: 1530892 - RNA, 19 nt, Artificial Sequence
  Description of Artificial Sequence: Synthetic oligonucleotide
  Sense strand starting at position 2480 of SEQ ID NO: 1245031
guguuugagaccuacagca

SEQ ID NO: 1530893 - RNA, 19 nt, Artificial Sequence
  Description of Artificial Sequence: Synthetic oligonucleotide
  Antisense strand to SEQ ID NO: 1530892
ugcuguaggucucaaacac

SEQ ID NO: 1530894 - RNA, 19 nt, Artificial Sequence
  Description of Artificial Sequence: Synthetic oligonucleotide
  Sense strand starting at position 2507 of SEQ ID NO: 1245031
aaaggaagccuccauugua

SEQ ID NO: 1530895 - RNA, 19 nt, Artificial Sequence
  Description of Artificial Sequence: Synthetic oligonucleotide
  Antisense strand to SEQ ID NO: 1530894
uacaauggaggcuuccuuu

SEQ ID NO: 1530896 - RNA, 19 nt, Artificial Sequence
  Description of Artificial Sequence: Synthetic oligonucleotide
  Sense strand starting at position 2510 of SEQ ID NO: 1245031
ggaagccuccauuguauua

SEQ ID NO: 1530897 - RNA, 19 nt, Artificial Sequence
  Description of Artificial Sequence: Synthetic oligonucleotide
  Antisense strand to SEQ ID NO: 1530896
uaauacaauggaggcuucc

SEQ ID NO: 1530898 - RNA, 19 nt, Artificial Sequence
  Description of Artificial Sequence: Synthetic oligonucleotide
  Sense strand starting at position 2558 of SEQ ID NO: 1245031
uuaauauacucagugguac

SEQ ID NO: 1530899 - RNA, 19 nt, Artificial Sequence
  Description of Artificial Sequence: Synthetic oligonucleotide
  Antisense strand to SEQ ID NO: 1530898
guaccacugaguauauuaa

SEQ ID NO: 1530900 - RNA, 19 nt, Artificial Sequence
  Description of Artificial Sequence: Synthetic oligonucleotide
  Sense strand starting at position 2570 of SEQ ID NO: 1245031
gugguacuauuaguuaaca

SEQ ID NO: 1530901 - RNA, 19 nt, Artificial Sequence
  Description of Artificial Sequence: Synthetic oligonucleotide
  Antisense strand to SEQ ID NO: 1530900
uguuaacuaauaguaccac

SEQ ID NO: 1530902 - RNA, 19 nt, Artificial Sequence
  Description of Artificial Sequence: Synthetic oligonucleotide
  Sense strand starting at position 2571 of SEQ ID NO: 1245031
ugguacuauuaguuaacaa

SEQ ID NO: 1530903 - RNA, 19 nt, Artificial Sequence
  Description of Artificial Sequence: Synthetic oligonucleotide
  Antisense strand to SEQ ID NO: 1530902
uuguuaacuaauaguacca

SEQ ID NO: 1530904 - RNA, 19 nt, Artificial Sequence
  Description of Artificial Sequence: Synthetic oligonucleotide
  Sense strand starting at position 2590 of SEQ ID NO: 1245031
gguagcauuuauccgaguu

SEQ ID NO: 1530905 - RNA, 19 nt, Artificial Sequence
  Description of Artificial Sequence: Synthetic oligonucleotide
  Antisense strand to SEQ ID NO: 1530904
aacucggauaaaugcuacc

SEQ ID NO: 1530906 - RNA, 19 nt, Artificial Sequence
  Description of Artificial Sequence: Synthetic oligonucleotide
  Sense strand starting at position 2591 of SEQ ID NO: 1245031
guagcauuuauccgaguuc

SEQ ID NO: 1530907 - RNA, 19 nt, Artificial Sequence
  Description of Artificial Sequence: Synthetic oligonucleotide
  Antisense strand to SEQ ID NO: 1530906
gaacucggauaaaugcuac

SEQ ID NO: 1530908 - RNA, 19 nt, Artificial Sequence
  Description of Artificial Sequence: Synthetic oligonucleotide
  Sense strand starting at position 2614 of SEQ ID NO: 1245031
acaagagaguguccauaau

SEQ ID NO: 1530909 - RNA, 19 nt, Artificial Sequence
  Description of Artificial Sequence: Synthetic oligonucleotide
  Antisense strand to SEQ ID NO: 1530908
auuauggacacucucuugu

SEQ ID NO: 1530910 - RNA, 19 nt, Artificial Sequence
  Description of Artificial Sequence: Synthetic oligonucleotide
  Sense strand starting at position 2620 of SEQ ID NO: 1245031
gaguguccauaauugaaag

SEQ ID NO: 1530911 - RNA, 19 nt, Artificial Sequence
  Description of Artificial Sequence: Synthetic oligonucleotide
  Antisense strand to SEQ ID NO: 1530910
cuuucaauuauggacacuc

SEQ ID NO: 1530912 - RNA, 19 nt, Artificial Sequence
  Description of Artificial Sequence: Synthetic oligonucleotide
  Sense strand starting at position 2630 of SEQ ID NO: 1245031
aauugaaaguguuuagggu

SEQ ID NO: 1530913 - RNA, 19 nt, Artificial Sequence
  Description of Artificial Sequence: Synthetic oligonucleotide
  Antisense strand to SEQ ID NO: 1530912
acccuaaacacuuucaauu

SEQ ID NO: 1530914 - RNA, 19 nt, Artificial Sequence
  Description of Artificial Sequence: Synthetic oligonucleotide
  Sense strand starting at position 2631 of SEQ ID NO: 1245031
auugaaaguguuuagggua

SEQ ID NO: 1530915 - RNA, 19 nt, Artificial Sequence
  Description of Artificial Sequence: Synthetic oligonucleotide
  Antisense strand to SEQ ID NO: 1530914
uacccuaaacacuuucaau

SEQ ID NO: 1530916 - RNA, 19 nt, Artificial Sequence
  Description of Artificial Sequence: Synthetic oligonucleotide
  Sense strand starting at position 2753 of SEQ ID NO: 1245031
cccugaaguuguccaaauc

SEQ ID NO: 1530917 - RNA, 19 nt, Artificial Sequence
  Description of Artificial Sequence: Synthetic oligonucleotide
  Antisense strand to SEQ ID NO: 1530916
gauuuggacaacuucaggg

SEQ ID NO: 1530918 - RNA, 19 nt, Artificial Sequence
  Description of Artificial Sequence: Synthetic oligonucleotide
  Sense strand starting at position 3021 of SEQ ID NO: 1245031
cugccucaccuggauaauu

SEQ ID NO: 1530919 - RNA, 19 nt, Artificial Sequence
  Description of Artificial Sequence: Synthetic oligonucleotide
  Antisense strand to SEQ ID NO: 1530918
aauuauccaggugaggcag

SEQ ID NO: 1530920 - RNA, 19 nt, Artificial Sequence
  Description of Artificial Sequence: Synthetic oligonucleotide
  Sense strand starting at position 3157 of SEQ ID NO: 1245031
acuguaccuggcugacauu

SEQ ID NO: 1530921 - RNA, 19 nt, Artificial Sequence
  Description of Artificial Sequence: Synthetic oligonucleotide
  Antisense strand to SEQ ID NO: 1530920
aaugucagccagguacagu

SEQ ID NO: 1530922 - RNA, 19 nt, Artificial Sequence
  Description of Artificial Sequence: Synthetic oligonucleotide
  Sense strand starting at position 3301 of SEQ ID NO: 1245031
agaguuuauuaggucauga

SEQ ID NO: 1530923 - RNA, 19 nt, Artificial Sequence
  Description of Artificial Sequence: Synthetic oligonucleotide
  Antisense strand to SEQ ID NO: 1530922
ucaugaccuaauaaacucu

SEQ ID NO: 1530924 - RNA, 19 nt, Artificial Sequence
  Description of Artificial Sequence: Synthetic oligonucleotide
  Sense strand starting at position 3697 of SEQ ID NO: 1245031
uaaacaguggguuaguuau

SEQ ID NO: 1530925 - RNA, 19 nt, Artificial Sequence
  Description of Artificial Sequence: Synthetic oligonucleotide
  Antisense strand to SEQ ID NO: 1530924
auaacuaacccacuguuua

SEQ ID NO: 1530926 - RNA, 19 nt, Artificial Sequence
  Description of Artificial Sequence: Synthetic oligonucleotide
  Sense strand starting at position 80 of SEQ ID NO: 1245032
cagacagugcuuugaagag

SEQ ID NO: 1530927 - RNA, 19 nt, Artificial Sequence
  Description of Artificial Sequence: Synthetic oligonucleotide
  Antisense strand to SEQ ID NO: 1530926
cucuucaaagcacugucug

SEQ ID NO: 1530928 - RNA, 19 nt, Artificial Sequence
  Description of Artificial Sequence: Synthetic oligonucleotide
  Sense strand starting at position 90 of SEQ ID NO: 1245032
uuugaagagugagugguuu

SEQ ID NO: 1530929 - RNA, 19 nt, Artificial Sequence
  Description of Artificial Sequence: Synthetic oligonucleotide
  Antisense strand to SEQ ID NO: 1530928
aaaccacucacucuucaaa

SEQ ID NO: 1530930 - RNA, 19 nt, Artificial Sequence
  Description of Artificial Sequence: Synthetic oligonucleotide
  Sense strand starting at position 234 of SEQ ID NO: 1245032
uucuaaggaguuugaacuu

SEQ ID NO: 1530931 - RNA, 19 nt, Artificial Sequence
  Description of Artificial Sequence: Synthetic oligonucleotide
  Antisense strand to SEQ ID NO: 1530930
aaguucaaacuccuuagaa

SEQ ID NO: 1530932 - RNA, 19 nt, Artificial Sequence
  Description of Artificial Sequence: Synthetic oligonucleotide
  Sense strand starting at position 365 of SEQ ID NO: 1245032
gcuugucaugcguccuaac

SEQ ID NO: 1530933 - RNA, 19 nt, Artificial Sequence
  Description of Artificial Sequence: Synthetic oligonucleotide
  Antisense strand to SEQ ID NO: 1530932
guuaggacgcaugacaagc

SEQ ID NO: 1530934 - RNA, 19 nt, Artificial Sequence
  Description of Artificial Sequence: Synthetic oligonucleotide
  Sense strand starting at position 507 of SEQ ID NO: 1245032
ugcauaacucaaggacaca

SEQ ID NO: 1530935 - RNA, 19 nt, Artificial Sequence
  Description of Artificial Sequence: Synthetic oligonucleotide
  Antisense strand to SEQ ID NO: 1530934
uguguccuugaguuaugca

SEQ ID NO: 1530936 - RNA, 19 nt, Artificial Sequence
  Description of Artificial Sequence: Synthetic oligonucleotide
  Sense strand starting at position 544 of SEQ ID NO: 1245032
ugugaugucgcaagaacga

SEQ ID NO: 1530937 - RNA, 19 nt, Artificial Sequence
  Description of Artificial Sequence: Synthetic oligonucleotide
  Antisense strand to SEQ ID NO: 1530936
ucguucuugcgacaucaca

SEQ ID NO: 1530938 - RNA, 19 nt, Artificial Sequence
  Description of Artificial Sequence: Synthetic oligonucleotide
  Sense strand starting at position 682 of SEQ ID NO: 1245032
agucuuugggaauguaauu

SEQ ID NO: 1530939 - RNA, 19 nt, Artificial Sequence
  Description of Artificial Sequence: Synthetic oligonucleotide
  Antisense strand to SEQ ID NO: 1530938
aauuacauucccaaagacu

SEQ ID NO: 1530940 - RNA, 19 nt, Artificial Sequence
  Description of Artificial Sequence: Synthetic oligonucleotide
  Sense strand starting at position 691 of SEQ ID NO: 1245032
gaauguaauuuggaagaau

SEQ ID NO: 1530941 - RNA, 19 nt, Artificial Sequence
  Description of Artificial Sequence: Synthetic oligonucleotide
  Antisense strand to SEQ ID NO: 1530940
auucuuccaaauuacauuc

SEQ ID NO: 1530942 - RNA, 19 nt, Artificial Sequence
  Description of Artificial Sequence: Synthetic oligonucleotide
  Sense strand starting at position 751 of SEQ ID NO: 1245032
gcaggagaucccgaguuac

SEQ ID NO: 1530943 - RNA, 19 nt, Artificial Sequence
  Description of Artificial Sequence: Synthetic oligonucleotide
  Antisense strand to SEQ ID NO: 1530942
guaacucgggaucuccugc

SEQ ID NO: 1530944 - RNA, 19 nt, Artificial Sequence
  Description of Artificial Sequence: Synthetic oligonucleotide
  Sense strand starting at position 908 of SEQ ID NO: 1245032
aguaauuguucuccuccaa

SEQ ID NO: 1530945 - RNA, 19 nt, Artificial Sequence
  Description of Artificial Sequence: Synthetic oligonucleotide
  Antisense strand to SEQ ID NO: 1530944
uuggaggagaacaauuacu

SEQ ID NO: 1530946 - RNA, 19 nt, Artificial Sequence
  Description of Artificial Sequence: Synthetic oligonucleotide
  Sense strand starting at position 975 of SEQ ID NO: 1245032
ugugucuauauguacagaa

SEQ ID NO: 1530947 - RNA, 19 nt, Artificial Sequence
  Description of Artificial Sequence: Synthetic oligonucleotide
  Antisense strand to SEQ ID NO: 1530946
uucuguacauauagacaca

SEQ ID NO: 1530948 - RNA, 19 nt, Artificial Sequence
  Description of Artificial Sequence: Synthetic oligonucleotide
  Sense strand starting at position 1142 of SEQ ID NO: 1245032
gucuaaugugcauacacca

SEQ ID NO: 1530949 - RNA, 19 nt, Artificial Sequence
  Description of Artificial Sequence: Synthetic oligonucleotide
  Antisense strand to SEQ ID NO: 1530948
ugguguaugcacauuagac

SEQ ID NO: 1530950 - RNA, 19 nt, Artificial Sequence
  Description of Artificial Sequence: Synthetic oligonucleotide
  Sense strand starting at position 1186 of SEQ ID NO: 1245032
gugucuaauguguauacac

SEQ ID NO: 1530951 - RNA, 19 nt, Artificial Sequence
  Description of Artificial Sequence: Synthetic oligonucleotide
  Antisense strand to SEQ ID NO: 1530950
guguauacacauuagacac

SEQ ID NO: 1530952 - RNA, 19 nt, Artificial Sequence
  Description of Artificial Sequence: Synthetic oligonucleotide
  Sense strand starting at position 1188 of SEQ ID NO: 1245032
gucuaauguguauacacca

SEQ ID NO: 1530953 - RNA, 19 nt, Artificial Sequence
  Description of Artificial Sequence: Synthetic oligonucleotide
  Antisense strand to SEQ ID NO: 1530952
ugguguauacacauuagac

SEQ ID NO: 1530954 - RNA, 19 nt, Artificial Sequence
  Description of Artificial Sequence: Synthetic oligonucleotide
  Sense strand starting at position 1195 of SEQ ID NO: 1245032
guguauacaccacacauau

SEQ ID NO: 1530955 - RNA, 19 nt, Artificial Sequence
  Description of Artificial Sequence: Synthetic oligonucleotide
  Antisense strand to SEQ ID NO: 1530954
auaugugugguguauacac

SEQ ID NO: 1530956 - RNA, 19 nt, Artificial Sequence
  Description of Artificial Sequence: Synthetic oligonucleotide
  Sense strand starting at position 1565 of SEQ ID NO: 1245032
aggagcaguuaagcaauaa

SEQ ID NO: 1530957 - RNA, 19 nt, Artificial Sequence
  Description of Artificial Sequence: Synthetic oligonucleotide
  Antisense strand to SEQ ID NO: 1530956
uuauugcuuaacugcuccu

SEQ ID NO: 1530958 - RNA, 19 nt, Artificial Sequence
  Description of Artificial Sequence: Synthetic oligonucleotide
  Sense strand starting at position 1566 of SEQ ID NO: 1245032
ggagcaguuaagcaauaau

SEQ ID NO: 1530959 - RNA, 19 nt, Artificial Sequence
  Description of Artificial Sequence: Synthetic oligonucleotide
  Antisense strand to SEQ ID NO: 1530958
auuauugcuuaacugcucc

SEQ ID NO: 1530960 - RNA, 19 nt, Artificial Sequence
  Description of Artificial Sequence: Synthetic oligonucleotide
  Sense strand starting at position 1569 of SEQ ID NO: 1245032
gcaguuaagcaauaauaug

SEQ ID NO: 1530961 - RNA, 19 nt, Artificial Sequence
  Description of Artificial Sequence: Synthetic oligonucleotide
  Antisense strand to SEQ ID NO: 1530960
cauauuauugcuuaacugc

SEQ ID NO: 1530962 - RNA, 19 nt, Artificial Sequence
  Description of Artificial Sequence: Synthetic oligonucleotide
  Sense strand starting at position 1631 of SEQ ID NO: 1245032
ggaguuaauuuccagauaa

SEQ ID NO: 1530963 - RNA, 19 nt, Artificial Sequence
  Description of Artificial Sequence: Synthetic oligonucleotide
  Antisense strand to SEQ ID NO: 1530962
uuaucuggaaauuaacucc

SEQ ID NO: 1530964 - RNA, 19 nt, Artificial Sequence
  Description of Artificial Sequence: Synthetic oligonucleotide
  Sense strand starting at position 1672 of SEQ ID NO: 1245032
aagugucagccucauuaga

SEQ ID NO: 1530965 - RNA, 19 nt, Artificial Sequence
  Description of Artificial Sequence: Synthetic oligonucleotide
  Antisense strand to SEQ ID NO: 1530964
ucuaaugaggcugacacuu

SEQ ID NO: 1530966 - RNA, 19 nt, Artificial Sequence
  Description of Artificial Sequence: Synthetic oligonucleotide
  Sense strand starting at position 1694 of SEQ ID NO: 1245032
uuuguaaucguggucugca

SEQ ID NO: 1530967 - RNA, 19 nt, Artificial Sequence
  Description of Artificial Sequence: Synthetic oligonucleotide
  Antisense strand to SEQ ID NO: 1530966
ugcagaccacgauuacaaa

SEQ ID NO: 1530968 - RNA, 19 nt, Artificial Sequence
  Description of Artificial Sequence: Synthetic oligonucleotide
  Sense strand starting at position 1806 of SEQ ID NO: 1245032
uuuagauacgucugagaag

SEQ ID NO: 1530969 - RNA, 19 nt, Artificial Sequence
  Description of Artificial Sequence: Synthetic oligonucleotide
  Antisense strand to SEQ ID NO: 1530968
cuucucagacguaucuaaa

SEQ ID NO: 1530970 - RNA, 19 nt, Artificial Sequence
  Description of Artificial Sequence: Synthetic oligonucleotide
  Sense strand starting at position 2123 of SEQ ID NO: 1245032
gcaaguuaucucgccgacu

SEQ ID NO: 1530971 - RNA, 19 nt, Artificial Sequence
  Description of Artificial Sequence: Synthetic oligonucleotide
  Antisense strand to SEQ ID NO: 1530970
agucggcgagauaacuugc

SEQ ID NO: 1530972 - RNA, 19 nt, Artificial Sequence
  Description of Artificial Sequence: Synthetic oligonucleotide
  Sense strand starting at position 2201 of SEQ ID NO: 1245032
ccauaugucagagggcuuu

SEQ ID NO: 1530973 - RNA, 19 nt, Artificial Sequence
  Description of Artificial Sequence: Synthetic oligonucleotide
  Antisense strand to SEQ ID NO: 1530972
aaagcccucugacauaugg

SEQ ID NO: 1530974 - RNA, 19 nt, Artificial Sequence
  Description of Artificial Sequence: Synthetic oligonucleotide
  Sense strand starting at position 2220 of SEQ ID NO: 1245032
cgauguguccgcaguuaga

SEQ ID NO: 1530975 - RNA, 19 nt, Artificial Sequence
  Description of Artificial Sequence: Synthetic oligonucleotide
  Antisense strand to SEQ ID NO: 1530974
ucuaacugcggacacaucg

SEQ ID NO: 1530976 - RNA, 19 nt, Artificial Sequence
  Description of Artificial Sequence: Synthetic oligonucleotide
  Sense strand starting at position 2300 of SEQ ID NO: 1245032
augugagacuuuccuuuag

SEQ ID NO: 1530977 - RNA, 19 nt, Artificial Sequence
  Description of Artificial Sequence: Synthetic oligonucleotide
  Antisense strand to SEQ ID NO: 1530976
cuaaaggaaagucucacau

SEQ ID NO: 1530978 - RNA, 19 nt, Artificial Sequence
  Description of Artificial Sequence: Synthetic oligonucleotide
  Sense strand starting at position 2302 of SEQ ID NO: 1245032
gugagacuuuccuuuagaa

SEQ ID NO: 1530979 - RNA, 19 nt, Artificial Sequence
  Description of Artificial Sequence: Synthetic oligonucleotide
  Antisense strand to SEQ ID NO: 1530978
uucuaaaggaaagucucac

SEQ ID NO: 1530980 - RNA, 19 nt, Artificial Sequence
  Description of Artificial Sequence: Synthetic oligonucleotide
  Sense strand starting at position 2418 of SEQ ID NO: 1245032
cagugaggccuuugaggau

SEQ ID NO: 1530981 - RNA, 19 nt, Artificial Sequence
  Description of Artificial Sequence: Synthetic oligonucleotide
  Antisense strand to SEQ ID NO: 1530980
auccucaaaggccucacug

SEQ ID NO: 1530982 - RNA, 19 nt, Artificial Sequence
  Description of Artificial Sequence: Synthetic oligonucleotide
  Sense strand starting at position 2775 of SEQ ID NO: 1245032
cgguuugaggacugggaaa

SEQ ID NO: 1530983 - RNA, 19 nt, Artificial Sequence
  Description of Artificial Sequence: Synthetic oligonucleotide
  Antisense strand to SEQ ID NO: 1530982
uuucccaguccucaaaccg

SEQ ID NO: 1530984 - RNA, 19 nt, Artificial Sequence
  Description of Artificial Sequence: Synthetic oligonucleotide
  Sense strand starting at position 3410 of SEQ ID NO: 1245032
ggucacuaugccuggagaa

SEQ ID NO: 1530985 - RNA, 19 nt, Artificial Sequence
  Description of Artificial Sequence: Synthetic oligonucleotide
  Antisense strand to SEQ ID NO: 1530984
uucuccaggcauagugacc

SEQ ID NO: 1530986 - RNA, 19 nt, Artificial Sequence
  Description of Artificial Sequence: Synthetic oligonucleotide
  Sense strand starting at position 3411 of SEQ ID NO: 1245032
gucacuaugccuggagaau

SEQ ID NO: 1530987 - RNA, 19 nt, Artificial Sequence
  Description of Artificial Sequence: Synthetic oligonucleotide
  Antisense strand to SEQ ID NO: 1530986
auucuccaggcauagugac

SEQ ID NO: 1530988 - RNA, 19 nt, Artificial Sequence
  Description of Artificial Sequence: Synthetic oligonucleotide
  Sense strand starting at position 3412 of SEQ ID NO: 1245032
ucacuaugccuggagaauu

SEQ ID NO: 1530989 - RNA, 19 nt, Artificial Sequence
  Description of Artificial Sequence: Synthetic oligonucleotide
  Antisense strand to SEQ ID NO: 1530988
aauucuccaggcauaguga

SEQ ID NO: 1530990 - RNA, 19 nt, Artificial Sequence
  Description of Artificial Sequence: Synthetic oligonucleotide
  Sense strand starting at position 3452 of SEQ ID NO: 1245032
ccauguuuccuaggauggu

SEQ ID NO: 1530991 - RNA, 19 nt, Artificial Sequence
  Description of Artificial Sequence: Synthetic oligonucleotide
  Antisense strand to SEQ ID NO: 1530990
accauccuaggaaacaugg

SEQ ID NO: 1530992 - RNA, 19 nt, Artificial Sequence
  Description of Artificial Sequence: Synthetic oligonucleotide
  Sense strand starting at position 3456 of SEQ ID NO: 1245032
guuuccuaggaugguuuaa

SEQ ID NO: 1530993 - RNA, 19 nt, Artificial Sequence
  Description of Artificial Sequence: Synthetic oligonucleotide
  Antisense strand to SEQ ID NO: 1530992
uuaaaccauccuaggaaac

SEQ ID NO: 1530994 - RNA, 19 nt, Artificial Sequence
  Description of Artificial Sequence: Synthetic oligonucleotide
  Sense strand starting at position 3458 of SEQ ID NO: 1245032
uuccuaggaugguuuaaua

SEQ ID NO: 1530995 - RNA, 19 nt, Artificial Sequence
  Description of Artificial Sequence: Synthetic oligonucleotide
  Antisense strand to SEQ ID NO: 1530994
uauuaaaccauccuaggaa

SEQ ID NO: 1530996 - RNA, 19 nt, Artificial Sequence
  Description of Artificial Sequence: Synthetic oligonucleotide
  Sense strand starting at position 3540 of SEQ ID NO: 1245032
agaguuauguaagucuuau

SEQ ID NO: 1530997 - RNA, 19 nt, Artificial Sequence
  Description of Artificial Sequence: Synthetic oligonucleotide
  Antisense strand to SEQ ID NO: 1530996
auaagacuuacauaacucu

SEQ ID NO: 1530998 - RNA, 19 nt, Artificial Sequence
  Description of Artificial Sequence: Synthetic oligonucleotide
  Sense strand starting at position 3590 of SEQ ID NO: 1245032
ccuauuccuggauagcaaa

SEQ ID NO: 1530999 - RNA, 19 nt, Artificial Sequence
  Description of Artificial Sequence: Synthetic oligonucleotide
  Antisense strand to SEQ ID NO: 1530998
uuugcuauccaggaauagg

SEQ ID NO: 1531000 - RNA, 19 nt, Artificial Sequence
  Description of Artificial Sequence: Synthetic oligonucleotide
  Sense strand starting at position 3693 of SEQ ID NO: 1245032
ccgagugcugcuucuguuu

SEQ ID NO: 1531001 - RNA, 19 nt, Artificial Sequence
  Description of Artificial Sequence: Synthetic oligonucleotide
  Antisense strand to SEQ ID NO: 1531000
aaacagaagcagcacucgg

SEQ ID NO: 1531002 - RNA, 19 nt, Artificial Sequence
  Description of Artificial Sequence: Synthetic oligonucleotide
  Sense strand starting at position 3882 of SEQ ID NO: 1245032
gguggucagcuguaugaug

SEQ ID NO: 1531003 - RNA, 19 nt, Artificial Sequence
  Description of Artificial Sequence: Synthetic oligonucleotide
  Antisense strand to SEQ ID NO: 1531002
caucauacagcugaccacc

SEQ ID NO: 1531004 - RNA, 19 nt, Artificial Sequence
  Description of Artificial Sequence: Synthetic oligonucleotide
  Sense strand starting at position 3929 of SEQ ID NO: 1245032
agguuccaguccuccagaa

SEQ ID NO: 1531005 - RNA, 19 nt, Artificial Sequence
  Description of Artificial Sequence: Synthetic oligonucleotide
  Antisense strand to SEQ ID NO: 1531004
uucuggaggacuggaaccu

SEQ ID NO: 1531006 - RNA, 19 nt, Artificial Sequence
  Description of Artificial Sequence: Synthetic oligonucleotide
  Sense strand starting at position 111 of SEQ ID NO: 1245033
uagggcaguuacucucuaa

SEQ ID NO: 1531007 - RNA, 19 nt, Artificial Sequence
  Description of Artificial Sequence: Synthetic oligonucleotide
  Antisense strand to SEQ ID NO: 1531006
uuagagaguaacugcccua

SEQ ID NO: 1531008 - RNA, 19 nt, Artificial Sequence
  Description of Artificial Sequence: Synthetic oligonucleotide
  Sense strand starting at position 144 of SEQ ID NO: 1245033
agaauaaccugggugcuua

SEQ ID NO: 1531009 - RNA, 19 nt, Artificial Sequence
  Description of Artificial Sequence: Synthetic oligonucleotide
  Antisense strand to SEQ ID NO: 1531008
uaagcacccagguuauucu

SEQ ID NO: 1531010 - RNA, 19 nt, Artificial Sequence
  Description of Artificial Sequence: Synthetic oligonucleotide
  Sense strand starting at position 145 of SEQ ID NO: 1245033
gaauaaccugggugcuuaa

SEQ ID NO: 1531011 - RNA, 19 nt, Artificial Sequence
  Description of Artificial Sequence: Synthetic oligonucleotide
  Antisense strand to SEQ ID NO: 1531010
uuaagcacccagguuauuc

SEQ ID NO: 1531012 - RNA, 19 nt, Artificial Sequence
  Description of Artificial Sequence: Synthetic oligonucleotide
  Sense strand starting at position 287 of SEQ ID NO: 1245033
ucauguuuggcauauaguu

SEQ ID NO: 1531013 - RNA, 19 nt, Artificial Sequence
  Description of Artificial Sequence: Synthetic oligonucleotide
  Antisense strand to SEQ ID NO: 1531012
aacuauaugccaaacauga

SEQ ID NO: 1531014 - RNA, 19 nt, Artificial Sequence
  Description of Artificial Sequence: Synthetic oligonucleotide
  Sense strand starting at position 2025 of SEQ ID NO: 1245033
uccuguaagggcgaugauu

SEQ ID NO: 1531015 - RNA, 19 nt, Artificial Sequence
  Description of Artificial Sequence: Synthetic oligonucleotide
  Antisense strand to SEQ ID NO: 1531014
aaucaucgcccuuacagga

SEQ ID NO: 1531016 - RNA, 19 nt, Artificial Sequence
  Description of Artificial Sequence: Synthetic oligonucleotide
  Sense strand starting at position 2366 of SEQ ID NO: 1245033
uguucuugcgagcuugauu

SEQ ID NO: 1531017 - RNA, 19 nt, Artificial Sequence
  Description of Artificial Sequence: Synthetic oligonucleotide
  Antisense strand to SEQ ID NO: 1531016
aaucaagcucgcaagaaca

SEQ ID NO: 1531018 - RNA, 19 nt, Artificial Sequence
  Description of Artificial Sequence: Synthetic oligonucleotide
  Sense strand starting at position 2374 of SEQ ID NO: 1245033
cgagcuugauuucccucau

SEQ ID NO: 1531019 - RNA, 19 nt, Artificial Sequence
  Description of Artificial Sequence: Synthetic oligonucleotide
  Antisense strand to SEQ ID NO: 1531018
augagggaaaucaagcucg

SEQ ID NO: 1531020 - RNA, 19 nt, Artificial Sequence
  Description of Artificial Sequence: Synthetic oligonucleotide
  Sense strand starting at position 2541 of SEQ ID NO: 1245033
uuuagugucucauuggaaa

SEQ ID NO: 1531021 - RNA, 19 nt, Artificial Sequence
  Description of Artificial Sequence: Synthetic oligonucleotide
  Antisense strand to SEQ ID NO: 1531020
uuuccaaugagacacuaaa

SEQ ID NO: 1531022 - RNA, 19 nt, Artificial Sequence
  Description of Artificial Sequence: Synthetic oligonucleotide
  Sense strand starting at position 2592 of SEQ ID NO: 1245033
guauacccuugguccauaa

SEQ ID NO: 1531023 - RNA, 19 nt, Artificial Sequence
  Description of Artificial Sequence: Synthetic oligonucleotide
  Antisense strand to SEQ ID NO: 1531022
uuauggaccaaggguauac

SEQ ID NO: 1531024 - RNA, 19 nt, Artificial Sequence
  Description of Artificial Sequence: Synthetic oligonucleotide
  Sense strand starting at position 2830 of SEQ ID NO: 1245033
agagacacauccucauagu

SEQ ID NO: 1531025 - RNA, 19 nt, Artificial Sequence
  Description of Artificial Sequence: Synthetic oligonucleotide
  Antisense strand to SEQ ID NO: 1531024
acuaugaggaugugucucu

SEQ ID NO: 1531026 - RNA, 19 nt, Artificial Sequence
  Description of Artificial Sequence: Synthetic oligonucleotide
  Sense strand starting at position 2930 of SEQ ID NO: 1245033
ucuguucuuaaggagaugu

SEQ ID NO: 1531027 - RNA, 19 nt, Artificial Sequence
  Description of Artificial Sequence: Synthetic oligonucleotide
  Antisense strand to SEQ ID NO: 1531026
acaucuccuuaagaacaga

SEQ ID NO: 1531028 - RNA, 19 nt, Artificial Sequence
  Description of Artificial Sequence: Synthetic oligonucleotide
  Sense strand starting at position 2934 of SEQ ID NO: 1245033
uucuuaaggagauguggua

SEQ ID NO: 1531029 - RNA, 19 nt, Artificial Sequence
  Description of Artificial Sequence: Synthetic oligonucleotide
  Antisense strand to SEQ ID NO: 1531028
uaccacaucuccuuaagaa

SEQ ID NO: 1531030 - RNA, 19 nt, Artificial Sequence
  Description of Artificial Sequence: Synthetic oligonucleotide
  Sense strand starting at position 2949 of SEQ ID NO: 1245033
gguagagacggauguggua

SEQ ID NO: 1531031 - RNA, 19 nt, Artificial Sequence
  Description of Artificial Sequence: Synthetic oligonucleotide
  Antisense strand to SEQ ID NO: 1531030
uaccacauccgucucuacc

SEQ ID NO: 1531032 - RNA, 19 nt, Artificial Sequence
  Description of Artificial Sequence: Synthetic oligonucleotide
  Sense strand starting at position 2966 of SEQ ID NO: 1245033
uagaguaggaugugcuaau

SEQ ID NO: 1531033 - RNA, 19 nt, Artificial Sequence
  Description of Artificial Sequence: Synthetic oligonucleotide
  Antisense strand to SEQ ID NO: 1531032
auuagcacauccuacucua

SEQ ID NO: 1531034 - RNA, 19 nt, Artificial Sequence
  Description of Artificial Sequence: Synthetic oligonucleotide
  Sense strand starting at position 2967 of SEQ ID NO: 1245033
agaguaggaugugcuaauu

SEQ ID NO: 1531035 - RNA, 19 nt, Artificial Sequence
  Description of Artificial Sequence: Synthetic oligonucleotide
  Antisense strand to SEQ ID NO: 1531034
aauuagcacauccuacucu

SEQ ID NO: 1531036 - RNA, 19 nt, Artificial Sequence
  Description of Artificial Sequence: Synthetic oligonucleotide
  Sense strand starting at position 3053 of SEQ ID NO: 1245033
cauguuugaucagucuuga

SEQ ID NO: 1531037 - RNA, 19 nt, Artificial Sequence
  Description of Artificial Sequence: Synthetic oligonucleotide
  Antisense strand to SEQ ID NO: 1531036
ucaagacugaucaaacaug

SEQ ID NO: 1531038 - RNA, 19 nt, Artificial Sequence
  Description of Artificial Sequence: Synthetic oligonucleotide
  Sense strand starting at position 3103 of SEQ ID NO: 1245033
ggaguaaaggccugggcaa

SEQ ID NO: 1531039 - RNA, 19 nt, Artificial Sequence
  Description of Artificial Sequence: Synthetic oligonucleotide
  Antisense strand to SEQ ID NO: 1531038
uugcccaggccuuuacucc

SEQ ID NO: 1531040 - RNA, 19 nt, Artificial Sequence
  Description of Artificial Sequence: Synthetic oligonucleotide
  Sense strand starting at position 3104 of SEQ ID NO: 1245033
gaguaaaggccugggcaaa

SEQ ID NO: 1531041 - RNA, 19 nt, Artificial Sequence
  Description of Artificial Sequence: Synthetic oligonucleotide
  Antisense strand to SEQ ID NO: 1531040
uuugcccaggccuuuacuc

SEQ ID NO: 1531042 - RNA, 19 nt, Artificial Sequence
  Description of Artificial Sequence: Synthetic oligonucleotide
  Sense strand starting at position 3246 of SEQ ID NO: 1245033
aaaggucaaguaugucauu

SEQ ID NO: 1531043 - RNA, 19 nt, Artificial Sequence
  Description of Artificial Sequence: Synthetic oligonucleotide
  Antisense strand to SEQ ID NO: 1531042
aaugacauacuugaccuuu

SEQ ID NO: 1531044 - RNA, 19 nt, Artificial Sequence
  Description of Artificial Sequence: Synthetic oligonucleotide
  Sense strand starting at position 3261 of SEQ ID NO: 1245033
cauugcuguguuuggauuu

SEQ ID NO: 1531045 - RNA, 19 nt, Artificial Sequence
  Description of Artificial Sequence: Synthetic oligonucleotide
  Antisense strand to SEQ ID NO: 1531044
aaauccaaacacagcaaug

SEQ ID NO: 1531046 - RNA, 19 nt, Artificial Sequence
  Description of Artificial Sequence: Synthetic oligonucleotide
  Sense strand starting at position 3366 of SEQ ID NO: 1245033
aaauguguggaggguauau

SEQ ID NO: 1531047 - RNA, 19 nt, Artificial Sequence
  Description of Artificial Sequence: Synthetic oligonucleotide
  Antisense strand to SEQ ID NO: 1531046
auauacccuccacacauuu

SEQ ID NO: 1531048 - RNA, 19 nt, Artificial Sequence
  Description of Artificial Sequence: Synthetic oligonucleotide
  Sense strand starting at position 3392 of SEQ ID NO: 1245033
uggagauauccggaugcca

SEQ ID NO: 1531049 - RNA, 19 nt, Artificial Sequence
  Description of Artificial Sequence: Synthetic oligonucleotide
  Antisense strand to SEQ ID NO: 1531048
uggcauccggauaucucca

SEQ ID NO: 1531050 - RNA, 19 nt, Artificial Sequence
  Description of Artificial Sequence: Synthetic oligonucleotide
  Sense strand starting at position 3394 of SEQ ID NO: 1245033
gagauauccggaugccauc

SEQ ID NO: 1531051 - RNA, 19 nt, Artificial Sequence
  Description of Artificial Sequence: Synthetic oligonucleotide
  Antisense strand to SEQ ID NO: 1531050
gauggcauccggauaucuc

SEQ ID NO: 1531052 - RNA, 19 nt, Artificial Sequence
  Description of Artificial Sequence: Synthetic oligonucleotide
  Sense strand starting at position 3401 of SEQ ID NO: 1245033
ccggaugccauccaaagua

SEQ ID NO: 1531053 - RNA, 19 nt, Artificial Sequence
  Description of Artificial Sequence: Synthetic oligonucleotide
  Antisense strand to SEQ ID NO: 1531052
uacuuuggauggcauccgg

SEQ ID NO: 1531054 - RNA, 19 nt, Artificial Sequence
  Description of Artificial Sequence: Synthetic oligonucleotide
  Sense strand starting at position 3460 of SEQ ID NO: 1245033
aagagauauuuagguagua

SEQ ID NO: 1531055 - RNA, 19 nt, Artificial Sequence
  Description of Artificial Sequence: Synthetic oligonucleotide
  Antisense strand to SEQ ID NO: 1531054
uacuaccuaaauaucucuu

SEQ ID NO: 1531056 - RNA, 19 nt, Artificial Sequence
  Description of Artificial Sequence: Synthetic oligonucleotide
  Sense strand starting at position 3482 of SEQ ID NO: 1245033
uugauagaacuuggugauc

SEQ ID NO: 1531057 - RNA, 19 nt, Artificial Sequence
  Description of Artificial Sequence: Synthetic oligonucleotide
  Antisense strand to SEQ ID NO: 1531056
gaucaccaaguucuaucaa

SEQ ID NO: 1531058 - RNA, 19 nt, Artificial Sequence
  Description of Artificial Sequence: Synthetic oligonucleotide
  Sense strand starting at position 3487 of SEQ ID NO: 1245033
agaacuuggugaucuaaua

SEQ ID NO: 1531059 - RNA, 19 nt, Artificial Sequence
  Description of Artificial Sequence: Synthetic oligonucleotide
  Antisense strand to SEQ ID NO: 1531058
uauuagaucaccaaguucu

SEQ ID NO: 1531060 - RNA, 19 nt, Artificial Sequence
  Description of Artificial Sequence: Synthetic oligonucleotide
  Sense strand starting at position 3523 of SEQ ID NO: 1245033
aacuaaguugagugacuga

SEQ ID NO: 1531061 - RNA, 19 nt, Artificial Sequence
  Description of Artificial Sequence: Synthetic oligonucleotide
  Antisense strand to SEQ ID NO: 1531060
ucagucacucaacuuaguu

SEQ ID NO: 1531062 - RNA, 19 nt, Artificial Sequence
  Description of Artificial Sequence: Synthetic oligonucleotide
  Sense strand starting at position 3574 of SEQ ID NO: 1245033
gcaggaaauuugcgaauuu

SEQ ID NO: 1531063 - RNA, 19 nt, Artificial Sequence
  Description of Artificial Sequence: Synthetic oligonucleotide
  Antisense strand to SEQ ID NO: 1531062
aaauucgcaaauuuccugc

SEQ ID NO: 1531064 - RNA, 19 nt, Artificial Sequence
  Description of Artificial Sequence: Synthetic oligonucleotide
  Sense strand starting at position 3585 of SEQ ID NO: 1245033
gcgaauuugugcuuuguag

SEQ ID NO: 1531065 - RNA, 19 nt, Artificial Sequence
  Description of Artificial Sequence: Synthetic oligonucleotide
  Antisense strand to SEQ ID NO: 1531064
cuacaaagcacaaauucgc

SEQ ID NO: 1531066 - RNA, 19 nt, Artificial Sequence
  Description of Artificial Sequence: Synthetic oligonucleotide
  Sense strand starting at position 3587 of SEQ ID NO: 1245033
gaauuugugcuuuguagac

SEQ ID NO: 1531067 - RNA, 19 nt, Artificial Sequence
  Description of Artificial Sequence: Synthetic oligonucleotide
  Antisense strand to SEQ ID NO: 1531066
gucuacaaagcacaaauuc

SEQ ID NO: 1531068 - RNA, 19 nt, Artificial Sequence
  Description of Artificial Sequence: Synthetic oligonucleotide
  Sense strand starting at position 3672 of SEQ ID NO: 1245033
aauaguccauuuggaauga

SEQ ID NO: 1531069 - RNA, 19 nt, Artificial Sequence
  Description of Artificial Sequence: Synthetic oligonucleotide
  Antisense strand to SEQ ID NO: 1531068
ucauuccaaauggacuauu

SEQ ID NO: 1531070 - RNA, 19 nt, Artificial Sequence
  Description of Artificial Sequence: Synthetic oligonucleotide
  Sense strand starting at position 3673 of SEQ ID NO: 1245033
auaguccauuuggaaugaa

SEQ ID NO: 1531071 - RNA, 19 nt, Artificial Sequence
  Description of Artificial Sequence: Synthetic oligonucleotide
  Antisense strand to SEQ ID NO: 1531070
uucauuccaaauggacuau

SEQ ID NO: 1531072 - RNA, 19 nt, Artificial Sequence
  Description of Artificial Sequence: Synthetic oligonucleotide
  Sense strand starting at position 3717 of SEQ ID NO: 1245033
agaaaugauucugugagcu

SEQ ID NO: 1531073 - RNA, 19 nt, Artificial Sequence
  Description of Artificial Sequence: Synthetic oligonucleotide
  Antisense strand to SEQ ID NO: 1531072
agcucacagaaucauuucu

SEQ ID NO: 1531074 - RNA, 19 nt, Artificial Sequence
  Description of Artificial Sequence: Synthetic oligonucleotide
  Sense strand starting at position 3744 of SEQ ID NO: 1245033
ugguaauuaccauggcaua

SEQ ID NO: 1531075 - RNA, 19 nt, Artificial Sequence
  Description of Artificial Sequence: Synthetic oligonucleotide
  Antisense strand to SEQ ID NO: 1531074
uaugccaugguaauuacca

SEQ ID NO: 1531076 - RNA, 19 nt, Artificial Sequence
  Description of Artificial Sequence: Synthetic oligonucleotide
  Sense strand starting at position 3745 of SEQ ID NO: 1245033
gguaauuaccauggcauau

SEQ ID NO: 1531077 - RNA, 19 nt, Artificial Sequence
  Description of Artificial Sequence: Synthetic oligonucleotide
  Antisense strand to SEQ ID NO: 1531076
auaugccaugguaauuacc

SEQ ID NO: 1531078 - RNA, 19 nt, Artificial Sequence
  Description of Artificial Sequence: Synthetic oligonucleotide
  Sense strand starting at position 3757 of SEQ ID NO: 1245033
ggcauauucccaugguaca

SEQ ID NO: 1531079 - RNA, 19 nt, Artificial Sequence
  Description of Artificial Sequence: Synthetic oligonucleotide
  Antisense strand to SEQ ID NO: 1531078
uguaccaugggaauaugcc

SEQ ID NO: 1531080 - RNA, 19 nt, Artificial Sequence
  Description of Artificial Sequence: Synthetic oligonucleotide
  Sense strand starting at position 3832 of SEQ ID NO: 1245033
gggaaugucuuccuaccac

SEQ ID NO: 1531081 - RNA, 19 nt, Artificial Sequence
  Description of Artificial Sequence: Synthetic oligonucleotide
  Antisense strand to SEQ ID NO: 1531080
gugguaggaagacauuccc

SEQ ID NO: 1531082 - RNA, 19 nt, Artificial Sequence
  Description of Artificial Sequence: Synthetic oligonucleotide
  Sense strand starting at position 3920 of SEQ ID NO: 1245033
uggcaaugugcugcucgau

SEQ ID NO: 1531083 - RNA, 19 nt, Artificial Sequence
  Description of Artificial Sequence: Synthetic oligonucleotide
  Antisense strand to SEQ ID NO: 1531082
aucgagcagcacauugcca

SEQ ID NO: 1531084 - RNA, 19 nt, Artificial Sequence
  Description of Artificial Sequence: Synthetic oligonucleotide
  Sense strand starting at position 3954 of SEQ ID NO: 1245033
ugcugcugacuuuaauaaa

SEQ ID NO: 1531085 - RNA, 19 nt, Artificial Sequence
  Description of Artificial Sequence: Synthetic oligonucleotide
  Antisense strand to SEQ ID NO: 1531084
uuuauuaaagucagcagca

SEQ ID NO: 1531086 - RNA, 19 nt, Artificial Sequence
  Description of Artificial Sequence: Synthetic oligonucleotide
  Sense strand starting at position 18 of SEQ ID NO: 1245034
ccuuuaagucagugagcua

SEQ ID NO: 1531087 - RNA, 19 nt, Artificial Sequence
  Description of Artificial Sequence: Synthetic oligonucleotide
  Antisense strand to SEQ ID NO: 1531086
uagcucacugacuuaaagg

SEQ ID NO: 1531088 - RNA, 19 nt, Artificial Sequence
  Description of Artificial Sequence: Synthetic oligonucleotide
  Sense strand starting at position 21 of SEQ ID NO: 1245034
uuaagucagugagcuagaa

SEQ ID NO: 1531089 - RNA, 19 nt, Artificial Sequence
  Description of Artificial Sequence: Synthetic oligonucleotide
  Antisense strand to SEQ ID NO: 1531088
uucuagcucacugacuuaa

SEQ ID NO: 1531090 - RNA, 19 nt, Artificial Sequence
  Description of Artificial Sequence: Synthetic oligonucleotide
  Sense strand starting at position 34 of SEQ ID NO: 1245034
cuagaacuuguaugcacua

SEQ ID NO: 1531091 - RNA, 19 nt, Artificial Sequence
  Description of Artificial Sequence: Synthetic oligonucleotide
  Antisense strand to SEQ ID NO: 1531090
uagugcauacaaguucuag

SEQ ID NO: 1531092 - RNA, 19 nt, Artificial Sequence
  Description of Artificial Sequence: Synthetic oligonucleotide
  Sense strand starting at position 410 of SEQ ID NO: 1245034
ugaggauguuggguacagu

SEQ ID NO: 1531093 - RNA, 19 nt, Artificial Sequence
  Description of Artificial Sequence: Synthetic oligonucleotide
  Antisense strand to SEQ ID NO: 1531092
acuguacccaacauccuca

SEQ ID NO: 1531094 - RNA, 19 nt, Artificial Sequence
  Description of Artificial Sequence: Synthetic oligonucleotide
  Sense strand starting at position 421 of SEQ ID NO: 1245034
gguacagucucauugcuga

SEQ ID NO: 1531095 - RNA, 19 nt, Artificial Sequence
  Description of Artificial Sequence: Synthetic oligonucleotide
  Antisense strand to SEQ ID NO: 1531094
ucagcaaugagacuguacc

SEQ ID NO: 1531096 - RNA, 19 nt, Artificial Sequence
  Description of Artificial Sequence: Synthetic oligonucleotide
  Sense strand starting at position 424 of SEQ ID NO: 1245034
acagucucauugcugagau

SEQ ID NO: 1531097 - RNA, 19 nt, Artificial Sequence
  Description of Artificial Sequence: Synthetic oligonucleotide
  Antisense strand to SEQ ID NO: 1531096
aucucagcaaugagacugu

SEQ ID NO: 1531098 - RNA, 19 nt, Artificial Sequence
  Description of Artificial Sequence: Synthetic oligonucleotide
  Sense strand starting at position 426 of SEQ ID NO: 1245034
agucucauugcugagauuc

SEQ ID NO: 1531099 - RNA, 19 nt, Artificial Sequence
  Description of Artificial Sequence: Synthetic oligonucleotide
  Antisense strand to SEQ ID NO: 1531098
gaaucucagcaaugagacu

SEQ ID NO: 1531100 - RNA, 19 nt, Artificial Sequence
  Description of Artificial Sequence: Synthetic oligonucleotide
  Sense strand starting at position 473 of SEQ ID NO: 1245034
uugguacaagaguggaaau

SEQ ID NO: 1531101 - RNA, 19 nt, Artificial Sequence
  Description of Artificial Sequence: Synthetic oligonucleotide
  Antisense strand to SEQ ID NO: 1531100
auuuccacucuuguaccaa

SEQ ID NO: 1531102 - RNA, 19 nt, Artificial Sequence
  Description of Artificial Sequence: Synthetic oligonucleotide
  Sense strand starting at position 1199 of SEQ ID NO: 1245034
aaggacgucuccuuguauu

SEQ ID NO: 1531103 - RNA, 19 nt, Artificial Sequence
  Description of Artificial Sequence: Synthetic oligonucleotide
  Antisense strand to SEQ ID NO: 1531102
aauacaaggagacguccuu

SEQ ID NO: 1531104 - RNA, 19 nt, Artificial Sequence
  Description of Artificial Sequence: Synthetic oligonucleotide
  Sense strand starting at position 1212 of SEQ ID NO: 1245034
uguauuguacauggacuua

SEQ ID NO: 1531105 - RNA, 19 nt, Artificial Sequence
  Description of Artificial Sequence: Synthetic oligonucleotide
  Antisense strand to SEQ ID NO: 1531104
uaaguccauguacaauaca

SEQ ID NO: 1531106 - RNA, 19 nt, Artificial Sequence
  Description of Artificial Sequence: Synthetic oligonucleotide
  Sense strand starting at position 1248 of SEQ ID NO: 1245034
agacauuauuuacacgagu

SEQ ID NO: 1531107 - RNA, 19 nt, Artificial Sequence
  Description of Artificial Sequence: Synthetic oligonucleotide
  Antisense strand to SEQ ID NO: 1531106
acucguguaaauaaugucu

SEQ ID NO: 1531108 - RNA, 19 nt, Artificial Sequence
  Description of Artificial Sequence: Synthetic oligonucleotide
  Sense strand starting at position 1276 of SEQ ID NO: 1245034
guuaaaguuagcgcaguuu

SEQ ID NO: 1531109 - RNA, 19 nt, Artificial Sequence
  Description of Artificial Sequence: Synthetic oligonucleotide
  Antisense strand to SEQ ID NO: 1531108
aaacugcgcuaacuuuaac

SEQ ID NO: 1531110 - RNA, 19 nt, Artificial Sequence
  Description of Artificial Sequence: Synthetic oligonucleotide
  Sense strand starting at position 1318 of SEQ ID NO: 1245034
ucagaauacugaggaagaa

SEQ ID NO: 1531111 - RNA, 19 nt, Artificial Sequence
  Description of Artificial Sequence: Synthetic oligonucleotide
  Antisense strand to SEQ ID NO: 1531110
uucuuccucaguauucuga

SEQ ID NO: 1531112 - RNA, 19 nt, Artificial Sequence
  Description of Artificial Sequence: Synthetic oligonucleotide
  Sense strand starting at position 1345 of SEQ ID NO: 1245034
gguagaccucggugggaaa

SEQ ID NO: 1531113 - RNA, 19 nt, Artificial Sequence
  Description of Artificial Sequence: Synthetic oligonucleotide
  Antisense strand to SEQ ID NO: 1531112
uuucccaccgaggucuacc

SEQ ID NO: 1531114 - RNA, 19 nt, Artificial Sequence
  Description of Artificial Sequence: Synthetic oligonucleotide
  Sense strand starting at position 1371 of SEQ ID NO: 1245034
ggaaacuauuucuaagcaa

SEQ ID NO: 1531115 - RNA, 19 nt, Artificial Sequence
  Description of Artificial Sequence: Synthetic oligonucleotide
  Antisense strand to SEQ ID NO: 1531114
uugcuuagaaauaguuucc

SEQ ID NO: 1531116 - RNA, 19 nt, Artificial Sequence
  Description of Artificial Sequence: Synthetic oligonucleotide
  Sense strand starting at position 1475 of SEQ ID NO: 1245034
gagggaacuguccgacaca

SEQ ID NO: 1531117 - RNA, 19 nt, Artificial Sequence
  Description of Artificial Sequence: Synthetic oligonucleotide
  Antisense strand to SEQ ID NO: 1531116
ugugucggacaguucccuc

SEQ ID NO: 1531118 - RNA, 19 nt, Artificial Sequence
  Description of Artificial Sequence: Synthetic oligonucleotide
  Sense strand starting at position 1520 of SEQ ID NO: 1245034
gaagcaagguuccugcaga

SEQ ID NO: 1531119 - RNA, 19 nt, Artificial Sequence
  Description of Artificial Sequence: Synthetic oligonucleotide
  Antisense strand to SEQ ID NO: 1531118
ucugcaggaaccuugcuuc

SEQ ID NO: 1531120 - RNA, 19 nt, Artificial Sequence
  Description of Artificial Sequence: Synthetic oligonucleotide
  Sense strand starting at position 2058 of SEQ ID NO: 1245034
gacugauccugcucacugu

SEQ ID NO: 1531121 - RNA, 19 nt, Artificial Sequence
  Description of Artificial Sequence: Synthetic oligonucleotide
  Antisense strand to SEQ ID NO: 1531120
acagugagcaggaucaguc

SEQ ID NO: 1531122 - RNA, 19 nt, Artificial Sequence
  Description of Artificial Sequence: Synthetic oligonucleotide
  Sense strand starting at position 2086 of SEQ ID NO: 1245034
cguacuuagagcgucgaua

SEQ ID NO: 1531123 - RNA, 19 nt, Artificial Sequence
  Description of Artificial Sequence: Synthetic oligonucleotide
  Antisense strand to SEQ ID NO: 1531122
uaucgacgcucuaaguacg

SEQ ID NO: 1531124 - RNA, 19 nt, Artificial Sequence
  Description of Artificial Sequence: Synthetic oligonucleotide
  Sense strand starting at position 2147 of SEQ ID NO: 1245034
auuagaucacagcgucgaa

SEQ ID NO: 1531125 - RNA, 19 nt, Artificial Sequence
  Description of Artificial Sequence: Synthetic oligonucleotide
  Antisense strand to SEQ ID NO: 1531124
uucgacgcugugaucuaau

SEQ ID NO: 1531126 - RNA, 19 nt, Artificial Sequence
  Description of Artificial Sequence: Synthetic oligonucleotide
  Sense strand starting at position 2312 of SEQ ID NO: 1245034
cugaaucuugcagggacau

SEQ ID NO: 1531127 - RNA, 19 nt, Artificial Sequence
  Description of Artificial Sequence: Synthetic oligonucleotide
  Antisense strand to SEQ ID NO: 1531126
augucccugcaagauucag

SEQ ID NO: 1531128 - RNA, 19 nt, Artificial Sequence
  Description of Artificial Sequence: Synthetic oligonucleotide
  Sense strand starting at position 2352 of SEQ ID NO: 1245034
aucugcuuauucuuggcaa

SEQ ID NO: 1531129 - RNA, 19 nt, Artificial Sequence
  Description of Artificial Sequence: Synthetic oligonucleotide
  Antisense strand to SEQ ID NO: 1531128
uugccaagaauaagcagau

SEQ ID NO: 1531130 - RNA, 19 nt, Artificial Sequence
  Description of Artificial Sequence: Synthetic oligonucleotide
  Sense strand starting at position 2354 of SEQ ID NO: 1245034
cugcuuauucuuggcaaag

SEQ ID NO: 1531131 - RNA, 19 nt, Artificial Sequence
  Description of Artificial Sequence: Synthetic oligonucleotide
  Antisense strand to SEQ ID NO: 1531130
cuuugccaagaauaagcag

SEQ ID NO: 1531132 - RNA, 19 nt, Artificial Sequence
  Description of Artificial Sequence: Synthetic oligonucleotide
  Sense strand starting at position 2393 of SEQ ID NO: 1245034
gaaccagaaucgguuggau

SEQ ID NO: 1531133 - RNA, 19 nt, Artificial Sequence
  Description of Artificial Sequence: Synthetic oligonucleotide
  Antisense strand to SEQ ID NO: 1531132
auccaaccgauucugguuc

SEQ ID NO: 1531134 - RNA, 19 nt, Artificial Sequence
  Description of Artificial Sequence: Synthetic oligonucleotide
  Sense strand starting at position 2395 of SEQ ID NO: 1245034
accagaaucgguuggauca

SEQ ID NO: 1531135 - RNA, 19 nt, Artificial Sequence
  Description of Artificial Sequence: Synthetic oligonucleotide
  Antisense strand to SEQ ID NO: 1531134
ugauccaaccgauucuggu

SEQ ID NO: 1531136 - RNA, 19 nt, Artificial Sequence
  Description of Artificial Sequence: Synthetic oligonucleotide
  Sense strand starting at position 2475 of SEQ ID NO: 1245034
gagccugaacaguggcaaa

SEQ ID NO: 1531137 - RNA, 19 nt, Artificial Sequence
  Description of Artificial Sequence: Synthetic oligonucleotide
  Antisense strand to SEQ ID NO: 1531136
uuugccacuguucaggcuc

SEQ ID NO: 1531138 - RNA, 19 nt, Artificial Sequence
  Description of Artificial Sequence: Synthetic oligonucleotide
  Sense strand starting at position 2489 of SEQ ID NO: 1245034
gcaaauguuugagcuccaa

SEQ ID NO: 1531139 - RNA, 19 nt, Artificial Sequence
  Description of Artificial Sequence: Synthetic oligonucleotide
  Antisense strand to SEQ ID NO: 1531138
uuggagcucaaacauuugc

SEQ ID NO: 1531140 - RNA, 19 nt, Artificial Sequence
  Description of Artificial Sequence: Synthetic oligonucleotide
  Sense strand starting at position 2574 of SEQ ID NO: 1245034
ggaacuaaaugcuuagagu

SEQ ID NO: 1531141 - RNA, 19 nt, Artificial Sequence
  Description of Artificial Sequence: Synthetic oligonucleotide
  Antisense strand to SEQ ID NO: 1531140
acucuaagcauuuaguucc

SEQ ID NO: 1531142 - RNA, 19 nt, Artificial Sequence
  Description of Artificial Sequence: Synthetic oligonucleotide
  Sense strand starting at position 2580 of SEQ ID NO: 1245034
aaaugcuuagagugaaagu

SEQ ID NO: 1531143 - RNA, 19 nt, Artificial Sequence
  Description of Artificial Sequence: Synthetic oligonucleotide
  Antisense strand to SEQ ID NO: 1531142
acuuucacucuaagcauuu

SEQ ID NO: 1531144 - RNA, 19 nt, Artificial Sequence
  Description of Artificial Sequence: Synthetic oligonucleotide
  Sense strand starting at position 2673 of SEQ ID NO: 1245034
gagacugagugcuucuuaa

SEQ ID NO: 1531145 - RNA, 19 nt, Artificial Sequence
  Description of Artificial Sequence: Synthetic oligonucleotide
  Antisense strand to SEQ ID NO: 1531144
uuaagaagcacucagucuc

SEQ ID NO: 1531146 - RNA, 19 nt, Artificial Sequence
  Description of Artificial Sequence: Synthetic oligonucleotide
  Sense strand starting at position 2735 of SEQ ID NO: 1245034
gcuaauugaccaggaagca

SEQ ID NO: 1531147 - RNA, 19 nt, Artificial Sequence
  Description of Artificial Sequence: Synthetic oligonucleotide
  Antisense strand to SEQ ID NO: 1531146
ugcuuccuggucaauuagc

SEQ ID NO: 1531148 - RNA, 19 nt, Artificial Sequence
  Description of Artificial Sequence: Synthetic oligonucleotide
  Sense strand starting at position 2789 of SEQ ID NO: 1245034
ggcagaugagucuggauag

SEQ ID NO: 1531149 - RNA, 19 nt, Artificial Sequence
  Description of Artificial Sequence: Synthetic oligonucleotide
  Antisense strand to SEQ ID NO: 1531148
cuauccagacucaucugcc

SEQ ID NO: 1531150 - RNA, 19 nt, Artificial Sequence
  Description of Artificial Sequence: Synthetic oligonucleotide
  Sense strand starting at position 2886 of SEQ ID NO: 1245034
aggaaauuugcuugcagcu

SEQ ID NO: 1531151 - RNA, 19 nt, Artificial Sequence
  Description of Artificial Sequence: Synthetic oligonucleotide
  Antisense strand to SEQ ID NO: 1531150
agcugcaagcaaauuuccu

SEQ ID NO: 1531152 - RNA, 19 nt, Artificial Sequence
  Description of Artificial Sequence: Synthetic oligonucleotide
  Sense strand starting at position 3037 of SEQ ID NO: 1245034
aggugucugcagggaugua

SEQ ID NO: 1531153 - RNA, 19 nt, Artificial Sequence
  Description of Artificial Sequence: Synthetic oligonucleotide
  Antisense strand to SEQ ID NO: 1531152
uacaucccugcagacaccu

SEQ ID NO: 1531154 - RNA, 19 nt, Artificial Sequence
  Description of Artificial Sequence: Synthetic oligonucleotide
  Sense strand starting at position 3038 of SEQ ID NO: 1245034
ggugucugcagggauguau

SEQ ID NO: 1531155 - RNA, 19 nt, Artificial Sequence
  Description of Artificial Sequence: Synthetic oligonucleotide
  Antisense strand to SEQ ID NO: 1531154
auacaucccugcagacacc

SEQ ID NO: 1531156 - RNA, 19 nt, Artificial Sequence
  Description of Artificial Sequence: Synthetic oligonucleotide
  Sense strand starting at position 3047 of SEQ ID NO: 1245034
agggauguaucugcaacaa

SEQ ID NO: 1531157 - RNA, 19 nt, Artificial Sequence
  Description of Artificial Sequence: Synthetic oligonucleotide
  Antisense strand to SEQ ID NO: 1531156
uuguugcagauacaucccu

SEQ ID NO: 1531158 - RNA, 19 nt, Artificial Sequence
  Description of Artificial Sequence: Synthetic oligonucleotide
  Sense strand starting at position 3075 of SEQ ID NO: 1245034
ugguuugaaccuuggcuca

SEQ ID NO: 1531159 - RNA, 19 nt, Artificial Sequence
  Description of Artificial Sequence: Synthetic oligonucleotide
  Antisense strand to SEQ ID NO: 1531158
ugagccaagguucaaacca

SEQ ID NO: 1531160 - RNA, 19 nt, Artificial Sequence
  Description of Artificial Sequence: Synthetic oligonucleotide
  Sense strand starting at position 3238 of SEQ ID NO: 1245034
gcuaccugauaucuagaaa

SEQ ID NO: 1531161 - RNA, 19 nt, Artificial Sequence
  Description of Artificial Sequence: Synthetic oligonucleotide
  Antisense strand to SEQ ID NO: 1531160
uuucuagauaucagguagc

SEQ ID NO: 1531162 - RNA, 19 nt, Artificial Sequence
  Description of Artificial Sequence: Synthetic oligonucleotide
  Sense strand starting at position 3358 of SEQ ID NO: 1245034
ggaggugaguaauuauccu

SEQ ID NO: 1531163 - RNA, 19 nt, Artificial Sequence
  Description of Artificial Sequence: Synthetic oligonucleotide
  Antisense strand to SEQ ID NO: 1531162
aggauaauuacucaccucc

SEQ ID NO: 1531164 - RNA, 19 nt, Artificial Sequence
  Description of Artificial Sequence: Synthetic oligonucleotide
  Sense strand starting at position 3631 of SEQ ID NO: 1245034
ugacuuguccagggccaua

SEQ ID NO: 1531165 - RNA, 19 nt, Artificial Sequence
  Description of Artificial Sequence: Synthetic oligonucleotide
  Antisense strand to SEQ ID NO: 1531164
uauggcccuggacaaguca

SEQ ID NO: 1531166 - RNA, 19 nt, Artificial Sequence
  Description of Artificial Sequence: Synthetic oligonucleotide
  Sense strand starting at position 856 of SEQ ID NO: 1245035
ccugauguuuaacuguaaa

SEQ ID NO: 1531167 - RNA, 19 nt, Artificial Sequence
  Description of Artificial Sequence: Synthetic oligonucleotide
  Antisense strand to SEQ ID NO: 1531166
uuuacaguuaaacaucagg

SEQ ID NO: 1531168 - RNA, 19 nt, Artificial Sequence
  Description of Artificial Sequence: Synthetic oligonucleotide
  Sense strand starting at position 900 of SEQ ID NO: 1245035
agccuaucugggcauauua

SEQ ID NO: 1531169 - RNA, 19 nt, Artificial Sequence
  Description of Artificial Sequence: Synthetic oligonucleotide
  Antisense strand to SEQ ID NO: 1531168
uaauaugcccagauaggcu

SEQ ID NO: 1531170 - RNA, 19 nt, Artificial Sequence
  Description of Artificial Sequence: Synthetic oligonucleotide
  Sense strand starting at position 911 of SEQ ID NO: 1245035
gcauauuaggaagaugugu

SEQ ID NO: 1531171 - RNA, 19 nt, Artificial Sequence
  Description of Artificial Sequence: Synthetic oligonucleotide
  Antisense strand to SEQ ID NO: 1531170
acacaucuuccuaauaugc

SEQ ID NO: 1531172 - RNA, 19 nt, Artificial Sequence
  Description of Artificial Sequence: Synthetic oligonucleotide
  Sense strand starting at position 913 of SEQ ID NO: 1245035
auauuaggaagauguguga

SEQ ID NO: 1531173 - RNA, 19 nt, Artificial Sequence
  Description of Artificial Sequence: Synthetic oligonucleotide
  Antisense strand to SEQ ID NO: 1531172
ucacacaucuuccuaauau

SEQ ID NO: 1531174 - RNA, 19 nt, Artificial Sequence
  Description of Artificial Sequence: Synthetic oligonucleotide
  Sense strand starting at position 917 of SEQ ID NO: 1245035
uaggaagaugugugauuac

SEQ ID NO: 1531175 - RNA, 19 nt, Artificial Sequence
  Description of Artificial Sequence: Synthetic oligonucleotide
  Antisense strand to SEQ ID NO: 1531174
guaaucacacaucuuccua

SEQ ID NO: 1531176 - RNA, 19 nt, Artificial Sequence
  Description of Artificial Sequence: Synthetic oligonucleotide
  Sense strand starting at position 920 of SEQ ID NO: 1245035
gaagaugugugauuacuuc

SEQ ID NO: 1531177 - RNA, 19 nt, Artificial Sequence
  Description of Artificial Sequence: Synthetic oligonucleotide
  Antisense strand to SEQ ID NO: 1531176
gaaguaaucacacaucuuc

SEQ ID NO: 1531178 - RNA, 19 nt, Artificial Sequence
  Description of Artificial Sequence: Synthetic oligonucleotide
  Sense strand starting at position 944 of SEQ ID NO: 1245035
ucugguuugguggacagaa

SEQ ID NO: 1531179 - RNA, 19 nt, Artificial Sequence
  Description of Artificial Sequence: Synthetic oligonucleotide
  Antisense strand to SEQ ID NO: 1531178
uucuguccaccaaaccaga

SEQ ID NO: 1531180 - RNA, 19 nt, Artificial Sequence
  Description of Artificial Sequence: Synthetic oligonucleotide
  Sense strand starting at position 964 of SEQ ID NO: 1245035
gaugguaugcuuggaauca

SEQ ID NO: 1531181 - RNA, 19 nt, Artificial Sequence
  Description of Artificial Sequence: Synthetic oligonucleotide
  Antisense strand to SEQ ID NO: 1531180
ugauuccaagcauaccauc

SEQ ID NO: 1531182 - RNA, 19 nt, Artificial Sequence
  Description of Artificial Sequence: Synthetic oligonucleotide
  Sense strand starting at position 1137 of SEQ ID NO: 1245035
uuagcuguguaacuaauuu

SEQ ID NO: 1531183 - RNA, 19 nt, Artificial Sequence
  Description of Artificial Sequence: Synthetic oligonucleotide
  Antisense strand to SEQ ID NO: 1531182
aaauuaguuacacagcuaa

SEQ ID NO: 1531184 - RNA, 19 nt, Artificial Sequence
  Description of Artificial Sequence: Synthetic oligonucleotide
  Sense strand starting at position 1161 of SEQ ID NO: 1245035
gggaaaguuucacugcaga

SEQ ID NO: 1531185 - RNA, 19 nt, Artificial Sequence
  Description of Artificial Sequence: Synthetic oligonucleotide
  Antisense strand to SEQ ID NO: 1531184
ucugcagugaaacuuuccc

SEQ ID NO: 1531186 - RNA, 19 nt, Artificial Sequence
  Description of Artificial Sequence: Synthetic oligonucleotide
  Sense strand starting at position 1291 of SEQ ID NO: 1245035
uggguuucccgcguugcaa

SEQ ID NO: 1531187 - RNA, 19 nt, Artificial Sequence
  Description of Artificial Sequence: Synthetic oligonucleotide
  Antisense strand to SEQ ID NO: 1531186
uugcaacgcgggaaaccca

SEQ ID NO: 1531188 - RNA, 19 nt, Artificial Sequence
  Description of Artificial Sequence: Synthetic oligonucleotide
  Sense strand starting at position 1292 of SEQ ID NO: 1245035
ggguuucccgcguugcaaa

SEQ ID NO: 1531189 - RNA, 19 nt, Artificial Sequence
  Description of Artificial Sequence: Synthetic oligonucleotide
  Antisense strand to SEQ ID NO: 1531188
uuugcaacgcgggaaaccc

SEQ ID NO: 1531190 - RNA, 19 nt, Artificial Sequence
  Description of Artificial Sequence: Synthetic oligonucleotide
  Sense strand starting at position 1331 of SEQ ID NO: 1245035
ugagauggcaucugagaga

SEQ ID NO: 1531191 - RNA, 19 nt, Artificial Sequence
  Description of Artificial Sequence: Synthetic oligonucleotide
  Antisense strand to SEQ ID NO: 1531190
ucucucagaugccaucuca

SEQ ID NO: 1531192 - RNA, 19 nt, Artificial Sequence
  Description of Artificial Sequence: Synthetic oligonucleotide
  Sense strand starting at position 1411 of SEQ ID NO: 1245035
uagggaucgcuguaaggau

SEQ ID NO: 1531193 - RNA, 19 nt, Artificial Sequence
  Description of Artificial Sequence: Synthetic oligonucleotide
  Antisense strand to SEQ ID NO: 1531192
auccuuacagcgaucccua

SEQ ID NO: 1531194 - RNA, 19 nt, Artificial Sequence
  Description of Artificial Sequence: Synthetic oligonucleotide
  Sense strand starting at position 1415 of SEQ ID NO: 1245035
gaucgcuguaaggaugaaa

SEQ ID NO: 1531195 - RNA, 19 nt, Artificial Sequence
  Description of Artificial Sequence: Synthetic oligonucleotide
  Antisense strand to SEQ ID NO: 1531194
uuucauccuuacagcgauc

SEQ ID NO: 1531196 - RNA, 19 nt, Artificial Sequence
  Description of Artificial Sequence: Synthetic oligonucleotide
  Sense strand starting at position 1456 of SEQ ID NO: 1245035
caagcagaugcuuaguaua

SEQ ID NO: 1531197 - RNA, 19 nt, Artificial Sequence
  Description of Artificial Sequence: Synthetic oligonucleotide
  Antisense strand to SEQ ID NO: 1531196
uauacuaagcaucugcuug

SEQ ID NO: 1531198 - RNA, 19 nt, Artificial Sequence
  Description of Artificial Sequence: Synthetic oligonucleotide
  Sense strand starting at position 2416 of SEQ ID NO: 1245035
ucucaugaacgcugaaacu

SEQ ID NO: 1531199 - RNA, 19 nt, Artificial Sequence
  Description of Artificial Sequence: Synthetic oligonucleotide
  Antisense strand to SEQ ID NO: 1531198
aguuucagcguucaugaga

SEQ ID NO: 1531200 - RNA, 19 nt, Artificial Sequence
  Description of Artificial Sequence: Synthetic oligonucleotide
  Sense strand starting at position 2586 of SEQ ID NO: 1245035
caaguaugaggcgauguga

SEQ ID NO: 1531201 - RNA, 19 nt, Artificial Sequence
  Description of Artificial Sequence: Synthetic oligonucleotide
  Antisense strand to SEQ ID NO: 1531200
ucacaucgccucauacuug

SEQ ID NO: 1531202 - RNA, 19 nt, Artificial Sequence
  Description of Artificial Sequence: Synthetic oligonucleotide
  Sense strand starting at position 2588 of SEQ ID NO: 1245035
aguaugaggcgaugugaga

SEQ ID NO: 1531203 - RNA, 19 nt, Artificial Sequence
  Description of Artificial Sequence: Synthetic oligonucleotide
  Antisense strand to SEQ ID NO: 1531202
ucucacaucgccucauacu

SEQ ID NO: 1531204 - RNA, 19 nt, Artificial Sequence
  Description of Artificial Sequence: Synthetic oligonucleotide
  Sense strand starting at position 2622 of SEQ ID NO: 1245035
aaacguaucuagguugaug

SEQ ID NO: 1531205 - RNA, 19 nt, Artificial Sequence
  Description of Artificial Sequence: Synthetic oligonucleotide
  Antisense strand to SEQ ID NO: 1531204
caucaaccuagauacguuu

SEQ ID NO: 1531206 - RNA, 19 nt, Artificial Sequence
  Description of Artificial Sequence: Synthetic oligonucleotide
  Sense strand starting at position 2624 of SEQ ID NO: 1245035
acguaucuagguugaugaa

SEQ ID NO: 1531207 - RNA, 19 nt, Artificial Sequence
  Description of Artificial Sequence: Synthetic oligonucleotide
  Antisense strand to SEQ ID NO: 1531206
uucaucaaccuagauacgu

SEQ ID NO: 1531208 - RNA, 19 nt, Artificial Sequence
  Description of Artificial Sequence: Synthetic oligonucleotide
  Sense strand starting at position 2827 of SEQ ID NO: 1245035
guguguugucuguuucuua

SEQ ID NO: 1531209 - RNA, 19 nt, Artificial Sequence
  Description of Artificial Sequence: Synthetic oligonucleotide
  Antisense strand to SEQ ID NO: 1531208
uaagaaacagacaacacac

SEQ ID NO: 1531210 - RNA, 19 nt, Artificial Sequence
  Description of Artificial Sequence: Synthetic oligonucleotide
  Sense strand starting at position 2996 of SEQ ID NO: 1245035
ucauaugguccaggagcaa

SEQ ID NO: 1531211 - RNA, 19 nt, Artificial Sequence
  Description of Artificial Sequence: Synthetic oligonucleotide
  Antisense strand to SEQ ID NO: 1531210
uugcuccuggaccauauga

SEQ ID NO: 1531212 - RNA, 19 nt, Artificial Sequence
  Description of Artificial Sequence: Synthetic oligonucleotide
  Sense strand starting at position 3007 of SEQ ID NO: 1245035
aggagcaaacuuugucagu

SEQ ID NO: 1531213 - RNA, 19 nt, Artificial Sequence
  Description of Artificial Sequence: Synthetic oligonucleotide
  Antisense strand to SEQ ID NO: 1531212
acugacaaaguuugcuccu

SEQ ID NO: 1531214 - RNA, 19 nt, Artificial Sequence
  Description of Artificial Sequence: Synthetic oligonucleotide
  Sense strand starting at position 3008 of SEQ ID NO: 1245035
ggagcaaacuuugucagua

SEQ ID NO: 1531215 - RNA, 19 nt, Artificial Sequence
  Description of Artificial Sequence: Synthetic oligonucleotide
  Antisense strand to SEQ ID NO: 1531214
uacugacaaaguuugcucc

SEQ ID NO: 1531216 - RNA, 19 nt, Artificial Sequence
  Description of Artificial Sequence: Synthetic oligonucleotide
  Sense strand starting at position 3009 of SEQ ID NO: 1245035
gagcaaacuuugucaguaa

SEQ ID NO: 1531217 - RNA, 19 nt, Artificial Sequence
  Description of Artificial Sequence: Synthetic oligonucleotide
  Antisense strand to SEQ ID NO: 1531216
uuacugacaaaguuugcuc

SEQ ID NO: 1531218 - RNA, 19 nt, Artificial Sequence
  Description of Artificial Sequence: Synthetic oligonucleotide
  Sense strand starting at position 3062 of SEQ ID NO: 1245035
agcauaagccaugaaaugu

SEQ ID NO: 1531219 - RNA, 19 nt, Artificial Sequence
  Description of Artificial Sequence: Synthetic oligonucleotide
  Antisense strand to SEQ ID NO: 1531218
acauuucauggcuuaugcu

SEQ ID NO: 1531220 - RNA, 19 nt, Artificial Sequence
  Description of Artificial Sequence: Synthetic oligonucleotide
  Sense strand starting at position 3109 of SEQ ID NO: 1245035
caguuaccaugucuggaua

SEQ ID NO: 1531221 - RNA, 19 nt, Artificial Sequence
  Description of Artificial Sequence: Synthetic oligonucleotide
  Antisense strand to SEQ ID NO: 1531220
uauccagacaugguaacug

SEQ ID NO: 1531222 - RNA, 19 nt, Artificial Sequence
  Description of Artificial Sequence: Synthetic oligonucleotide
  Sense strand starting at position 3112 of SEQ ID NO: 1245035
uuaccaugucuggauacau

SEQ ID NO: 1531223 - RNA, 19 nt, Artificial Sequence
  Description of Artificial Sequence: Synthetic oligonucleotide
  Antisense strand to SEQ ID NO: 1531222
auguauccagacaugguaa

SEQ ID NO: 1531224 - RNA, 19 nt, Artificial Sequence
  Description of Artificial Sequence: Synthetic oligonucleotide
  Sense strand starting at position 3237 of SEQ ID NO: 1245035
auuauauauccacagugug

SEQ ID NO: 1531225 - RNA, 19 nt, Artificial Sequence
  Description of Artificial Sequence: Synthetic oligonucleotide
  Antisense strand to SEQ ID NO: 1531224
cacacuguggauauauaau

SEQ ID NO: 1531226 - RNA, 19 nt, Artificial Sequence
  Description of Artificial Sequence: Synthetic oligonucleotide
  Sense strand starting at position 3271 of SEQ ID NO: 1245035
gguuacuguaaguaauuga

SEQ ID NO: 1531227 - RNA, 19 nt, Artificial Sequence
  Description of Artificial Sequence: Synthetic oligonucleotide
  Antisense strand to SEQ ID NO: 1531226
ucaauuacuuacaguaacc

SEQ ID NO: 1531228 - RNA, 19 nt, Artificial Sequence
  Description of Artificial Sequence: Synthetic oligonucleotide
  Sense strand starting at position 3294 of SEQ ID NO: 1245035
uguaaauccugugugauaa

SEQ ID NO: 1531229 - RNA, 19 nt, Artificial Sequence
  Description of Artificial Sequence: Synthetic oligonucleotide
  Antisense strand to SEQ ID NO: 1531228
uuaucacacaggauuuaca

SEQ ID NO: 1531230 - RNA, 19 nt, Artificial Sequence
  Description of Artificial Sequence: Synthetic oligonucleotide
  Sense strand starting at position 3295 of SEQ ID NO: 1245035
guaaauccugugugauaaa

SEQ ID NO: 1531231 - RNA, 19 nt, Artificial Sequence
  Description of Artificial Sequence: Synthetic oligonucleotide
  Antisense strand to SEQ ID NO: 1531230
uuuaucacacaggauuuac

SEQ ID NO: 1531232 - RNA, 19 nt, Artificial Sequence
  Description of Artificial Sequence: Synthetic oligonucleotide
  Sense strand starting at position 3659 of SEQ ID NO: 1245035
aucguaucuccuuagauuc

SEQ ID NO: 1531233 - RNA, 19 nt, Artificial Sequence
  Description of Artificial Sequence: Synthetic oligonucleotide
  Antisense strand to SEQ ID NO: 1531232
gaaucuaaggagauacgau

SEQ ID NO: 1531234 - RNA, 19 nt, Artificial Sequence
  Description of Artificial Sequence: Synthetic oligonucleotide
  Sense strand starting at position 3724 of SEQ ID NO: 1245035
gcuuuaauuggugagguau

SEQ ID NO: 1531235 - RNA, 19 nt, Artificial Sequence
  Description of Artificial Sequence: Synthetic oligonucleotide
  Antisense strand to SEQ ID NO: 1531234
auaccucaccaauuaaagc

SEQ ID NO: 1531236 - RNA, 19 nt, Artificial Sequence
  Description of Artificial Sequence: Synthetic oligonucleotide
  Sense strand starting at position 3771 of SEQ ID NO: 1245035
ggugucuuucuccauauua

SEQ ID NO: 1531237 - RNA, 19 nt, Artificial Sequence
  Description of Artificial Sequence: Synthetic oligonucleotide
  Antisense strand to SEQ ID NO: 1531236
uaauauggagaaagacacc

SEQ ID NO: 1531238 - RNA, 19 nt, Artificial Sequence
  Description of Artificial Sequence: Synthetic oligonucleotide
  Sense strand starting at position 3773 of SEQ ID NO: 1245035
ugucuuucuccauauuaga

SEQ ID NO: 1531239 - RNA, 19 nt, Artificial Sequence
  Description of Artificial Sequence: Synthetic oligonucleotide
  Antisense strand to SEQ ID NO: 1531238
ucuaauauggagaaagaca

SEQ ID NO: 1531240 - RNA, 19 nt, Artificial Sequence
  Description of Artificial Sequence: Synthetic oligonucleotide
  Sense strand starting at position 3811 of SEQ ID NO: 1245035
ggaggaagauuacagagau

SEQ ID NO: 1531241 - RNA, 19 nt, Artificial Sequence
  Description of Artificial Sequence: Synthetic oligonucleotide
  Antisense strand to SEQ ID NO: 1531240
aucucuguaaucuuccucc

SEQ ID NO: 1531242 - RNA, 19 nt, Artificial Sequence
  Description of Artificial Sequence: Synthetic oligonucleotide
  Sense strand starting at position 3878 of SEQ ID NO: 1245035
gccuuaucacuugauguua

SEQ ID NO: 1531243 - RNA, 19 nt, Artificial Sequence
  Description of Artificial Sequence: Synthetic oligonucleotide
  Antisense strand to SEQ ID NO: 1531242
uaacaucaagugauaaggc

SEQ ID NO: 1531244 - RNA, 19 nt, Artificial Sequence
  Description of Artificial Sequence: Synthetic oligonucleotide
  Sense strand starting at position 3964 of SEQ ID NO: 1245035
auacuauacucuucggaag

SEQ ID NO: 1531245 - RNA, 19 nt, Artificial Sequence
  Description of Artificial Sequence: Synthetic oligonucleotide
  Antisense strand to SEQ ID NO: 1531244
cuuccgaagaguauaguau

SEQ ID NO: 1531246 - RNA, 19 nt, Artificial Sequence
  Description of Artificial Sequence: Synthetic oligonucleotide
  Sense strand starting at position 32 of SEQ ID NO: 1245036
gucugaaccauggguguca

SEQ ID NO: 1531247 - RNA, 19 nt, Artificial Sequence
  Description of Artificial Sequence: Synthetic oligonucleotide
  Antisense strand to SEQ ID NO: 1531246
ugacacccaugguucagac

SEQ ID NO: 1531248 - RNA, 19 nt, Artificial Sequence
  Description of Artificial Sequence: Synthetic oligonucleotide
  Sense strand starting at position 430 of SEQ ID NO: 1245036
aaacuacugucaguguaug

SEQ ID NO: 1531249 - RNA, 19 nt, Artificial Sequence
  Description of Artificial Sequence: Synthetic oligonucleotide
  Antisense strand to SEQ ID NO: 1531248
cauacacugacaguaguuu

SEQ ID NO: 1531250 - RNA, 19 nt, Artificial Sequence
  Description of Artificial Sequence: Synthetic oligonucleotide
  Sense strand starting at position 435 of SEQ ID NO: 1245036
acugucaguguauggauua

SEQ ID NO: 1531251 - RNA, 19 nt, Artificial Sequence
  Description of Artificial Sequence: Synthetic oligonucleotide
  Antisense strand to SEQ ID NO: 1531250
uaauccauacacugacagu

SEQ ID NO: 1531252 - RNA, 19 nt, Artificial Sequence
  Description of Artificial Sequence: Synthetic oligonucleotide
  Sense strand starting at position 440 of SEQ ID NO: 1245036
caguguauggauuaaccua

SEQ ID NO: 1531253 - RNA, 19 nt, Artificial Sequence
  Description of Artificial Sequence: Synthetic oligonucleotide
  Antisense strand to SEQ ID NO: 1531252
uagguuaauccauacacug

SEQ ID NO: 1531254 - RNA, 19 nt, Artificial Sequence
  Description of Artificial Sequence: Synthetic oligonucleotide
  Sense strand starting at position 470 of SEQ ID NO: 1245036
aacaguucuggcgauuauu

SEQ ID NO: 1531255 - RNA, 19 nt, Artificial Sequence
  Description of Artificial Sequence: Synthetic oligonucleotide
  Antisense strand to SEQ ID NO: 1531254
aauaaucgccagaacuguu

SEQ ID NO: 1531256 - RNA, 19 nt, Artificial Sequence
  Description of Artificial Sequence: Synthetic oligonucleotide
  Sense strand starting at position 478 of SEQ ID NO: 1245036
uggcgauuauuguuuaaag

SEQ ID NO: 1531257 - RNA, 19 nt, Artificial Sequence
  Description of Artificial Sequence: Synthetic oligonucleotide
  Antisense strand to SEQ ID NO: 1531256
cuuuaaacaauaaucgcca

SEQ ID NO: 1531258 - RNA, 19 nt, Artificial Sequence
  Description of Artificial Sequence: Synthetic oligonucleotide
  Sense strand starting at position 480 of SEQ ID NO: 1245036
gcgauuauuguuuaaagug

SEQ ID NO: 1531259 - RNA, 19 nt, Artificial Sequence
  Description of Artificial Sequence: Synthetic oligonucleotide
  Antisense strand to SEQ ID NO: 1531258
cacuuuaaacaauaaucgc

SEQ ID NO: 1531260 - RNA, 19 nt, Artificial Sequence
  Description of Artificial Sequence: Synthetic oligonucleotide
  Sense strand starting at position 587 of SEQ ID NO: 1245036
uggaaacaaguauguuuga

SEQ ID NO: 1531261 - RNA, 19 nt, Artificial Sequence
  Description of Artificial Sequence: Synthetic oligonucleotide
  Antisense strand to SEQ ID NO: 1531260
ucaaacauacuuguuucca

SEQ ID NO: 1531262 - RNA, 19 nt, Artificial Sequence
  Description of Artificial Sequence: Synthetic oligonucleotide
  Sense strand starting at position 588 of SEQ ID NO: 1245036
ggaaacaaguauguuugaa

SEQ ID NO: 1531263 - RNA, 19 nt, Artificial Sequence
  Description of Artificial Sequence: Synthetic oligonucleotide
  Antisense strand to SEQ ID NO: 1531262
uucaaacauacuuguuucc

SEQ ID NO: 1531264 - RNA, 19 nt, Artificial Sequence
  Description of Artificial Sequence: Synthetic oligonucleotide
  Sense strand starting at position 603 of SEQ ID NO: 1245036
ugaauacuuggcugcacua

SEQ ID NO: 1531265 - RNA, 19 nt, Artificial Sequence
  Description of Artificial Sequence: Synthetic oligonucleotide
  Antisense strand to SEQ ID NO: 1531264
uagugcagccaaguauuca

SEQ ID NO: 1531266 - RNA, 19 nt, Artificial Sequence
  Description of Artificial Sequence: Synthetic oligonucleotide
  Sense strand starting at position 671 of SEQ ID NO: 1245036
gaaacaaaguuggcuuauu

SEQ ID NO: 1531267 - RNA, 19 nt, Artificial Sequence
  Description of Artificial Sequence: Synthetic oligonucleotide
  Antisense strand to SEQ ID NO: 1531266
aauaagccaacuuuguuuc

SEQ ID NO: 1531268 - RNA, 19 nt, Artificial Sequence
  Description of Artificial Sequence: Synthetic oligonucleotide
  Sense strand starting at position 968 of SEQ ID NO: 1245036
acccucugcuggucagaaa

SEQ ID NO: 1531269 - RNA, 19 nt, Artificial Sequence
  Description of Artificial Sequence: Synthetic oligonucleotide
  Antisense strand to SEQ ID NO: 1531268
uuucugaccagcagagggu

SEQ ID NO: 1531270 - RNA, 19 nt, Artificial Sequence
  Description of Artificial Sequence: Synthetic oligonucleotide
  Sense strand starting at position 1023 of SEQ ID NO: 1245036
acgauugcauaugcauuua

SEQ ID NO: 1531271 - RNA, 19 nt, Artificial Sequence
  Description of Artificial Sequence: Synthetic oligonucleotide
  Antisense strand to SEQ ID NO: 1531270
uaaaugcauaugcaaucgu

SEQ ID NO: 1531272 - RNA, 19 nt, Artificial Sequence
  Description of Artificial Sequence: Synthetic oligonucleotide
  Sense strand starting at position 1374 of SEQ ID NO: 1245036
aguguauggaagcauuaac

SEQ ID NO: 1531273 - RNA, 19 nt, Artificial Sequence
  Description of Artificial Sequence: Synthetic oligonucleotide
  Antisense strand to SEQ ID NO: 1531272
guuaaugcuuccauacacu

SEQ ID NO: 1531274 - RNA, 19 nt, Artificial Sequence
  Description of Artificial Sequence: Synthetic oligonucleotide
  Sense strand starting at position 1457 of SEQ ID NO: 1245036
ucaagaacuccacguuucu

SEQ ID NO: 1531275 - RNA, 19 nt, Artificial Sequence
  Description of Artificial Sequence: Synthetic oligonucleotide
  Antisense strand to SEQ ID NO: 1531274
agaaacguggaguucuuga

SEQ ID NO: 1531276 - RNA, 19 nt, Artificial Sequence
  Description of Artificial Sequence: Synthetic oligonucleotide
  Sense strand starting at position 1598 of SEQ ID NO: 1245036
cugcgcuguaccguaaaua

SEQ ID NO: 1531277 - RNA, 19 nt, Artificial Sequence
  Description of Artificial Sequence: Synthetic oligonucleotide
  Antisense strand to SEQ ID NO: 1531276
uauuuacgguacagcgcag

SEQ ID NO: 1531278 - RNA, 19 nt, Artificial Sequence
  Description of Artificial Sequence: Synthetic oligonucleotide
  Sense strand starting at position 2681 of SEQ ID NO: 1245036
cgagaaugaggugggucau

SEQ ID NO: 1531279 - RNA, 19 nt, Artificial Sequence
  Description of Artificial Sequence: Synthetic oligonucleotide
  Antisense strand to SEQ ID NO: 1531278
augacccaccucauucucg

SEQ ID NO: 1531280 - RNA, 19 nt, Artificial Sequence
  Description of Artificial Sequence: Synthetic oligonucleotide
  Sense strand starting at position 2687 of SEQ ID NO: 1245036
ugaggugggucauccgaga

SEQ ID NO: 1531281 - RNA, 19 nt, Artificial Sequence
  Description of Artificial Sequence: Synthetic oligonucleotide
  Antisense strand to SEQ ID NO: 1531280
ucucggaugacccaccuca

SEQ ID NO: 1531282 - RNA, 19 nt, Artificial Sequence
  Description of Artificial Sequence: Synthetic oligonucleotide
  Sense strand starting at position 2734 of SEQ ID NO: 1245036
gacucuaaggccugcagua

SEQ ID NO: 1531283 - RNA, 19 nt, Artificial Sequence
  Description of Artificial Sequence: Synthetic oligonucleotide
  Antisense strand to SEQ ID NO: 1531282
uacugcaggccuuagaguc

SEQ ID NO: 1531284 - RNA, 19 nt, Artificial Sequence
  Description of Artificial Sequence: Synthetic oligonucleotide
  Sense strand starting at position 2798 of SEQ ID NO: 1245036
ucacgcuuuaugcaaacga

SEQ ID NO: 1531285 - RNA, 19 nt, Artificial Sequence
  Description of Artificial Sequence: Synthetic oligonucleotide
  Antisense strand to SEQ ID NO: 1531284
ucguuugcauaaagcguga

SEQ ID NO: 1531286 - RNA, 19 nt, Artificial Sequence
  Description of Artificial Sequence: Synthetic oligonucleotide
  Sense strand starting at position 2813 of SEQ ID NO: 1245036
acgaaauaucgggaacguu

SEQ ID NO: 1531287 - RNA, 19 nt, Artificial Sequence
  Description of Artificial Sequence: Synthetic oligonucleotide
  Antisense strand to SEQ ID NO: 1531286
aacguucccgauauuucgu

SEQ ID NO: 1531288 - RNA, 19 nt, Artificial Sequence
  Description of Artificial Sequence: Synthetic oligonucleotide
  Sense strand starting at position 2869 of SEQ ID NO: 1245036
ugacauaauuucgcacgua

SEQ ID NO: 1531289 - RNA, 19 nt, Artificial Sequence
  Description of Artificial Sequence: Synthetic oligonucleotide
  Antisense strand to SEQ ID NO: 1531288
uacgugcgaaauuauguca

SEQ ID NO: 1531290 - RNA, 19 nt, Artificial Sequence
  Description of Artificial Sequence: Synthetic oligonucleotide
  Sense strand starting at position 2872 of SEQ ID NO: 1245036
cauaauuucgcacguauau

SEQ ID NO: 1531291 - RNA, 19 nt, Artificial Sequence
  Description of Artificial Sequence: Synthetic oligonucleotide
  Antisense strand to SEQ ID NO: 1531290
auauacgugcgaaauuaug

SEQ ID NO: 1531292 - RNA, 19 nt, Artificial Sequence
  Description of Artificial Sequence: Synthetic oligonucleotide
  Sense strand starting at position 2932 of SEQ ID NO: 1245036
gguucuccuccugaauucu

SEQ ID NO: 1531293 - RNA, 19 nt, Artificial Sequence
  Description of Artificial Sequence: Synthetic oligonucleotide
  Antisense strand to SEQ ID NO: 1531292
agaauucaggaggagaacc

SEQ ID NO: 1531294 - RNA, 19 nt, Artificial Sequence
  Description of Artificial Sequence: Synthetic oligonucleotide
  Sense strand starting at position 3172 of SEQ ID NO: 1245036
cgcuuucgccaucucuuua

SEQ ID NO: 1531295 - RNA, 19 nt, Artificial Sequence
  Description of Artificial Sequence: Synthetic oligonucleotide
  Antisense strand to SEQ ID NO: 1531294
uaaagagauggcgaaagcg

SEQ ID NO: 1531296 - RNA, 19 nt, Artificial Sequence
  Description of Artificial Sequence: Synthetic oligonucleotide
  Sense strand starting at position 3379 of SEQ ID NO: 1245036
ccaacuaugcuccaguagu

SEQ ID NO: 1531297 - RNA, 19 nt, Artificial Sequence
  Description of Artificial Sequence: Synthetic oligonucleotide
  Antisense strand to SEQ ID NO: 1531296
acuacuggagcauaguugg

SEQ ID NO: 1531298 - RNA, 19 nt, Artificial Sequence
  Description of Artificial Sequence: Synthetic oligonucleotide
  Sense strand starting at position 3474 of SEQ ID NO: 1245036
uggauuaugucaucuccuu

SEQ ID NO: 1531299 - RNA, 19 nt, Artificial Sequence
  Description of Artificial Sequence: Synthetic oligonucleotide
  Antisense strand to SEQ ID NO: 1531298
aaggagaugacauaaucca

SEQ ID NO: 1531300 - RNA, 19 nt, Artificial Sequence
  Description of Artificial Sequence: Synthetic oligonucleotide
  Sense strand starting at position 3480 of SEQ ID NO: 1245036
augucaucuccuugucaga

SEQ ID NO: 1531301 - RNA, 19 nt, Artificial Sequence
  Description of Artificial Sequence: Synthetic oligonucleotide
  Antisense strand to SEQ ID NO: 1531300
ucugacaaggagaugacau

SEQ ID NO: 1531302 - RNA, 19 nt, Artificial Sequence
  Description of Artificial Sequence: Synthetic oligonucleotide
  Sense strand starting at position 3482 of SEQ ID NO: 1245036
gucaucuccuugucagaaa

SEQ ID NO: 1531303 - RNA, 19 nt, Artificial Sequence
  Description of Artificial Sequence: Synthetic oligonucleotide
  Antisense strand to SEQ ID NO: 1531302
uuucugacaaggagaugac

SEQ ID NO: 1531304 - RNA, 19 nt, Artificial Sequence
  Description of Artificial Sequence: Synthetic oligonucleotide
  Sense strand starting at position 3711 of SEQ ID NO: 1245036
cucuguuugagucauuguu

SEQ ID NO: 1531305 - RNA, 19 nt, Artificial Sequence
  Description of Artificial Sequence: Synthetic oligonucleotide
  Antisense strand to SEQ ID NO: 1531304
aacaaugacucaaacagag

SEQ ID NO: 1531306 - RNA, 19 nt, Artificial Sequence
  Description of Artificial Sequence: Synthetic oligonucleotide
  Sense strand starting at position 3746 of SEQ ID NO: 1245036
uugguugacucauucucau

SEQ ID NO: 1531307 - RNA, 19 nt, Artificial Sequence
  Description of Artificial Sequence: Synthetic oligonucleotide
  Antisense strand to SEQ ID NO: 1531306
augagaaugagucaaccaa

SEQ ID NO: 1531308 - RNA, 19 nt, Artificial Sequence
  Description of Artificial Sequence: Synthetic oligonucleotide
  Sense strand starting at position 3782 of SEQ ID NO: 1245036
agcugucacuuccuuggaa

SEQ ID NO: 1531309 - RNA, 19 nt, Artificial Sequence
  Description of Artificial Sequence: Synthetic oligonucleotide
  Antisense strand to SEQ ID NO: 1531308
uuccaaggaagugacagcu

SEQ ID NO: 1531310 - RNA, 19 nt, Artificial Sequence
  Description of Artificial Sequence: Synthetic oligonucleotide
  Sense strand starting at position 3795 of SEQ ID NO: 1245036
uuggaaggcuucccuaagu

SEQ ID NO: 1531311 - RNA, 19 nt, Artificial Sequence
  Description of Artificial Sequence: Synthetic oligonucleotide
  Antisense strand to SEQ ID NO: 1531310
acuuagggaagccuuccaa

SEQ ID NO: 1531312 - RNA, 19 nt, Artificial Sequence
  Description of Artificial Sequence: Synthetic oligonucleotide
  Sense strand starting at position 3810 of SEQ ID NO: 1245036
aaguccuauuuagaggaga

SEQ ID NO: 1531313 - RNA, 19 nt, Artificial Sequence
  Description of Artificial Sequence: Synthetic oligonucleotide
  Antisense strand to SEQ ID NO: 1531312
ucuccucuaaauaggacuu

SEQ ID NO: 1531314 - RNA, 19 nt, Artificial Sequence
  Description of Artificial Sequence: Synthetic oligonucleotide
  Sense strand starting at position 3844 of SEQ ID NO: 1245036
uucugucaucuuuauagcu

SEQ ID NO: 1531315 - RNA, 19 nt, Artificial Sequence
  Description of Artificial Sequence: Synthetic oligonucleotide
  Antisense strand to SEQ ID NO: 1531314
agcuauaaagaugacagaa

SEQ ID NO: 1531316 - RNA, 19 nt, Artificial Sequence
  Description of Artificial Sequence: Synthetic oligonucleotide
  Sense strand starting at position 3859 of SEQ ID NO: 1245036
agcucuuaucauuaguugu

SEQ ID NO: 1531317 - RNA, 19 nt, Artificial Sequence
  Description of Artificial Sequence: Synthetic oligonucleotide
  Antisense strand to SEQ ID NO: 1531316
acaacuaaugauaagagcu

SEQ ID NO: 1531318 - RNA, 19 nt, Artificial Sequence
  Description of Artificial Sequence: Synthetic oligonucleotide
  Sense strand starting at position 3861 of SEQ ID NO: 1245036
cucuuaucauuaguuguaa

SEQ ID NO: 1531319 - RNA, 19 nt, Artificial Sequence
  Description of Artificial Sequence: Synthetic oligonucleotide
  Antisense strand to SEQ ID NO: 1531318
uuacaacuaaugauaagag

SEQ ID NO: 1531320 - RNA, 19 nt, Artificial Sequence
  Description of Artificial Sequence: Synthetic oligonucleotide
  Sense strand starting at position 3872 of SEQ ID NO: 1245036
aguuguaauuaagcuuacu

SEQ ID NO: 1531321 - RNA, 19 nt, Artificial Sequence
  Description of Artificial Sequence: Synthetic oligonucleotide
  Antisense strand to SEQ ID NO: 1531320
aguaagcuuaauuacaacu

SEQ ID NO: 1531322 - RNA, 19 nt, Artificial Sequence
  Description of Artificial Sequence: Synthetic oligonucleotide
  Sense strand starting at position 3875 of SEQ ID NO: 1245036
uguaauuaagcuuacuugu

SEQ ID NO: 1531323 - RNA, 19 nt, Artificial Sequence
  Description of Artificial Sequence: Synthetic oligonucleotide
  Antisense strand to SEQ ID NO: 1531322
acaaguaagcuuaauuaca

SEQ ID NO: 1531324 - RNA, 19 nt, Artificial Sequence
  Description of Artificial Sequence: Synthetic oligonucleotide
  Sense strand starting at position 3908 of SEQ ID NO: 1245036
uccagccugcaagaaauua

SEQ ID NO: 1531325 - RNA, 19 nt, Artificial Sequence
  Description of Artificial Sequence: Synthetic oligonucleotide
  Antisense strand to SEQ ID NO: 1531324
uaauuucuugcaggcugga

SEQ ID NO: 1531326 - RNA, 19 nt, Artificial Sequence
  Description of Artificial Sequence: Synthetic oligonucleotide
  Sense strand starting at position 321 of SEQ ID NO: 1245037
ucugaauucuggccaugua

SEQ ID NO: 1531327 - RNA, 19 nt, Artificial Sequence
  Description of Artificial Sequence: Synthetic oligonucleotide
  Antisense strand to SEQ ID NO: 1531326
uacauggccagaauucaga

SEQ ID NO: 1531328 - RNA, 19 nt, Artificial Sequence
  Description of Artificial Sequence: Synthetic oligonucleotide
  Sense strand starting at position 322 of SEQ ID NO: 1245037
cugaauucuggccauguac

SEQ ID NO: 1531329 - RNA, 19 nt, Artificial Sequence
  Description of Artificial Sequence: Synthetic oligonucleotide
  Antisense strand to SEQ ID NO: 1531328
guacauggccagaauucag

SEQ ID NO: 1531330 - RNA, 19 nt, Artificial Sequence
  Description of Artificial Sequence: Synthetic oligonucleotide
  Sense strand starting at position 324 of SEQ ID NO: 1245037
gaauucuggccauguacag

SEQ ID NO: 1531331 - RNA, 19 nt, Artificial Sequence
  Description of Artificial Sequence: Synthetic oligonucleotide
  Antisense strand to SEQ ID NO: 1531330
cuguacauggccagaauuc

SEQ ID NO: 1531332 - RNA, 19 nt, Artificial Sequence
  Description of Artificial Sequence: Synthetic oligonucleotide
  Sense strand starting at position 422 of SEQ ID NO: 1245037
gguuuacugcuuuauguac

SEQ ID NO: 1531333 - RNA, 19 nt, Artificial Sequence
  Description of Artificial Sequence: Synthetic oligonucleotide
  Antisense strand to SEQ ID NO: 1531332
guacauaaagcaguaaacc

SEQ ID NO: 1531334 - RNA, 19 nt, Artificial Sequence
  Description of Artificial Sequence: Synthetic oligonucleotide
  Sense strand starting at position 816 of SEQ ID NO: 1245037
uggguaacccuggaucagu

SEQ ID NO: 1531335 - RNA, 19 nt, Artificial Sequence
  Description of Artificial Sequence: Synthetic oligonucleotide
  Antisense strand to SEQ ID NO: 1531334
acugauccaggguuaccca

SEQ ID NO: 1531336 - RNA, 19 nt, Artificial Sequence
  Description of Artificial Sequence: Synthetic oligonucleotide
  Sense strand starting at position 825 of SEQ ID NO: 1245037
cuggaucagucuucuuaac

SEQ ID NO: 1531337 - RNA, 19 nt, Artificial Sequence
  Description of Artificial Sequence: Synthetic oligonucleotide
  Antisense strand to SEQ ID NO: 1531336
guuaagaagacugauccag

SEQ ID NO: 1531338 - RNA, 19 nt, Artificial Sequence
  Description of Artificial Sequence: Synthetic oligonucleotide
  Sense strand starting at position 827 of SEQ ID NO: 1245037
ggaucagucuucuuaacuc

SEQ ID NO: 1531339 - RNA, 19 nt, Artificial Sequence
  Description of Artificial Sequence: Synthetic oligonucleotide
  Antisense strand to SEQ ID NO: 1531338
gaguuaagaagacugaucc

SEQ ID NO: 1531340 - RNA, 19 nt, Artificial Sequence
  Description of Artificial Sequence: Synthetic oligonucleotide
  Sense strand starting at position 834 of SEQ ID NO: 1245037
ucuucuuaacucgaaguga

SEQ ID NO: 1531341 - RNA, 19 nt, Artificial Sequence
  Description of Artificial Sequence: Synthetic oligonucleotide
  Antisense strand to SEQ ID NO: 1531340
ucacuucgaguuaagaaga

SEQ ID NO: 1531342 - RNA, 19 nt, Artificial Sequence
  Description of Artificial Sequence: Synthetic oligonucleotide
  Sense strand starting at position 847 of SEQ ID NO: 1245037
aagugaagcgcccaguaaa

SEQ ID NO: 1531343 - RNA, 19 nt, Artificial Sequence
  Description of Artificial Sequence: Synthetic oligonucleotide
  Antisense strand to SEQ ID NO: 1531342
uuuacugggcgcuucacuu

SEQ ID NO: 1531344 - RNA, 19 nt, Artificial Sequence
  Description of Artificial Sequence: Synthetic oligonucleotide
  Sense strand starting at position 850 of SEQ ID NO: 1245037
ugaagcgcccaguaaauaa

SEQ ID NO: 1531345 - RNA, 19 nt, Artificial Sequence
  Description of Artificial Sequence: Synthetic oligonucleotide
  Antisense strand to SEQ ID NO: 1531344
uuauuuacugggcgcuuca

SEQ ID NO: 1531346 - RNA, 19 nt, Artificial Sequence
  Description of Artificial Sequence: Synthetic oligonucleotide
  Sense strand starting at position 922 of SEQ ID NO: 1245037
cuuaaugacuuagcagaca

SEQ ID NO: 1531347 - RNA, 19 nt, Artificial Sequence
  Description of Artificial Sequence: Synthetic oligonucleotide
  Antisense strand to SEQ ID NO: 1531346
ugucugcuaagucauuaag

SEQ ID NO: 1531348 - RNA, 19 nt, Artificial Sequence
  Description of Artificial Sequence: Synthetic oligonucleotide
  Sense strand starting at position 936 of SEQ ID NO: 1245037
agacaugaucuuggugauu

SEQ ID NO: 1531349 - RNA, 19 nt, Artificial Sequence
  Description of Artificial Sequence: Synthetic oligonucleotide
  Antisense strand to SEQ ID NO: 1531348
aaucaccaagaucaugucu

SEQ ID NO: 1531350 - RNA, 19 nt, Artificial Sequence
  Description of Artificial Sequence: Synthetic oligonucleotide
  Sense strand starting at position 941 of SEQ ID NO: 1245037
ugaucuuggugauuauaug

SEQ ID NO: 1531351 - RNA, 19 nt, Artificial Sequence
  Description of Artificial Sequence: Synthetic oligonucleotide
  Antisense strand to SEQ ID NO: 1531350
cauauaaucaccaagauca

SEQ ID NO: 1531352 - RNA, 19 nt, Artificial Sequence
  Description of Artificial Sequence: Synthetic oligonucleotide
  Sense strand starting at position 1016 of SEQ ID NO: 1245037
ggauccuaugaagguuuaa

SEQ ID NO: 1531353 - RNA, 19 nt, Artificial Sequence
  Description of Artificial Sequence: Synthetic oligonucleotide
  Antisense strand to SEQ ID NO: 1531352
uuaaaccuucauaggaucc

SEQ ID NO: 1531354 - RNA, 19 nt, Artificial Sequence
  Description of Artificial Sequence: Synthetic oligonucleotide
  Sense strand starting at position 1027 of SEQ ID NO: 1245037
agguuuaaaugagucuaau

SEQ ID NO: 1531355 - RNA, 19 nt, Artificial Sequence
  Description of Artificial Sequence: Synthetic oligonucleotide
  Antisense strand to SEQ ID NO: 1531354
auuagacucauuuaaaccu

SEQ ID NO: 1531356 - RNA, 19 nt, Artificial Sequence
  Description of Artificial Sequence: Synthetic oligonucleotide
  Sense strand starting at position 1044 of SEQ ID NO: 1245037
auauaugguucuuuaagga

SEQ ID NO: 1531357 - RNA, 19 nt, Artificial Sequence
  Description of Artificial Sequence: Synthetic oligonucleotide
  Antisense strand to SEQ ID NO: 1531356
uccuuaaagaaccauauau

SEQ ID NO: 1531358 - RNA, 19 nt, Artificial Sequence
  Description of Artificial Sequence: Synthetic oligonucleotide
  Sense strand starting at position 1063 of SEQ ID NO: 1245037
ucuacaaaccaguauguau

SEQ ID NO: 1531359 - RNA, 19 nt, Artificial Sequence
  Description of Artificial Sequence: Synthetic oligonucleotide
  Antisense strand to SEQ ID NO: 1531358
auacauacugguuuguaga

SEQ ID NO: 1531360 - RNA, 19 nt, Artificial Sequence
  Description of Artificial Sequence: Synthetic oligonucleotide
  Sense strand starting at position 1128 of SEQ ID NO: 1245037
gagccuuuccagcauguua

SEQ ID NO: 1531361 - RNA, 19 nt, Artificial Sequence
  Description of Artificial Sequence: Synthetic oligonucleotide
  Antisense strand to SEQ ID NO: 1531360
uaacaugcuggaaaggcuc

SEQ ID NO: 1531362 - RNA, 19 nt, Artificial Sequence
  Description of Artificial Sequence: Synthetic oligonucleotide
  Sense strand starting at position 1271 of SEQ ID NO: 1245037
ucuccaaacuguucgagaa

SEQ ID NO: 1531363 - RNA, 19 nt, Artificial Sequence
  Description of Artificial Sequence: Synthetic oligonucleotide
  Antisense strand to SEQ ID NO: 1531362
uucucgaacaguuuggaga

SEQ ID NO: 1531364 - RNA, 19 nt, Artificial Sequence
  Description of Artificial Sequence: Synthetic oligonucleotide
  Sense strand starting at position 1272 of SEQ ID NO: 1245037
cuccaaacuguucgagaau

SEQ ID NO: 1531365 - RNA, 19 nt, Artificial Sequence
  Description of Artificial Sequence: Synthetic oligonucleotide
  Antisense strand to SEQ ID NO: 1531364
auucucgaacaguuuggag

SEQ ID NO: 1531366 - RNA, 19 nt, Artificial Sequence
  Description of Artificial Sequence: Synthetic oligonucleotide
  Sense strand starting at position 1275 of SEQ ID NO: 1245037
caaacuguucgagaaucug

SEQ ID NO: 1531367 - RNA, 19 nt, Artificial Sequence
  Description of Artificial Sequence: Synthetic oligonucleotide
  Antisense strand to SEQ ID NO: 1531366
cagauucucgaacaguuug

SEQ ID NO: 1531368 - RNA, 19 nt, Artificial Sequence
  Description of Artificial Sequence: Synthetic oligonucleotide
  Sense strand starting at position 1359 of SEQ ID NO: 1245037
gacauaugggcuuguccag

SEQ ID NO: 1531369 - RNA, 19 nt, Artificial Sequence
  Description of Artificial Sequence: Synthetic oligonucleotide
  Antisense strand to SEQ ID NO: 1531368
cuggacaagcccauauguc

SEQ ID NO: 1531370 - RNA, 19 nt, Artificial Sequence
  Description of Artificial Sequence: Synthetic oligonucleotide
  Sense strand starting at position 1442 of SEQ ID NO: 1245037
gaagcaaacgccuggugaa

SEQ ID NO: 1531371 - RNA, 19 nt, Artificial Sequence
  Description of Artificial Sequence: Synthetic oligonucleotide
  Antisense strand to SEQ ID NO: 1531370
uucaccaggcguuugcuuc

SEQ ID NO: 1531372 - RNA, 19 nt, Artificial Sequence
  Description of Artificial Sequence: Synthetic oligonucleotide
  Sense strand starting at position 1443 of SEQ ID NO: 1245037
aagcaaacgccuggugaaa

SEQ ID NO: 1531373 - RNA, 19 nt, Artificial Sequence
  Description of Artificial Sequence: Synthetic oligonucleotide
  Antisense strand to SEQ ID NO: 1531372
uuucaccaggcguuugcuu

SEQ ID NO: 1531374 - RNA, 19 nt, Artificial Sequence
  Description of Artificial Sequence: Synthetic oligonucleotide
  Sense strand starting at position 3108 of SEQ ID NO: 1245037
ucguucguugguucauuau

SEQ ID NO: 1531375 - RNA, 19 nt, Artificial Sequence
  Description of Artificial Sequence: Synthetic oligonucleotide
  Antisense strand to SEQ ID NO: 1531374
auaaugaaccaacgaacga

SEQ ID NO: 1531376 - RNA, 19 nt, Artificial Sequence
  Description of Artificial Sequence: Synthetic oligonucleotide
  Sense strand starting at position 3265 of SEQ ID NO: 1245037
cgugacuuacauuggagaa

SEQ ID NO: 1531377 - RNA, 19 nt, Artificial Sequence
  Description of Artificial Sequence: Synthetic oligonucleotide
  Antisense strand to SEQ ID NO: 1531376
uucuccaauguaagucacg

SEQ ID NO: 1531378 - RNA, 19 nt, Artificial Sequence
  Description of Artificial Sequence: Synthetic oligonucleotide
  Sense strand starting at position 3278 of SEQ ID NO: 1245037
ggagaaacaugucuucugu

SEQ ID NO: 1531379 - RNA, 19 nt, Artificial Sequence
  Description of Artificial Sequence: Synthetic oligonucleotide
  Antisense strand to SEQ ID NO: 1531378
acagaagacauguuucucc

SEQ ID NO: 1531380 - RNA, 19 nt, Artificial Sequence
  Description of Artificial Sequence: Synthetic oligonucleotide
  Sense strand starting at position 3280 of SEQ ID NO: 1245037
agaaacaugucuucugucu

SEQ ID NO: 1531381 - RNA, 19 nt, Artificial Sequence
  Description of Artificial Sequence: Synthetic oligonucleotide
  Antisense strand to SEQ ID NO: 1531380
agacagaagacauguuucu

SEQ ID NO: 1531382 - RNA, 19 nt, Artificial Sequence
  Description of Artificial Sequence: Synthetic oligonucleotide
  Sense strand starting at position 3362 of SEQ ID NO: 1245037
gggcucuuagggcacagau

SEQ ID NO: 1531383 - RNA, 19 nt, Artificial Sequence
  Description of Artificial Sequence: Synthetic oligonucleotide
  Antisense strand to SEQ ID NO: 1531382
aucugugcccuaagagccc

SEQ ID NO: 1531384 - RNA, 19 nt, Artificial Sequence
  Description of Artificial Sequence: Synthetic oligonucleotide
  Sense strand starting at position 3364 of SEQ ID NO: 1245037
gcucuuagggcacagauaa

SEQ ID NO: 1531385 - RNA, 19 nt, Artificial Sequence
  Description of Artificial Sequence: Synthetic oligonucleotide
  Antisense strand to SEQ ID NO: 1531384
uuaucugugcccuaagagc

SEQ ID NO: 1531386 - RNA, 19 nt, Artificial Sequence
  Description of Artificial Sequence: Synthetic oligonucleotide
  Sense strand starting at position 3510 of SEQ ID NO: 1245037
augguuuaugagcaugcau

SEQ ID NO: 1531387 - RNA, 19 nt, Artificial Sequence
  Description of Artificial Sequence: Synthetic oligonucleotide
  Antisense strand to SEQ ID NO: 1531386
augcaugcucauaaaccau

SEQ ID NO: 1531388 - RNA, 19 nt, Artificial Sequence
  Description of Artificial Sequence: Synthetic oligonucleotide
  Sense strand starting at position 3561 of SEQ ID NO: 1245037
guacauuuggucugaguca

SEQ ID NO: 1531389 - RNA, 19 nt, Artificial Sequence
  Description of Artificial Sequence: Synthetic oligonucleotide
  Antisense strand to SEQ ID NO: 1531388
ugacucagaccaaauguac

SEQ ID NO: 1531390 - RNA, 19 nt, Artificial Sequence
  Description of Artificial Sequence: Synthetic oligonucleotide
  Sense strand starting at position 3653 of SEQ ID NO: 1245037
ccuuuacaguccuugauac

SEQ ID NO: 1531391 - RNA, 19 nt, Artificial Sequence
  Description of Artificial Sequence: Synthetic oligonucleotide
  Antisense strand to SEQ ID NO: 1531390
guaucaaggacuguaaagg

SEQ ID NO: 1531392 - RNA, 19 nt, Artificial Sequence
  Description of Artificial Sequence: Synthetic oligonucleotide
  Sense strand starting at position 3655 of SEQ ID NO: 1245037
uuuacaguccuugauacgu

SEQ ID NO: 1531393 - RNA, 19 nt, Artificial Sequence
  Description of Artificial Sequence: Synthetic oligonucleotide
  Antisense strand to SEQ ID NO: 1531392
acguaucaaggacuguaaa

SEQ ID NO: 1531394 - RNA, 19 nt, Artificial Sequence
  Description of Artificial Sequence: Synthetic oligonucleotide
  Sense strand starting at position 3661 of SEQ ID NO: 1245037
guccuugauacguagacca

SEQ ID NO: 1531395 - RNA, 19 nt, Artificial Sequence
  Description of Artificial Sequence: Synthetic oligonucleotide
  Antisense strand to SEQ ID NO: 1531394
uggucuacguaucaaggac

SEQ ID NO: 1531396 - RNA, 19 nt, Artificial Sequence
  Description of Artificial Sequence: Synthetic oligonucleotide
  Sense strand starting at position 3663 of SEQ ID NO: 1245037
ccuugauacguagaccaaa

SEQ ID NO: 1531397 - RNA, 19 nt, Artificial Sequence
  Description of Artificial Sequence: Synthetic oligonucleotide
  Antisense strand to SEQ ID NO: 1531396
uuuggucuacguaucaagg

SEQ ID NO: 1531398 - RNA, 19 nt, Artificial Sequence
  Description of Artificial Sequence: Synthetic oligonucleotide
  Sense strand starting at position 3678 of SEQ ID NO: 1245037
caaaguugugcauauguua

SEQ ID NO: 1531399 - RNA, 19 nt, Artificial Sequence
  Description of Artificial Sequence: Synthetic oligonucleotide
  Antisense strand to SEQ ID NO: 1531398
uaacauaugcacaacuuug

SEQ ID NO: 1531400 - RNA, 19 nt, Artificial Sequence
  Description of Artificial Sequence: Synthetic oligonucleotide
  Sense strand starting at position 3690 of SEQ ID NO: 1245037
uauguuaggccucaagaaa

SEQ ID NO: 1531401 - RNA, 19 nt, Artificial Sequence
  Description of Artificial Sequence: Synthetic oligonucleotide
  Antisense strand to SEQ ID NO: 1531400
uuucuugaggccuaacaua

SEQ ID NO: 1531402 - RNA, 19 nt, Artificial Sequence
  Description of Artificial Sequence: Synthetic oligonucleotide
  Sense strand starting at position 3767 of SEQ ID NO: 1245037
augcgauuugccugaaacc

SEQ ID NO: 1531403 - RNA, 19 nt, Artificial Sequence
  Description of Artificial Sequence: Synthetic oligonucleotide
  Antisense strand to SEQ ID NO: 1531402
gguuucaggcaaaucgcau

SEQ ID NO: 1531404 - RNA, 19 nt, Artificial Sequence
  Description of Artificial Sequence: Synthetic oligonucleotide
  Sense strand starting at position 3792 of SEQ ID NO: 1245037
ccugaauacugacagaaua

SEQ ID NO: 1531405 - RNA, 19 nt, Artificial Sequence
  Description of Artificial Sequence: Synthetic oligonucleotide
  Antisense strand to SEQ ID NO: 1531404
uauucugucaguauucagg

SEQ ID NO: 1531406 - RNA, 19 nt, Artificial Sequence
  Description of Artificial Sequence: Synthetic oligonucleotide
  Sense strand starting at position 24 of SEQ ID NO: 1245038
agggaagucugaguaagua

SEQ ID NO: 1531407 - RNA, 19 nt, Artificial Sequence
  Description of Artificial Sequence: Synthetic oligonucleotide
  Antisense strand to SEQ ID NO: 1531406
uacuuacucagacuucccu

SEQ ID NO: 1531408 - RNA, 19 nt, Artificial Sequence
  Description of Artificial Sequence: Synthetic oligonucleotide
  Sense strand starting at position 96 of SEQ ID NO: 1245038
agucuccuuguauaguaua

SEQ ID NO: 1531409 - RNA, 19 nt, Artificial Sequence
  Description of Artificial Sequence: Synthetic oligonucleotide
  Antisense strand to SEQ ID NO: 1531408
uauacuauacaaggagacu

SEQ ID NO: 1531410 - RNA, 19 nt, Artificial Sequence
  Description of Artificial Sequence: Synthetic oligonucleotide
  Sense strand starting at position 231 of SEQ ID NO: 1245038
auagaugacuaagggaaau

SEQ ID NO: 1531411 - RNA, 19 nt, Artificial Sequence
  Description of Artificial Sequence: Synthetic oligonucleotide
  Antisense strand to SEQ ID NO: 1531410
auuucccuuagucaucuau

SEQ ID NO: 1531412 - RNA, 19 nt, Artificial Sequence
  Description of Artificial Sequence: Synthetic oligonucleotide
  Sense strand starting at position 279 of SEQ ID NO: 1245038
cugauaaauccuggaccgu

SEQ ID NO: 1531413 - RNA, 19 nt, Artificial Sequence
  Description of Artificial Sequence: Synthetic oligonucleotide
  Antisense strand to SEQ ID NO: 1531412
acgguccaggauuuaucag

SEQ ID NO: 1531414 - RNA, 19 nt, Artificial Sequence
  Description of Artificial Sequence: Synthetic oligonucleotide
  Sense strand starting at position 280 of SEQ ID NO: 1245038
ugauaaauccuggaccgua

SEQ ID NO: 1531415 - RNA, 19 nt, Artificial Sequence
  Description of Artificial Sequence: Synthetic oligonucleotide
  Antisense strand to SEQ ID NO: 1531414
uacgguccaggauuuauca

SEQ ID NO: 1531416 - RNA, 19 nt, Artificial Sequence
  Description of Artificial Sequence: Synthetic oligonucleotide
  Sense strand starting at position 432 of SEQ ID NO: 1245038
gcuacuuaucaaugaauga

SEQ ID NO: 1531417 - RNA, 19 nt, Artificial Sequence
  Description of Artificial Sequence: Synthetic oligonucleotide
  Antisense strand to SEQ ID NO: 1531416
ucauucauugauaaguagc

SEQ ID NO: 1531418 - RNA, 19 nt, Artificial Sequence
  Description of Artificial Sequence: Synthetic oligonucleotide
  Sense strand starting at position 796 of SEQ ID NO: 1245038
gggcuucgaagugaugaaa

SEQ ID NO: 1531419 - RNA, 19 nt, Artificial Sequence
  Description of Artificial Sequence: Synthetic oligonucleotide
  Antisense strand to SEQ ID NO: 1531418
uuucaucacuucgaagccc

SEQ ID NO: 1531420 - RNA, 19 nt, Artificial Sequence
  Description of Artificial Sequence: Synthetic oligonucleotide
  Sense strand starting at position 799 of SEQ ID NO: 1245038
cuucgaagugaugaaaggu

SEQ ID NO: 1531421 - RNA, 19 nt, Artificial Sequence
  Description of Artificial Sequence: Synthetic oligonucleotide
  Antisense strand to SEQ ID NO: 1531420
accuuucaucacuucgaag

SEQ ID NO: 1531422 - RNA, 19 nt, Artificial Sequence
  Description of Artificial Sequence: Synthetic oligonucleotide
  Sense strand starting at position 859 of SEQ ID NO: 1245038
cggguaguacguuucugua

SEQ ID NO: 1531423 - RNA, 19 nt, Artificial Sequence
  Description of Artificial Sequence: Synthetic oligonucleotide
  Antisense strand to SEQ ID NO: 1531422
uacagaaacguacuacccg

SEQ ID NO: 1531424 - RNA, 19 nt, Artificial Sequence
  Description of Artificial Sequence: Synthetic oligonucleotide
  Sense strand starting at position 881 of SEQ ID NO: 1245038
acgggacaguggucuugaa

SEQ ID NO: 1531425 - RNA, 19 nt, Artificial Sequence
  Description of Artificial Sequence: Synthetic oligonucleotide
  Antisense strand to SEQ ID NO: 1531424
uucaagaccacugucccgu

SEQ ID NO: 1531426 - RNA, 19 nt, Artificial Sequence
  Description of Artificial Sequence: Synthetic oligonucleotide
  Sense strand starting at position 975 of SEQ ID NO: 1245038
agagcaaaguuucugccaa

SEQ ID NO: 1531427 - RNA, 19 nt, Artificial Sequence
  Description of Artificial Sequence: Synthetic oligonucleotide
  Antisense strand to SEQ ID NO: 1531426
uuggcagaaacuuugcucu

SEQ ID NO: 1531428 - RNA, 19 nt, Artificial Sequence
  Description of Artificial Sequence: Synthetic oligonucleotide
  Sense strand starting at position 1036 of SEQ ID NO: 1245038
gcuuccuccgauuacaacu

SEQ ID NO: 1531429 - RNA, 19 nt, Artificial Sequence
  Description of Artificial Sequence: Synthetic oligonucleotide
  Antisense strand to SEQ ID NO: 1531428
aguuguaaucggaggaagc

SEQ ID NO: 1531430 - RNA, 19 nt, Artificial Sequence
  Description of Artificial Sequence: Synthetic oligonucleotide
  Sense strand starting at position 1134 of SEQ ID NO: 1245038
cgagaaucgcgauaaggga

SEQ ID NO: 1531431 - RNA, 19 nt, Artificial Sequence
  Description of Artificial Sequence: Synthetic oligonucleotide
  Antisense strand to SEQ ID NO: 1531430
ucccuuaucgcgauucucg

SEQ ID NO: 1531432 - RNA, 19 nt, Artificial Sequence
  Description of Artificial Sequence: Synthetic oligonucleotide
  Sense strand starting at position 1794 of SEQ ID NO: 1245038
cuugguguuccagguagag

SEQ ID NO: 1531433 - RNA, 19 nt, Artificial Sequence
  Description of Artificial Sequence: Synthetic oligonucleotide
  Antisense strand to SEQ ID NO: 1531432
cucuaccuggaacaccaag

SEQ ID NO: 1531434 - RNA, 19 nt, Artificial Sequence
  Description of Artificial Sequence: Synthetic oligonucleotide
  Sense strand starting at position 1812 of SEQ ID NO: 1245038
gggagagcucccgggacaa

SEQ ID NO: 1531435 - RNA, 19 nt, Artificial Sequence
  Description of Artificial Sequence: Synthetic oligonucleotide
  Antisense strand to SEQ ID NO: 1531434
uugucccgggagcucuccc

SEQ ID NO: 1531436 - RNA, 19 nt, Artificial Sequence
  Description of Artificial Sequence: Synthetic oligonucleotide
  Sense strand starting at position 2254 of SEQ ID NO: 1245038
cccagugaccuugaacgau

SEQ ID NO: 1531437 - RNA, 19 nt, Artificial Sequence
  Description of Artificial Sequence: Synthetic oligonucleotide
  Antisense strand to SEQ ID NO: 1531436
aucguucaaggucacuggg

SEQ ID NO: 1531438 - RNA, 19 nt, Artificial Sequence
  Description of Artificial Sequence: Synthetic oligonucleotide
  Sense strand starting at position 2356 of SEQ ID NO: 1245038
ugccaaagauauguuagca

SEQ ID NO: 1531439 - RNA, 19 nt, Artificial Sequence
  Description of Artificial Sequence: Synthetic oligonucleotide
  Antisense strand to SEQ ID NO: 1531438
ugcuaacauaucuuuggca

SEQ ID NO: 1531440 - RNA, 19 nt, Artificial Sequence
  Description of Artificial Sequence: Synthetic oligonucleotide
  Sense strand starting at position 2360 of SEQ ID NO: 1245038
aaagauauguuagcaggua

SEQ ID NO: 1531441 - RNA, 19 nt, Artificial Sequence
  Description of Artificial Sequence: Synthetic oligonucleotide
  Antisense strand to SEQ ID NO: 1531440
uaccugcuaacauaucuuu

SEQ ID NO: 1531442 - RNA, 19 nt, Artificial Sequence
  Description of Artificial Sequence: Synthetic oligonucleotide
  Sense strand starting at position 2478 of SEQ ID NO: 1245038
ucugaaucacucugugaau

SEQ ID NO: 1531443 - RNA, 19 nt, Artificial Sequence
  Description of Artificial Sequence: Synthetic oligonucleotide
  Antisense strand to SEQ ID NO: 1531442
auucacagagugauucaga

SEQ ID NO: 1531444 - RNA, 19 nt, Artificial Sequence
  Description of Artificial Sequence: Synthetic oligonucleotide
  Sense strand starting at position 2479 of SEQ ID NO: 1245038
cugaaucacucugugaauc

SEQ ID NO: 1531445 - RNA, 19 nt, Artificial Sequence
  Description of Artificial Sequence: Synthetic oligonucleotide
  Antisense strand to SEQ ID NO: 1531444
gauucacagagugauucag

SEQ ID NO: 1531446 - RNA, 19 nt, Artificial Sequence
  Description of Artificial Sequence: Synthetic oligonucleotide
  Sense strand starting at position 2480 of SEQ ID NO: 1245038
ugaaucacucugugaaucu

SEQ ID NO: 1531447 - RNA, 19 nt, Artificial Sequence
  Description of Artificial Sequence: Synthetic oligonucleotide
  Antisense strand to SEQ ID NO: 1531446
agauucacagagugauuca

SEQ ID NO: 1531448 - RNA, 19 nt, Artificial Sequence
  Description of Artificial Sequence: Synthetic oligonucleotide
  Sense strand starting at position 2506 of SEQ ID NO: 1245038
ugcuaagugucacuuaaau

SEQ ID NO: 1531449 - RNA, 19 nt, Artificial Sequence
  Description of Artificial Sequence: Synthetic oligonucleotide
  Antisense strand to SEQ ID NO: 1531448
auuuaagugacacuuagca

SEQ ID NO: 1531450 - RNA, 19 nt, Artificial Sequence
  Description of Artificial Sequence: Synthetic oligonucleotide
  Sense strand starting at position 2512 of SEQ ID NO: 1245038
gugucacuuaaaugagaag

SEQ ID NO: 1531451 - RNA, 19 nt, Artificial Sequence
  Description of Artificial Sequence: Synthetic oligonucleotide
  Antisense strand to SEQ ID NO: 1531450
cuucucauuuaagugacac

SEQ ID NO: 1531452 - RNA, 19 nt, Artificial Sequence
  Description of Artificial Sequence: Synthetic oligonucleotide
  Sense strand starting at position 2664 of SEQ ID NO: 1245038
agaaaccauuuaugaagua

SEQ ID NO: 1531453 - RNA, 19 nt, Artificial Sequence
  Description of Artificial Sequence: Synthetic oligonucleotide
  Antisense strand to SEQ ID NO: 1531452
uacuucauaaaugguuucu

SEQ ID NO: 1531454 - RNA, 19 nt, Artificial Sequence
  Description of Artificial Sequence: Synthetic oligonucleotide
  Sense strand starting at position 2682 of SEQ ID NO: 1245038
agggucuccuaggcuuauu

SEQ ID NO: 1531455 - RNA, 19 nt, Artificial Sequence
  Description of Artificial Sequence: Synthetic oligonucleotide
  Antisense strand to SEQ ID NO: 1531454
aauaagccuaggagacccu

SEQ ID NO: 1531456 - RNA, 19 nt, Artificial Sequence
  Description of Artificial Sequence: Synthetic oligonucleotide
  Sense strand starting at position 2725 of SEQ ID NO: 1245038
acuuaugguuaucugaaau

SEQ ID NO: 1531457 - RNA, 19 nt, Artificial Sequence
  Description of Artificial Sequence: Synthetic oligonucleotide
  Antisense strand to SEQ ID NO: 1531456
auuucagauaaccauaagu

SEQ ID NO: 1531458 - RNA, 19 nt, Artificial Sequence
  Description of Artificial Sequence: Synthetic oligonucleotide
  Sense strand starting at position 2731 of SEQ ID NO: 1245038
gguuaucugaaaugguuag

SEQ ID NO: 1531459 - RNA, 19 nt, Artificial Sequence
  Description of Artificial Sequence: Synthetic oligonucleotide
  Antisense strand to SEQ ID NO: 1531458
cuaaccauuucagauaacc

SEQ ID NO: 1531460 - RNA, 19 nt, Artificial Sequence
  Description of Artificial Sequence: Synthetic oligonucleotide
  Sense strand starting at position 2732 of SEQ ID NO: 1245038
guuaucugaaaugguuaga

SEQ ID NO: 1531461 - RNA, 19 nt, Artificial Sequence
  Description of Artificial Sequence: Synthetic oligonucleotide
  Antisense strand to SEQ ID NO: 1531460
ucuaaccauuucagauaac

SEQ ID NO: 1531462 - RNA, 19 nt, Artificial Sequence
  Description of Artificial Sequence: Synthetic oligonucleotide
  Sense strand starting at position 2737 of SEQ ID NO: 1245038
cugaaaugguuagaauuua

SEQ ID NO: 1531463 - RNA, 19 nt, Artificial Sequence
  Description of Artificial Sequence: Synthetic oligonucleotide
  Antisense strand to SEQ ID NO: 1531462
uaaauucuaaccauuucag

SEQ ID NO: 1531464 - RNA, 19 nt, Artificial Sequence
  Description of Artificial Sequence: Synthetic oligonucleotide
  Sense strand starting at position 2745 of SEQ ID NO: 1245038
guuagaauuuaauagccua

SEQ ID NO: 1531465 - RNA, 19 nt, Artificial Sequence
  Description of Artificial Sequence: Synthetic oligonucleotide
  Antisense strand to SEQ ID NO: 1531464
uaggcuauuaaauucuaac

SEQ ID NO: 1531466 - RNA, 19 nt, Artificial Sequence
  Description of Artificial Sequence: Synthetic oligonucleotide
  Sense strand starting at position 2776 of SEQ ID NO: 1245038
ugaacuccuuccucagaga

SEQ ID NO: 1531467 - RNA, 19 nt, Artificial Sequence
  Description of Artificial Sequence: Synthetic oligonucleotide
  Antisense strand to SEQ ID NO: 1531466
ucucugaggaaggaguuca

SEQ ID NO: 1531468 - RNA, 19 nt, Artificial Sequence
  Description of Artificial Sequence: Synthetic oligonucleotide
  Sense strand starting at position 2834 of SEQ ID NO: 1245038
gaaagugcugucuagauua

SEQ ID NO: 1531469 - RNA, 19 nt, Artificial Sequence
  Description of Artificial Sequence: Synthetic oligonucleotide
  Antisense strand to SEQ ID NO: 1531468
uaaucuagacagcacuuuc

SEQ ID NO: 1531470 - RNA, 19 nt, Artificial Sequence
  Description of Artificial Sequence: Synthetic oligonucleotide
  Sense strand starting at position 2836 of SEQ ID NO: 1245038
aagugcugucuagauuaug

SEQ ID NO: 1531471 - RNA, 19 nt, Artificial Sequence
  Description of Artificial Sequence: Synthetic oligonucleotide
  Antisense strand to SEQ ID NO: 1531470
cauaaucuagacagcacuu

SEQ ID NO: 1531472 - RNA, 19 nt, Artificial Sequence
  Description of Artificial Sequence: Synthetic oligonucleotide
  Sense strand starting at position 2839 of SEQ ID NO: 1245038
ugcugucuagauuaugaaa

SEQ ID NO: 1531473 - RNA, 19 nt, Artificial Sequence
  Description of Artificial Sequence: Synthetic oligonucleotide
  Antisense strand to SEQ ID NO: 1531472
uuucauaaucuagacagca

SEQ ID NO: 1531474 - RNA, 19 nt, Artificial Sequence
  Description of Artificial Sequence: Synthetic oligonucleotide
  Sense strand starting at position 2937 of SEQ ID NO: 1245038
ccgauuuggucauugcaac

SEQ ID NO: 1531475 - RNA, 19 nt, Artificial Sequence
  Description of Artificial Sequence: Synthetic oligonucleotide
  Antisense strand to SEQ ID NO: 1531474
guugcaaugaccaaaucgg

SEQ ID NO: 1531476 - RNA, 19 nt, Artificial Sequence
  Description of Artificial Sequence: Synthetic oligonucleotide
  Sense strand starting at position 2938 of SEQ ID NO: 1245038
cgauuuggucauugcaacu

SEQ ID NO: 1531477 - RNA, 19 nt, Artificial Sequence
  Description of Artificial Sequence: Synthetic oligonucleotide
  Antisense strand to SEQ ID NO: 1531476
aguugcaaugaccaaaucg

SEQ ID NO: 1531478 - RNA, 19 nt, Artificial Sequence
  Description of Artificial Sequence: Synthetic oligonucleotide
  Sense strand starting at position 3025 of SEQ ID NO: 1245038
uaaucuguagcguaacaau

SEQ ID NO: 1531479 - RNA, 19 nt, Artificial Sequence
  Description of Artificial Sequence: Synthetic oligonucleotide
  Antisense strand to SEQ ID NO: 1531478
auuguuacgcuacagauua

SEQ ID NO: 1531480 - RNA, 19 nt, Artificial Sequence
  Description of Artificial Sequence: Synthetic oligonucleotide
  Sense strand starting at position 3034 of SEQ ID NO: 1245038
gcguaacaauuucuacuuu

SEQ ID NO: 1531481 - RNA, 19 nt, Artificial Sequence
  Description of Artificial Sequence: Synthetic oligonucleotide
  Antisense strand to SEQ ID NO: 1531480
aaaguagaaauuguuacgc

SEQ ID NO: 1531482 - RNA, 19 nt, Artificial Sequence
  Description of Artificial Sequence: Synthetic oligonucleotide
  Sense strand starting at position 3147 of SEQ ID NO: 1245038
agcaaacgugaaugcauau

SEQ ID NO: 1531483 - RNA, 19 nt, Artificial Sequence
  Description of Artificial Sequence: Synthetic oligonucleotide
  Antisense strand to SEQ ID NO: 1531482
auaugcauucacguuugcu

SEQ ID NO: 1531484 - RNA, 19 nt, Artificial Sequence
  Description of Artificial Sequence: Synthetic oligonucleotide
  Sense strand starting at position 3170 of SEQ ID NO: 1245038
guugccauacuugaaacuu

SEQ ID NO: 1531485 - RNA, 19 nt, Artificial Sequence
  Description of Artificial Sequence: Synthetic oligonucleotide
  Antisense strand to SEQ ID NO: 1531484
aaguuucaaguauggcaac

SEQ ID NO: 1531486 - RNA, 19 nt, Artificial Sequence
  Description of Artificial Sequence: Synthetic oligonucleotide
  Sense strand starting at position 63 of SEQ ID NO: 1245039
ucaaacaggucuguauuau

SEQ ID NO: 1531487 - RNA, 19 nt, Artificial Sequence
  Description of Artificial Sequence: Synthetic oligonucleotide
  Antisense strand to SEQ ID NO: 1531486
auaauacagaccuguuuga

SEQ ID NO: 1531488 - RNA, 19 nt, Artificial Sequence
  Description of Artificial Sequence: Synthetic oligonucleotide
  Sense strand starting at position 145 of SEQ ID NO: 1245039
uuuagaagauagcucauga

SEQ ID NO: 1531489 - RNA, 19 nt, Artificial Sequence
  Description of Artificial Sequence: Synthetic oligonucleotide
  Antisense strand to SEQ ID NO: 1531488
ucaugagcuaucuucuaaa

SEQ ID NO: 1531490 - RNA, 19 nt, Artificial Sequence
  Description of Artificial Sequence: Synthetic oligonucleotide
  Sense strand starting at position 266 of SEQ ID NO: 1245039
aaaugaaauccacguugca

SEQ ID NO: 1531491 - RNA, 19 nt, Artificial Sequence
  Description of Artificial Sequence: Synthetic oligonucleotide
  Antisense strand to SEQ ID NO: 1531490
ugcaacguggauuucauuu

SEQ ID NO: 1531492 - RNA, 19 nt, Artificial Sequence
  Description of Artificial Sequence: Synthetic oligonucleotide
  Sense strand starting at position 300 of SEQ ID NO: 1245039
ugcauuuggucccagaaua

SEQ ID NO: 1531493 - RNA, 19 nt, Artificial Sequence
  Description of Artificial Sequence: Synthetic oligonucleotide
  Antisense strand to SEQ ID NO: 1531492
uauucugggaccaaaugca

SEQ ID NO: 1531494 - RNA, 19 nt, Artificial Sequence
  Description of Artificial Sequence: Synthetic oligonucleotide
  Sense strand starting at position 489 of SEQ ID NO: 1245039
uuuccucacucuguaaagu

SEQ ID NO: 1531495 - RNA, 19 nt, Artificial Sequence
  Description of Artificial Sequence: Synthetic oligonucleotide
  Antisense strand to SEQ ID NO: 1531494
acuuuacagagugaggaaa

SEQ ID NO: 1531496 - RNA, 19 nt, Artificial Sequence
  Description of Artificial Sequence: Synthetic oligonucleotide
  Sense strand starting at position 725 of SEQ ID NO: 1245039
uggucucuucgccauuaca

SEQ ID NO: 1531497 - RNA, 19 nt, Artificial Sequence
  Description of Artificial Sequence: Synthetic oligonucleotide
  Antisense strand to SEQ ID NO: 1531496
uguaauggcgaagagacca

SEQ ID NO: 1531498 - RNA, 19 nt, Artificial Sequence
  Description of Artificial Sequence: Synthetic oligonucleotide
  Sense strand starting at position 795 of SEQ ID NO: 1245039
gcuuuaaaucccuguauug

SEQ ID NO: 1531499 - RNA, 19 nt, Artificial Sequence
  Description of Artificial Sequence: Synthetic oligonucleotide
  Antisense strand to SEQ ID NO: 1531498
caauacagggauuuaaagc

SEQ ID NO: 1531500 - RNA, 19 nt, Artificial Sequence
  Description of Artificial Sequence: Synthetic oligonucleotide
  Sense strand starting at position 879 of SEQ ID NO: 1245039
aaugcuugguucuuagauc

SEQ ID NO: 1531501 - RNA, 19 nt, Artificial Sequence
  Description of Artificial Sequence: Synthetic oligonucleotide
  Antisense strand to SEQ ID NO: 1531500
gaucuaagaaccaagcauu

SEQ ID NO: 1531502 - RNA, 19 nt, Artificial Sequence
  Description of Artificial Sequence: Synthetic oligonucleotide
  Sense strand starting at position 932 of SEQ ID NO: 1245039
uguauuccaccucaauguu

SEQ ID NO: 1531503 - RNA, 19 nt, Artificial Sequence
  Description of Artificial Sequence: Synthetic oligonucleotide
  Antisense strand to SEQ ID NO: 1531502
aacauugagguggaauaca

SEQ ID NO: 1531504 - RNA, 19 nt, Artificial Sequence
  Description of Artificial Sequence: Synthetic oligonucleotide
  Sense strand starting at position 940 of SEQ ID NO: 1245039
accucaauguucuucgacu

SEQ ID NO: 1531505 - RNA, 19 nt, Artificial Sequence
  Description of Artificial Sequence: Synthetic oligonucleotide
  Antisense strand to SEQ ID NO: 1531504
agucgaagaacauugaggu

SEQ ID NO: 1531506 - RNA, 19 nt, Artificial Sequence
  Description of Artificial Sequence: Synthetic oligonucleotide
  Sense strand starting at position 956 of SEQ ID NO: 1245039
acucguacauccuuaaagu

SEQ ID NO: 1531507 - RNA, 19 nt, Artificial Sequence
  Description of Artificial Sequence: Synthetic oligonucleotide
  Antisense strand to SEQ ID NO: 1531506
acuuuaaggauguacgagu

SEQ ID NO: 1531508 - RNA, 19 nt, Artificial Sequence
  Description of Artificial Sequence: Synthetic oligonucleotide
  Sense strand starting at position 957 of SEQ ID NO: 1245039
cucguacauccuuaaagua

SEQ ID NO: 1531509 - RNA, 19 nt, Artificial Sequence
  Description of Artificial Sequence: Synthetic oligonucleotide
  Antisense strand to SEQ ID NO: 1531508
uacuuuaaggauguacgag

SEQ ID NO: 1531510 - RNA, 19 nt, Artificial Sequence
  Description of Artificial Sequence: Synthetic oligonucleotide
  Sense strand starting at position 973 of SEQ ID NO: 1245039
guaagauuccauugacugu

SEQ ID NO: 1531511 - RNA, 19 nt, Artificial Sequence
  Description of Artificial Sequence: Synthetic oligonucleotide
  Antisense strand to SEQ ID NO: 1531510
acagucaauggaaucuuac

SEQ ID NO: 1531512 - RNA, 19 nt, Artificial Sequence
  Description of Artificial Sequence: Synthetic oligonucleotide
  Sense strand starting at position 1049 of SEQ ID NO: 1245039
ccuagaacuuagguauaga

SEQ ID NO: 1531513 - RNA, 19 nt, Artificial Sequence
  Description of Artificial Sequence: Synthetic oligonucleotide
  Antisense strand to SEQ ID NO: 1531512
ucuauaccuaaguucuagg

SEQ ID NO: 1531514 - RNA, 19 nt, Artificial Sequence
  Description of Artificial Sequence: Synthetic oligonucleotide
  Sense strand starting at position 1066 of SEQ ID NO: 1245039
gagugaccgcucuaaucua

SEQ ID NO: 1531515 - RNA, 19 nt, Artificial Sequence
  Description of Artificial Sequence: Synthetic oligonucleotide
  Antisense strand to SEQ ID NO: 1531514
uagauuagagcggucacuc

SEQ ID NO: 1531516 - RNA, 19 nt, Artificial Sequence
  Description of Artificial Sequence: Synthetic oligonucleotide
  Sense strand starting at position 1289 of SEQ ID NO: 1245039
ggucacuguuaggcgaaga

SEQ ID NO: 1531517 - RNA, 19 nt, Artificial Sequence
  Description of Artificial Sequence: Synthetic oligonucleotide
  Antisense strand to SEQ ID NO: 1531516
ucuucgccuaacagugacc

SEQ ID NO: 1531518 - RNA, 19 nt, Artificial Sequence
  Description of Artificial Sequence: Synthetic oligonucleotide
  Sense strand starting at position 1290 of SEQ ID NO: 1245039
gucacuguuaggcgaagaa

SEQ ID NO: 1531519 - RNA, 19 nt, Artificial Sequence
  Description of Artificial Sequence: Synthetic oligonucleotide
  Antisense strand to SEQ ID NO: 1531518
uucuucgccuaacagugac

SEQ ID NO: 1531520 - RNA, 19 nt, Artificial Sequence
  Description of Artificial Sequence: Synthetic oligonucleotide
  Sense strand starting at position 1335 of SEQ ID NO: 1245039
agcaaacuuuggucucaac

SEQ ID NO: 1531521 - RNA, 19 nt, Artificial Sequence
  Description of Artificial Sequence: Synthetic oligonucleotide
  Antisense strand to SEQ ID NO: 1531520
guugagaccaaaguuugcu

SEQ ID NO: 1531522 - RNA, 19 nt, Artificial Sequence
  Description of Artificial Sequence: Synthetic oligonucleotide
  Sense strand starting at position 1359 of SEQ ID NO: 1245039
aggaaauugcaccgaaauc

SEQ ID NO: 1531523 - RNA, 19 nt, Artificial Sequence
  Description of Artificial Sequence: Synthetic oligonucleotide
  Antisense strand to SEQ ID NO: 1531522
gauuucggugcaauuuccu

SEQ ID NO: 1531524 - RNA, 19 nt, Artificial Sequence
  Description of Artificial Sequence: Synthetic oligonucleotide
  Sense strand starting at position 1369 of SEQ ID NO: 1245039
accgaaaucgcugucgcua

SEQ ID NO: 1531525 - RNA, 19 nt, Artificial Sequence
  Description of Artificial Sequence: Synthetic oligonucleotide
  Antisense strand to SEQ ID NO: 1531524
uagcgacagcgauuucggu

SEQ ID NO: 1531526 - RNA, 19 nt, Artificial Sequence
  Description of Artificial Sequence: Synthetic oligonucleotide
  Sense strand starting at position 1858 of SEQ ID NO: 1245039
gcggacucuuuccucacau

SEQ ID NO: 1531527 - RNA, 19 nt, Artificial Sequence
  Description of Artificial Sequence: Synthetic oligonucleotide
  Antisense strand to SEQ ID NO: 1531526
augugaggaaagaguccgc

SEQ ID NO: 1531528 - RNA, 19 nt, Artificial Sequence
  Description of Artificial Sequence: Synthetic oligonucleotide
  Sense strand starting at position 3390 of SEQ ID NO: 1245039
ucaguuugccucuacauau

SEQ ID NO: 1531529 - RNA, 19 nt, Artificial Sequence
  Description of Artificial Sequence: Synthetic oligonucleotide
  Antisense strand to SEQ ID NO: 1531528
auauguagaggcaaacuga

SEQ ID NO: 1531530 - RNA, 19 nt, Artificial Sequence
  Description of Artificial Sequence: Synthetic oligonucleotide
  Sense strand starting at position 3401 of SEQ ID NO: 1245039
cuacauauuuaagaaaggu

SEQ ID NO: 1531531 - RNA, 19 nt, Artificial Sequence
  Description of Artificial Sequence: Synthetic oligonucleotide
  Antisense strand to SEQ ID NO: 1531530
accuuucuuaaauauguag

SEQ ID NO: 1531532 - RNA, 19 nt, Artificial Sequence
  Description of Artificial Sequence: Synthetic oligonucleotide
  Sense strand starting at position 3451 of SEQ ID NO: 1245039
aucaguaggucuuuauaga

SEQ ID NO: 1531533 - RNA, 19 nt, Artificial Sequence
  Description of Artificial Sequence: Synthetic oligonucleotide
  Antisense strand to SEQ ID NO: 1531532
ucuauaaagaccuacugau

SEQ ID NO: 1531534 - RNA, 19 nt, Artificial Sequence
  Description of Artificial Sequence: Synthetic oligonucleotide
  Sense strand starting at position 3452 of SEQ ID NO: 1245039
ucaguaggucuuuauagau

SEQ ID NO: 1531535 - RNA, 19 nt, Artificial Sequence
  Description of Artificial Sequence: Synthetic oligonucleotide
  Antisense strand to SEQ ID NO: 1531534
aucuauaaagaccuacuga

SEQ ID NO: 1531536 - RNA, 19 nt, Artificial Sequence
  Description of Artificial Sequence: Synthetic oligonucleotide
  Sense strand starting at position 3458 of SEQ ID NO: 1245039
ggucuuuauagauguacug

SEQ ID NO: 1531537 - RNA, 19 nt, Artificial Sequence
  Description of Artificial Sequence: Synthetic oligonucleotide
  Antisense strand to SEQ ID NO: 1531536
caguacaucuauaaagacc

SEQ ID NO: 1531538 - RNA, 19 nt, Artificial Sequence
  Description of Artificial Sequence: Synthetic oligonucleotide
  Sense strand starting at position 3489 of SEQ ID NO: 1245039
uuggaaaugucacuaauga

SEQ ID NO: 1531539 - RNA, 19 nt, Artificial Sequence
  Description of Artificial Sequence: Synthetic oligonucleotide
  Antisense strand to SEQ ID NO: 1531538
ucauuagugacauuuccaa

SEQ ID NO: 1531540 - RNA, 19 nt, Artificial Sequence
  Description of Artificial Sequence: Synthetic oligonucleotide
  Sense strand starting at position 3496 of SEQ ID NO: 1245039
ugucacuaaugaguggauu

SEQ ID NO: 1531541 - RNA, 19 nt, Artificial Sequence
  Description of Artificial Sequence: Synthetic oligonucleotide
  Antisense strand to SEQ ID NO: 1531540
aauccacucauuagugaca

SEQ ID NO: 1531542 - RNA, 19 nt, Artificial Sequence
  Description of Artificial Sequence: Synthetic oligonucleotide
  Sense strand starting at position 3575 of SEQ ID NO: 1245039
ugacauagucuccaagucu

SEQ ID NO: 1531543 - RNA, 19 nt, Artificial Sequence
  Description of Artificial Sequence: Synthetic oligonucleotide
  Antisense strand to SEQ ID NO: 1531542
agacuuggagacuauguca

SEQ ID NO: 1531544 - RNA, 19 nt, Artificial Sequence
  Description of Artificial Sequence: Synthetic oligonucleotide
  Sense strand starting at position 3609 of SEQ ID NO: 1245039
guaccuuuacaauggauaa

SEQ ID NO: 1531545 - RNA, 19 nt, Artificial Sequence
  Description of Artificial Sequence: Synthetic oligonucleotide
  Antisense strand to SEQ ID NO: 1531544
uuauccauuguaaagguac

SEQ ID NO: 1531546 - RNA, 19 nt, Artificial Sequence
  Description of Artificial Sequence: Synthetic oligonucleotide
  Sense strand starting at position 3624 of SEQ ID NO: 1245039
auaaaucuugcggguauua

SEQ ID NO: 1531547 - RNA, 19 nt, Artificial Sequence
  Description of Artificial Sequence: Synthetic oligonucleotide
  Antisense strand to SEQ ID NO: 1531546
uaauacccgcaagauuuau

SEQ ID NO: 1531548 - RNA, 19 nt, Artificial Sequence
  Description of Artificial Sequence: Synthetic oligonucleotide
  Sense strand starting at position 3626 of SEQ ID NO: 1245039
aaaucuugcggguauuacu

SEQ ID NO: 1531549 - RNA, 19 nt, Artificial Sequence
  Description of Artificial Sequence: Synthetic oligonucleotide
  Antisense strand to SEQ ID NO: 1531548
aguaauacccgcaagauuu

SEQ ID NO: 1531550 - RNA, 19 nt, Artificial Sequence
  Description of Artificial Sequence: Synthetic oligonucleotide
  Sense strand starting at position 3658 of SEQ ID NO: 1245039
aaguaauggugucccauca

SEQ ID NO: 1531551 - RNA, 19 nt, Artificial Sequence
  Description of Artificial Sequence: Synthetic oligonucleotide
  Antisense strand to SEQ ID NO: 1531550
ugaugggacaccauuacuu

SEQ ID NO: 1531552 - RNA, 19 nt, Artificial Sequence
  Description of Artificial Sequence: Synthetic oligonucleotide
  Sense strand starting at position 3665 of SEQ ID NO: 1245039
ggugucccaucaccaauaa

SEQ ID NO: 1531553 - RNA, 19 nt, Artificial Sequence
  Description of Artificial Sequence: Synthetic oligonucleotide
  Antisense strand to SEQ ID NO: 1531552
uuauuggugaugggacacc

SEQ ID NO: 1531554 - RNA, 19 nt, Artificial Sequence
  Description of Artificial Sequence: Synthetic oligonucleotide
  Sense strand starting at position 3666 of SEQ ID NO: 1245039
gugucccaucaccaauaaa

SEQ ID NO: 1531555 - RNA, 19 nt, Artificial Sequence
  Description of Artificial Sequence: Synthetic oligonucleotide
  Antisense strand to SEQ ID NO: 1531554
uuuauuggugaugggacac

SEQ ID NO: 1531556 - RNA, 19 nt, Artificial Sequence
  Description of Artificial Sequence: Synthetic oligonucleotide
  Sense strand starting at position 3730 of SEQ ID NO: 1245039
aaucucacuugcguagaau

SEQ ID NO: 1531557 - RNA, 19 nt, Artificial Sequence
  Description of Artificial Sequence: Synthetic oligonucleotide
  Antisense strand to SEQ ID NO: 1531556
auucuacgcaagugagauu

SEQ ID NO: 1531558 - RNA, 19 nt, Artificial Sequence
  Description of Artificial Sequence: Synthetic oligonucleotide
  Sense strand starting at position 3731 of SEQ ID NO: 1245039
aucucacuugcguagaauu

SEQ ID NO: 1531559 - RNA, 19 nt, Artificial Sequence
  Description of Artificial Sequence: Synthetic oligonucleotide
  Antisense strand to SEQ ID NO: 1531558
aauucuacgcaagugagau

SEQ ID NO: 1531560 - RNA, 19 nt, Artificial Sequence
  Description of Artificial Sequence: Synthetic oligonucleotide
  Sense strand starting at position 3767 of SEQ ID NO: 1245039
gccugaaucuaauuauaag

SEQ ID NO: 1531561 - RNA, 19 nt, Artificial Sequence
  Description of Artificial Sequence: Synthetic oligonucleotide
  Antisense strand to SEQ ID NO: 1531560
cuuauaauuagauucaggc

SEQ ID NO: 1531562 - RNA, 19 nt, Artificial Sequence
  Description of Artificial Sequence: Synthetic oligonucleotide
  Sense strand starting at position 3888 of SEQ ID NO: 1245039
ggaauaguaucacauuaaa

SEQ ID NO: 1531563 - RNA, 19 nt, Artificial Sequence
  Description of Artificial Sequence: Synthetic oligonucleotide
  Antisense strand to SEQ ID NO: 1531562
uuuaaugugauacuauucc

SEQ ID NO: 1531564 - RNA, 19 nt, Artificial Sequence
  Description of Artificial Sequence: Synthetic oligonucleotide
  Sense strand starting at position 3923 of SEQ ID NO: 1245039
acacauauuguaugagauc

SEQ ID NO: 1531565 - RNA, 19 nt, Artificial Sequence
  Description of Artificial Sequence: Synthetic oligonucleotide
  Antisense strand to SEQ ID NO: 1531564
gaucucauacaauaugugu

SEQ ID NO: 1531566 - RNA, 19 nt, Artificial Sequence
  Description of Artificial Sequence: Synthetic oligonucleotide
  Sense strand starting at position 26 of SEQ ID NO: 1245040
cgaauaguucgcgcugauc

SEQ ID NO: 1531567 - RNA, 19 nt, Artificial Sequence
  Description of Artificial Sequence: Synthetic oligonucleotide
  Antisense strand to SEQ ID NO: 1531566
gaucagcgcgaacuauucg

SEQ ID NO: 1531568 - RNA, 19 nt, Artificial Sequence
  Description of Artificial Sequence: Synthetic oligonucleotide
  Sense strand starting at position 35 of SEQ ID NO: 1245040
cgcgcugaucuguuaucga

SEQ ID NO: 1531569 - RNA, 19 nt, Artificial Sequence
  Description of Artificial Sequence: Synthetic oligonucleotide
  Antisense strand to SEQ ID NO: 1531568
ucgauaacagaucagcgcg

SEQ ID NO: 1531570 - RNA, 19 nt, Artificial Sequence
  Description of Artificial Sequence: Synthetic oligonucleotide
  Sense strand starting at position 160 of SEQ ID NO: 1245040
acggguagagauggguuaa

SEQ ID NO: 1531571 - RNA, 19 nt, Artificial Sequence
  Description of Artificial Sequence: Synthetic oligonucleotide
  Antisense strand to SEQ ID NO: 1531570
uuaacccaucucuacccgu

SEQ ID NO: 1531572 - RNA, 19 nt, Artificial Sequence
  Description of Artificial Sequence: Synthetic oligonucleotide
  Sense strand starting at position 161 of SEQ ID NO: 1245040
cggguagagauggguuaaa

SEQ ID NO: 1531573 - RNA, 19 nt, Artificial Sequence
  Description of Artificial Sequence: Synthetic oligonucleotide
  Antisense strand to SEQ ID NO: 1531572
uuuaacccaucucuacccg

SEQ ID NO: 1531574 - RNA, 19 nt, Artificial Sequence
  Description of Artificial Sequence: Synthetic oligonucleotide
  Sense strand starting at position 436 of SEQ ID NO: 1245040
cuggaauccuaauacagaa

SEQ ID NO: 1531575 - RNA, 19 nt, Artificial Sequence
  Description of Artificial Sequence: Synthetic oligonucleotide
  Antisense strand to SEQ ID NO: 1531574
uucuguauuaggauuccag

SEQ ID NO: 1531576 - RNA, 19 nt, Artificial Sequence
  Description of Artificial Sequence: Synthetic oligonucleotide
  Sense strand starting at position 665 of SEQ ID NO: 1245040
cgcgccugccgguuagaaa

SEQ ID NO: 1531577 - RNA, 19 nt, Artificial Sequence
  Description of Artificial Sequence: Synthetic oligonucleotide
  Antisense strand to SEQ ID NO: 1531576
uuucuaaccggcaggcgcg

SEQ ID NO: 1531578 - RNA, 19 nt, Artificial Sequence
  Description of Artificial Sequence: Synthetic oligonucleotide
  Sense strand starting at position 951 of SEQ ID NO: 1245040
gggaaagaauuggaaugaa

SEQ ID NO: 1531579 - RNA, 19 nt, Artificial Sequence
  Description of Artificial Sequence: Synthetic oligonucleotide
  Antisense strand to SEQ ID NO: 1531578
uucauuccaauucuuuccc

SEQ ID NO: 1531580 - RNA, 19 nt, Artificial Sequence
  Description of Artificial Sequence: Synthetic oligonucleotide
  Sense strand starting at position 1082 of SEQ ID NO: 1245040
agcugaaguucuccuaacu

SEQ ID NO: 1531581 - RNA, 19 nt, Artificial Sequence
  Description of Artificial Sequence: Synthetic oligonucleotide
  Antisense strand to SEQ ID NO: 1531580
aguuaggagaacuucagcu

SEQ ID NO: 1531582 - RNA, 19 nt, Artificial Sequence
  Description of Artificial Sequence: Synthetic oligonucleotide
  Sense strand starting at position 1346 of SEQ ID NO: 1245040
gcuaguagucuggacccaa

SEQ ID NO: 1531583 - RNA, 19 nt, Artificial Sequence
  Description of Artificial Sequence: Synthetic oligonucleotide
  Antisense strand to SEQ ID NO: 1531582
uuggguccagacuacuagc

SEQ ID NO: 1531584 - RNA, 19 nt, Artificial Sequence
  Description of Artificial Sequence: Synthetic oligonucleotide
  Sense strand starting at position 1992 of SEQ ID NO: 1245040
guuggugucugagcagaag

SEQ ID NO: 1531585 - RNA, 19 nt, Artificial Sequence
  Description of Artificial Sequence: Synthetic oligonucleotide
  Antisense strand to SEQ ID NO: 1531584
cuucugcucagacaccaac

SEQ ID NO: 1531586 - RNA, 19 nt, Artificial Sequence
  Description of Artificial Sequence: Synthetic oligonucleotide
  Sense strand starting at position 2214 of SEQ ID NO: 1245040
ggaagaagcaggcgauuaa

SEQ ID NO: 1531587 - RNA, 19 nt, Artificial Sequence
  Description of Artificial Sequence: Synthetic oligonucleotide
  Antisense strand to SEQ ID NO: 1531586
uuaaucgccugcuucuucc

SEQ ID NO: 1531588 - RNA, 19 nt, Artificial Sequence
  Description of Artificial Sequence: Synthetic oligonucleotide
  Sense strand starting at position 2430 of SEQ ID NO: 1245040
gcuccuauuuaucugugca

SEQ ID NO: 1531589 - RNA, 19 nt, Artificial Sequence
  Description of Artificial Sequence: Synthetic oligonucleotide
  Antisense strand to SEQ ID NO: 1531588
ugcacagauaaauaggagc

SEQ ID NO: 1531590 - RNA, 19 nt, Artificial Sequence
  Description of Artificial Sequence: Synthetic oligonucleotide
  Sense strand starting at position 2432 of SEQ ID NO: 1245040
uccuauuuaucugugcagu

SEQ ID NO: 1531591 - RNA, 19 nt, Artificial Sequence
  Description of Artificial Sequence: Synthetic oligonucleotide
  Antisense strand to SEQ ID NO: 1531590
acugcacagauaaauagga

SEQ ID NO: 1531592 - RNA, 19 nt, Artificial Sequence
  Description of Artificial Sequence: Synthetic oligonucleotide
  Sense strand starting at position 2433 of SEQ ID NO: 1245040
ccuauuuaucugugcaguu

SEQ ID NO: 1531593 - RNA, 19 nt, Artificial Sequence
  Description of Artificial Sequence: Synthetic oligonucleotide
  Antisense strand to SEQ ID NO: 1531592
aacugcacagauaaauagg

SEQ ID NO: 1531594 - RNA, 19 nt, Artificial Sequence
  Description of Artificial Sequence: Synthetic oligonucleotide
  Sense strand starting at position 2434 of SEQ ID NO: 1245040
cuauuuaucugugcaguuc

SEQ ID NO: 1531595 - RNA, 19 nt, Artificial Sequence
  Description of Artificial Sequence: Synthetic oligonucleotide
  Antisense strand to SEQ ID NO: 1531594
gaacugcacagauaaauag

SEQ ID NO: 1531596 - RNA, 19 nt, Artificial Sequence
  Description of Artificial Sequence: Synthetic oligonucleotide
  Sense strand starting at position 2458 of SEQ ID NO: 1245040
aaucuauccgaacaugguu

SEQ ID NO: 1531597 - RNA, 19 nt, Artificial Sequence
  Description of Artificial Sequence: Synthetic oligonucleotide
  Antisense strand to SEQ ID NO: 1531596
aaccauguucggauagauu

SEQ ID NO: 1531598 - RNA, 19 nt, Artificial Sequence
  Description of Artificial Sequence: Synthetic oligonucleotide
  Sense strand starting at position 2506 of SEQ ID NO: 1245040
cugccuguugccuuuaagu

SEQ ID NO: 1531599 - RNA, 19 nt, Artificial Sequence
  Description of Artificial Sequence: Synthetic oligonucleotide
  Antisense strand to SEQ ID NO: 1531598
acuuaaaggcaacaggcag

SEQ ID NO: 1531600 - RNA, 19 nt, Artificial Sequence
  Description of Artificial Sequence: Synthetic oligonucleotide
  Sense strand starting at position 2514 of SEQ ID NO: 1245040
ugccuuuaaguacagaaua

SEQ ID NO: 1531601 - RNA, 19 nt, Artificial Sequence
  Description of Artificial Sequence: Synthetic oligonucleotide
  Antisense strand to SEQ ID NO: 1531600
uauucuguacuuaaaggca

SEQ ID NO: 1531602 - RNA, 19 nt, Artificial Sequence
  Description of Artificial Sequence: Synthetic oligonucleotide
  Sense strand starting at position 2596 of SEQ ID NO: 1245040
ucacguaaugaucggguau

SEQ ID NO: 1531603 - RNA, 19 nt, Artificial Sequence
  Description of Artificial Sequence: Synthetic oligonucleotide
  Antisense strand to SEQ ID NO: 1531602
auacccgaucauuacguga

SEQ ID NO: 1531604 - RNA, 19 nt, Artificial Sequence
  Description of Artificial Sequence: Synthetic oligonucleotide
  Sense strand starting at position 2667 of SEQ ID NO: 1245040
ugcuguccucuuggaugau

SEQ ID NO: 1531605 - RNA, 19 nt, Artificial Sequence
  Description of Artificial Sequence: Synthetic oligonucleotide
  Antisense strand to SEQ ID NO: 1531604
aucauccaagaggacagca

SEQ ID NO: 1531606 - RNA, 19 nt, Artificial Sequence
  Description of Artificial Sequence: Synthetic oligonucleotide
  Sense strand starting at position 2670 of SEQ ID NO: 1245040
uguccucuuggaugauaag

SEQ ID NO: 1531607 - RNA, 19 nt, Artificial Sequence
  Description of Artificial Sequence: Synthetic oligonucleotide
  Antisense strand to SEQ ID NO: 1531606
cuuaucauccaagaggaca

SEQ ID NO: 1531608 - RNA, 19 nt, Artificial Sequence
  Description of Artificial Sequence: Synthetic oligonucleotide
  Sense strand starting at position 2696 of SEQ ID NO: 1245040
gucaucgacuucucauaaa

SEQ ID NO: 1531609 - RNA, 19 nt, Artificial Sequence
  Description of Artificial Sequence: Synthetic oligonucleotide
  Antisense strand to SEQ ID NO: 1531608
uuuaugagaagucgaugac

SEQ ID NO: 1531610 - RNA, 19 nt, Artificial Sequence
  Description of Artificial Sequence: Synthetic oligonucleotide
  Sense strand starting at position 2892 of SEQ ID NO: 1245040
gagcucuggucucuggaau

SEQ ID NO: 1531611 - RNA, 19 nt, Artificial Sequence
  Description of Artificial Sequence: Synthetic oligonucleotide
  Antisense strand to SEQ ID NO: 1531610
auuccagagaccagagcuc

SEQ ID NO: 1531612 - RNA, 19 nt, Artificial Sequence
  Description of Artificial Sequence: Synthetic oligonucleotide
  Sense strand starting at position 2893 of SEQ ID NO: 1245040
agcucuggucucuggaauu

SEQ ID NO: 1531613 - RNA, 19 nt, Artificial Sequence
  Description of Artificial Sequence: Synthetic oligonucleotide
  Antisense strand to SEQ ID NO: 1531612
aauuccagagaccagagcu

SEQ ID NO: 1531614 - RNA, 19 nt, Artificial Sequence
  Description of Artificial Sequence: Synthetic oligonucleotide
  Sense strand starting at position 2899 of SEQ ID NO: 1245040
ggucucuggaauuaagcau

SEQ ID NO: 1531615 - RNA, 19 nt, Artificial Sequence
  Description of Artificial Sequence: Synthetic oligonucleotide
  Antisense strand to SEQ ID NO: 1531614
augcuuaauuccagagacc

SEQ ID NO: 1531616 - RNA, 19 nt, Artificial Sequence
  Description of Artificial Sequence: Synthetic oligonucleotide
  Sense strand starting at position 2952 of SEQ ID NO: 1245040
ucuccuaauuucuugcgua

SEQ ID NO: 1531617 - RNA, 19 nt, Artificial Sequence
  Description of Artificial Sequence: Synthetic oligonucleotide
  Antisense strand to SEQ ID NO: 1531616
uacgcaagaaauuaggaga

SEQ ID NO: 1531618 - RNA, 19 nt, Artificial Sequence
  Description of Artificial Sequence: Synthetic oligonucleotide
  Sense strand starting at position 3077 of SEQ ID NO: 1245040
gggcuaugaguagauugau

SEQ ID NO: 1531619 - RNA, 19 nt, Artificial Sequence
  Description of Artificial Sequence: Synthetic oligonucleotide
  Antisense strand to SEQ ID NO: 1531618
aucaaucuacucauagccc

SEQ ID NO: 1531620 - RNA, 19 nt, Artificial Sequence
  Description of Artificial Sequence: Synthetic oligonucleotide
  Sense strand starting at position 3216 of SEQ ID NO: 1245040
gccucuaaauuugaagauu

SEQ ID NO: 1531621 - RNA, 19 nt, Artificial Sequence
  Description of Artificial Sequence: Synthetic oligonucleotide
  Antisense strand to SEQ ID NO: 1531620
aaucuucaaauuuagaggc

SEQ ID NO: 1531622 - RNA, 19 nt, Artificial Sequence
  Description of Artificial Sequence: Synthetic oligonucleotide
  Sense strand starting at position 3224 of SEQ ID NO: 1245040
auuugaagauuuggcagua

SEQ ID NO: 1531623 - RNA, 19 nt, Artificial Sequence
  Description of Artificial Sequence: Synthetic oligonucleotide
  Antisense strand to SEQ ID NO: 1531622
uacugccaaaucuucaaau

SEQ ID NO: 1531624 - RNA, 19 nt, Artificial Sequence
  Description of Artificial Sequence: Synthetic oligonucleotide
  Sense strand starting at position 3237 of SEQ ID NO: 1245040
gcaguagugcuauuaacgu

SEQ ID NO: 1531625 - RNA, 19 nt, Artificial Sequence
  Description of Artificial Sequence: Synthetic oligonucleotide
  Antisense strand to SEQ ID NO: 1531624
acguuaauagcacuacugc

SEQ ID NO: 1531626 - RNA, 19 nt, Artificial Sequence
  Description of Artificial Sequence: Synthetic oligonucleotide
  Sense strand starting at position 3305 of SEQ ID NO: 1245040
ucuuguagcguccauaaau

SEQ ID NO: 1531627 - RNA, 19 nt, Artificial Sequence
  Description of Artificial Sequence: Synthetic oligonucleotide
  Antisense strand to SEQ ID NO: 1531626
auuuauggacgcuacaaga

SEQ ID NO: 1531628 - RNA, 19 nt, Artificial Sequence
  Description of Artificial Sequence: Synthetic oligonucleotide
  Sense strand starting at position 3323 of SEQ ID NO: 1245040
ugcccuaaugcugagaaug

SEQ ID NO: 1531629 - RNA, 19 nt, Artificial Sequence
  Description of Artificial Sequence: Synthetic oligonucleotide
  Antisense strand to SEQ ID NO: 1531628
cauucucagcauuagggca

SEQ ID NO: 1531630 - RNA, 19 nt, Artificial Sequence
  Description of Artificial Sequence: Synthetic oligonucleotide
  Sense strand starting at position 3352 of SEQ ID NO: 1245040
cugccuggauuugaggaaa

SEQ ID NO: 1531631 - RNA, 19 nt, Artificial Sequence
  Description of Artificial Sequence: Synthetic oligonucleotide
  Antisense strand to SEQ ID NO: 1531630
uuuccucaaauccaggcag

SEQ ID NO: 1531632 - RNA, 19 nt, Artificial Sequence
  Description of Artificial Sequence: Synthetic oligonucleotide
  Sense strand starting at position 3553 of SEQ ID NO: 1245040
uucagcucuguuugggaga

SEQ ID NO: 1531633 - RNA, 19 nt, Artificial Sequence
  Description of Artificial Sequence: Synthetic oligonucleotide
  Antisense strand to SEQ ID NO: 1531632
ucucccaaacagagcugaa

SEQ ID NO: 1531634 - RNA, 19 nt, Artificial Sequence
  Description of Artificial Sequence: Synthetic oligonucleotide
  Sense strand starting at position 3594 of SEQ ID NO: 1245040
gaggguucccaguacaagu

SEQ ID NO: 1531635 - RNA, 19 nt, Artificial Sequence
  Description of Artificial Sequence: Synthetic oligonucleotide
  Antisense strand to SEQ ID NO: 1531634
acuuguacugggaacccuc

SEQ ID NO: 1531636 - RNA, 19 nt, Artificial Sequence
  Description of Artificial Sequence: Synthetic oligonucleotide
  Sense strand starting at position 3618 of SEQ ID NO: 1245040
ugaugaagguuucuaacag

SEQ ID NO: 1531637 - RNA, 19 nt, Artificial Sequence
  Description of Artificial Sequence: Synthetic oligonucleotide
  Antisense strand to SEQ ID NO: 1531636
cuguuagaaaccuucauca

SEQ ID NO: 1531638 - RNA, 19 nt, Artificial Sequence
  Description of Artificial Sequence: Synthetic oligonucleotide
  Sense strand starting at position 3635 of SEQ ID NO: 1245040
aggaaucccucugcuggaa

SEQ ID NO: 1531639 - RNA, 19 nt, Artificial Sequence
  Description of Artificial Sequence: Synthetic oligonucleotide
  Antisense strand to SEQ ID NO: 1531638
uuccagcagagggauuccu

SEQ ID NO: 1531640 - RNA, 19 nt, Artificial Sequence
  Description of Artificial Sequence: Synthetic oligonucleotide
  Sense strand starting at position 3734 of SEQ ID NO: 1245040
uuuccuggguaauugaaga

SEQ ID NO: 1531641 - RNA, 19 nt, Artificial Sequence
  Description of Artificial Sequence: Synthetic oligonucleotide
  Antisense strand to SEQ ID NO: 1531640
ucuucaauuacccaggaaa

SEQ ID NO: 1531642 - RNA, 19 nt, Artificial Sequence
  Description of Artificial Sequence: Synthetic oligonucleotide
  Sense strand starting at position 3917 of SEQ ID NO: 1245040
gugggaggguuuccuguua

SEQ ID NO: 1531643 - RNA, 19 nt, Artificial Sequence
  Description of Artificial Sequence: Synthetic oligonucleotide
  Antisense strand to SEQ ID NO: 1531642
uaacaggaaacccucccac

SEQ ID NO: 1531644 - RNA, 19 nt, Artificial Sequence
  Description of Artificial Sequence: Synthetic oligonucleotide
  Sense strand starting at position 3967 of SEQ ID NO: 1245040
auauuaguucugcaugcuu

SEQ ID NO: 1531645 - RNA, 19 nt, Artificial Sequence
  Description of Artificial Sequence: Synthetic oligonucleotide
  Antisense strand to SEQ ID NO: 1531644
aagcaugcagaacuaauau

SEQ ID NO: 1531646 - RNA, 19 nt, Artificial Sequence
  Description of Artificial Sequence: Synthetic oligonucleotide
  Sense strand starting at position 75 of SEQ ID NO: 1245041
cggagaaccucgguuucua

SEQ ID NO: 1531647 - RNA, 19 nt, Artificial Sequence
  Description of Artificial Sequence: Synthetic oligonucleotide
  Antisense strand to SEQ ID NO: 1531646
uagaaaccgagguucuccg

SEQ ID NO: 1531648 - RNA, 19 nt, Artificial Sequence
  Description of Artificial Sequence: Synthetic oligonucleotide
  Sense strand starting at position 106 of SEQ ID NO: 1245041
gaggaucuggcaggaacau

SEQ ID NO: 1531649 - RNA, 19 nt, Artificial Sequence
  Description of Artificial Sequence: Synthetic oligonucleotide
  Antisense strand to SEQ ID NO: 1531648
auguuccugccagauccuc

SEQ ID NO: 1531650 - RNA, 19 nt, Artificial Sequence
  Description of Artificial Sequence: Synthetic oligonucleotide
  Sense strand starting at position 247 of SEQ ID NO: 1245041
gggugaaaccaggguguuu

SEQ ID NO: 1531651 - RNA, 19 nt, Artificial Sequence
  Description of Artificial Sequence: Synthetic oligonucleotide
  Antisense strand to SEQ ID NO: 1531650
aaacacccugguuucaccc

SEQ ID NO: 1531652 - RNA, 19 nt, Artificial Sequence
  Description of Artificial Sequence: Synthetic oligonucleotide
  Sense strand starting at position 279 of SEQ ID NO: 1245041
cgaauaguucgcgcugauc

SEQ ID NO: 1531653 - RNA, 19 nt, Artificial Sequence
  Description of Artificial Sequence: Synthetic oligonucleotide
  Antisense strand to SEQ ID NO: 1531652
gaucagcgcgaacuauucg

SEQ ID NO: 1531654 - RNA, 19 nt, Artificial Sequence
  Description of Artificial Sequence: Synthetic oligonucleotide
  Sense strand starting at position 288 of SEQ ID NO: 1245041
cgcgcugaucuguuaucga

SEQ ID NO: 1531655 - RNA, 19 nt, Artificial Sequence
  Description of Artificial Sequence: Synthetic oligonucleotide
  Antisense strand to SEQ ID NO: 1531654
ucgauaacagaucagcgcg

SEQ ID NO: 1531656 - RNA, 19 nt, Artificial Sequence
  Description of Artificial Sequence: Synthetic oligonucleotide
  Sense strand starting at position 413 of SEQ ID NO: 1245041
acggguagagauggguuaa

SEQ ID NO: 1531657 - RNA, 19 nt, Artificial Sequence
  Description of Artificial Sequence: Synthetic oligonucleotide
  Antisense strand to SEQ ID NO: 1531656
uuaacccaucucuacccgu

SEQ ID NO: 1531658 - RNA, 19 nt, Artificial Sequence
  Description of Artificial Sequence: Synthetic oligonucleotide
  Sense strand starting at position 414 of SEQ ID NO: 1245041
cggguagagauggguuaaa

SEQ ID NO: 1531659 - RNA, 19 nt, Artificial Sequence
  Description of Artificial Sequence: Synthetic oligonucleotide
  Antisense strand to SEQ ID NO: 1531658
uuuaacccaucucuacccg

SEQ ID NO: 1531660 - RNA, 19 nt, Artificial Sequence
  Description of Artificial Sequence: Synthetic oligonucleotide
  Sense strand starting at position 689 of SEQ ID NO: 1245041
cuggaauccuaauacagaa

SEQ ID NO: 1531661 - RNA, 19 nt, Artificial Sequence
  Description of Artificial Sequence: Synthetic oligonucleotide
  Antisense strand to SEQ ID NO: 1531660
uucuguauuaggauuccag

SEQ ID NO: 1531662 - RNA, 19 nt, Artificial Sequence
  Description of Artificial Sequence: Synthetic oligonucleotide
  Sense strand starting at position 918 of SEQ ID NO: 1245041
cgcgccugccgguuagaaa

SEQ ID NO: 1531663 - RNA, 19 nt, Artificial Sequence
  Description of Artificial Sequence: Synthetic oligonucleotide
  Antisense strand to SEQ ID NO: 1531662
uuucuaaccggcaggcgcg

SEQ ID NO: 1531664 - RNA, 19 nt, Artificial Sequence
  Description of Artificial Sequence: Synthetic oligonucleotide
  Sense strand starting at position 1204 of SEQ ID NO: 1245041
gggaaagaauuggaaugaa

SEQ ID NO: 1531665 - RNA, 19 nt, Artificial Sequence
  Description of Artificial Sequence: Synthetic oligonucleotide
  Antisense strand to SEQ ID NO: 1531664
uucauuccaauucuuuccc

SEQ ID NO: 1531666 - RNA, 19 nt, Artificial Sequence
  Description of Artificial Sequence: Synthetic oligonucleotide
  Sense strand starting at position 1335 of SEQ ID NO: 1245041
agcugaaguucuccuaacu

SEQ ID NO: 1531667 - RNA, 19 nt, Artificial Sequence
  Description of Artificial Sequence: Synthetic oligonucleotide
  Antisense strand to SEQ ID NO: 1531666
aguuaggagaacuucagcu

SEQ ID NO: 1531668 - RNA, 19 nt, Artificial Sequence
  Description of Artificial Sequence: Synthetic oligonucleotide
  Sense strand starting at position 1599 of SEQ ID NO: 1245041
gcuaguagucuggacccaa

SEQ ID NO: 1531669 - RNA, 19 nt, Artificial Sequence
  Description of Artificial Sequence: Synthetic oligonucleotide
  Antisense strand to SEQ ID NO: 1531668
uuggguccagacuacuagc

SEQ ID NO: 1531670 - RNA, 19 nt, Artificial Sequence
  Description of Artificial Sequence: Synthetic oligonucleotide
  Sense strand starting at position 2245 of SEQ ID NO: 1245041
guuggugucugagcagaag

SEQ ID NO: 1531671 - RNA, 19 nt, Artificial Sequence
  Description of Artificial Sequence: Synthetic oligonucleotide
  Antisense strand to SEQ ID NO: 1531670
cuucugcucagacaccaac

SEQ ID NO: 1531672 - RNA, 19 nt, Artificial Sequence
  Description of Artificial Sequence: Synthetic oligonucleotide
  Sense strand starting at position 2467 of SEQ ID NO: 1245041
ggaagaagcaggcgauuaa

SEQ ID NO: 1531673 - RNA, 19 nt, Artificial Sequence
  Description of Artificial Sequence: Synthetic oligonucleotide
  Antisense strand to SEQ ID NO: 1531672
uuaaucgccugcuucuucc

SEQ ID NO: 1531674 - RNA, 19 nt, Artificial Sequence
  Description of Artificial Sequence: Synthetic oligonucleotide
  Sense strand starting at position 2683 of SEQ ID NO: 1245041
gcuccuauuuaucugugca

SEQ ID NO: 1531675 - RNA, 19 nt, Artificial Sequence
  Description of Artificial Sequence: Synthetic oligonucleotide
  Antisense strand to SEQ ID NO: 1531674
ugcacagauaaauaggagc

SEQ ID NO: 1531676 - RNA, 19 nt, Artificial Sequence
  Description of Artificial Sequence: Synthetic oligonucleotide
  Sense strand starting at position 2685 of SEQ ID NO: 1245041
uccuauuuaucugugcagu

SEQ ID NO: 1531677 - RNA, 19 nt, Artificial Sequence
  Description of Artificial Sequence: Synthetic oligonucleotide
  Antisense strand to SEQ ID NO: 1531676
acugcacagauaaauagga

SEQ ID NO: 1531678 - RNA, 19 nt, Artificial Sequence
  Description of Artificial Sequence: Synthetic oligonucleotide
  Sense strand starting at position 2686 of SEQ ID NO: 1245041
ccuauuuaucugugcaguu

SEQ ID NO: 1531679 - RNA, 19 nt, Artificial Sequence
  Description of Artificial Sequence: Synthetic oligonucleotide
  Antisense strand to SEQ ID NO: 1531678
aacugcacagauaaauagg

SEQ ID NO: 1531680 - RNA, 19 nt, Artificial Sequence
  Description of Artificial Sequence: Synthetic oligonucleotide
  Sense strand starting at position 2687 of SEQ ID NO: 1245041
cuauuuaucugugcaguuc

SEQ ID NO: 1531681 - RNA, 19 nt, Artificial Sequence
  Description of Artificial Sequence: Synthetic oligonucleotide
  Antisense strand to SEQ ID NO: 1531680
gaacugcacagauaaauag

SEQ ID NO: 1531682 - RNA, 19 nt, Artificial Sequence
  Description of Artificial Sequence: Synthetic oligonucleotide
  Sense strand starting at position 2711 of SEQ ID NO: 1245041
aaucuauccgaacaugguu

SEQ ID NO: 1531683 - RNA, 19 nt, Artificial Sequence
  Description of Artificial Sequence: Synthetic oligonucleotide
  Antisense strand to SEQ ID NO: 1531682
aaccauguucggauagauu

SEQ ID NO: 1531684 - RNA, 19 nt, Artificial Sequence
  Description of Artificial Sequence: Synthetic oligonucleotide
  Sense strand starting at position 2759 of SEQ ID NO: 1245041
cugccuguugccuuuaagu

SEQ ID NO: 1531685 - RNA, 19 nt, Artificial Sequence
  Description of Artificial Sequence: Synthetic oligonucleotide
  Antisense strand to SEQ ID NO: 1531684
acuuaaaggcaacaggcag

SEQ ID NO: 1531686 - RNA, 19 nt, Artificial Sequence
  Description of Artificial Sequence: Synthetic oligonucleotide
  Sense strand starting at position 2767 of SEQ ID NO: 1245041
ugccuuuaaguacagaaua

SEQ ID NO: 1531687 - RNA, 19 nt, Artificial Sequence
  Description of Artificial Sequence: Synthetic oligonucleotide
  Antisense strand to SEQ ID NO: 1531686
uauucuguacuuaaaggca

SEQ ID NO: 1531688 - RNA, 19 nt, Artificial Sequence
  Description of Artificial Sequence: Synthetic oligonucleotide
  Sense strand starting at position 2849 of SEQ ID NO: 1245041
ucacguaaugaucggguau

SEQ ID NO: 1531689 - RNA, 19 nt, Artificial Sequence
  Description of Artificial Sequence: Synthetic oligonucleotide
  Antisense strand to SEQ ID NO: 1531688
auacccgaucauuacguga

SEQ ID NO: 1531690 - RNA, 19 nt, Artificial Sequence
  Description of Artificial Sequence: Synthetic oligonucleotide
  Sense strand starting at position 2920 of SEQ ID NO: 1245041
ugcuguccucuuggaugau

SEQ ID NO: 1531691 - RNA, 19 nt, Artificial Sequence
  Description of Artificial Sequence: Synthetic oligonucleotide
  Antisense strand to SEQ ID NO: 1531690
aucauccaagaggacagca

SEQ ID NO: 1531692 - RNA, 19 nt, Artificial Sequence
  Description of Artificial Sequence: Synthetic oligonucleotide
  Sense strand starting at position 2923 of SEQ ID NO: 1245041
uguccucuuggaugauaag

SEQ ID NO: 1531693 - RNA, 19 nt, Artificial Sequence
  Description of Artificial Sequence: Synthetic oligonucleotide
  Antisense strand to SEQ ID NO: 1531692
cuuaucauccaagaggaca

SEQ ID NO: 1531694 - RNA, 19 nt, Artificial Sequence
  Description of Artificial Sequence: Synthetic oligonucleotide
  Sense strand starting at position 2949 of SEQ ID NO: 1245041
gucaucgacuucucauaaa

SEQ ID NO: 1531695 - RNA, 19 nt, Artificial Sequence
  Description of Artificial Sequence: Synthetic oligonucleotide
  Antisense strand to SEQ ID NO: 1531694
uuuaugagaagucgaugac

SEQ ID NO: 1531696 - RNA, 19 nt, Artificial Sequence
  Description of Artificial Sequence: Synthetic oligonucleotide
  Sense strand starting at position 3145 of SEQ ID NO: 1245041
gagcucuggucucuggaau

SEQ ID NO: 1531697 - RNA, 19 nt, Artificial Sequence
  Description of Artificial Sequence: Synthetic oligonucleotide
  Antisense strand to SEQ ID NO: 1531696
auuccagagaccagagcuc

SEQ ID NO: 1531698 - RNA, 19 nt, Artificial Sequence
  Description of Artificial Sequence: Synthetic oligonucleotide
  Sense strand starting at position 3146 of SEQ ID NO: 1245041
agcucuggucucuggaauu

SEQ ID NO: 1531699 - RNA, 19 nt, Artificial Sequence
  Description of Artificial Sequence: Synthetic oligonucleotide
  Antisense strand to SEQ ID NO: 1531698
aauuccagagaccagagcu

SEQ ID NO: 1531700 - RNA, 19 nt, Artificial Sequence
  Description of Artificial Sequence: Synthetic oligonucleotide
  Sense strand starting at position 3152 of SEQ ID NO: 1245041
ggucucuggaauuaagcau

SEQ ID NO: 1531701 - RNA, 19 nt, Artificial Sequence
  Description of Artificial Sequence: Synthetic oligonucleotide
  Antisense strand to SEQ ID NO: 1531700
augcuuaauuccagagacc

SEQ ID NO: 1531702 - RNA, 19 nt, Artificial Sequence
  Description of Artificial Sequence: Synthetic oligonucleotide
  Sense strand starting at position 3205 of SEQ ID NO: 1245041
ucuccuaauuucuugcgua

SEQ ID NO: 1531703 - RNA, 19 nt, Artificial Sequence
  Description of Artificial Sequence: Synthetic oligonucleotide
  Antisense strand to SEQ ID NO: 1531702
uacgcaagaaauuaggaga

SEQ ID NO: 1531704 - RNA, 19 nt, Artificial Sequence
  Description of Artificial Sequence: Synthetic oligonucleotide
  Sense strand starting at position 3330 of SEQ ID NO: 1245041
gggcuaugaguagauugau

SEQ ID NO: 1531705 - RNA, 19 nt, Artificial Sequence
  Description of Artificial Sequence: Synthetic oligonucleotide
  Antisense strand to SEQ ID NO: 1531704
aucaaucuacucauagccc

SEQ ID NO: 1531706 - RNA, 19 nt, Artificial Sequence
  Description of Artificial Sequence: Synthetic oligonucleotide
  Sense strand starting at position 3469 of SEQ ID NO: 1245041
gccucuaaauuugaagauu

SEQ ID NO: 1531707 - RNA, 19 nt, Artificial Sequence
  Description of Artificial Sequence: Synthetic oligonucleotide
  Antisense strand to SEQ ID NO: 1531706
aaucuucaaauuuagaggc

SEQ ID NO: 1531708 - RNA, 19 nt, Artificial Sequence
  Description of Artificial Sequence: Synthetic oligonucleotide
  Sense strand starting at position 3477 of SEQ ID NO: 1245041
auuugaagauuuggcagua

SEQ ID NO: 1531709 - RNA, 19 nt, Artificial Sequence
  Description of Artificial Sequence: Synthetic oligonucleotide
  Antisense strand to SEQ ID NO: 1531708
uacugccaaaucuucaaau

SEQ ID NO: 1531710 - RNA, 19 nt, Artificial Sequence
  Description of Artificial Sequence: Synthetic oligonucleotide
  Sense strand starting at position 3490 of SEQ ID NO: 1245041
gcaguagugcuauuaacgu

SEQ ID NO: 1531711 - RNA, 19 nt, Artificial Sequence
  Description of Artificial Sequence: Synthetic oligonucleotide
  Antisense strand to SEQ ID NO: 1531710
acguuaauagcacuacugc

SEQ ID NO: 1531712 - RNA, 19 nt, Artificial Sequence
  Description of Artificial Sequence: Synthetic oligonucleotide
  Sense strand starting at position 3558 of SEQ ID NO: 1245041
ucuuguagcguccauaaau

SEQ ID NO: 1531713 - RNA, 19 nt, Artificial Sequence
  Description of Artificial Sequence: Synthetic oligonucleotide
  Antisense strand to SEQ ID NO: 1531712
auuuauggacgcuacaaga

SEQ ID NO: 1531714 - RNA, 19 nt, Artificial Sequence
  Description of Artificial Sequence: Synthetic oligonucleotide
  Sense strand starting at position 3576 of SEQ ID NO: 1245041
ugcccuaaugcugagaaug

SEQ ID NO: 1531715 - RNA, 19 nt, Artificial Sequence
  Description of Artificial Sequence: Synthetic oligonucleotide
  Antisense strand to SEQ ID NO: 1531714
cauucucagcauuagggca

SEQ ID NO: 1531716 - RNA, 19 nt, Artificial Sequence
  Description of Artificial Sequence: Synthetic oligonucleotide
  Sense strand starting at position 3605 of SEQ ID NO: 1245041
cugccuggauuugaggaaa

SEQ ID NO: 1531717 - RNA, 19 nt, Artificial Sequence
  Description of Artificial Sequence: Synthetic oligonucleotide
  Antisense strand to SEQ ID NO: 1531716
uuuccucaaauccaggcag

SEQ ID NO: 1531718 - RNA, 19 nt, Artificial Sequence
  Description of Artificial Sequence: Synthetic oligonucleotide
  Sense strand starting at position 3806 of SEQ ID NO: 1245041
uucagcucuguuugggaga

SEQ ID NO: 1531719 - RNA, 19 nt, Artificial Sequence
  Description of Artificial Sequence: Synthetic oligonucleotide
  Antisense strand to SEQ ID NO: 1531718
ucucccaaacagagcugaa

SEQ ID NO: 1531720 - RNA, 19 nt, Artificial Sequence
  Description of Artificial Sequence: Synthetic oligonucleotide
  Sense strand starting at position 3847 of SEQ ID NO: 1245041
gaggguucccaguacaagu

SEQ ID NO: 1531721 - RNA, 19 nt, Artificial Sequence
  Description of Artificial Sequence: Synthetic oligonucleotide
  Antisense strand to SEQ ID NO: 1531720
acuuguacugggaacccuc

SEQ ID NO: 1531722 - RNA, 19 nt, Artificial Sequence
  Description of Artificial Sequence: Synthetic oligonucleotide
  Sense strand starting at position 3871 of SEQ ID NO: 1245041
ugaugaagguuucuaacag

SEQ ID NO: 1531723 - RNA, 19 nt, Artificial Sequence
  Description of Artificial Sequence: Synthetic oligonucleotide
  Antisense strand to SEQ ID NO: 1531722
cuguuagaaaccuucauca

SEQ ID NO: 1531724 - RNA, 19 nt, Artificial Sequence
  Description of Artificial Sequence: Synthetic oligonucleotide
  Sense strand starting at position 3888 of SEQ ID NO: 1245041
aggaaucccucugcuggaa

SEQ ID NO: 1531725 - RNA, 19 nt, Artificial Sequence
  Description of Artificial Sequence: Synthetic oligonucleotide
  Antisense strand to SEQ ID NO: 1531724
uuccagcagagggauuccu

SEQ ID NO: 1531726 - RNA, 19 nt, Artificial Sequence
  Description of Artificial Sequence: Synthetic oligonucleotide
  Sense strand starting at position 273 of SEQ ID NO: 1245042
gcugucuucgcagugaagu

SEQ ID NO: 1531727 - RNA, 19 nt, Artificial Sequence
  Description of Artificial Sequence: Synthetic oligonucleotide
  Antisense strand to SEQ ID NO: 1531726
acuucacugcgaagacagc

SEQ ID NO: 1531728 - RNA, 19 nt, Artificial Sequence
  Description of Artificial Sequence: Synthetic oligonucleotide
  Sense strand starting at position 520 of SEQ ID NO: 1245042
ggcagaugcccacaguacu

SEQ ID NO: 1531729 - RNA, 19 nt, Artificial Sequence
  Description of Artificial Sequence: Synthetic oligonucleotide
  Antisense strand to SEQ ID NO: 1531728
aguacugugggcaucugcc

SEQ ID NO: 1531730 - RNA, 19 nt, Artificial Sequence
  Description of Artificial Sequence: Synthetic oligonucleotide
  Sense strand starting at position 622 of SEQ ID NO: 1245042
gccaguauauuccucaaga

SEQ ID NO: 1531731 - RNA, 19 nt, Artificial Sequence
  Description of Artificial Sequence: Synthetic oligonucleotide
  Antisense strand to SEQ ID NO: 1531730
ucuugaggaauauacuggc

SEQ ID NO: 1531732 - RNA, 19 nt, Artificial Sequence
  Description of Artificial Sequence: Synthetic oligonucleotide
  Sense strand starting at position 654 of SEQ ID NO: 1245042
ugauuacccgugcaaauag

SEQ ID NO: 1531733 - RNA, 19 nt, Artificial Sequence
  Description of Artificial Sequence: Synthetic oligonucleotide
  Antisense strand to SEQ ID NO: 1531732
cuauuugcacggguaauca

SEQ ID NO: 1531734 - RNA, 19 nt, Artificial Sequence
  Description of Artificial Sequence: Synthetic oligonucleotide
  Sense strand starting at position 663 of SEQ ID NO: 1245042
gugcaaauagaguaaguuu

SEQ ID NO: 1531735 - RNA, 19 nt, Artificial Sequence
  Description of Artificial Sequence: Synthetic oligonucleotide
  Antisense strand to SEQ ID NO: 1531734
aaacuuacucuauuugcac

SEQ ID NO: 1531736 - RNA, 19 nt, Artificial Sequence
  Description of Artificial Sequence: Synthetic oligonucleotide
  Sense strand starting at position 743 of SEQ ID NO: 1245042
ucugcaucuguacaguauu

SEQ ID NO: 1531737 - RNA, 19 nt, Artificial Sequence
  Description of Artificial Sequence: Synthetic oligonucleotide
  Antisense strand to SEQ ID NO: 1531736
aauacuguacagaugcaga

SEQ ID NO: 1531738 - RNA, 19 nt, Artificial Sequence
  Description of Artificial Sequence: Synthetic oligonucleotide
  Sense strand starting at position 788 of SEQ ID NO: 1245042
caaagucaacuguaguaga

SEQ ID NO: 1531739 - RNA, 19 nt, Artificial Sequence
  Description of Artificial Sequence: Synthetic oligonucleotide
  Antisense strand to SEQ ID NO: 1531738
ucuacuacaguugacuuug

SEQ ID NO: 1531740 - RNA, 19 nt, Artificial Sequence
  Description of Artificial Sequence: Synthetic oligonucleotide
  Sense strand starting at position 868 of SEQ ID NO: 1245042
agucaacaucuguauauca

SEQ ID NO: 1531741 - RNA, 19 nt, Artificial Sequence
  Description of Artificial Sequence: Synthetic oligonucleotide
  Antisense strand to SEQ ID NO: 1531740
ugauauacagauguugacu

SEQ ID NO: 1531742 - RNA, 19 nt, Artificial Sequence
  Description of Artificial Sequence: Synthetic oligonucleotide
  Sense strand starting at position 979 of SEQ ID NO: 1245042
ggcagauuuaggugucacc

SEQ ID NO: 1531743 - RNA, 19 nt, Artificial Sequence
  Description of Artificial Sequence: Synthetic oligonucleotide
  Antisense strand to SEQ ID NO: 1531742
ggugacaccuaaaucugcc

SEQ ID NO: 1531744 - RNA, 19 nt, Artificial Sequence
  Description of Artificial Sequence: Synthetic oligonucleotide
  Sense strand starting at position 1990 of SEQ ID NO: 1245042
gcaaacucucgugagaguu

SEQ ID NO: 1531745 - RNA, 19 nt, Artificial Sequence
  Description of Artificial Sequence: Synthetic oligonucleotide
  Antisense strand to SEQ ID NO: 1531744
aacucucacgagaguuugc

SEQ ID NO: 1531746 - RNA, 19 nt, Artificial Sequence
  Description of Artificial Sequence: Synthetic oligonucleotide
  Sense strand starting at position 2002 of SEQ ID NO: 1245042
gagaguuugagugggcaau

SEQ ID NO: 1531747 - RNA, 19 nt, Artificial Sequence
  Description of Artificial Sequence: Synthetic oligonucleotide
  Antisense strand to SEQ ID NO: 1531746
auugcccacucaaacucuc

SEQ ID NO: 1531748 - RNA, 19 nt, Artificial Sequence
  Description of Artificial Sequence: Synthetic oligonucleotide
  Sense strand starting at position 2004 of SEQ ID NO: 1245042
gaguuugagugggcaauga

SEQ ID NO: 1531749 - RNA, 19 nt, Artificial Sequence
  Description of Artificial Sequence: Synthetic oligonucleotide
  Antisense strand to SEQ ID NO: 1531748
ucauugcccacucaaacuc

SEQ ID NO: 1531750 - RNA, 19 nt, Artificial Sequence
  Description of Artificial Sequence: Synthetic oligonucleotide
  Sense strand starting at position 2014 of SEQ ID NO: 1245042
gggcaaugacgucacuaaa

SEQ ID NO: 1531751 - RNA, 19 nt, Artificial Sequence
  Description of Artificial Sequence: Synthetic oligonucleotide
  Antisense strand to SEQ ID NO: 1531750
uuuagugacgucauugccc

SEQ ID NO: 1531752 - RNA, 19 nt, Artificial Sequence
  Description of Artificial Sequence: Synthetic oligonucleotide
  Sense strand starting at position 2041 of SEQ ID NO: 1245042
gagagugugucaucaacca

SEQ ID NO: 1531753 - RNA, 19 nt, Artificial Sequence
  Description of Artificial Sequence: Synthetic oligonucleotide
  Antisense strand to SEQ ID NO: 1531752
ugguugaugacacacucuc

SEQ ID NO: 1531754 - RNA, 19 nt, Artificial Sequence
  Description of Artificial Sequence: Synthetic oligonucleotide
  Sense strand starting at position 2046 of SEQ ID NO: 1245042
ugugucaucaaccauguga

SEQ ID NO: 1531755 - RNA, 19 nt, Artificial Sequence
  Description of Artificial Sequence: Synthetic oligonucleotide
  Antisense strand to SEQ ID NO: 1531754
ucacaugguugaugacaca

SEQ ID NO: 1531756 - RNA, 19 nt, Artificial Sequence
  Description of Artificial Sequence: Synthetic oligonucleotide
  Sense strand starting at position 2048 of SEQ ID NO: 1245042
ugucaucaaccaugugacu

SEQ ID NO: 1531757 - RNA, 19 nt, Artificial Sequence
  Description of Artificial Sequence: Synthetic oligonucleotide
  Antisense strand to SEQ ID NO: 1531756
agucacaugguugaugaca

SEQ ID NO: 1531758 - RNA, 19 nt, Artificial Sequence
  Description of Artificial Sequence: Synthetic oligonucleotide
  Sense strand starting at position 2062 of SEQ ID NO: 1245042
ugacuaaucacguggacuc

SEQ ID NO: 1531759 - RNA, 19 nt, Artificial Sequence
  Description of Artificial Sequence: Synthetic oligonucleotide
  Antisense strand to SEQ ID NO: 1531758
gaguccacgugauuaguca

SEQ ID NO: 1531760 - RNA, 19 nt, Artificial Sequence
  Description of Artificial Sequence: Synthetic oligonucleotide
  Sense strand starting at position 2063 of SEQ ID NO: 1245042
gacuaaucacguggacuca

SEQ ID NO: 1531761 - RNA, 19 nt, Artificial Sequence
  Description of Artificial Sequence: Synthetic oligonucleotide
  Antisense strand to SEQ ID NO: 1531760
ugaguccacgugauuaguc

SEQ ID NO: 1531762 - RNA, 19 nt, Artificial Sequence
  Description of Artificial Sequence: Synthetic oligonucleotide
  Sense strand starting at position 2170 of SEQ ID NO: 1245042
ggagcccaacugugauaau

SEQ ID NO: 1531763 - RNA, 19 nt, Artificial Sequence
  Description of Artificial Sequence: Synthetic oligonucleotide
  Antisense strand to SEQ ID NO: 1531762
auuaucacaguugggcucc

SEQ ID NO: 1531764 - RNA, 19 nt, Artificial Sequence
  Description of Artificial Sequence: Synthetic oligonucleotide
  Sense strand starting at position 2190 of SEQ ID NO: 1245042
cugccuugccauuggaaga

SEQ ID NO: 1531765 - RNA, 19 nt, Artificial Sequence
  Description of Artificial Sequence: Synthetic oligonucleotide
  Antisense strand to SEQ ID NO: 1531764
ucuuccaauggcaaggcag

SEQ ID NO: 1531766 - RNA, 19 nt, Artificial Sequence
  Description of Artificial Sequence: Synthetic oligonucleotide
  Sense strand starting at position 2249 of SEQ ID NO: 1245042
uuggcauauccuggugaac

SEQ ID NO: 1531767 - RNA, 19 nt, Artificial Sequence
  Description of Artificial Sequence: Synthetic oligonucleotide
  Antisense strand to SEQ ID NO: 1531766
guucaccaggauaugccaa

SEQ ID NO: 1531768 - RNA, 19 nt, Artificial Sequence
  Description of Artificial Sequence: Synthetic oligonucleotide
  Sense strand starting at position 2291 of SEQ ID NO: 1245042
ucaucauuccugugggaaa

SEQ ID NO: 1531769 - RNA, 19 nt, Artificial Sequence
  Description of Artificial Sequence: Synthetic oligonucleotide
  Antisense strand to SEQ ID NO: 1531768
uuucccacaggaaugauga

SEQ ID NO: 1531770 - RNA, 19 nt, Artificial Sequence
  Description of Artificial Sequence: Synthetic oligonucleotide
  Sense strand starting at position 2293 of SEQ ID NO: 1245042
aucauuccugugggaaagu

SEQ ID NO: 1531771 - RNA, 19 nt, Artificial Sequence
  Description of Artificial Sequence: Synthetic oligonucleotide
  Antisense strand to SEQ ID NO: 1531770
acuuucccacaggaaugau

SEQ ID NO: 1531772 - RNA, 19 nt, Artificial Sequence
  Description of Artificial Sequence: Synthetic oligonucleotide
  Sense strand starting at position 2430 of SEQ ID NO: 1245042
uuuaucaauuguguagcaa

SEQ ID NO: 1531773 - RNA, 19 nt, Artificial Sequence
  Description of Artificial Sequence: Synthetic oligonucleotide
  Antisense strand to SEQ ID NO: 1531772
uugcuacacaauugauaaa

SEQ ID NO: 1531774 - RNA, 19 nt, Artificial Sequence
  Description of Artificial Sequence: Synthetic oligonucleotide
  Sense strand starting at position 2431 of SEQ ID NO: 1245042
uuaucaauuguguagcaau

SEQ ID NO: 1531775 - RNA, 19 nt, Artificial Sequence
  Description of Artificial Sequence: Synthetic oligonucleotide
  Antisense strand to SEQ ID NO: 1531774
auugcuacacaauugauaa

SEQ ID NO: 1531776 - RNA, 19 nt, Artificial Sequence
  Description of Artificial Sequence: Synthetic oligonucleotide
  Sense strand starting at position 2990 of SEQ ID NO: 1245042
aguuuagcccagugacuaa

SEQ ID NO: 1531777 - RNA, 19 nt, Artificial Sequence
  Description of Artificial Sequence: Synthetic oligonucleotide
  Antisense strand to SEQ ID NO: 1531776
uuagucacugggcuaaacu

SEQ ID NO: 1531778 - RNA, 19 nt, Artificial Sequence
  Description of Artificial Sequence: Synthetic oligonucleotide
  Sense strand starting at position 3056 of SEQ ID NO: 1245042
guuaaauggugggccgaua

SEQ ID NO: 1531779 - RNA, 19 nt, Artificial Sequence
  Description of Artificial Sequence: Synthetic oligonucleotide
  Antisense strand to SEQ ID NO: 1531778
uaucggcccaccauuuaac

SEQ ID NO: 1531780 - RNA, 19 nt, Artificial Sequence
  Description of Artificial Sequence: Synthetic oligonucleotide
  Sense strand starting at position 3068 of SEQ ID NO: 1245042
gccgauaugaccugaccaa

SEQ ID NO: 1531781 - RNA, 19 nt, Artificial Sequence
  Description of Artificial Sequence: Synthetic oligonucleotide
  Antisense strand to SEQ ID NO: 1531780
uuggucaggucauaucggc

SEQ ID NO: 1531782 - RNA, 19 nt, Artificial Sequence
  Description of Artificial Sequence: Synthetic oligonucleotide
  Sense strand starting at position 3124 of SEQ ID NO: 1245042
gaaguagaguuugcccuuu

SEQ ID NO: 1531783 - RNA, 19 nt, Artificial Sequence
  Description of Artificial Sequence: Synthetic oligonucleotide
  Antisense strand to SEQ ID NO: 1531782
aaagggcaaacucuacuuc

SEQ ID NO: 1531784 - RNA, 19 nt, Artificial Sequence
  Description of Artificial Sequence: Synthetic oligonucleotide
  Sense strand starting at position 3138 of SEQ ID NO: 1245042
ccuuuauguuugcugacaa

SEQ ID NO: 1531785 - RNA, 19 nt, Artificial Sequence
  Description of Artificial Sequence: Synthetic oligonucleotide
  Antisense strand to SEQ ID NO: 1531784
uugucagcaaacauaaagg

SEQ ID NO: 1531786 - RNA, 19 nt, Artificial Sequence
  Description of Artificial Sequence: Synthetic oligonucleotide
  Sense strand starting at position 3171 of SEQ ID NO: 1245042
uugaguuacagugguaaau

SEQ ID NO: 1531787 - RNA, 19 nt, Artificial Sequence
  Description of Artificial Sequence: Synthetic oligonucleotide
  Antisense strand to SEQ ID NO: 1531786
auuuaccacuguaacucaa

SEQ ID NO: 1531788 - RNA, 19 nt, Artificial Sequence
  Description of Artificial Sequence: Synthetic oligonucleotide
  Sense strand starting at position 3180 of SEQ ID NO: 1245042
agugguaaaugggugugau

SEQ ID NO: 1531789 - RNA, 19 nt, Artificial Sequence
  Description of Artificial Sequence: Synthetic oligonucleotide
  Antisense strand to SEQ ID NO: 1531788
aucacacccauuuaccacu

SEQ ID NO: 1531790 - RNA, 19 nt, Artificial Sequence
  Description of Artificial Sequence: Synthetic oligonucleotide
  Sense strand starting at position 3181 of SEQ ID NO: 1245042
gugguaaaugggugugaug

SEQ ID NO: 1531791 - RNA, 19 nt, Artificial Sequence
  Description of Artificial Sequence: Synthetic oligonucleotide
  Antisense strand to SEQ ID NO: 1531790
caucacacccauuuaccac

SEQ ID NO: 1531792 - RNA, 19 nt, Artificial Sequence
  Description of Artificial Sequence: Synthetic oligonucleotide
  Sense strand starting at position 3183 of SEQ ID NO: 1245042
gguaaaugggugugauguc

SEQ ID NO: 1531793 - RNA, 19 nt, Artificial Sequence
  Description of Artificial Sequence: Synthetic oligonucleotide
  Antisense strand to SEQ ID NO: 1531792
gacaucacacccauuuacc

SEQ ID NO: 1531794 - RNA, 19 nt, Artificial Sequence
  Description of Artificial Sequence: Synthetic oligonucleotide
  Sense strand starting at position 3192 of SEQ ID NO: 1245042
gugugaugucccuauauau

SEQ ID NO: 1531795 - RNA, 19 nt, Artificial Sequence
  Description of Artificial Sequence: Synthetic oligonucleotide
  Antisense strand to SEQ ID NO: 1531794
auauauagggacaucacac

SEQ ID NO: 1531796 - RNA, 19 nt, Artificial Sequence
  Description of Artificial Sequence: Synthetic oligonucleotide
  Sense strand starting at position 3222 of SEQ ID NO: 1245042
aauuaugggugggaugaaa

SEQ ID NO: 1531797 - RNA, 19 nt, Artificial Sequence
  Description of Artificial Sequence: Synthetic oligonucleotide
  Antisense strand to SEQ ID NO: 1531796
uuucaucccacccauaauu

SEQ ID NO: 1531798 - RNA, 19 nt, Artificial Sequence
  Description of Artificial Sequence: Synthetic oligonucleotide
  Sense strand starting at position 3402 of SEQ ID NO: 1245042
ccuaauugcugagcccaaa

SEQ ID NO: 1531799 - RNA, 19 nt, Artificial Sequence
  Description of Artificial Sequence: Synthetic oligonucleotide
  Antisense strand to SEQ ID NO: 1531798
uuugggcucagcaauuagg

SEQ ID NO: 1531800 - RNA, 19 nt, Artificial Sequence
  Description of Artificial Sequence: Synthetic oligonucleotide
  Sense strand starting at position 3535 of SEQ ID NO: 1245042
cgggcucuuuaaucuccaa

SEQ ID NO: 1531801 - RNA, 19 nt, Artificial Sequence
  Description of Artificial Sequence: Synthetic oligonucleotide
  Antisense strand to SEQ ID NO: 1531800
uuggagauuaaagagcccg

SEQ ID NO: 1531802 - RNA, 19 nt, Artificial Sequence
  Description of Artificial Sequence: Synthetic oligonucleotide
  Sense strand starting at position 3557 of SEQ ID NO: 1245042
cgggaacuguuuccuaauc

SEQ ID NO: 1531803 - RNA, 19 nt, Artificial Sequence
  Description of Artificial Sequence: Synthetic oligonucleotide
  Antisense strand to SEQ ID NO: 1531802
gauuaggaaacaguucccg

SEQ ID NO: 1531804 - RNA, 19 nt, Artificial Sequence
  Description of Artificial Sequence: Synthetic oligonucleotide
  Sense strand starting at position 3558 of SEQ ID NO: 1245042
gggaacuguuuccuaaucu

SEQ ID NO: 1531805 - RNA, 19 nt, Artificial Sequence
  Description of Artificial Sequence: Synthetic oligonucleotide
  Antisense strand to SEQ ID NO: 1531804
agauuaggaaacaguuccc

SEQ ID NO: 1531806 - RNA, 19 nt, Artificial Sequence
  Description of Artificial Sequence: Synthetic oligonucleotide
  Sense strand starting at position 99 of SEQ ID NO: 1245043
cugggacuauagucauaag

SEQ ID NO: 1531807 - RNA, 19 nt, Artificial Sequence
  Description of Artificial Sequence: Synthetic oligonucleotide
  Antisense strand to SEQ ID NO: 1531806
cuuaugacuauagucccag

SEQ ID NO: 1531808 - RNA, 19 nt, Artificial Sequence
  Description of Artificial Sequence: Synthetic oligonucleotide
  Sense strand starting at position 102 of SEQ ID NO: 1245043
ggacuauagucauaaguca

SEQ ID NO: 1531809 - RNA, 19 nt, Artificial Sequence
  Description of Artificial Sequence: Synthetic oligonucleotide
  Antisense strand to SEQ ID NO: 1531808
ugacuuaugacuauagucc

SEQ ID NO: 1531810 - RNA, 19 nt, Artificial Sequence
  Description of Artificial Sequence: Synthetic oligonucleotide
  Sense strand starting at position 268 of SEQ ID NO: 1245043
gauggugaacccuaucuuu

SEQ ID NO: 1531811 - RNA, 19 nt, Artificial Sequence
  Description of Artificial Sequence: Synthetic oligonucleotide
  Antisense strand to SEQ ID NO: 1531810
aaagauaggguucaccauc

SEQ ID NO: 1531812 - RNA, 19 nt, Artificial Sequence
  Description of Artificial Sequence: Synthetic oligonucleotide
  Sense strand starting at position 549 of SEQ ID NO: 1245043
cuggccucuccagaaacuu

SEQ ID NO: 1531813 - RNA, 19 nt, Artificial Sequence
  Description of Artificial Sequence: Synthetic oligonucleotide
  Antisense strand to SEQ ID NO: 1531812
aaguuucuggagaggccag

SEQ ID NO: 1531814 - RNA, 19 nt, Artificial Sequence
  Description of Artificial Sequence: Synthetic oligonucleotide
  Sense strand starting at position 869 of SEQ ID NO: 1245043
agacguugagcugacuaca

SEQ ID NO: 1531815 - RNA, 19 nt, Artificial Sequence
  Description of Artificial Sequence: Synthetic oligonucleotide
  Antisense strand to SEQ ID NO: 1531814
uguagucagcucaacgucu

SEQ ID NO: 1531816 - RNA, 19 nt, Artificial Sequence
  Description of Artificial Sequence: Synthetic oligonucleotide
  Sense strand starting at position 974 of SEQ ID NO: 1245043
gaggaaccgugucacuuaa

SEQ ID NO: 1531817 - RNA, 19 nt, Artificial Sequence
  Description of Artificial Sequence: Synthetic oligonucleotide
  Antisense strand to SEQ ID NO: 1531816
uuaagugacacgguuccuc

SEQ ID NO: 1531818 - RNA, 19 nt, Artificial Sequence
  Description of Artificial Sequence: Synthetic oligonucleotide
  Sense strand starting at position 976 of SEQ ID NO: 1245043
ggaaccgugucacuuaaac

SEQ ID NO: 1531819 - RNA, 19 nt, Artificial Sequence
  Description of Artificial Sequence: Synthetic oligonucleotide
  Antisense strand to SEQ ID NO: 1531818
guuuaagugacacgguucc

SEQ ID NO: 1531820 - RNA, 19 nt, Artificial Sequence
  Description of Artificial Sequence: Synthetic oligonucleotide
  Sense strand starting at position 1002 of SEQ ID NO: 1245043
gcgacuauucgacacguga

SEQ ID NO: 1531821 - RNA, 19 nt, Artificial Sequence
  Description of Artificial Sequence: Synthetic oligonucleotide
  Antisense strand to SEQ ID NO: 1531820
ucacgugucgaauagucgc

SEQ ID NO: 1531822 - RNA, 19 nt, Artificial Sequence
  Description of Artificial Sequence: Synthetic oligonucleotide
  Sense strand starting at position 1042 of SEQ ID NO: 1245043
cggccaugguucugucaac

SEQ ID NO: 1531823 - RNA, 19 nt, Artificial Sequence
  Description of Artificial Sequence: Synthetic oligonucleotide
  Antisense strand to SEQ ID NO: 1531822
guugacagaaccauggccg

SEQ ID NO: 1531824 - RNA, 19 nt, Artificial Sequence
  Description of Artificial Sequence: Synthetic oligonucleotide
  Sense strand starting at position 1043 of SEQ ID NO: 1245043
ggccaugguucugucaaca

SEQ ID NO: 1531825 - RNA, 19 nt, Artificial Sequence
  Description of Artificial Sequence: Synthetic oligonucleotide
  Antisense strand to SEQ ID NO: 1531824
uguugacagaaccauggcc

SEQ ID NO: 1531826 - RNA, 19 nt, Artificial Sequence
  Description of Artificial Sequence: Synthetic oligonucleotide
  Sense strand starting at position 1048 of SEQ ID NO: 1245043
ugguucugucaacacucua

SEQ ID NO: 1531827 - RNA, 19 nt, Artificial Sequence
  Description of Artificial Sequence: Synthetic oligonucleotide
  Antisense strand to SEQ ID NO: 1531826
uagaguguugacagaacca

SEQ ID NO: 1531828 - RNA, 19 nt, Artificial Sequence
  Description of Artificial Sequence: Synthetic oligonucleotide
  Sense strand starting at position 1061 of SEQ ID NO: 1245043
acucuaucauuaugucaga

SEQ ID NO: 1531829 - RNA, 19 nt, Artificial Sequence
  Description of Artificial Sequence: Synthetic oligonucleotide
  Antisense strand to SEQ ID NO: 1531828
ucugacauaaugauagagu

SEQ ID NO: 1531830 - RNA, 19 nt, Artificial Sequence
  Description of Artificial Sequence: Synthetic oligonucleotide
  Sense strand starting at position 1099 of SEQ ID NO: 1245043
guguguaucuagagggaug

SEQ ID NO: 1531831 - RNA, 19 nt, Artificial Sequence
  Description of Artificial Sequence: Synthetic oligonucleotide
  Antisense strand to SEQ ID NO: 1531830
caucccucuagauacacac

SEQ ID NO: 1531832 - RNA, 19 nt, Artificial Sequence
  Description of Artificial Sequence: Synthetic oligonucleotide
  Sense strand starting at position 1153 of SEQ ID NO: 1245043
ggcccugauaugcaacgaa

SEQ ID NO: 1531833 - RNA, 19 nt, Artificial Sequence
  Description of Artificial Sequence: Synthetic oligonucleotide
  Antisense strand to SEQ ID NO: 1531832
uucguugcauaucagggcc

SEQ ID NO: 1531834 - RNA, 19 nt, Artificial Sequence
  Description of Artificial Sequence: Synthetic oligonucleotide
  Sense strand starting at position 1174 of SEQ ID NO: 1245043
cagagucccugcuaugaaa

SEQ ID NO: 1531835 - RNA, 19 nt, Artificial Sequence
  Description of Artificial Sequence: Synthetic oligonucleotide
  Antisense strand to SEQ ID NO: 1531834
uuucauagcagggacucug

SEQ ID NO: 1531836 - RNA, 19 nt, Artificial Sequence
  Description of Artificial Sequence: Synthetic oligonucleotide
  Sense strand starting at position 1193 of SEQ ID NO: 1245043
aggugacauucuuaauaau

SEQ ID NO: 1531837 - RNA, 19 nt, Artificial Sequence
  Description of Artificial Sequence: Synthetic oligonucleotide
  Antisense strand to SEQ ID NO: 1531836
auuauuaagaaugucaccu

SEQ ID NO: 1531838 - RNA, 19 nt, Artificial Sequence
  Description of Artificial Sequence: Synthetic oligonucleotide
  Sense strand starting at position 1272 of SEQ ID NO: 1245043
cggagacucggagagguua

SEQ ID NO: 1531839 - RNA, 19 nt, Artificial Sequence
  Description of Artificial Sequence: Synthetic oligonucleotide
  Antisense strand to SEQ ID NO: 1531838
uaaccucuccgagucuccg

SEQ ID NO: 1531840 - RNA, 19 nt, Artificial Sequence
  Description of Artificial Sequence: Synthetic oligonucleotide
  Sense strand starting at position 2482 of SEQ ID NO: 1245043
gugcuaggcucuggagaca

SEQ ID NO: 1531841 - RNA, 19 nt, Artificial Sequence
  Description of Artificial Sequence: Synthetic oligonucleotide
  Antisense strand to SEQ ID NO: 1531840
ugucuccagagccuagcac

SEQ ID NO: 1531842 - RNA, 19 nt, Artificial Sequence
  Description of Artificial Sequence: Synthetic oligonucleotide
  Sense strand starting at position 2605 of SEQ ID NO: 1245043
gggaacugguucucggaga

SEQ ID NO: 1531843 - RNA, 19 nt, Artificial Sequence
  Description of Artificial Sequence: Synthetic oligonucleotide
  Antisense strand to SEQ ID NO: 1531842
ucuccgagaaccaguuccc

SEQ ID NO: 1531844 - RNA, 19 nt, Artificial Sequence
  Description of Artificial Sequence: Synthetic oligonucleotide
  Sense strand starting at position 2627 of SEQ ID NO: 1245043
agucgagucuuccagguag

SEQ ID NO: 1531845 - RNA, 19 nt, Artificial Sequence
  Description of Artificial Sequence: Synthetic oligonucleotide
  Antisense strand to SEQ ID NO: 1531844
cuaccuggaagacucgacu

SEQ ID NO: 1531846 - RNA, 19 nt, Artificial Sequence
  Description of Artificial Sequence: Synthetic oligonucleotide
  Sense strand starting at position 2629 of SEQ ID NO: 1245043
ucgagucuuccagguagug

SEQ ID NO: 1531847 - RNA, 19 nt, Artificial Sequence
  Description of Artificial Sequence: Synthetic oligonucleotide
  Antisense strand to SEQ ID NO: 1531846
cacuaccuggaagacucga

SEQ ID NO: 1531848 - RNA, 19 nt, Artificial Sequence
  Description of Artificial Sequence: Synthetic oligonucleotide
  Sense strand starting at position 2631 of SEQ ID NO: 1245043
gagucuuccagguagugga

SEQ ID NO: 1531849 - RNA, 19 nt, Artificial Sequence
  Description of Artificial Sequence: Synthetic oligonucleotide
  Antisense strand to SEQ ID NO: 1531848
uccacuaccuggaagacuc

SEQ ID NO: 1531850 - RNA, 19 nt, Artificial Sequence
  Description of Artificial Sequence: Synthetic oligonucleotide
  Sense strand starting at position 2819 of SEQ ID NO: 1245043
ccaggugaguccugugauu

SEQ ID NO: 1531851 - RNA, 19 nt, Artificial Sequence
  Description of Artificial Sequence: Synthetic oligonucleotide
  Antisense strand to SEQ ID NO: 1531850
aaucacaggacucaccugg

SEQ ID NO: 1531852 - RNA, 19 nt, Artificial Sequence
  Description of Artificial Sequence: Synthetic oligonucleotide
  Sense strand starting at position 3438 of SEQ ID NO: 1245043
ccaauuauauuuggagauu

SEQ ID NO: 1531853 - RNA, 19 nt, Artificial Sequence
  Description of Artificial Sequence: Synthetic oligonucleotide
  Antisense strand to SEQ ID NO: 1531852
aaucuccaaauauaauugg

SEQ ID NO: 1531854 - RNA, 19 nt, Artificial Sequence
  Description of Artificial Sequence: Synthetic oligonucleotide
  Sense strand starting at position 3469 of SEQ ID NO: 1245043
uuugauaauugacagaaca

SEQ ID NO: 1531855 - RNA, 19 nt, Artificial Sequence
  Description of Artificial Sequence: Synthetic oligonucleotide
  Antisense strand to SEQ ID NO: 1531854
uguucugucaauuaucaaa

SEQ ID NO: 1531856 - RNA, 19 nt, Artificial Sequence
  Description of Artificial Sequence: Synthetic oligonucleotide
  Sense strand starting at position 3623 of SEQ ID NO: 1245043
accauauuguaggccauaa

SEQ ID NO: 1531857 - RNA, 19 nt, Artificial Sequence
  Description of Artificial Sequence: Synthetic oligonucleotide
  Antisense strand to SEQ ID NO: 1531856
uuauggccuacaauauggu

SEQ ID NO: 1531858 - RNA, 19 nt, Artificial Sequence
  Description of Artificial Sequence: Synthetic oligonucleotide
  Sense strand starting at position 3898 of SEQ ID NO: 1245043
gaaaucaaaguguguucuu

SEQ ID NO: 1531859 - RNA, 19 nt, Artificial Sequence
  Description of Artificial Sequence: Synthetic oligonucleotide
  Antisense strand to SEQ ID NO: 1531858
aagaacacacuuugauuuc

SEQ ID NO: 1531860 - RNA, 19 nt, Artificial Sequence
  Description of Artificial Sequence: Synthetic oligonucleotide
  Sense strand starting at position 3903 of SEQ ID NO: 1245043
caaaguguguucuuugaga

SEQ ID NO: 1531861 - RNA, 19 nt, Artificial Sequence
  Description of Artificial Sequence: Synthetic oligonucleotide
  Antisense strand to SEQ ID NO: 1531860
ucucaaagaacacacuuug

SEQ ID NO: 1531862 - RNA, 19 nt, Artificial Sequence
  Description of Artificial Sequence: Synthetic oligonucleotide
  Sense strand starting at position 3905 of SEQ ID NO: 1245043
aaguguguucuuugagaag

SEQ ID NO: 1531863 - RNA, 19 nt, Artificial Sequence
  Description of Artificial Sequence: Synthetic oligonucleotide
  Antisense strand to SEQ ID NO: 1531862
cuucucaaagaacacacuu

SEQ ID NO: 1531864 - RNA, 19 nt, Artificial Sequence
  Description of Artificial Sequence: Synthetic oligonucleotide
  Sense strand starting at position 3908 of SEQ ID NO: 1245043
uguguucuuugagaagauc

SEQ ID NO: 1531865 - RNA, 19 nt, Artificial Sequence
  Description of Artificial Sequence: Synthetic oligonucleotide
  Antisense strand to SEQ ID NO: 1531864
gaucuucucaaagaacaca

SEQ ID NO: 1531866 - RNA, 19 nt, Artificial Sequence
  Description of Artificial Sequence: Synthetic oligonucleotide
  Sense strand starting at position 3923 of SEQ ID NO: 1245043
gaucaauagucagagcaau

SEQ ID NO: 1531867 - RNA, 19 nt, Artificial Sequence
  Description of Artificial Sequence: Synthetic oligonucleotide
  Antisense strand to SEQ ID NO: 1531866
auugcucugacuauugauc

SEQ ID NO: 1531868 - RNA, 19 nt, Artificial Sequence
  Description of Artificial Sequence: Synthetic oligonucleotide
  Sense strand starting at position 40 of SEQ ID NO: 1245044
uguuaaagugaauacuguu

SEQ ID NO: 1531869 - RNA, 19 nt, Artificial Sequence
  Description of Artificial Sequence: Synthetic oligonucleotide
  Antisense strand to SEQ ID NO: 1531868
aacaguauucacuuuaaca

SEQ ID NO: 1531870 - RNA, 19 nt, Artificial Sequence
  Description of Artificial Sequence: Synthetic oligonucleotide
  Sense strand starting at position 308 of SEQ ID NO: 1245044
ggaacucugcccuaccuaa

SEQ ID NO: 1531871 - RNA, 19 nt, Artificial Sequence
  Description of Artificial Sequence: Synthetic oligonucleotide
  Antisense strand to SEQ ID NO: 1531870
uuagguagggcagaguucc

SEQ ID NO: 1531872 - RNA, 19 nt, Artificial Sequence
  Description of Artificial Sequence: Synthetic oligonucleotide
  Sense strand starting at position 750 of SEQ ID NO: 1245044
aguccugauuuccaagauc

SEQ ID NO: 1531873 - RNA, 19 nt, Artificial Sequence
  Description of Artificial Sequence: Synthetic oligonucleotide
  Antisense strand to SEQ ID NO: 1531872
gaucuuggaaaucaggacu

SEQ ID NO: 1531874 - RNA, 19 nt, Artificial Sequence
  Description of Artificial Sequence: Synthetic oligonucleotide
  Sense strand starting at position 764 of SEQ ID NO: 1245044
agaucugaacaugguuauu

SEQ ID NO: 1531875 - RNA, 19 nt, Artificial Sequence
  Description of Artificial Sequence: Synthetic oligonucleotide
  Antisense strand to SEQ ID NO: 1531874
aauaaccauguucagaucu

SEQ ID NO: 1531876 - RNA, 19 nt, Artificial Sequence
  Description of Artificial Sequence: Synthetic oligonucleotide
  Sense strand starting at position 774 of SEQ ID NO: 1245044
augguuauuggccauccau

SEQ ID NO: 1531877 - RNA, 19 nt, Artificial Sequence
  Description of Artificial Sequence: Synthetic oligonucleotide
  Antisense strand to SEQ ID NO: 1531876
auggauggccaauaaccau

SEQ ID NO: 1531878 - RNA, 19 nt, Artificial Sequence
  Description of Artificial Sequence: Synthetic oligonucleotide
  Sense strand starting at position 813 of SEQ ID NO: 1245044
ugaaguuguugauucggaa

SEQ ID NO: 1531879 - RNA, 19 nt, Artificial Sequence
  Description of Artificial Sequence: Synthetic oligonucleotide
  Antisense strand to SEQ ID NO: 1531878
uuccgaaucaacaacuuca

SEQ ID NO: 1531880 - RNA, 19 nt, Artificial Sequence
  Description of Artificial Sequence: Synthetic oligonucleotide
  Sense strand starting at position 924 of SEQ ID NO: 1245044
aucacauaucucuggaaug

SEQ ID NO: 1531881 - RNA, 19 nt, Artificial Sequence
  Description of Artificial Sequence: Synthetic oligonucleotide
  Antisense strand to SEQ ID NO: 1531880
cauuccagagauaugugau

SEQ ID NO: 1531882 - RNA, 19 nt, Artificial Sequence
  Description of Artificial Sequence: Synthetic oligonucleotide
  Sense strand starting at position 938 of SEQ ID NO: 1245044
gaaugaccauuccugguua

SEQ ID NO: 1531883 - RNA, 19 nt, Artificial Sequence
  Description of Artificial Sequence: Synthetic oligonucleotide
  Antisense strand to SEQ ID NO: 1531882
uaaccaggaauggucauuc

SEQ ID NO: 1531884 - RNA, 19 nt, Artificial Sequence
  Description of Artificial Sequence: Synthetic oligonucleotide
  Sense strand starting at position 940 of SEQ ID NO: 1245044
augaccauuccugguuaau

SEQ ID NO: 1531885 - RNA, 19 nt, Artificial Sequence
  Description of Artificial Sequence: Synthetic oligonucleotide
  Antisense strand to SEQ ID NO: 1531884
auuaaccaggaauggucau

SEQ ID NO: 1531886 - RNA, 19 nt, Artificial Sequence
  Description of Artificial Sequence: Synthetic oligonucleotide
  Sense strand starting at position 1062 of SEQ ID NO: 1245044
uuuaaaugauugccaaaug

SEQ ID NO: 1531887 - RNA, 19 nt, Artificial Sequence
  Description of Artificial Sequence: Synthetic oligonucleotide
  Antisense strand to SEQ ID NO: 1531886
cauuuggcaaucauuuaaa

SEQ ID NO: 1531888 - RNA, 19 nt, Artificial Sequence
  Description of Artificial Sequence: Synthetic oligonucleotide
  Sense strand starting at position 1073 of SEQ ID NO: 1245044
gccaaaugucuguaacuga

SEQ ID NO: 1531889 - RNA, 19 nt, Artificial Sequence
  Description of Artificial Sequence: Synthetic oligonucleotide
  Antisense strand to SEQ ID NO: 1531888
ucaguuacagacauuuggc

SEQ ID NO: 1531890 - RNA, 19 nt, Artificial Sequence
  Description of Artificial Sequence: Synthetic oligonucleotide
  Sense strand starting at position 1223 of SEQ ID NO: 1245044
cucgauaaauguuuacauc

SEQ ID NO: 1531891 - RNA, 19 nt, Artificial Sequence
  Description of Artificial Sequence: Synthetic oligonucleotide
  Antisense strand to SEQ ID NO: 1531890
gauguaaacauuuaucgag

SEQ ID NO: 1531892 - RNA, 19 nt, Artificial Sequence
  Description of Artificial Sequence: Synthetic oligonucleotide
  Sense strand starting at position 1224 of SEQ ID NO: 1245044
ucgauaaauguuuacauca

SEQ ID NO: 1531893 - RNA, 19 nt, Artificial Sequence
  Description of Artificial Sequence: Synthetic oligonucleotide
  Antisense strand to SEQ ID NO: 1531892
ugauguaaacauuuaucga

SEQ ID NO: 1531894 - RNA, 19 nt, Artificial Sequence
  Description of Artificial Sequence: Synthetic oligonucleotide
  Sense strand starting at position 1308 of SEQ ID NO: 1245044
ugugucuacccagauagga

SEQ ID NO: 1531895 - RNA, 19 nt, Artificial Sequence
  Description of Artificial Sequence: Synthetic oligonucleotide
  Antisense strand to SEQ ID NO: 1531894
uccuaucuggguagacaca

SEQ ID NO: 1531896 - RNA, 19 nt, Artificial Sequence
  Description of Artificial Sequence: Synthetic oligonucleotide
  Sense strand starting at position 1413 of SEQ ID NO: 1245044
gccugaguuaccuggauag

SEQ ID NO: 1531897 - RNA, 19 nt, Artificial Sequence
  Description of Artificial Sequence: Synthetic oligonucleotide
  Antisense strand to SEQ ID NO: 1531896
cuauccagguaacucaggc

SEQ ID NO: 1531898 - RNA, 19 nt, Artificial Sequence
  Description of Artificial Sequence: Synthetic oligonucleotide
  Sense strand starting at position 1415 of SEQ ID NO: 1245044
cugaguuaccuggauaguu

SEQ ID NO: 1531899 - RNA, 19 nt, Artificial Sequence
  Description of Artificial Sequence: Synthetic oligonucleotide
  Antisense strand to SEQ ID NO: 1531898
aacuauccagguaacucag

SEQ ID NO: 1531900 - RNA, 19 nt, Artificial Sequence
  Description of Artificial Sequence: Synthetic oligonucleotide
  Sense strand starting at position 1417 of SEQ ID NO: 1245044
gaguuaccuggauaguuga

SEQ ID NO: 1531901 - RNA, 19 nt, Artificial Sequence
  Description of Artificial Sequence: Synthetic oligonucleotide
  Antisense strand to SEQ ID NO: 1531900
ucaacuauccagguaacuc

SEQ ID NO: 1531902 - RNA, 19 nt, Artificial Sequence
  Description of Artificial Sequence: Synthetic oligonucleotide
  Sense strand starting at position 1812 of SEQ ID NO: 1245044
aguacucuuuguccaagaa

SEQ ID NO: 1531903 - RNA, 19 nt, Artificial Sequence
  Description of Artificial Sequence: Synthetic oligonucleotide
  Antisense strand to SEQ ID NO: 1531902
uucuuggacaaagaguacu

SEQ ID NO: 1531904 - RNA, 19 nt, Artificial Sequence
  Description of Artificial Sequence: Synthetic oligonucleotide
  Sense strand starting at position 1813 of SEQ ID NO: 1245044
guacucuuuguccaagaaa

SEQ ID NO: 1531905 - RNA, 19 nt, Artificial Sequence
  Description of Artificial Sequence: Synthetic oligonucleotide
  Antisense strand to SEQ ID NO: 1531904
uuucuuggacaaagaguac

SEQ ID NO: 1531906 - RNA, 19 nt, Artificial Sequence
  Description of Artificial Sequence: Synthetic oligonucleotide
  Sense strand starting at position 1816 of SEQ ID NO: 1245044
cucuuuguccaagaaaugu

SEQ ID NO: 1531907 - RNA, 19 nt, Artificial Sequence
  Description of Artificial Sequence: Synthetic oligonucleotide
  Antisense strand to SEQ ID NO: 1531906
acauuucuuggacaaagag

SEQ ID NO: 1531908 - RNA, 19 nt, Artificial Sequence
  Description of Artificial Sequence: Synthetic oligonucleotide
  Sense strand starting at position 1937 of SEQ ID NO: 1245044
cagggucuuccaugaucag

SEQ ID NO: 1531909 - RNA, 19 nt, Artificial Sequence
  Description of Artificial Sequence: Synthetic oligonucleotide
  Antisense strand to SEQ ID NO: 1531908
cugaucauggaagacccug

SEQ ID NO: 1531910 - RNA, 19 nt, Artificial Sequence
  Description of Artificial Sequence: Synthetic oligonucleotide
  Sense strand starting at position 1946 of SEQ ID NO: 1245044
ccaugaucaggucaaagca

SEQ ID NO: 1531911 - RNA, 19 nt, Artificial Sequence
  Description of Artificial Sequence: Synthetic oligonucleotide
  Antisense strand to SEQ ID NO: 1531910
ugcuuugaccugaucaugg

SEQ ID NO: 1531912 - RNA, 19 nt, Artificial Sequence
  Description of Artificial Sequence: Synthetic oligonucleotide
  Sense strand starting at position 2064 of SEQ ID NO: 1245044
ugaacuaggucauugcuga

SEQ ID NO: 1531913 - RNA, 19 nt, Artificial Sequence
  Description of Artificial Sequence: Synthetic oligonucleotide
  Antisense strand to SEQ ID NO: 1531912
ucagcaaugaccuaguuca

SEQ ID NO: 1531914 - RNA, 19 nt, Artificial Sequence
  Description of Artificial Sequence: Synthetic oligonucleotide
  Sense strand starting at position 2065 of SEQ ID NO: 1245044
gaacuaggucauugcugaa

SEQ ID NO: 1531915 - RNA, 19 nt, Artificial Sequence
  Description of Artificial Sequence: Synthetic oligonucleotide
  Antisense strand to SEQ ID NO: 1531914
uucagcaaugaccuaguuc

SEQ ID NO: 1531916 - RNA, 19 nt, Artificial Sequence
  Description of Artificial Sequence: Synthetic oligonucleotide
  Sense strand starting at position 2075 of SEQ ID NO: 1245044
auugcugaagcuggagaau

SEQ ID NO: 1531917 - RNA, 19 nt, Artificial Sequence
  Description of Artificial Sequence: Synthetic oligonucleotide
  Antisense strand to SEQ ID NO: 1531916
auucuccagcuucagcaau

SEQ ID NO: 1531918 - RNA, 19 nt, Artificial Sequence
  Description of Artificial Sequence: Synthetic oligonucleotide
  Sense strand starting at position 2099 of SEQ ID NO: 1245044
uuagcaucccugugaugaa

SEQ ID NO: 1531919 - RNA, 19 nt, Artificial Sequence
  Description of Artificial Sequence: Synthetic oligonucleotide
  Antisense strand to SEQ ID NO: 1531918
uucaucacagggaugcuaa

SEQ ID NO: 1531920 - RNA, 19 nt, Artificial Sequence
  Description of Artificial Sequence: Synthetic oligonucleotide
  Sense strand starting at position 2260 of SEQ ID NO: 1245044
cgagcagcucuuuacaaag

SEQ ID NO: 1531921 - RNA, 19 nt, Artificial Sequence
  Description of Artificial Sequence: Synthetic oligonucleotide
  Antisense strand to SEQ ID NO: 1531920
cuuuguaaagagcugcucg

SEQ ID NO: 1531922 - RNA, 19 nt, Artificial Sequence
  Description of Artificial Sequence: Synthetic oligonucleotide
  Sense strand starting at position 2332 of SEQ ID NO: 1245044
cugccugauaaagggauua

SEQ ID NO: 1531923 - RNA, 19 nt, Artificial Sequence
  Description of Artificial Sequence: Synthetic oligonucleotide
  Antisense strand to SEQ ID NO: 1531922
uaaucccuuuaucaggcag

SEQ ID NO: 1531924 - RNA, 19 nt, Artificial Sequence
  Description of Artificial Sequence: Synthetic oligonucleotide
  Sense strand starting at position 2343 of SEQ ID NO: 1245044
agggauuaaggccggagua

SEQ ID NO: 1531925 - RNA, 19 nt, Artificial Sequence
  Description of Artificial Sequence: Synthetic oligonucleotide
  Antisense strand to SEQ ID NO: 1531924
uacuccggccuuaaucccu

SEQ ID NO: 1531926 - RNA, 19 nt, Artificial Sequence
  Description of Artificial Sequence: Synthetic oligonucleotide
  Sense strand starting at position 2344 of SEQ ID NO: 1245044
gggauuaaggccggaguaa

SEQ ID NO: 1531927 - RNA, 19 nt, Artificial Sequence
  Description of Artificial Sequence: Synthetic oligonucleotide
  Antisense strand to SEQ ID NO: 1531926
uuacuccggccuuaauccc

SEQ ID NO: 1531928 - RNA, 19 nt, Artificial Sequence
  Description of Artificial Sequence: Synthetic oligonucleotide
  Sense strand starting at position 2490 of SEQ ID NO: 1245044
cucugaaguucucugagaa

SEQ ID NO: 1531929 - RNA, 19 nt, Artificial Sequence
  Description of Artificial Sequence: Synthetic oligonucleotide
  Antisense strand to SEQ ID NO: 1531928
uucucagagaacuucagag

SEQ ID NO: 1531930 - RNA, 19 nt, Artificial Sequence
  Description of Artificial Sequence: Synthetic oligonucleotide
  Sense strand starting at position 2672 of SEQ ID NO: 1245044
agacaaagaucagaagaaa

SEQ ID NO: 1531931 - RNA, 19 nt, Artificial Sequence
  Description of Artificial Sequence: Synthetic oligonucleotide
  Antisense strand to SEQ ID NO: 1531930
uuucuucugaucuuugucu

SEQ ID NO: 1531932 - RNA, 19 nt, Artificial Sequence
  Description of Artificial Sequence: Synthetic oligonucleotide
  Sense strand starting at position 2723 of SEQ ID NO: 1245044
ucagauugccuggaauggu

SEQ ID NO: 1531933 - RNA, 19 nt, Artificial Sequence
  Description of Artificial Sequence: Synthetic oligonucleotide
  Antisense strand to SEQ ID NO: 1531932
accauuccaggcaaucuga

SEQ ID NO: 1531934 - RNA, 19 nt, Artificial Sequence
  Description of Artificial Sequence: Synthetic oligonucleotide
  Sense strand starting at position 2762 of SEQ ID NO: 1245044
uuguaauaugggcaauucu

SEQ ID NO: 1531935 - RNA, 19 nt, Artificial Sequence
  Description of Artificial Sequence: Synthetic oligonucleotide
  Antisense strand to SEQ ID NO: 1531934
agaauugcccauauuacaa

SEQ ID NO: 1531936 - RNA, 19 nt, Artificial Sequence
  Description of Artificial Sequence: Synthetic oligonucleotide
  Sense strand starting at position 3045 of SEQ ID NO: 1245044
aucauuaucccuugaugga

SEQ ID NO: 1531937 - RNA, 19 nt, Artificial Sequence
  Description of Artificial Sequence: Synthetic oligonucleotide
  Antisense strand to SEQ ID NO: 1531936
uccaucaagggauaaugau

SEQ ID NO: 1531938 - RNA, 19 nt, Artificial Sequence
  Description of Artificial Sequence: Synthetic oligonucleotide
  Sense strand starting at position 3262 of SEQ ID NO: 1245044
aauggucggcuuuauggaa

SEQ ID NO: 1531939 - RNA, 19 nt, Artificial Sequence
  Description of Artificial Sequence: Synthetic oligonucleotide
  Antisense strand to SEQ ID NO: 1531938
uuccauaaagccgaccauu

SEQ ID NO: 1531940 - RNA, 19 nt, Artificial Sequence
  Description of Artificial Sequence: Synthetic oligonucleotide
  Sense strand starting at position 3447 of SEQ ID NO: 1245044
auaaaugugauaugguugu

SEQ ID NO: 1531941 - RNA, 19 nt, Artificial Sequence
  Description of Artificial Sequence: Synthetic oligonucleotide
  Antisense strand to SEQ ID NO: 1531940
acaaccauaucacauuuau

SEQ ID NO: 1531942 - RNA, 19 nt, Artificial Sequence
  Description of Artificial Sequence: Synthetic oligonucleotide
  Sense strand starting at position 3451 of SEQ ID NO: 1245044
augugauaugguugugaaa

SEQ ID NO: 1531943 - RNA, 19 nt, Artificial Sequence
  Description of Artificial Sequence: Synthetic oligonucleotide
  Antisense strand to SEQ ID NO: 1531942
uuucacaaccauaucacau

SEQ ID NO: 1531944 - RNA, 19 nt, Artificial Sequence
  Description of Artificial Sequence: Synthetic oligonucleotide
  Sense strand starting at position 3476 of SEQ ID NO: 1245044
uugccugggaguuauuaaa

SEQ ID NO: 1531945 - RNA, 19 nt, Artificial Sequence
  Description of Artificial Sequence: Synthetic oligonucleotide
  Antisense strand to SEQ ID NO: 1531944
uuuaauaacucccaggcaa

SEQ ID NO: 1531946 - RNA, 19 nt, Artificial Sequence
  Description of Artificial Sequence: Synthetic oligonucleotide
  Sense strand starting at position 3855 of SEQ ID NO: 1245044
ucaaauuaggccuguaauc

SEQ ID NO: 1531947 - RNA, 19 nt, Artificial Sequence
  Description of Artificial Sequence: Synthetic oligonucleotide
  Antisense strand to SEQ ID NO: 1531946
gauuacaggccuaauuuga

SEQ ID NO: 1531948 - RNA, 19 nt, Artificial Sequence
  Description of Artificial Sequence: Synthetic oligonucleotide
  Sense strand starting at position 47 of SEQ ID NO: 1245045
gguggacacuauccucauu

SEQ ID NO: 1531949 - RNA, 19 nt, Artificial Sequence
  Description of Artificial Sequence: Synthetic oligonucleotide
  Antisense strand to SEQ ID NO: 1531948
aaugaggauaguguccacc

SEQ ID NO: 1531950 - RNA, 19 nt, Artificial Sequence
  Description of Artificial Sequence: Synthetic oligonucleotide
  Sense strand starting at position 76 of SEQ ID NO: 1245045
gccacuuggcaccaauaga

SEQ ID NO: 1531951 - RNA, 19 nt, Artificial Sequence
  Description of Artificial Sequence: Synthetic oligonucleotide
  Antisense strand to SEQ ID NO: 1531950
ucuauuggugccaaguggc

SEQ ID NO: 1531952 - RNA, 19 nt, Artificial Sequence
  Description of Artificial Sequence: Synthetic oligonucleotide
  Sense strand starting at position 95 of SEQ ID NO: 1245045
gcauauguucugccaguuc

SEQ ID NO: 1531953 - RNA, 19 nt, Artificial Sequence
  Description of Artificial Sequence: Synthetic oligonucleotide
  Antisense strand to SEQ ID NO: 1531952
gaacuggcagaacauaugc

SEQ ID NO: 1531954 - RNA, 19 nt, Artificial Sequence
  Description of Artificial Sequence: Synthetic oligonucleotide
  Sense strand starting at position 113 of SEQ ID NO: 1245045
cugagcuaaucuccaggaa

SEQ ID NO: 1531955 - RNA, 19 nt, Artificial Sequence
  Description of Artificial Sequence: Synthetic oligonucleotide
  Antisense strand to SEQ ID NO: 1531954
uuccuggagauuagcucag

SEQ ID NO: 1531956 - RNA, 19 nt, Artificial Sequence
  Description of Artificial Sequence: Synthetic oligonucleotide
  Sense strand starting at position 126 of SEQ ID NO: 1245045
caggaaaggcuuuguauaa

SEQ ID NO: 1531957 - RNA, 19 nt, Artificial Sequence
  Description of Artificial Sequence: Synthetic oligonucleotide
  Antisense strand to SEQ ID NO: 1531956
uuauacaaagccuuuccug

SEQ ID NO: 1531958 - RNA, 19 nt, Artificial Sequence
  Description of Artificial Sequence: Synthetic oligonucleotide
  Sense strand starting at position 127 of SEQ ID NO: 1245045
aggaaaggcuuuguauaac

SEQ ID NO: 1531959 - RNA, 19 nt, Artificial Sequence
  Description of Artificial Sequence: Synthetic oligonucleotide
  Antisense strand to SEQ ID NO: 1531958
guuauacaaagccuuuccu

SEQ ID NO: 1531960 - RNA, 19 nt, Artificial Sequence
  Description of Artificial Sequence: Synthetic oligonucleotide
  Sense strand starting at position 130 of SEQ ID NO: 1245045
aaaggcuuuguauaacgau

SEQ ID NO: 1531961 - RNA, 19 nt, Artificial Sequence
  Description of Artificial Sequence: Synthetic oligonucleotide
  Antisense strand to SEQ ID NO: 1531960
aucguuauacaaagccuuu

SEQ ID NO: 1531962 - RNA, 19 nt, Artificial Sequence
  Description of Artificial Sequence: Synthetic oligonucleotide
  Sense strand starting at position 158 of SEQ ID NO: 1245045
ucagaucagugcccaagau

SEQ ID NO: 1531963 - RNA, 19 nt, Artificial Sequence
  Description of Artificial Sequence: Synthetic oligonucleotide
  Antisense strand to SEQ ID NO: 1531962
aucuugggcacugaucuga

SEQ ID NO: 1531964 - RNA, 19 nt, Artificial Sequence
  Description of Artificial Sequence: Synthetic oligonucleotide
  Sense strand starting at position 159 of SEQ ID NO: 1245045
cagaucagugcccaagauu

SEQ ID NO: 1531965 - RNA, 19 nt, Artificial Sequence
  Description of Artificial Sequence: Synthetic oligonucleotide
  Antisense strand to SEQ ID NO: 1531964
aaucuugggcacugaucug

SEQ ID NO: 1531966 - RNA, 19 nt, Artificial Sequence
  Description of Artificial Sequence: Synthetic oligonucleotide
  Sense strand starting at position 184 of SEQ ID NO: 1245045
ggccuacuugagcauaugu

SEQ ID NO: 1531967 - RNA, 19 nt, Artificial Sequence
  Description of Artificial Sequence: Synthetic oligonucleotide
  Antisense strand to SEQ ID NO: 1531966
acauaugcucaaguaggcc

SEQ ID NO: 1531968 - RNA, 19 nt, Artificial Sequence
  Description of Artificial Sequence: Synthetic oligonucleotide
  Sense strand starting at position 186 of SEQ ID NO: 1245045
ccuacuugagcauauguuu

SEQ ID NO: 1531969 - RNA, 19 nt, Artificial Sequence
  Description of Artificial Sequence: Synthetic oligonucleotide
  Antisense strand to SEQ ID NO: 1531968
aaacauaugcucaaguagg

SEQ ID NO: 1531970 - RNA, 19 nt, Artificial Sequence
  Description of Artificial Sequence: Synthetic oligonucleotide
  Sense strand starting at position 618 of SEQ ID NO: 1245045
cgaaauacaugacugcaga

SEQ ID NO: 1531971 - RNA, 19 nt, Artificial Sequence
  Description of Artificial Sequence: Synthetic oligonucleotide
  Antisense strand to SEQ ID NO: 1531970
ucugcagucauguauuucg

SEQ ID NO: 1531972 - RNA, 19 nt, Artificial Sequence
  Description of Artificial Sequence: Synthetic oligonucleotide
  Sense strand starting at position 652 of SEQ ID NO: 1245045
acuuuaggauuagagguaa

SEQ ID NO: 1531973 - RNA, 19 nt, Artificial Sequence
  Description of Artificial Sequence: Synthetic oligonucleotide
  Antisense strand to SEQ ID NO: 1531972
uuaccucuaauccuaaagu

SEQ ID NO: 1531974 - RNA, 19 nt, Artificial Sequence
  Description of Artificial Sequence: Synthetic oligonucleotide
  Sense strand starting at position 736 of SEQ ID NO: 1245045
acggguguccaguggaaau

SEQ ID NO: 1531975 - RNA, 19 nt, Artificial Sequence
  Description of Artificial Sequence: Synthetic oligonucleotide
  Antisense strand to SEQ ID NO: 1531974
auuuccacuggacacccgu

SEQ ID NO: 1531976 - RNA, 19 nt, Artificial Sequence
  Description of Artificial Sequence: Synthetic oligonucleotide
  Sense strand starting at position 738 of SEQ ID NO: 1245045
ggguguccaguggaaauua

SEQ ID NO: 1531977 - RNA, 19 nt, Artificial Sequence
  Description of Artificial Sequence: Synthetic oligonucleotide
  Antisense strand to SEQ ID NO: 1531976
uaauuuccacuggacaccc

SEQ ID NO: 1531978 - RNA, 19 nt, Artificial Sequence
  Description of Artificial Sequence: Synthetic oligonucleotide
  Sense strand starting at position 754 of SEQ ID NO: 1245045
uuacaaucccggugacuac

SEQ ID NO: 1531979 - RNA, 19 nt, Artificial Sequence
  Description of Artificial Sequence: Synthetic oligonucleotide
  Antisense strand to SEQ ID NO: 1531978
guagucaccgggauuguaa

SEQ ID NO: 1531980 - RNA, 19 nt, Artificial Sequence
  Description of Artificial Sequence: Synthetic oligonucleotide
  Sense strand starting at position 763 of SEQ ID NO: 1245045
cggugacuacacugcuuua

SEQ ID NO: 1531981 - RNA, 19 nt, Artificial Sequence
  Description of Artificial Sequence: Synthetic oligonucleotide
  Antisense strand to SEQ ID NO: 1531980
uaaagcaguguagucaccg

SEQ ID NO: 1531982 - RNA, 19 nt, Artificial Sequence
  Description of Artificial Sequence: Synthetic oligonucleotide
  Sense strand starting at position 778 of SEQ ID NO: 1245045
uuuaaauguuuccuaaggu

SEQ ID NO: 1531983 - RNA, 19 nt, Artificial Sequence
  Description of Artificial Sequence: Synthetic oligonucleotide
  Antisense strand to SEQ ID NO: 1531982
accuuaggaaacauuuaaa

SEQ ID NO: 1531984 - RNA, 19 nt, Artificial Sequence
  Description of Artificial Sequence: Synthetic oligonucleotide
  Sense strand starting at position 794 of SEQ ID NO: 1245045
gguuucaacgagugcaaca

SEQ ID NO: 1531985 - RNA, 19 nt, Artificial Sequence
  Description of Artificial Sequence: Synthetic oligonucleotide
  Antisense strand to SEQ ID NO: 1531984
uguugcacucguugaaacc

SEQ ID NO: 1531986 - RNA, 19 nt, Artificial Sequence
  Description of Artificial Sequence: Synthetic oligonucleotide
  Sense strand starting at position 835 of SEQ ID NO: 1245045
gucuuacuguuauuacuaa

SEQ ID NO: 1531987 - RNA, 19 nt, Artificial Sequence
  Description of Artificial Sequence: Synthetic oligonucleotide
  Antisense strand to SEQ ID NO: 1531986
uuaguaauaacaguaagac

SEQ ID NO: 1531988 - RNA, 19 nt, Artificial Sequence
  Description of Artificial Sequence: Synthetic oligonucleotide
  Sense strand starting at position 861 of SEQ ID NO: 1245045
gucagcuaagcuucgcaua

SEQ ID NO: 1531989 - RNA, 19 nt, Artificial Sequence
  Description of Artificial Sequence: Synthetic oligonucleotide
  Antisense strand to SEQ ID NO: 1531988
uaugcgaagcuuagcugac

SEQ ID NO: 1531990 - RNA, 19 nt, Artificial Sequence
  Description of Artificial Sequence: Synthetic oligonucleotide
  Sense strand starting at position 2423 of SEQ ID NO: 1245045
ggacgagcgugauccaacu

SEQ ID NO: 1531991 - RNA, 19 nt, Artificial Sequence
  Description of Artificial Sequence: Synthetic oligonucleotide
  Antisense strand to SEQ ID NO: 1531990
aguuggaucacgcucgucc

SEQ ID NO: 1531992 - RNA, 19 nt, Artificial Sequence
  Description of Artificial Sequence: Synthetic oligonucleotide
  Sense strand starting at position 2817 of SEQ ID NO: 1245045
gcguuauuuacguagaggu

SEQ ID NO: 1531993 - RNA, 19 nt, Artificial Sequence
  Description of Artificial Sequence: Synthetic oligonucleotide
  Antisense strand to SEQ ID NO: 1531992
accucuacguaaauaacgc

SEQ ID NO: 1531994 - RNA, 19 nt, Artificial Sequence
  Description of Artificial Sequence: Synthetic oligonucleotide
  Sense strand starting at position 2827 of SEQ ID NO: 1245045
cguagagguuaaucugcaa

SEQ ID NO: 1531995 - RNA, 19 nt, Artificial Sequence
  Description of Artificial Sequence: Synthetic oligonucleotide
  Antisense strand to SEQ ID NO: 1531994
uugcagauuaaccucuacg

SEQ ID NO: 1531996 - RNA, 19 nt, Artificial Sequence
  Description of Artificial Sequence: Synthetic oligonucleotide
  Sense strand starting at position 2830 of SEQ ID NO: 1245045
agagguuaaucugcaacaa

SEQ ID NO: 1531997 - RNA, 19 nt, Artificial Sequence
  Description of Artificial Sequence: Synthetic oligonucleotide
  Antisense strand to SEQ ID NO: 1531996
uuguugcagauuaaccucu

SEQ ID NO: 1531998 - RNA, 19 nt, Artificial Sequence
  Description of Artificial Sequence: Synthetic oligonucleotide
  Sense strand starting at position 2889 of SEQ ID NO: 1245045
auguuacacuguccuuuaa

SEQ ID NO: 1531999 - RNA, 19 nt, Artificial Sequence
  Description of Artificial Sequence: Synthetic oligonucleotide
  Antisense strand to SEQ ID NO: 1531998
uuaaaggacaguguaacau

SEQ ID NO: 1532000 - RNA, 19 nt, Artificial Sequence
  Description of Artificial Sequence: Synthetic oligonucleotide
  Sense strand starting at position 2902 of SEQ ID NO: 1245045
cuuuaacgucuugaugaac

SEQ ID NO: 1532001 - RNA, 19 nt, Artificial Sequence
  Description of Artificial Sequence: Synthetic oligonucleotide
  Antisense strand to SEQ ID NO: 1532000
guucaucaagacguuaaag

SEQ ID NO: 1532002 - RNA, 19 nt, Artificial Sequence
  Description of Artificial Sequence: Synthetic oligonucleotide
  Sense strand starting at position 2905 of SEQ ID NO: 1245045
uaacgucuugaugaacuga

SEQ ID NO: 1532003 - RNA, 19 nt, Artificial Sequence
  Description of Artificial Sequence: Synthetic oligonucleotide
  Antisense strand to SEQ ID NO: 1532002
ucaguucaucaagacguua

SEQ ID NO: 1532004 - RNA, 19 nt, Artificial Sequence
  Description of Artificial Sequence: Synthetic oligonucleotide
  Sense strand starting at position 2932 of SEQ ID NO: 1245045
gugugaucacagcagauga

SEQ ID NO: 1532005 - RNA, 19 nt, Artificial Sequence
  Description of Artificial Sequence: Synthetic oligonucleotide
  Antisense strand to SEQ ID NO: 1532004
ucaucugcugugaucacac

SEQ ID NO: 1532006 - RNA, 19 nt, Artificial Sequence
  Description of Artificial Sequence: Synthetic oligonucleotide
  Sense strand starting at position 3101 of SEQ ID NO: 1245045
gcaccuuauggcuagaggu

SEQ ID NO: 1532007 - RNA, 19 nt, Artificial Sequence
  Description of Artificial Sequence: Synthetic oligonucleotide
  Antisense strand to SEQ ID NO: 1532006
accucuagccauaaggugc

SEQ ID NO: 1532008 - RNA, 19 nt, Artificial Sequence
  Description of Artificial Sequence: Synthetic oligonucleotide
  Sense strand starting at position 3118 of SEQ ID NO: 1245045
guggaauaguguuacauuu

SEQ ID NO: 1532009 - RNA, 19 nt, Artificial Sequence
  Description of Artificial Sequence: Synthetic oligonucleotide
  Antisense strand to SEQ ID NO: 1532008
aaauguaacacuauuccac

SEQ ID NO: 1532010 - RNA, 19 nt, Artificial Sequence
  Description of Artificial Sequence: Synthetic oligonucleotide
  Sense strand starting at position 3120 of SEQ ID NO: 1245045
ggaauaguguuacauuuaa

SEQ ID NO: 1532011 - RNA, 19 nt, Artificial Sequence
  Description of Artificial Sequence: Synthetic oligonucleotide
  Antisense strand to SEQ ID NO: 1532010
uuaaauguaacacuauucc

SEQ ID NO: 1532012 - RNA, 19 nt, Artificial Sequence
  Description of Artificial Sequence: Synthetic oligonucleotide
  Sense strand starting at position 3140 of SEQ ID NO: 1245045
uugguuauuuaugauguga

SEQ ID NO: 1532013 - RNA, 19 nt, Artificial Sequence
  Description of Artificial Sequence: Synthetic oligonucleotide
  Antisense strand to SEQ ID NO: 1532012
ucacaucauaaauaaccaa

SEQ ID NO: 1532014 - RNA, 19 nt, Artificial Sequence
  Description of Artificial Sequence: Synthetic oligonucleotide
  Sense strand starting at position 3173 of SEQ ID NO: 1245045
aacagucgccuaugagaaa

SEQ ID NO: 1532015 - RNA, 19 nt, Artificial Sequence
  Description of Artificial Sequence: Synthetic oligonucleotide
  Antisense strand to SEQ ID NO: 1532014
uuucucauaggcgacuguu

SEQ ID NO: 1532016 - RNA, 19 nt, Artificial Sequence
  Description of Artificial Sequence: Synthetic oligonucleotide
  Sense strand starting at position 3507 of SEQ ID NO: 1245045
aggguauugcagugaacca

SEQ ID NO: 1532017 - RNA, 19 nt, Artificial Sequence
  Description of Artificial Sequence: Synthetic oligonucleotide
  Antisense strand to SEQ ID NO: 1532016
ugguucacugcaauacccu

SEQ ID NO: 1532018 - RNA, 19 nt, Artificial Sequence
  Description of Artificial Sequence: Synthetic oligonucleotide
  Sense strand starting at position 3508 of SEQ ID NO: 1245045
ggguauugcagugaaccaa

SEQ ID NO: 1532019 - RNA, 19 nt, Artificial Sequence
  Description of Artificial Sequence: Synthetic oligonucleotide
  Antisense strand to SEQ ID NO: 1532018
uugguucacugcaauaccc

SEQ ID NO: 1532020 - RNA, 19 nt, Artificial Sequence
  Description of Artificial Sequence: Synthetic oligonucleotide
  Sense strand starting at position 3588 of SEQ ID NO: 1245045
acuagugaauagucuguuu

SEQ ID NO: 1532021 - RNA, 19 nt, Artificial Sequence
  Description of Artificial Sequence: Synthetic oligonucleotide
  Antisense strand to SEQ ID NO: 1532020
aaacagacuauucacuagu

SEQ ID NO: 1532022 - RNA, 19 nt, Artificial Sequence
  Description of Artificial Sequence: Synthetic oligonucleotide
  Sense strand starting at position 3628 of SEQ ID NO: 1245045
aaucgaggauuagauuaau

SEQ ID NO: 1532023 - RNA, 19 nt, Artificial Sequence
  Description of Artificial Sequence: Synthetic oligonucleotide
  Antisense strand to SEQ ID NO: 1532022
auuaaucuaauccucgauu

SEQ ID NO: 1532024 - RNA, 19 nt, Artificial Sequence
  Description of Artificial Sequence: Synthetic oligonucleotide
  Sense strand starting at position 3659 of SEQ ID NO: 1245045
ugcauuaaagcuggcuaau

SEQ ID NO: 1532025 - RNA, 19 nt, Artificial Sequence
  Description of Artificial Sequence: Synthetic oligonucleotide
  Antisense strand to SEQ ID NO: 1532024
auuagccagcuuuaaugca

SEQ ID NO: 1532026 - RNA, 19 nt, Artificial Sequence
  Description of Artificial Sequence: Synthetic oligonucleotide
  Sense strand starting at position 3807 of SEQ ID NO: 1245045
guauacuugcagugucaga

SEQ ID NO: 1532027 - RNA, 19 nt, Artificial Sequence
  Description of Artificial Sequence: Synthetic oligonucleotide
  Antisense strand to SEQ ID NO: 1532026
ucugacacugcaaguauac

SEQ ID NO: 1532028 - RNA, 19 nt, Artificial Sequence
  Description of Artificial Sequence: Synthetic oligonucleotide
  Sense strand starting at position 41 of SEQ ID NO: 1245046
acguaagaaugguuuaaag

SEQ ID NO: 1532029 - RNA, 19 nt, Artificial Sequence
  Description of Artificial Sequence: Synthetic oligonucleotide
  Antisense strand to SEQ ID NO: 1532028
cuuuaaaccauucuuacgu

SEQ ID NO: 1532030 - RNA, 19 nt, Artificial Sequence
  Description of Artificial Sequence: Synthetic oligonucleotide
  Sense strand starting at position 234 of SEQ ID NO: 1245046
aaguaauaucgacagcuug

SEQ ID NO: 1532031 - RNA, 19 nt, Artificial Sequence
  Description of Artificial Sequence: Synthetic oligonucleotide
  Antisense strand to SEQ ID NO: 1532030
caagcugucgauauuacuu

SEQ ID NO: 1532032 - RNA, 19 nt, Artificial Sequence
  Description of Artificial Sequence: Synthetic oligonucleotide
  Sense strand starting at position 289 of SEQ ID NO: 1245046
uggacacuagucugcaaau

SEQ ID NO: 1532033 - RNA, 19 nt, Artificial Sequence
  Description of Artificial Sequence: Synthetic oligonucleotide
  Antisense strand to SEQ ID NO: 1532032
auuugcagacuagugucca

SEQ ID NO: 1532034 - RNA, 19 nt, Artificial Sequence
  Description of Artificial Sequence: Synthetic oligonucleotide
  Sense strand starting at position 290 of SEQ ID NO: 1245046
ggacacuagucugcaaaua

SEQ ID NO: 1532035 - RNA, 19 nt, Artificial Sequence
  Description of Artificial Sequence: Synthetic oligonucleotide
  Antisense strand to SEQ ID NO: 1532034
uauuugcagacuagugucc

SEQ ID NO: 1532036 - RNA, 19 nt, Artificial Sequence
  Description of Artificial Sequence: Synthetic oligonucleotide
  Sense strand starting at position 337 of SEQ ID NO: 1245046
uuaacaaaccaguguaagu

SEQ ID NO: 1532037 - RNA, 19 nt, Artificial Sequence
  Description of Artificial Sequence: Synthetic oligonucleotide
  Antisense strand to SEQ ID NO: 1532036
acuuacacugguuuguuaa

SEQ ID NO: 1532038 - RNA, 19 nt, Artificial Sequence
  Description of Artificial Sequence: Synthetic oligonucleotide
  Sense strand starting at position 347 of SEQ ID NO: 1245046
aguguaagucugcacaaug

SEQ ID NO: 1532039 - RNA, 19 nt, Artificial Sequence
  Description of Artificial Sequence: Synthetic oligonucleotide
  Antisense strand to SEQ ID NO: 1532038
cauugugcagacuuacacu

SEQ ID NO: 1532040 - RNA, 19 nt, Artificial Sequence
  Description of Artificial Sequence: Synthetic oligonucleotide
  Sense strand starting at position 379 of SEQ ID NO: 1245046
auucuuuccucgucugaau

SEQ ID NO: 1532041 - RNA, 19 nt, Artificial Sequence
  Description of Artificial Sequence: Synthetic oligonucleotide
  Antisense strand to SEQ ID NO: 1532040
auucagacgaggaaagaau

SEQ ID NO: 1532042 - RNA, 19 nt, Artificial Sequence
  Description of Artificial Sequence: Synthetic oligonucleotide
  Sense strand starting at position 641 of SEQ ID NO: 1245046
cgaguuaaacuugaccuua

SEQ ID NO: 1532043 - RNA, 19 nt, Artificial Sequence
  Description of Artificial Sequence: Synthetic oligonucleotide
  Antisense strand to SEQ ID NO: 1532042
uaaggucaaguuuaacucg

SEQ ID NO: 1532044 - RNA, 19 nt, Artificial Sequence
  Description of Artificial Sequence: Synthetic oligonucleotide
  Sense strand starting at position 661 of SEQ ID NO: 1245046
ccaagaugccuguagagcu

SEQ ID NO: 1532045 - RNA, 19 nt, Artificial Sequence
  Description of Artificial Sequence: Synthetic oligonucleotide
  Antisense strand to SEQ ID NO: 1532044
agcucuacaggcaucuugg

SEQ ID NO: 1532046 - RNA, 19 nt, Artificial Sequence
  Description of Artificial Sequence: Synthetic oligonucleotide
  Sense strand starting at position 857 of SEQ ID NO: 1245046
gguggacacuauccucauu

SEQ ID NO: 1532047 - RNA, 19 nt, Artificial Sequence
  Description of Artificial Sequence: Synthetic oligonucleotide
  Antisense strand to SEQ ID NO: 1532046
aaugaggauaguguccacc

SEQ ID NO: 1532048 - RNA, 19 nt, Artificial Sequence
  Description of Artificial Sequence: Synthetic oligonucleotide
  Sense strand starting at position 886 of SEQ ID NO: 1245046
gccacuuggcaccaauaga

SEQ ID NO: 1532049 - RNA, 19 nt, Artificial Sequence
  Description of Artificial Sequence: Synthetic oligonucleotide
  Antisense strand to SEQ ID NO: 1532048
ucuauuggugccaaguggc

SEQ ID NO: 1532050 - RNA, 19 nt, Artificial Sequence
  Description of Artificial Sequence: Synthetic oligonucleotide
  Sense strand starting at position 905 of SEQ ID NO: 1245046
gcauauguucugccaguuc

SEQ ID NO: 1532051 - RNA, 19 nt, Artificial Sequence
  Description of Artificial Sequence: Synthetic oligonucleotide
  Antisense strand to SEQ ID NO: 1532050
gaacuggcagaacauaugc

SEQ ID NO: 1532052 - RNA, 19 nt, Artificial Sequence
  Description of Artificial Sequence: Synthetic oligonucleotide
  Sense strand starting at position 923 of SEQ ID NO: 1245046
cugagcuaaucuccaggaa

SEQ ID NO: 1532053 - RNA, 19 nt, Artificial Sequence
  Description of Artificial Sequence: Synthetic oligonucleotide
  Antisense strand to SEQ ID NO: 1532052
uuccuggagauuagcucag

SEQ ID NO: 1532054 - RNA, 19 nt, Artificial Sequence
  Description of Artificial Sequence: Synthetic oligonucleotide
  Sense strand starting at position 936 of SEQ ID NO: 1245046
caggaaaggcuuuguauaa

SEQ ID NO: 1532055 - RNA, 19 nt, Artificial Sequence
  Description of Artificial Sequence: Synthetic oligonucleotide
  Antisense strand to SEQ ID NO: 1532054
uuauacaaagccuuuccug

SEQ ID NO: 1532056 - RNA, 19 nt, Artificial Sequence
  Description of Artificial Sequence: Synthetic oligonucleotide
  Sense strand starting at position 937 of SEQ ID NO: 1245046
aggaaaggcuuuguauaac

SEQ ID NO: 1532057 - RNA, 19 nt, Artificial Sequence
  Description of Artificial Sequence: Synthetic oligonucleotide
  Antisense strand to SEQ ID NO: 1532056
guuauacaaagccuuuccu

SEQ ID NO: 1532058 - RNA, 19 nt, Artificial Sequence
  Description of Artificial Sequence: Synthetic oligonucleotide
  Sense strand starting at position 940 of SEQ ID NO: 1245046
aaaggcuuuguauaacgau

SEQ ID NO: 1532059 - RNA, 19 nt, Artificial Sequence
  Description of Artificial Sequence: Synthetic oligonucleotide
  Antisense strand to SEQ ID NO: 1532058
aucguuauacaaagccuuu

SEQ ID NO: 1532060 - RNA, 19 nt, Artificial Sequence
  Description of Artificial Sequence: Synthetic oligonucleotide
  Sense strand starting at position 968 of SEQ ID NO: 1245046
ucagaucagugcccaagau

SEQ ID NO: 1532061 - RNA, 19 nt, Artificial Sequence
  Description of Artificial Sequence: Synthetic oligonucleotide
  Antisense strand to SEQ ID NO: 1532060
aucuugggcacugaucuga

SEQ ID NO: 1532062 - RNA, 19 nt, Artificial Sequence
  Description of Artificial Sequence: Synthetic oligonucleotide
  Sense strand starting at position 969 of SEQ ID NO: 1245046
cagaucagugcccaagauu

SEQ ID NO: 1532063 - RNA, 19 nt, Artificial Sequence
  Description of Artificial Sequence: Synthetic oligonucleotide
  Antisense strand to SEQ ID NO: 1532062
aaucuugggcacugaucug

SEQ ID NO: 1532064 - RNA, 19 nt, Artificial Sequence
  Description of Artificial Sequence: Synthetic oligonucleotide
  Sense strand starting at position 994 of SEQ ID NO: 1245046
ggccuacuugagcauaugu

SEQ ID NO: 1532065 - RNA, 19 nt, Artificial Sequence
  Description of Artificial Sequence: Synthetic oligonucleotide
  Antisense strand to SEQ ID NO: 1532064
acauaugcucaaguaggcc

SEQ ID NO: 1532066 - RNA, 19 nt, Artificial Sequence
  Description of Artificial Sequence: Synthetic oligonucleotide
  Sense strand starting at position 996 of SEQ ID NO: 1245046
ccuacuugagcauauguuu

SEQ ID NO: 1532067 - RNA, 19 nt, Artificial Sequence
  Description of Artificial Sequence: Synthetic oligonucleotide
  Antisense strand to SEQ ID NO: 1532066
aaacauaugcucaaguagg

SEQ ID NO: 1532068 - RNA, 19 nt, Artificial Sequence
  Description of Artificial Sequence: Synthetic oligonucleotide
  Sense strand starting at position 1428 of SEQ ID NO: 1245046
cgaaauacaugacugcaga

SEQ ID NO: 1532069 - RNA, 19 nt, Artificial Sequence
  Description of Artificial Sequence: Synthetic oligonucleotide
  Antisense strand to SEQ ID NO: 1532068
ucugcagucauguauuucg

SEQ ID NO: 1532070 - RNA, 19 nt, Artificial Sequence
  Description of Artificial Sequence: Synthetic oligonucleotide
  Sense strand starting at position 1546 of SEQ ID NO: 1245046
acggguguccaguggaaau

SEQ ID NO: 1532071 - RNA, 19 nt, Artificial Sequence
  Description of Artificial Sequence: Synthetic oligonucleotide
  Antisense strand to SEQ ID NO: 1532070
auuuccacuggacacccgu

SEQ ID NO: 1532072 - RNA, 19 nt, Artificial Sequence
  Description of Artificial Sequence: Synthetic oligonucleotide
  Sense strand starting at position 1548 of SEQ ID NO: 1245046
ggguguccaguggaaauua

SEQ ID NO: 1532073 - RNA, 19 nt, Artificial Sequence
  Description of Artificial Sequence: Synthetic oligonucleotide
  Antisense strand to SEQ ID NO: 1532072
uaauuuccacuggacaccc

SEQ ID NO: 1532074 - RNA, 19 nt, Artificial Sequence
  Description of Artificial Sequence: Synthetic oligonucleotide
  Sense strand starting at position 1564 of SEQ ID NO: 1245046
uuacaaucccggugacuac

SEQ ID NO: 1532075 - RNA, 19 nt, Artificial Sequence
  Description of Artificial Sequence: Synthetic oligonucleotide
  Antisense strand to SEQ ID NO: 1532074
guagucaccgggauuguaa

SEQ ID NO: 1532076 - RNA, 19 nt, Artificial Sequence
  Description of Artificial Sequence: Synthetic oligonucleotide
  Sense strand starting at position 1588 of SEQ ID NO: 1245046
uuuaaauguuuccuaaggu

SEQ ID NO: 1532077 - RNA, 19 nt, Artificial Sequence
  Description of Artificial Sequence: Synthetic oligonucleotide
  Antisense strand to SEQ ID NO: 1532076
accuuaggaaacauuuaaa

SEQ ID NO: 1532078 - RNA, 19 nt, Artificial Sequence
  Description of Artificial Sequence: Synthetic oligonucleotide
  Sense strand starting at position 1604 of SEQ ID NO: 1245046
gguuucaacgagugcaaca

SEQ ID NO: 1532079 - RNA, 19 nt, Artificial Sequence
  Description of Artificial Sequence: Synthetic oligonucleotide
  Antisense strand to SEQ ID NO: 1532078
uguugcacucguugaaacc

SEQ ID NO: 1532080 - RNA, 19 nt, Artificial Sequence
  Description of Artificial Sequence: Synthetic oligonucleotide
  Sense strand starting at position 1645 of SEQ ID NO: 1245046
gucuuacuguuauuacuaa

SEQ ID NO: 1532081 - RNA, 19 nt, Artificial Sequence
  Description of Artificial Sequence: Synthetic oligonucleotide
  Antisense strand to SEQ ID NO: 1532080
uuaguaauaacaguaagac

SEQ ID NO: 1532082 - RNA, 19 nt, Artificial Sequence
  Description of Artificial Sequence: Synthetic oligonucleotide
  Sense strand starting at position 1671 of SEQ ID NO: 1245046
gucagcuaagcuucgcaua

SEQ ID NO: 1532083 - RNA, 19 nt, Artificial Sequence
  Description of Artificial Sequence: Synthetic oligonucleotide
  Antisense strand to SEQ ID NO: 1532082
uaugcgaagcuuagcugac

SEQ ID NO: 1532084 - RNA, 19 nt, Artificial Sequence
  Description of Artificial Sequence: Synthetic oligonucleotide
  Sense strand starting at position 3233 of SEQ ID NO: 1245046
ggacgagcgugauccaacu

SEQ ID NO: 1532085 - RNA, 19 nt, Artificial Sequence
  Description of Artificial Sequence: Synthetic oligonucleotide
  Antisense strand to SEQ ID NO: 1532084
aguuggaucacgcucgucc

SEQ ID NO: 1532086 - RNA, 19 nt, Artificial Sequence
  Description of Artificial Sequence: Synthetic oligonucleotide
  Sense strand starting at position 3627 of SEQ ID NO: 1245046
gcguuauuuacguagaggu

SEQ ID NO: 1532087 - RNA, 19 nt, Artificial Sequence
  Description of Artificial Sequence: Synthetic oligonucleotide
  Antisense strand to SEQ ID NO: 1532086
accucuacguaaauaacgc

SEQ ID NO: 1532088 - RNA, 19 nt, Artificial Sequence
  Description of Artificial Sequence: Synthetic oligonucleotide
  Sense strand starting at position 3637 of SEQ ID NO: 1245046
cguagagguuaaucugcaa

SEQ ID NO: 1532089 - RNA, 19 nt, Artificial Sequence
  Description of Artificial Sequence: Synthetic oligonucleotide
  Antisense strand to SEQ ID NO: 1532088
uugcagauuaaccucuacg

SEQ ID NO: 1532090 - RNA, 19 nt, Artificial Sequence
  Description of Artificial Sequence: Synthetic oligonucleotide
  Sense strand starting at position 3640 of SEQ ID NO: 1245046
agagguuaaucugcaacaa

SEQ ID NO: 1532091 - RNA, 19 nt, Artificial Sequence
  Description of Artificial Sequence: Synthetic oligonucleotide
  Antisense strand to SEQ ID NO: 1532090
uuguugcagauuaaccucu

SEQ ID NO: 1532092 - RNA, 19 nt, Artificial Sequence
  Description of Artificial Sequence: Synthetic oligonucleotide
  Sense strand starting at position 3699 of SEQ ID NO: 1245046
auguuacacuguccuuuaa

SEQ ID NO: 1532093 - RNA, 19 nt, Artificial Sequence
  Description of Artificial Sequence: Synthetic oligonucleotide
  Antisense strand to SEQ ID NO: 1532092
uuaaaggacaguguaacau

SEQ ID NO: 1532094 - RNA, 19 nt, Artificial Sequence
  Description of Artificial Sequence: Synthetic oligonucleotide
  Sense strand starting at position 3712 of SEQ ID NO: 1245046
cuuuaacgucuugaugaac

SEQ ID NO: 1532095 - RNA, 19 nt, Artificial Sequence
  Description of Artificial Sequence: Synthetic oligonucleotide
  Antisense strand to SEQ ID NO: 1532094
guucaucaagacguuaaag

SEQ ID NO: 1532096 - RNA, 19 nt, Artificial Sequence
  Description of Artificial Sequence: Synthetic oligonucleotide
  Sense strand starting at position 3715 of SEQ ID NO: 1245046
uaacgucuugaugaacuga

SEQ ID NO: 1532097 - RNA, 19 nt, Artificial Sequence
  Description of Artificial Sequence: Synthetic oligonucleotide
  Antisense strand to SEQ ID NO: 1532096
ucaguucaucaagacguua

SEQ ID NO: 1532098 - RNA, 19 nt, Artificial Sequence
  Description of Artificial Sequence: Synthetic oligonucleotide
  Sense strand starting at position 3742 of SEQ ID NO: 1245046
gugugaucacagcagauga

SEQ ID NO: 1532099 - RNA, 19 nt, Artificial Sequence
  Description of Artificial Sequence: Synthetic oligonucleotide
  Antisense strand to SEQ ID NO: 1532098
ucaucugcugugaucacac

SEQ ID NO: 1532100 - RNA, 19 nt, Artificial Sequence
  Description of Artificial Sequence: Synthetic oligonucleotide
  Sense strand starting at position 3911 of SEQ ID NO: 1245046
gcaccuuauggcuagaggu

SEQ ID NO: 1532101 - RNA, 19 nt, Artificial Sequence
  Description of Artificial Sequence: Synthetic oligonucleotide
  Antisense strand to SEQ ID NO: 1532100
accucuagccauaaggugc

SEQ ID NO: 1532102 - RNA, 19 nt, Artificial Sequence
  Description of Artificial Sequence: Synthetic oligonucleotide
  Sense strand starting at position 3930 of SEQ ID NO: 1245046
ggaauaguguuacauuuaa

SEQ ID NO: 1532103 - RNA, 19 nt, Artificial Sequence
  Description of Artificial Sequence: Synthetic oligonucleotide
  Antisense strand to SEQ ID NO: 1532102
uuaaauguaacacuauucc

SEQ ID NO: 1532104 - RNA, 19 nt, Artificial Sequence
  Description of Artificial Sequence: Synthetic oligonucleotide
  Sense strand starting at position 3950 of SEQ ID NO: 1245046
uugguuauuuaugauguga

SEQ ID NO: 1532105 - RNA, 19 nt, Artificial Sequence
  Description of Artificial Sequence: Synthetic oligonucleotide
  Antisense strand to SEQ ID NO: 1532104
ucacaucauaaauaaccaa

SEQ ID NO: 1532106 - RNA, 19 nt, Artificial Sequence
  Description of Artificial Sequence: Synthetic oligonucleotide
  Sense strand starting at position 3983 of SEQ ID NO: 1245046
aacagucgccuaugagaaa

SEQ ID NO: 1532107 - RNA, 19 nt, Artificial Sequence
  Description of Artificial Sequence: Synthetic oligonucleotide
  Antisense strand to SEQ ID NO: 1532106
uuucucauaggcgacuguu

SEQ ID NO: 1532108 - RNA, 19 nt, Artificial Sequence
  Description of Artificial Sequence: Synthetic oligonucleotide
  Sense strand starting at position 74 of SEQ ID NO: 1245047
ugccuauuccgucacuaaa

SEQ ID NO: 1532109 - RNA, 19 nt, Artificial Sequence
  Description of Artificial Sequence: Synthetic oligonucleotide
  Antisense strand to SEQ ID NO: 1532108
uuuagugacggaauaggca

SEQ ID NO: 1532110 - RNA, 19 nt, Artificial Sequence
  Description of Artificial Sequence: Synthetic oligonucleotide
  Sense strand starting at position 122 of SEQ ID NO: 1245047
uugauuucccuguggcauu

SEQ ID NO: 1532111 - RNA, 19 nt, Artificial Sequence
  Description of Artificial Sequence: Synthetic oligonucleotide
  Antisense strand to SEQ ID NO: 1532110
aaugccacagggaaaucaa

SEQ ID NO: 1532112 - RNA, 19 nt, Artificial Sequence
  Description of Artificial Sequence: Synthetic oligonucleotide
  Sense strand starting at position 177 of SEQ ID NO: 1245047
auuagagaugcuuggugua

SEQ ID NO: 1532113 - RNA, 19 nt, Artificial Sequence
  Description of Artificial Sequence: Synthetic oligonucleotide
  Antisense strand to SEQ ID NO: 1532112
uacaccaagcaucucuaau

SEQ ID NO: 1532114 - RNA, 19 nt, Artificial Sequence
  Description of Artificial Sequence: Synthetic oligonucleotide
  Sense strand starting at position 179 of SEQ ID NO: 1245047
uagagaugcuugguguaag

SEQ ID NO: 1532115 - RNA, 19 nt, Artificial Sequence
  Description of Artificial Sequence: Synthetic oligonucleotide
  Antisense strand to SEQ ID NO: 1532114
cuuacaccaagcaucucua

SEQ ID NO: 1532116 - RNA, 19 nt, Artificial Sequence
  Description of Artificial Sequence: Synthetic oligonucleotide
  Sense strand starting at position 182 of SEQ ID NO: 1245047
agaugcuugguguaaguga

SEQ ID NO: 1532117 - RNA, 19 nt, Artificial Sequence
  Description of Artificial Sequence: Synthetic oligonucleotide
  Antisense strand to SEQ ID NO: 1532116
ucacuuacaccaagcaucu

SEQ ID NO: 1532118 - RNA, 19 nt, Artificial Sequence
  Description of Artificial Sequence: Synthetic oligonucleotide
  Sense strand starting at position 235 of SEQ ID NO: 1245047
ggcugcucuuucucaaauc

SEQ ID NO: 1532119 - RNA, 19 nt, Artificial Sequence
  Description of Artificial Sequence: Synthetic oligonucleotide
  Antisense strand to SEQ ID NO: 1532118
gauuugagaaagagcagcc

SEQ ID NO: 1532120 - RNA, 19 nt, Artificial Sequence
  Description of Artificial Sequence: Synthetic oligonucleotide
  Sense strand starting at position 267 of SEQ ID NO: 1245047
uguccucaguccucuuauu

SEQ ID NO: 1532121 - RNA, 19 nt, Artificial Sequence
  Description of Artificial Sequence: Synthetic oligonucleotide
  Antisense strand to SEQ ID NO: 1532120
aauaagaggacugaggaca

SEQ ID NO: 1532122 - RNA, 19 nt, Artificial Sequence
  Description of Artificial Sequence: Synthetic oligonucleotide
  Sense strand starting at position 403 of SEQ ID NO: 1245047
aggagaguauaucugucua

SEQ ID NO: 1532123 - RNA, 19 nt, Artificial Sequence
  Description of Artificial Sequence: Synthetic oligonucleotide
  Antisense strand to SEQ ID NO: 1532122
uagacagauauacucuccu

SEQ ID NO: 1532124 - RNA, 19 nt, Artificial Sequence
  Description of Artificial Sequence: Synthetic oligonucleotide
  Sense strand starting at position 405 of SEQ ID NO: 1245047
gagaguauaucugucuaau

SEQ ID NO: 1532125 - RNA, 19 nt, Artificial Sequence
  Description of Artificial Sequence: Synthetic oligonucleotide
  Antisense strand to SEQ ID NO: 1532124
auuagacagauauacucuc

SEQ ID NO: 1532126 - RNA, 19 nt, Artificial Sequence
  Description of Artificial Sequence: Synthetic oligonucleotide
  Sense strand starting at position 408 of SEQ ID NO: 1245047
aguauaucugucuaaucaa

SEQ ID NO: 1532127 - RNA, 19 nt, Artificial Sequence
  Description of Artificial Sequence: Synthetic oligonucleotide
  Antisense strand to SEQ ID NO: 1532126
uugauuagacagauauacu

SEQ ID NO: 1532128 - RNA, 19 nt, Artificial Sequence
  Description of Artificial Sequence: Synthetic oligonucleotide
  Sense strand starting at position 955 of SEQ ID NO: 1245047
gccagagaucuuugcaaca

SEQ ID NO: 1532129 - RNA, 19 nt, Artificial Sequence
  Description of Artificial Sequence: Synthetic oligonucleotide
  Antisense strand to SEQ ID NO: 1532128
uguugcaaagaucucuggc

SEQ ID NO: 1532130 - RNA, 19 nt, Artificial Sequence
  Description of Artificial Sequence: Synthetic oligonucleotide
  Sense strand starting at position 1023 of SEQ ID NO: 1245047
acgggauuacaguggcuua

SEQ ID NO: 1532131 - RNA, 19 nt, Artificial Sequence
  Description of Artificial Sequence: Synthetic oligonucleotide
  Antisense strand to SEQ ID NO: 1532130
uaagccacuguaaucccgu

SEQ ID NO: 1532132 - RNA, 19 nt, Artificial Sequence
  Description of Artificial Sequence: Synthetic oligonucleotide
  Sense strand starting at position 1077 of SEQ ID NO: 1245047
auaacuuauuggcugcaaa

SEQ ID NO: 1532133 - RNA, 19 nt, Artificial Sequence
  Description of Artificial Sequence: Synthetic oligonucleotide
  Antisense strand to SEQ ID NO: 1532132
uuugcagccaauaaguuau

SEQ ID NO: 1532134 - RNA, 19 nt, Artificial Sequence
  Description of Artificial Sequence: Synthetic oligonucleotide
  Sense strand starting at position 1095 of SEQ ID NO: 1245047
aaccgugggugaguuaauu

SEQ ID NO: 1532135 - RNA, 19 nt, Artificial Sequence
  Description of Artificial Sequence: Synthetic oligonucleotide
  Antisense strand to SEQ ID NO: 1532134
aauuaacucacccacgguu

SEQ ID NO: 1532136 - RNA, 19 nt, Artificial Sequence
  Description of Artificial Sequence: Synthetic oligonucleotide
  Sense strand starting at position 1595 of SEQ ID NO: 1245047
gugcgaagccucucaggca

SEQ ID NO: 1532137 - RNA, 19 nt, Artificial Sequence
  Description of Artificial Sequence: Synthetic oligonucleotide
  Antisense strand to SEQ ID NO: 1532136
ugccugagaggcuucgcac

SEQ ID NO: 1532138 - RNA, 19 nt, Artificial Sequence
  Description of Artificial Sequence: Synthetic oligonucleotide
  Sense strand starting at position 1815 of SEQ ID NO: 1245047
ggucgcucaccuugaagga

SEQ ID NO: 1532139 - RNA, 19 nt, Artificial Sequence
  Description of Artificial Sequence: Synthetic oligonucleotide
  Antisense strand to SEQ ID NO: 1532138
uccuucaaggugagcgacc

SEQ ID NO: 1532140 - RNA, 19 nt, Artificial Sequence
  Description of Artificial Sequence: Synthetic oligonucleotide
  Sense strand starting at position 2432 of SEQ ID NO: 1245047
cucgguuuccugggaaacu

SEQ ID NO: 1532141 - RNA, 19 nt, Artificial Sequence
  Description of Artificial Sequence: Synthetic oligonucleotide
  Antisense strand to SEQ ID NO: 1532140
aguuucccaggaaaccgag

SEQ ID NO: 1532142 - RNA, 19 nt, Artificial Sequence
  Description of Artificial Sequence: Synthetic oligonucleotide
  Sense strand starting at position 2564 of SEQ ID NO: 1245047
cuccuccuccgcguuauua

SEQ ID NO: 1532143 - RNA, 19 nt, Artificial Sequence
  Description of Artificial Sequence: Synthetic oligonucleotide
  Antisense strand to SEQ ID NO: 1532142
uaauaacgcggaggaggag

SEQ ID NO: 1532144 - RNA, 19 nt, Artificial Sequence
  Description of Artificial Sequence: Synthetic oligonucleotide
  Sense strand starting at position 2565 of SEQ ID NO: 1245047
uccuccuccgcguuauuaa

SEQ ID NO: 1532145 - RNA, 19 nt, Artificial Sequence
  Description of Artificial Sequence: Synthetic oligonucleotide
  Antisense strand to SEQ ID NO: 1532144
uuaauaacgcggaggagga

SEQ ID NO: 1532146 - RNA, 19 nt, Artificial Sequence
  Description of Artificial Sequence: Synthetic oligonucleotide
  Sense strand starting at position 2566 of SEQ ID NO: 1245047
ccuccuccgcguuauuaau

SEQ ID NO: 1532147 - RNA, 19 nt, Artificial Sequence
  Description of Artificial Sequence: Synthetic oligonucleotide
  Antisense strand to SEQ ID NO: 1532146
auuaauaacgcggaggagg

SEQ ID NO: 1532148 - RNA, 19 nt, Artificial Sequence
  Description of Artificial Sequence: Synthetic oligonucleotide
  Sense strand starting at position 2574 of SEQ ID NO: 1245047
gcguuauuaauccagcagu

SEQ ID NO: 1532149 - RNA, 19 nt, Artificial Sequence
  Description of Artificial Sequence: Synthetic oligonucleotide
  Antisense strand to SEQ ID NO: 1532148
acugcuggauuaauaacgc

SEQ ID NO: 1532150 - RNA, 19 nt, Artificial Sequence
  Description of Artificial Sequence: Synthetic oligonucleotide
  Sense strand starting at position 2615 of SEQ ID NO: 1245047
gcugcagcccuggaguauu

SEQ ID NO: 1532151 - RNA, 19 nt, Artificial Sequence
  Description of Artificial Sequence: Synthetic oligonucleotide
  Antisense strand to SEQ ID NO: 1532150
aauacuccagggcugcagc

SEQ ID NO: 1532152 - RNA, 19 nt, Artificial Sequence
  Description of Artificial Sequence: Synthetic oligonucleotide
  Sense strand starting at position 2626 of SEQ ID NO: 1245047
ggaguauugcaguaugugu

SEQ ID NO: 1532153 - RNA, 19 nt, Artificial Sequence
  Description of Artificial Sequence: Synthetic oligonucleotide
  Antisense strand to SEQ ID NO: 1532152
acacauacugcaauacucc

SEQ ID NO: 1532154 - RNA, 19 nt, Artificial Sequence
  Description of Artificial Sequence: Synthetic oligonucleotide
  Sense strand starting at position 2667 of SEQ ID NO: 1245047
ggauugguuugggcgaagu

SEQ ID NO: 1532155 - RNA, 19 nt, Artificial Sequence
  Description of Artificial Sequence: Synthetic oligonucleotide
  Antisense strand to SEQ ID NO: 1532154
acuucgcccaaaccaaucc

SEQ ID NO: 1532156 - RNA, 19 nt, Artificial Sequence
  Description of Artificial Sequence: Synthetic oligonucleotide
  Sense strand starting at position 2669 of SEQ ID NO: 1245047
auugguuugggcgaaguaa

SEQ ID NO: 1532157 - RNA, 19 nt, Artificial Sequence
  Description of Artificial Sequence: Synthetic oligonucleotide
  Antisense strand to SEQ ID NO: 1532156
uuacuucgcccaaaccaau

SEQ ID NO: 1532158 - RNA, 19 nt, Artificial Sequence
  Description of Artificial Sequence: Synthetic oligonucleotide
  Sense strand starting at position 2992 of SEQ ID NO: 1245047
ccaagauucggucacugca

SEQ ID NO: 1532159 - RNA, 19 nt, Artificial Sequence
  Description of Artificial Sequence: Synthetic oligonucleotide
  Antisense strand to SEQ ID NO: 1532158
ugcagugaccgaaucuugg

SEQ ID NO: 1532160 - RNA, 19 nt, Artificial Sequence
  Description of Artificial Sequence: Synthetic oligonucleotide
  Sense strand starting at position 3249 of SEQ ID NO: 1245047
uuguauuacuuugugcuua

SEQ ID NO: 1532161 - RNA, 19 nt, Artificial Sequence
  Description of Artificial Sequence: Synthetic oligonucleotide
  Antisense strand to SEQ ID NO: 1532160
uaagcacaaaguaauacaa

SEQ ID NO: 1532162 - RNA, 19 nt, Artificial Sequence
  Description of Artificial Sequence: Synthetic oligonucleotide
  Sense strand starting at position 3251 of SEQ ID NO: 1245047
guauuacuuugugcuuaaa

SEQ ID NO: 1532163 - RNA, 19 nt, Artificial Sequence
  Description of Artificial Sequence: Synthetic oligonucleotide
  Antisense strand to SEQ ID NO: 1532162
uuuaagcacaaaguaauac

SEQ ID NO: 1532164 - RNA, 19 nt, Artificial Sequence
  Description of Artificial Sequence: Synthetic oligonucleotide
  Sense strand starting at position 3384 of SEQ ID NO: 1245047
gccacacaacguuauuaua

SEQ ID NO: 1532165 - RNA, 19 nt, Artificial Sequence
  Description of Artificial Sequence: Synthetic oligonucleotide
  Antisense strand to SEQ ID NO: 1532164
uauaauaacguuguguggc

SEQ ID NO: 1532166 - RNA, 19 nt, Artificial Sequence
  Description of Artificial Sequence: Synthetic oligonucleotide
  Sense strand starting at position 3739 of SEQ ID NO: 1245047
gcgccuggucugcuuuaau

SEQ ID NO: 1532167 - RNA, 19 nt, Artificial Sequence
  Description of Artificial Sequence: Synthetic oligonucleotide
  Antisense strand to SEQ ID NO: 1532166
auuaaagcagaccaggcgc

SEQ ID NO: 1532168 - RNA, 19 nt, Artificial Sequence
  Description of Artificial Sequence: Synthetic oligonucleotide
  Sense strand starting at position 3742 of SEQ ID NO: 1245047
ccuggucugcuuuaauagu

SEQ ID NO: 1532169 - RNA, 19 nt, Artificial Sequence
  Description of Artificial Sequence: Synthetic oligonucleotide
  Antisense strand to SEQ ID NO: 1532168
acuauuaaagcagaccagg

SEQ ID NO: 1532170 - RNA, 19 nt, Artificial Sequence
  Description of Artificial Sequence: Synthetic oligonucleotide
  Sense strand starting at position 3898 of SEQ ID NO: 1245047
ggaguaauuugcuaauaag

SEQ ID NO: 1532171 - RNA, 19 nt, Artificial Sequence
  Description of Artificial Sequence: Synthetic oligonucleotide
  Antisense strand to SEQ ID NO: 1532170
cuuauuagcaaauuacucc

SEQ ID NO: 1532172 - RNA, 19 nt, Artificial Sequence
  Description of Artificial Sequence: Synthetic oligonucleotide
  Sense strand starting at position 3901 of SEQ ID NO: 1245047
guaauuugcuaauaaguga

SEQ ID NO: 1532173 - RNA, 19 nt, Artificial Sequence
  Description of Artificial Sequence: Synthetic oligonucleotide
  Antisense strand to SEQ ID NO: 1532172
ucacuuauuagcaaauuac

SEQ ID NO: 1532174 - RNA, 19 nt, Artificial Sequence
  Description of Artificial Sequence: Synthetic oligonucleotide
  Sense strand starting at position 3914 of SEQ ID NO: 1245047
aagugauagggcuaggugu

SEQ ID NO: 1532175 - RNA, 19 nt, Artificial Sequence
  Description of Artificial Sequence: Synthetic oligonucleotide
  Antisense strand to SEQ ID NO: 1532174
acaccuagcccuaucacuu

SEQ ID NO: 1532176 - RNA, 19 nt, Artificial Sequence
  Description of Artificial Sequence: Synthetic oligonucleotide
  Sense strand starting at position 3916 of SEQ ID NO: 1245047
gugauagggcuagguguuu

SEQ ID NO: 1532177 - RNA, 19 nt, Artificial Sequence
  Description of Artificial Sequence: Synthetic oligonucleotide
  Antisense strand to SEQ ID NO: 1532176
aaacaccuagcccuaucac

SEQ ID NO: 1532178 - RNA, 19 nt, Artificial Sequence
  Description of Artificial Sequence: Synthetic oligonucleotide
  Sense strand starting at position 3921 of SEQ ID NO: 1245047
agggcuagguguuugucua

SEQ ID NO: 1532179 - RNA, 19 nt, Artificial Sequence
  Description of Artificial Sequence: Synthetic oligonucleotide
  Antisense strand to SEQ ID NO: 1532178
uagacaaacaccuagcccu

SEQ ID NO: 1532180 - RNA, 19 nt, Artificial Sequence
  Description of Artificial Sequence: Synthetic oligonucleotide
  Sense strand starting at position 3922 of SEQ ID NO: 1245047
gggcuagguguuugucuag

SEQ ID NO: 1532181 - RNA, 19 nt, Artificial Sequence
  Description of Artificial Sequence: Synthetic oligonucleotide
  Antisense strand to SEQ ID NO: 1532180
cuagacaaacaccuagccc

SEQ ID NO: 1532182 - RNA, 19 nt, Artificial Sequence
  Description of Artificial Sequence: Synthetic oligonucleotide
  Sense strand starting at position 3948 of SEQ ID NO: 1245047
gccuguuuccuuuccguua

SEQ ID NO: 1532183 - RNA, 19 nt, Artificial Sequence
  Description of Artificial Sequence: Synthetic oligonucleotide
  Antisense strand to SEQ ID NO: 1532182
uaacggaaaggaaacaggc

SEQ ID NO: 1532184 - RNA, 19 nt, Artificial Sequence
  Description of Artificial Sequence: Synthetic oligonucleotide
  Sense strand starting at position 3953 of SEQ ID NO: 1245047
uuuccuuuccguuacacuu

SEQ ID NO: 1532185 - RNA, 19 nt, Artificial Sequence
  Description of Artificial Sequence: Synthetic oligonucleotide
  Antisense strand to SEQ ID NO: 1532184
aaguguaacggaaaggaaa

SEQ ID NO: 1532186 - RNA, 19 nt, Artificial Sequence
  Description of Artificial Sequence: Synthetic oligonucleotide
  Sense strand starting at position 3962 of SEQ ID NO: 1245047
cguuacacuugagcucaaa

SEQ ID NO: 1532187 - RNA, 19 nt, Artificial Sequence
  Description of Artificial Sequence: Synthetic oligonucleotide
  Antisense strand to SEQ ID NO: 1532186
uuugagcucaaguguaacg

SEQ ID NO: 1532188 - RNA, 19 nt, Artificial Sequence
  Description of Artificial Sequence: Synthetic oligonucleotide
  Sense strand starting at position 62 of SEQ ID NO: 1245048
acacauacaugaguaguaa

SEQ ID NO: 1532189 - RNA, 19 nt, Artificial Sequence
  Description of Artificial Sequence: Synthetic oligonucleotide
  Antisense strand to SEQ ID NO: 1532188
uuacuacucauguaugugu

SEQ ID NO: 1532190 - RNA, 19 nt, Artificial Sequence
  Description of Artificial Sequence: Synthetic oligonucleotide
  Sense strand starting at position 111 of SEQ ID NO: 1245048
uucucauaugcagggugau

SEQ ID NO: 1532191 - RNA, 19 nt, Artificial Sequence
  Description of Artificial Sequence: Synthetic oligonucleotide
  Antisense strand to SEQ ID NO: 1532190
aucacccugcauaugagaa

SEQ ID NO: 1532192 - RNA, 19 nt, Artificial Sequence
  Description of Artificial Sequence: Synthetic oligonucleotide
  Sense strand starting at position 112 of SEQ ID NO: 1245048
ucucauaugcagggugauu

SEQ ID NO: 1532193 - RNA, 19 nt, Artificial Sequence
  Description of Artificial Sequence: Synthetic oligonucleotide
  Antisense strand to SEQ ID NO: 1532192
aaucacccugcauaugaga

SEQ ID NO: 1532194 - RNA, 19 nt, Artificial Sequence
  Description of Artificial Sequence: Synthetic oligonucleotide
  Sense strand starting at position 157 of SEQ ID NO: 1245048
ucagaaugcuugcuucuga

SEQ ID NO: 1532195 - RNA, 19 nt, Artificial Sequence
  Description of Artificial Sequence: Synthetic oligonucleotide
  Antisense strand to SEQ ID NO: 1532194
ucagaagcaagcauucuga

SEQ ID NO: 1532196 - RNA, 19 nt, Artificial Sequence
  Description of Artificial Sequence: Synthetic oligonucleotide
  Sense strand starting at position 416 of SEQ ID NO: 1245048
ggauaaugauccuugugau

SEQ ID NO: 1532197 - RNA, 19 nt, Artificial Sequence
  Description of Artificial Sequence: Synthetic oligonucleotide
  Antisense strand to SEQ ID NO: 1532196
aucacaaggaucauuaucc

SEQ ID NO: 1532198 - RNA, 19 nt, Artificial Sequence
  Description of Artificial Sequence: Synthetic oligonucleotide
  Sense strand starting at position 417 of SEQ ID NO: 1245048
gauaaugauccuugugauc

SEQ ID NO: 1532199 - RNA, 19 nt, Artificial Sequence
  Description of Artificial Sequence: Synthetic oligonucleotide
  Antisense strand to SEQ ID NO: 1532198
gaucacaaggaucauuauc

SEQ ID NO: 1532200 - RNA, 19 nt, Artificial Sequence
  Description of Artificial Sequence: Synthetic oligonucleotide
  Sense strand starting at position 422 of SEQ ID NO: 1245048
ugauccuugugaucauuau

SEQ ID NO: 1532201 - RNA, 19 nt, Artificial Sequence
  Description of Artificial Sequence: Synthetic oligonucleotide
  Antisense strand to SEQ ID NO: 1532200
auaaugaucacaaggauca

SEQ ID NO: 1532202 - RNA, 19 nt, Artificial Sequence
  Description of Artificial Sequence: Synthetic oligonucleotide
  Sense strand starting at position 426 of SEQ ID NO: 1245048
ccuugugaucauuaucaag

SEQ ID NO: 1532203 - RNA, 19 nt, Artificial Sequence
  Description of Artificial Sequence: Synthetic oligonucleotide
  Antisense strand to SEQ ID NO: 1532202
cuugauaaugaucacaagg

SEQ ID NO: 1532204 - RNA, 19 nt, Artificial Sequence
  Description of Artificial Sequence: Synthetic oligonucleotide
  Sense strand starting at position 428 of SEQ ID NO: 1245048
uugugaucauuaucaaguu

SEQ ID NO: 1532205 - RNA, 19 nt, Artificial Sequence
  Description of Artificial Sequence: Synthetic oligonucleotide
  Antisense strand to SEQ ID NO: 1532204
aacuugauaaugaucacaa

SEQ ID NO: 1532206 - RNA, 19 nt, Artificial Sequence
  Description of Artificial Sequence: Synthetic oligonucleotide
  Sense strand starting at position 456 of SEQ ID NO: 1245048
uacauauguuuggguguuu

SEQ ID NO: 1532207 - RNA, 19 nt, Artificial Sequence
  Description of Artificial Sequence: Synthetic oligonucleotide
  Antisense strand to SEQ ID NO: 1532206
aaacacccaaacauaugua

SEQ ID NO: 1532208 - RNA, 19 nt, Artificial Sequence
  Description of Artificial Sequence: Synthetic oligonucleotide
  Sense strand starting at position 860 of SEQ ID NO: 1245048
gcaaauuaauagcgcauuu

SEQ ID NO: 1532209 - RNA, 19 nt, Artificial Sequence
  Description of Artificial Sequence: Synthetic oligonucleotide
  Antisense strand to SEQ ID NO: 1532208
aaaugcgcuauuaauuugc

SEQ ID NO: 1532210 - RNA, 19 nt, Artificial Sequence
  Description of Artificial Sequence: Synthetic oligonucleotide
  Sense strand starting at position 1009 of SEQ ID NO: 1245048
uaagucgcaucuugagaaa

SEQ ID NO: 1532211 - RNA, 19 nt, Artificial Sequence
  Description of Artificial Sequence: Synthetic oligonucleotide
  Antisense strand to SEQ ID NO: 1532210
uuucucaagaugcgacuua

SEQ ID NO: 1532212 - RNA, 19 nt, Artificial Sequence
  Description of Artificial Sequence: Synthetic oligonucleotide
  Sense strand starting at position 1169 of SEQ ID NO: 1245048
ccaagaaggucauauauua

SEQ ID NO: 1532213 - RNA, 19 nt, Artificial Sequence
  Description of Artificial Sequence: Synthetic oligonucleotide
  Antisense strand to SEQ ID NO: 1532212
uaauauaugaccuucuugg

SEQ ID NO: 1532214 - RNA, 19 nt, Artificial Sequence
  Description of Artificial Sequence: Synthetic oligonucleotide
  Sense strand starting at position 1282 of SEQ ID NO: 1245048
uugugaguuuaaucacuuu

SEQ ID NO: 1532215 - RNA, 19 nt, Artificial Sequence
  Description of Artificial Sequence: Synthetic oligonucleotide
  Antisense strand to SEQ ID NO: 1532214
aaagugauuaaacucacaa

SEQ ID NO: 1532216 - RNA, 19 nt, Artificial Sequence
  Description of Artificial Sequence: Synthetic oligonucleotide
  Sense strand starting at position 1308 of SEQ ID NO: 1245048
ucuacagagugcuuuguga

SEQ ID NO: 1532217 - RNA, 19 nt, Artificial Sequence
  Description of Artificial Sequence: Synthetic oligonucleotide
  Antisense strand to SEQ ID NO: 1532216
ucacaaagcacucuguaga

SEQ ID NO: 1532218 - RNA, 19 nt, Artificial Sequence
  Description of Artificial Sequence: Synthetic oligonucleotide
  Sense strand starting at position 2009 of SEQ ID NO: 1245048
cggccucugucgggagaaa

SEQ ID NO: 1532219 - RNA, 19 nt, Artificial Sequence
  Description of Artificial Sequence: Synthetic oligonucleotide
  Antisense strand to SEQ ID NO: 1532218
uuucucccgacagaggccg

SEQ ID NO: 1532220 - RNA, 19 nt, Artificial Sequence
  Description of Artificial Sequence: Synthetic oligonucleotide
  Sense strand starting at position 2010 of SEQ ID NO: 1245048
ggccucugucgggagaaau

SEQ ID NO: 1532221 - RNA, 19 nt, Artificial Sequence
  Description of Artificial Sequence: Synthetic oligonucleotide
  Antisense strand to SEQ ID NO: 1532220
auuucucccgacagaggcc

SEQ ID NO: 1532222 - RNA, 19 nt, Artificial Sequence
  Description of Artificial Sequence: Synthetic oligonucleotide
  Sense strand starting at position 2022 of SEQ ID NO: 1245048
gagaaauucugagcagagc

SEQ ID NO: 1532223 - RNA, 19 nt, Artificial Sequence
  Description of Artificial Sequence: Synthetic oligonucleotide
  Antisense strand to SEQ ID NO: 1532222
gcucugcucagaauuucuc

SEQ ID NO: 1532224 - RNA, 19 nt, Artificial Sequence
  Description of Artificial Sequence: Synthetic oligonucleotide
  Sense strand starting at position 2049 of SEQ ID NO: 1245048
gcucuaacguuagagcguu

SEQ ID NO: 1532225 - RNA, 19 nt, Artificial Sequence
  Description of Artificial Sequence: Synthetic oligonucleotide
  Antisense strand to SEQ ID NO: 1532224
aacgcucuaacguuagagc

SEQ ID NO: 1532226 - RNA, 19 nt, Artificial Sequence
  Description of Artificial Sequence: Synthetic oligonucleotide
  Sense strand starting at position 2374 of SEQ ID NO: 1245048
ggaagcuucuggcccaagu

SEQ ID NO: 1532227 - RNA, 19 nt, Artificial Sequence
  Description of Artificial Sequence: Synthetic oligonucleotide
  Antisense strand to SEQ ID NO: 1532226
acuugggccagaagcuucc

SEQ ID NO: 1532228 - RNA, 19 nt, Artificial Sequence
  Description of Artificial Sequence: Synthetic oligonucleotide
  Sense strand starting at position 2376 of SEQ ID NO: 1245048
aagcuucuggcccaaguau

SEQ ID NO: 1532229 - RNA, 19 nt, Artificial Sequence
  Description of Artificial Sequence: Synthetic oligonucleotide
  Antisense strand to SEQ ID NO: 1532228
auacuugggccagaagcuu

SEQ ID NO: 1532230 - RNA, 19 nt, Artificial Sequence
  Description of Artificial Sequence: Synthetic oligonucleotide
  Sense strand starting at position 2600 of SEQ ID NO: 1245048
cauguauaguugccaggau

SEQ ID NO: 1532231 - RNA, 19 nt, Artificial Sequence
  Description of Artificial Sequence: Synthetic oligonucleotide
  Antisense strand to SEQ ID NO: 1532230
auccuggcaacuauacaug

SEQ ID NO: 1532232 - RNA, 19 nt, Artificial Sequence
  Description of Artificial Sequence: Synthetic oligonucleotide
  Sense strand starting at position 2656 of SEQ ID NO: 1245048
ggucccaccgccugauuua

SEQ ID NO: 1532233 - RNA, 19 nt, Artificial Sequence
  Description of Artificial Sequence: Synthetic oligonucleotide
  Antisense strand to SEQ ID NO: 1532232
uaaaucaggcggugggacc

SEQ ID NO: 1532234 - RNA, 19 nt, Artificial Sequence
  Description of Artificial Sequence: Synthetic oligonucleotide
  Sense strand starting at position 3103 of SEQ ID NO: 1245048
gcggguuacuuuguagguu

SEQ ID NO: 1532235 - RNA, 19 nt, Artificial Sequence
  Description of Artificial Sequence: Synthetic oligonucleotide
  Antisense strand to SEQ ID NO: 1532234
aaccuacaaaguaacccgc

SEQ ID NO: 1532236 - RNA, 19 nt, Artificial Sequence
  Description of Artificial Sequence: Synthetic oligonucleotide
  Sense strand starting at position 3104 of SEQ ID NO: 1245048
cggguuacuuuguagguua

SEQ ID NO: 1532237 - RNA, 19 nt, Artificial Sequence
  Description of Artificial Sequence: Synthetic oligonucleotide
  Antisense strand to SEQ ID NO: 1532236
uaaccuacaaaguaacccg

SEQ ID NO: 1532238 - RNA, 19 nt, Artificial Sequence
  Description of Artificial Sequence: Synthetic oligonucleotide
  Sense strand starting at position 3115 of SEQ ID NO: 1245048
guagguuacuuuguacuuu

SEQ ID NO: 1532239 - RNA, 19 nt, Artificial Sequence
  Description of Artificial Sequence: Synthetic oligonucleotide
  Antisense strand to SEQ ID NO: 1532238
aaaguacaaaguaaccuac

SEQ ID NO: 1532240 - RNA, 19 nt, Artificial Sequence
  Description of Artificial Sequence: Synthetic oligonucleotide
  Sense strand starting at position 3119 of SEQ ID NO: 1245048
guuacuuuguacuuuaagu

SEQ ID NO: 1532241 - RNA, 19 nt, Artificial Sequence
  Description of Artificial Sequence: Synthetic oligonucleotide
  Antisense strand to SEQ ID NO: 1532240
acuuaaaguacaaaguaac

SEQ ID NO: 1532242 - RNA, 19 nt, Artificial Sequence
  Description of Artificial Sequence: Synthetic oligonucleotide
  Sense strand starting at position 3759 of SEQ ID NO: 1245048
augauuauucuuggcuauu

SEQ ID NO: 1532243 - RNA, 19 nt, Artificial Sequence
  Description of Artificial Sequence: Synthetic oligonucleotide
  Antisense strand to SEQ ID NO: 1532242
aauagccaagaauaaucau

SEQ ID NO: 1532244 - RNA, 19 nt, Artificial Sequence
  Description of Artificial Sequence: Synthetic oligonucleotide
  Sense strand starting at position 3760 of SEQ ID NO: 1245048
ugauuauucuuggcuauuc

SEQ ID NO: 1532245 - RNA, 19 nt, Artificial Sequence
  Description of Artificial Sequence: Synthetic oligonucleotide
  Antisense strand to SEQ ID NO: 1532244
gaauagccaagaauaauca

SEQ ID NO: 1532246 - RNA, 19 nt, Artificial Sequence
  Description of Artificial Sequence: Synthetic oligonucleotide
  Sense strand starting at position 3776 of SEQ ID NO: 1245048
uucagagguccuugaaggu

SEQ ID NO: 1532247 - RNA, 19 nt, Artificial Sequence
  Description of Artificial Sequence: Synthetic oligonucleotide
  Antisense strand to SEQ ID NO: 1532246
accuucaaggaccucugaa

SEQ ID NO: 1532248 - RNA, 19 nt, Artificial Sequence
  Description of Artificial Sequence: Synthetic oligonucleotide
  Sense strand starting at position 3848 of SEQ ID NO: 1245048
uagugaauugacggagucu

SEQ ID NO: 1532249 - RNA, 19 nt, Artificial Sequence
  Description of Artificial Sequence: Synthetic oligonucleotide
  Antisense strand to SEQ ID NO: 1532248
agacuccgucaauucacua

SEQ ID NO: 1532250 - RNA, 19 nt, Artificial Sequence
  Description of Artificial Sequence: Synthetic oligonucleotide
  Sense strand starting at position 58 of SEQ ID NO: 1245049
gacuacagaccucguguuu

SEQ ID NO: 1532251 - RNA, 19 nt, Artificial Sequence
  Description of Artificial Sequence: Synthetic oligonucleotide
  Antisense strand to SEQ ID NO: 1532250
aaacacgaggucuguaguc

SEQ ID NO: 1532252 - RNA, 19 nt, Artificial Sequence
  Description of Artificial Sequence: Synthetic oligonucleotide
  Sense strand starting at position 118 of SEQ ID NO: 1245049
agcaaauauuugcacguaa

SEQ ID NO: 1532253 - RNA, 19 nt, Artificial Sequence
  Description of Artificial Sequence: Synthetic oligonucleotide
  Antisense strand to SEQ ID NO: 1532252
uuacgugcaaauauuugcu

SEQ ID NO: 1532254 - RNA, 19 nt, Artificial Sequence
  Description of Artificial Sequence: Synthetic oligonucleotide
  Sense strand starting at position 175 of SEQ ID NO: 1245049
aucauaugucaaugguaaa

SEQ ID NO: 1532255 - RNA, 19 nt, Artificial Sequence
  Description of Artificial Sequence: Synthetic oligonucleotide
  Antisense strand to SEQ ID NO: 1532254
uuuaccauugacauaugau

SEQ ID NO: 1532256 - RNA, 19 nt, Artificial Sequence
  Description of Artificial Sequence: Synthetic oligonucleotide
  Sense strand starting at position 219 of SEQ ID NO: 1245049
aagaacauugguugaucau

SEQ ID NO: 1532257 - RNA, 19 nt, Artificial Sequence
  Description of Artificial Sequence: Synthetic oligonucleotide
  Antisense strand to SEQ ID NO: 1532256
augaucaaccaauguucuu

SEQ ID NO: 1532258 - RNA, 19 nt, Artificial Sequence
  Description of Artificial Sequence: Synthetic oligonucleotide
  Sense strand starting at position 438 of SEQ ID NO: 1245049
gacuguaaauucuaggaaa

SEQ ID NO: 1532259 - RNA, 19 nt, Artificial Sequence
  Description of Artificial Sequence: Synthetic oligonucleotide
  Antisense strand to SEQ ID NO: 1532258
uuuccuagaauuuacaguc

SEQ ID NO: 1532260 - RNA, 19 nt, Artificial Sequence
  Description of Artificial Sequence: Synthetic oligonucleotide
  Sense strand starting at position 671 of SEQ ID NO: 1245049
agagcaguccugugagaau

SEQ ID NO: 1532261 - RNA, 19 nt, Artificial Sequence
  Description of Artificial Sequence: Synthetic oligonucleotide
  Antisense strand to SEQ ID NO: 1532260
auucucacaggacugcucu

SEQ ID NO: 1532262 - RNA, 19 nt, Artificial Sequence
  Description of Artificial Sequence: Synthetic oligonucleotide
  Sense strand starting at position 2250 of SEQ ID NO: 1245049
cuggcucacgccugugauu

SEQ ID NO: 1532263 - RNA, 19 nt, Artificial Sequence
  Description of Artificial Sequence: Synthetic oligonucleotide
  Antisense strand to SEQ ID NO: 1532262
aaucacaggcgugagccag

SEQ ID NO: 1532264 - RNA, 19 nt, Artificial Sequence
  Description of Artificial Sequence: Synthetic oligonucleotide
  Sense strand starting at position 2601 of SEQ ID NO: 1245049
uugguucugcccuaacuuu

SEQ ID NO: 1532265 - RNA, 19 nt, Artificial Sequence
  Description of Artificial Sequence: Synthetic oligonucleotide
  Antisense strand to SEQ ID NO: 1532264
aaaguuagggcagaaccaa

SEQ ID NO: 1532266 - RNA, 19 nt, Artificial Sequence
  Description of Artificial Sequence: Synthetic oligonucleotide
  Sense strand starting at position 2612 of SEQ ID NO: 1245049
cuaacuuugcccugugcua

SEQ ID NO: 1532267 - RNA, 19 nt, Artificial Sequence
  Description of Artificial Sequence: Synthetic oligonucleotide
  Antisense strand to SEQ ID NO: 1532266
uagcacagggcaaaguuag

SEQ ID NO: 1532268 - RNA, 19 nt, Artificial Sequence
  Description of Artificial Sequence: Synthetic oligonucleotide
  Sense strand starting at position 2813 of SEQ ID NO: 1245049
ugcagugagcccgagagua

SEQ ID NO: 1532269 - RNA, 19 nt, Artificial Sequence
  Description of Artificial Sequence: Synthetic oligonucleotide
  Antisense strand to SEQ ID NO: 1532268
uacucucgggcucacugca

SEQ ID NO: 1532270 - RNA, 19 nt, Artificial Sequence
  Description of Artificial Sequence: Synthetic oligonucleotide
  Sense strand starting at position 3097 of SEQ ID NO: 1245049
cagugaucaccaggcagau

SEQ ID NO: 1532271 - RNA, 19 nt, Artificial Sequence
  Description of Artificial Sequence: Synthetic oligonucleotide
  Antisense strand to SEQ ID NO: 1532270
aucugccuggugaucacug

SEQ ID NO: 1532272 - RNA, 19 nt, Artificial Sequence
  Description of Artificial Sequence: Synthetic oligonucleotide
  Sense strand starting at position 3119 of SEQ ID NO: 1245049
gguggugagcuuucugcuu

SEQ ID NO: 1532273 - RNA, 19 nt, Artificial Sequence
  Description of Artificial Sequence: Synthetic oligonucleotide
  Antisense strand to SEQ ID NO: 1532272
aagcagaaagcucaccacc

SEQ ID NO: 1532274 - RNA, 19 nt, Artificial Sequence
  Description of Artificial Sequence: Synthetic oligonucleotide
  Sense strand starting at position 3161 of SEQ ID NO: 1245049
gcugauuggcauggagacu

SEQ ID NO: 1532275 - RNA, 19 nt, Artificial Sequence
  Description of Artificial Sequence: Synthetic oligonucleotide
  Antisense strand to SEQ ID NO: 1532274
agucuccaugccaaucagc

SEQ ID NO: 1532276 - RNA, 19 nt, Artificial Sequence
  Description of Artificial Sequence: Synthetic oligonucleotide
  Sense strand starting at position 3395 of SEQ ID NO: 1245049
ugcaucuagccacagagau

SEQ ID NO: 1532277 - RNA, 19 nt, Artificial Sequence
  Description of Artificial Sequence: Synthetic oligonucleotide
  Antisense strand to SEQ ID NO: 1532276
aucucuguggcuagaugca

SEQ ID NO: 1532278 - RNA, 19 nt, Artificial Sequence
  Description of Artificial Sequence: Synthetic oligonucleotide
  Sense strand starting at position 3462 of SEQ ID NO: 1245049
ugggaaugcucacaccuuu

SEQ ID NO: 1532279 - RNA, 19 nt, Artificial Sequence
  Description of Artificial Sequence: Synthetic oligonucleotide
  Antisense strand to SEQ ID NO: 1532278
aaaggugugagcauuccca

SEQ ID NO: 1532280 - RNA, 19 nt, Artificial Sequence
  Description of Artificial Sequence: Synthetic oligonucleotide
  Sense strand starting at position 3470 of SEQ ID NO: 1245049
cucacaccuuugugggaaa

SEQ ID NO: 1532281 - RNA, 19 nt, Artificial Sequence
  Description of Artificial Sequence: Synthetic oligonucleotide
  Antisense strand to SEQ ID NO: 1532280
uuucccacaaaggugugag

SEQ ID NO: 1532282 - RNA, 19 nt, Artificial Sequence
  Description of Artificial Sequence: Synthetic oligonucleotide
  Sense strand starting at position 3472 of SEQ ID NO: 1245049
cacaccuuugugggaaaca

SEQ ID NO: 1532283 - RNA, 19 nt, Artificial Sequence
  Description of Artificial Sequence: Synthetic oligonucleotide
  Antisense strand to SEQ ID NO: 1532282
uguuucccacaaaggugug

SEQ ID NO: 1532284 - RNA, 19 nt, Artificial Sequence
  Description of Artificial Sequence: Synthetic oligonucleotide
  Sense strand starting at position 3553 of SEQ ID NO: 1245049
gcugacaucuaugcugaga

SEQ ID NO: 1532285 - RNA, 19 nt, Artificial Sequence
  Description of Artificial Sequence: Synthetic oligonucleotide
  Antisense strand to SEQ ID NO: 1532284
ucucagcauagaugucagc

SEQ ID NO: 1532286 - RNA, 19 nt, Artificial Sequence
  Description of Artificial Sequence: Synthetic oligonucleotide
  Sense strand starting at position 3555 of SEQ ID NO: 1245049
ugacaucuaugcugagaau

SEQ ID NO: 1532287 - RNA, 19 nt, Artificial Sequence
  Description of Artificial Sequence: Synthetic oligonucleotide
  Antisense strand to SEQ ID NO: 1532286
auucucagcauagauguca

SEQ ID NO: 1532288 - RNA, 19 nt, Artificial Sequence
  Description of Artificial Sequence: Synthetic oligonucleotide
  Sense strand starting at position 3558 of SEQ ID NO: 1245049
caucuaugcugagaaugag

SEQ ID NO: 1532289 - RNA, 19 nt, Artificial Sequence
  Description of Artificial Sequence: Synthetic oligonucleotide
  Antisense strand to SEQ ID NO: 1532288
cucauucucagcauagaug

SEQ ID NO: 1532290 - RNA, 19 nt, Artificial Sequence
  Description of Artificial Sequence: Synthetic oligonucleotide
  Sense strand starting at position 3702 of SEQ ID NO: 1245049
ugaagaccuugcugcuaaa

SEQ ID NO: 1532291 - RNA, 19 nt, Artificial Sequence
  Description of Artificial Sequence: Synthetic oligonucleotide
  Antisense strand to SEQ ID NO: 1532290
uuuagcagcaaggucuuca

SEQ ID NO: 1532292 - RNA, 19 nt, Artificial Sequence
  Description of Artificial Sequence: Synthetic oligonucleotide
  Sense strand starting at position 3782 of SEQ ID NO: 1245049
gcugucacuuggugacaca

SEQ ID NO: 1532293 - RNA, 19 nt, Artificial Sequence
  Description of Artificial Sequence: Synthetic oligonucleotide
  Antisense strand to SEQ ID NO: 1532292
ugugucaccaagugacagc

SEQ ID NO: 1532294 - RNA, 19 nt, Artificial Sequence
  Description of Artificial Sequence: Synthetic oligonucleotide
  Sense strand starting at position 3891 of SEQ ID NO: 1245049
guggacauguaccaacaga

SEQ ID NO: 1532295 - RNA, 19 nt, Artificial Sequence
  Description of Artificial Sequence: Synthetic oligonucleotide
  Antisense strand to SEQ ID NO: 1532294
ucuguugguacauguccac

SEQ ID NO: 1532296 - RNA, 19 nt, Artificial Sequence
  Description of Artificial Sequence: Synthetic oligonucleotide
  Sense strand starting at position 167 of SEQ ID NO: 1245050
gggacaauguuuccuguuu

SEQ ID NO: 1532297 - RNA, 19 nt, Artificial Sequence
  Description of Artificial Sequence: Synthetic oligonucleotide
  Antisense strand to SEQ ID NO: 1532296
aaacaggaaacauuguccc

SEQ ID NO: 1532298 - RNA, 19 nt, Artificial Sequence
  Description of Artificial Sequence: Synthetic oligonucleotide
  Sense strand starting at position 284 of SEQ ID NO: 1245050
cuguaauucuaagcagaug

SEQ ID NO: 1532299 - RNA, 19 nt, Artificial Sequence
  Description of Artificial Sequence: Synthetic oligonucleotide
  Antisense strand to SEQ ID NO: 1532298
caucugcuuagaauuacag

SEQ ID NO: 1532300 - RNA, 19 nt, Artificial Sequence
  Description of Artificial Sequence: Synthetic oligonucleotide
  Sense strand starting at position 359 of SEQ ID NO: 1245050
uuccaucccgacuguuaaa

SEQ ID NO: 1532301 - RNA, 19 nt, Artificial Sequence
  Description of Artificial Sequence: Synthetic oligonucleotide
  Antisense strand to SEQ ID NO: 1532300
uuuaacagucgggauggaa

SEQ ID NO: 1532302 - RNA, 19 nt, Artificial Sequence
  Description of Artificial Sequence: Synthetic oligonucleotide
  Sense strand starting at position 513 of SEQ ID NO: 1245050
uggcuuguggguuaacaau

SEQ ID NO: 1532303 - RNA, 19 nt, Artificial Sequence
  Description of Artificial Sequence: Synthetic oligonucleotide
  Antisense strand to SEQ ID NO: 1532302
auuguuaacccacaagcca

SEQ ID NO: 1532304 - RNA, 19 nt, Artificial Sequence
  Description of Artificial Sequence: Synthetic oligonucleotide
  Sense strand starting at position 702 of SEQ ID NO: 1245050
gggacaguuugcucaggac

SEQ ID NO: 1532305 - RNA, 19 nt, Artificial Sequence
  Description of Artificial Sequence: Synthetic oligonucleotide
  Antisense strand to SEQ ID NO: 1532304
guccugagcaaacuguccc

SEQ ID NO: 1532306 - RNA, 19 nt, Artificial Sequence
  Description of Artificial Sequence: Synthetic oligonucleotide
  Sense strand starting at position 748 of SEQ ID NO: 1245050
acggcuugucaggauuaug

SEQ ID NO: 1532307 - RNA, 19 nt, Artificial Sequence
  Description of Artificial Sequence: Synthetic oligonucleotide
  Antisense strand to SEQ ID NO: 1532306
cauaauccugacaagccgu

SEQ ID NO: 1532308 - RNA, 19 nt, Artificial Sequence
  Description of Artificial Sequence: Synthetic oligonucleotide
  Sense strand starting at position 751 of SEQ ID NO: 1245050
gcuugucaggauuaugaac

SEQ ID NO: 1532309 - RNA, 19 nt, Artificial Sequence
  Description of Artificial Sequence: Synthetic oligonucleotide
  Antisense strand to SEQ ID NO: 1532308
guucauaauccugacaagc

SEQ ID NO: 1532310 - RNA, 19 nt, Artificial Sequence
  Description of Artificial Sequence: Synthetic oligonucleotide
  Sense strand starting at position 804 of SEQ ID NO: 1245050
aagaaauucugucuuggug

SEQ ID NO: 1532311 - RNA, 19 nt, Artificial Sequence
  Description of Artificial Sequence: Synthetic oligonucleotide
  Antisense strand to SEQ ID NO: 1532310
caccaagacagaauuucuu

SEQ ID NO: 1532312 - RNA, 19 nt, Artificial Sequence
  Description of Artificial Sequence: Synthetic oligonucleotide
  Sense strand starting at position 868 of SEQ ID NO: 1245050
uagcuaaagguuuacuaga

SEQ ID NO: 1532313 - RNA, 19 nt, Artificial Sequence
  Description of Artificial Sequence: Synthetic oligonucleotide
  Antisense strand to SEQ ID NO: 1532312
ucuaguaaaccuuuagcua

SEQ ID NO: 1532314 - RNA, 19 nt, Artificial Sequence
  Description of Artificial Sequence: Synthetic oligonucleotide
  Sense strand starting at position 870 of SEQ ID NO: 1245050
gcuaaagguuuacuagaac

SEQ ID NO: 1532315 - RNA, 19 nt, Artificial Sequence
  Description of Artificial Sequence: Synthetic oligonucleotide
  Antisense strand to SEQ ID NO: 1532314
guucuaguaaaccuuuagc

SEQ ID NO: 1532316 - RNA, 19 nt, Artificial Sequence
  Description of Artificial Sequence: Synthetic oligonucleotide
  Sense strand starting at position 965 of SEQ ID NO: 1245050
ugauuaaaucuuggcuaau

SEQ ID NO: 1532317 - RNA, 19 nt, Artificial Sequence
  Description of Artificial Sequence: Synthetic oligonucleotide
  Antisense strand to SEQ ID NO: 1532316
auuagccaagauuuaauca

SEQ ID NO: 1532318 - RNA, 19 nt, Artificial Sequence
  Description of Artificial Sequence: Synthetic oligonucleotide
  Sense strand starting at position 967 of SEQ ID NO: 1245050
auuaaaucuuggcuaauag

SEQ ID NO: 1532319 - RNA, 19 nt, Artificial Sequence
  Description of Artificial Sequence: Synthetic oligonucleotide
  Antisense strand to SEQ ID NO: 1532318
cuauuagccaagauuuaau

SEQ ID NO: 1532320 - RNA, 19 nt, Artificial Sequence
  Description of Artificial Sequence: Synthetic oligonucleotide
  Sense strand starting at position 1133 of SEQ ID NO: 1245050
ugaucaguuucucuuucca

SEQ ID NO: 1532321 - RNA, 19 nt, Artificial Sequence
  Description of Artificial Sequence: Synthetic oligonucleotide
  Antisense strand to SEQ ID NO: 1532320
uggaaagagaaacugauca

SEQ ID NO: 1532322 - RNA, 19 nt, Artificial Sequence
  Description of Artificial Sequence: Synthetic oligonucleotide
  Sense strand starting at position 1154 of SEQ ID NO: 1245050
cuccuaaacgcuuggaaca

SEQ ID NO: 1532323 - RNA, 19 nt, Artificial Sequence
  Description of Artificial Sequence: Synthetic oligonucleotide
  Antisense strand to SEQ ID NO: 1532322
uguuccaagcguuuaggag

SEQ ID NO: 1532324 - RNA, 19 nt, Artificial Sequence
  Description of Artificial Sequence: Synthetic oligonucleotide
  Sense strand starting at position 1266 of SEQ ID NO: 1245050
gacgaaaguuucccucgga

SEQ ID NO: 1532325 - RNA, 19 nt, Artificial Sequence
  Description of Artificial Sequence: Synthetic oligonucleotide
  Antisense strand to SEQ ID NO: 1532324
uccgagggaaacuuucguc

SEQ ID NO: 1532326 - RNA, 19 nt, Artificial Sequence
  Description of Artificial Sequence: Synthetic oligonucleotide
  Sense strand starting at position 1269 of SEQ ID NO: 1245050
gaaaguuucccucggacug

SEQ ID NO: 1532327 - RNA, 19 nt, Artificial Sequence
  Description of Artificial Sequence: Synthetic oligonucleotide
  Antisense strand to SEQ ID NO: 1532326
caguccgagggaaacuuuc

SEQ ID NO: 1532328 - RNA, 19 nt, Artificial Sequence
  Description of Artificial Sequence: Synthetic oligonucleotide
  Sense strand starting at position 1348 of SEQ ID NO: 1245050
agaacagucccgcagcaaa

SEQ ID NO: 1532329 - RNA, 19 nt, Artificial Sequence
  Description of Artificial Sequence: Synthetic oligonucleotide
  Antisense strand to SEQ ID NO: 1532328
uuugcugcgggacuguucu

SEQ ID NO: 1532330 - RNA, 19 nt, Artificial Sequence
  Description of Artificial Sequence: Synthetic oligonucleotide
  Sense strand starting at position 1580 of SEQ ID NO: 1245050
gggaacucaccgugaagca

SEQ ID NO: 1532331 - RNA, 19 nt, Artificial Sequence
  Description of Artificial Sequence: Synthetic oligonucleotide
  Antisense strand to SEQ ID NO: 1532330
ugcuucacggugaguuccc

SEQ ID NO: 1532332 - RNA, 19 nt, Artificial Sequence
  Description of Artificial Sequence: Synthetic oligonucleotide
  Sense strand starting at position 2693 of SEQ ID NO: 1245050
cacggagaaccuugucaua

SEQ ID NO: 1532333 - RNA, 19 nt, Artificial Sequence
  Description of Artificial Sequence: Synthetic oligonucleotide
  Antisense strand to SEQ ID NO: 1532332
uaugacaagguucuccgug

SEQ ID NO: 1532334 - RNA, 19 nt, Artificial Sequence
  Description of Artificial Sequence: Synthetic oligonucleotide
  Sense strand starting at position 2695 of SEQ ID NO: 1245050
cggagaaccuugucauagg

SEQ ID NO: 1532335 - RNA, 19 nt, Artificial Sequence
  Description of Artificial Sequence: Synthetic oligonucleotide
  Antisense strand to SEQ ID NO: 1532334
ccuaugacaagguucuccg

SEQ ID NO: 1532336 - RNA, 19 nt, Artificial Sequence
  Description of Artificial Sequence: Synthetic oligonucleotide
  Sense strand starting at position 2780 of SEQ ID NO: 1245050
aggcaaaugacuuguugaa

SEQ ID NO: 1532337 - RNA, 19 nt, Artificial Sequence
  Description of Artificial Sequence: Synthetic oligonucleotide
  Antisense strand to SEQ ID NO: 1532336
uucaacaagucauuugccu

SEQ ID NO: 1532338 - RNA, 19 nt, Artificial Sequence
  Description of Artificial Sequence: Synthetic oligonucleotide
  Sense strand starting at position 2782 of SEQ ID NO: 1245050
gcaaaugacuuguugaaac

SEQ ID NO: 1532339 - RNA, 19 nt, Artificial Sequence
  Description of Artificial Sequence: Synthetic oligonucleotide
  Antisense strand to SEQ ID NO: 1532338
guuucaacaagucauuugc

SEQ ID NO: 1532340 - RNA, 19 nt, Artificial Sequence
  Description of Artificial Sequence: Synthetic oligonucleotide
  Sense strand starting at position 2789 of SEQ ID NO: 1245050
acuuguugaaacgggagaa

SEQ ID NO: 1532341 - RNA, 19 nt, Artificial Sequence
  Description of Artificial Sequence: Synthetic oligonucleotide
  Antisense strand to SEQ ID NO: 1532340
uucucccguuucaacaagu

SEQ ID NO: 1532342 - RNA, 19 nt, Artificial Sequence
  Description of Artificial Sequence: Synthetic oligonucleotide
  Sense strand starting at position 2790 of SEQ ID NO: 1245050
cuuguugaaacgggagaaa

SEQ ID NO: 1532343 - RNA, 19 nt, Artificial Sequence
  Description of Artificial Sequence: Synthetic oligonucleotide
  Antisense strand to SEQ ID NO: 1532342
uuucucccguuucaacaag

SEQ ID NO: 1532344 - RNA, 19 nt, Artificial Sequence
  Description of Artificial Sequence: Synthetic oligonucleotide
  Sense strand starting at position 2859 of SEQ ID NO: 1245050
cgccgaguccucuucucuu

SEQ ID NO: 1532345 - RNA, 19 nt, Artificial Sequence
  Description of Artificial Sequence: Synthetic oligonucleotide
  Antisense strand to SEQ ID NO: 1532344
aagagaagaggacucggcg

SEQ ID NO: 1532346 - RNA, 19 nt, Artificial Sequence
  Description of Artificial Sequence: Synthetic oligonucleotide
  Sense strand starting at position 3319 of SEQ ID NO: 1245050
ggaucuuagcaacgguaua

SEQ ID NO: 1532347 - RNA, 19 nt, Artificial Sequence
  Description of Artificial Sequence: Synthetic oligonucleotide
  Antisense strand to SEQ ID NO: 1532346
uauaccguugcuaagaucc

SEQ ID NO: 1532348 - RNA, 19 nt, Artificial Sequence
  Description of Artificial Sequence: Synthetic oligonucleotide
  Sense strand starting at position 3324 of SEQ ID NO: 1245050
uuagcaacgguauaauagu

SEQ ID NO: 1532349 - RNA, 19 nt, Artificial Sequence
  Description of Artificial Sequence: Synthetic oligonucleotide
  Antisense strand to SEQ ID NO: 1532348
acuauuauaccguugcuaa

SEQ ID NO: 1532350 - RNA, 19 nt, Artificial Sequence
  Description of Artificial Sequence: Synthetic oligonucleotide
  Sense strand starting at position 3352 of SEQ ID NO: 1245050
gagaauacauuugacaguu

SEQ ID NO: 1532351 - RNA, 19 nt, Artificial Sequence
  Description of Artificial Sequence: Synthetic oligonucleotide
  Antisense strand to SEQ ID NO: 1532350
aacugucaaauguauucuc

SEQ ID NO: 1532352 - RNA, 19 nt, Artificial Sequence
  Description of Artificial Sequence: Synthetic oligonucleotide
  Sense strand starting at position 3397 of SEQ ID NO: 1245050
cugagaaauccaugggugu

SEQ ID NO: 1532353 - RNA, 19 nt, Artificial Sequence
  Description of Artificial Sequence: Synthetic oligonucleotide
  Antisense strand to SEQ ID NO: 1532352
acacccauggauuucucag

SEQ ID NO: 1532354 - RNA, 19 nt, Artificial Sequence
  Description of Artificial Sequence: Synthetic oligonucleotide
  Sense strand starting at position 3398 of SEQ ID NO: 1245050
ugagaaauccauggguguu

SEQ ID NO: 1532355 - RNA, 19 nt, Artificial Sequence
  Description of Artificial Sequence: Synthetic oligonucleotide
  Antisense strand to SEQ ID NO: 1532354
aacacccauggauuucuca

SEQ ID NO: 1532356 - RNA, 19 nt, Artificial Sequence
  Description of Artificial Sequence: Synthetic oligonucleotide
  Sense strand starting at position 3399 of SEQ ID NO: 1245050
gagaaauccauggguguuu

SEQ ID NO: 1532357 - RNA, 19 nt, Artificial Sequence
  Description of Artificial Sequence: Synthetic oligonucleotide
  Antisense strand to SEQ ID NO: 1532356
aaacacccauggauuucuc

SEQ ID NO: 1532358 - RNA, 19 nt, Artificial Sequence
  Description of Artificial Sequence: Synthetic oligonucleotide
  Sense strand starting at position 3491 of SEQ ID NO: 1245050
uacagaggaucauaagaug

SEQ ID NO: 1532359 - RNA, 19 nt, Artificial Sequence
  Description of Artificial Sequence: Synthetic oligonucleotide
  Antisense strand to SEQ ID NO: 1532358
caucuuaugauccucugua

SEQ ID NO: 1532360 - RNA, 19 nt, Artificial Sequence
  Description of Artificial Sequence: Synthetic oligonucleotide
  Sense strand starting at position 3546 of SEQ ID NO: 1245050
uaaugugcuccuguuugca

SEQ ID NO: 1532361 - RNA, 19 nt, Artificial Sequence
  Description of Artificial Sequence: Synthetic oligonucleotide
  Antisense strand to SEQ ID NO: 1532360
ugcaaacaggagcacauua

SEQ ID NO: 1532362 - RNA, 19 nt, Artificial Sequence
  Description of Artificial Sequence: Synthetic oligonucleotide
  Sense strand starting at position 3679 of SEQ ID NO: 1245050
gacuuuguaccugaucguu

SEQ ID NO: 1532363 - RNA, 19 nt, Artificial Sequence
  Description of Artificial Sequence: Synthetic oligonucleotide
  Antisense strand to SEQ ID NO: 1532362
aacgaucagguacaaaguc

SEQ ID NO: 1532364 - RNA, 19 nt, Artificial Sequence
  Description of Artificial Sequence: Synthetic oligonucleotide
  Sense strand starting at position 3720 of SEQ ID NO: 1245050
uggguagcagacuaugauu

SEQ ID NO: 1532365 - RNA, 19 nt, Artificial Sequence
  Description of Artificial Sequence: Synthetic oligonucleotide
  Antisense strand to SEQ ID NO: 1532364
aaucauagucugcuaccca

SEQ ID NO: 1532366 - RNA, 19 nt, Artificial Sequence
  Description of Artificial Sequence: Synthetic oligonucleotide
  Sense strand starting at position 3729 of SEQ ID NO: 1245050
gacuaugauuuguaagauu

SEQ ID NO: 1532367 - RNA, 19 nt, Artificial Sequence
  Description of Artificial Sequence: Synthetic oligonucleotide
  Antisense strand to SEQ ID NO: 1532366
aaucuuacaaaucauaguc

SEQ ID NO: 1532368 - RNA, 19 nt, Artificial Sequence
  Description of Artificial Sequence: Synthetic oligonucleotide
  Sense strand starting at position 3816 of SEQ ID NO: 1245050
ggcaguuggaaacgaugua

SEQ ID NO: 1532369 - RNA, 19 nt, Artificial Sequence
  Description of Artificial Sequence: Synthetic oligonucleotide
  Antisense strand to SEQ ID NO: 1532368
uacaucguuuccaacugcc

SEQ ID NO: 1532370 - RNA, 19 nt, Artificial Sequence
  Description of Artificial Sequence: Synthetic oligonucleotide
  Sense strand starting at position 3817 of SEQ ID NO: 1245050
gcaguuggaaacgauguaa

SEQ ID NO: 1532371 - RNA, 19 nt, Artificial Sequence
  Description of Artificial Sequence: Synthetic oligonucleotide
  Antisense strand to SEQ ID NO: 1532370
uuacaucguuuccaacugc

SEQ ID NO: 1532372 - RNA, 19 nt, Artificial Sequence
  Description of Artificial Sequence: Synthetic oligonucleotide
  Sense strand starting at position 3828 of SEQ ID NO: 1245050
cgauguaaacagcauacuu

SEQ ID NO: 1532373 - RNA, 19 nt, Artificial Sequence
  Description of Artificial Sequence: Synthetic oligonucleotide
  Antisense strand to SEQ ID NO: 1532372
aaguaugcuguuuacaucg

SEQ ID NO: 1532374 - RNA, 19 nt, Artificial Sequence
  Description of Artificial Sequence: Synthetic oligonucleotide
  Sense strand starting at position 3848 of SEQ ID NO: 1245050
guugguuaugcagaacaaa

SEQ ID NO: 1532375 - RNA, 19 nt, Artificial Sequence
  Description of Artificial Sequence: Synthetic oligonucleotide
  Antisense strand to SEQ ID NO: 1532374
uuuguucugcauaaccaac

SEQ ID NO: 1532376 - RNA, 19 nt, Artificial Sequence
  Description of Artificial Sequence: Synthetic oligonucleotide
  Sense strand starting at position 34 of SEQ ID NO: 1245051
guuacaugggccuauagga

SEQ ID NO: 1532377 - RNA, 19 nt, Artificial Sequence
  Description of Artificial Sequence: Synthetic oligonucleotide
  Antisense strand to SEQ ID NO: 1532376
uccuauaggcccauguaac

SEQ ID NO: 1532378 - RNA, 19 nt, Artificial Sequence
  Description of Artificial Sequence: Synthetic oligonucleotide
  Sense strand starting at position 153 of SEQ ID NO: 1245051
ucauuagaucuuuggagca

SEQ ID NO: 1532379 - RNA, 19 nt, Artificial Sequence
  Description of Artificial Sequence: Synthetic oligonucleotide
  Antisense strand to SEQ ID NO: 1532378
ugcuccaaagaucuaauga

SEQ ID NO: 1532380 - RNA, 19 nt, Artificial Sequence
  Description of Artificial Sequence: Synthetic oligonucleotide
  Sense strand starting at position 178 of SEQ ID NO: 1245051
gggugguuugacgauauug

SEQ ID NO: 1532381 - RNA, 19 nt, Artificial Sequence
  Description of Artificial Sequence: Synthetic oligonucleotide
  Antisense strand to SEQ ID NO: 1532380
caauaucgucaaaccaccc

SEQ ID NO: 1532382 - RNA, 19 nt, Artificial Sequence
  Description of Artificial Sequence: Synthetic oligonucleotide
  Sense strand starting at position 180 of SEQ ID NO: 1245051
gugguuugacgauauugau

SEQ ID NO: 1532383 - RNA, 19 nt, Artificial Sequence
  Description of Artificial Sequence: Synthetic oligonucleotide
  Antisense strand to SEQ ID NO: 1532382
aucaauaucgucaaaccac

SEQ ID NO: 1532384 - RNA, 19 nt, Artificial Sequence
  Description of Artificial Sequence: Synthetic oligonucleotide
  Sense strand starting at position 207 of SEQ ID NO: 1245051
cucauucuggcaggaaaug

SEQ ID NO: 1532385 - RNA, 19 nt, Artificial Sequence
  Description of Artificial Sequence: Synthetic oligonucleotide
  Antisense strand to SEQ ID NO: 1532384
cauuuccugccagaaugag

SEQ ID NO: 1532386 - RNA, 19 nt, Artificial Sequence
  Description of Artificial Sequence: Synthetic oligonucleotide
  Sense strand starting at position 303 of SEQ ID NO: 1245051
gccugugauagucaugaga

SEQ ID NO: 1532387 - RNA, 19 nt, Artificial Sequence
  Description of Artificial Sequence: Synthetic oligonucleotide
  Antisense strand to SEQ ID NO: 1532386
ucucaugacuaucacaggc

SEQ ID NO: 1532388 - RNA, 19 nt, Artificial Sequence
  Description of Artificial Sequence: Synthetic oligonucleotide
  Sense strand starting at position 335 of SEQ ID NO: 1245051
gagaguauuuaccagagaa

SEQ ID NO: 1532389 - RNA, 19 nt, Artificial Sequence
  Description of Artificial Sequence: Synthetic oligonucleotide
  Antisense strand to SEQ ID NO: 1532388
uucucugguaaauacucuc

SEQ ID NO: 1532390 - RNA, 19 nt, Artificial Sequence
  Description of Artificial Sequence: Synthetic oligonucleotide
  Sense strand starting at position 467 of SEQ ID NO: 1245051
cacugaauguucccgggaa

SEQ ID NO: 1532391 - RNA, 19 nt, Artificial Sequence
  Description of Artificial Sequence: Synthetic oligonucleotide
  Antisense strand to SEQ ID NO: 1532390
uucccgggaacauucagug

SEQ ID NO: 1532392 - RNA, 19 nt, Artificial Sequence
  Description of Artificial Sequence: Synthetic oligonucleotide
  Sense strand starting at position 471 of SEQ ID NO: 1245051
gaauguucccgggaaccug

SEQ ID NO: 1532393 - RNA, 19 nt, Artificial Sequence
  Description of Artificial Sequence: Synthetic oligonucleotide
  Antisense strand to SEQ ID NO: 1532392
cagguucccgggaacauuc

SEQ ID NO: 1532394 - RNA, 19 nt, Artificial Sequence
  Description of Artificial Sequence: Synthetic oligonucleotide
  Sense strand starting at position 507 of SEQ ID NO: 1245051
gaggaaaugcagugccaaa

SEQ ID NO: 1532395 - RNA, 19 nt, Artificial Sequence
  Description of Artificial Sequence: Synthetic oligonucleotide
  Antisense strand to SEQ ID NO: 1532394
uuuggcacugcauuuccuc

SEQ ID NO: 1532396 - RNA, 19 nt, Artificial Sequence
  Description of Artificial Sequence: Synthetic oligonucleotide
  Sense strand starting at position 579 of SEQ ID NO: 1245051
ugcuuuagagguggagaga

SEQ ID NO: 1532397 - RNA, 19 nt, Artificial Sequence
  Description of Artificial Sequence: Synthetic oligonucleotide
  Antisense strand to SEQ ID NO: 1532396
ucucuccaccucuaaagca

SEQ ID NO: 1532398 - RNA, 19 nt, Artificial Sequence
  Description of Artificial Sequence: Synthetic oligonucleotide
  Sense strand starting at position 879 of SEQ ID NO: 1245051
uuaggagagucacuucuga

SEQ ID NO: 1532399 - RNA, 19 nt, Artificial Sequence
  Description of Artificial Sequence: Synthetic oligonucleotide
  Antisense strand to SEQ ID NO: 1532398
ucagaagugacucuccuaa

SEQ ID NO: 1532400 - RNA, 19 nt, Artificial Sequence
  Description of Artificial Sequence: Synthetic oligonucleotide
  Sense strand starting at position 963 of SEQ ID NO: 1245051
ucguuuguggucaggguua

SEQ ID NO: 1532401 - RNA, 19 nt, Artificial Sequence
  Description of Artificial Sequence: Synthetic oligonucleotide
  Antisense strand to SEQ ID NO: 1532400
uaacccugaccacaaacga

SEQ ID NO: 1532402 - RNA, 19 nt, Artificial Sequence
  Description of Artificial Sequence: Synthetic oligonucleotide
  Sense strand starting at position 1123 of SEQ ID NO: 1245051
cugccauuuccggaguucu

SEQ ID NO: 1532403 - RNA, 19 nt, Artificial Sequence
  Description of Artificial Sequence: Synthetic oligonucleotide
  Antisense strand to SEQ ID NO: 1532402
agaacuccggaaauggcag

SEQ ID NO: 1532404 - RNA, 19 nt, Artificial Sequence
  Description of Artificial Sequence: Synthetic oligonucleotide
  Sense strand starting at position 1318 of SEQ ID NO: 1245051
aucuucuuccaaggcagau

SEQ ID NO: 1532405 - RNA, 19 nt, Artificial Sequence
  Description of Artificial Sequence: Synthetic oligonucleotide
  Antisense strand to SEQ ID NO: 1532404
aucugccuuggaagaagau

SEQ ID NO: 1532406 - RNA, 19 nt, Artificial Sequence
  Description of Artificial Sequence: Synthetic oligonucleotide
  Sense strand starting at position 1523 of SEQ ID NO: 1245051
gcggguuuguugauguacu

SEQ ID NO: 1532407 - RNA, 19 nt, Artificial Sequence
  Description of Artificial Sequence: Synthetic oligonucleotide
  Antisense strand to SEQ ID NO: 1532406
aguacaucaacaaacccgc

SEQ ID NO: 1532408 - RNA, 19 nt, Artificial Sequence
  Description of Artificial Sequence: Synthetic oligonucleotide
  Sense strand starting at position 1600 of SEQ ID NO: 1245051
agcgucugggugaguaauu

SEQ ID NO: 1532409 - RNA, 19 nt, Artificial Sequence
  Description of Artificial Sequence: Synthetic oligonucleotide
  Antisense strand to SEQ ID NO: 1532408
aauuacucacccagacgcu

SEQ ID NO: 1532410 - RNA, 19 nt, Artificial Sequence
  Description of Artificial Sequence: Synthetic oligonucleotide
  Sense strand starting at position 1807 of SEQ ID NO: 1245051
uccagauucugccuaagaa

SEQ ID NO: 1532411 - RNA, 19 nt, Artificial Sequence
  Description of Artificial Sequence: Synthetic oligonucleotide
  Antisense strand to SEQ ID NO: 1532410
uucuuaggcagaaucugga

SEQ ID NO: 1532412 - RNA, 19 nt, Artificial Sequence
  Description of Artificial Sequence: Synthetic oligonucleotide
  Sense strand starting at position 1985 of SEQ ID NO: 1245051
cugugugcugggagucaga

SEQ ID NO: 1532413 - RNA, 19 nt, Artificial Sequence
  Description of Artificial Sequence: Synthetic oligonucleotide
  Antisense strand to SEQ ID NO: 1532412
ucugacucccagcacacag

SEQ ID NO: 1532414 - RNA, 19 nt, Artificial Sequence
  Description of Artificial Sequence: Synthetic oligonucleotide
  Sense strand starting at position 1988 of SEQ ID NO: 1245051
ugugcugggagucagauua

SEQ ID NO: 1532415 - RNA, 19 nt, Artificial Sequence
  Description of Artificial Sequence: Synthetic oligonucleotide
  Antisense strand to SEQ ID NO: 1532414
uaaucugacucccagcaca

SEQ ID NO: 1532416 - RNA, 19 nt, Artificial Sequence
  Description of Artificial Sequence: Synthetic oligonucleotide
  Sense strand starting at position 2045 of SEQ ID NO: 1245051
uggaaagauucugcaccau

SEQ ID NO: 1532417 - RNA, 19 nt, Artificial Sequence
  Description of Artificial Sequence: Synthetic oligonucleotide
  Antisense strand to SEQ ID NO: 1532416
auggugcagaaucuuucca

SEQ ID NO: 1532418 - RNA, 19 nt, Artificial Sequence
  Description of Artificial Sequence: Synthetic oligonucleotide
  Sense strand starting at position 2249 of SEQ ID NO: 1245051
gaauuugucuuguuugguu

SEQ ID NO: 1532419 - RNA, 19 nt, Artificial Sequence
  Description of Artificial Sequence: Synthetic oligonucleotide
  Antisense strand to SEQ ID NO: 1532418
aaccaaacaagacaaauuc

SEQ ID NO: 1532420 - RNA, 19 nt, Artificial Sequence
  Description of Artificial Sequence: Synthetic oligonucleotide
  Sense strand starting at position 2251 of SEQ ID NO: 1245051
auuugucuuguuugguuau

SEQ ID NO: 1532421 - RNA, 19 nt, Artificial Sequence
  Description of Artificial Sequence: Synthetic oligonucleotide
  Antisense strand to SEQ ID NO: 1532420
auaaccaaacaagacaaau

SEQ ID NO: 1532422 - RNA, 19 nt, Artificial Sequence
  Description of Artificial Sequence: Synthetic oligonucleotide
  Sense strand starting at position 2277 of SEQ ID NO: 1245051
aguugaaauugggcaauua

SEQ ID NO: 1532423 - RNA, 19 nt, Artificial Sequence
  Description of Artificial Sequence: Synthetic oligonucleotide
  Antisense strand to SEQ ID NO: 1532422
uaauugcccaauuucaacu

SEQ ID NO: 1532424 - RNA, 19 nt, Artificial Sequence
  Description of Artificial Sequence: Synthetic oligonucleotide
  Sense strand starting at position 2278 of SEQ ID NO: 1245051
guugaaauugggcaauuau

SEQ ID NO: 1532425 - RNA, 19 nt, Artificial Sequence
  Description of Artificial Sequence: Synthetic oligonucleotide
  Antisense strand to SEQ ID NO: 1532424
auaauugcccaauuucaac

SEQ ID NO: 1532426 - RNA, 19 nt, Artificial Sequence
  Description of Artificial Sequence: Synthetic oligonucleotide
  Sense strand starting at position 2310 of SEQ ID NO: 1245051
uguauaauccagcaguuaa

SEQ ID NO: 1532427 - RNA, 19 nt, Artificial Sequence
  Description of Artificial Sequence: Synthetic oligonucleotide
  Antisense strand to SEQ ID NO: 1532426
uuaacugcuggauuauaca

SEQ ID NO: 1532428 - RNA, 19 nt, Artificial Sequence
  Description of Artificial Sequence: Synthetic oligonucleotide
  Sense strand starting at position 2371 of SEQ ID NO: 1245051
aaugaauucuguuugaagu

SEQ ID NO: 1532429 - RNA, 19 nt, Artificial Sequence
  Description of Artificial Sequence: Synthetic oligonucleotide
  Antisense strand to SEQ ID NO: 1532428
acuucaaacagaauucauu

SEQ ID NO: 1532430 - RNA, 19 nt, Artificial Sequence
  Description of Artificial Sequence: Synthetic oligonucleotide
  Sense strand starting at position 2454 of SEQ ID NO: 1245051
agcacugauuuggacaaua

SEQ ID NO: 1532431 - RNA, 19 nt, Artificial Sequence
  Description of Artificial Sequence: Synthetic oligonucleotide
  Antisense strand to SEQ ID NO: 1532430
uauuguccaaaucagugcu

SEQ ID NO: 1532432 - RNA, 19 nt, Artificial Sequence
  Description of Artificial Sequence: Synthetic oligonucleotide
  Sense strand starting at position 2719 of SEQ ID NO: 1245051
ucaagauugcgacagcaga

SEQ ID NO: 1532433 - RNA, 19 nt, Artificial Sequence
  Description of Artificial Sequence: Synthetic oligonucleotide
  Antisense strand to SEQ ID NO: 1532432
ucugcugucgcaaucuuga

SEQ ID NO: 1532434 - RNA, 19 nt, Artificial Sequence
  Description of Artificial Sequence: Synthetic oligonucleotide
  Sense strand starting at position 2906 of SEQ ID NO: 1245051
ggugcaugggauuggaaua

SEQ ID NO: 1532435 - RNA, 19 nt, Artificial Sequence
  Description of Artificial Sequence: Synthetic oligonucleotide
  Antisense strand to SEQ ID NO: 1532434
uauuccaaucccaugcacc

SEQ ID NO: 1532436 - RNA, 19 nt, Artificial Sequence
  Description of Artificial Sequence: Synthetic oligonucleotide
  Sense strand starting at position 2940 of SEQ ID NO: 1245051
uuaugacacucugucauca

SEQ ID NO: 1532437 - RNA, 19 nt, Artificial Sequence
  Description of Artificial Sequence: Synthetic oligonucleotide
  Antisense strand to SEQ ID NO: 1532436
ugaugacagagugucauaa

SEQ ID NO: 1532438 - RNA, 19 nt, Artificial Sequence
  Description of Artificial Sequence: Synthetic oligonucleotide
  Sense strand starting at position 2952 of SEQ ID NO: 1245051
gucaucacucgugcaugua

SEQ ID NO: 1532439 - RNA, 19 nt, Artificial Sequence
  Description of Artificial Sequence: Synthetic oligonucleotide
  Antisense strand to SEQ ID NO: 1532438
uacaugcacgagugaugac

SEQ ID NO: 1532440 - RNA, 19 nt, Artificial Sequence
  Description of Artificial Sequence: Synthetic oligonucleotide
  Sense strand starting at position 3158 of SEQ ID NO: 1245051
agaaauacaugagagaaga

SEQ ID NO: 1532441 - RNA, 19 nt, Artificial Sequence
  Description of Artificial Sequence: Synthetic oligonucleotide
  Antisense strand to SEQ ID NO: 1532440
ucuucucucauguauuucu

SEQ ID NO: 1532442 - RNA, 19 nt, Artificial Sequence
  Description of Artificial Sequence: Synthetic oligonucleotide
  Sense strand starting at position 3231 of SEQ ID NO: 1245051
gcguacuugagacauggga

SEQ ID NO: 1532443 - RNA, 19 nt, Artificial Sequence
  Description of Artificial Sequence: Synthetic oligonucleotide
  Antisense strand to SEQ ID NO: 1532442
ucccaugucucaaguacgc

SEQ ID NO: 1532444 - RNA, 19 nt, Artificial Sequence
  Description of Artificial Sequence: Synthetic oligonucleotide
  Sense strand starting at position 3364 of SEQ ID NO: 1245051
uuaagaauaugguugcaca

SEQ ID NO: 1532445 - RNA, 19 nt, Artificial Sequence
  Description of Artificial Sequence: Synthetic oligonucleotide
  Antisense strand to SEQ ID NO: 1532444
ugugcaaccauauucuuaa

SEQ ID NO: 1532446 - RNA, 19 nt, Artificial Sequence
  Description of Artificial Sequence: Synthetic oligonucleotide
  Sense strand starting at position 3383 of SEQ ID NO: 1245051
cuuauuauuguacaucagu

SEQ ID NO: 1532447 - RNA, 19 nt, Artificial Sequence
  Description of Artificial Sequence: Synthetic oligonucleotide
  Antisense strand to SEQ ID NO: 1532446
acugauguacaauaauaag

SEQ ID NO: 1532448 - RNA, 19 nt, Artificial Sequence
  Description of Artificial Sequence: Synthetic oligonucleotide
  Sense strand starting at position 3413 of SEQ ID NO: 1245051
uuaauaugcucccugaaag

SEQ ID NO: 1532449 - RNA, 19 nt, Artificial Sequence
  Description of Artificial Sequence: Synthetic oligonucleotide
  Antisense strand to SEQ ID NO: 1532448
cuuucagggagcauauuaa

SEQ ID NO: 1532450 - RNA, 19 nt, Artificial Sequence
  Description of Artificial Sequence: Synthetic oligonucleotide
  Sense strand starting at position 3608 of SEQ ID NO: 1245051
gcuaaaugucauuacucug

SEQ ID NO: 1532451 - RNA, 19 nt, Artificial Sequence
  Description of Artificial Sequence: Synthetic oligonucleotide
  Antisense strand to SEQ ID NO: 1532450
cagaguaaugacauuuagc

SEQ ID NO: 1532452 - RNA, 19 nt, Artificial Sequence
  Description of Artificial Sequence: Synthetic oligonucleotide
  Sense strand starting at position 3957 of SEQ ID NO: 1245051
agggaugacuguucccauc

SEQ ID NO: 1532453 - RNA, 19 nt, Artificial Sequence
  Description of Artificial Sequence: Synthetic oligonucleotide
  Antisense strand to SEQ ID NO: 1532452
gaugggaacagucaucccu

SEQ ID NO: 1532454 - RNA, 19 nt, Artificial Sequence
  Description of Artificial Sequence: Synthetic oligonucleotide
  Sense strand starting at position 3959 of SEQ ID NO: 1245051
ggaugacuguucccaucaa

SEQ ID NO: 1532455 - RNA, 19 nt, Artificial Sequence
  Description of Artificial Sequence: Synthetic oligonucleotide
  Antisense strand to SEQ ID NO: 1532454
uugaugggaacagucaucc

SEQ ID NO: 1532456 - RNA, 19 nt, Artificial Sequence
  Description of Artificial Sequence: Synthetic oligonucleotide
  Sense strand starting at position 28 of SEQ ID NO: 1245052
gauguaauaaagugagggu

SEQ ID NO: 1532457 - RNA, 19 nt, Artificial Sequence
  Description of Artificial Sequence: Synthetic oligonucleotide
  Antisense strand to SEQ ID NO: 1532456
acccucacuuuauuacauc

SEQ ID NO: 1532458 - RNA, 19 nt, Artificial Sequence
  Description of Artificial Sequence: Synthetic oligonucleotide
  Sense strand starting at position 44 of SEQ ID NO: 1245052
ggucaagguuggagaaaug

SEQ ID NO: 1532459 - RNA, 19 nt, Artificial Sequence
  Description of Artificial Sequence: Synthetic oligonucleotide
  Antisense strand to SEQ ID NO: 1532458
cauuucuccaaccuugacc

SEQ ID NO: 1532460 - RNA, 19 nt, Artificial Sequence
  Description of Artificial Sequence: Synthetic oligonucleotide
  Sense strand starting at position 107 of SEQ ID NO: 1245052
acagguaauuguccucaac

SEQ ID NO: 1532461 - RNA, 19 nt, Artificial Sequence
  Description of Artificial Sequence: Synthetic oligonucleotide
  Antisense strand to SEQ ID NO: 1532460
guugaggacaauuaccugu

SEQ ID NO: 1532462 - RNA, 19 nt, Artificial Sequence
  Description of Artificial Sequence: Synthetic oligonucleotide
  Sense strand starting at position 118 of SEQ ID NO: 1245052
uccucaacuguaggaagau

SEQ ID NO: 1532463 - RNA, 19 nt, Artificial Sequence
  Description of Artificial Sequence: Synthetic oligonucleotide
  Antisense strand to SEQ ID NO: 1532462
aucuuccuacaguugagga

SEQ ID NO: 1532464 - RNA, 19 nt, Artificial Sequence
  Description of Artificial Sequence: Synthetic oligonucleotide
  Sense strand starting at position 183 of SEQ ID NO: 1245052
augauaacugcagguccaa

SEQ ID NO: 1532465 - RNA, 19 nt, Artificial Sequence
  Description of Artificial Sequence: Synthetic oligonucleotide
  Antisense strand to SEQ ID NO: 1532464
uuggaccugcaguuaucau

SEQ ID NO: 1532466 - RNA, 19 nt, Artificial Sequence
  Description of Artificial Sequence: Synthetic oligonucleotide
  Sense strand starting at position 314 of SEQ ID NO: 1245052
ugcugucauuugucacuua

SEQ ID NO: 1532467 - RNA, 19 nt, Artificial Sequence
  Description of Artificial Sequence: Synthetic oligonucleotide
  Antisense strand to SEQ ID NO: 1532466
uaagugacaaaugacagca

SEQ ID NO: 1532468 - RNA, 19 nt, Artificial Sequence
  Description of Artificial Sequence: Synthetic oligonucleotide
  Sense strand starting at position 407 of SEQ ID NO: 1245052
cagucauggcuggauacua

SEQ ID NO: 1532469 - RNA, 19 nt, Artificial Sequence
  Description of Artificial Sequence: Synthetic oligonucleotide
  Antisense strand to SEQ ID NO: 1532468
uaguauccagccaugacug

SEQ ID NO: 1532470 - RNA, 19 nt, Artificial Sequence
  Description of Artificial Sequence: Synthetic oligonucleotide
  Sense strand starting at position 459 of SEQ ID NO: 1245052
gccagcuagagugaggaua

SEQ ID NO: 1532471 - RNA, 19 nt, Artificial Sequence
  Description of Artificial Sequence: Synthetic oligonucleotide
  Antisense strand to SEQ ID NO: 1532470
uauccucacucuagcuggc

SEQ ID NO: 1532472 - RNA, 19 nt, Artificial Sequence
  Description of Artificial Sequence: Synthetic oligonucleotide
  Sense strand starting at position 657 of SEQ ID NO: 1245052
caugaccagcgguaagauu

SEQ ID NO: 1532473 - RNA, 19 nt, Artificial Sequence
  Description of Artificial Sequence: Synthetic oligonucleotide
  Antisense strand to SEQ ID NO: 1532472
aaucuuaccgcuggucaug

SEQ ID NO: 1532474 - RNA, 19 nt, Artificial Sequence
  Description of Artificial Sequence: Synthetic oligonucleotide
  Sense strand starting at position 728 of SEQ ID NO: 1245052
uuucgaugacaauguauua

SEQ ID NO: 1532475 - RNA, 19 nt, Artificial Sequence
  Description of Artificial Sequence: Synthetic oligonucleotide
  Antisense strand to SEQ ID NO: 1532474
uaauacauugucaucgaaa

SEQ ID NO: 1532476 - RNA, 19 nt, Artificial Sequence
  Description of Artificial Sequence: Synthetic oligonucleotide
  Sense strand starting at position 871 of SEQ ID NO: 1245052
ggucaucacagaugacugu

SEQ ID NO: 1532477 - RNA, 19 nt, Artificial Sequence
  Description of Artificial Sequence: Synthetic oligonucleotide
  Antisense strand to SEQ ID NO: 1532476
acagucaucugugaugacc

SEQ ID NO: 1532478 - RNA, 19 nt, Artificial Sequence
  Description of Artificial Sequence: Synthetic oligonucleotide
  Sense strand starting at position 875 of SEQ ID NO: 1245052
aucacagaugacugugauu

SEQ ID NO: 1532479 - RNA, 19 nt, Artificial Sequence
  Description of Artificial Sequence: Synthetic oligonucleotide
  Antisense strand to SEQ ID NO: 1532478
aaucacagucaucugugau

SEQ ID NO: 1532480 - RNA, 19 nt, Artificial Sequence
  Description of Artificial Sequence: Synthetic oligonucleotide
  Sense strand starting at position 877 of SEQ ID NO: 1245052
cacagaugacugugauuac

SEQ ID NO: 1532481 - RNA, 19 nt, Artificial Sequence
  Description of Artificial Sequence: Synthetic oligonucleotide
  Antisense strand to SEQ ID NO: 1532480
guaaucacagucaucugug

SEQ ID NO: 1532482 - RNA, 19 nt, Artificial Sequence
  Description of Artificial Sequence: Synthetic oligonucleotide
  Sense strand starting at position 880 of SEQ ID NO: 1245052
agaugacugugauuacucu

SEQ ID NO: 1532483 - RNA, 19 nt, Artificial Sequence
  Description of Artificial Sequence: Synthetic oligonucleotide
  Antisense strand to SEQ ID NO: 1532482
agaguaaucacagucaucu

SEQ ID NO: 1532484 - RNA, 19 nt, Artificial Sequence
  Description of Artificial Sequence: Synthetic oligonucleotide
  Sense strand starting at position 881 of SEQ ID NO: 1245052
gaugacugugauuacucuu

SEQ ID NO: 1532485 - RNA, 19 nt, Artificial Sequence
  Description of Artificial Sequence: Synthetic oligonucleotide
  Antisense strand to SEQ ID NO: 1532484
aagaguaaucacagucauc

SEQ ID NO: 1532486 - RNA, 19 nt, Artificial Sequence
  Description of Artificial Sequence: Synthetic oligonucleotide
  Sense strand starting at position 1071 of SEQ ID NO: 1245052
auuuaagccauguguguuu

SEQ ID NO: 1532487 - RNA, 19 nt, Artificial Sequence
  Description of Artificial Sequence: Synthetic oligonucleotide
  Antisense strand to SEQ ID NO: 1532486
aaacacacauggcuuaaau

SEQ ID NO: 1532488 - RNA, 19 nt, Artificial Sequence
  Description of Artificial Sequence: Synthetic oligonucleotide
  Sense strand starting at position 1176 of SEQ ID NO: 1245052
agcauaacccuuuauguag

SEQ ID NO: 1532489 - RNA, 19 nt, Artificial Sequence
  Description of Artificial Sequence: Synthetic oligonucleotide
  Antisense strand to SEQ ID NO: 1532488
cuacauaaaggguuaugcu

SEQ ID NO: 1532490 - RNA, 19 nt, Artificial Sequence
  Description of Artificial Sequence: Synthetic oligonucleotide
  Sense strand starting at position 1182 of SEQ ID NO: 1245052
acccuuuauguagaucauu

SEQ ID NO: 1532491 - RNA, 19 nt, Artificial Sequence
  Description of Artificial Sequence: Synthetic oligonucleotide
  Antisense strand to SEQ ID NO: 1532490
aaugaucuacauaaagggu

SEQ ID NO: 1532492 - RNA, 19 nt, Artificial Sequence
  Description of Artificial Sequence: Synthetic oligonucleotide
  Sense strand starting at position 1185 of SEQ ID NO: 1245052
cuuuauguagaucauugua

SEQ ID NO: 1532493 - RNA, 19 nt, Artificial Sequence
  Description of Artificial Sequence: Synthetic oligonucleotide
  Antisense strand to SEQ ID NO: 1532492
uacaaugaucuacauaaag

SEQ ID NO: 1532494 - RNA, 19 nt, Artificial Sequence
  Description of Artificial Sequence: Synthetic oligonucleotide
  Sense strand starting at position 1187 of SEQ ID NO: 1245052
uuauguagaucauuguaca

SEQ ID NO: 1532495 - RNA, 19 nt, Artificial Sequence
  Description of Artificial Sequence: Synthetic oligonucleotide
  Antisense strand to SEQ ID NO: 1532494
uguacaaugaucuacauaa

SEQ ID NO: 1532496 - RNA, 19 nt, Artificial Sequence
  Description of Artificial Sequence: Synthetic oligonucleotide
  Sense strand starting at position 1237 of SEQ ID NO: 1245052
ucugcuagugaacaaauaa

SEQ ID NO: 1532497 - RNA, 19 nt, Artificial Sequence
  Description of Artificial Sequence: Synthetic oligonucleotide
  Antisense strand to SEQ ID NO: 1532496
uuauuuguucacuagcaga

SEQ ID NO: 1532498 - RNA, 19 nt, Artificial Sequence
  Description of Artificial Sequence: Synthetic oligonucleotide
  Sense strand starting at position 1514 of SEQ ID NO: 1245052
agcaaagaguuugcaagaa

SEQ ID NO: 1532499 - RNA, 19 nt, Artificial Sequence
  Description of Artificial Sequence: Synthetic oligonucleotide
  Antisense strand to SEQ ID NO: 1532498
uucuugcaaacucuuugcu

SEQ ID NO: 1532500 - RNA, 19 nt, Artificial Sequence
  Description of Artificial Sequence: Synthetic oligonucleotide
  Sense strand starting at position 1518 of SEQ ID NO: 1245052
aagaguuugcaagaagcuu

SEQ ID NO: 1532501 - RNA, 19 nt, Artificial Sequence
  Description of Artificial Sequence: Synthetic oligonucleotide
  Antisense strand to SEQ ID NO: 1532500
aagcuucuugcaaacucuu

SEQ ID NO: 1532502 - RNA, 19 nt, Artificial Sequence
  Description of Artificial Sequence: Synthetic oligonucleotide
  Sense strand starting at position 1619 of SEQ ID NO: 1245052
gaggauuccugcuccaaug

SEQ ID NO: 1532503 - RNA, 19 nt, Artificial Sequence
  Description of Artificial Sequence: Synthetic oligonucleotide
  Antisense strand to SEQ ID NO: 1532502
cauuggagcaggaauccuc

SEQ ID NO: 1532504 - RNA, 19 nt, Artificial Sequence
  Description of Artificial Sequence: Synthetic oligonucleotide
  Sense strand starting at position 1621 of SEQ ID NO: 1245052
ggauuccugcuccaaugau

SEQ ID NO: 1532505 - RNA, 19 nt, Artificial Sequence
  Description of Artificial Sequence: Synthetic oligonucleotide
  Antisense strand to SEQ ID NO: 1532504
aucauuggagcaggaaucc

SEQ ID NO: 1532506 - RNA, 19 nt, Artificial Sequence
  Description of Artificial Sequence: Synthetic oligonucleotide
  Sense strand starting at position 2016 of SEQ ID NO: 1245052
ccacuacacccagguuuau

SEQ ID NO: 1532507 - RNA, 19 nt, Artificial Sequence
  Description of Artificial Sequence: Synthetic oligonucleotide
  Antisense strand to SEQ ID NO: 1532506
auaaaccuggguguagugg

SEQ ID NO: 1532508 - RNA, 19 nt, Artificial Sequence
  Description of Artificial Sequence: Synthetic oligonucleotide
  Sense strand starting at position 2146 of SEQ ID NO: 1245052
uagucaagagacuguuauu

SEQ ID NO: 1532509 - RNA, 19 nt, Artificial Sequence
  Description of Artificial Sequence: Synthetic oligonucleotide
  Antisense strand to SEQ ID NO: 1532508
aauaacagucucuugacua

SEQ ID NO: 1532510 - RNA, 19 nt, Artificial Sequence
  Description of Artificial Sequence: Synthetic oligonucleotide
  Sense strand starting at position 2151 of SEQ ID NO: 1245052
aagagacuguuauucuagu

SEQ ID NO: 1532511 - RNA, 19 nt, Artificial Sequence
  Description of Artificial Sequence: Synthetic oligonucleotide
  Antisense strand to SEQ ID NO: 1532510
acuagaauaacagucucuu

SEQ ID NO: 1532512 - RNA, 19 nt, Artificial Sequence
  Description of Artificial Sequence: Synthetic oligonucleotide
  Sense strand starting at position 2292 of SEQ ID NO: 1245052
guacuuaauucccuuagag

SEQ ID NO: 1532513 - RNA, 19 nt, Artificial Sequence
  Description of Artificial Sequence: Synthetic oligonucleotide
  Antisense strand to SEQ ID NO: 1532512
cucuaagggaauuaaguac

SEQ ID NO: 1532514 - RNA, 19 nt, Artificial Sequence
  Description of Artificial Sequence: Synthetic oligonucleotide
  Sense strand starting at position 3175 of SEQ ID NO: 1245052
guuacaugggccuauagga

SEQ ID NO: 1532515 - RNA, 19 nt, Artificial Sequence
  Description of Artificial Sequence: Synthetic oligonucleotide
  Antisense strand to SEQ ID NO: 1532514
uccuauaggcccauguaac

SEQ ID NO: 1532516 - RNA, 19 nt, Artificial Sequence
  Description of Artificial Sequence: Synthetic oligonucleotide
  Sense strand starting at position 3294 of SEQ ID NO: 1245052
ucauuagaucuuuggagca

SEQ ID NO: 1532517 - RNA, 19 nt, Artificial Sequence
  Description of Artificial Sequence: Synthetic oligonucleotide
  Antisense strand to SEQ ID NO: 1532516
ugcuccaaagaucuaauga

SEQ ID NO: 1532518 - RNA, 19 nt, Artificial Sequence
  Description of Artificial Sequence: Synthetic oligonucleotide
  Sense strand starting at position 3319 of SEQ ID NO: 1245052
gggugguuugacgauauug

SEQ ID NO: 1532519 - RNA, 19 nt, Artificial Sequence
  Description of Artificial Sequence: Synthetic oligonucleotide
  Antisense strand to SEQ ID NO: 1532518
caauaucgucaaaccaccc

SEQ ID NO: 1532520 - RNA, 19 nt, Artificial Sequence
  Description of Artificial Sequence: Synthetic oligonucleotide
  Sense strand starting at position 3321 of SEQ ID NO: 1245052
gugguuugacgauauugau

SEQ ID NO: 1532521 - RNA, 19 nt, Artificial Sequence
  Description of Artificial Sequence: Synthetic oligonucleotide
  Antisense strand to SEQ ID NO: 1532520
aucaauaucgucaaaccac

SEQ ID NO: 1532522 - RNA, 19 nt, Artificial Sequence
  Description of Artificial Sequence: Synthetic oligonucleotide
  Sense strand starting at position 3348 of SEQ ID NO: 1245052
cucauucuggcaggaaaug

SEQ ID NO: 1532523 - RNA, 19 nt, Artificial Sequence
  Description of Artificial Sequence: Synthetic oligonucleotide
  Antisense strand to SEQ ID NO: 1532522
cauuuccugccagaaugag

SEQ ID NO: 1532524 - RNA, 19 nt, Artificial Sequence
  Description of Artificial Sequence: Synthetic oligonucleotide
  Sense strand starting at position 3444 of SEQ ID NO: 1245052
gccugugauagucaugaga

SEQ ID NO: 1532525 - RNA, 19 nt, Artificial Sequence
  Description of Artificial Sequence: Synthetic oligonucleotide
  Antisense strand to SEQ ID NO: 1532524
ucucaugacuaucacaggc

SEQ ID NO: 1532526 - RNA, 19 nt, Artificial Sequence
  Description of Artificial Sequence: Synthetic oligonucleotide
  Sense strand starting at position 3476 of SEQ ID NO: 1245052
gagaguauuuaccagagaa

SEQ ID NO: 1532527 - RNA, 19 nt, Artificial Sequence
  Description of Artificial Sequence: Synthetic oligonucleotide
  Antisense strand to SEQ ID NO: 1532526
uucucugguaaauacucuc

SEQ ID NO: 1532528 - RNA, 19 nt, Artificial Sequence
  Description of Artificial Sequence: Synthetic oligonucleotide
  Sense strand starting at position 3608 of SEQ ID NO: 1245052
cacugaauguucccgggaa

SEQ ID NO: 1532529 - RNA, 19 nt, Artificial Sequence
  Description of Artificial Sequence: Synthetic oligonucleotide
  Antisense strand to SEQ ID NO: 1532528
uucccgggaacauucagug

SEQ ID NO: 1532530 - RNA, 19 nt, Artificial Sequence
  Description of Artificial Sequence: Synthetic oligonucleotide
  Sense strand starting at position 3612 of SEQ ID NO: 1245052
gaauguucccgggaaccug

SEQ ID NO: 1532531 - RNA, 19 nt, Artificial Sequence
  Description of Artificial Sequence: Synthetic oligonucleotide
  Antisense strand to SEQ ID NO: 1532530
cagguucccgggaacauuc

SEQ ID NO: 1532532 - RNA, 19 nt, Artificial Sequence
  Description of Artificial Sequence: Synthetic oligonucleotide
  Sense strand starting at position 3648 of SEQ ID NO: 1245052
gaggaaaugcagugccaaa

SEQ ID NO: 1532533 - RNA, 19 nt, Artificial Sequence
  Description of Artificial Sequence: Synthetic oligonucleotide
  Antisense strand to SEQ ID NO: 1532532
uuuggcacugcauuuccuc

SEQ ID NO: 1532534 - RNA, 19 nt, Artificial Sequence
  Description of Artificial Sequence: Synthetic oligonucleotide
  Sense strand starting at position 3720 of SEQ ID NO: 1245052
ugcuuuagagguggagaga

SEQ ID NO: 1532535 - RNA, 19 nt, Artificial Sequence
  Description of Artificial Sequence: Synthetic oligonucleotide
  Antisense strand to SEQ ID NO: 1532534
ucucuccaccucuaaagca

SEQ ID NO: 1532536 - RNA, 19 nt, Artificial Sequence
  Description of Artificial Sequence: Synthetic oligonucleotide
  Sense strand starting at position 328 of SEQ ID NO: 1245053
acgaguuuccuguaagagg

SEQ ID NO: 1532537 - RNA, 19 nt, Artificial Sequence
  Description of Artificial Sequence: Synthetic oligonucleotide
  Antisense strand to SEQ ID NO: 1532536
ccucuuacaggaaacucgu

SEQ ID NO: 1532538 - RNA, 19 nt, Artificial Sequence
  Description of Artificial Sequence: Synthetic oligonucleotide
  Sense strand starting at position 399 of SEQ ID NO: 1245053
agagguauccugugaaagg

SEQ ID NO: 1532539 - RNA, 19 nt, Artificial Sequence
  Description of Artificial Sequence: Synthetic oligonucleotide
  Antisense strand to SEQ ID NO: 1532538
ccuuucacaggauaccucu

SEQ ID NO: 1532540 - RNA, 19 nt, Artificial Sequence
  Description of Artificial Sequence: Synthetic oligonucleotide
  Sense strand starting at position 416 of SEQ ID NO: 1245053
ggcaaacaucagugaccaa

SEQ ID NO: 1532541 - RNA, 19 nt, Artificial Sequence
  Description of Artificial Sequence: Synthetic oligonucleotide
  Antisense strand to SEQ ID NO: 1532540
uuggucacugauguuugcc

SEQ ID NO: 1532542 - RNA, 19 nt, Artificial Sequence
  Description of Artificial Sequence: Synthetic oligonucleotide
  Sense strand starting at position 607 of SEQ ID NO: 1245053
ggaagaaagucgguauuca

SEQ ID NO: 1532543 - RNA, 19 nt, Artificial Sequence
  Description of Artificial Sequence: Synthetic oligonucleotide
  Antisense strand to SEQ ID NO: 1532542
ugaauaccgacuuucuucc

SEQ ID NO: 1532544 - RNA, 19 nt, Artificial Sequence
  Description of Artificial Sequence: Synthetic oligonucleotide
  Sense strand starting at position 741 of SEQ ID NO: 1245053
aacaguguccuguaacaga

SEQ ID NO: 1532545 - RNA, 19 nt, Artificial Sequence
  Description of Artificial Sequence: Synthetic oligonucleotide
  Antisense strand to SEQ ID NO: 1532544
ucuguuacaggacacuguu

SEQ ID NO: 1532546 - RNA, 19 nt, Artificial Sequence
  Description of Artificial Sequence: Synthetic oligonucleotide
  Sense strand starting at position 777 of SEQ ID NO: 1245053
guuucugggaacuaugcua

SEQ ID NO: 1532547 - RNA, 19 nt, Artificial Sequence
  Description of Artificial Sequence: Synthetic oligonucleotide
  Antisense strand to SEQ ID NO: 1532546
uagcauaguucccagaaac

SEQ ID NO: 1532548 - RNA, 19 nt, Artificial Sequence
  Description of Artificial Sequence: Synthetic oligonucleotide
  Sense strand starting at position 878 of SEQ ID NO: 1245053
cuggauucugcuuacauua

SEQ ID NO: 1532549 - RNA, 19 nt, Artificial Sequence
  Description of Artificial Sequence: Synthetic oligonucleotide
  Antisense strand to SEQ ID NO: 1532548
uaauguaagcagaauccag

SEQ ID NO: 1532550 - RNA, 19 nt, Artificial Sequence
  Description of Artificial Sequence: Synthetic oligonucleotide
  Sense strand starting at position 1080 of SEQ ID NO: 1245053
agaguuaugacauggagcu

SEQ ID NO: 1532551 - RNA, 19 nt, Artificial Sequence
  Description of Artificial Sequence: Synthetic oligonucleotide
  Antisense strand to SEQ ID NO: 1532550
agcuccaugucauaacucu

SEQ ID NO: 1532552 - RNA, 19 nt, Artificial Sequence
  Description of Artificial Sequence: Synthetic oligonucleotide
  Sense strand starting at position 1233 of SEQ ID NO: 1245053
gaaagaguacuugguagga

SEQ ID NO: 1532553 - RNA, 19 nt, Artificial Sequence
  Description of Artificial Sequence: Synthetic oligonucleotide
  Antisense strand to SEQ ID NO: 1532552
uccuaccaaguacucuuuc

SEQ ID NO: 1532554 - RNA, 19 nt, Artificial Sequence
  Description of Artificial Sequence: Synthetic oligonucleotide
  Sense strand starting at position 1270 of SEQ ID NO: 1245053
agaggugaggauggucuaa

SEQ ID NO: 1532555 - RNA, 19 nt, Artificial Sequence
  Description of Artificial Sequence: Synthetic oligonucleotide
  Antisense strand to SEQ ID NO: 1532554
uuagaccauccucaccucu

SEQ ID NO: 1532556 - RNA, 19 nt, Artificial Sequence
  Description of Artificial Sequence: Synthetic oligonucleotide
  Sense strand starting at position 1282 of SEQ ID NO: 1245053
ggucuaaguccuuaaacug

SEQ ID NO: 1532557 - RNA, 19 nt, Artificial Sequence
  Description of Artificial Sequence: Synthetic oligonucleotide
  Antisense strand to SEQ ID NO: 1532556
caguuuaaggacuuagacc

SEQ ID NO: 1532558 - RNA, 19 nt, Artificial Sequence
  Description of Artificial Sequence: Synthetic oligonucleotide
  Sense strand starting at position 1305 of SEQ ID NO: 1245053
cuaaguaggauguauguuu

SEQ ID NO: 1532559 - RNA, 19 nt, Artificial Sequence
  Description of Artificial Sequence: Synthetic oligonucleotide
  Antisense strand to SEQ ID NO: 1532558
aaacauacauccuacuuag

SEQ ID NO: 1532560 - RNA, 19 nt, Artificial Sequence
  Description of Artificial Sequence: Synthetic oligonucleotide
  Sense strand starting at position 1331 of SEQ ID NO: 1245053
guaagaaauguucagggca

SEQ ID NO: 1532561 - RNA, 19 nt, Artificial Sequence
  Description of Artificial Sequence: Synthetic oligonucleotide
  Antisense strand to SEQ ID NO: 1532560
ugcccugaacauuucuuac

SEQ ID NO: 1532562 - RNA, 19 nt, Artificial Sequence
  Description of Artificial Sequence: Synthetic oligonucleotide
  Sense strand starting at position 1334 of SEQ ID NO: 1245053
agaaauguucagggcagau

SEQ ID NO: 1532563 - RNA, 19 nt, Artificial Sequence
  Description of Artificial Sequence: Synthetic oligonucleotide
  Antisense strand to SEQ ID NO: 1532562
aucugcccugaacauuucu

SEQ ID NO: 1532564 - RNA, 19 nt, Artificial Sequence
  Description of Artificial Sequence: Synthetic oligonucleotide
  Sense strand starting at position 1346 of SEQ ID NO: 1245053
ggcagauaccaguauuacu

SEQ ID NO: 1532565 - RNA, 19 nt, Artificial Sequence
  Description of Artificial Sequence: Synthetic oligonucleotide
  Antisense strand to SEQ ID NO: 1532564
aguaauacugguaucugcc

SEQ ID NO: 1532566 - RNA, 19 nt, Artificial Sequence
  Description of Artificial Sequence: Synthetic oligonucleotide
  Sense strand starting at position 1608 of SEQ ID NO: 1245053
ggaggcauucuugacaucu

SEQ ID NO: 1532567 - RNA, 19 nt, Artificial Sequence
  Description of Artificial Sequence: Synthetic oligonucleotide
  Antisense strand to SEQ ID NO: 1532566
agaugucaagaaugccucc

SEQ ID NO: 1532568 - RNA, 19 nt, Artificial Sequence
  Description of Artificial Sequence: Synthetic oligonucleotide
  Sense strand starting at position 1868 of SEQ ID NO: 1245053
auaauucuacagugugaaa

SEQ ID NO: 1532569 - RNA, 19 nt, Artificial Sequence
  Description of Artificial Sequence: Synthetic oligonucleotide
  Antisense strand to SEQ ID NO: 1532568
uuucacacuguagaauuau

SEQ ID NO: 1532570 - RNA, 19 nt, Artificial Sequence
  Description of Artificial Sequence: Synthetic oligonucleotide
  Sense strand starting at position 1991 of SEQ ID NO: 1245053
ucacaaggucuuuggacau

SEQ ID NO: 1532571 - RNA, 19 nt, Artificial Sequence
  Description of Artificial Sequence: Synthetic oligonucleotide
  Antisense strand to SEQ ID NO: 1532570
auguccaaagaccuuguga

SEQ ID NO: 1532572 - RNA, 19 nt, Artificial Sequence
  Description of Artificial Sequence: Synthetic oligonucleotide
  Sense strand starting at position 2228 of SEQ ID NO: 1245053
agauuaucaucuccuugag

SEQ ID NO: 1532573 - RNA, 19 nt, Artificial Sequence
  Description of Artificial Sequence: Synthetic oligonucleotide
  Antisense strand to SEQ ID NO: 1532572
cucaaggagaugauaaucu

SEQ ID NO: 1532574 - RNA, 19 nt, Artificial Sequence
  Description of Artificial Sequence: Synthetic oligonucleotide
  Sense strand starting at position 2230 of SEQ ID NO: 1245053
auuaucaucuccuugagag

SEQ ID NO: 1532575 - RNA, 19 nt, Artificial Sequence
  Description of Artificial Sequence: Synthetic oligonucleotide
  Antisense strand to SEQ ID NO: 1532574
cucucaaggagaugauaau

SEQ ID NO: 1532576 - RNA, 19 nt, Artificial Sequence
  Description of Artificial Sequence: Synthetic oligonucleotide
  Sense strand starting at position 2231 of SEQ ID NO: 1245053
uuaucaucuccuugagaga

SEQ ID NO: 1532577 - RNA, 19 nt, Artificial Sequence
  Description of Artificial Sequence: Synthetic oligonucleotide
  Antisense strand to SEQ ID NO: 1532576
ucucucaaggagaugauaa

SEQ ID NO: 1532578 - RNA, 19 nt, Artificial Sequence
  Description of Artificial Sequence: Synthetic oligonucleotide
  Sense strand starting at position 2294 of SEQ ID NO: 1245053
uccagagugcucuauuaga

SEQ ID NO: 1532579 - RNA, 19 nt, Artificial Sequence
  Description of Artificial Sequence: Synthetic oligonucleotide
  Antisense strand to SEQ ID NO: 1532578
ucuaauagagcacucugga

SEQ ID NO: 1532580 - RNA, 19 nt, Artificial Sequence
  Description of Artificial Sequence: Synthetic oligonucleotide
  Sense strand starting at position 2594 of SEQ ID NO: 1245053
aagaaauaacuugguguag

SEQ ID NO: 1532581 - RNA, 19 nt, Artificial Sequence
  Description of Artificial Sequence: Synthetic oligonucleotide
  Antisense strand to SEQ ID NO: 1532580
cuacaccaaguuauuucuu

SEQ ID NO: 1532582 - RNA, 19 nt, Artificial Sequence
  Description of Artificial Sequence: Synthetic oligonucleotide
  Sense strand starting at position 2595 of SEQ ID NO: 1245053
agaaauaacuugguguaga

SEQ ID NO: 1532583 - RNA, 19 nt, Artificial Sequence
  Description of Artificial Sequence: Synthetic oligonucleotide
  Antisense strand to SEQ ID NO: 1532582
ucuacaccaaguuauuucu

SEQ ID NO: 1532584 - RNA, 19 nt, Artificial Sequence
  Description of Artificial Sequence: Synthetic oligonucleotide
  Sense strand starting at position 2819 of SEQ ID NO: 1245053
aaagauguauaaccugagu

SEQ ID NO: 1532585 - RNA, 19 nt, Artificial Sequence
  Description of Artificial Sequence: Synthetic oligonucleotide
  Antisense strand to SEQ ID NO: 1532584
acucagguuauacaucuuu

SEQ ID NO: 1532586 - RNA, 19 nt, Artificial Sequence
  Description of Artificial Sequence: Synthetic oligonucleotide
  Sense strand starting at position 2822 of SEQ ID NO: 1245053
gauguauaaccugagucua

SEQ ID NO: 1532587 - RNA, 19 nt, Artificial Sequence
  Description of Artificial Sequence: Synthetic oligonucleotide
  Antisense strand to SEQ ID NO: 1532586
uagacucagguuauacauc

SEQ ID NO: 1532588 - RNA, 19 nt, Artificial Sequence
  Description of Artificial Sequence: Synthetic oligonucleotide
  Sense strand starting at position 2834 of SEQ ID NO: 1245053
gagucuaagucauugggaa

SEQ ID NO: 1532589 - RNA, 19 nt, Artificial Sequence
  Description of Artificial Sequence: Synthetic oligonucleotide
  Antisense strand to SEQ ID NO: 1532588
uucccaaugacuuagacuc

SEQ ID NO: 1532590 - RNA, 19 nt, Artificial Sequence
  Description of Artificial Sequence: Synthetic oligonucleotide
  Sense strand starting at position 2835 of SEQ ID NO: 1245053
agucuaagucauugggaaa

SEQ ID NO: 1532591 - RNA, 19 nt, Artificial Sequence
  Description of Artificial Sequence: Synthetic oligonucleotide
  Antisense strand to SEQ ID NO: 1532590
uuucccaaugacuuagacu

SEQ ID NO: 1532592 - RNA, 19 nt, Artificial Sequence
  Description of Artificial Sequence: Synthetic oligonucleotide
  Sense strand starting at position 2836 of SEQ ID NO: 1245053
gucuaagucauugggaaac

SEQ ID NO: 1532593 - RNA, 19 nt, Artificial Sequence
  Description of Artificial Sequence: Synthetic oligonucleotide
  Antisense strand to SEQ ID NO: 1532592
guuucccaaugacuuagac

SEQ ID NO: 1532594 - RNA, 19 nt, Artificial Sequence
  Description of Artificial Sequence: Synthetic oligonucleotide
  Sense strand starting at position 2869 of SEQ ID NO: 1245053
acuugucugauguagagga

SEQ ID NO: 1532595 - RNA, 19 nt, Artificial Sequence
  Description of Artificial Sequence: Synthetic oligonucleotide
  Antisense strand to SEQ ID NO: 1532594
uccucuacaucagacaagu

SEQ ID NO: 1532596 - RNA, 19 nt, Artificial Sequence
  Description of Artificial Sequence: Synthetic oligonucleotide
  Sense strand starting at position 2946 of SEQ ID NO: 1245053
cuaagaaacuguuccagac

SEQ ID NO: 1532597 - RNA, 19 nt, Artificial Sequence
  Description of Artificial Sequence: Synthetic oligonucleotide
  Antisense strand to SEQ ID NO: 1532596
gucuggaacaguuucuuag

SEQ ID NO: 1532598 - RNA, 19 nt, Artificial Sequence
  Description of Artificial Sequence: Synthetic oligonucleotide
  Sense strand starting at position 2950 of SEQ ID NO: 1245053
gaaacuguuccagacugua

SEQ ID NO: 1532599 - RNA, 19 nt, Artificial Sequence
  Description of Artificial Sequence: Synthetic oligonucleotide
  Antisense strand to SEQ ID NO: 1532598
uacagucuggaacaguuuc

SEQ ID NO: 1532600 - RNA, 19 nt, Artificial Sequence
  Description of Artificial Sequence: Synthetic oligonucleotide
  Sense strand starting at position 3150 of SEQ ID NO: 1245053
guauguugugauuauacag

SEQ ID NO: 1532601 - RNA, 19 nt, Artificial Sequence
  Description of Artificial Sequence: Synthetic oligonucleotide
  Antisense strand to SEQ ID NO: 1532600
cuguauaaucacaacauac

SEQ ID NO: 1532602 - RNA, 19 nt, Artificial Sequence
  Description of Artificial Sequence: Synthetic oligonucleotide
  Sense strand starting at position 3217 of SEQ ID NO: 1245053
accuaaaguacuugggagu

SEQ ID NO: 1532603 - RNA, 19 nt, Artificial Sequence
  Description of Artificial Sequence: Synthetic oligonucleotide
  Antisense strand to SEQ ID NO: 1532602
acucccaaguacuuuaggu

SEQ ID NO: 1532604 - RNA, 19 nt, Artificial Sequence
  Description of Artificial Sequence: Synthetic oligonucleotide
  Sense strand starting at position 3223 of SEQ ID NO: 1245053
aguacuugggagugauaga

SEQ ID NO: 1532605 - RNA, 19 nt, Artificial Sequence
  Description of Artificial Sequence: Synthetic oligonucleotide
  Antisense strand to SEQ ID NO: 1532604
ucuaucacucccaaguacu

SEQ ID NO: 1532606 - RNA, 19 nt, Artificial Sequence
  Description of Artificial Sequence: Synthetic oligonucleotide
  Sense strand starting at position 3263 of SEQ ID NO: 1245053
cucaaauggucccugaaac

SEQ ID NO: 1532607 - RNA, 19 nt, Artificial Sequence
  Description of Artificial Sequence: Synthetic oligonucleotide
  Antisense strand to SEQ ID NO: 1532606
guuucagggaccauuugag

SEQ ID NO: 1532608 - RNA, 19 nt, Artificial Sequence
  Description of Artificial Sequence: Synthetic oligonucleotide
  Sense strand starting at position 3264 of SEQ ID NO: 1245053
ucaaauggucccugaaacu

SEQ ID NO: 1532609 - RNA, 19 nt, Artificial Sequence
  Description of Artificial Sequence: Synthetic oligonucleotide
  Antisense strand to SEQ ID NO: 1532608
aguuucagggaccauuuga

SEQ ID NO: 1532610 - RNA, 19 nt, Artificial Sequence
  Description of Artificial Sequence: Synthetic oligonucleotide
  Sense strand starting at position 3490 of SEQ ID NO: 1245053
ugauauagugaaugaagca

SEQ ID NO: 1532611 - RNA, 19 nt, Artificial Sequence
  Description of Artificial Sequence: Synthetic oligonucleotide
  Antisense strand to SEQ ID NO: 1532610
ugcuucauucacuauauca

SEQ ID NO: 1532612 - RNA, 19 nt, Artificial Sequence
  Description of Artificial Sequence: Synthetic oligonucleotide
  Sense strand starting at position 3497 of SEQ ID NO: 1245053
gugaaugaagcauaguauu

SEQ ID NO: 1532613 - RNA, 19 nt, Artificial Sequence
  Description of Artificial Sequence: Synthetic oligonucleotide
  Antisense strand to SEQ ID NO: 1532612
aauacuaugcuucauucac

SEQ ID NO: 1532614 - RNA, 19 nt, Artificial Sequence
  Description of Artificial Sequence: Synthetic oligonucleotide
  Sense strand starting at position 3584 of SEQ ID NO: 1245053
agcaauauagcugaaaugu

SEQ ID NO: 1532615 - RNA, 19 nt, Artificial Sequence
  Description of Artificial Sequence: Synthetic oligonucleotide
  Antisense strand to SEQ ID NO: 1532614
acauuucagcuauauugcu

SEQ ID NO: 1532616 - RNA, 19 nt, Artificial Sequence
  Description of Artificial Sequence: Synthetic oligonucleotide
  Sense strand starting at position 10 of SEQ ID NO: 1245054
auuccaucagaguaauguu

SEQ ID NO: 1532617 - RNA, 19 nt, Artificial Sequence
  Description of Artificial Sequence: Synthetic oligonucleotide
  Antisense strand to SEQ ID NO: 1532616
aacauuacucugauggaau

SEQ ID NO: 1532618 - RNA, 19 nt, Artificial Sequence
  Description of Artificial Sequence: Synthetic oligonucleotide
  Sense strand starting at position 217 of SEQ ID NO: 1245054
gaauuaauggccgagcaaa

SEQ ID NO: 1532619 - RNA, 19 nt, Artificial Sequence
  Description of Artificial Sequence: Synthetic oligonucleotide
  Antisense strand to SEQ ID NO: 1532618
uuugcucggccauuaauuc

SEQ ID NO: 1532620 - RNA, 19 nt, Artificial Sequence
  Description of Artificial Sequence: Synthetic oligonucleotide
  Sense strand starting at position 246 of SEQ ID NO: 1245054
uguacuaugcuccagcaaa

SEQ ID NO: 1532621 - RNA, 19 nt, Artificial Sequence
  Description of Artificial Sequence: Synthetic oligonucleotide
  Antisense strand to SEQ ID NO: 1532620
uuugcuggagcauaguaca

SEQ ID NO: 1532622 - RNA, 19 nt, Artificial Sequence
  Description of Artificial Sequence: Synthetic oligonucleotide
  Sense strand starting at position 392 of SEQ ID NO: 1245054
uccacagagugagagauuu

SEQ ID NO: 1532623 - RNA, 19 nt, Artificial Sequence
  Description of Artificial Sequence: Synthetic oligonucleotide
  Antisense strand to SEQ ID NO: 1532622
aaaucucucacucugugga

SEQ ID NO: 1532624 - RNA, 19 nt, Artificial Sequence
  Description of Artificial Sequence: Synthetic oligonucleotide
  Sense strand starting at position 548 of SEQ ID NO: 1245054
gggcaauagggccaauuau

SEQ ID NO: 1532625 - RNA, 19 nt, Artificial Sequence
  Description of Artificial Sequence: Synthetic oligonucleotide
  Antisense strand to SEQ ID NO: 1532624
auaauuggcccuauugccc

SEQ ID NO: 1532626 - RNA, 19 nt, Artificial Sequence
  Description of Artificial Sequence: Synthetic oligonucleotide
  Sense strand starting at position 638 of SEQ ID NO: 1245054
ugacaaauguucuccuuga

SEQ ID NO: 1532627 - RNA, 19 nt, Artificial Sequence
  Description of Artificial Sequence: Synthetic oligonucleotide
  Antisense strand to SEQ ID NO: 1532626
ucaaggagaacauuuguca

SEQ ID NO: 1532628 - RNA, 19 nt, Artificial Sequence
  Description of Artificial Sequence: Synthetic oligonucleotide
  Sense strand starting at position 639 of SEQ ID NO: 1245054
gacaaauguucuccuugag

SEQ ID NO: 1532629 - RNA, 19 nt, Artificial Sequence
  Description of Artificial Sequence: Synthetic oligonucleotide
  Antisense strand to SEQ ID NO: 1532628
cucaaggagaacauuuguc

SEQ ID NO: 1532630 - RNA, 19 nt, Artificial Sequence
  Description of Artificial Sequence: Synthetic oligonucleotide
  Sense strand starting at position 648 of SEQ ID NO: 1245054
ucuccuugagcauaaugua

SEQ ID NO: 1532631 - RNA, 19 nt, Artificial Sequence
  Description of Artificial Sequence: Synthetic oligonucleotide
  Antisense strand to SEQ ID NO: 1532630
uacauuaugcucaaggaga

SEQ ID NO: 1532632 - RNA, 19 nt, Artificial Sequence
  Description of Artificial Sequence: Synthetic oligonucleotide
  Sense strand starting at position 790 of SEQ ID NO: 1245054
gccaauuuauaacagauag

SEQ ID NO: 1532633 - RNA, 19 nt, Artificial Sequence
  Description of Artificial Sequence: Synthetic oligonucleotide
  Antisense strand to SEQ ID NO: 1532632
cuaucuguuauaaauuggc

SEQ ID NO: 1532634 - RNA, 19 nt, Artificial Sequence
  Description of Artificial Sequence: Synthetic oligonucleotide
  Sense strand starting at position 806 of SEQ ID NO: 1245054
uaguaagcuggcgaauaaa

SEQ ID NO: 1532635 - RNA, 19 nt, Artificial Sequence
  Description of Artificial Sequence: Synthetic oligonucleotide
  Antisense strand to SEQ ID NO: 1532634
uuuauucgccagcuuacua

SEQ ID NO: 1532636 - RNA, 19 nt, Artificial Sequence
  Description of Artificial Sequence: Synthetic oligonucleotide
  Sense strand starting at position 1045 of SEQ ID NO: 1245054
uagagacauucuuucgaug

SEQ ID NO: 1532637 - RNA, 19 nt, Artificial Sequence
  Description of Artificial Sequence: Synthetic oligonucleotide
  Antisense strand to SEQ ID NO: 1532636
caucgaaagaaugucucua

SEQ ID NO: 1532638 - RNA, 19 nt, Artificial Sequence
  Description of Artificial Sequence: Synthetic oligonucleotide
  Sense strand starting at position 1050 of SEQ ID NO: 1245054
acauucuuucgaugauuaa

SEQ ID NO: 1532639 - RNA, 19 nt, Artificial Sequence
  Description of Artificial Sequence: Synthetic oligonucleotide
  Antisense strand to SEQ ID NO: 1532638
uuaaucaucgaaagaaugu

SEQ ID NO: 1532640 - RNA, 19 nt, Artificial Sequence
  Description of Artificial Sequence: Synthetic oligonucleotide
  Sense strand starting at position 1322 of SEQ ID NO: 1245054
gcacguaucagugugcaca

SEQ ID NO: 1532641 - RNA, 19 nt, Artificial Sequence
  Description of Artificial Sequence: Synthetic oligonucleotide
  Antisense strand to SEQ ID NO: 1532640
ugugcacacugauacgugc

SEQ ID NO: 1532642 - RNA, 19 nt, Artificial Sequence
  Description of Artificial Sequence: Synthetic oligonucleotide
  Sense strand starting at position 1479 of SEQ ID NO: 1245054
ugugcacagaguuauugau

SEQ ID NO: 1532643 - RNA, 19 nt, Artificial Sequence
  Description of Artificial Sequence: Synthetic oligonucleotide
  Antisense strand to SEQ ID NO: 1532642
aucaauaacucugugcaca

SEQ ID NO: 1532644 - RNA, 19 nt, Artificial Sequence
  Description of Artificial Sequence: Synthetic oligonucleotide
  Sense strand starting at position 1481 of SEQ ID NO: 1245054
ugcacagaguuauugauga

SEQ ID NO: 1532645 - RNA, 19 nt, Artificial Sequence
  Description of Artificial Sequence: Synthetic oligonucleotide
  Antisense strand to SEQ ID NO: 1532644
ucaucaauaacucugugca

SEQ ID NO: 1532646 - RNA, 19 nt, Artificial Sequence
  Description of Artificial Sequence: Synthetic oligonucleotide
  Sense strand starting at position 1520 of SEQ ID NO: 1245054
ccgggagggagugguaauu

SEQ ID NO: 1532647 - RNA, 19 nt, Artificial Sequence
  Description of Artificial Sequence: Synthetic oligonucleotide
  Antisense strand to SEQ ID NO: 1532646
aauuaccacucccucccgg

SEQ ID NO: 1532648 - RNA, 19 nt, Artificial Sequence
  Description of Artificial Sequence: Synthetic oligonucleotide
  Sense strand starting at position 1531 of SEQ ID NO: 1245054
ugguaauugccacacaaag

SEQ ID NO: 1532649 - RNA, 19 nt, Artificial Sequence
  Description of Artificial Sequence: Synthetic oligonucleotide
  Antisense strand to SEQ ID NO: 1532648
cuuuguguggcaauuacca

SEQ ID NO: 1532650 - RNA, 19 nt, Artificial Sequence
  Description of Artificial Sequence: Synthetic oligonucleotide
  Sense strand starting at position 2617 of SEQ ID NO: 1245054
uuggaacuuguguaggagu

SEQ ID NO: 1532651 - RNA, 19 nt, Artificial Sequence
  Description of Artificial Sequence: Synthetic oligonucleotide
  Antisense strand to SEQ ID NO: 1532650
acuccuacacaaguuccaa

SEQ ID NO: 1532652 - RNA, 19 nt, Artificial Sequence
  Description of Artificial Sequence: Synthetic oligonucleotide
  Sense strand starting at position 2758 of SEQ ID NO: 1245054
cccagagccuuguugaaag

SEQ ID NO: 1532653 - RNA, 19 nt, Artificial Sequence
  Description of Artificial Sequence: Synthetic oligonucleotide
  Antisense strand to SEQ ID NO: 1532652
cuuucaacaaggcucuggg

SEQ ID NO: 1532654 - RNA, 19 nt, Artificial Sequence
  Description of Artificial Sequence: Synthetic oligonucleotide
  Sense strand starting at position 2788 of SEQ ID NO: 1245054
agugucuucggauacagaa

SEQ ID NO: 1532655 - RNA, 19 nt, Artificial Sequence
  Description of Artificial Sequence: Synthetic oligonucleotide
  Antisense strand to SEQ ID NO: 1532654
uucuguauccgaagacacu

SEQ ID NO: 1532656 - RNA, 19 nt, Artificial Sequence
  Description of Artificial Sequence: Synthetic oligonucleotide
  Sense strand starting at position 2940 of SEQ ID NO: 1245054
gucaacauucuguagagua

SEQ ID NO: 1532657 - RNA, 19 nt, Artificial Sequence
  Description of Artificial Sequence: Synthetic oligonucleotide
  Antisense strand to SEQ ID NO: 1532656
uacucuacagaauguugac

SEQ ID NO: 1532658 - RNA, 19 nt, Artificial Sequence
  Description of Artificial Sequence: Synthetic oligonucleotide
  Sense strand starting at position 2987 of SEQ ID NO: 1245054
aagcuaacgcuuguguauu

SEQ ID NO: 1532659 - RNA, 19 nt, Artificial Sequence
  Description of Artificial Sequence: Synthetic oligonucleotide
  Antisense strand to SEQ ID NO: 1532658
aauacacaagcguuagcuu

SEQ ID NO: 1532660 - RNA, 19 nt, Artificial Sequence
  Description of Artificial Sequence: Synthetic oligonucleotide
  Sense strand starting at position 3031 of SEQ ID NO: 1245054
ggauacaugaaguguugga

SEQ ID NO: 1532661 - RNA, 19 nt, Artificial Sequence
  Description of Artificial Sequence: Synthetic oligonucleotide
  Antisense strand to SEQ ID NO: 1532660
uccaacacuucauguaucc

SEQ ID NO: 1532662 - RNA, 19 nt, Artificial Sequence
  Description of Artificial Sequence: Synthetic oligonucleotide
  Sense strand starting at position 3045 of SEQ ID NO: 1245054
uuggauuguuauccuuauu

SEQ ID NO: 1532663 - RNA, 19 nt, Artificial Sequence
  Description of Artificial Sequence: Synthetic oligonucleotide
  Antisense strand to SEQ ID NO: 1532662
aauaaggauaacaauccaa

SEQ ID NO: 1532664 - RNA, 19 nt, Artificial Sequence
  Description of Artificial Sequence: Synthetic oligonucleotide
  Sense strand starting at position 3136 of SEQ ID NO: 1245054
aauuguuugggucaguaga

SEQ ID NO: 1532665 - RNA, 19 nt, Artificial Sequence
  Description of Artificial Sequence: Synthetic oligonucleotide
  Antisense strand to SEQ ID NO: 1532664
ucuacugacccaaacaauu

SEQ ID NO: 1532666 - RNA, 19 nt, Artificial Sequence
  Description of Artificial Sequence: Synthetic oligonucleotide
  Sense strand starting at position 3200 of SEQ ID NO: 1245054
uuauguguauuugucuuga

SEQ ID NO: 1532667 - RNA, 19 nt, Artificial Sequence
  Description of Artificial Sequence: Synthetic oligonucleotide
  Antisense strand to SEQ ID NO: 1532666
ucaagacaaauacacauaa

SEQ ID NO: 1532668 - RNA, 19 nt, Artificial Sequence
  Description of Artificial Sequence: Synthetic oligonucleotide
  Sense strand starting at position 3202 of SEQ ID NO: 1245054
auguguauuugucuugagu

SEQ ID NO: 1532669 - RNA, 19 nt, Artificial Sequence
  Description of Artificial Sequence: Synthetic oligonucleotide
  Antisense strand to SEQ ID NO: 1532668
acucaagacaaauacacau

SEQ ID NO: 1532670 - RNA, 19 nt, Artificial Sequence
  Description of Artificial Sequence: Synthetic oligonucleotide
  Sense strand starting at position 3552 of SEQ ID NO: 1245054
agauuuaugucucagaaug

SEQ ID NO: 1532671 - RNA, 19 nt, Artificial Sequence
  Description of Artificial Sequence: Synthetic oligonucleotide
  Antisense strand to SEQ ID NO: 1532670
cauucugagacauaaaucu

SEQ ID NO: 1532672 - RNA, 19 nt, Artificial Sequence
  Description of Artificial Sequence: Synthetic oligonucleotide
  Sense strand starting at position 3557 of SEQ ID NO: 1245054
uaugucucagaaugagaac

SEQ ID NO: 1532673 - RNA, 19 nt, Artificial Sequence
  Description of Artificial Sequence: Synthetic oligonucleotide
  Antisense strand to SEQ ID NO: 1532672
guucucauucugagacaua

SEQ ID NO: 1532674 - RNA, 19 nt, Artificial Sequence
  Description of Artificial Sequence: Synthetic oligonucleotide
  Sense strand starting at position 3580 of SEQ ID NO: 1245054
auaguaaggugauuccuuu

SEQ ID NO: 1532675 - RNA, 19 nt, Artificial Sequence
  Description of Artificial Sequence: Synthetic oligonucleotide
  Antisense strand to SEQ ID NO: 1532674
aaaggaaucaccuuacuau

SEQ ID NO: 1532676 - RNA, 19 nt, Artificial Sequence
  Description of Artificial Sequence: Synthetic oligonucleotide
  Sense strand starting at position 3584 of SEQ ID NO: 1245054
uaaggugauuccuuugaga

SEQ ID NO: 1532677 - RNA, 19 nt, Artificial Sequence
  Description of Artificial Sequence: Synthetic oligonucleotide
  Antisense strand to SEQ ID NO: 1532676
ucucaaaggaaucaccuua

SEQ ID NO: 1532678 - RNA, 19 nt, Artificial Sequence
  Description of Artificial Sequence: Synthetic oligonucleotide
  Sense strand starting at position 3586 of SEQ ID NO: 1245054
aggugauuccuuugagagc

SEQ ID NO: 1532679 - RNA, 19 nt, Artificial Sequence
  Description of Artificial Sequence: Synthetic oligonucleotide
  Antisense strand to SEQ ID NO: 1532678
gcucucaaaggaaucaccu

SEQ ID NO: 1532680 - RNA, 19 nt, Artificial Sequence
  Description of Artificial Sequence: Synthetic oligonucleotide
  Sense strand starting at position 3595 of SEQ ID NO: 1245054
cuuugagagcacugucaaa

SEQ ID NO: 1532681 - RNA, 19 nt, Artificial Sequence
  Description of Artificial Sequence: Synthetic oligonucleotide
  Antisense strand to SEQ ID NO: 1532680
uuugacagugcucucaaag

SEQ ID NO: 1532682 - RNA, 19 nt, Artificial Sequence
  Description of Artificial Sequence: Synthetic oligonucleotide
  Sense strand starting at position 3606 of SEQ ID NO: 1245054
cugucaaaugauuggagua

SEQ ID NO: 1532683 - RNA, 19 nt, Artificial Sequence
  Description of Artificial Sequence: Synthetic oligonucleotide
  Antisense strand to SEQ ID NO: 1532682
uacuccaaucauuugacag

SEQ ID NO: 1532684 - RNA, 19 nt, Artificial Sequence
  Description of Artificial Sequence: Synthetic oligonucleotide
  Sense strand starting at position 3607 of SEQ ID NO: 1245054
ugucaaaugauuggaguaa

SEQ ID NO: 1532685 - RNA, 19 nt, Artificial Sequence
  Description of Artificial Sequence: Synthetic oligonucleotide
  Antisense strand to SEQ ID NO: 1532684
uuacuccaaucauuugaca

SEQ ID NO: 1532686 - RNA, 19 nt, Artificial Sequence
  Description of Artificial Sequence: Synthetic oligonucleotide
  Sense strand starting at position 3803 of SEQ ID NO: 1245054
uagagaacacgcugaaguu

SEQ ID NO: 1532687 - RNA, 19 nt, Artificial Sequence
  Description of Artificial Sequence: Synthetic oligonucleotide
  Antisense strand to SEQ ID NO: 1532686
aacuucagcguguucucua

SEQ ID NO: 1532688 - RNA, 19 nt, Artificial Sequence
  Description of Artificial Sequence: Synthetic oligonucleotide
  Sense strand starting at position 3804 of SEQ ID NO: 1245054
agagaacacgcugaaguua

SEQ ID NO: 1532689 - RNA, 19 nt, Artificial Sequence
  Description of Artificial Sequence: Synthetic oligonucleotide
  Antisense strand to SEQ ID NO: 1532688
uaacuucagcguguucucu

SEQ ID NO: 1532690 - RNA, 19 nt, Artificial Sequence
  Description of Artificial Sequence: Synthetic oligonucleotide
  Sense strand starting at position 3861 of SEQ ID NO: 1245054
ucuauccagguguauuaua

SEQ ID NO: 1532691 - RNA, 19 nt, Artificial Sequence
  Description of Artificial Sequence: Synthetic oligonucleotide
  Antisense strand to SEQ ID NO: 1532690
uauaauacaccuggauaga

SEQ ID NO: 1532692 - RNA, 19 nt, Artificial Sequence
  Description of Artificial Sequence: Synthetic oligonucleotide
  Sense strand starting at position 3947 of SEQ ID NO: 1245054
ucucuuuauggcuaaagua

SEQ ID NO: 1532693 - RNA, 19 nt, Artificial Sequence
  Description of Artificial Sequence: Synthetic oligonucleotide
  Antisense strand to SEQ ID NO: 1532692
uacuuuagccauaaagaga

SEQ ID NO: 1532694 - RNA, 19 nt, Artificial Sequence
  Description of Artificial Sequence: Synthetic oligonucleotide
  Sense strand starting at position 3955 of SEQ ID NO: 1245054
uggcuaaaguaauugauau

SEQ ID NO: 1532695 - RNA, 19 nt, Artificial Sequence
  Description of Artificial Sequence: Synthetic oligonucleotide
  Antisense strand to SEQ ID NO: 1532694
auaucaauuacuuuagcca

SEQ ID NO: 1532696 - RNA, 19 nt, Artificial Sequence
  Description of Artificial Sequence: Synthetic oligonucleotide
  Sense strand starting at position 187 of SEQ ID NO: 1245055
ugucuuucccuuuaaaggu

SEQ ID NO: 1532697 - RNA, 19 nt, Artificial Sequence
  Description of Artificial Sequence: Synthetic oligonucleotide
  Antisense strand to SEQ ID NO: 1532696
accuuuaaagggaaagaca

SEQ ID NO: 1532698 - RNA, 19 nt, Artificial Sequence
  Description of Artificial Sequence: Synthetic oligonucleotide
  Sense strand starting at position 681 of SEQ ID NO: 1245055
agaguuagauuagaaacca

SEQ ID NO: 1532699 - RNA, 19 nt, Artificial Sequence
  Description of Artificial Sequence: Synthetic oligonucleotide
  Antisense strand to SEQ ID NO: 1532698
ugguuucuaaucuaacucu

SEQ ID NO: 1532700 - RNA, 19 nt, Artificial Sequence
  Description of Artificial Sequence: Synthetic oligonucleotide
  Sense strand starting at position 970 of SEQ ID NO: 1245055
gugucagugucaaugcguu

SEQ ID NO: 1532701 - RNA, 19 nt, Artificial Sequence
  Description of Artificial Sequence: Synthetic oligonucleotide
  Antisense strand to SEQ ID NO: 1532700
aacgcauugacacugacac

SEQ ID NO: 1532702 - RNA, 19 nt, Artificial Sequence
  Description of Artificial Sequence: Synthetic oligonucleotide
  Sense strand starting at position 972 of SEQ ID NO: 1245055
gucagugucaaugcguuua

SEQ ID NO: 1532703 - RNA, 19 nt, Artificial Sequence
  Description of Artificial Sequence: Synthetic oligonucleotide
  Antisense strand to SEQ ID NO: 1532702
uaaacgcauugacacugac

SEQ ID NO: 1532704 - RNA, 19 nt, Artificial Sequence
  Description of Artificial Sequence: Synthetic oligonucleotide
  Sense strand starting at position 976 of SEQ ID NO: 1245055
gugucaaugcguuuacacu

SEQ ID NO: 1532705 - RNA, 19 nt, Artificial Sequence
  Description of Artificial Sequence: Synthetic oligonucleotide
  Antisense strand to SEQ ID NO: 1532704
aguguaaacgcauugacac

SEQ ID NO: 1532706 - RNA, 19 nt, Artificial Sequence
  Description of Artificial Sequence: Synthetic oligonucleotide
  Sense strand starting at position 982 of SEQ ID NO: 1245055
augcguuuacacugaaauc

SEQ ID NO: 1532707 - RNA, 19 nt, Artificial Sequence
  Description of Artificial Sequence: Synthetic oligonucleotide
  Antisense strand to SEQ ID NO: 1532706
gauuucaguguaaacgcau

SEQ ID NO: 1532708 - RNA, 19 nt, Artificial Sequence
  Description of Artificial Sequence: Synthetic oligonucleotide
  Sense strand starting at position 1019 of SEQ ID NO: 1245055
acaaauaacgaaggguauu

SEQ ID NO: 1532709 - RNA, 19 nt, Artificial Sequence
  Description of Artificial Sequence: Synthetic oligonucleotide
  Antisense strand to SEQ ID NO: 1532708
aauacccuucguuauuugu

SEQ ID NO: 1532710 - RNA, 19 nt, Artificial Sequence
  Description of Artificial Sequence: Synthetic oligonucleotide
  Sense strand starting at position 1031 of SEQ ID NO: 1245055
ggguauuaauccuuacagc

SEQ ID NO: 1532711 - RNA, 19 nt, Artificial Sequence
  Description of Artificial Sequence: Synthetic oligonucleotide
  Antisense strand to SEQ ID NO: 1532710
gcuguaaggauuaauaccc

SEQ ID NO: 1532712 - RNA, 19 nt, Artificial Sequence
  Description of Artificial Sequence: Synthetic oligonucleotide
  Sense strand starting at position 1210 of SEQ ID NO: 1245055
cagugcuggccacaugaaa

SEQ ID NO: 1532713 - RNA, 19 nt, Artificial Sequence
  Description of Artificial Sequence: Synthetic oligonucleotide
  Antisense strand to SEQ ID NO: 1532712
uuucauguggccagcacug

SEQ ID NO: 1532714 - RNA, 19 nt, Artificial Sequence
  Description of Artificial Sequence: Synthetic oligonucleotide
  Sense strand starting at position 1223 of SEQ ID NO: 1245055
augaaaugguucuuugcac

SEQ ID NO: 1532715 - RNA, 19 nt, Artificial Sequence
  Description of Artificial Sequence: Synthetic oligonucleotide
  Antisense strand to SEQ ID NO: 1532714
gugcaaagaaccauuucau

SEQ ID NO: 1532716 - RNA, 19 nt, Artificial Sequence
  Description of Artificial Sequence: Synthetic oligonucleotide
  Sense strand starting at position 1259 of SEQ ID NO: 1245055
ggucguuucguauucagca

SEQ ID NO: 1532717 - RNA, 19 nt, Artificial Sequence
  Description of Artificial Sequence: Synthetic oligonucleotide
  Antisense strand to SEQ ID NO: 1532716
ugcugaauacgaaacgacc

SEQ ID NO: 1532718 - RNA, 19 nt, Artificial Sequence
  Description of Artificial Sequence: Synthetic oligonucleotide
  Sense strand starting at position 1281 of SEQ ID NO: 1245055
agagaaagccuacguaagu

SEQ ID NO: 1532719 - RNA, 19 nt, Artificial Sequence
  Description of Artificial Sequence: Synthetic oligonucleotide
  Antisense strand to SEQ ID NO: 1532718
acuuacguaggcuuucucu

SEQ ID NO: 1532720 - RNA, 19 nt, Artificial Sequence
  Description of Artificial Sequence: Synthetic oligonucleotide
  Sense strand starting at position 1282 of SEQ ID NO: 1245055
gagaaagccuacguaagua

SEQ ID NO: 1532721 - RNA, 19 nt, Artificial Sequence
  Description of Artificial Sequence: Synthetic oligonucleotide
  Antisense strand to SEQ ID NO: 1532720
uacuuacguaggcuuucuc

SEQ ID NO: 1532722 - RNA, 19 nt, Artificial Sequence
  Description of Artificial Sequence: Synthetic oligonucleotide
  Sense strand starting at position 1590 of SEQ ID NO: 1245055
ucuggacaccaucgaguua

SEQ ID NO: 1532723 - RNA, 19 nt, Artificial Sequence
  Description of Artificial Sequence: Synthetic oligonucleotide
  Antisense strand to SEQ ID NO: 1532722
uaacucgaugguguccaga

SEQ ID NO: 1532724 - RNA, 19 nt, Artificial Sequence
  Description of Artificial Sequence: Synthetic oligonucleotide
  Sense strand starting at position 1591 of SEQ ID NO: 1245055
cuggacaccaucgaguuaa

SEQ ID NO: 1532725 - RNA, 19 nt, Artificial Sequence
  Description of Artificial Sequence: Synthetic oligonucleotide
  Antisense strand to SEQ ID NO: 1532724
uuaacucgaugguguccag

SEQ ID NO: 1532726 - RNA, 19 nt, Artificial Sequence
  Description of Artificial Sequence: Synthetic oligonucleotide
  Sense strand starting at position 2129 of SEQ ID NO: 1245055
ccuggcauucguuauacau

SEQ ID NO: 1532727 - RNA, 19 nt, Artificial Sequence
  Description of Artificial Sequence: Synthetic oligonucleotide
  Antisense strand to SEQ ID NO: 1532726
auguauaacgaaugccagg

SEQ ID NO: 1532728 - RNA, 19 nt, Artificial Sequence
  Description of Artificial Sequence: Synthetic oligonucleotide
  Sense strand starting at position 2399 of SEQ ID NO: 1245055
cccguuaaucugcagaucu

SEQ ID NO: 1532729 - RNA, 19 nt, Artificial Sequence
  Description of Artificial Sequence: Synthetic oligonucleotide
  Antisense strand to SEQ ID NO: 1532728
agaucugcagauuaacggg

SEQ ID NO: 1532730 - RNA, 19 nt, Artificial Sequence
  Description of Artificial Sequence: Synthetic oligonucleotide
  Sense strand starting at position 2401 of SEQ ID NO: 1245055
cguuaaucugcagaucuua

SEQ ID NO: 1532731 - RNA, 19 nt, Artificial Sequence
  Description of Artificial Sequence: Synthetic oligonucleotide
  Antisense strand to SEQ ID NO: 1532730
uaagaucugcagauuaacg

SEQ ID NO: 1532732 - RNA, 19 nt, Artificial Sequence
  Description of Artificial Sequence: Synthetic oligonucleotide
  Sense strand starting at position 2503 of SEQ ID NO: 1245055
cugcgcucagguuaaagau

SEQ ID NO: 1532733 - RNA, 19 nt, Artificial Sequence
  Description of Artificial Sequence: Synthetic oligonucleotide
  Antisense strand to SEQ ID NO: 1532732
aucuuuaaccugagcgcag

SEQ ID NO: 1532734 - RNA, 19 nt, Artificial Sequence
  Description of Artificial Sequence: Synthetic oligonucleotide
  Sense strand starting at position 2512 of SEQ ID NO: 1245055
gguuaaagauucccagcuu

SEQ ID NO: 1532735 - RNA, 19 nt, Artificial Sequence
  Description of Artificial Sequence: Synthetic oligonucleotide
  Antisense strand to SEQ ID NO: 1532734
aagcugggaaucuuuaacc

SEQ ID NO: 1532736 - RNA, 19 nt, Artificial Sequence
  Description of Artificial Sequence: Synthetic oligonucleotide
  Sense strand starting at position 2549 of SEQ ID NO: 1245055
agaauccugucagugaauu

SEQ ID NO: 1532737 - RNA, 19 nt, Artificial Sequence
  Description of Artificial Sequence: Synthetic oligonucleotide
  Antisense strand to SEQ ID NO: 1532736
aauucacugacaggauucu

SEQ ID NO: 1532738 - RNA, 19 nt, Artificial Sequence
  Description of Artificial Sequence: Synthetic oligonucleotide
  Sense strand starting at position 2550 of SEQ ID NO: 1245055
gaauccugucagugaauua

SEQ ID NO: 1532739 - RNA, 19 nt, Artificial Sequence
  Description of Artificial Sequence: Synthetic oligonucleotide
  Antisense strand to SEQ ID NO: 1532738
uaauucacugacaggauuc

SEQ ID NO: 1532740 - RNA, 19 nt, Artificial Sequence
  Description of Artificial Sequence: Synthetic oligonucleotide
  Sense strand starting at position 2719 of SEQ ID NO: 1245055
cuggacauguauuccggaa

SEQ ID NO: 1532741 - RNA, 19 nt, Artificial Sequence
  Description of Artificial Sequence: Synthetic oligonucleotide
  Antisense strand to SEQ ID NO: 1532740
uuccggaauacauguccag

SEQ ID NO: 1532742 - RNA, 19 nt, Artificial Sequence
  Description of Artificial Sequence: Synthetic oligonucleotide
  Sense strand starting at position 2723 of SEQ ID NO: 1245055
acauguauuccggaacuuu

SEQ ID NO: 1532743 - RNA, 19 nt, Artificial Sequence
  Description of Artificial Sequence: Synthetic oligonucleotide
  Antisense strand to SEQ ID NO: 1532742
aaaguuccggaauacaugu

SEQ ID NO: 1532744 - RNA, 19 nt, Artificial Sequence
  Description of Artificial Sequence: Synthetic oligonucleotide
  Sense strand starting at position 2778 of SEQ ID NO: 1245055
cuagaagagucauugccaa

SEQ ID NO: 1532745 - RNA, 19 nt, Artificial Sequence
  Description of Artificial Sequence: Synthetic oligonucleotide
  Antisense strand to SEQ ID NO: 1532744
uuggcaaugacucuucuag

SEQ ID NO: 1532746 - RNA, 19 nt, Artificial Sequence
  Description of Artificial Sequence: Synthetic oligonucleotide
  Sense strand starting at position 2800 of SEQ ID NO: 1245055
uacugagaauuguccagaa

SEQ ID NO: 1532747 - RNA, 19 nt, Artificial Sequence
  Description of Artificial Sequence: Synthetic oligonucleotide
  Antisense strand to SEQ ID NO: 1532746
uucuggacaauucucagua

SEQ ID NO: 1532748 - RNA, 19 nt, Artificial Sequence
  Description of Artificial Sequence: Synthetic oligonucleotide
  Sense strand starting at position 2937 of SEQ ID NO: 1245055
uuucuaugcuuaccuggau

SEQ ID NO: 1532749 - RNA, 19 nt, Artificial Sequence
  Description of Artificial Sequence: Synthetic oligonucleotide
  Antisense strand to SEQ ID NO: 1532748
auccagguaagcauagaaa

SEQ ID NO: 1532750 - RNA, 19 nt, Artificial Sequence
  Description of Artificial Sequence: Synthetic oligonucleotide
  Sense strand starting at position 3005 of SEQ ID NO: 1245055
auaugcaagauuugugugu

SEQ ID NO: 1532751 - RNA, 19 nt, Artificial Sequence
  Description of Artificial Sequence: Synthetic oligonucleotide
  Antisense strand to SEQ ID NO: 1532750
acacacaaaucuugcauau

SEQ ID NO: 1532752 - RNA, 19 nt, Artificial Sequence
  Description of Artificial Sequence: Synthetic oligonucleotide
  Sense strand starting at position 3027 of SEQ ID NO: 1245055
ugugaugcugguuauuauu

SEQ ID NO: 1532753 - RNA, 19 nt, Artificial Sequence
  Description of Artificial Sequence: Synthetic oligonucleotide
  Antisense strand to SEQ ID NO: 1532752
aauaauaaccagcaucaca

SEQ ID NO: 1532754 - RNA, 19 nt, Artificial Sequence
  Description of Artificial Sequence: Synthetic oligonucleotide
  Sense strand starting at position 3029 of SEQ ID NO: 1245055
ugaugcugguuauuauuau

SEQ ID NO: 1532755 - RNA, 19 nt, Artificial Sequence
  Description of Artificial Sequence: Synthetic oligonucleotide
  Antisense strand to SEQ ID NO: 1532754
auaauaauaaccagcauca

SEQ ID NO: 1532756 - RNA, 19 nt, Artificial Sequence
  Description of Artificial Sequence: Synthetic oligonucleotide
  Sense strand starting at position 3036 of SEQ ID NO: 1245055
gguuauuauuaugucauag

SEQ ID NO: 1532757 - RNA, 19 nt, Artificial Sequence
  Description of Artificial Sequence: Synthetic oligonucleotide
  Antisense strand to SEQ ID NO: 1532756
cuaugacauaauaauaacc

SEQ ID NO: 1532758 - RNA, 19 nt, Artificial Sequence
  Description of Artificial Sequence: Synthetic oligonucleotide
  Sense strand starting at position 3047 of SEQ ID NO: 1245055
ugucauaguggacacuuau

SEQ ID NO: 1532759 - RNA, 19 nt, Artificial Sequence
  Description of Artificial Sequence: Synthetic oligonucleotide
  Antisense strand to SEQ ID NO: 1532758
auaaguguccacuaugaca

SEQ ID NO: 1532760 - RNA, 19 nt, Artificial Sequence
  Description of Artificial Sequence: Synthetic oligonucleotide
  Sense strand starting at position 3130 of SEQ ID NO: 1245055
cacucuguugcccaggaaa

SEQ ID NO: 1532761 - RNA, 19 nt, Artificial Sequence
  Description of Artificial Sequence: Synthetic oligonucleotide
  Antisense strand to SEQ ID NO: 1532760
uuuccugggcaacagagug

SEQ ID NO: 1532762 - RNA, 19 nt, Artificial Sequence
  Description of Artificial Sequence: Synthetic oligonucleotide
  Sense strand starting at position 3132 of SEQ ID NO: 1245055
cucuguugcccaggaaaga

SEQ ID NO: 1532763 - RNA, 19 nt, Artificial Sequence
  Description of Artificial Sequence: Synthetic oligonucleotide
  Antisense strand to SEQ ID NO: 1532762
ucuuuccugggcaacagag

SEQ ID NO: 1532764 - RNA, 19 nt, Artificial Sequence
  Description of Artificial Sequence: Synthetic oligonucleotide
  Sense strand starting at position 3145 of SEQ ID NO: 1245055
gaaagagugcaguggguuu

SEQ ID NO: 1532765 - RNA, 19 nt, Artificial Sequence
  Description of Artificial Sequence: Synthetic oligonucleotide
  Antisense strand to SEQ ID NO: 1532764
aaacccacugcacucuuuc

SEQ ID NO: 1532766 - RNA, 19 nt, Artificial Sequence
  Description of Artificial Sequence: Synthetic oligonucleotide
  Sense strand starting at position 3198 of SEQ ID NO: 1245055
ggagcaauccucugaccuc

SEQ ID NO: 1532767 - RNA, 19 nt, Artificial Sequence
  Description of Artificial Sequence: Synthetic oligonucleotide
  Antisense strand to SEQ ID NO: 1532766
gaggucagaggauugcucc

SEQ ID NO: 1532768 - RNA, 19 nt, Artificial Sequence
  Description of Artificial Sequence: Synthetic oligonucleotide
  Sense strand starting at position 3488 of SEQ ID NO: 1245055
ccugaaacauggcuuguaa

SEQ ID NO: 1532769 - RNA, 19 nt, Artificial Sequence
  Description of Artificial Sequence: Synthetic oligonucleotide
  Antisense strand to SEQ ID NO: 1532768
uuacaagccauguuucagg

SEQ ID NO: 1532770 - RNA, 19 nt, Artificial Sequence
  Description of Artificial Sequence: Synthetic oligonucleotide
  Sense strand starting at position 3490 of SEQ ID NO: 1245055
ugaaacauggcuuguaaac

SEQ ID NO: 1532771 - RNA, 19 nt, Artificial Sequence
  Description of Artificial Sequence: Synthetic oligonucleotide
  Antisense strand to SEQ ID NO: 1532770
guuuacaagccauguuuca

SEQ ID NO: 1532772 - RNA, 19 nt, Artificial Sequence
  Description of Artificial Sequence: Synthetic oligonucleotide
  Sense strand starting at position 3500 of SEQ ID NO: 1245055
cuuguaaacacgugauuag

SEQ ID NO: 1532773 - RNA, 19 nt, Artificial Sequence
  Description of Artificial Sequence: Synthetic oligonucleotide
  Antisense strand to SEQ ID NO: 1532772
cuaaucacguguuuacaag

SEQ ID NO: 1532774 - RNA, 19 nt, Artificial Sequence
  Description of Artificial Sequence: Synthetic oligonucleotide
  Sense strand starting at position 3576 of SEQ ID NO: 1245055
gcaguucuccugggaauca

SEQ ID NO: 1532775 - RNA, 19 nt, Artificial Sequence
  Description of Artificial Sequence: Synthetic oligonucleotide
  Antisense strand to SEQ ID NO: 1532774
ugauucccaggagaacugc

SEQ ID NO: 1532776 - RNA, 19 nt, Artificial Sequence
  Description of Artificial Sequence: Synthetic oligonucleotide
  Sense strand starting at position 41 of SEQ ID NO: 1245056
gcaccaguuuaucugaaau

SEQ ID NO: 1532777 - RNA, 19 nt, Artificial Sequence
  Description of Artificial Sequence: Synthetic oligonucleotide
  Antisense strand to SEQ ID NO: 1532776
auuucagauaaacuggugc

SEQ ID NO: 1532778 - RNA, 19 nt, Artificial Sequence
  Description of Artificial Sequence: Synthetic oligonucleotide
  Sense strand starting at position 55 of SEQ ID NO: 1245056
gaaauuugguuacagagca

SEQ ID NO: 1532779 - RNA, 19 nt, Artificial Sequence
  Description of Artificial Sequence: Synthetic oligonucleotide
  Antisense strand to SEQ ID NO: 1532778
ugcucuguaaccaaauuuc

SEQ ID NO: 1532780 - RNA, 19 nt, Artificial Sequence
  Description of Artificial Sequence: Synthetic oligonucleotide
  Sense strand starting at position 360 of SEQ ID NO: 1245056
agaauauaggugugaggca

SEQ ID NO: 1532781 - RNA, 19 nt, Artificial Sequence
  Description of Artificial Sequence: Synthetic oligonucleotide
  Antisense strand to SEQ ID NO: 1532780
ugccucacaccuauauucu

SEQ ID NO: 1532782 - RNA, 19 nt, Artificial Sequence
  Description of Artificial Sequence: Synthetic oligonucleotide
  Sense strand starting at position 391 of SEQ ID NO: 1245056
agagcagagauauguuuga

SEQ ID NO: 1532783 - RNA, 19 nt, Artificial Sequence
  Description of Artificial Sequence: Synthetic oligonucleotide
  Antisense strand to SEQ ID NO: 1532782
ucaaacauaucucugcucu

SEQ ID NO: 1532784 - RNA, 19 nt, Artificial Sequence
  Description of Artificial Sequence: Synthetic oligonucleotide
  Sense strand starting at position 395 of SEQ ID NO: 1245056
cagagauauguuugaagca

SEQ ID NO: 1532785 - RNA, 19 nt, Artificial Sequence
  Description of Artificial Sequence: Synthetic oligonucleotide
  Antisense strand to SEQ ID NO: 1532784
ugcuucaaacauaucucug

SEQ ID NO: 1532786 - RNA, 19 nt, Artificial Sequence
  Description of Artificial Sequence: Synthetic oligonucleotide
  Sense strand starting at position 753 of SEQ ID NO: 1245056
cuaguaaguuuccuuugaa

SEQ ID NO: 1532787 - RNA, 19 nt, Artificial Sequence
  Description of Artificial Sequence: Synthetic oligonucleotide
  Antisense strand to SEQ ID NO: 1532786
uucaaaggaaacuuacuag

SEQ ID NO: 1532788 - RNA, 19 nt, Artificial Sequence
  Description of Artificial Sequence: Synthetic oligonucleotide
  Sense strand starting at position 1727 of SEQ ID NO: 1245056
ucaaguuaagauugccuca

SEQ ID NO: 1532789 - RNA, 19 nt, Artificial Sequence
  Description of Artificial Sequence: Synthetic oligonucleotide
  Antisense strand to SEQ ID NO: 1532788
ugaggcaaucuuaacuuga

SEQ ID NO: 1532790 - RNA, 19 nt, Artificial Sequence
  Description of Artificial Sequence: Synthetic oligonucleotide
  Sense strand starting at position 1747 of SEQ ID NO: 1245056
cucauauugccaggguaga

SEQ ID NO: 1532791 - RNA, 19 nt, Artificial Sequence
  Description of Artificial Sequence: Synthetic oligonucleotide
  Antisense strand to SEQ ID NO: 1532790
ucuacccuggcaauaugag

SEQ ID NO: 1532792 - RNA, 19 nt, Artificial Sequence
  Description of Artificial Sequence: Synthetic oligonucleotide
  Sense strand starting at position 1748 of SEQ ID NO: 1245056
ucauauugccaggguagaa

SEQ ID NO: 1532793 - RNA, 19 nt, Artificial Sequence
  Description of Artificial Sequence: Synthetic oligonucleotide
  Antisense strand to SEQ ID NO: 1532792
uucuacccuggcaauauga

SEQ ID NO: 1532794 - RNA, 19 nt, Artificial Sequence
  Description of Artificial Sequence: Synthetic oligonucleotide
  Sense strand starting at position 1767 of SEQ ID NO: 1245056
uauaaauucugaguggaug

SEQ ID NO: 1532795 - RNA, 19 nt, Artificial Sequence
  Description of Artificial Sequence: Synthetic oligonucleotide
  Antisense strand to SEQ ID NO: 1532794
cauccacucagaauuuaua

SEQ ID NO: 1532796 - RNA, 19 nt, Artificial Sequence
  Description of Artificial Sequence: Synthetic oligonucleotide
  Sense strand starting at position 1809 of SEQ ID NO: 1245056
acaucuugcuaagcaagaa

SEQ ID NO: 1532797 - RNA, 19 nt, Artificial Sequence
  Description of Artificial Sequence: Synthetic oligonucleotide
  Antisense strand to SEQ ID NO: 1532796
uucuugcuuagcaagaugu

SEQ ID NO: 1532798 - RNA, 19 nt, Artificial Sequence
  Description of Artificial Sequence: Synthetic oligonucleotide
  Sense strand starting at position 1917 of SEQ ID NO: 1245056
gcucuaucucucguagugu

SEQ ID NO: 1532799 - RNA, 19 nt, Artificial Sequence
  Description of Artificial Sequence: Synthetic oligonucleotide
  Antisense strand to SEQ ID NO: 1532798
acacuacgagagauagagc

SEQ ID NO: 1532800 - RNA, 19 nt, Artificial Sequence
  Description of Artificial Sequence: Synthetic oligonucleotide
  Sense strand starting at position 2368 of SEQ ID NO: 1245056
ugcuuagacucuccugaag

SEQ ID NO: 1532801 - RNA, 19 nt, Artificial Sequence
  Description of Artificial Sequence: Synthetic oligonucleotide
  Antisense strand to SEQ ID NO: 1532800
cuucaggagagucuaagca

SEQ ID NO: 1532802 - RNA, 19 nt, Artificial Sequence
  Description of Artificial Sequence: Synthetic oligonucleotide
  Sense strand starting at position 2590 of SEQ ID NO: 1245056
ucuggugaucgagggacaa

SEQ ID NO: 1532803 - RNA, 19 nt, Artificial Sequence
  Description of Artificial Sequence: Synthetic oligonucleotide
  Antisense strand to SEQ ID NO: 1532802
uugucccucgaucaccaga

SEQ ID NO: 1532804 - RNA, 19 nt, Artificial Sequence
  Description of Artificial Sequence: Synthetic oligonucleotide
  Sense strand starting at position 2623 of SEQ ID NO: 1245056
ccaugcacggucuaauaau

SEQ ID NO: 1532805 - RNA, 19 nt, Artificial Sequence
  Description of Artificial Sequence: Synthetic oligonucleotide
  Antisense strand to SEQ ID NO: 1532804
auuauuagaccgugcaugg

SEQ ID NO: 1532806 - RNA, 19 nt, Artificial Sequence
  Description of Artificial Sequence: Synthetic oligonucleotide
  Sense strand starting at position 2633 of SEQ ID NO: 1245056
ucuaauaaugcguucgcau

SEQ ID NO: 1532807 - RNA, 19 nt, Artificial Sequence
  Description of Artificial Sequence: Synthetic oligonucleotide
  Antisense strand to SEQ ID NO: 1532806
augcgaacgcauuauuaga

SEQ ID NO: 1532808 - RNA, 19 nt, Artificial Sequence
  Description of Artificial Sequence: Synthetic oligonucleotide
  Sense strand starting at position 2634 of SEQ ID NO: 1245056
cuaauaaugcguucgcauu

SEQ ID NO: 1532809 - RNA, 19 nt, Artificial Sequence
  Description of Artificial Sequence: Synthetic oligonucleotide
  Antisense strand to SEQ ID NO: 1532808
aaugcgaacgcauuauuag

SEQ ID NO: 1532810 - RNA, 19 nt, Artificial Sequence
  Description of Artificial Sequence: Synthetic oligonucleotide
  Sense strand starting at position 2656 of SEQ ID NO: 1245056
auggucuauuaagcuuuaa

SEQ ID NO: 1532811 - RNA, 19 nt, Artificial Sequence
  Description of Artificial Sequence: Synthetic oligonucleotide
  Antisense strand to SEQ ID NO: 1532810
uuaaagcuuaauagaccau

SEQ ID NO: 1532812 - RNA, 19 nt, Artificial Sequence
  Description of Artificial Sequence: Synthetic oligonucleotide
  Sense strand starting at position 2660 of SEQ ID NO: 1245056
ucuauuaagcuuuaagguu

SEQ ID NO: 1532813 - RNA, 19 nt, Artificial Sequence
  Description of Artificial Sequence: Synthetic oligonucleotide
  Antisense strand to SEQ ID NO: 1532812
aaccuuaaagcuuaauaga

SEQ ID NO: 1532814 - RNA, 19 nt, Artificial Sequence
  Description of Artificial Sequence: Synthetic oligonucleotide
  Sense strand starting at position 2815 of SEQ ID NO: 1245056
ccuaaagacaagugagguu

SEQ ID NO: 1532815 - RNA, 19 nt, Artificial Sequence
  Description of Artificial Sequence: Synthetic oligonucleotide
  Antisense strand to SEQ ID NO: 1532814
aaccucacuugucuuuagg

SEQ ID NO: 1532816 - RNA, 19 nt, Artificial Sequence
  Description of Artificial Sequence: Synthetic oligonucleotide
  Sense strand starting at position 2828 of SEQ ID NO: 1245056
gagguugugaaguaggacu

SEQ ID NO: 1532817 - RNA, 19 nt, Artificial Sequence
  Description of Artificial Sequence: Synthetic oligonucleotide
  Antisense strand to SEQ ID NO: 1532816
aguccuacuucacaaccuc

SEQ ID NO: 1532818 - RNA, 19 nt, Artificial Sequence
  Description of Artificial Sequence: Synthetic oligonucleotide
  Sense strand starting at position 2861 of SEQ ID NO: 1245056
gaaagcauuuaguuugcuu

SEQ ID NO: 1532819 - RNA, 19 nt, Artificial Sequence
  Description of Artificial Sequence: Synthetic oligonucleotide
  Antisense strand to SEQ ID NO: 1532818
aagcaaacuaaaugcuuuc

SEQ ID NO: 1532820 - RNA, 19 nt, Artificial Sequence
  Description of Artificial Sequence: Synthetic oligonucleotide
  Sense strand starting at position 2879 of SEQ ID NO: 1245056
uuugaucacuucuuuguca

SEQ ID NO: 1532821 - RNA, 19 nt, Artificial Sequence
  Description of Artificial Sequence: Synthetic oligonucleotide
  Antisense strand to SEQ ID NO: 1532820
ugacaaagaagugaucaaa

SEQ ID NO: 1532822 - RNA, 19 nt, Artificial Sequence
  Description of Artificial Sequence: Synthetic oligonucleotide
  Sense strand starting at position 2880 of SEQ ID NO: 1245056
uugaucacuucuuugucau

SEQ ID NO: 1532823 - RNA, 19 nt, Artificial Sequence
  Description of Artificial Sequence: Synthetic oligonucleotide
  Antisense strand to SEQ ID NO: 1532822
augacaaagaagugaucaa

SEQ ID NO: 1532824 - RNA, 19 nt, Artificial Sequence
  Description of Artificial Sequence: Synthetic oligonucleotide
  Sense strand starting at position 2881 of SEQ ID NO: 1245056
ugaucacuucuuugucaua

SEQ ID NO: 1532825 - RNA, 19 nt, Artificial Sequence
  Description of Artificial Sequence: Synthetic oligonucleotide
  Antisense strand to SEQ ID NO: 1532824
uaugacaaagaagugauca

SEQ ID NO: 1532826 - RNA, 19 nt, Artificial Sequence
  Description of Artificial Sequence: Synthetic oligonucleotide
  Sense strand starting at position 2927 of SEQ ID NO: 1245056
ggcuuauaauauuugucuu

SEQ ID NO: 1532827 - RNA, 19 nt, Artificial Sequence
  Description of Artificial Sequence: Synthetic oligonucleotide
  Antisense strand to SEQ ID NO: 1532826
aagacaaauauuauaagcc

SEQ ID NO: 1532828 - RNA, 19 nt, Artificial Sequence
  Description of Artificial Sequence: Synthetic oligonucleotide
  Sense strand starting at position 3648 of SEQ ID NO: 1245056
aguaguaauucucuaagua

SEQ ID NO: 1532829 - RNA, 19 nt, Artificial Sequence
  Description of Artificial Sequence: Synthetic oligonucleotide
  Antisense strand to SEQ ID NO: 1532828
uacuuagagaauuacuacu

SEQ ID NO: 1532830 - RNA, 19 nt, Artificial Sequence
  Description of Artificial Sequence: Synthetic oligonucleotide
  Sense strand starting at position 3649 of SEQ ID NO: 1245056
guaguaauucucuaaguaa

SEQ ID NO: 1532831 - RNA, 19 nt, Artificial Sequence
  Description of Artificial Sequence: Synthetic oligonucleotide
  Antisense strand to SEQ ID NO: 1532830
uuacuuagagaauuacuac

SEQ ID NO: 1532832 - RNA, 19 nt, Artificial Sequence
  Description of Artificial Sequence: Synthetic oligonucleotide
  Sense strand starting at position 3689 of SEQ ID NO: 1245056
ucuuauugguacucugaua

SEQ ID NO: 1532833 - RNA, 19 nt, Artificial Sequence
  Description of Artificial Sequence: Synthetic oligonucleotide
  Antisense strand to SEQ ID NO: 1532832
uaucagaguaccaauaaga

SEQ ID NO: 1532834 - RNA, 19 nt, Artificial Sequence
  Description of Artificial Sequence: Synthetic oligonucleotide
  Sense strand starting at position 3728 of SEQ ID NO: 1245056
agagucuaaacuuguuagu

SEQ ID NO: 1532835 - RNA, 19 nt, Artificial Sequence
  Description of Artificial Sequence: Synthetic oligonucleotide
  Antisense strand to SEQ ID NO: 1532834
acuaacaaguuuagacucu

SEQ ID NO: 1532836 - RNA, 19 nt, Artificial Sequence
  Description of Artificial Sequence: Synthetic oligonucleotide
  Sense strand starting at position 3810 of SEQ ID NO: 1245056
augauuuagucauacggac

SEQ ID NO: 1532837 - RNA, 19 nt, Artificial Sequence
  Description of Artificial Sequence: Synthetic oligonucleotide
  Antisense strand to SEQ ID NO: 1532836
guccguaugacuaaaucau

SEQ ID NO: 1532838 - RNA, 19 nt, Artificial Sequence
  Description of Artificial Sequence: Synthetic oligonucleotide
  Sense strand starting at position 3845 of SEQ ID NO: 1245056
ggugguggccaugaaaugu

SEQ ID NO: 1532839 - RNA, 19 nt, Artificial Sequence
  Description of Artificial Sequence: Synthetic oligonucleotide
  Antisense strand to SEQ ID NO: 1532838
acauuucauggccaccacc

SEQ ID NO: 1532840 - RNA, 19 nt, Artificial Sequence
  Description of Artificial Sequence: Synthetic oligonucleotide
  Sense strand starting at position 3849 of SEQ ID NO: 1245056
guggccaugaaaugugaga

SEQ ID NO: 1532841 - RNA, 19 nt, Artificial Sequence
  Description of Artificial Sequence: Synthetic oligonucleotide
  Antisense strand to SEQ ID NO: 1532840
ucucacauuucauggccac

SEQ ID NO: 1532842 - RNA, 19 nt, Artificial Sequence
  Description of Artificial Sequence: Synthetic oligonucleotide
  Sense strand starting at position 3851 of SEQ ID NO: 1245056
ggccaugaaaugugagacu

SEQ ID NO: 1532843 - RNA, 19 nt, Artificial Sequence
  Description of Artificial Sequence: Synthetic oligonucleotide
  Antisense strand to SEQ ID NO: 1532842
agucucacauuucauggcc

SEQ ID NO: 1532844 - RNA, 19 nt, Artificial Sequence
  Description of Artificial Sequence: Synthetic oligonucleotide
  Sense strand starting at position 3858 of SEQ ID NO: 1245056
aaaugugagacuuggacga

SEQ ID NO: 1532845 - RNA, 19 nt, Artificial Sequence
  Description of Artificial Sequence: Synthetic oligonucleotide
  Antisense strand to SEQ ID NO: 1532844
ucguccaagucucacauuu

SEQ ID NO: 1532846 - RNA, 19 nt, Artificial Sequence
  Description of Artificial Sequence: Synthetic oligonucleotide
  Sense strand starting at position 3862 of SEQ ID NO: 1245056
gugagacuuggacgaaauu

SEQ ID NO: 1532847 - RNA, 19 nt, Artificial Sequence
  Description of Artificial Sequence: Synthetic oligonucleotide
  Antisense strand to SEQ ID NO: 1532846
aauuucguccaagucucac

SEQ ID NO: 1532848 - RNA, 19 nt, Artificial Sequence
  Description of Artificial Sequence: Synthetic oligonucleotide
  Sense strand starting at position 3871 of SEQ ID NO: 1245056
ggacgaaauuacucuauga

SEQ ID NO: 1532849 - RNA, 19 nt, Artificial Sequence
  Description of Artificial Sequence: Synthetic oligonucleotide
  Antisense strand to SEQ ID NO: 1532848
ucauagaguaauuucgucc

SEQ ID NO: 1532850 - RNA, 19 nt, Artificial Sequence
  Description of Artificial Sequence: Synthetic oligonucleotide
  Sense strand starting at position 3881 of SEQ ID NO: 1245056
acucuaugacuacguauca

SEQ ID NO: 1532851 - RNA, 19 nt, Artificial Sequence
  Description of Artificial Sequence: Synthetic oligonucleotide
  Antisense strand to SEQ ID NO: 1532850
ugauacguagucauagagu

SEQ ID NO: 1532852 - RNA, 19 nt, Artificial Sequence
  Description of Artificial Sequence: Synthetic oligonucleotide
  Sense strand starting at position 3894 of SEQ ID NO: 1245056
guaucaggagauugcauua

SEQ ID NO: 1532853 - RNA, 19 nt, Artificial Sequence
  Description of Artificial Sequence: Synthetic oligonucleotide
  Antisense strand to SEQ ID NO: 1532852
uaaugcaaucuccugauac

SEQ ID NO: 1532854 - RNA, 19 nt, Artificial Sequence
  Description of Artificial Sequence: Synthetic oligonucleotide
  Sense strand starting at position 3925 of SEQ ID NO: 1245056
gggcauauauaguuugaaa

SEQ ID NO: 1532855 - RNA, 19 nt, Artificial Sequence
  Description of Artificial Sequence: Synthetic oligonucleotide
  Antisense strand to SEQ ID NO: 1532854
uuucaaacuauauaugccc

SEQ ID NO: 1532856 - RNA, 19 nt, Artificial Sequence
  Description of Artificial Sequence: Synthetic oligonucleotide
  Sense strand starting at position 86 of SEQ ID NO: 1245057
aucuguguuggacaguaau

SEQ ID NO: 1532857 - RNA, 19 nt, Artificial Sequence
  Description of Artificial Sequence: Synthetic oligonucleotide
  Antisense strand to SEQ ID NO: 1532856
auuacuguccaacacagau

SEQ ID NO: 1532858 - RNA, 19 nt, Artificial Sequence
  Description of Artificial Sequence: Synthetic oligonucleotide
  Sense strand starting at position 89 of SEQ ID NO: 1245057
uguguuggacaguaauaac

SEQ ID NO: 1532859 - RNA, 19 nt, Artificial Sequence
  Description of Artificial Sequence: Synthetic oligonucleotide
  Antisense strand to SEQ ID NO: 1532858
guuauuacuguccaacaca

SEQ ID NO: 1532860 - RNA, 19 nt, Artificial Sequence
  Description of Artificial Sequence: Synthetic oligonucleotide
  Sense strand starting at position 191 of SEQ ID NO: 1245057
ugaacaaagugguuaaugu

SEQ ID NO: 1532861 - RNA, 19 nt, Artificial Sequence
  Description of Artificial Sequence: Synthetic oligonucleotide
  Antisense strand to SEQ ID NO: 1532860
acauuaaccacuuuguuca

SEQ ID NO: 1532862 - RNA, 19 nt, Artificial Sequence
  Description of Artificial Sequence: Synthetic oligonucleotide
  Sense strand starting at position 192 of SEQ ID NO: 1245057
gaacaaagugguuaauguu

SEQ ID NO: 1532863 - RNA, 19 nt, Artificial Sequence
  Description of Artificial Sequence: Synthetic oligonucleotide
  Antisense strand to SEQ ID NO: 1532862
aacauuaaccacuuuguuc

SEQ ID NO: 1532864 - RNA, 19 nt, Artificial Sequence
  Description of Artificial Sequence: Synthetic oligonucleotide
  Sense strand starting at position 400 of SEQ ID NO: 1245057
auuaaugaacggcaucuua

SEQ ID NO: 1532865 - RNA, 19 nt, Artificial Sequence
  Description of Artificial Sequence: Synthetic oligonucleotide
  Antisense strand to SEQ ID NO: 1532864
uaagaugccguucauuaau

SEQ ID NO: 1532866 - RNA, 19 nt, Artificial Sequence
  Description of Artificial Sequence: Synthetic oligonucleotide
  Sense strand starting at position 411 of SEQ ID NO: 1245057
gcaucuuaggucuaacaca

SEQ ID NO: 1532867 - RNA, 19 nt, Artificial Sequence
  Description of Artificial Sequence: Synthetic oligonucleotide
  Antisense strand to SEQ ID NO: 1532866
uguguuagaccuaagaugc

SEQ ID NO: 1532868 - RNA, 19 nt, Artificial Sequence
  Description of Artificial Sequence: Synthetic oligonucleotide
  Sense strand starting at position 434 of SEQ ID NO: 1245057
uauuccuuagcggacgaaa

SEQ ID NO: 1532869 - RNA, 19 nt, Artificial Sequence
  Description of Artificial Sequence: Synthetic oligonucleotide
  Antisense strand to SEQ ID NO: 1532868
uuucguccgcuaaggaaua

SEQ ID NO: 1532870 - RNA, 19 nt, Artificial Sequence
  Description of Artificial Sequence: Synthetic oligonucleotide
  Sense strand starting at position 524 of SEQ ID NO: 1245057
gcuuuaucacgcgugguuu

SEQ ID NO: 1532871 - RNA, 19 nt, Artificial Sequence
  Description of Artificial Sequence: Synthetic oligonucleotide
  Antisense strand to SEQ ID NO: 1532870
aaaccacgcgugauaaagc

SEQ ID NO: 1532872 - RNA, 19 nt, Artificial Sequence
  Description of Artificial Sequence: Synthetic oligonucleotide
  Sense strand starting at position 597 of SEQ ID NO: 1245057
ccgggugaucuccaaacau

SEQ ID NO: 1532873 - RNA, 19 nt, Artificial Sequence
  Description of Artificial Sequence: Synthetic oligonucleotide
  Antisense strand to SEQ ID NO: 1532872
auguuuggagaucacccgg

SEQ ID NO: 1532874 - RNA, 19 nt, Artificial Sequence
  Description of Artificial Sequence: Synthetic oligonucleotide
  Sense strand starting at position 682 of SEQ ID NO: 1245057
ggaagaugggagcgaauau

SEQ ID NO: 1532875 - RNA, 19 nt, Artificial Sequence
  Description of Artificial Sequence: Synthetic oligonucleotide
  Antisense strand to SEQ ID NO: 1532874
auauucgcucccaucuucc

SEQ ID NO: 1532876 - RNA, 19 nt, Artificial Sequence
  Description of Artificial Sequence: Synthetic oligonucleotide
  Sense strand starting at position 721 of SEQ ID NO: 1245057
gccaguuuccgggagagga

SEQ ID NO: 1532877 - RNA, 19 nt, Artificial Sequence
  Description of Artificial Sequence: Synthetic oligonucleotide
  Antisense strand to SEQ ID NO: 1532876
uccucucccggaaacuggc

SEQ ID NO: 1532878 - RNA, 19 nt, Artificial Sequence
  Description of Artificial Sequence: Synthetic oligonucleotide
  Sense strand starting at position 1207 of SEQ ID NO: 1245057
aggagaugccugcagccau

SEQ ID NO: 1532879 - RNA, 19 nt, Artificial Sequence
  Description of Artificial Sequence: Synthetic oligonucleotide
  Antisense strand to SEQ ID NO: 1532878
auggcugcaggcaucuccu

SEQ ID NO: 1532880 - RNA, 19 nt, Artificial Sequence
  Description of Artificial Sequence: Synthetic oligonucleotide
  Sense strand starting at position 1322 of SEQ ID NO: 1245057
acggaagaugucugggagu

SEQ ID NO: 1532881 - RNA, 19 nt, Artificial Sequence
  Description of Artificial Sequence: Synthetic oligonucleotide
  Antisense strand to SEQ ID NO: 1532880
acucccagacaucuuccgu

SEQ ID NO: 1532882 - RNA, 19 nt, Artificial Sequence
  Description of Artificial Sequence: Synthetic oligonucleotide
  Sense strand starting at position 1324 of SEQ ID NO: 1245057
ggaagaugucugggaguac

SEQ ID NO: 1532883 - RNA, 19 nt, Artificial Sequence
  Description of Artificial Sequence: Synthetic oligonucleotide
  Antisense strand to SEQ ID NO: 1532882
guacucccagacaucuucc

SEQ ID NO: 1532884 - RNA, 19 nt, Artificial Sequence
  Description of Artificial Sequence: Synthetic oligonucleotide
  Sense strand starting at position 1631 of SEQ ID NO: 1245057
cuccucuaggcaggugaaa

SEQ ID NO: 1532885 - RNA, 19 nt, Artificial Sequence
  Description of Artificial Sequence: Synthetic oligonucleotide
  Antisense strand to SEQ ID NO: 1532884
uuucaccugccuagaggag

SEQ ID NO: 1532886 - RNA, 19 nt, Artificial Sequence
  Description of Artificial Sequence: Synthetic oligonucleotide
  Sense strand starting at position 2699 of SEQ ID NO: 1245057
accgaaugcgcgucaaagu

SEQ ID NO: 1532887 - RNA, 19 nt, Artificial Sequence
  Description of Artificial Sequence: Synthetic oligonucleotide
  Antisense strand to SEQ ID NO: 1532886
acuuugacgcgcauucggu

SEQ ID NO: 1532888 - RNA, 19 nt, Artificial Sequence
  Description of Artificial Sequence: Synthetic oligonucleotide
  Sense strand starting at position 2752 of SEQ ID NO: 1245057
ucaagacuuccagaaacgu

SEQ ID NO: 1532889 - RNA, 19 nt, Artificial Sequence
  Description of Artificial Sequence: Synthetic oligonucleotide
  Antisense strand to SEQ ID NO: 1532888
acguuucuggaagucuuga

SEQ ID NO: 1532890 - RNA, 19 nt, Artificial Sequence
  Description of Artificial Sequence: Synthetic oligonucleotide
  Sense strand starting at position 2761 of SEQ ID NO: 1245057
ccagaaacguauccuguga

SEQ ID NO: 1532891 - RNA, 19 nt, Artificial Sequence
  Description of Artificial Sequence: Synthetic oligonucleotide
  Antisense strand to SEQ ID NO: 1532890
ucacaggauacguuucugg

SEQ ID NO: 1532892 - RNA, 19 nt, Artificial Sequence
  Description of Artificial Sequence: Synthetic oligonucleotide
  Sense strand starting at position 2963 of SEQ ID NO: 1245057
ccuccuucuugaguagacu

SEQ ID NO: 1532893 - RNA, 19 nt, Artificial Sequence
  Description of Artificial Sequence: Synthetic oligonucleotide
  Antisense strand to SEQ ID NO: 1532892
agucuacucaagaaggagg

SEQ ID NO: 1532894 - RNA, 19 nt, Artificial Sequence
  Description of Artificial Sequence: Synthetic oligonucleotide
  Sense strand starting at position 2964 of SEQ ID NO: 1245057
cuccuucuugaguagacuu

SEQ ID NO: 1532895 - RNA, 19 nt, Artificial Sequence
  Description of Artificial Sequence: Synthetic oligonucleotide
  Antisense strand to SEQ ID NO: 1532894
aagucuacucaagaaggag

SEQ ID NO: 1532896 - RNA, 19 nt, Artificial Sequence
  Description of Artificial Sequence: Synthetic oligonucleotide
  Sense strand starting at position 3037 of SEQ ID NO: 1245057
aagaucagaguuugcuuaa

SEQ ID NO: 1532897 - RNA, 19 nt, Artificial Sequence
  Description of Artificial Sequence: Synthetic oligonucleotide
  Antisense strand to SEQ ID NO: 1532896
uuaagcaaacucugaucuu

SEQ ID NO: 1532898 - RNA, 19 nt, Artificial Sequence
  Description of Artificial Sequence: Synthetic oligonucleotide
  Sense strand starting at position 3038 of SEQ ID NO: 1245057
agaucagaguuugcuuaaa

SEQ ID NO: 1532899 - RNA, 19 nt, Artificial Sequence
  Description of Artificial Sequence: Synthetic oligonucleotide
  Antisense strand to SEQ ID NO: 1532898
uuuaagcaaacucugaucu

SEQ ID NO: 1532900 - RNA, 19 nt, Artificial Sequence
  Description of Artificial Sequence: Synthetic oligonucleotide
  Sense strand starting at position 3071 of SEQ ID NO: 1245057
ccaggacucccacacgauu

SEQ ID NO: 1532901 - RNA, 19 nt, Artificial Sequence
  Description of Artificial Sequence: Synthetic oligonucleotide
  Antisense strand to SEQ ID NO: 1532900
aaucgugugggaguccugg

SEQ ID NO: 1532902 - RNA, 19 nt, Artificial Sequence
  Description of Artificial Sequence: Synthetic oligonucleotide
  Sense strand starting at position 3135 of SEQ ID NO: 1245057
ccaacugggucaucacaga

SEQ ID NO: 1532903 - RNA, 19 nt, Artificial Sequence
  Description of Artificial Sequence: Synthetic oligonucleotide
  Antisense strand to SEQ ID NO: 1532902
ucugugaugacccaguugg

SEQ ID NO: 1532904 - RNA, 19 nt, Artificial Sequence
  Description of Artificial Sequence: Synthetic oligonucleotide
  Sense strand starting at position 3198 of SEQ ID NO: 1245057
agcuuuaaggaucagaguu

SEQ ID NO: 1532905 - RNA, 19 nt, Artificial Sequence
  Description of Artificial Sequence: Synthetic oligonucleotide
  Antisense strand to SEQ ID NO: 1532904
aacucugauccuuaaagcu

SEQ ID NO: 1532906 - RNA, 19 nt, Artificial Sequence
  Description of Artificial Sequence: Synthetic oligonucleotide
  Sense strand starting at position 3208 of SEQ ID NO: 1245057
aucagaguuguguagagag

SEQ ID NO: 1532907 - RNA, 19 nt, Artificial Sequence
  Description of Artificial Sequence: Synthetic oligonucleotide
  Antisense strand to SEQ ID NO: 1532906
cucucuacacaacucugau

SEQ ID NO: 1532908 - RNA, 19 nt, Artificial Sequence
  Description of Artificial Sequence: Synthetic oligonucleotide
  Sense strand starting at position 3241 of SEQ ID NO: 1245057
ggccaacugguagaaucuu

SEQ ID NO: 1532909 - RNA, 19 nt, Artificial Sequence
  Description of Artificial Sequence: Synthetic oligonucleotide
  Antisense strand to SEQ ID NO: 1532908
aagauucuaccaguuggcc

SEQ ID NO: 1532910 - RNA, 19 nt, Artificial Sequence
  Description of Artificial Sequence: Synthetic oligonucleotide
  Sense strand starting at position 3249 of SEQ ID NO: 1245057
gguagaaucuugucugaua

SEQ ID NO: 1532911 - RNA, 19 nt, Artificial Sequence
  Description of Artificial Sequence: Synthetic oligonucleotide
  Antisense strand to SEQ ID NO: 1532910
uaucagacaagauucuacc

SEQ ID NO: 1532912 - RNA, 19 nt, Artificial Sequence
  Description of Artificial Sequence: Synthetic oligonucleotide
  Sense strand starting at position 3250 of SEQ ID NO: 1245057
guagaaucuugucugauac

SEQ ID NO: 1532913 - RNA, 19 nt, Artificial Sequence
  Description of Artificial Sequence: Synthetic oligonucleotide
  Antisense strand to SEQ ID NO: 1532912
guaucagacaagauucuac

SEQ ID NO: 1532914 - RNA, 19 nt, Artificial Sequence
  Description of Artificial Sequence: Synthetic oligonucleotide
  Sense strand starting at position 3303 of SEQ ID NO: 1245057
agucaaacuugaucucuga

SEQ ID NO: 1532915 - RNA, 19 nt, Artificial Sequence
  Description of Artificial Sequence: Synthetic oligonucleotide
  Antisense strand to SEQ ID NO: 1532914
ucagagaucaaguuugacu

SEQ ID NO: 1532916 - RNA, 19 nt, Artificial Sequence
  Description of Artificial Sequence: Synthetic oligonucleotide
  Sense strand starting at position 3394 of SEQ ID NO: 1245057
ggucucuuccagcacuuau

SEQ ID NO: 1532917 - RNA, 19 nt, Artificial Sequence
  Description of Artificial Sequence: Synthetic oligonucleotide
  Antisense strand to SEQ ID NO: 1532916
auaagugcuggaagagacc

SEQ ID NO: 1532918 - RNA, 19 nt, Artificial Sequence
  Description of Artificial Sequence: Synthetic oligonucleotide
  Sense strand starting at position 3469 of SEQ ID NO: 1245057
ggugacacugguugaucua

SEQ ID NO: 1532919 - RNA, 19 nt, Artificial Sequence
  Description of Artificial Sequence: Synthetic oligonucleotide
  Antisense strand to SEQ ID NO: 1532918
uagaucaaccagugucacc

SEQ ID NO: 1532920 - RNA, 19 nt, Artificial Sequence
  Description of Artificial Sequence: Synthetic oligonucleotide
  Sense strand starting at position 3470 of SEQ ID NO: 1245057
gugacacugguugaucuaa

SEQ ID NO: 1532921 - RNA, 19 nt, Artificial Sequence
  Description of Artificial Sequence: Synthetic oligonucleotide
  Antisense strand to SEQ ID NO: 1532920
uuagaucaaccagugucac

SEQ ID NO: 1532922 - RNA, 19 nt, Artificial Sequence
  Description of Artificial Sequence: Synthetic oligonucleotide
  Sense strand starting at position 3472 of SEQ ID NO: 1245057
gacacugguugaucuaaga

SEQ ID NO: 1532923 - RNA, 19 nt, Artificial Sequence
  Description of Artificial Sequence: Synthetic oligonucleotide
  Antisense strand to SEQ ID NO: 1532922
ucuuagaucaaccaguguc

SEQ ID NO: 1532924 - RNA, 19 nt, Artificial Sequence
  Description of Artificial Sequence: Synthetic oligonucleotide
  Sense strand starting at position 3516 of SEQ ID NO: 1245057
cugcaaaccguugacaauu

SEQ ID NO: 1532925 - RNA, 19 nt, Artificial Sequence
  Description of Artificial Sequence: Synthetic oligonucleotide
  Antisense strand to SEQ ID NO: 1532924
aauugucaacgguuugcag

SEQ ID NO: 1532926 - RNA, 19 nt, Artificial Sequence
  Description of Artificial Sequence: Synthetic oligonucleotide
  Sense strand starting at position 3541 of SEQ ID NO: 1245057
cgagcaugagcaugaucaa

SEQ ID NO: 1532927 - RNA, 19 nt, Artificial Sequence
  Description of Artificial Sequence: Synthetic oligonucleotide
  Antisense strand to SEQ ID NO: 1532926
uugaucaugcucaugcucg

SEQ ID NO: 1532928 - RNA, 19 nt, Artificial Sequence
  Description of Artificial Sequence: Synthetic oligonucleotide
  Sense strand starting at position 3775 of SEQ ID NO: 1245057
gguucucaagacuggguua

SEQ ID NO: 1532929 - RNA, 19 nt, Artificial Sequence
  Description of Artificial Sequence: Synthetic oligonucleotide
  Antisense strand to SEQ ID NO: 1532928
uaacccagucuugagaacc

SEQ ID NO: 1532930 - RNA, 19 nt, Artificial Sequence
  Description of Artificial Sequence: Synthetic oligonucleotide
  Sense strand starting at position 3776 of SEQ ID NO: 1245057
guucucaagacuggguuau

SEQ ID NO: 1532931 - RNA, 19 nt, Artificial Sequence
  Description of Artificial Sequence: Synthetic oligonucleotide
  Antisense strand to SEQ ID NO: 1532930
auaacccagucuugagaac

SEQ ID NO: 1532932 - RNA, 19 nt, Artificial Sequence
  Description of Artificial Sequence: Synthetic oligonucleotide
  Sense strand starting at position 3940 of SEQ ID NO: 1245057
ugcucaaccuguccaagaa

SEQ ID NO: 1532933 - RNA, 19 nt, Artificial Sequence
  Description of Artificial Sequence: Synthetic oligonucleotide
  Antisense strand to SEQ ID NO: 1532932
uucuuggacagguugagca

SEQ ID NO: 1532934 - RNA, 19 nt, Artificial Sequence
  Description of Artificial Sequence: Synthetic oligonucleotide
  Sense strand starting at position 3941 of SEQ ID NO: 1245057
gcucaaccuguccaagaaa

SEQ ID NO: 1532935 - RNA, 19 nt, Artificial Sequence
  Description of Artificial Sequence: Synthetic oligonucleotide
  Antisense strand to SEQ ID NO: 1532934
uuucuuggacagguugagc

SEQ ID NO: 1532936 - RNA, 19 nt, Artificial Sequence
  Description of Artificial Sequence: Synthetic oligonucleotide
  Sense strand starting at position 34 of SEQ ID NO: 1245058
ugguauaugcaauacacua

SEQ ID NO: 1532937 - RNA, 19 nt, Artificial Sequence
  Description of Artificial Sequence: Synthetic oligonucleotide
  Antisense strand to SEQ ID NO: 1532936
uaguguauugcauauacca

SEQ ID NO: 1532938 - RNA, 19 nt, Artificial Sequence
  Description of Artificial Sequence: Synthetic oligonucleotide
  Sense strand starting at position 174 of SEQ ID NO: 1245058
uugacuggaaguggugaaa

SEQ ID NO: 1532939 - RNA, 19 nt, Artificial Sequence
  Description of Artificial Sequence: Synthetic oligonucleotide
  Antisense strand to SEQ ID NO: 1532938
uuucaccacuuccagucaa

SEQ ID NO: 1532940 - RNA, 19 nt, Artificial Sequence
  Description of Artificial Sequence: Synthetic oligonucleotide
  Sense strand starting at position 196 of SEQ ID NO: 1245058
agcaauacaccauggugau

SEQ ID NO: 1532941 - RNA, 19 nt, Artificial Sequence
  Description of Artificial Sequence: Synthetic oligonucleotide
  Antisense strand to SEQ ID NO: 1532940
aucaccaugguguauugcu

SEQ ID NO: 1532942 - RNA, 19 nt, Artificial Sequence
  Description of Artificial Sequence: Synthetic oligonucleotide
  Sense strand starting at position 197 of SEQ ID NO: 1245058
gcaauacaccauggugaua

SEQ ID NO: 1532943 - RNA, 19 nt, Artificial Sequence
  Description of Artificial Sequence: Synthetic oligonucleotide
  Antisense strand to SEQ ID NO: 1532942
uaucaccaugguguauugc

SEQ ID NO: 1532944 - RNA, 19 nt, Artificial Sequence
  Description of Artificial Sequence: Synthetic oligonucleotide
  Sense strand starting at position 231 of SEQ ID NO: 1245058
uuguaauacccagagcaag

SEQ ID NO: 1532945 - RNA, 19 nt, Artificial Sequence
  Description of Artificial Sequence: Synthetic oligonucleotide
  Antisense strand to SEQ ID NO: 1532944
cuugcucuggguauuacaa

SEQ ID NO: 1532946 - RNA, 19 nt, Artificial Sequence
  Description of Artificial Sequence: Synthetic oligonucleotide
  Sense strand starting at position 362 of SEQ ID NO: 1245058
gaaugagaaucagaagaaa

SEQ ID NO: 1532947 - RNA, 19 nt, Artificial Sequence
  Description of Artificial Sequence: Synthetic oligonucleotide
  Antisense strand to SEQ ID NO: 1532946
uuucuucugauucucauuc

SEQ ID NO: 1532948 - RNA, 19 nt, Artificial Sequence
  Description of Artificial Sequence: Synthetic oligonucleotide
  Sense strand starting at position 434 of SEQ ID NO: 1245058
guaaauguaaaugguguaa

SEQ ID NO: 1532949 - RNA, 19 nt, Artificial Sequence
  Description of Artificial Sequence: Synthetic oligonucleotide
  Antisense strand to SEQ ID NO: 1532948
uuacaccauuuacauuuac

SEQ ID NO: 1532950 - RNA, 19 nt, Artificial Sequence
  Description of Artificial Sequence: Synthetic oligonucleotide
  Sense strand starting at position 583 of SEQ ID NO: 1245058
uggcgacaucaauaucuaa

SEQ ID NO: 1532951 - RNA, 19 nt, Artificial Sequence
  Description of Artificial Sequence: Synthetic oligonucleotide
  Antisense strand to SEQ ID NO: 1532950
uuagauauugaugucgcca

SEQ ID NO: 1532952 - RNA, 19 nt, Artificial Sequence
  Description of Artificial Sequence: Synthetic oligonucleotide
  Sense strand starting at position 738 of SEQ ID NO: 1245058
ggauucaaucugugaugga

SEQ ID NO: 1532953 - RNA, 19 nt, Artificial Sequence
  Description of Artificial Sequence: Synthetic oligonucleotide
  Antisense strand to SEQ ID NO: 1532952
uccaucacagauugaaucc

SEQ ID NO: 1532954 - RNA, 19 nt, Artificial Sequence
  Description of Artificial Sequence: Synthetic oligonucleotide
  Sense strand starting at position 774 of SEQ ID NO: 1245058
guggcacauuuccaacuaa

SEQ ID NO: 1532955 - RNA, 19 nt, Artificial Sequence
  Description of Artificial Sequence: Synthetic oligonucleotide
  Antisense strand to SEQ ID NO: 1532954
uuaguuggaaaugugccac

SEQ ID NO: 1532956 - RNA, 19 nt, Artificial Sequence
  Description of Artificial Sequence: Synthetic oligonucleotide
  Sense strand starting at position 894 of SEQ ID NO: 1245058
guucuacuguaaucuccaa

SEQ ID NO: 1532957 - RNA, 19 nt, Artificial Sequence
  Description of Artificial Sequence: Synthetic oligonucleotide
  Antisense strand to SEQ ID NO: 1532956
uuggagauuacaguagaac

SEQ ID NO: 1532958 - RNA, 19 nt, Artificial Sequence
  Description of Artificial Sequence: Synthetic oligonucleotide
  Sense strand starting at position 952 of SEQ ID NO: 1245058
ugaggaaaccauggcuuga

SEQ ID NO: 1532959 - RNA, 19 nt, Artificial Sequence
  Description of Artificial Sequence: Synthetic oligonucleotide
  Antisense strand to SEQ ID NO: 1532958
ucaagccaugguuuccuca

SEQ ID NO: 1532960 - RNA, 19 nt, Artificial Sequence
  Description of Artificial Sequence: Synthetic oligonucleotide
  Sense strand starting at position 956 of SEQ ID NO: 1245058
gaaaccauggcuugaguuu

SEQ ID NO: 1532961 - RNA, 19 nt, Artificial Sequence
  Description of Artificial Sequence: Synthetic oligonucleotide
  Antisense strand to SEQ ID NO: 1532960
aaacucaagccaugguuuc

SEQ ID NO: 1532962 - RNA, 19 nt, Artificial Sequence
  Description of Artificial Sequence: Synthetic oligonucleotide
  Sense strand starting at position 957 of SEQ ID NO: 1245058
aaaccauggcuugaguuua

SEQ ID NO: 1532963 - RNA, 19 nt, Artificial Sequence
  Description of Artificial Sequence: Synthetic oligonucleotide
  Antisense strand to SEQ ID NO: 1532962
uaaacucaagccaugguuu

SEQ ID NO: 1532964 - RNA, 19 nt, Artificial Sequence
  Description of Artificial Sequence: Synthetic oligonucleotide
  Sense strand starting at position 962 of SEQ ID NO: 1245058
auggcuugaguuuaaauaa

SEQ ID NO: 1532965 - RNA, 19 nt, Artificial Sequence
  Description of Artificial Sequence: Synthetic oligonucleotide
  Antisense strand to SEQ ID NO: 1532964
uuauuuaaacucaagccau

SEQ ID NO: 1532966 - RNA, 19 nt, Artificial Sequence
  Description of Artificial Sequence: Synthetic oligonucleotide
  Sense strand starting at position 973 of SEQ ID NO: 1245058
uuaaauaaguuacccgaga

SEQ ID NO: 1532967 - RNA, 19 nt, Artificial Sequence
  Description of Artificial Sequence: Synthetic oligonucleotide
  Antisense strand to SEQ ID NO: 1532966
ucucggguaacuuauuuaa

SEQ ID NO: 1532968 - RNA, 19 nt, Artificial Sequence
  Description of Artificial Sequence: Synthetic oligonucleotide
  Sense strand starting at position 978 of SEQ ID NO: 1245058
uaaguuacccgagaguaaa

SEQ ID NO: 1532969 - RNA, 19 nt, Artificial Sequence
  Description of Artificial Sequence: Synthetic oligonucleotide
  Antisense strand to SEQ ID NO: 1532968
uuuacucucggguaacuua

SEQ ID NO: 1532970 - RNA, 19 nt, Artificial Sequence
  Description of Artificial Sequence: Synthetic oligonucleotide
  Sense strand starting at position 1011 of SEQ ID NO: 1245058
acacucaaaucagcguuau

SEQ ID NO: 1532971 - RNA, 19 nt, Artificial Sequence
  Description of Artificial Sequence: Synthetic oligonucleotide
  Antisense strand to SEQ ID NO: 1532970
auaacgcugauuugagugu

SEQ ID NO: 1532972 - RNA, 19 nt, Artificial Sequence
  Description of Artificial Sequence: Synthetic oligonucleotide
  Sense strand starting at position 1015 of SEQ ID NO: 1245058
ucaaaucagcguuauaaca

SEQ ID NO: 1532973 - RNA, 19 nt, Artificial Sequence
  Description of Artificial Sequence: Synthetic oligonucleotide
  Antisense strand to SEQ ID NO: 1532972
uguuauaacgcugauuuga

SEQ ID NO: 1532974 - RNA, 19 nt, Artificial Sequence
  Description of Artificial Sequence: Synthetic oligonucleotide
  Sense strand starting at position 1028 of SEQ ID NO: 1245058
auaacauuccaguauguac

SEQ ID NO: 1532975 - RNA, 19 nt, Artificial Sequence
  Description of Artificial Sequence: Synthetic oligonucleotide
  Antisense strand to SEQ ID NO: 1532974
guacauacuggaauguuau

SEQ ID NO: 1532976 - RNA, 19 nt, Artificial Sequence
  Description of Artificial Sequence: Synthetic oligonucleotide
  Sense strand starting at position 1055 of SEQ ID NO: 1245058
auauguuagucucucaaau

SEQ ID NO: 1532977 - RNA, 19 nt, Artificial Sequence
  Description of Artificial Sequence: Synthetic oligonucleotide
  Antisense strand to SEQ ID NO: 1532976
auuugagagacuaacauau

SEQ ID NO: 1532978 - RNA, 19 nt, Artificial Sequence
  Description of Artificial Sequence: Synthetic oligonucleotide
  Sense strand starting at position 1117 of SEQ ID NO: 1245058
cuacauauugagugaaauu

SEQ ID NO: 1532979 - RNA, 19 nt, Artificial Sequence
  Description of Artificial Sequence: Synthetic oligonucleotide
  Antisense strand to SEQ ID NO: 1532978
aauuucacucaauauguag

SEQ ID NO: 1532980 - RNA, 19 nt, Artificial Sequence
  Description of Artificial Sequence: Synthetic oligonucleotide
  Sense strand starting at position 1141 of SEQ ID NO: 1245058
uucgacaauuccucuggaa

SEQ ID NO: 1532981 - RNA, 19 nt, Artificial Sequence
  Description of Artificial Sequence: Synthetic oligonucleotide
  Antisense strand to SEQ ID NO: 1532980
uuccagaggaauugucgaa

SEQ ID NO: 1532982 - RNA, 19 nt, Artificial Sequence
  Description of Artificial Sequence: Synthetic oligonucleotide
  Sense strand starting at position 1143 of SEQ ID NO: 1245058
cgacaauuccucuggaaua

SEQ ID NO: 1532983 - RNA, 19 nt, Artificial Sequence
  Description of Artificial Sequence: Synthetic oligonucleotide
  Antisense strand to SEQ ID NO: 1532982
uauuccagaggaauugucg

SEQ ID NO: 1532984 - RNA, 19 nt, Artificial Sequence
  Description of Artificial Sequence: Synthetic oligonucleotide
  Sense strand starting at position 1240 of SEQ ID NO: 1245058
ugcaaucucgaguaugaaa

SEQ ID NO: 1532985 - RNA, 19 nt, Artificial Sequence
  Description of Artificial Sequence: Synthetic oligonucleotide
  Antisense strand to SEQ ID NO: 1532984
uuucauacucgagauugca

SEQ ID NO: 1532986 - RNA, 19 nt, Artificial Sequence
  Description of Artificial Sequence: Synthetic oligonucleotide
  Sense strand starting at position 1247 of SEQ ID NO: 1245058
ucgaguaugaaaggucugu

SEQ ID NO: 1532987 - RNA, 19 nt, Artificial Sequence
  Description of Artificial Sequence: Synthetic oligonucleotide
  Antisense strand to SEQ ID NO: 1532986
acagaccuuucauacucga

SEQ ID NO: 1532988 - RNA, 19 nt, Artificial Sequence
  Description of Artificial Sequence: Synthetic oligonucleotide
  Sense strand starting at position 1251 of SEQ ID NO: 1245058
guaugaaaggucuguacac

SEQ ID NO: 1532989 - RNA, 19 nt, Artificial Sequence
  Description of Artificial Sequence: Synthetic oligonucleotide
  Antisense strand to SEQ ID NO: 1532988
guguacagaccuuucauac

SEQ ID NO: 1532990 - RNA, 19 nt, Artificial Sequence
  Description of Artificial Sequence: Synthetic oligonucleotide
  Sense strand starting at position 1252 of SEQ ID NO: 1245058
uaugaaaggucuguacacu

SEQ ID NO: 1532991 - RNA, 19 nt, Artificial Sequence
  Description of Artificial Sequence: Synthetic oligonucleotide
  Antisense strand to SEQ ID NO: 1532990
aguguacagaccuuucaua

SEQ ID NO: 1532992 - RNA, 19 nt, Artificial Sequence
  Description of Artificial Sequence: Synthetic oligonucleotide
  Sense strand starting at position 1304 of SEQ ID NO: 1245058
aguuaaccguucucaauac

SEQ ID NO: 1532993 - RNA, 19 nt, Artificial Sequence
  Description of Artificial Sequence: Synthetic oligonucleotide
  Antisense strand to SEQ ID NO: 1532992
guauugagaacgguuaacu

SEQ ID NO: 1532994 - RNA, 19 nt, Artificial Sequence
  Description of Artificial Sequence: Synthetic oligonucleotide
  Sense strand starting at position 1404 of SEQ ID NO: 1245058
agcaaagauaucgaaaugu

SEQ ID NO: 1532995 - RNA, 19 nt, Artificial Sequence
  Description of Artificial Sequence: Synthetic oligonucleotide
  Antisense strand to SEQ ID NO: 1532994
acauuucgauaucuuugcu

SEQ ID NO: 1532996 - RNA, 19 nt, Artificial Sequence
  Description of Artificial Sequence: Synthetic oligonucleotide
  Sense strand starting at position 1415 of SEQ ID NO: 1245058
cgaaaugucgaagagaagu

SEQ ID NO: 1532997 - RNA, 19 nt, Artificial Sequence
  Description of Artificial Sequence: Synthetic oligonucleotide
  Antisense strand to SEQ ID NO: 1532996
acuucucuucgacauuucg

SEQ ID NO: 1532998 - RNA, 19 nt, Artificial Sequence
  Description of Artificial Sequence: Synthetic oligonucleotide
  Sense strand starting at position 1527 of SEQ ID NO: 1245058
cucugaaguauccgagaag

SEQ ID NO: 1532999 - RNA, 19 nt, Artificial Sequence
  Description of Artificial Sequence: Synthetic oligonucleotide
  Antisense strand to SEQ ID NO: 1532998
cuucucggauacuucagag

SEQ ID NO: 1533000 - RNA, 19 nt, Artificial Sequence
  Description of Artificial Sequence: Synthetic oligonucleotide
  Sense strand starting at position 1530 of SEQ ID NO: 1245058
ugaaguauccgagaaguua

SEQ ID NO: 1533001 - RNA, 19 nt, Artificial Sequence
  Description of Artificial Sequence: Synthetic oligonucleotide
  Antisense strand to SEQ ID NO: 1533000
uaacuucucggauacuuca

SEQ ID NO: 1533002 - RNA, 19 nt, Artificial Sequence
  Description of Artificial Sequence: Synthetic oligonucleotide
  Sense strand starting at position 2245 of SEQ ID NO: 1245058
gggcaaugacgucacgagu

SEQ ID NO: 1533003 - RNA, 19 nt, Artificial Sequence
  Description of Artificial Sequence: Synthetic oligonucleotide
  Antisense strand to SEQ ID NO: 1533002
acucgugacgucauugccc

SEQ ID NO: 1533004 - RNA, 19 nt, Artificial Sequence
  Description of Artificial Sequence: Synthetic oligonucleotide
  Sense strand starting at position 2812 of SEQ ID NO: 1245058
ggucuuuagcuugauucca

SEQ ID NO: 1533005 - RNA, 19 nt, Artificial Sequence
  Description of Artificial Sequence: Synthetic oligonucleotide
  Antisense strand to SEQ ID NO: 1533004
uggaaucaagcuaaagacc

SEQ ID NO: 1533006 - RNA, 19 nt, Artificial Sequence
  Description of Artificial Sequence: Synthetic oligonucleotide
  Sense strand starting at position 2892 of SEQ ID NO: 1245058
gguuuacacccucagucua

SEQ ID NO: 1533007 - RNA, 19 nt, Artificial Sequence
  Description of Artificial Sequence: Synthetic oligonucleotide
  Antisense strand to SEQ ID NO: 1533006
uagacugaggguguaaacc

SEQ ID NO: 1533008 - RNA, 19 nt, Artificial Sequence
  Description of Artificial Sequence: Synthetic oligonucleotide
  Sense strand starting at position 3055 of SEQ ID NO: 1245058
guauuaaugguuuacucac

SEQ ID NO: 1533009 - RNA, 19 nt, Artificial Sequence
  Description of Artificial Sequence: Synthetic oligonucleotide
  Antisense strand to SEQ ID NO: 1533008
gugaguaaaccauuaauac

SEQ ID NO: 1533010 - RNA, 19 nt, Artificial Sequence
  Description of Artificial Sequence: Synthetic oligonucleotide
  Sense strand starting at position 3130 of SEQ ID NO: 1245058
uugucuauguguuugaaac

SEQ ID NO: 1533011 - RNA, 19 nt, Artificial Sequence
  Description of Artificial Sequence: Synthetic oligonucleotide
  Antisense strand to SEQ ID NO: 1533010
guuucaaacacauagacaa

SEQ ID NO: 1533012 - RNA, 19 nt, Artificial Sequence
  Description of Artificial Sequence: Synthetic oligonucleotide
  Sense strand starting at position 3131 of SEQ ID NO: 1245058
ugucuauguguuugaaaca

SEQ ID NO: 1533013 - RNA, 19 nt, Artificial Sequence
  Description of Artificial Sequence: Synthetic oligonucleotide
  Antisense strand to SEQ ID NO: 1533012
uguuucaaacacauagaca

SEQ ID NO: 1533014 - RNA, 19 nt, Artificial Sequence
  Description of Artificial Sequence: Synthetic oligonucleotide
  Sense strand starting at position 3136 of SEQ ID NO: 1245058
auguguuugaaacacuguu

SEQ ID NO: 1533015 - RNA, 19 nt, Artificial Sequence
  Description of Artificial Sequence: Synthetic oligonucleotide
  Antisense strand to SEQ ID NO: 1533014
aacaguguuucaaacacau

SEQ ID NO: 1533016 - RNA, 19 nt, Artificial Sequence
  Description of Artificial Sequence: Synthetic oligonucleotide
  Sense strand starting at position 162 of SEQ ID NO: 1245059
cuuguugaguaucuagaua

SEQ ID NO: 1533017 - RNA, 19 nt, Artificial Sequence
  Description of Artificial Sequence: Synthetic oligonucleotide
  Antisense strand to SEQ ID NO: 1533016
uaucuagauacucaacaag

SEQ ID NO: 1533018 - RNA, 19 nt, Artificial Sequence
  Description of Artificial Sequence: Synthetic oligonucleotide
  Sense strand starting at position 367 of SEQ ID NO: 1245059
aucaucaucugaguuuaua

SEQ ID NO: 1533019 - RNA, 19 nt, Artificial Sequence
  Description of Artificial Sequence: Synthetic oligonucleotide
  Antisense strand to SEQ ID NO: 1533018
uauaaacucagaugaugau

SEQ ID NO: 1533020 - RNA, 19 nt, Artificial Sequence
  Description of Artificial Sequence: Synthetic oligonucleotide
  Sense strand starting at position 444 of SEQ ID NO: 1245059
aaugaagcagucuggauua

SEQ ID NO: 1533021 - RNA, 19 nt, Artificial Sequence
  Description of Artificial Sequence: Synthetic oligonucleotide
  Antisense strand to SEQ ID NO: 1533020
uaauccagacugcuucauu

SEQ ID NO: 1533022 - RNA, 19 nt, Artificial Sequence
  Description of Artificial Sequence: Synthetic oligonucleotide
  Sense strand starting at position 456 of SEQ ID NO: 1245059
uggauuagguuuccaucuu

SEQ ID NO: 1533023 - RNA, 19 nt, Artificial Sequence
  Description of Artificial Sequence: Synthetic oligonucleotide
  Antisense strand to SEQ ID NO: 1533022
aagauggaaaccuaaucca

SEQ ID NO: 1533024 - RNA, 19 nt, Artificial Sequence
  Description of Artificial Sequence: Synthetic oligonucleotide
  Sense strand starting at position 516 of SEQ ID NO: 1245059
agacaaugcccugaucauu

SEQ ID NO: 1533025 - RNA, 19 nt, Artificial Sequence
  Description of Artificial Sequence: Synthetic oligonucleotide
  Antisense strand to SEQ ID NO: 1533024
aaugaucagggcauugucu

SEQ ID NO: 1533026 - RNA, 19 nt, Artificial Sequence
  Description of Artificial Sequence: Synthetic oligonucleotide
  Sense strand starting at position 644 of SEQ ID NO: 1245059
agaggagaugcucacuguu

SEQ ID NO: 1533027 - RNA, 19 nt, Artificial Sequence
  Description of Artificial Sequence: Synthetic oligonucleotide
  Antisense strand to SEQ ID NO: 1533026
aacagugagcaucuccucu

SEQ ID NO: 1533028 - RNA, 19 nt, Artificial Sequence
  Description of Artificial Sequence: Synthetic oligonucleotide
  Sense strand starting at position 646 of SEQ ID NO: 1245059
aggagaugcucacuguuac

SEQ ID NO: 1533029 - RNA, 19 nt, Artificial Sequence
  Description of Artificial Sequence: Synthetic oligonucleotide
  Antisense strand to SEQ ID NO: 1533028
guaacagugagcaucuccu

SEQ ID NO: 1533030 - RNA, 19 nt, Artificial Sequence
  Description of Artificial Sequence: Synthetic oligonucleotide
  Sense strand starting at position 647 of SEQ ID NO: 1245059
ggagaugcucacuguuacu

SEQ ID NO: 1533031 - RNA, 19 nt, Artificial Sequence
  Description of Artificial Sequence: Synthetic oligonucleotide
  Antisense strand to SEQ ID NO: 1533030
aguaacagugagcaucucc

SEQ ID NO: 1533032 - RNA, 19 nt, Artificial Sequence
  Description of Artificial Sequence: Synthetic oligonucleotide
  Sense strand starting at position 652 of SEQ ID NO: 1245059
ugcucacuguuacuaagua

SEQ ID NO: 1533033 - RNA, 19 nt, Artificial Sequence
  Description of Artificial Sequence: Synthetic oligonucleotide
  Antisense strand to SEQ ID NO: 1533032
uacuuaguaacagugagca

SEQ ID NO: 1533034 - RNA, 19 nt, Artificial Sequence
  Description of Artificial Sequence: Synthetic oligonucleotide
  Sense strand starting at position 683 of SEQ ID NO: 1245059
auacguaauagccaggaaa

SEQ ID NO: 1533035 - RNA, 19 nt, Artificial Sequence
  Description of Artificial Sequence: Synthetic oligonucleotide
  Antisense strand to SEQ ID NO: 1533034
uuuccuggcuauuacguau

SEQ ID NO: 1533036 - RNA, 19 nt, Artificial Sequence
  Description of Artificial Sequence: Synthetic oligonucleotide
  Sense strand starting at position 808 of SEQ ID NO: 1245059
ggacgaggaauucggauau

SEQ ID NO: 1533037 - RNA, 19 nt, Artificial Sequence
  Description of Artificial Sequence: Synthetic oligonucleotide
  Antisense strand to SEQ ID NO: 1533036
auauccgaauuccucgucc

SEQ ID NO: 1533038 - RNA, 19 nt, Artificial Sequence
  Description of Artificial Sequence: Synthetic oligonucleotide
  Sense strand starting at position 889 of SEQ ID NO: 1245059
ugauaaaccgguuaacauu

SEQ ID NO: 1533039 - RNA, 19 nt, Artificial Sequence
  Description of Artificial Sequence: Synthetic oligonucleotide
  Antisense strand to SEQ ID NO: 1533038
aauguuaaccgguuuauca

SEQ ID NO: 1533040 - RNA, 19 nt, Artificial Sequence
  Description of Artificial Sequence: Synthetic oligonucleotide
  Sense strand starting at position 1197 of SEQ ID NO: 1245059
caguuauuauacccgagag

SEQ ID NO: 1533041 - RNA, 19 nt, Artificial Sequence
  Description of Artificial Sequence: Synthetic oligonucleotide
  Antisense strand to SEQ ID NO: 1533040
cucucggguauaauaacug

SEQ ID NO: 1533042 - RNA, 19 nt, Artificial Sequence
  Description of Artificial Sequence: Synthetic oligonucleotide
  Sense strand starting at position 1198 of SEQ ID NO: 1245059
aguuauuauacccgagagu

SEQ ID NO: 1533043 - RNA, 19 nt, Artificial Sequence
  Description of Artificial Sequence: Synthetic oligonucleotide
  Antisense strand to SEQ ID NO: 1533042
acucucggguauaauaacu

SEQ ID NO: 1533044 - RNA, 19 nt, Artificial Sequence
  Description of Artificial Sequence: Synthetic oligonucleotide
  Sense strand starting at position 1199 of SEQ ID NO: 1245059
guuauuauacccgagagug

SEQ ID NO: 1533045 - RNA, 19 nt, Artificial Sequence
  Description of Artificial Sequence: Synthetic oligonucleotide
  Antisense strand to SEQ ID NO: 1533044
cacucucggguauaauaac

SEQ ID NO: 1533046 - RNA, 19 nt, Artificial Sequence
  Description of Artificial Sequence: Synthetic oligonucleotide
  Sense strand starting at position 1201 of SEQ ID NO: 1245059
uauuauacccgagaguguu

SEQ ID NO: 1533047 - RNA, 19 nt, Artificial Sequence
  Description of Artificial Sequence: Synthetic oligonucleotide
  Antisense strand to SEQ ID NO: 1533046
aacacucucggguauaaua

SEQ ID NO: 1533048 - RNA, 19 nt, Artificial Sequence
  Description of Artificial Sequence: Synthetic oligonucleotide
  Sense strand starting at position 1207 of SEQ ID NO: 1245059
acccgagaguguuugaaua

SEQ ID NO: 1533049 - RNA, 19 nt, Artificial Sequence
  Description of Artificial Sequence: Synthetic oligonucleotide
  Antisense strand to SEQ ID NO: 1533048
uauucaaacacucucgggu

SEQ ID NO: 1533050 - RNA, 19 nt, Artificial Sequence
  Description of Artificial Sequence: Synthetic oligonucleotide
  Sense strand starting at position 1243 of SEQ ID NO: 1245059
ucaguuuaggcuuaaagac

SEQ ID NO: 1533051 - RNA, 19 nt, Artificial Sequence
  Description of Artificial Sequence: Synthetic oligonucleotide
  Antisense strand to SEQ ID NO: 1533050
gucuuuaagccuaaacuga

SEQ ID NO: 1533052 - RNA, 19 nt, Artificial Sequence
  Description of Artificial Sequence: Synthetic oligonucleotide
  Sense strand starting at position 1439 of SEQ ID NO: 1245059
guuugacacgucugaaaua

SEQ ID NO: 1533053 - RNA, 19 nt, Artificial Sequence
  Description of Artificial Sequence: Synthetic oligonucleotide
  Antisense strand to SEQ ID NO: 1533052
uauuucagacgugucaaac

SEQ ID NO: 1533054 - RNA, 19 nt, Artificial Sequence
  Description of Artificial Sequence: Synthetic oligonucleotide
  Sense strand starting at position 1514 of SEQ ID NO: 1245059
agaaguaacaucggauaac

SEQ ID NO: 1533055 - RNA, 19 nt, Artificial Sequence
  Description of Artificial Sequence: Synthetic oligonucleotide
  Antisense strand to SEQ ID NO: 1533054
guuauccgauguuacuucu

SEQ ID NO: 1533056 - RNA, 19 nt, Artificial Sequence
  Description of Artificial Sequence: Synthetic oligonucleotide
  Sense strand starting at position 1598 of SEQ ID NO: 1245059
gggccacauagaugaagua

SEQ ID NO: 1533057 - RNA, 19 nt, Artificial Sequence
  Description of Artificial Sequence: Synthetic oligonucleotide
  Antisense strand to SEQ ID NO: 1533056
uacuucaucuauguggccc

SEQ ID NO: 1533058 - RNA, 19 nt, Artificial Sequence
  Description of Artificial Sequence: Synthetic oligonucleotide
  Sense strand starting at position 1776 of SEQ ID NO: 1245059
uuccauaaaugugcugaga

SEQ ID NO: 1533059 - RNA, 19 nt, Artificial Sequence
  Description of Artificial Sequence: Synthetic oligonucleotide
  Antisense strand to SEQ ID NO: 1533058
ucucagcacauuuauggaa

SEQ ID NO: 1533060 - RNA, 19 nt, Artificial Sequence
  Description of Artificial Sequence: Synthetic oligonucleotide
  Sense strand starting at position 3388 of SEQ ID NO: 1245059
gguccuuagcuguaucaca

SEQ ID NO: 1533061 - RNA, 19 nt, Artificial Sequence
  Description of Artificial Sequence: Synthetic oligonucleotide
  Antisense strand to SEQ ID NO: 1533060
ugugauacagcuaaggacc

SEQ ID NO: 1533062 - RNA, 19 nt, Artificial Sequence
  Description of Artificial Sequence: Synthetic oligonucleotide
  Sense strand starting at position 3475 of SEQ ID NO: 1245059
cugccauuauuugcugagu

SEQ ID NO: 1533063 - RNA, 19 nt, Artificial Sequence
  Description of Artificial Sequence: Synthetic oligonucleotide
  Antisense strand to SEQ ID NO: 1533062
acucagcaaauaauggcag

SEQ ID NO: 1533064 - RNA, 19 nt, Artificial Sequence
  Description of Artificial Sequence: Synthetic oligonucleotide
  Sense strand starting at position 3476 of SEQ ID NO: 1245059
ugccauuauuugcugagua

SEQ ID NO: 1533065 - RNA, 19 nt, Artificial Sequence
  Description of Artificial Sequence: Synthetic oligonucleotide
  Antisense strand to SEQ ID NO: 1533064
uacucagcaaauaauggca

SEQ ID NO: 1533066 - RNA, 19 nt, Artificial Sequence
  Description of Artificial Sequence: Synthetic oligonucleotide
  Sense strand starting at position 3497 of SEQ ID NO: 1245059
uccagauggaacuguaguu

SEQ ID NO: 1533067 - RNA, 19 nt, Artificial Sequence
  Description of Artificial Sequence: Synthetic oligonucleotide
  Antisense strand to SEQ ID NO: 1533066
aacuacaguuccaucugga

SEQ ID NO: 1533068 - RNA, 19 nt, Artificial Sequence
  Description of Artificial Sequence: Synthetic oligonucleotide
  Sense strand starting at position 3509 of SEQ ID NO: 1245059
uguaguugauagccaauaa

SEQ ID NO: 1533069 - RNA, 19 nt, Artificial Sequence
  Description of Artificial Sequence: Synthetic oligonucleotide
  Antisense strand to SEQ ID NO: 1533068
uuauuggcuaucaacuaca

SEQ ID NO: 1533070 - RNA, 19 nt, Artificial Sequence
  Description of Artificial Sequence: Synthetic oligonucleotide
  Sense strand starting at position 3559 of SEQ ID NO: 1245059
cauagaucgucccugagau

SEQ ID NO: 1533071 - RNA, 19 nt, Artificial Sequence
  Description of Artificial Sequence: Synthetic oligonucleotide
  Antisense strand to SEQ ID NO: 1533070
aucucagggacgaucuaug

SEQ ID NO: 1533072 - RNA, 19 nt, Artificial Sequence
  Description of Artificial Sequence: Synthetic oligonucleotide
  Sense strand starting at position 3560 of SEQ ID NO: 1245059
auagaucgucccugagaua

SEQ ID NO: 1533073 - RNA, 19 nt, Artificial Sequence
  Description of Artificial Sequence: Synthetic oligonucleotide
  Antisense strand to SEQ ID NO: 1533072
uaucucagggacgaucuau

SEQ ID NO: 1533074 - RNA, 19 nt, Artificial Sequence
  Description of Artificial Sequence: Synthetic oligonucleotide
  Sense strand starting at position 3561 of SEQ ID NO: 1245059
uagaucgucccugagauaa

SEQ ID NO: 1533075 - RNA, 19 nt, Artificial Sequence
  Description of Artificial Sequence: Synthetic oligonucleotide
  Antisense strand to SEQ ID NO: 1533074
uuaucucagggacgaucua

SEQ ID NO: 1533076 - RNA, 19 nt, Artificial Sequence
  Description of Artificial Sequence: Synthetic oligonucleotide
  Sense strand starting at position 3571 of SEQ ID NO: 1245059
cugagauaaugcuuugcaa

SEQ ID NO: 1533077 - RNA, 19 nt, Artificial Sequence
  Description of Artificial Sequence: Synthetic oligonucleotide
  Antisense strand to SEQ ID NO: 1533076
uugcaaagcauuaucucag

SEQ ID NO: 1533078 - RNA, 19 nt, Artificial Sequence
  Description of Artificial Sequence: Synthetic oligonucleotide
  Sense strand starting at position 3573 of SEQ ID NO: 1245059
gagauaaugcuuugcaaug

SEQ ID NO: 1533079 - RNA, 19 nt, Artificial Sequence
  Description of Artificial Sequence: Synthetic oligonucleotide
  Antisense strand to SEQ ID NO: 1533078
cauugcaaagcauuaucuc

SEQ ID NO: 1533080 - RNA, 19 nt, Artificial Sequence
  Description of Artificial Sequence: Synthetic oligonucleotide
  Sense strand starting at position 3574 of SEQ ID NO: 1245059
agauaaugcuuugcaaugu

SEQ ID NO: 1533081 - RNA, 19 nt, Artificial Sequence
  Description of Artificial Sequence: Synthetic oligonucleotide
  Antisense strand to SEQ ID NO: 1533080
acauugcaaagcauuaucu

SEQ ID NO: 1533082 - RNA, 19 nt, Artificial Sequence
  Description of Artificial Sequence: Synthetic oligonucleotide
  Sense strand starting at position 3578 of SEQ ID NO: 1245059
aaugcuuugcaauguggaa

SEQ ID NO: 1533083 - RNA, 19 nt, Artificial Sequence
  Description of Artificial Sequence: Synthetic oligonucleotide
  Antisense strand to SEQ ID NO: 1533082
uuccacauugcaaagcauu

SEQ ID NO: 1533084 - RNA, 19 nt, Artificial Sequence
  Description of Artificial Sequence: Synthetic oligonucleotide
  Sense strand starting at position 3688 of SEQ ID NO: 1245059
gcccucaaacaguggauau

SEQ ID NO: 1533085 - RNA, 19 nt, Artificial Sequence
  Description of Artificial Sequence: Synthetic oligonucleotide
  Antisense strand to SEQ ID NO: 1533084
auauccacuguuugagggc

SEQ ID NO: 1533086 - RNA, 19 nt, Artificial Sequence
  Description of Artificial Sequence: Synthetic oligonucleotide
  Sense strand starting at position 3736 of SEQ ID NO: 1245059
auggauaacugugcauaau

SEQ ID NO: 1533087 - RNA, 19 nt, Artificial Sequence
  Description of Artificial Sequence: Synthetic oligonucleotide
  Antisense strand to SEQ ID NO: 1533086
auuaugcacaguuauccau

SEQ ID NO: 1533088 - RNA, 19 nt, Artificial Sequence
  Description of Artificial Sequence: Synthetic oligonucleotide
  Sense strand starting at position 3737 of SEQ ID NO: 1245059
uggauaacugugcauaaug

SEQ ID NO: 1533089 - RNA, 19 nt, Artificial Sequence
  Description of Artificial Sequence: Synthetic oligonucleotide
  Antisense strand to SEQ ID NO: 1533088
cauuaugcacaguuaucca

SEQ ID NO: 1533090 - RNA, 19 nt, Artificial Sequence
  Description of Artificial Sequence: Synthetic oligonucleotide
  Sense strand starting at position 3763 of SEQ ID NO: 1245059
uggugucugggacguaaga

SEQ ID NO: 1533091 - RNA, 19 nt, Artificial Sequence
  Description of Artificial Sequence: Synthetic oligonucleotide
  Antisense strand to SEQ ID NO: 1533090
ucuuacgucccagacacca

SEQ ID NO: 1533092 - RNA, 19 nt, Artificial Sequence
  Description of Artificial Sequence: Synthetic oligonucleotide
  Sense strand starting at position 3776 of SEQ ID NO: 1245059
guaagagguuccuuauauc

SEQ ID NO: 1533093 - RNA, 19 nt, Artificial Sequence
  Description of Artificial Sequence: Synthetic oligonucleotide
  Antisense strand to SEQ ID NO: 1533092
gauauaaggaaccucuuac

SEQ ID NO: 1533094 - RNA, 19 nt, Artificial Sequence
  Description of Artificial Sequence: Synthetic oligonucleotide
  Sense strand starting at position 3782 of SEQ ID NO: 1245059
gguuccuuauaucccauua

SEQ ID NO: 1533095 - RNA, 19 nt, Artificial Sequence
  Description of Artificial Sequence: Synthetic oligonucleotide
  Antisense strand to SEQ ID NO: 1533094
uaaugggauauaaggaacc

SEQ ID NO: 1533096 - RNA, 19 nt, Artificial Sequence
  Description of Artificial Sequence: Synthetic oligonucleotide
  Sense strand starting at position 15 of SEQ ID NO: 1245060
gccugauacuccucaggac

SEQ ID NO: 1533097 - RNA, 19 nt, Artificial Sequence
  Description of Artificial Sequence: Synthetic oligonucleotide
  Antisense strand to SEQ ID NO: 1533096
guccugaggaguaucaggc

SEQ ID NO: 1533098 - RNA, 19 nt, Artificial Sequence
  Description of Artificial Sequence: Synthetic oligonucleotide
  Sense strand starting at position 183 of SEQ ID NO: 1245060
ugaugaugcccuuggucuu

SEQ ID NO: 1533099 - RNA, 19 nt, Artificial Sequence
  Description of Artificial Sequence: Synthetic oligonucleotide
  Antisense strand to SEQ ID NO: 1533098
aagaccaagggcaucauca

SEQ ID NO: 1533100 - RNA, 19 nt, Artificial Sequence
  Description of Artificial Sequence: Synthetic oligonucleotide
  Sense strand starting at position 195 of SEQ ID NO: 1245060
uggucuucuguggagucua

SEQ ID NO: 1533101 - RNA, 19 nt, Artificial Sequence
  Description of Artificial Sequence: Synthetic oligonucleotide
  Antisense strand to SEQ ID NO: 1533100
uagacuccacagaagacca

SEQ ID NO: 1533102 - RNA, 19 nt, Artificial Sequence
  Description of Artificial Sequence: Synthetic oligonucleotide
  Sense strand starting at position 203 of SEQ ID NO: 1245060
uguggagucuauucuucua

SEQ ID NO: 1533103 - RNA, 19 nt, Artificial Sequence
  Description of Artificial Sequence: Synthetic oligonucleotide
  Antisense strand to SEQ ID NO: 1533102
uagaagaauagacuccaca

SEQ ID NO: 1533104 - RNA, 19 nt, Artificial Sequence
  Description of Artificial Sequence: Synthetic oligonucleotide
  Sense strand starting at position 205 of SEQ ID NO: 1245060
uggagucuauucuucuaau

SEQ ID NO: 1533105 - RNA, 19 nt, Artificial Sequence
  Description of Artificial Sequence: Synthetic oligonucleotide
  Antisense strand to SEQ ID NO: 1533104
auuagaagaauagacucca

SEQ ID NO: 1533106 - RNA, 19 nt, Artificial Sequence
  Description of Artificial Sequence: Synthetic oligonucleotide
  Sense strand starting at position 206 of SEQ ID NO: 1245060
ggagucuauucuucuaauc

SEQ ID NO: 1533107 - RNA, 19 nt, Artificial Sequence
  Description of Artificial Sequence: Synthetic oligonucleotide
  Antisense strand to SEQ ID NO: 1533106
gauuagaagaauagacucc

SEQ ID NO: 1533108 - RNA, 19 nt, Artificial Sequence
  Description of Artificial Sequence: Synthetic oligonucleotide
  Sense strand starting at position 211 of SEQ ID NO: 1245060
cuauucuucuaaucggguu

SEQ ID NO: 1533109 - RNA, 19 nt, Artificial Sequence
  Description of Artificial Sequence: Synthetic oligonucleotide
  Antisense strand to SEQ ID NO: 1533108
aacccgauuagaagaauag

SEQ ID NO: 1533110 - RNA, 19 nt, Artificial Sequence
  Description of Artificial Sequence: Synthetic oligonucleotide
  Sense strand starting at position 223 of SEQ ID NO: 1245060
ucggguuguucuccaauuu

SEQ ID NO: 1533111 - RNA, 19 nt, Artificial Sequence
  Description of Artificial Sequence: Synthetic oligonucleotide
  Antisense strand to SEQ ID NO: 1533110
aaauuggagaacaacccga

SEQ ID NO: 1533112 - RNA, 19 nt, Artificial Sequence
  Description of Artificial Sequence: Synthetic oligonucleotide
  Sense strand starting at position 270 of SEQ ID NO: 1245060
gcuuguuugggaugcagac

SEQ ID NO: 1533113 - RNA, 19 nt, Artificial Sequence
  Description of Artificial Sequence: Synthetic oligonucleotide
  Antisense strand to SEQ ID NO: 1533112
gucugcaucccaaacaagc

SEQ ID NO: 1533114 - RNA, 19 nt, Artificial Sequence
  Description of Artificial Sequence: Synthetic oligonucleotide
  Sense strand starting at position 444 of SEQ ID NO: 1245060
cuggauuacaaacgcuaga

SEQ ID NO: 1533115 - RNA, 19 nt, Artificial Sequence
  Description of Artificial Sequence: Synthetic oligonucleotide
  Antisense strand to SEQ ID NO: 1533114
ucuagcguuuguaauccag

SEQ ID NO: 1533116 - RNA, 19 nt, Artificial Sequence
  Description of Artificial Sequence: Synthetic oligonucleotide
  Sense strand starting at position 449 of SEQ ID NO: 1245060
uuacaaacgcuagaucuuu

SEQ ID NO: 1533117 - RNA, 19 nt, Artificial Sequence
  Description of Artificial Sequence: Synthetic oligonucleotide
  Antisense strand to SEQ ID NO: 1533116
aaagaucuagcguuuguaa

SEQ ID NO: 1533118 - RNA, 19 nt, Artificial Sequence
  Description of Artificial Sequence: Synthetic oligonucleotide
  Sense strand starting at position 455 of SEQ ID NO: 1245060
acgcuagaucuuuggaucu

SEQ ID NO: 1533119 - RNA, 19 nt, Artificial Sequence
  Description of Artificial Sequence: Synthetic oligonucleotide
  Antisense strand to SEQ ID NO: 1533118
agauccaaagaucuagcgu

SEQ ID NO: 1533120 - RNA, 19 nt, Artificial Sequence
  Description of Artificial Sequence: Synthetic oligonucleotide
  Sense strand starting at position 511 of SEQ ID NO: 1245060
aggcguuaucggucagguu

SEQ ID NO: 1533121 - RNA, 19 nt, Artificial Sequence
  Description of Artificial Sequence: Synthetic oligonucleotide
  Antisense strand to SEQ ID NO: 1533120
aaccugaccgauaacgccu

SEQ ID NO: 1533122 - RNA, 19 nt, Artificial Sequence
  Description of Artificial Sequence: Synthetic oligonucleotide
  Sense strand starting at position 533 of SEQ ID NO: 1245060
agugaacgcuuuguccaga

SEQ ID NO: 1533123 - RNA, 19 nt, Artificial Sequence
  Description of Artificial Sequence: Synthetic oligonucleotide
  Antisense strand to SEQ ID NO: 1533122
ucuggacaaagcguucacu

SEQ ID NO: 1533124 - RNA, 19 nt, Artificial Sequence
  Description of Artificial Sequence: Synthetic oligonucleotide
  Sense strand starting at position 536 of SEQ ID NO: 1245060
gaacgcuuuguccagagga

SEQ ID NO: 1533125 - RNA, 19 nt, Artificial Sequence
  Description of Artificial Sequence: Synthetic oligonucleotide
  Antisense strand to SEQ ID NO: 1533124
uccucuggacaaagcguuc

SEQ ID NO: 1533126 - RNA, 19 nt, Artificial Sequence
  Description of Artificial Sequence: Synthetic oligonucleotide
  Sense strand starting at position 707 of SEQ ID NO: 1245060
cuccguuauccuggaucca

SEQ ID NO: 1533127 - RNA, 19 nt, Artificial Sequence
  Description of Artificial Sequence: Synthetic oligonucleotide
  Antisense strand to SEQ ID NO: 1533126
uggauccaggauaacggag

SEQ ID NO: 1533128 - RNA, 19 nt, Artificial Sequence
  Description of Artificial Sequence: Synthetic oligonucleotide
  Sense strand starting at position 1220 of SEQ ID NO: 1245060
gcuuauaauggauguacuu

SEQ ID NO: 1533129 - RNA, 19 nt, Artificial Sequence
  Description of Artificial Sequence: Synthetic oligonucleotide
  Antisense strand to SEQ ID NO: 1533128
aaguacauccauuauaagc

SEQ ID NO: 1533130 - RNA, 19 nt, Artificial Sequence
  Description of Artificial Sequence: Synthetic oligonucleotide
  Sense strand starting at position 1241 of SEQ ID NO: 1245060
ucacuaucucccgguuauc

SEQ ID NO: 1533131 - RNA, 19 nt, Artificial Sequence
  Description of Artificial Sequence: Synthetic oligonucleotide
  Antisense strand to SEQ ID NO: 1533130
gauaaccgggagauaguga

SEQ ID NO: 1533132 - RNA, 19 nt, Artificial Sequence
  Description of Artificial Sequence: Synthetic oligonucleotide
  Sense strand starting at position 1466 of SEQ ID NO: 1245060
gcaugagaugcaggaaauu

SEQ ID NO: 1533133 - RNA, 19 nt, Artificial Sequence
  Description of Artificial Sequence: Synthetic oligonucleotide
  Antisense strand to SEQ ID NO: 1533132
aauuuccugcaucucaugc

SEQ ID NO: 1533134 - RNA, 19 nt, Artificial Sequence
  Description of Artificial Sequence: Synthetic oligonucleotide
  Sense strand starting at position 1542 of SEQ ID NO: 1245060
uuguuaauaucagucuacu

SEQ ID NO: 1533135 - RNA, 19 nt, Artificial Sequence
  Description of Artificial Sequence: Synthetic oligonucleotide
  Antisense strand to SEQ ID NO: 1533134
aguagacugauauuaacaa

SEQ ID NO: 1533136 - RNA, 19 nt, Artificial Sequence
  Description of Artificial Sequence: Synthetic oligonucleotide
  Sense strand starting at position 1554 of SEQ ID NO: 1245060
gucuacuuccucugugaug

SEQ ID NO: 1533137 - RNA, 19 nt, Artificial Sequence
  Description of Artificial Sequence: Synthetic oligonucleotide
  Antisense strand to SEQ ID NO: 1533136
caucacagaggaaguagac

SEQ ID NO: 1533138 - RNA, 19 nt, Artificial Sequence
  Description of Artificial Sequence: Synthetic oligonucleotide
  Sense strand starting at position 1563 of SEQ ID NO: 1245060
cucugugaugcugaaaggu

SEQ ID NO: 1533139 - RNA, 19 nt, Artificial Sequence
  Description of Artificial Sequence: Synthetic oligonucleotide
  Antisense strand to SEQ ID NO: 1533138
accuuucagcaucacagag

SEQ ID NO: 1533140 - RNA, 19 nt, Artificial Sequence
  Description of Artificial Sequence: Synthetic oligonucleotide
  Sense strand starting at position 1616 of SEQ ID NO: 1245060
gugcguuucccuguacaca

SEQ ID NO: 1533141 - RNA, 19 nt, Artificial Sequence
  Description of Artificial Sequence: Synthetic oligonucleotide
  Antisense strand to SEQ ID NO: 1533140
uguguacagggaaacgcac

SEQ ID NO: 1533142 - RNA, 19 nt, Artificial Sequence
  Description of Artificial Sequence: Synthetic oligonucleotide
  Sense strand starting at position 1685 of SEQ ID NO: 1245060
guauuaagcugccuggaaa

SEQ ID NO: 1533143 - RNA, 19 nt, Artificial Sequence
  Description of Artificial Sequence: Synthetic oligonucleotide
  Antisense strand to SEQ ID NO: 1533142
uuuccaggcagcuuaauac

SEQ ID NO: 1533144 - RNA, 19 nt, Artificial Sequence
  Description of Artificial Sequence: Synthetic oligonucleotide
  Sense strand starting at position 1688 of SEQ ID NO: 1245060
uuaagcugccuggaaauua

SEQ ID NO: 1533145 - RNA, 19 nt, Artificial Sequence
  Description of Artificial Sequence: Synthetic oligonucleotide
  Antisense strand to SEQ ID NO: 1533144
uaauuuccaggcagcuuaa

SEQ ID NO: 1533146 - RNA, 19 nt, Artificial Sequence
  Description of Artificial Sequence: Synthetic oligonucleotide
  Sense strand starting at position 1714 of SEQ ID NO: 1245060
ucgaaugcacuuuaaguaa

SEQ ID NO: 1533147 - RNA, 19 nt, Artificial Sequence
  Description of Artificial Sequence: Synthetic oligonucleotide
  Antisense strand to SEQ ID NO: 1533146
uuacuuaaagugcauucga

SEQ ID NO: 1533148 - RNA, 19 nt, Artificial Sequence
  Description of Artificial Sequence: Synthetic oligonucleotide
  Sense strand starting at position 1737 of SEQ ID NO: 1245060
ucucaaagguuuccauuga

SEQ ID NO: 1533149 - RNA, 19 nt, Artificial Sequence
  Description of Artificial Sequence: Synthetic oligonucleotide
  Antisense strand to SEQ ID NO: 1533148
ucaauggaaaccuuugaga

SEQ ID NO: 1533150 - RNA, 19 nt, Artificial Sequence
  Description of Artificial Sequence: Synthetic oligonucleotide
  Sense strand starting at position 1741 of SEQ ID NO: 1245060
aaagguuuccauugaaagu

SEQ ID NO: 1533151 - RNA, 19 nt, Artificial Sequence
  Description of Artificial Sequence: Synthetic oligonucleotide
  Antisense strand to SEQ ID NO: 1533150
acuuucaauggaaaccuuu

SEQ ID NO: 1533152 - RNA, 19 nt, Artificial Sequence
  Description of Artificial Sequence: Synthetic oligonucleotide
  Sense strand starting at position 1809 of SEQ ID NO: 1245060
acagcaugauccucuguca

SEQ ID NO: 1533153 - RNA, 19 nt, Artificial Sequence
  Description of Artificial Sequence: Synthetic oligonucleotide
  Antisense strand to SEQ ID NO: 1533152
ugacagaggaucaugcugu

SEQ ID NO: 1533154 - RNA, 19 nt, Artificial Sequence
  Description of Artificial Sequence: Synthetic oligonucleotide
  Sense strand starting at position 1812 of SEQ ID NO: 1245060
gcaugauccucugucaagu

SEQ ID NO: 1533155 - RNA, 19 nt, Artificial Sequence
  Description of Artificial Sequence: Synthetic oligonucleotide
  Antisense strand to SEQ ID NO: 1533154
acuugacagaggaucaugc

SEQ ID NO: 1533156 - RNA, 19 nt, Artificial Sequence
  Description of Artificial Sequence: Synthetic oligonucleotide
  Sense strand starting at position 1970 of SEQ ID NO: 1245060
gaucgauucccagacuucu

SEQ ID NO: 1533157 - RNA, 19 nt, Artificial Sequence
  Description of Artificial Sequence: Synthetic oligonucleotide
  Antisense strand to SEQ ID NO: 1533156
agaagucugggaaucgauc

SEQ ID NO: 1533158 - RNA, 19 nt, Artificial Sequence
  Description of Artificial Sequence: Synthetic oligonucleotide
  Sense strand starting at position 1998 of SEQ ID NO: 1245060
aaaugucaauccgcaggaa

SEQ ID NO: 1533159 - RNA, 19 nt, Artificial Sequence
  Description of Artificial Sequence: Synthetic oligonucleotide
  Antisense strand to SEQ ID NO: 1533158
uuccugcggauugacauuu

SEQ ID NO: 1533160 - RNA, 19 nt, Artificial Sequence
  Description of Artificial Sequence: Synthetic oligonucleotide
  Sense strand starting at position 1999 of SEQ ID NO: 1245060
aaugucaauccgcaggaau

SEQ ID NO: 1533161 - RNA, 19 nt, Artificial Sequence
  Description of Artificial Sequence: Synthetic oligonucleotide
  Antisense strand to SEQ ID NO: 1533160
auuccugcggauugacauu

SEQ ID NO: 1533162 - RNA, 19 nt, Artificial Sequence
  Description of Artificial Sequence: Synthetic oligonucleotide
  Sense strand starting at position 2029 of SEQ ID NO: 1245060
aucucaagagcucgagaaa

SEQ ID NO: 1533163 - RNA, 19 nt, Artificial Sequence
  Description of Artificial Sequence: Synthetic oligonucleotide
  Antisense strand to SEQ ID NO: 1533162
uuucucgagcucuugagau

SEQ ID NO: 1533164 - RNA, 19 nt, Artificial Sequence
  Description of Artificial Sequence: Synthetic oligonucleotide
  Sense strand starting at position 2444 of SEQ ID NO: 1245060
ggaugacugcuacgaaguu

SEQ ID NO: 1533165 - RNA, 19 nt, Artificial Sequence
  Description of Artificial Sequence: Synthetic oligonucleotide
  Antisense strand to SEQ ID NO: 1533164
aacuucguagcagucaucc

SEQ ID NO: 1533166 - RNA, 19 nt, Artificial Sequence
  Description of Artificial Sequence: Synthetic oligonucleotide
  Sense strand starting at position 3246 of SEQ ID NO: 1245060
gggagggugcgccaugaaa

SEQ ID NO: 1533167 - RNA, 19 nt, Artificial Sequence
  Description of Artificial Sequence: Synthetic oligonucleotide
  Antisense strand to SEQ ID NO: 1533166
uuucauggcgcacccuccc

SEQ ID NO: 1533168 - RNA, 19 nt, Artificial Sequence
  Description of Artificial Sequence: Synthetic oligonucleotide
  Sense strand starting at position 3415 of SEQ ID NO: 1245060
uuucuagccguguaugaga

SEQ ID NO: 1533169 - RNA, 19 nt, Artificial Sequence
  Description of Artificial Sequence: Synthetic oligonucleotide
  Antisense strand to SEQ ID NO: 1533168
ucucauacacggcuagaaa

SEQ ID NO: 1533170 - RNA, 19 nt, Artificial Sequence
  Description of Artificial Sequence: Synthetic oligonucleotide
  Sense strand starting at position 3734 of SEQ ID NO: 1245060
ggguuuaucaagggcuuua

SEQ ID NO: 1533171 - RNA, 19 nt, Artificial Sequence
  Description of Artificial Sequence: Synthetic oligonucleotide
  Antisense strand to SEQ ID NO: 1533170
uaaagcccuugauaaaccc

SEQ ID NO: 1533172 - RNA, 19 nt, Artificial Sequence
  Description of Artificial Sequence: Synthetic oligonucleotide
  Sense strand starting at position 3744 of SEQ ID NO: 1245060
agggcuuuacgacaguuua

SEQ ID NO: 1533173 - RNA, 19 nt, Artificial Sequence
  Description of Artificial Sequence: Synthetic oligonucleotide
  Antisense strand to SEQ ID NO: 1533172
uaaacugucguaaagcccu

SEQ ID NO: 1533174 - RNA, 19 nt, Artificial Sequence
  Description of Artificial Sequence: Synthetic oligonucleotide
  Sense strand starting at position 3802 of SEQ ID NO: 1245060
gguuuagugcuacacgaug

SEQ ID NO: 1533175 - RNA, 19 nt, Artificial Sequence
  Description of Artificial Sequence: Synthetic oligonucleotide
  Antisense strand to SEQ ID NO: 1533174
caucguguagcacuaaacc

SEQ ID NO: 1533176 - RNA, 19 nt, Artificial Sequence
  Description of Artificial Sequence: Synthetic oligonucleotide
  Sense strand starting at position 2034 of SEQ ID NO: 1245061
ggaaccguaaucugcauuu

SEQ ID NO: 1533177 - RNA, 19 nt, Artificial Sequence
  Description of Artificial Sequence: Synthetic oligonucleotide
  Antisense strand to SEQ ID NO: 1533176
aaaugcagauuacgguucc

SEQ ID NO: 1533178 - RNA, 19 nt, Artificial Sequence
  Description of Artificial Sequence: Synthetic oligonucleotide
  Sense strand starting at position 2210 of SEQ ID NO: 1245061
aagagauauuuaggagaua

SEQ ID NO: 1533179 - RNA, 19 nt, Artificial Sequence
  Description of Artificial Sequence: Synthetic oligonucleotide
  Antisense strand to SEQ ID NO: 1533178
uaucuccuaaauaucucuu

SEQ ID NO: 1533180 - RNA, 19 nt, Artificial Sequence
  Description of Artificial Sequence: Synthetic oligonucleotide
  Sense strand starting at position 2226 of SEQ ID NO: 1245061
auagacucaucccagggau

SEQ ID NO: 1533181 - RNA, 19 nt, Artificial Sequence
  Description of Artificial Sequence: Synthetic oligonucleotide
  Antisense strand to SEQ ID NO: 1533180
aucccugggaugagucuau

SEQ ID NO: 1533182 - RNA, 19 nt, Artificial Sequence
  Description of Artificial Sequence: Synthetic oligonucleotide
  Sense strand starting at position 2350 of SEQ ID NO: 1245061
cagguauagaggugaggau

SEQ ID NO: 1533183 - RNA, 19 nt, Artificial Sequence
  Description of Artificial Sequence: Synthetic oligonucleotide
  Antisense strand to SEQ ID NO: 1533182
auccucaccucuauaccug

SEQ ID NO: 1533184 - RNA, 19 nt, Artificial Sequence
  Description of Artificial Sequence: Synthetic oligonucleotide
  Sense strand starting at position 2375 of SEQ ID NO: 1245061
cagagacaugaucgugcau

SEQ ID NO: 1533185 - RNA, 19 nt, Artificial Sequence
  Description of Artificial Sequence: Synthetic oligonucleotide
  Antisense strand to SEQ ID NO: 1533184
augcacgaucaugucucug

SEQ ID NO: 1533186 - RNA, 19 nt, Artificial Sequence
  Description of Artificial Sequence: Synthetic oligonucleotide
  Sense strand starting at position 2407 of SEQ ID NO: 1245061
acuaguuuaagauggguau

SEQ ID NO: 1533187 - RNA, 19 nt, Artificial Sequence
  Description of Artificial Sequence: Synthetic oligonucleotide
  Antisense strand to SEQ ID NO: 1533186
auacccaucuuaaacuagu

SEQ ID NO: 1533188 - RNA, 19 nt, Artificial Sequence
  Description of Artificial Sequence: Synthetic oligonucleotide
  Sense strand starting at position 2413 of SEQ ID NO: 1245061
uuaagauggguauggguua

SEQ ID NO: 1533189 - RNA, 19 nt, Artificial Sequence
  Description of Artificial Sequence: Synthetic oligonucleotide
  Antisense strand to SEQ ID NO: 1533188
uaacccauacccaucuuaa

SEQ ID NO: 1533190 - RNA, 19 nt, Artificial Sequence
  Description of Artificial Sequence: Synthetic oligonucleotide
  Sense strand starting at position 2420 of SEQ ID NO: 1245061
ggguauggguuauucagau

SEQ ID NO: 1533191 - RNA, 19 nt, Artificial Sequence
  Description of Artificial Sequence: Synthetic oligonucleotide
  Antisense strand to SEQ ID NO: 1533190
aucugaauaacccauaccc

SEQ ID NO: 1533192 - RNA, 19 nt, Artificial Sequence
  Description of Artificial Sequence: Synthetic oligonucleotide
  Sense strand starting at position 2439 of SEQ ID NO: 1245061
gcagacaucugccuaugaa

SEQ ID NO: 1533193 - RNA, 19 nt, Artificial Sequence
  Description of Artificial Sequence: Synthetic oligonucleotide
  Antisense strand to SEQ ID NO: 1533192
uucauaggcagaugucugc

SEQ ID NO: 1533194 - RNA, 19 nt, Artificial Sequence
  Description of Artificial Sequence: Synthetic oligonucleotide
  Sense strand starting at position 2442 of SEQ ID NO: 1245061
gacaucugccuaugaaguc

SEQ ID NO: 1533195 - RNA, 19 nt, Artificial Sequence
  Description of Artificial Sequence: Synthetic oligonucleotide
  Antisense strand to SEQ ID NO: 1533194
gacuucauaggcagauguc

SEQ ID NO: 1533196 - RNA, 19 nt, Artificial Sequence
  Description of Artificial Sequence: Synthetic oligonucleotide
  Sense strand starting at position 2449 of SEQ ID NO: 1245061
gccuaugaaguccaaagau

SEQ ID NO: 1533197 - RNA, 19 nt, Artificial Sequence
  Description of Artificial Sequence: Synthetic oligonucleotide
  Antisense strand to SEQ ID NO: 1533196
aucuuuggacuucauaggc

SEQ ID NO: 1533198 - RNA, 19 nt, Artificial Sequence
  Description of Artificial Sequence: Synthetic oligonucleotide
  Sense strand starting at position 2512 of SEQ ID NO: 1245061
agagacuauagguggcaau

SEQ ID NO: 1533199 - RNA, 19 nt, Artificial Sequence
  Description of Artificial Sequence: Synthetic oligonucleotide
  Antisense strand to SEQ ID NO: 1533198
auugccaccuauagucucu

SEQ ID NO: 1533200 - RNA, 19 nt, Artificial Sequence
  Description of Artificial Sequence: Synthetic oligonucleotide
  Sense strand starting at position 2513 of SEQ ID NO: 1245061
gagacuauagguggcaauu

SEQ ID NO: 1533201 - RNA, 19 nt, Artificial Sequence
  Description of Artificial Sequence: Synthetic oligonucleotide
  Antisense strand to SEQ ID NO: 1533200
aauugccaccuauagucuc

SEQ ID NO: 1533202 - RNA, 19 nt, Artificial Sequence
  Description of Artificial Sequence: Synthetic oligonucleotide
  Sense strand starting at position 2671 of SEQ ID NO: 1245061
ggugaaaugccacacuaug

SEQ ID NO: 1533203 - RNA, 19 nt, Artificial Sequence
  Description of Artificial Sequence: Synthetic oligonucleotide
  Antisense strand to SEQ ID NO: 1533202
cauaguguggcauuucacc

SEQ ID NO: 1533204 - RNA, 19 nt, Artificial Sequence
  Description of Artificial Sequence: Synthetic oligonucleotide
  Sense strand starting at position 2707 of SEQ ID NO: 1245061
uggcuuugguagccauuga

SEQ ID NO: 1533205 - RNA, 19 nt, Artificial Sequence
  Description of Artificial Sequence: Synthetic oligonucleotide
  Antisense strand to SEQ ID NO: 1533204
ucaauggcuaccaaagcca

SEQ ID NO: 1533206 - RNA, 19 nt, Artificial Sequence
  Description of Artificial Sequence: Synthetic oligonucleotide
  Sense strand starting at position 2708 of SEQ ID NO: 1245061
ggcuuugguagccauugau

SEQ ID NO: 1533207 - RNA, 19 nt, Artificial Sequence
  Description of Artificial Sequence: Synthetic oligonucleotide
  Antisense strand to SEQ ID NO: 1533206
aucaauggcuaccaaagcc

SEQ ID NO: 1533208 - RNA, 19 nt, Artificial Sequence
  Description of Artificial Sequence: Synthetic oligonucleotide
  Sense strand starting at position 2736 of SEQ ID NO: 1245061
gcagaugugucagucagaa

SEQ ID NO: 1533209 - RNA, 19 nt, Artificial Sequence
  Description of Artificial Sequence: Synthetic oligonucleotide
  Antisense strand to SEQ ID NO: 1533208
uucugacugacacaucugc

SEQ ID NO: 1533210 - RNA, 19 nt, Artificial Sequence
  Description of Artificial Sequence: Synthetic oligonucleotide
  Sense strand starting at position 2738 of SEQ ID NO: 1245061
agaugugucagucagaagg

SEQ ID NO: 1533211 - RNA, 19 nt, Artificial Sequence
  Description of Artificial Sequence: Synthetic oligonucleotide
  Antisense strand to SEQ ID NO: 1533210
ccuucugacugacacaucu

SEQ ID NO: 1533212 - RNA, 19 nt, Artificial Sequence
  Description of Artificial Sequence: Synthetic oligonucleotide
  Sense strand starting at position 2773 of SEQ ID NO: 1245061
agaacuguauugcaaccaa

SEQ ID NO: 1533213 - RNA, 19 nt, Artificial Sequence
  Description of Artificial Sequence: Synthetic oligonucleotide
  Antisense strand to SEQ ID NO: 1533212
uugguugcaauacaguucu

SEQ ID NO: 1533214 - RNA, 19 nt, Artificial Sequence
  Description of Artificial Sequence: Synthetic oligonucleotide
  Sense strand starting at position 2816 of SEQ ID NO: 1245061
agcgccauccaauagagaa

SEQ ID NO: 1533215 - RNA, 19 nt, Artificial Sequence
  Description of Artificial Sequence: Synthetic oligonucleotide
  Antisense strand to SEQ ID NO: 1533214
uucucuauuggauggcgcu

SEQ ID NO: 1533216 - RNA, 19 nt, Artificial Sequence
  Description of Artificial Sequence: Synthetic oligonucleotide
  Sense strand starting at position 2953 of SEQ ID NO: 1245061
uucuauaagccguaacaua

SEQ ID NO: 1533217 - RNA, 19 nt, Artificial Sequence
  Description of Artificial Sequence: Synthetic oligonucleotide
  Antisense strand to SEQ ID NO: 1533216
uauguuacggcuuauagaa

SEQ ID NO: 1533218 - RNA, 19 nt, Artificial Sequence
  Description of Artificial Sequence: Synthetic oligonucleotide
  Sense strand starting at position 2961 of SEQ ID NO: 1245061
gccguaacauagcuuaaag

SEQ ID NO: 1533219 - RNA, 19 nt, Artificial Sequence
  Description of Artificial Sequence: Synthetic oligonucleotide
  Antisense strand to SEQ ID NO: 1533218
cuuuaagcuauguuacggc

SEQ ID NO: 1533220 - RNA, 19 nt, Artificial Sequence
  Description of Artificial Sequence: Synthetic oligonucleotide
  Sense strand starting at position 2963 of SEQ ID NO: 1245061
cguaacauagcuuaaaggu

SEQ ID NO: 1533221 - RNA, 19 nt, Artificial Sequence
  Description of Artificial Sequence: Synthetic oligonucleotide
  Antisense strand to SEQ ID NO: 1533220
accuuuaagcuauguuacg

SEQ ID NO: 1533222 - RNA, 19 nt, Artificial Sequence
  Description of Artificial Sequence: Synthetic oligonucleotide
  Sense strand starting at position 2972 of SEQ ID NO: 1245061
gcuuaaagguaguauauuu

SEQ ID NO: 1533223 - RNA, 19 nt, Artificial Sequence
  Description of Artificial Sequence: Synthetic oligonucleotide
  Antisense strand to SEQ ID NO: 1533222
aaauauacuaccuuuaagc

SEQ ID NO: 1533224 - RNA, 19 nt, Artificial Sequence
  Description of Artificial Sequence: Synthetic oligonucleotide
  Sense strand starting at position 3159 of SEQ ID NO: 1245061
ccaugaucagcucgacaau

SEQ ID NO: 1533225 - RNA, 19 nt, Artificial Sequence
  Description of Artificial Sequence: Synthetic oligonucleotide
  Antisense strand to SEQ ID NO: 1533224
auugucgagcugaucaugg

SEQ ID NO: 1533226 - RNA, 19 nt, Artificial Sequence
  Description of Artificial Sequence: Synthetic oligonucleotide
  Sense strand starting at position 3202 of SEQ ID NO: 1245061
aucaauauuuauugaggga

SEQ ID NO: 1533227 - RNA, 19 nt, Artificial Sequence
  Description of Artificial Sequence: Synthetic oligonucleotide
  Antisense strand to SEQ ID NO: 1533226
ucccucaauaaauauugau

SEQ ID NO: 1533228 - RNA, 19 nt, Artificial Sequence
  Description of Artificial Sequence: Synthetic oligonucleotide
  Sense strand starting at position 3226 of SEQ ID NO: 1245061
cgauguggcccugugcuaa

SEQ ID NO: 1533229 - RNA, 19 nt, Artificial Sequence
  Description of Artificial Sequence: Synthetic oligonucleotide
  Antisense strand to SEQ ID NO: 1533228
uuagcacagggccacaucg

SEQ ID NO: 1533230 - RNA, 19 nt, Artificial Sequence
  Description of Artificial Sequence: Synthetic oligonucleotide
  Sense strand starting at position 3301 of SEQ ID NO: 1245061
guggcuguuguuuaagaca

SEQ ID NO: 1533231 - RNA, 19 nt, Artificial Sequence
  Description of Artificial Sequence: Synthetic oligonucleotide
  Antisense strand to SEQ ID NO: 1533230
ugucuuaaacaacagccac

SEQ ID NO: 1533232 - RNA, 19 nt, Artificial Sequence
  Description of Artificial Sequence: Synthetic oligonucleotide
  Sense strand starting at position 3306 of SEQ ID NO: 1245061
uguuguuuaagacaggcaa

SEQ ID NO: 1533233 - RNA, 19 nt, Artificial Sequence
  Description of Artificial Sequence: Synthetic oligonucleotide
  Antisense strand to SEQ ID NO: 1533232
uugccugucuuaaacaaca

SEQ ID NO: 1533234 - RNA, 19 nt, Artificial Sequence
  Description of Artificial Sequence: Synthetic oligonucleotide
  Sense strand starting at position 3365 of SEQ ID NO: 1245061
gggagauguugacagagaa

SEQ ID NO: 1533235 - RNA, 19 nt, Artificial Sequence
  Description of Artificial Sequence: Synthetic oligonucleotide
  Antisense strand to SEQ ID NO: 1533234
uucucugucaacaucuccc

SEQ ID NO: 1533236 - RNA, 19 nt, Artificial Sequence
  Description of Artificial Sequence: Synthetic oligonucleotide
  Sense strand starting at position 3513 of SEQ ID NO: 1245061
gucccugucauguguugga

SEQ ID NO: 1533237 - RNA, 19 nt, Artificial Sequence
  Description of Artificial Sequence: Synthetic oligonucleotide
  Antisense strand to SEQ ID NO: 1533236
uccaacacaugacagggac

SEQ ID NO: 1533238 - RNA, 19 nt, Artificial Sequence
  Description of Artificial Sequence: Synthetic oligonucleotide
  Sense strand starting at position 3517 of SEQ ID NO: 1245061
cugucauguguuggagaac

SEQ ID NO: 1533239 - RNA, 19 nt, Artificial Sequence
  Description of Artificial Sequence: Synthetic oligonucleotide
  Antisense strand to SEQ ID NO: 1533238
guucuccaacacaugacag

SEQ ID NO: 1533240 - RNA, 19 nt, Artificial Sequence
  Description of Artificial Sequence: Synthetic oligonucleotide
  Sense strand starting at position 3520 of SEQ ID NO: 1245061
ucauguguuggagaacacu

SEQ ID NO: 1533241 - RNA, 19 nt, Artificial Sequence
  Description of Artificial Sequence: Synthetic oligonucleotide
  Antisense strand to SEQ ID NO: 1533240
aguguucuccaacacauga

SEQ ID NO: 1533242 - RNA, 19 nt, Artificial Sequence
  Description of Artificial Sequence: Synthetic oligonucleotide
  Sense strand starting at position 3650 of SEQ ID NO: 1245061
guucucuuagaaugcaauc

SEQ ID NO: 1533243 - RNA, 19 nt, Artificial Sequence
  Description of Artificial Sequence: Synthetic oligonucleotide
  Antisense strand to SEQ ID NO: 1533242
gauugcauucuaagagaac

SEQ ID NO: 1533244 - RNA, 19 nt, Artificial Sequence
  Description of Artificial Sequence: Synthetic oligonucleotide
  Sense strand starting at position 3662 of SEQ ID NO: 1245061
ugcaaucaccuauguggau

SEQ ID NO: 1533245 - RNA, 19 nt, Artificial Sequence
  Description of Artificial Sequence: Synthetic oligonucleotide
  Antisense strand to SEQ ID NO: 1533244
auccacauaggugauugca

SEQ ID NO: 1533246 - RNA, 19 nt, Artificial Sequence
  Description of Artificial Sequence: Synthetic oligonucleotide
  Sense strand starting at position 3768 of SEQ ID NO: 1245061
aucauauugcaguguucca

SEQ ID NO: 1533247 - RNA, 19 nt, Artificial Sequence
  Description of Artificial Sequence: Synthetic oligonucleotide
  Antisense strand to SEQ ID NO: 1533246
uggaacacugcaauaugau

SEQ ID NO: 1533248 - RNA, 19 nt, Artificial Sequence
  Description of Artificial Sequence: Synthetic oligonucleotide
  Sense strand starting at position 3779 of SEQ ID NO: 1245061
guguuccauucuguacuga

SEQ ID NO: 1533249 - RNA, 19 nt, Artificial Sequence
  Description of Artificial Sequence: Synthetic oligonucleotide
  Antisense strand to SEQ ID NO: 1533248
ucaguacagaauggaacac

SEQ ID NO: 1533250 - RNA, 19 nt, Artificial Sequence
  Description of Artificial Sequence: Synthetic oligonucleotide
  Sense strand starting at position 3780 of SEQ ID NO: 1245061
uguuccauucuguacugaa

SEQ ID NO: 1533251 - RNA, 19 nt, Artificial Sequence
  Description of Artificial Sequence: Synthetic oligonucleotide
  Antisense strand to SEQ ID NO: 1533250
uucaguacagaauggaaca

SEQ ID NO: 1533252 - RNA, 19 nt, Artificial Sequence
  Description of Artificial Sequence: Synthetic oligonucleotide
  Sense strand starting at position 3876 of SEQ ID NO: 1245061
agcugacuuguguauuauu

SEQ ID NO: 1533253 - RNA, 19 nt, Artificial Sequence
  Description of Artificial Sequence: Synthetic oligonucleotide
  Antisense strand to SEQ ID NO: 1533252
aauaauacacaagucagcu

SEQ ID NO: 1533254 - RNA, 19 nt, Artificial Sequence
  Description of Artificial Sequence: Synthetic oligonucleotide
  Sense strand starting at position 3879 of SEQ ID NO: 1245061
ugacuuguguauuauuugu

SEQ ID NO: 1533255 - RNA, 19 nt, Artificial Sequence
  Description of Artificial Sequence: Synthetic oligonucleotide
  Antisense strand to SEQ ID NO: 1533254
acaaauaauacacaaguca

SEQ ID NO: 1533256 - RNA, 19 nt, Artificial Sequence
  Description of Artificial Sequence: Synthetic oligonucleotide
  Sense strand starting at position 156 of SEQ ID NO: 1245062
gugcuaagugccagggaug

SEQ ID NO: 1533257 - RNA, 19 nt, Artificial Sequence
  Description of Artificial Sequence: Synthetic oligonucleotide
  Antisense strand to SEQ ID NO: 1533256
caucccuggcacuuagcac

SEQ ID NO: 1533258 - RNA, 19 nt, Artificial Sequence
  Description of Artificial Sequence: Synthetic oligonucleotide
  Sense strand starting at position 349 of SEQ ID NO: 1245062
auguuaagugcugggaaua

SEQ ID NO: 1533259 - RNA, 19 nt, Artificial Sequence
  Description of Artificial Sequence: Synthetic oligonucleotide
  Antisense strand to SEQ ID NO: 1533258
uauucccagcacuuaacau

SEQ ID NO: 1533260 - RNA, 19 nt, Artificial Sequence
  Description of Artificial Sequence: Synthetic oligonucleotide
  Sense strand starting at position 350 of SEQ ID NO: 1245062
uguuaagugcugggaauaa

SEQ ID NO: 1533261 - RNA, 19 nt, Artificial Sequence
  Description of Artificial Sequence: Synthetic oligonucleotide
  Antisense strand to SEQ ID NO: 1533260
uuauucccagcacuuaaca

SEQ ID NO: 1533262 - RNA, 19 nt, Artificial Sequence
  Description of Artificial Sequence: Synthetic oligonucleotide
  Sense strand starting at position 393 of SEQ ID NO: 1245062
agaaguauugauggaguua

SEQ ID NO: 1533263 - RNA, 19 nt, Artificial Sequence
  Description of Artificial Sequence: Synthetic oligonucleotide
  Antisense strand to SEQ ID NO: 1533262
uaacuccaucaauacuucu

SEQ ID NO: 1533264 - RNA, 19 nt, Artificial Sequence
  Description of Artificial Sequence: Synthetic oligonucleotide
  Sense strand starting at position 435 of SEQ ID NO: 1245062
gggaaagcuucauugagug

SEQ ID NO: 1533265 - RNA, 19 nt, Artificial Sequence
  Description of Artificial Sequence: Synthetic oligonucleotide
  Antisense strand to SEQ ID NO: 1533264
cacucaaugaagcuuuccc

SEQ ID NO: 1533266 - RNA, 19 nt, Artificial Sequence
  Description of Artificial Sequence: Synthetic oligonucleotide
  Sense strand starting at position 508 of SEQ ID NO: 1245062
gcaagaaucccaggcagag

SEQ ID NO: 1533267 - RNA, 19 nt, Artificial Sequence
  Description of Artificial Sequence: Synthetic oligonucleotide
  Antisense strand to SEQ ID NO: 1533266
cucugccugggauucuugc

SEQ ID NO: 1533268 - RNA, 19 nt, Artificial Sequence
  Description of Artificial Sequence: Synthetic oligonucleotide
  Sense strand starting at position 525 of SEQ ID NO: 1245062
agugaagaguaccugcaaa

SEQ ID NO: 1533269 - RNA, 19 nt, Artificial Sequence
  Description of Artificial Sequence: Synthetic oligonucleotide
  Antisense strand to SEQ ID NO: 1533268
uuugcagguacucuucacu

SEQ ID NO: 1533270 - RNA, 19 nt, Artificial Sequence
  Description of Artificial Sequence: Synthetic oligonucleotide
  Sense strand starting at position 579 of SEQ ID NO: 1245062
acuggaguugcgugaagga

SEQ ID NO: 1533271 - RNA, 19 nt, Artificial Sequence
  Description of Artificial Sequence: Synthetic oligonucleotide
  Antisense strand to SEQ ID NO: 1533270
uccuucacgcaacuccagu

SEQ ID NO: 1533272 - RNA, 19 nt, Artificial Sequence
  Description of Artificial Sequence: Synthetic oligonucleotide
  Sense strand starting at position 600 of SEQ ID NO: 1245062
gaguacgucagagagguau

SEQ ID NO: 1533273 - RNA, 19 nt, Artificial Sequence
  Description of Artificial Sequence: Synthetic oligonucleotide
  Antisense strand to SEQ ID NO: 1533272
auaccucucugacguacuc

SEQ ID NO: 1533274 - RNA, 19 nt, Artificial Sequence
  Description of Artificial Sequence: Synthetic oligonucleotide
  Sense strand starting at position 1012 of SEQ ID NO: 1245062
acaggauuugcucgcauac

SEQ ID NO: 1533275 - RNA, 19 nt, Artificial Sequence
  Description of Artificial Sequence: Synthetic oligonucleotide
  Antisense strand to SEQ ID NO: 1533274
guaugcgagcaaauccugu

SEQ ID NO: 1533276 - RNA, 19 nt, Artificial Sequence
  Description of Artificial Sequence: Synthetic oligonucleotide
  Sense strand starting at position 1110 of SEQ ID NO: 1245062
ggaauuauuuacugaaaug

SEQ ID NO: 1533277 - RNA, 19 nt, Artificial Sequence
  Description of Artificial Sequence: Synthetic oligonucleotide
  Antisense strand to SEQ ID NO: 1533276
cauuucaguaaauaauucc

SEQ ID NO: 1533278 - RNA, 19 nt, Artificial Sequence
  Description of Artificial Sequence: Synthetic oligonucleotide
  Sense strand starting at position 1171 of SEQ ID NO: 1245062
uggacauauuagcuaaguu

SEQ ID NO: 1533279 - RNA, 19 nt, Artificial Sequence
  Description of Artificial Sequence: Synthetic oligonucleotide
  Antisense strand to SEQ ID NO: 1533278
aacuuagcuaauaugucca

SEQ ID NO: 1533280 - RNA, 19 nt, Artificial Sequence
  Description of Artificial Sequence: Synthetic oligonucleotide
  Sense strand starting at position 1230 of SEQ ID NO: 1245062
ucggauauaugagucuaga

SEQ ID NO: 1533281 - RNA, 19 nt, Artificial Sequence
  Description of Artificial Sequence: Synthetic oligonucleotide
  Antisense strand to SEQ ID NO: 1533280
ucuagacucauauauccga

SEQ ID NO: 1533282 - RNA, 19 nt, Artificial Sequence
  Description of Artificial Sequence: Synthetic oligonucleotide
  Sense strand starting at position 1281 of SEQ ID NO: 1245062
auuuguaaguccucaguau

SEQ ID NO: 1533283 - RNA, 19 nt, Artificial Sequence
  Description of Artificial Sequence: Synthetic oligonucleotide
  Antisense strand to SEQ ID NO: 1533282
auacugaggacuuacaaau

SEQ ID NO: 1533284 - RNA, 19 nt, Artificial Sequence
  Description of Artificial Sequence: Synthetic oligonucleotide
  Sense strand starting at position 1282 of SEQ ID NO: 1245062
uuuguaaguccucaguaua

SEQ ID NO: 1533285 - RNA, 19 nt, Artificial Sequence
  Description of Artificial Sequence: Synthetic oligonucleotide
  Antisense strand to SEQ ID NO: 1533284
uauacugaggacuuacaaa

SEQ ID NO: 1533286 - RNA, 19 nt, Artificial Sequence
  Description of Artificial Sequence: Synthetic oligonucleotide
  Sense strand starting at position 1289 of SEQ ID NO: 1245062
guccucaguauaugguauu

SEQ ID NO: 1533287 - RNA, 19 nt, Artificial Sequence
  Description of Artificial Sequence: Synthetic oligonucleotide
  Antisense strand to SEQ ID NO: 1533286
aauaccauauacugaggac

SEQ ID NO: 1533288 - RNA, 19 nt, Artificial Sequence
  Description of Artificial Sequence: Synthetic oligonucleotide
  Sense strand starting at position 1292 of SEQ ID NO: 1245062
cucaguauaugguauuuaa

SEQ ID NO: 1533289 - RNA, 19 nt, Artificial Sequence
  Description of Artificial Sequence: Synthetic oligonucleotide
  Antisense strand to SEQ ID NO: 1533288
uuaaauaccauauacugag

SEQ ID NO: 1533290 - RNA, 19 nt, Artificial Sequence
  Description of Artificial Sequence: Synthetic oligonucleotide
  Sense strand starting at position 1507 of SEQ ID NO: 1245062
aagacugaucaauguguca

SEQ ID NO: 1533291 - RNA, 19 nt, Artificial Sequence
  Description of Artificial Sequence: Synthetic oligonucleotide
  Antisense strand to SEQ ID NO: 1533290
ugacacauugaucagucuu

SEQ ID NO: 1533292 - RNA, 19 nt, Artificial Sequence
  Description of Artificial Sequence: Synthetic oligonucleotide
  Sense strand starting at position 1522 of SEQ ID NO: 1245062
gucaaaugccgcuaacaaa

SEQ ID NO: 1533293 - RNA, 19 nt, Artificial Sequence
  Description of Artificial Sequence: Synthetic oligonucleotide
  Antisense strand to SEQ ID NO: 1533292
uuuguuagcggcauuugac

SEQ ID NO: 1533294 - RNA, 19 nt, Artificial Sequence
  Description of Artificial Sequence: Synthetic oligonucleotide
  Sense strand starting at position 1638 of SEQ ID NO: 1245062
ggccuuauuugagcguugu

SEQ ID NO: 1533295 - RNA, 19 nt, Artificial Sequence
  Description of Artificial Sequence: Synthetic oligonucleotide
  Antisense strand to SEQ ID NO: 1533294
acaacgcucaaauaaggcc

SEQ ID NO: 1533296 - RNA, 19 nt, Artificial Sequence
  Description of Artificial Sequence: Synthetic oligonucleotide
  Sense strand starting at position 1639 of SEQ ID NO: 1245062
gccuuauuugagcguugug

SEQ ID NO: 1533297 - RNA, 19 nt, Artificial Sequence
  Description of Artificial Sequence: Synthetic oligonucleotide
  Antisense strand to SEQ ID NO: 1533296
cacaacgcucaaauaaggc

SEQ ID NO: 1533298 - RNA, 19 nt, Artificial Sequence
  Description of Artificial Sequence: Synthetic oligonucleotide
  Sense strand starting at position 2162 of SEQ ID NO: 1245062
ggaguuucgagucagacuu

SEQ ID NO: 1533299 - RNA, 19 nt, Artificial Sequence
  Description of Artificial Sequence: Synthetic oligonucleotide
  Antisense strand to SEQ ID NO: 1533298
aagucugacucgaaacucc

SEQ ID NO: 1533300 - RNA, 19 nt, Artificial Sequence
  Description of Artificial Sequence: Synthetic oligonucleotide
  Sense strand starting at position 2213 of SEQ ID NO: 1245062
gcgauagaguccaaaggug

SEQ ID NO: 1533301 - RNA, 19 nt, Artificial Sequence
  Description of Artificial Sequence: Synthetic oligonucleotide
  Antisense strand to SEQ ID NO: 1533300
caccuuuggacucuaucgc

SEQ ID NO: 1533302 - RNA, 19 nt, Artificial Sequence
  Description of Artificial Sequence: Synthetic oligonucleotide
  Sense strand starting at position 2502 of SEQ ID NO: 1245062
uucaguggcguuuaguaaa

SEQ ID NO: 1533303 - RNA, 19 nt, Artificial Sequence
  Description of Artificial Sequence: Synthetic oligonucleotide
  Antisense strand to SEQ ID NO: 1533302
uuuacuaaacgccacugaa

SEQ ID NO: 1533304 - RNA, 19 nt, Artificial Sequence
  Description of Artificial Sequence: Synthetic oligonucleotide
  Sense strand starting at position 2785 of SEQ ID NO: 1245062
guuguuauggcugaauaau

SEQ ID NO: 1533305 - RNA, 19 nt, Artificial Sequence
  Description of Artificial Sequence: Synthetic oligonucleotide
  Antisense strand to SEQ ID NO: 1533304
auuauucagccauaacaac

SEQ ID NO: 1533306 - RNA, 19 nt, Artificial Sequence
  Description of Artificial Sequence: Synthetic oligonucleotide
  Sense strand starting at position 2809 of SEQ ID NO: 1245062
auuguauggcgguaucaca

SEQ ID NO: 1533307 - RNA, 19 nt, Artificial Sequence
  Description of Artificial Sequence: Synthetic oligonucleotide
  Antisense strand to SEQ ID NO: 1533306
ugugauaccgccauacaau

SEQ ID NO: 1533308 - RNA, 19 nt, Artificial Sequence
  Description of Artificial Sequence: Synthetic oligonucleotide
  Sense strand starting at position 2818 of SEQ ID NO: 1245062
cgguaucacaaugguuuau

SEQ ID NO: 1533309 - RNA, 19 nt, Artificial Sequence
  Description of Artificial Sequence: Synthetic oligonucleotide
  Antisense strand to SEQ ID NO: 1533308
auaaaccauugugauaccg

SEQ ID NO: 1533310 - RNA, 19 nt, Artificial Sequence
  Description of Artificial Sequence: Synthetic oligonucleotide
  Sense strand starting at position 2895 of SEQ ID NO: 1245062
cgcugugaacaugugugua

SEQ ID NO: 1533311 - RNA, 19 nt, Artificial Sequence
  Description of Artificial Sequence: Synthetic oligonucleotide
  Antisense strand to SEQ ID NO: 1533310
uacacacauguucacagcg

SEQ ID NO: 1533312 - RNA, 19 nt, Artificial Sequence
  Description of Artificial Sequence: Synthetic oligonucleotide
  Sense strand starting at position 2917 of SEQ ID NO: 1245062
gcauuuguuugagugccuu

SEQ ID NO: 1533313 - RNA, 19 nt, Artificial Sequence
  Description of Artificial Sequence: Synthetic oligonucleotide
  Antisense strand to SEQ ID NO: 1533312
aaggcacucaaacaaaugc

SEQ ID NO: 1533314 - RNA, 19 nt, Artificial Sequence
  Description of Artificial Sequence: Synthetic oligonucleotide
  Sense strand starting at position 2966 of SEQ ID NO: 1245062
aguagaucugcuggguuau

SEQ ID NO: 1533315 - RNA, 19 nt, Artificial Sequence
  Description of Artificial Sequence: Synthetic oligonucleotide
  Antisense strand to SEQ ID NO: 1533314
auaacccagcagaucuacu

SEQ ID NO: 1533316 - RNA, 19 nt, Artificial Sequence
  Description of Artificial Sequence: Synthetic oligonucleotide
  Sense strand starting at position 2967 of SEQ ID NO: 1245062
guagaucugcuggguuaug

SEQ ID NO: 1533317 - RNA, 19 nt, Artificial Sequence
  Description of Artificial Sequence: Synthetic oligonucleotide
  Antisense strand to SEQ ID NO: 1533316
cauaacccagcagaucuac

SEQ ID NO: 1533318 - RNA, 19 nt, Artificial Sequence
  Description of Artificial Sequence: Synthetic oligonucleotide
  Sense strand starting at position 2988 of SEQ ID NO: 1245062
guaauucugugcuuaauga

SEQ ID NO: 1533319 - RNA, 19 nt, Artificial Sequence
  Description of Artificial Sequence: Synthetic oligonucleotide
  Antisense strand to SEQ ID NO: 1533318
ucauuaagcacagaauuac

SEQ ID NO: 1533320 - RNA, 19 nt, Artificial Sequence
  Description of Artificial Sequence: Synthetic oligonucleotide
  Sense strand starting at position 2996 of SEQ ID NO: 1245062
gugcuuaaugaggguucca

SEQ ID NO: 1533321 - RNA, 19 nt, Artificial Sequence
  Description of Artificial Sequence: Synthetic oligonucleotide
  Antisense strand to SEQ ID NO: 1533320
uggaacccucauuaagcac

SEQ ID NO: 1533322 - RNA, 19 nt, Artificial Sequence
  Description of Artificial Sequence: Synthetic oligonucleotide
  Sense strand starting at position 3072 of SEQ ID NO: 1245062
ccuuccuagugaguaugau

SEQ ID NO: 1533323 - RNA, 19 nt, Artificial Sequence
  Description of Artificial Sequence: Synthetic oligonucleotide
  Antisense strand to SEQ ID NO: 1533322
aucauacucacuaggaagg

SEQ ID NO: 1533324 - RNA, 19 nt, Artificial Sequence
  Description of Artificial Sequence: Synthetic oligonucleotide
  Sense strand starting at position 3080 of SEQ ID NO: 1245062
gugaguaugauguagcauc

SEQ ID NO: 1533325 - RNA, 19 nt, Artificial Sequence
  Description of Artificial Sequence: Synthetic oligonucleotide
  Antisense strand to SEQ ID NO: 1533324
gaugcuacaucauacucac

SEQ ID NO: 1533326 - RNA, 19 nt, Artificial Sequence
  Description of Artificial Sequence: Synthetic oligonucleotide
  Sense strand starting at position 3252 of SEQ ID NO: 1245062
uaauguguauguucuggau

SEQ ID NO: 1533327 - RNA, 19 nt, Artificial Sequence
  Description of Artificial Sequence: Synthetic oligonucleotide
  Antisense strand to SEQ ID NO: 1533326
auccagaacauacacauua

SEQ ID NO: 1533328 - RNA, 19 nt, Artificial Sequence
  Description of Artificial Sequence: Synthetic oligonucleotide
  Sense strand starting at position 3256 of SEQ ID NO: 1245062
guguauguucuggauagug

SEQ ID NO: 1533329 - RNA, 19 nt, Artificial Sequence
  Description of Artificial Sequence: Synthetic oligonucleotide
  Antisense strand to SEQ ID NO: 1533328
cacuauccagaacauacac

SEQ ID NO: 1533330 - RNA, 19 nt, Artificial Sequence
  Description of Artificial Sequence: Synthetic oligonucleotide
  Sense strand starting at position 3258 of SEQ ID NO: 1245062
guauguucuggauagugga

SEQ ID NO: 1533331 - RNA, 19 nt, Artificial Sequence
  Description of Artificial Sequence: Synthetic oligonucleotide
  Antisense strand to SEQ ID NO: 1533330
uccacuauccagaacauac

SEQ ID NO: 1533332 - RNA, 19 nt, Artificial Sequence
  Description of Artificial Sequence: Synthetic oligonucleotide
  Sense strand starting at position 3298 of SEQ ID NO: 1245062
uuauuuaucugagauggga

SEQ ID NO: 1533333 - RNA, 19 nt, Artificial Sequence
  Description of Artificial Sequence: Synthetic oligonucleotide
  Antisense strand to SEQ ID NO: 1533332
ucccaucucagauaaauaa

SEQ ID NO: 1533334 - RNA, 19 nt, Artificial Sequence
  Description of Artificial Sequence: Synthetic oligonucleotide
  Sense strand starting at position 3377 of SEQ ID NO: 1245062
auuccugggcuggguuaaa

SEQ ID NO: 1533335 - RNA, 19 nt, Artificial Sequence
  Description of Artificial Sequence: Synthetic oligonucleotide
  Antisense strand to SEQ ID NO: 1533334
uuuaacccagcccaggaau

SEQ ID NO: 1533336 - RNA, 19 nt, Artificial Sequence
  Description of Artificial Sequence: Synthetic oligonucleotide
  Sense strand starting at position 109 of SEQ ID NO: 1245063
cggugaacuuauucuaaca

SEQ ID NO: 1533337 - RNA, 19 nt, Artificial Sequence
  Description of Artificial Sequence: Synthetic oligonucleotide
  Antisense strand to SEQ ID NO: 1533336
uguuagaauaaguucaccg

SEQ ID NO: 1533338 - RNA, 19 nt, Artificial Sequence
  Description of Artificial Sequence: Synthetic oligonucleotide
  Sense strand starting at position 416 of SEQ ID NO: 1245063
cugcuugaaccauguguuu

SEQ ID NO: 1533339 - RNA, 19 nt, Artificial Sequence
  Description of Artificial Sequence: Synthetic oligonucleotide
  Antisense strand to SEQ ID NO: 1533338
aaacacaugguucaagcag

SEQ ID NO: 1533340 - RNA, 19 nt, Artificial Sequence
  Description of Artificial Sequence: Synthetic oligonucleotide
  Sense strand starting at position 463 of SEQ ID NO: 1245063
gacaucaggcaguaacuau

SEQ ID NO: 1533341 - RNA, 19 nt, Artificial Sequence
  Description of Artificial Sequence: Synthetic oligonucleotide
  Antisense strand to SEQ ID NO: 1533340
auaguuacugccugauguc

SEQ ID NO: 1533342 - RNA, 19 nt, Artificial Sequence
  Description of Artificial Sequence: Synthetic oligonucleotide
  Sense strand starting at position 620 of SEQ ID NO: 1245063
gggagugauucuguuagca

SEQ ID NO: 1533343 - RNA, 19 nt, Artificial Sequence
  Description of Artificial Sequence: Synthetic oligonucleotide
  Antisense strand to SEQ ID NO: 1533342
ugcuaacagaaucacuccc

SEQ ID NO: 1533344 - RNA, 19 nt, Artificial Sequence
  Description of Artificial Sequence: Synthetic oligonucleotide
  Sense strand starting at position 624 of SEQ ID NO: 1245063
gugauucuguuagcaugua

SEQ ID NO: 1533345 - RNA, 19 nt, Artificial Sequence
  Description of Artificial Sequence: Synthetic oligonucleotide
  Antisense strand to SEQ ID NO: 1533344
uacaugcuaacagaaucac

SEQ ID NO: 1533346 - RNA, 19 nt, Artificial Sequence
  Description of Artificial Sequence: Synthetic oligonucleotide
  Sense strand starting at position 711 of SEQ ID NO: 1245063
gacgaaguaucaucaguag

SEQ ID NO: 1533347 - RNA, 19 nt, Artificial Sequence
  Description of Artificial Sequence: Synthetic oligonucleotide
  Antisense strand to SEQ ID NO: 1533346
cuacugaugauacuucguc

SEQ ID NO: 1533348 - RNA, 19 nt, Artificial Sequence
  Description of Artificial Sequence: Synthetic oligonucleotide
  Sense strand starting at position 714 of SEQ ID NO: 1245063
gaaguaucaucaguaggau

SEQ ID NO: 1533349 - RNA, 19 nt, Artificial Sequence
  Description of Artificial Sequence: Synthetic oligonucleotide
  Antisense strand to SEQ ID NO: 1533348
auccuacugaugauacuuc

SEQ ID NO: 1533350 - RNA, 19 nt, Artificial Sequence
  Description of Artificial Sequence: Synthetic oligonucleotide
  Sense strand starting at position 734 of SEQ ID NO: 1245063
uuaauucuacuggguaaga

SEQ ID NO: 1533351 - RNA, 19 nt, Artificial Sequence
  Description of Artificial Sequence: Synthetic oligonucleotide
  Antisense strand to SEQ ID NO: 1533350
ucuuacccaguagaauuaa

SEQ ID NO: 1533352 - RNA, 19 nt, Artificial Sequence
  Description of Artificial Sequence: Synthetic oligonucleotide
  Sense strand starting at position 849 of SEQ ID NO: 1245063
ucaaccugugagcaucaau

SEQ ID NO: 1533353 - RNA, 19 nt, Artificial Sequence
  Description of Artificial Sequence: Synthetic oligonucleotide
  Antisense strand to SEQ ID NO: 1533352
auugaugcucacagguuga

SEQ ID NO: 1533354 - RNA, 19 nt, Artificial Sequence
  Description of Artificial Sequence: Synthetic oligonucleotide
  Sense strand starting at position 929 of SEQ ID NO: 1245063
gaaugaauggcuugcguaa

SEQ ID NO: 1533355 - RNA, 19 nt, Artificial Sequence
  Description of Artificial Sequence: Synthetic oligonucleotide
  Antisense strand to SEQ ID NO: 1533354
uuacgcaagccauucauuc

SEQ ID NO: 1533356 - RNA, 19 nt, Artificial Sequence
  Description of Artificial Sequence: Synthetic oligonucleotide
  Sense strand starting at position 942 of SEQ ID NO: 1245063
gcguaaaggcgauagucuu

SEQ ID NO: 1533357 - RNA, 19 nt, Artificial Sequence
  Description of Artificial Sequence: Synthetic oligonucleotide
  Antisense strand to SEQ ID NO: 1533356
aagacuaucgccuuuacgc

SEQ ID NO: 1533358 - RNA, 19 nt, Artificial Sequence
  Description of Artificial Sequence: Synthetic oligonucleotide
  Sense strand starting at position 948 of SEQ ID NO: 1245063
aggcgauagucuuuaacac

SEQ ID NO: 1533359 - RNA, 19 nt, Artificial Sequence
  Description of Artificial Sequence: Synthetic oligonucleotide
  Antisense strand to SEQ ID NO: 1533358
guguuaaagacuaucgccu

SEQ ID NO: 1533360 - RNA, 19 nt, Artificial Sequence
  Description of Artificial Sequence: Synthetic oligonucleotide
  Sense strand starting at position 963 of SEQ ID NO: 1245063
acacggguucgucagugua

SEQ ID NO: 1533361 - RNA, 19 nt, Artificial Sequence
  Description of Artificial Sequence: Synthetic oligonucleotide
  Antisense strand to SEQ ID NO: 1533360
uacacugacgaacccgugu

SEQ ID NO: 1533362 - RNA, 19 nt, Artificial Sequence
  Description of Artificial Sequence: Synthetic oligonucleotide
  Sense strand starting at position 1112 of SEQ ID NO: 1245063
gcgccaagccuauaagaaa

SEQ ID NO: 1533363 - RNA, 19 nt, Artificial Sequence
  Description of Artificial Sequence: Synthetic oligonucleotide
  Antisense strand to SEQ ID NO: 1533362
uuucuuauaggcuuggcgc

SEQ ID NO: 1533364 - RNA, 19 nt, Artificial Sequence
  Description of Artificial Sequence: Synthetic oligonucleotide
  Sense strand starting at position 1267 of SEQ ID NO: 1245063
ccggaaaguugcgugaaga

SEQ ID NO: 1533365 - RNA, 19 nt, Artificial Sequence
  Description of Artificial Sequence: Synthetic oligonucleotide
  Antisense strand to SEQ ID NO: 1533364
ucuucacgcaacuuuccgg

SEQ ID NO: 1533366 - RNA, 19 nt, Artificial Sequence
  Description of Artificial Sequence: Synthetic oligonucleotide
  Sense strand starting at position 1268 of SEQ ID NO: 1245063
cggaaaguugcgugaagac

SEQ ID NO: 1533367 - RNA, 19 nt, Artificial Sequence
  Description of Artificial Sequence: Synthetic oligonucleotide
  Antisense strand to SEQ ID NO: 1533366
gucuucacgcaacuuuccg

SEQ ID NO: 1533368 - RNA, 19 nt, Artificial Sequence
  Description of Artificial Sequence: Synthetic oligonucleotide
  Sense strand starting at position 2193 of SEQ ID NO: 1245063
accgucaccuucccgaaau

SEQ ID NO: 1533369 - RNA, 19 nt, Artificial Sequence
  Description of Artificial Sequence: Synthetic oligonucleotide
  Antisense strand to SEQ ID NO: 1533368
auuucgggaaggugacggu

SEQ ID NO: 1533370 - RNA, 19 nt, Artificial Sequence
  Description of Artificial Sequence: Synthetic oligonucleotide
  Sense strand starting at position 2195 of SEQ ID NO: 1245063
cgucaccuucccgaaaugu

SEQ ID NO: 1533371 - RNA, 19 nt, Artificial Sequence
  Description of Artificial Sequence: Synthetic oligonucleotide
  Antisense strand to SEQ ID NO: 1533370
acauuucgggaaggugacg

SEQ ID NO: 1533372 - RNA, 19 nt, Artificial Sequence
  Description of Artificial Sequence: Synthetic oligonucleotide
  Sense strand starting at position 2335 of SEQ ID NO: 1245063
cagcuugcggugucugaau

SEQ ID NO: 1533373 - RNA, 19 nt, Artificial Sequence
  Description of Artificial Sequence: Synthetic oligonucleotide
  Antisense strand to SEQ ID NO: 1533372
auucagacaccgcaagcug

SEQ ID NO: 1533374 - RNA, 19 nt, Artificial Sequence
  Description of Artificial Sequence: Synthetic oligonucleotide
  Sense strand starting at position 2459 of SEQ ID NO: 1245063
gcaccaauaucugcucaag

SEQ ID NO: 1533375 - RNA, 19 nt, Artificial Sequence
  Description of Artificial Sequence: Synthetic oligonucleotide
  Antisense strand to SEQ ID NO: 1533374
cuugagcagauauuggugc

SEQ ID NO: 1533376 - RNA, 19 nt, Artificial Sequence
  Description of Artificial Sequence: Synthetic oligonucleotide
  Sense strand starting at position 2819 of SEQ ID NO: 1245063
uguaaacggucuuuaccuu

SEQ ID NO: 1533377 - RNA, 19 nt, Artificial Sequence
  Description of Artificial Sequence: Synthetic oligonucleotide
  Antisense strand to SEQ ID NO: 1533376
aagguaaagaccguuuaca

SEQ ID NO: 1533378 - RNA, 19 nt, Artificial Sequence
  Description of Artificial Sequence: Synthetic oligonucleotide
  Sense strand starting at position 2826 of SEQ ID NO: 1245063
ggucuuuaccuuuacagag

SEQ ID NO: 1533379 - RNA, 19 nt, Artificial Sequence
  Description of Artificial Sequence: Synthetic oligonucleotide
  Antisense strand to SEQ ID NO: 1533378
cucuguaaagguaaagacc

SEQ ID NO: 1533380 - RNA, 19 nt, Artificial Sequence
  Description of Artificial Sequence: Synthetic oligonucleotide
  Sense strand starting at position 3056 of SEQ ID NO: 1245063
ccaggcaccuugcauuuaa

SEQ ID NO: 1533381 - RNA, 19 nt, Artificial Sequence
  Description of Artificial Sequence: Synthetic oligonucleotide
  Antisense strand to SEQ ID NO: 1533380
uuaaaugcaaggugccugg

SEQ ID NO: 1533382 - RNA, 19 nt, Artificial Sequence
  Description of Artificial Sequence: Synthetic oligonucleotide
  Sense strand starting at position 3118 of SEQ ID NO: 1245063
cuaugaguuggauggcguu

SEQ ID NO: 1533383 - RNA, 19 nt, Artificial Sequence
  Description of Artificial Sequence: Synthetic oligonucleotide
  Antisense strand to SEQ ID NO: 1533382
aacgccauccaacucauag

SEQ ID NO: 1533384 - RNA, 19 nt, Artificial Sequence
  Description of Artificial Sequence: Synthetic oligonucleotide
  Sense strand starting at position 3124 of SEQ ID NO: 1245063
guuggauggcguuacuagu

SEQ ID NO: 1533385 - RNA, 19 nt, Artificial Sequence
  Description of Artificial Sequence: Synthetic oligonucleotide
  Antisense strand to SEQ ID NO: 1533384
acuaguaacgccauccaac

SEQ ID NO: 1533386 - RNA, 19 nt, Artificial Sequence
  Description of Artificial Sequence: Synthetic oligonucleotide
  Sense strand starting at position 3130 of SEQ ID NO: 1245063
uggcguuacuagucccaaa

SEQ ID NO: 1533387 - RNA, 19 nt, Artificial Sequence
  Description of Artificial Sequence: Synthetic oligonucleotide
  Antisense strand to SEQ ID NO: 1533386
uuugggacuaguaacgcca

SEQ ID NO: 1533388 - RNA, 19 nt, Artificial Sequence
  Description of Artificial Sequence: Synthetic oligonucleotide
  Sense strand starting at position 3231 of SEQ ID NO: 1245063
ggcagagcuuacuuucuua

SEQ ID NO: 1533389 - RNA, 19 nt, Artificial Sequence
  Description of Artificial Sequence: Synthetic oligonucleotide
  Antisense strand to SEQ ID NO: 1533388
uaagaaaguaagcucugcc

SEQ ID NO: 1533390 - RNA, 19 nt, Artificial Sequence
  Description of Artificial Sequence: Synthetic oligonucleotide
  Sense strand starting at position 3260 of SEQ ID NO: 1245063
ccaacugccucacugagaa

SEQ ID NO: 1533391 - RNA, 19 nt, Artificial Sequence
  Description of Artificial Sequence: Synthetic oligonucleotide
  Antisense strand to SEQ ID NO: 1533390
uucucagugaggcaguugg

SEQ ID NO: 1533392 - RNA, 19 nt, Artificial Sequence
  Description of Artificial Sequence: Synthetic oligonucleotide
  Sense strand starting at position 3291 of SEQ ID NO: 1245063
uagugugugcuagcuaagu

SEQ ID NO: 1533393 - RNA, 19 nt, Artificial Sequence
  Description of Artificial Sequence: Synthetic oligonucleotide
  Antisense strand to SEQ ID NO: 1533392
acuuagcuagcacacacua

SEQ ID NO: 1533394 - RNA, 19 nt, Artificial Sequence
  Description of Artificial Sequence: Synthetic oligonucleotide
  Sense strand starting at position 3297 of SEQ ID NO: 1245063
gugcuagcuaaguaguuua

SEQ ID NO: 1533395 - RNA, 19 nt, Artificial Sequence
  Description of Artificial Sequence: Synthetic oligonucleotide
  Antisense strand to SEQ ID NO: 1533394
uaaacuacuuagcuagcac

SEQ ID NO: 1533396 - RNA, 19 nt, Artificial Sequence
  Description of Artificial Sequence: Synthetic oligonucleotide
  Sense strand starting at position 3305 of SEQ ID NO: 1245063
uaaguaguuuauccgugua

SEQ ID NO: 1533397 - RNA, 19 nt, Artificial Sequence
  Description of Artificial Sequence: Synthetic oligonucleotide
  Antisense strand to SEQ ID NO: 1533396
uacacggauaaacuacuua

SEQ ID NO: 1533398 - RNA, 19 nt, Artificial Sequence
  Description of Artificial Sequence: Synthetic oligonucleotide
  Sense strand starting at position 3307 of SEQ ID NO: 1245063
aguaguuuauccguguaug

SEQ ID NO: 1533399 - RNA, 19 nt, Artificial Sequence
  Description of Artificial Sequence: Synthetic oligonucleotide
  Antisense strand to SEQ ID NO: 1533398
cauacacggauaaacuacu

SEQ ID NO: 1533400 - RNA, 19 nt, Artificial Sequence
  Description of Artificial Sequence: Synthetic oligonucleotide
  Sense strand starting at position 3309 of SEQ ID NO: 1245063
uaguuuauccguguauguu

SEQ ID NO: 1533401 - RNA, 19 nt, Artificial Sequence
  Description of Artificial Sequence: Synthetic oligonucleotide
  Antisense strand to SEQ ID NO: 1533400
aacauacacggauaaacua

SEQ ID NO: 1533402 - RNA, 19 nt, Artificial Sequence
  Description of Artificial Sequence: Synthetic oligonucleotide
  Sense strand starting at position 3310 of SEQ ID NO: 1245063
aguuuauccguguauguua

SEQ ID NO: 1533403 - RNA, 19 nt, Artificial Sequence
  Description of Artificial Sequence: Synthetic oligonucleotide
  Antisense strand to SEQ ID NO: 1533402
uaacauacacggauaaacu

SEQ ID NO: 1533404 - RNA, 19 nt, Artificial Sequence
  Description of Artificial Sequence: Synthetic oligonucleotide
  Sense strand starting at position 3312 of SEQ ID NO: 1245063
uuuauccguguauguuauu

SEQ ID NO: 1533405 - RNA, 19 nt, Artificial Sequence
  Description of Artificial Sequence: Synthetic oligonucleotide
  Antisense strand to SEQ ID NO: 1533404
aauaacauacacggauaaa

SEQ ID NO: 1533406 - RNA, 19 nt, Artificial Sequence
  Description of Artificial Sequence: Synthetic oligonucleotide
  Sense strand starting at position 3481 of SEQ ID NO: 1245063
augaaugaauguggacuaa

SEQ ID NO: 1533407 - RNA, 19 nt, Artificial Sequence
  Description of Artificial Sequence: Synthetic oligonucleotide
  Antisense strand to SEQ ID NO: 1533406
uuaguccacauucauucau

SEQ ID NO: 1533408 - RNA, 19 nt, Artificial Sequence
  Description of Artificial Sequence: Synthetic oligonucleotide
  Sense strand starting at position 3493 of SEQ ID NO: 1245063
ggacuaauacauugaguuu

SEQ ID NO: 1533409 - RNA, 19 nt, Artificial Sequence
  Description of Artificial Sequence: Synthetic oligonucleotide
  Antisense strand to SEQ ID NO: 1533408
aaacucaauguauuagucc

SEQ ID NO: 1533410 - RNA, 19 nt, Artificial Sequence
  Description of Artificial Sequence: Synthetic oligonucleotide
  Sense strand starting at position 3524 of SEQ ID NO: 1245063
uugacagucugaucuaauc

SEQ ID NO: 1533411 - RNA, 19 nt, Artificial Sequence
  Description of Artificial Sequence: Synthetic oligonucleotide
  Antisense strand to SEQ ID NO: 1533410
gauuagaucagacugucaa

SEQ ID NO: 1533412 - RNA, 19 nt, Artificial Sequence
  Description of Artificial Sequence: Synthetic oligonucleotide
  Sense strand starting at position 3533 of SEQ ID NO: 1245063
ugaucuaaucaaugcugca

SEQ ID NO: 1533413 - RNA, 19 nt, Artificial Sequence
  Description of Artificial Sequence: Synthetic oligonucleotide
  Antisense strand to SEQ ID NO: 1533412
ugcagcauugauuagauca

SEQ ID NO: 1533414 - RNA, 19 nt, Artificial Sequence
  Description of Artificial Sequence: Synthetic oligonucleotide
  Sense strand starting at position 3567 of SEQ ID NO: 1245063
gacccugacuacugagaua

SEQ ID NO: 1533415 - RNA, 19 nt, Artificial Sequence
  Description of Artificial Sequence: Synthetic oligonucleotide
  Antisense strand to SEQ ID NO: 1533414
uaucucaguagucaggguc

SEQ ID NO: 1533416 - RNA, 19 nt, Artificial Sequence
  Description of Artificial Sequence: Synthetic oligonucleotide
  Sense strand starting at position 622 of SEQ ID NO: 1245064
acuggaaccuggccuaauu

SEQ ID NO: 1533417 - RNA, 19 nt, Artificial Sequence
  Description of Artificial Sequence: Synthetic oligonucleotide
  Antisense strand to SEQ ID NO: 1533416
aauuaggccagguuccagu

SEQ ID NO: 1533418 - RNA, 19 nt, Artificial Sequence
  Description of Artificial Sequence: Synthetic oligonucleotide
  Sense strand starting at position 651 of SEQ ID NO: 1245064
aauaauuagcaagguguga

SEQ ID NO: 1533419 - RNA, 19 nt, Artificial Sequence
  Description of Artificial Sequence: Synthetic oligonucleotide
  Antisense strand to SEQ ID NO: 1533418
ucacaccuugcuaauuauu

SEQ ID NO: 1533420 - RNA, 19 nt, Artificial Sequence
  Description of Artificial Sequence: Synthetic oligonucleotide
  Sense strand starting at position 836 of SEQ ID NO: 1245064
uuguaaccuguccaaaguu

SEQ ID NO: 1533421 - RNA, 19 nt, Artificial Sequence
  Description of Artificial Sequence: Synthetic oligonucleotide
  Antisense strand to SEQ ID NO: 1533420
aacuuuggacagguuacaa

SEQ ID NO: 1533422 - RNA, 19 nt, Artificial Sequence
  Description of Artificial Sequence: Synthetic oligonucleotide
  Sense strand starting at position 844 of SEQ ID NO: 1245064
uguccaaaguucucacaga

SEQ ID NO: 1533423 - RNA, 19 nt, Artificial Sequence
  Description of Artificial Sequence: Synthetic oligonucleotide
  Antisense strand to SEQ ID NO: 1533422
ucugugagaacuuuggaca

SEQ ID NO: 1533424 - RNA, 19 nt, Artificial Sequence
  Description of Artificial Sequence: Synthetic oligonucleotide
  Sense strand starting at position 1207 of SEQ ID NO: 1245064
gccuauuuguaucuuaucu

SEQ ID NO: 1533425 - RNA, 19 nt, Artificial Sequence
  Description of Artificial Sequence: Synthetic oligonucleotide
  Antisense strand to SEQ ID NO: 1533424
agauaagauacaaauaggc

SEQ ID NO: 1533426 - RNA, 19 nt, Artificial Sequence
  Description of Artificial Sequence: Synthetic oligonucleotide
  Sense strand starting at position 1234 of SEQ ID NO: 1245064
ucauaauaauacuucggua

SEQ ID NO: 1533427 - RNA, 19 nt, Artificial Sequence
  Description of Artificial Sequence: Synthetic oligonucleotide
  Antisense strand to SEQ ID NO: 1533426
uaccgaaguauuauuauga

SEQ ID NO: 1533428 - RNA, 19 nt, Artificial Sequence
  Description of Artificial Sequence: Synthetic oligonucleotide
  Sense strand starting at position 1236 of SEQ ID NO: 1245064
auaauaauacuucgguaag

SEQ ID NO: 1533429 - RNA, 19 nt, Artificial Sequence
  Description of Artificial Sequence: Synthetic oligonucleotide
  Antisense strand to SEQ ID NO: 1533428
cuuaccgaaguauuauuau

SEQ ID NO: 1533430 - RNA, 19 nt, Artificial Sequence
  Description of Artificial Sequence: Synthetic oligonucleotide
  Sense strand starting at position 1242 of SEQ ID NO: 1245064
auacuucgguaagauauuu

SEQ ID NO: 1533431 - RNA, 19 nt, Artificial Sequence
  Description of Artificial Sequence: Synthetic oligonucleotide
  Antisense strand to SEQ ID NO: 1533430
aaauaucuuaccgaaguau

SEQ ID NO: 1533432 - RNA, 19 nt, Artificial Sequence
  Description of Artificial Sequence: Synthetic oligonucleotide
  Sense strand starting at position 1302 of SEQ ID NO: 1245064
guggcuacgagauauuauu

SEQ ID NO: 1533433 - RNA, 19 nt, Artificial Sequence
  Description of Artificial Sequence: Synthetic oligonucleotide
  Antisense strand to SEQ ID NO: 1533432
aauaauaucucguagccac

SEQ ID NO: 1533434 - RNA, 19 nt, Artificial Sequence
  Description of Artificial Sequence: Synthetic oligonucleotide
  Sense strand starting at position 1323 of SEQ ID NO: 1245064
uuuaauuauucgcuccaag

SEQ ID NO: 1533435 - RNA, 19 nt, Artificial Sequence
  Description of Artificial Sequence: Synthetic oligonucleotide
  Antisense strand to SEQ ID NO: 1533434
cuuggagcgaauaauuaaa

SEQ ID NO: 1533436 - RNA, 19 nt, Artificial Sequence
  Description of Artificial Sequence: Synthetic oligonucleotide
  Sense strand starting at position 1366 of SEQ ID NO: 1245064
aaagcuguugcagaggaau

SEQ ID NO: 1533437 - RNA, 19 nt, Artificial Sequence
  Description of Artificial Sequence: Synthetic oligonucleotide
  Antisense strand to SEQ ID NO: 1533436
auuccucugcaacagcuuu

SEQ ID NO: 1533438 - RNA, 19 nt, Artificial Sequence
  Description of Artificial Sequence: Synthetic oligonucleotide
  Sense strand starting at position 1369 of SEQ ID NO: 1245064
gcuguugcagaggaaucuu

SEQ ID NO: 1533439 - RNA, 19 nt, Artificial Sequence
  Description of Artificial Sequence: Synthetic oligonucleotide
  Antisense strand to SEQ ID NO: 1533438
aagauuccucugcaacagc

SEQ ID NO: 1533440 - RNA, 19 nt, Artificial Sequence
  Description of Artificial Sequence: Synthetic oligonucleotide
  Sense strand starting at position 1434 of SEQ ID NO: 1245064
ugaggcuccauccgaaaua

SEQ ID NO: 1533441 - RNA, 19 nt, Artificial Sequence
  Description of Artificial Sequence: Synthetic oligonucleotide
  Antisense strand to SEQ ID NO: 1533440
uauuucggauggagccuca

SEQ ID NO: 1533442 - RNA, 19 nt, Artificial Sequence
  Description of Artificial Sequence: Synthetic oligonucleotide
  Sense strand starting at position 1502 of SEQ ID NO: 1245064
caugucaucuuaguggaga

SEQ ID NO: 1533443 - RNA, 19 nt, Artificial Sequence
  Description of Artificial Sequence: Synthetic oligonucleotide
  Antisense strand to SEQ ID NO: 1533442
ucuccacuaagaugacaug

SEQ ID NO: 1533444 - RNA, 19 nt, Artificial Sequence
  Description of Artificial Sequence: Synthetic oligonucleotide
  Sense strand starting at position 1504 of SEQ ID NO: 1245064
ugucaucuuaguggagaca

SEQ ID NO: 1533445 - RNA, 19 nt, Artificial Sequence
  Description of Artificial Sequence: Synthetic oligonucleotide
  Antisense strand to SEQ ID NO: 1533444
ugucuccacuaagaugaca

SEQ ID NO: 1533446 - RNA, 19 nt, Artificial Sequence
  Description of Artificial Sequence: Synthetic oligonucleotide
  Sense strand starting at position 1651 of SEQ ID NO: 1245064
aaguaucggagaggcaaau

SEQ ID NO: 1533447 - RNA, 19 nt, Artificial Sequence
  Description of Artificial Sequence: Synthetic oligonucleotide
  Antisense strand to SEQ ID NO: 1533446
auuugccucuccgauacuu

SEQ ID NO: 1533448 - RNA, 19 nt, Artificial Sequence
  Description of Artificial Sequence: Synthetic oligonucleotide
  Sense strand starting at position 2206 of SEQ ID NO: 1245064
gcaggaucucgguaaagga

SEQ ID NO: 1533449 - RNA, 19 nt, Artificial Sequence
  Description of Artificial Sequence: Synthetic oligonucleotide
  Antisense strand to SEQ ID NO: 1533448
uccuuuaccgagauccugc

SEQ ID NO: 1533450 - RNA, 19 nt, Artificial Sequence
  Description of Artificial Sequence: Synthetic oligonucleotide
  Sense strand starting at position 2220 of SEQ ID NO: 1245064
aaggaugaugccugugcaa

SEQ ID NO: 1533451 - RNA, 19 nt, Artificial Sequence
  Description of Artificial Sequence: Synthetic oligonucleotide
  Antisense strand to SEQ ID NO: 1533450
uugcacaggcaucauccuu

SEQ ID NO: 1533452 - RNA, 19 nt, Artificial Sequence
  Description of Artificial Sequence: Synthetic oligonucleotide
  Sense strand starting at position 2383 of SEQ ID NO: 1245064
gcaguuacaucacuuuaua

SEQ ID NO: 1533453 - RNA, 19 nt, Artificial Sequence
  Description of Artificial Sequence: Synthetic oligonucleotide
  Antisense strand to SEQ ID NO: 1533452
uauaaagugauguaacugc

SEQ ID NO: 1533454 - RNA, 19 nt, Artificial Sequence
  Description of Artificial Sequence: Synthetic oligonucleotide
  Sense strand starting at position 2470 of SEQ ID NO: 1245064
ucauaaaccguugguggaa

SEQ ID NO: 1533455 - RNA, 19 nt, Artificial Sequence
  Description of Artificial Sequence: Synthetic oligonucleotide
  Antisense strand to SEQ ID NO: 1533454
uuccaccaacgguuuauga

SEQ ID NO: 1533456 - RNA, 19 nt, Artificial Sequence
  Description of Artificial Sequence: Synthetic oligonucleotide
  Sense strand starting at position 2507 of SEQ ID NO: 1245064
uuggaaauauuuggaaguu

SEQ ID NO: 1533457 - RNA, 19 nt, Artificial Sequence
  Description of Artificial Sequence: Synthetic oligonucleotide
  Antisense strand to SEQ ID NO: 1533456
aacuuccaaauauuuccaa

SEQ ID NO: 1533458 - RNA, 19 nt, Artificial Sequence
  Description of Artificial Sequence: Synthetic oligonucleotide
  Sense strand starting at position 2508 of SEQ ID NO: 1245064
uggaaauauuuggaaguuc

SEQ ID NO: 1533459 - RNA, 19 nt, Artificial Sequence
  Description of Artificial Sequence: Synthetic oligonucleotide
  Antisense strand to SEQ ID NO: 1533458
gaacuuccaaauauuucca

SEQ ID NO: 1533460 - RNA, 19 nt, Artificial Sequence
  Description of Artificial Sequence: Synthetic oligonucleotide
  Sense strand starting at position 2516 of SEQ ID NO: 1245064
uuuggaaguuccucagaug

SEQ ID NO: 1533461 - RNA, 19 nt, Artificial Sequence
  Description of Artificial Sequence: Synthetic oligonucleotide
  Antisense strand to SEQ ID NO: 1533460
caucugaggaacuuccaaa

SEQ ID NO: 1533462 - RNA, 19 nt, Artificial Sequence
  Description of Artificial Sequence: Synthetic oligonucleotide
  Sense strand starting at position 2517 of SEQ ID NO: 1245064
uuggaaguuccucagaugu

SEQ ID NO: 1533463 - RNA, 19 nt, Artificial Sequence
  Description of Artificial Sequence: Synthetic oligonucleotide
  Antisense strand to SEQ ID NO: 1533462
acaucugaggaacuuccaa

SEQ ID NO: 1533464 - RNA, 19 nt, Artificial Sequence
  Description of Artificial Sequence: Synthetic oligonucleotide
  Sense strand starting at position 2527 of SEQ ID NO: 1245064
cucagauguuuacucaggu

SEQ ID NO: 1533465 - RNA, 19 nt, Artificial Sequence
  Description of Artificial Sequence: Synthetic oligonucleotide
  Antisense strand to SEQ ID NO: 1533464
accugaguaaacaucugag

SEQ ID NO: 1533466 - RNA, 19 nt, Artificial Sequence
  Description of Artificial Sequence: Synthetic oligonucleotide
  Sense strand starting at position 2528 of SEQ ID NO: 1245064
ucagauguuuacucaggua

SEQ ID NO: 1533467 - RNA, 19 nt, Artificial Sequence
  Description of Artificial Sequence: Synthetic oligonucleotide
  Antisense strand to SEQ ID NO: 1533466
uaccugaguaaacaucuga

SEQ ID NO: 1533468 - RNA, 19 nt, Artificial Sequence
  Description of Artificial Sequence: Synthetic oligonucleotide
  Sense strand starting at position 2544 of SEQ ID NO: 1245064
guaaccuuaugaucuagca

SEQ ID NO: 1533469 - RNA, 19 nt, Artificial Sequence
  Description of Artificial Sequence: Synthetic oligonucleotide
  Antisense strand to SEQ ID NO: 1533468
ugcuagaucauaagguuac

SEQ ID NO: 1533470 - RNA, 19 nt, Artificial Sequence
  Description of Artificial Sequence: Synthetic oligonucleotide
  Sense strand starting at position 2774 of SEQ ID NO: 1245064
ggaugaucaacugguauau

SEQ ID NO: 1533471 - RNA, 19 nt, Artificial Sequence
  Description of Artificial Sequence: Synthetic oligonucleotide
  Antisense strand to SEQ ID NO: 1533470
auauaccaguugaucaucc

SEQ ID NO: 1533472 - RNA, 19 nt, Artificial Sequence
  Description of Artificial Sequence: Synthetic oligonucleotide
  Sense strand starting at position 2800 of SEQ ID NO: 1245064
cuggauuguucugcaaaga

SEQ ID NO: 1533473 - RNA, 19 nt, Artificial Sequence
  Description of Artificial Sequence: Synthetic oligonucleotide
  Antisense strand to SEQ ID NO: 1533472
ucuuugcagaacaauccag

SEQ ID NO: 1533474 - RNA, 19 nt, Artificial Sequence
  Description of Artificial Sequence: Synthetic oligonucleotide
  Sense strand starting at position 2801 of SEQ ID NO: 1245064
uggauuguucugcaaagaa

SEQ ID NO: 1533475 - RNA, 19 nt, Artificial Sequence
  Description of Artificial Sequence: Synthetic oligonucleotide
  Antisense strand to SEQ ID NO: 1533474
uucuuugcagaacaaucca

SEQ ID NO: 1533476 - RNA, 19 nt, Artificial Sequence
  Description of Artificial Sequence: Synthetic oligonucleotide
  Sense strand starting at position 3093 of SEQ ID NO: 1245064
uuuaauggugcaggguaaa

SEQ ID NO: 1533477 - RNA, 19 nt, Artificial Sequence
  Description of Artificial Sequence: Synthetic oligonucleotide
  Antisense strand to SEQ ID NO: 1533476
uuuacccugcaccauuaaa

SEQ ID NO: 1533478 - RNA, 19 nt, Artificial Sequence
  Description of Artificial Sequence: Synthetic oligonucleotide
  Sense strand starting at position 3308 of SEQ ID NO: 1245064
uguguuaaguuucuuagag

SEQ ID NO: 1533479 - RNA, 19 nt, Artificial Sequence
  Description of Artificial Sequence: Synthetic oligonucleotide
  Antisense strand to SEQ ID NO: 1533478
cucuaagaaacuuaacaca

SEQ ID NO: 1533480 - RNA, 19 nt, Artificial Sequence
  Description of Artificial Sequence: Synthetic oligonucleotide
  Sense strand starting at position 3309 of SEQ ID NO: 1245064
guguuaaguuucuuagaga

SEQ ID NO: 1533481 - RNA, 19 nt, Artificial Sequence
  Description of Artificial Sequence: Synthetic oligonucleotide
  Antisense strand to SEQ ID NO: 1533480
ucucuaagaaacuuaacac

SEQ ID NO: 1533482 - RNA, 19 nt, Artificial Sequence
  Description of Artificial Sequence: Synthetic oligonucleotide
  Sense strand starting at position 3356 of SEQ ID NO: 1245064
gcuuauucuggaggcagga

SEQ ID NO: 1533483 - RNA, 19 nt, Artificial Sequence
  Description of Artificial Sequence: Synthetic oligonucleotide
  Antisense strand to SEQ ID NO: 1533482
uccugccuccagaauaagc

SEQ ID NO: 1533484 - RNA, 19 nt, Artificial Sequence
  Description of Artificial Sequence: Synthetic oligonucleotide
  Sense strand starting at position 3370 of SEQ ID NO: 1245064
caggaaaccuagucguuaa

SEQ ID NO: 1533485 - RNA, 19 nt, Artificial Sequence
  Description of Artificial Sequence: Synthetic oligonucleotide
  Antisense strand to SEQ ID NO: 1533484
uuaacgacuagguuuccug

SEQ ID NO: 1533486 - RNA, 19 nt, Artificial Sequence
  Description of Artificial Sequence: Synthetic oligonucleotide
  Sense strand starting at position 3371 of SEQ ID NO: 1245064
aggaaaccuagucguuaag

SEQ ID NO: 1533487 - RNA, 19 nt, Artificial Sequence
  Description of Artificial Sequence: Synthetic oligonucleotide
  Antisense strand to SEQ ID NO: 1533486
cuuaacgacuagguuuccu

SEQ ID NO: 1533488 - RNA, 19 nt, Artificial Sequence
  Description of Artificial Sequence: Synthetic oligonucleotide
  Sense strand starting at position 3373 of SEQ ID NO: 1245064
gaaaccuagucguuaagga

SEQ ID NO: 1533489 - RNA, 19 nt, Artificial Sequence
  Description of Artificial Sequence: Synthetic oligonucleotide
  Antisense strand to SEQ ID NO: 1533488
uccuuaacgacuagguuuc

SEQ ID NO: 1533490 - RNA, 19 nt, Artificial Sequence
  Description of Artificial Sequence: Synthetic oligonucleotide
  Sense strand starting at position 3576 of SEQ ID NO: 1245064
gggccaucagcagauaauc

SEQ ID NO: 1533491 - RNA, 19 nt, Artificial Sequence
  Description of Artificial Sequence: Synthetic oligonucleotide
  Antisense strand to SEQ ID NO: 1533490
gauuaucugcugauggccc

SEQ ID NO: 1533492 - RNA, 19 nt, Artificial Sequence
  Description of Artificial Sequence: Synthetic oligonucleotide
  Sense strand starting at position 3601 of SEQ ID NO: 1245064
gccugagguacugaauaua

SEQ ID NO: 1533493 - RNA, 19 nt, Artificial Sequence
  Description of Artificial Sequence: Synthetic oligonucleotide
  Antisense strand to SEQ ID NO: 1533492
uauauucaguaccucaggc

SEQ ID NO: 1533494 - RNA, 19 nt, Artificial Sequence
  Description of Artificial Sequence: Synthetic oligonucleotide
  Sense strand starting at position 3963 of SEQ ID NO: 1245064
gugaaaggguugcucagaa

SEQ ID NO: 1533495 - RNA, 19 nt, Artificial Sequence
  Description of Artificial Sequence: Synthetic oligonucleotide
  Antisense strand to SEQ ID NO: 1533494
uucugagcaacccuuucac

SEQ ID NO: 1533496 - RNA, 19 nt, Artificial Sequence
  Description of Artificial Sequence: Synthetic oligonucleotide
  Sense strand starting at position 66 of SEQ ID NO: 1245065
gccagucuacuccagaaau

SEQ ID NO: 1533497 - RNA, 19 nt, Artificial Sequence
  Description of Artificial Sequence: Synthetic oligonucleotide
  Antisense strand to SEQ ID NO: 1533496
auuucuggaguagacuggc

SEQ ID NO: 1533498 - RNA, 19 nt, Artificial Sequence
  Description of Artificial Sequence: Synthetic oligonucleotide
  Sense strand starting at position 138 of SEQ ID NO: 1245065
ccuaguuaacaucacgcaa

SEQ ID NO: 1533499 - RNA, 19 nt, Artificial Sequence
  Description of Artificial Sequence: Synthetic oligonucleotide
  Antisense strand to SEQ ID NO: 1533498
uugcgugauguuaacuagg

SEQ ID NO: 1533500 - RNA, 19 nt, Artificial Sequence
  Description of Artificial Sequence: Synthetic oligonucleotide
  Sense strand starting at position 260 of SEQ ID NO: 1245065
ccuggagccagugagauau

SEQ ID NO: 1533501 - RNA, 19 nt, Artificial Sequence
  Description of Artificial Sequence: Synthetic oligonucleotide
  Antisense strand to SEQ ID NO: 1533500
auaucucacuggcuccagg

SEQ ID NO: 1533502 - RNA, 19 nt, Artificial Sequence
  Description of Artificial Sequence: Synthetic oligonucleotide
  Sense strand starting at position 310 of SEQ ID NO: 1245065
gacagaauucgaggucaga

SEQ ID NO: 1533503 - RNA, 19 nt, Artificial Sequence
  Description of Artificial Sequence: Synthetic oligonucleotide
  Antisense strand to SEQ ID NO: 1533502
ucugaccucgaauucuguc

SEQ ID NO: 1533504 - RNA, 19 nt, Artificial Sequence
  Description of Artificial Sequence: Synthetic oligonucleotide
  Sense strand starting at position 344 of SEQ ID NO: 1245065
cuagcaagauuaucuggaa

SEQ ID NO: 1533505 - RNA, 19 nt, Artificial Sequence
  Description of Artificial Sequence: Synthetic oligonucleotide
  Antisense strand to SEQ ID NO: 1533504
uuccagauaaucuugcuag

SEQ ID NO: 1533506 - RNA, 19 nt, Artificial Sequence
  Description of Artificial Sequence: Synthetic oligonucleotide
  Sense strand starting at position 401 of SEQ ID NO: 1245065
cuuaacucucaggguaauu

SEQ ID NO: 1533507 - RNA, 19 nt, Artificial Sequence
  Description of Artificial Sequence: Synthetic oligonucleotide
  Antisense strand to SEQ ID NO: 1533506
aauuacccugagaguuaag

SEQ ID NO: 1533508 - RNA, 19 nt, Artificial Sequence
  Description of Artificial Sequence: Synthetic oligonucleotide
  Sense strand starting at position 432 of SEQ ID NO: 1245065
gagauagcagcaugaaacu

SEQ ID NO: 1533509 - RNA, 19 nt, Artificial Sequence
  Description of Artificial Sequence: Synthetic oligonucleotide
  Antisense strand to SEQ ID NO: 1533508
aguuucaugcugcuaucuc

SEQ ID NO: 1533510 - RNA, 19 nt, Artificial Sequence
  Description of Artificial Sequence: Synthetic oligonucleotide
  Sense strand starting at position 462 of SEQ ID NO: 1245065
uguuaagugcuguauaaau

SEQ ID NO: 1533511 - RNA, 19 nt, Artificial Sequence
  Description of Artificial Sequence: Synthetic oligonucleotide
  Antisense strand to SEQ ID NO: 1533510
auuuauacagcacuuaaca

SEQ ID NO: 1533512 - RNA, 19 nt, Artificial Sequence
  Description of Artificial Sequence: Synthetic oligonucleotide
  Sense strand starting at position 509 of SEQ ID NO: 1245065
ugcuccaguguugauugaa

SEQ ID NO: 1533513 - RNA, 19 nt, Artificial Sequence
  Description of Artificial Sequence: Synthetic oligonucleotide
  Antisense strand to SEQ ID NO: 1533512
uucaaucaacacuggagca

SEQ ID NO: 1533514 - RNA, 19 nt, Artificial Sequence
  Description of Artificial Sequence: Synthetic oligonucleotide
  Sense strand starting at position 528 of SEQ ID NO: 1245065
uguccuuugcuauauggaa

SEQ ID NO: 1533515 - RNA, 19 nt, Artificial Sequence
  Description of Artificial Sequence: Synthetic oligonucleotide
  Antisense strand to SEQ ID NO: 1533514
uuccauauagcaaaggaca

SEQ ID NO: 1533516 - RNA, 19 nt, Artificial Sequence
  Description of Artificial Sequence: Synthetic oligonucleotide
  Sense strand starting at position 582 of SEQ ID NO: 1245065
ggaagagcuccugggcauu

SEQ ID NO: 1533517 - RNA, 19 nt, Artificial Sequence
  Description of Artificial Sequence: Synthetic oligonucleotide
  Antisense strand to SEQ ID NO: 1533516
aaugcccaggagcucuucc

SEQ ID NO: 1533518 - RNA, 19 nt, Artificial Sequence
  Description of Artificial Sequence: Synthetic oligonucleotide
  Sense strand starting at position 915 of SEQ ID NO: 1245065
cacagcagucuuuaacgaa

SEQ ID NO: 1533519 - RNA, 19 nt, Artificial Sequence
  Description of Artificial Sequence: Synthetic oligonucleotide
  Antisense strand to SEQ ID NO: 1533518
uucguuaaagacugcugug

SEQ ID NO: 1533520 - RNA, 19 nt, Artificial Sequence
  Description of Artificial Sequence: Synthetic oligonucleotide
  Sense strand starting at position 1098 of SEQ ID NO: 1245065
cggucaaccgcagacaaau

SEQ ID NO: 1533521 - RNA, 19 nt, Artificial Sequence
  Description of Artificial Sequence: Synthetic oligonucleotide
  Antisense strand to SEQ ID NO: 1533520
auuugucugcgguugaccg

SEQ ID NO: 1533522 - RNA, 19 nt, Artificial Sequence
  Description of Artificial Sequence: Synthetic oligonucleotide
  Sense strand starting at position 1254 of SEQ ID NO: 1245065
aggucuaauuccuuaagaa

SEQ ID NO: 1533523 - RNA, 19 nt, Artificial Sequence
  Description of Artificial Sequence: Synthetic oligonucleotide
  Antisense strand to SEQ ID NO: 1533522
uucuuaaggaauuagaccu

SEQ ID NO: 1533524 - RNA, 19 nt, Artificial Sequence
  Description of Artificial Sequence: Synthetic oligonucleotide
  Sense strand starting at position 1564 of SEQ ID NO: 1245065
cgaggaagggcuggagauu

SEQ ID NO: 1533525 - RNA, 19 nt, Artificial Sequence
  Description of Artificial Sequence: Synthetic oligonucleotide
  Antisense strand to SEQ ID NO: 1533524
aaucuccagcccuuccucg

SEQ ID NO: 1533526 - RNA, 19 nt, Artificial Sequence
  Description of Artificial Sequence: Synthetic oligonucleotide
  Sense strand starting at position 1570 of SEQ ID NO: 1245065
agggcuggagauuguuaga

SEQ ID NO: 1533527 - RNA, 19 nt, Artificial Sequence
  Description of Artificial Sequence: Synthetic oligonucleotide
  Antisense strand to SEQ ID NO: 1533526
ucuaacaaucuccagcccu

SEQ ID NO: 1533528 - RNA, 19 nt, Artificial Sequence
  Description of Artificial Sequence: Synthetic oligonucleotide
  Sense strand starting at position 1576 of SEQ ID NO: 1245065
ggagauuguuagaggacag

SEQ ID NO: 1533529 - RNA, 19 nt, Artificial Sequence
  Description of Artificial Sequence: Synthetic oligonucleotide
  Antisense strand to SEQ ID NO: 1533528
cuguccucuaacaaucucc

SEQ ID NO: 1533530 - RNA, 19 nt, Artificial Sequence
  Description of Artificial Sequence: Synthetic oligonucleotide
  Sense strand starting at position 2225 of SEQ ID NO: 1245065
acugacauuuaagauagau

SEQ ID NO: 1533531 - RNA, 19 nt, Artificial Sequence
  Description of Artificial Sequence: Synthetic oligonucleotide
  Antisense strand to SEQ ID NO: 1533530
aucuaucuuaaaugucagu

SEQ ID NO: 1533532 - RNA, 19 nt, Artificial Sequence
  Description of Artificial Sequence: Synthetic oligonucleotide
  Sense strand starting at position 2283 of SEQ ID NO: 1245065
cgaggaugacucugaguuc

SEQ ID NO: 1533533 - RNA, 19 nt, Artificial Sequence
  Description of Artificial Sequence: Synthetic oligonucleotide
  Antisense strand to SEQ ID NO: 1533532
gaacucagagucauccucg

SEQ ID NO: 1533534 - RNA, 19 nt, Artificial Sequence
  Description of Artificial Sequence: Synthetic oligonucleotide
  Sense strand starting at position 2308 of SEQ ID NO: 1245065
uugggcuggcucgaauaga

SEQ ID NO: 1533535 - RNA, 19 nt, Artificial Sequence
  Description of Artificial Sequence: Synthetic oligonucleotide
  Antisense strand to SEQ ID NO: 1533534
ucuauucgagccagcccaa

SEQ ID NO: 1533536 - RNA, 19 nt, Artificial Sequence
  Description of Artificial Sequence: Synthetic oligonucleotide
  Sense strand starting at position 2621 of SEQ ID NO: 1245065
ugagaacagcccugagauc

SEQ ID NO: 1533537 - RNA, 19 nt, Artificial Sequence
  Description of Artificial Sequence: Synthetic oligonucleotide
  Antisense strand to SEQ ID NO: 1533536
gaucucagggcuguucuca

SEQ ID NO: 1533538 - RNA, 19 nt, Artificial Sequence
  Description of Artificial Sequence: Synthetic oligonucleotide
  Sense strand starting at position 2710 of SEQ ID NO: 1245065
ccaguucuaccuuaaaggu

SEQ ID NO: 1533539 - RNA, 19 nt, Artificial Sequence
  Description of Artificial Sequence: Synthetic oligonucleotide
  Antisense strand to SEQ ID NO: 1533538
accuuuaagguagaacugg

SEQ ID NO: 1533540 - RNA, 19 nt, Artificial Sequence
  Description of Artificial Sequence: Synthetic oligonucleotide
  Sense strand starting at position 2985 of SEQ ID NO: 1245065
uugcaacuaucccuggaaa

SEQ ID NO: 1533541 - RNA, 19 nt, Artificial Sequence
  Description of Artificial Sequence: Synthetic oligonucleotide
  Antisense strand to SEQ ID NO: 1533540
uuuccagggauaguugcaa

SEQ ID NO: 1533542 - RNA, 19 nt, Artificial Sequence
  Description of Artificial Sequence: Synthetic oligonucleotide
  Sense strand starting at position 3025 of SEQ ID NO: 1245065
aguauuuccugauaauugg

SEQ ID NO: 1533543 - RNA, 19 nt, Artificial Sequence
  Description of Artificial Sequence: Synthetic oligonucleotide
  Antisense strand to SEQ ID NO: 1533542
ccaauuaucaggaaauacu

SEQ ID NO: 1533544 - RNA, 19 nt, Artificial Sequence
  Description of Artificial Sequence: Synthetic oligonucleotide
  Sense strand starting at position 3031 of SEQ ID NO: 1245065
uccugauaauugguugaug

SEQ ID NO: 1533545 - RNA, 19 nt, Artificial Sequence
  Description of Artificial Sequence: Synthetic oligonucleotide
  Antisense strand to SEQ ID NO: 1533544
caucaaccaauuaucagga

SEQ ID NO: 1533546 - RNA, 19 nt, Artificial Sequence
  Description of Artificial Sequence: Synthetic oligonucleotide
  Sense strand starting at position 3034 of SEQ ID NO: 1245065
ugauaauugguugauggca

SEQ ID NO: 1533547 - RNA, 19 nt, Artificial Sequence
  Description of Artificial Sequence: Synthetic oligonucleotide
  Antisense strand to SEQ ID NO: 1533546
ugccaucaaccaauuauca

SEQ ID NO: 1533548 - RNA, 19 nt, Artificial Sequence
  Description of Artificial Sequence: Synthetic oligonucleotide
  Sense strand starting at position 3042 of SEQ ID NO: 1245065
gguugauggcaauaaguuc

SEQ ID NO: 1533549 - RNA, 19 nt, Artificial Sequence
  Description of Artificial Sequence: Synthetic oligonucleotide
  Antisense strand to SEQ ID NO: 1533548
gaacuuauugccaucaacc

SEQ ID NO: 1533550 - RNA, 19 nt, Artificial Sequence
  Description of Artificial Sequence: Synthetic oligonucleotide
  Sense strand starting at position 3165 of SEQ ID NO: 1245065
gaacuacaguuugcaugaa

SEQ ID NO: 1533551 - RNA, 19 nt, Artificial Sequence
  Description of Artificial Sequence: Synthetic oligonucleotide
  Antisense strand to SEQ ID NO: 1533550
uucaugcaaacuguaguuc

SEQ ID NO: 1533552 - RNA, 19 nt, Artificial Sequence
  Description of Artificial Sequence: Synthetic oligonucleotide
  Sense strand starting at position 3291 of SEQ ID NO: 1245065
agcugaugggcaggauaaa

SEQ ID NO: 1533553 - RNA, 19 nt, Artificial Sequence
  Description of Artificial Sequence: Synthetic oligonucleotide
  Antisense strand to SEQ ID NO: 1533552
uuuauccugcccaucagcu

SEQ ID NO: 1533554 - RNA, 19 nt, Artificial Sequence
  Description of Artificial Sequence: Synthetic oligonucleotide
  Sense strand starting at position 3323 of SEQ ID NO: 1245065
aggauagaguucucccauu

SEQ ID NO: 1533555 - RNA, 19 nt, Artificial Sequence
  Description of Artificial Sequence: Synthetic oligonucleotide
  Antisense strand to SEQ ID NO: 1533554
aaugggagaacucuauccu

SEQ ID NO: 1533556 - RNA, 19 nt, Artificial Sequence
  Description of Artificial Sequence: Synthetic oligonucleotide
  Sense strand starting at position 3343 of SEQ ID NO: 1245065
ugccaaguuucuccaauga

SEQ ID NO: 1533557 - RNA, 19 nt, Artificial Sequence
  Description of Artificial Sequence: Synthetic oligonucleotide
  Antisense strand to SEQ ID NO: 1533556
ucauuggagaaacuuggca

SEQ ID NO: 1533558 - RNA, 19 nt, Artificial Sequence
  Description of Artificial Sequence: Synthetic oligonucleotide
  Sense strand starting at position 3423 of SEQ ID NO: 1245065
uuuggaaugaaagguguuu

SEQ ID NO: 1533559 - RNA, 19 nt, Artificial Sequence
  Description of Artificial Sequence: Synthetic oligonucleotide
  Antisense strand to SEQ ID NO: 1533558
aaacaccuuucauuccaaa

SEQ ID NO: 1533560 - RNA, 19 nt, Artificial Sequence
  Description of Artificial Sequence: Synthetic oligonucleotide
  Sense strand starting at position 3622 of SEQ ID NO: 1245065
uuacuagaugcaugaccuu

SEQ ID NO: 1533561 - RNA, 19 nt, Artificial Sequence
  Description of Artificial Sequence: Synthetic oligonucleotide
  Antisense strand to SEQ ID NO: 1533560
aaggucaugcaucuaguaa

SEQ ID NO: 1533562 - RNA, 19 nt, Artificial Sequence
  Description of Artificial Sequence: Synthetic oligonucleotide
  Sense strand starting at position 3625 of SEQ ID NO: 1245065
cuagaugcaugaccuuaaa

SEQ ID NO: 1533563 - RNA, 19 nt, Artificial Sequence
  Description of Artificial Sequence: Synthetic oligonucleotide
  Antisense strand to SEQ ID NO: 1533562
uuuaaggucaugcaucuag

SEQ ID NO: 1533564 - RNA, 19 nt, Artificial Sequence
  Description of Artificial Sequence: Synthetic oligonucleotide
  Sense strand starting at position 3694 of SEQ ID NO: 1245065
cuugaagguuuguuguaag

SEQ ID NO: 1533565 - RNA, 19 nt, Artificial Sequence
  Description of Artificial Sequence: Synthetic oligonucleotide
  Antisense strand to SEQ ID NO: 1533564
cuuacaacaaaccuucaag

SEQ ID NO: 1533566 - RNA, 19 nt, Artificial Sequence
  Description of Artificial Sequence: Synthetic oligonucleotide
  Sense strand starting at position 3710 of SEQ ID NO: 1245065
aaggauuagcugugagaug

SEQ ID NO: 1533567 - RNA, 19 nt, Artificial Sequence
  Description of Artificial Sequence: Synthetic oligonucleotide
  Antisense strand to SEQ ID NO: 1533566
caucucacagcuaauccuu

SEQ ID NO: 1533568 - RNA, 19 nt, Artificial Sequence
  Description of Artificial Sequence: Synthetic oligonucleotide
  Sense strand starting at position 3715 of SEQ ID NO: 1245065
uuagcugugagauggauua

SEQ ID NO: 1533569 - RNA, 19 nt, Artificial Sequence
  Description of Artificial Sequence: Synthetic oligonucleotide
  Antisense strand to SEQ ID NO: 1533568
uaauccaucucacagcuaa

SEQ ID NO: 1533570 - RNA, 19 nt, Artificial Sequence
  Description of Artificial Sequence: Synthetic oligonucleotide
  Sense strand starting at position 3750 of SEQ ID NO: 1245065
agagcacagccucaauuaa

SEQ ID NO: 1533571 - RNA, 19 nt, Artificial Sequence
  Description of Artificial Sequence: Synthetic oligonucleotide
  Antisense strand to SEQ ID NO: 1533570
uuaauugaggcugugcucu

SEQ ID NO: 1533572 - RNA, 19 nt, Artificial Sequence
  Description of Artificial Sequence: Synthetic oligonucleotide
  Sense strand starting at position 3857 of SEQ ID NO: 1245065
cauuaaugugcguaagaau

SEQ ID NO: 1533573 - RNA, 19 nt, Artificial Sequence
  Description of Artificial Sequence: Synthetic oligonucleotide
  Antisense strand to SEQ ID NO: 1533572
auucuuacgcacauuaaug

SEQ ID NO: 1533574 - RNA, 19 nt, Artificial Sequence
  Description of Artificial Sequence: Synthetic oligonucleotide
  Sense strand starting at position 3903 of SEQ ID NO: 1245065
gguuaugauucagcaguga

SEQ ID NO: 1533575 - RNA, 19 nt, Artificial Sequence
  Description of Artificial Sequence: Synthetic oligonucleotide
  Antisense strand to SEQ ID NO: 1533574
ucacugcugaaucauaacc

SEQ ID NO: 1533576 - RNA, 19 nt, Artificial Sequence
  Description of Artificial Sequence: Synthetic oligonucleotide
  Sense strand starting at position 131 of SEQ ID NO: 1245066
uugagagaaucccugucua

SEQ ID NO: 1533577 - RNA, 19 nt, Artificial Sequence
  Description of Artificial Sequence: Synthetic oligonucleotide
  Antisense strand to SEQ ID NO: 1533576
uagacagggauucucucaa

SEQ ID NO: 1533578 - RNA, 19 nt, Artificial Sequence
  Description of Artificial Sequence: Synthetic oligonucleotide
  Sense strand starting at position 144 of SEQ ID NO: 1245066
ugucuaccucaguacagua

SEQ ID NO: 1533579 - RNA, 19 nt, Artificial Sequence
  Description of Artificial Sequence: Synthetic oligonucleotide
  Antisense strand to SEQ ID NO: 1533578
uacuguacugagguagaca

SEQ ID NO: 1533580 - RNA, 19 nt, Artificial Sequence
  Description of Artificial Sequence: Synthetic oligonucleotide
  Sense strand starting at position 157 of SEQ ID NO: 1245066
acaguaacaggauguauau

SEQ ID NO: 1533581 - RNA, 19 nt, Artificial Sequence
  Description of Artificial Sequence: Synthetic oligonucleotide
  Antisense strand to SEQ ID NO: 1533580
auauacauccuguuacugu

SEQ ID NO: 1533582 - RNA, 19 nt, Artificial Sequence
  Description of Artificial Sequence: Synthetic oligonucleotide
  Sense strand starting at position 465 of SEQ ID NO: 1245066
ugcaauggccauuacaaga

SEQ ID NO: 1533583 - RNA, 19 nt, Artificial Sequence
  Description of Artificial Sequence: Synthetic oligonucleotide
  Antisense strand to SEQ ID NO: 1533582
ucuuguaauggccauugca

SEQ ID NO: 1533584 - RNA, 19 nt, Artificial Sequence
  Description of Artificial Sequence: Synthetic oligonucleotide
  Sense strand starting at position 500 of SEQ ID NO: 1245066
gugcaaauggcagaacaua

SEQ ID NO: 1533585 - RNA, 19 nt, Artificial Sequence
  Description of Artificial Sequence: Synthetic oligonucleotide
  Antisense strand to SEQ ID NO: 1533584
uauguucugccauuugcac

SEQ ID NO: 1533586 - RNA, 19 nt, Artificial Sequence
  Description of Artificial Sequence: Synthetic oligonucleotide
  Sense strand starting at position 529 of SEQ ID NO: 1245066
uguuucgucucauugauuu

SEQ ID NO: 1533587 - RNA, 19 nt, Artificial Sequence
  Description of Artificial Sequence: Synthetic oligonucleotide
  Antisense strand to SEQ ID NO: 1533586
aaaucaaugagacgaaaca

SEQ ID NO: 1533588 - RNA, 19 nt, Artificial Sequence
  Description of Artificial Sequence: Synthetic oligonucleotide
  Sense strand starting at position 533 of SEQ ID NO: 1245066
ucgucucauugauuuaucu

SEQ ID NO: 1533589 - RNA, 19 nt, Artificial Sequence
  Description of Artificial Sequence: Synthetic oligonucleotide
  Antisense strand to SEQ ID NO: 1533588
agauaaaucaaugagacga

SEQ ID NO: 1533590 - RNA, 19 nt, Artificial Sequence
  Description of Artificial Sequence: Synthetic oligonucleotide
  Sense strand starting at position 564 of SEQ ID NO: 1245066
acugguauaucucugacga

SEQ ID NO: 1533591 - RNA, 19 nt, Artificial Sequence
  Description of Artificial Sequence: Synthetic oligonucleotide
  Antisense strand to SEQ ID NO: 1533590
ucgucagagauauaccagu

SEQ ID NO: 1533592 - RNA, 19 nt, Artificial Sequence
  Description of Artificial Sequence: Synthetic oligonucleotide
  Sense strand starting at position 565 of SEQ ID NO: 1245066
cugguauaucucugacgaa

SEQ ID NO: 1533593 - RNA, 19 nt, Artificial Sequence
  Description of Artificial Sequence: Synthetic oligonucleotide
  Antisense strand to SEQ ID NO: 1533592
uucgucagagauauaccag

SEQ ID NO: 1533594 - RNA, 19 nt, Artificial Sequence
  Description of Artificial Sequence: Synthetic oligonucleotide
  Sense strand starting at position 634 of SEQ ID NO: 1245066
aguuuaaacucacucaagu

SEQ ID NO: 1533595 - RNA, 19 nt, Artificial Sequence
  Description of Artificial Sequence: Synthetic oligonucleotide
  Antisense strand to SEQ ID NO: 1533594
acuugagugaguuuaaacu

SEQ ID NO: 1533596 - RNA, 19 nt, Artificial Sequence
  Description of Artificial Sequence: Synthetic oligonucleotide
  Sense strand starting at position 660 of SEQ ID NO: 1245066
uuuggauaagccugaccaa

SEQ ID NO: 1533597 - RNA, 19 nt, Artificial Sequence
  Description of Artificial Sequence: Synthetic oligonucleotide
  Antisense strand to SEQ ID NO: 1533596
uuggucaggcuuauccaaa

SEQ ID NO: 1533598 - RNA, 19 nt, Artificial Sequence
  Description of Artificial Sequence: Synthetic oligonucleotide
  Sense strand starting at position 663 of SEQ ID NO: 1245066
ggauaagccugaccaaaug

SEQ ID NO: 1533599 - RNA, 19 nt, Artificial Sequence
  Description of Artificial Sequence: Synthetic oligonucleotide
  Antisense strand to SEQ ID NO: 1533598
cauuuggucaggcuuaucc

SEQ ID NO: 1533600 - RNA, 19 nt, Artificial Sequence
  Description of Artificial Sequence: Synthetic oligonucleotide
  Sense strand starting at position 746 of SEQ ID NO: 1245066
uguuguauuggucuccgua

SEQ ID NO: 1533601 - RNA, 19 nt, Artificial Sequence
  Description of Artificial Sequence: Synthetic oligonucleotide
  Antisense strand to SEQ ID NO: 1533600
uacggagaccaauacaaca

SEQ ID NO: 1533602 - RNA, 19 nt, Artificial Sequence
  Description of Artificial Sequence: Synthetic oligonucleotide
  Sense strand starting at position 758 of SEQ ID NO: 1245066
cuccguaagugggugauaa

SEQ ID NO: 1533603 - RNA, 19 nt, Artificial Sequence
  Description of Artificial Sequence: Synthetic oligonucleotide
  Antisense strand to SEQ ID NO: 1533602
uuaucacccacuuacggag

SEQ ID NO: 1533604 - RNA, 19 nt, Artificial Sequence
  Description of Artificial Sequence: Synthetic oligonucleotide
  Sense strand starting at position 760 of SEQ ID NO: 1245066
ccguaagugggugauaaca

SEQ ID NO: 1533605 - RNA, 19 nt, Artificial Sequence
  Description of Artificial Sequence: Synthetic oligonucleotide
  Antisense strand to SEQ ID NO: 1533604
uguuaucacccacuuacgg

SEQ ID NO: 1533606 - RNA, 19 nt, Artificial Sequence
  Description of Artificial Sequence: Synthetic oligonucleotide
  Sense strand starting at position 924 of SEQ ID NO: 1245066
ccaacaaucgcugaacaga

SEQ ID NO: 1533607 - RNA, 19 nt, Artificial Sequence
  Description of Artificial Sequence: Synthetic oligonucleotide
  Antisense strand to SEQ ID NO: 1533606
ucuguucagcgauuguugg

SEQ ID NO: 1533608 - RNA, 19 nt, Artificial Sequence
  Description of Artificial Sequence: Synthetic oligonucleotide
  Sense strand starting at position 1173 of SEQ ID NO: 1245066
uuaaauagccaaugggaau

SEQ ID NO: 1533609 - RNA, 19 nt, Artificial Sequence
  Description of Artificial Sequence: Synthetic oligonucleotide
  Antisense strand to SEQ ID NO: 1533608
auucccauuggcuauuuaa

SEQ ID NO: 1533610 - RNA, 19 nt, Artificial Sequence
  Description of Artificial Sequence: Synthetic oligonucleotide
  Sense strand starting at position 1219 of SEQ ID NO: 1245066
uggaaauagcucugugacu

SEQ ID NO: 1533611 - RNA, 19 nt, Artificial Sequence
  Description of Artificial Sequence: Synthetic oligonucleotide
  Antisense strand to SEQ ID NO: 1533610
agucacagagcuauuucca

SEQ ID NO: 1533612 - RNA, 19 nt, Artificial Sequence
  Description of Artificial Sequence: Synthetic oligonucleotide
  Sense strand starting at position 1220 of SEQ ID NO: 1245066
ggaaauagcucugugacug

SEQ ID NO: 1533613 - RNA, 19 nt, Artificial Sequence
  Description of Artificial Sequence: Synthetic oligonucleotide
  Antisense strand to SEQ ID NO: 1533612
cagucacagagcuauuucc

SEQ ID NO: 1533614 - RNA, 19 nt, Artificial Sequence
  Description of Artificial Sequence: Synthetic oligonucleotide
  Sense strand starting at position 1250 of SEQ ID NO: 1245066
aagggaacguuuguuuacu

SEQ ID NO: 1533615 - RNA, 19 nt, Artificial Sequence
  Description of Artificial Sequence: Synthetic oligonucleotide
  Antisense strand to SEQ ID NO: 1533614
aguaaacaaacguucccuu

SEQ ID NO: 1533616 - RNA, 19 nt, Artificial Sequence
  Description of Artificial Sequence: Synthetic oligonucleotide
  Sense strand starting at position 2219 of SEQ ID NO: 1245066
agcuauucucggccaguuu

SEQ ID NO: 1533617 - RNA, 19 nt, Artificial Sequence
  Description of Artificial Sequence: Synthetic oligonucleotide
  Antisense strand to SEQ ID NO: 1533616
aaacuggccgagaauagcu

SEQ ID NO: 1533618 - RNA, 19 nt, Artificial Sequence
  Description of Artificial Sequence: Synthetic oligonucleotide
  Sense strand starting at position 2644 of SEQ ID NO: 1245066
gaaagagggucauuguaca

SEQ ID NO: 1533619 - RNA, 19 nt, Artificial Sequence
  Description of Artificial Sequence: Synthetic oligonucleotide
  Antisense strand to SEQ ID NO: 1533618
uguacaaugacccucuuuc

SEQ ID NO: 1533620 - RNA, 19 nt, Artificial Sequence
  Description of Artificial Sequence: Synthetic oligonucleotide
  Sense strand starting at position 2787 of SEQ ID NO: 1245066
ugacccuaugagugaagau

SEQ ID NO: 1533621 - RNA, 19 nt, Artificial Sequence
  Description of Artificial Sequence: Synthetic oligonucleotide
  Antisense strand to SEQ ID NO: 1533620
aucuucacucauaggguca

SEQ ID NO: 1533622 - RNA, 19 nt, Artificial Sequence
  Description of Artificial Sequence: Synthetic oligonucleotide
  Sense strand starting at position 2796 of SEQ ID NO: 1245066
gagugaagauauccuugac

SEQ ID NO: 1533623 - RNA, 19 nt, Artificial Sequence
  Description of Artificial Sequence: Synthetic oligonucleotide
  Antisense strand to SEQ ID NO: 1533622
gucaaggauaucuucacuc

SEQ ID NO: 1533624 - RNA, 19 nt, Artificial Sequence
  Description of Artificial Sequence: Synthetic oligonucleotide
  Sense strand starting at position 2799 of SEQ ID NO: 1245066
ugaagauauccuugaccau

SEQ ID NO: 1533625 - RNA, 19 nt, Artificial Sequence
  Description of Artificial Sequence: Synthetic oligonucleotide
  Antisense strand to SEQ ID NO: 1533624
auggucaaggauaucuuca

SEQ ID NO: 1533626 - RNA, 19 nt, Artificial Sequence
  Description of Artificial Sequence: Synthetic oligonucleotide
  Sense strand starting at position 2851 of SEQ ID NO: 1245066
guuccaccaccauguaaua

SEQ ID NO: 1533627 - RNA, 19 nt, Artificial Sequence
  Description of Artificial Sequence: Synthetic oligonucleotide
  Antisense strand to SEQ ID NO: 1533626
uauuacauggugguggaac

SEQ ID NO: 1533628 - RNA, 19 nt, Artificial Sequence
  Description of Artificial Sequence: Synthetic oligonucleotide
  Sense strand starting at position 2867 of SEQ ID NO: 1245066
auacaauuguagucuuacu

SEQ ID NO: 1533629 - RNA, 19 nt, Artificial Sequence
  Description of Artificial Sequence: Synthetic oligonucleotide
  Antisense strand to SEQ ID NO: 1533628
aguaagacuacaauuguau

SEQ ID NO: 1533630 - RNA, 19 nt, Artificial Sequence
  Description of Artificial Sequence: Synthetic oligonucleotide
  Sense strand starting at position 2978 of SEQ ID NO: 1245066
ucaguuuagugguuaaaca

SEQ ID NO: 1533631 - RNA, 19 nt, Artificial Sequence
  Description of Artificial Sequence: Synthetic oligonucleotide
  Antisense strand to SEQ ID NO: 1533630
uguuuaaccacuaaacuga

SEQ ID NO: 1533632 - RNA, 19 nt, Artificial Sequence
  Description of Artificial Sequence: Synthetic oligonucleotide
  Sense strand starting at position 2979 of SEQ ID NO: 1245066
caguuuagugguuaaacac

SEQ ID NO: 1533633 - RNA, 19 nt, Artificial Sequence
  Description of Artificial Sequence: Synthetic oligonucleotide
  Antisense strand to SEQ ID NO: 1533632
guguuuaaccacuaaacug

SEQ ID NO: 1533634 - RNA, 19 nt, Artificial Sequence
  Description of Artificial Sequence: Synthetic oligonucleotide
  Sense strand starting at position 3176 of SEQ ID NO: 1245066
uuaauuguuagugacguaa

SEQ ID NO: 1533635 - RNA, 19 nt, Artificial Sequence
  Description of Artificial Sequence: Synthetic oligonucleotide
  Antisense strand to SEQ ID NO: 1533634
uuacgucacuaacaauuaa

SEQ ID NO: 1533636 - RNA, 19 nt, Artificial Sequence
  Description of Artificial Sequence: Synthetic oligonucleotide
  Sense strand starting at position 3344 of SEQ ID NO: 1245066
uguagcaaauguuuccuaa

SEQ ID NO: 1533637 - RNA, 19 nt, Artificial Sequence
  Description of Artificial Sequence: Synthetic oligonucleotide
  Antisense strand to SEQ ID NO: 1533636
uuaggaaacauuugcuaca

SEQ ID NO: 1533638 - RNA, 19 nt, Artificial Sequence
  Description of Artificial Sequence: Synthetic oligonucleotide
  Sense strand starting at position 3347 of SEQ ID NO: 1245066
agcaaauguuuccuaauga

SEQ ID NO: 1533639 - RNA, 19 nt, Artificial Sequence
  Description of Artificial Sequence: Synthetic oligonucleotide
  Antisense strand to SEQ ID NO: 1533638
ucauuaggaaacauuugcu

SEQ ID NO: 1533640 - RNA, 19 nt, Artificial Sequence
  Description of Artificial Sequence: Synthetic oligonucleotide
  Sense strand starting at position 3536 of SEQ ID NO: 1245066
ugcauuagaucugucagga

SEQ ID NO: 1533641 - RNA, 19 nt, Artificial Sequence
  Description of Artificial Sequence: Synthetic oligonucleotide
  Antisense strand to SEQ ID NO: 1533640
uccugacagaucuaaugca

SEQ ID NO: 1533642 - RNA, 19 nt, Artificial Sequence
  Description of Artificial Sequence: Synthetic oligonucleotide
  Sense strand starting at position 3647 of SEQ ID NO: 1245066
ugugccuugcuggagaauu

SEQ ID NO: 1533643 - RNA, 19 nt, Artificial Sequence
  Description of Artificial Sequence: Synthetic oligonucleotide
  Antisense strand to SEQ ID NO: 1533642
aauucuccagcaaggcaca

SEQ ID NO: 1533644 - RNA, 19 nt, Artificial Sequence
  Description of Artificial Sequence: Synthetic oligonucleotide
  Sense strand starting at position 3649 of SEQ ID NO: 1245066
ugccuugcuggagaauuaa

SEQ ID NO: 1533645 - RNA, 19 nt, Artificial Sequence
  Description of Artificial Sequence: Synthetic oligonucleotide
  Antisense strand to SEQ ID NO: 1533644
uuaauucuccagcaaggca

SEQ ID NO: 1533646 - RNA, 19 nt, Artificial Sequence
  Description of Artificial Sequence: Synthetic oligonucleotide
  Sense strand starting at position 3753 of SEQ ID NO: 1245066
agguuuauuuaagugcuua

SEQ ID NO: 1533647 - RNA, 19 nt, Artificial Sequence
  Description of Artificial Sequence: Synthetic oligonucleotide
  Antisense strand to SEQ ID NO: 1533646
uaagcacuuaaauaaaccu

SEQ ID NO: 1533648 - RNA, 19 nt, Artificial Sequence
  Description of Artificial Sequence: Synthetic oligonucleotide
  Sense strand starting at position 3774 of SEQ ID NO: 1245066
gaagcagaucuuuggagag

SEQ ID NO: 1533649 - RNA, 19 nt, Artificial Sequence
  Description of Artificial Sequence: Synthetic oligonucleotide
  Antisense strand to SEQ ID NO: 1533648
cucuccaaagaucugcuuc

SEQ ID NO: 1533650 - RNA, 19 nt, Artificial Sequence
  Description of Artificial Sequence: Synthetic oligonucleotide
  Sense strand starting at position 3863 of SEQ ID NO: 1245066
agggcuccacacuguuuaa

SEQ ID NO: 1533651 - RNA, 19 nt, Artificial Sequence
  Description of Artificial Sequence: Synthetic oligonucleotide
  Antisense strand to SEQ ID NO: 1533650
uuaaacaguguggagcccu

SEQ ID NO: 1533652 - RNA, 19 nt, Artificial Sequence
  Description of Artificial Sequence: Synthetic oligonucleotide
  Sense strand starting at position 3915 of SEQ ID NO: 1245066
uauaaugauucggugagau

SEQ ID NO: 1533653 - RNA, 19 nt, Artificial Sequence
  Description of Artificial Sequence: Synthetic oligonucleotide
  Antisense strand to SEQ ID NO: 1533652
aucucaccgaaucauuaua

SEQ ID NO: 1533654 - RNA, 19 nt, Artificial Sequence
  Description of Artificial Sequence: Synthetic oligonucleotide
  Sense strand starting at position 3957 of SEQ ID NO: 1245066
agauauggaaguugaaguu

SEQ ID NO: 1533655 - RNA, 19 nt, Artificial Sequence
  Description of Artificial Sequence: Synthetic oligonucleotide
  Antisense strand to SEQ ID NO: 1533654
aacuucaacuuccauaucu

SEQ ID NO: 1533656 - RNA, 19 nt, Artificial Sequence
  Description of Artificial Sequence: Synthetic oligonucleotide
  Sense strand starting at position 955 of SEQ ID NO: 1245067
uuaagaauuuaagaggcau

SEQ ID NO: 1533657 - RNA, 19 nt, Artificial Sequence
  Description of Artificial Sequence: Synthetic oligonucleotide
  Antisense strand to SEQ ID NO: 1533656
augccucuuaaauucuuaa

SEQ ID NO: 1533658 - RNA, 19 nt, Artificial Sequence
  Description of Artificial Sequence: Synthetic oligonucleotide
  Sense strand starting at position 1022 of SEQ ID NO: 1245067
aaagguguagguggauaaa

SEQ ID NO: 1533659 - RNA, 19 nt, Artificial Sequence
  Description of Artificial Sequence: Synthetic oligonucleotide
  Antisense strand to SEQ ID NO: 1533658
uuuauccaccuacaccuuu

SEQ ID NO: 1533660 - RNA, 19 nt, Artificial Sequence
  Description of Artificial Sequence: Synthetic oligonucleotide
  Sense strand starting at position 1062 of SEQ ID NO: 1245067
acgauucuucguucugugu

SEQ ID NO: 1533661 - RNA, 19 nt, Artificial Sequence
  Description of Artificial Sequence: Synthetic oligonucleotide
  Antisense strand to SEQ ID NO: 1533660
acacagaacgaagaaucgu

SEQ ID NO: 1533662 - RNA, 19 nt, Artificial Sequence
  Description of Artificial Sequence: Synthetic oligonucleotide
  Sense strand starting at position 1063 of SEQ ID NO: 1245067
cgauucuucguucuguguu

SEQ ID NO: 1533663 - RNA, 19 nt, Artificial Sequence
  Description of Artificial Sequence: Synthetic oligonucleotide
  Antisense strand to SEQ ID NO: 1533662
aacacagaacgaagaaucg

SEQ ID NO: 1533664 - RNA, 19 nt, Artificial Sequence
  Description of Artificial Sequence: Synthetic oligonucleotide
  Sense strand starting at position 1075 of SEQ ID NO: 1245067
cuguguuaauuucuacguu

SEQ ID NO: 1533665 - RNA, 19 nt, Artificial Sequence
  Description of Artificial Sequence: Synthetic oligonucleotide
  Antisense strand to SEQ ID NO: 1533664
aacguagaaauuaacacag

SEQ ID NO: 1533666 - RNA, 19 nt, Artificial Sequence
  Description of Artificial Sequence: Synthetic oligonucleotide
  Sense strand starting at position 1078 of SEQ ID NO: 1245067
uguuaauuucuacguuucu

SEQ ID NO: 1533667 - RNA, 19 nt, Artificial Sequence
  Description of Artificial Sequence: Synthetic oligonucleotide
  Antisense strand to SEQ ID NO: 1533666
agaaacguagaaauuaaca

SEQ ID NO: 1533668 - RNA, 19 nt, Artificial Sequence
  Description of Artificial Sequence: Synthetic oligonucleotide
  Sense strand starting at position 1118 of SEQ ID NO: 1245067
uguguucucuaauuuacug

SEQ ID NO: 1533669 - RNA, 19 nt, Artificial Sequence
  Description of Artificial Sequence: Synthetic oligonucleotide
  Antisense strand to SEQ ID NO: 1533668
caguaaauuagagaacaca

SEQ ID NO: 1533670 - RNA, 19 nt, Artificial Sequence
  Description of Artificial Sequence: Synthetic oligonucleotide
  Sense strand starting at position 1187 of SEQ ID NO: 1245067
aguaacauuggucacucaa

SEQ ID NO: 1533671 - RNA, 19 nt, Artificial Sequence
  Description of Artificial Sequence: Synthetic oligonucleotide
  Antisense strand to SEQ ID NO: 1533670
uugagugaccaauguuacu

SEQ ID NO: 1533672 - RNA, 19 nt, Artificial Sequence
  Description of Artificial Sequence: Synthetic oligonucleotide
  Sense strand starting at position 1233 of SEQ ID NO: 1245067
gcuauuaaacuagguggaa

SEQ ID NO: 1533673 - RNA, 19 nt, Artificial Sequence
  Description of Artificial Sequence: Synthetic oligonucleotide
  Antisense strand to SEQ ID NO: 1533672
uuccaccuaguuuaauagc

SEQ ID NO: 1533674 - RNA, 19 nt, Artificial Sequence
  Description of Artificial Sequence: Synthetic oligonucleotide
  Sense strand starting at position 1397 of SEQ ID NO: 1245067
gcaaguguuaaguaaagua

SEQ ID NO: 1533675 - RNA, 19 nt, Artificial Sequence
  Description of Artificial Sequence: Synthetic oligonucleotide
  Antisense strand to SEQ ID NO: 1533674
uacuuuacuuaacacuugc

SEQ ID NO: 1533676 - RNA, 19 nt, Artificial Sequence
  Description of Artificial Sequence: Synthetic oligonucleotide
  Sense strand starting at position 1412 of SEQ ID NO: 1245067
aguaguaauugacuuauca

SEQ ID NO: 1533677 - RNA, 19 nt, Artificial Sequence
  Description of Artificial Sequence: Synthetic oligonucleotide
  Antisense strand to SEQ ID NO: 1533676
ugauaagucaauuacuacu

SEQ ID NO: 1533678 - RNA, 19 nt, Artificial Sequence
  Description of Artificial Sequence: Synthetic oligonucleotide
  Sense strand starting at position 1458 of SEQ ID NO: 1245067
aaggaagcuuuauuaugga

SEQ ID NO: 1533679 - RNA, 19 nt, Artificial Sequence
  Description of Artificial Sequence: Synthetic oligonucleotide
  Antisense strand to SEQ ID NO: 1533678
uccauaauaaagcuuccuu

SEQ ID NO: 1533680 - RNA, 19 nt, Artificial Sequence
  Description of Artificial Sequence: Synthetic oligonucleotide
  Sense strand starting at position 2122 of SEQ ID NO: 1245067
agacacuccuuguuaggaa

SEQ ID NO: 1533681 - RNA, 19 nt, Artificial Sequence
  Description of Artificial Sequence: Synthetic oligonucleotide
  Antisense strand to SEQ ID NO: 1533680
uuccuaacaaggagugucu

SEQ ID NO: 1533682 - RNA, 19 nt, Artificial Sequence
  Description of Artificial Sequence: Synthetic oligonucleotide
  Sense strand starting at position 2130 of SEQ ID NO: 1245067
cuuguuaggaauuguagau

SEQ ID NO: 1533683 - RNA, 19 nt, Artificial Sequence
  Description of Artificial Sequence: Synthetic oligonucleotide
  Antisense strand to SEQ ID NO: 1533682
aucuacaauuccuaacaag

SEQ ID NO: 1533684 - RNA, 19 nt, Artificial Sequence
  Description of Artificial Sequence: Synthetic oligonucleotide
  Sense strand starting at position 2221 of SEQ ID NO: 1245067
gcuggaaguauguauacaa

SEQ ID NO: 1533685 - RNA, 19 nt, Artificial Sequence
  Description of Artificial Sequence: Synthetic oligonucleotide
  Antisense strand to SEQ ID NO: 1533684
uuguauacauacuuccagc

SEQ ID NO: 1533686 - RNA, 19 nt, Artificial Sequence
  Description of Artificial Sequence: Synthetic oligonucleotide
  Sense strand starting at position 2325 of SEQ ID NO: 1245067
uucucuuauggugauauau

SEQ ID NO: 1533687 - RNA, 19 nt, Artificial Sequence
  Description of Artificial Sequence: Synthetic oligonucleotide
  Antisense strand to SEQ ID NO: 1533686
auauaucaccauaagagaa

SEQ ID NO: 1533688 - RNA, 19 nt, Artificial Sequence
  Description of Artificial Sequence: Synthetic oligonucleotide
  Sense strand starting at position 2406 of SEQ ID NO: 1245067
uaccaugugcugcagauaa

SEQ ID NO: 1533689 - RNA, 19 nt, Artificial Sequence
  Description of Artificial Sequence: Synthetic oligonucleotide
  Antisense strand to SEQ ID NO: 1533688
uuaucugcagcacauggua

SEQ ID NO: 1533690 - RNA, 19 nt, Artificial Sequence
  Description of Artificial Sequence: Synthetic oligonucleotide
  Sense strand starting at position 2408 of SEQ ID NO: 1245067
ccaugugcugcagauaaua

SEQ ID NO: 1533691 - RNA, 19 nt, Artificial Sequence
  Description of Artificial Sequence: Synthetic oligonucleotide
  Antisense strand to SEQ ID NO: 1533690
uauuaucugcagcacaugg

SEQ ID NO: 1533692 - RNA, 19 nt, Artificial Sequence
  Description of Artificial Sequence: Synthetic oligonucleotide
  Sense strand starting at position 2552 of SEQ ID NO: 1245067
cuuauucuggaaugaguua

SEQ ID NO: 1533693 - RNA, 19 nt, Artificial Sequence
  Description of Artificial Sequence: Synthetic oligonucleotide
  Antisense strand to SEQ ID NO: 1533692
uaacucauuccagaauaag

SEQ ID NO: 1533694 - RNA, 19 nt, Artificial Sequence
  Description of Artificial Sequence: Synthetic oligonucleotide
  Sense strand starting at position 2557 of SEQ ID NO: 1245067
ucuggaaugaguuagcaau

SEQ ID NO: 1533695 - RNA, 19 nt, Artificial Sequence
  Description of Artificial Sequence: Synthetic oligonucleotide
  Antisense strand to SEQ ID NO: 1533694
auugcuaacucauuccaga

SEQ ID NO: 1533696 - RNA, 19 nt, Artificial Sequence
  Description of Artificial Sequence: Synthetic oligonucleotide
  Sense strand starting at position 2559 of SEQ ID NO: 1245067
uggaaugaguuagcaauau

SEQ ID NO: 1533697 - RNA, 19 nt, Artificial Sequence
  Description of Artificial Sequence: Synthetic oligonucleotide
  Antisense strand to SEQ ID NO: 1533696
auauugcuaacucauucca

SEQ ID NO: 1533698 - RNA, 19 nt, Artificial Sequence
  Description of Artificial Sequence: Synthetic oligonucleotide
  Sense strand starting at position 2563 of SEQ ID NO: 1245067
augaguuagcaauauacac

SEQ ID NO: 1533699 - RNA, 19 nt, Artificial Sequence
  Description of Artificial Sequence: Synthetic oligonucleotide
  Antisense strand to SEQ ID NO: 1533698
guguauauugcuaacucau

SEQ ID NO: 1533700 - RNA, 19 nt, Artificial Sequence
  Description of Artificial Sequence: Synthetic oligonucleotide
  Sense strand starting at position 2742 of SEQ ID NO: 1245067
uugagagaaucccugucua

SEQ ID NO: 1533701 - RNA, 19 nt, Artificial Sequence
  Description of Artificial Sequence: Synthetic oligonucleotide
  Antisense strand to SEQ ID NO: 1533700
uagacagggauucucucaa

SEQ ID NO: 1533702 - RNA, 19 nt, Artificial Sequence
  Description of Artificial Sequence: Synthetic oligonucleotide
  Sense strand starting at position 2755 of SEQ ID NO: 1245067
ugucuaccucaguacagua

SEQ ID NO: 1533703 - RNA, 19 nt, Artificial Sequence
  Description of Artificial Sequence: Synthetic oligonucleotide
  Antisense strand to SEQ ID NO: 1533702
uacuguacugagguagaca

SEQ ID NO: 1533704 - RNA, 19 nt, Artificial Sequence
  Description of Artificial Sequence: Synthetic oligonucleotide
  Sense strand starting at position 2768 of SEQ ID NO: 1245067
acaguaacaggauguauau

SEQ ID NO: 1533705 - RNA, 19 nt, Artificial Sequence
  Description of Artificial Sequence: Synthetic oligonucleotide
  Antisense strand to SEQ ID NO: 1533704
auauacauccuguuacugu

SEQ ID NO: 1533706 - RNA, 19 nt, Artificial Sequence
  Description of Artificial Sequence: Synthetic oligonucleotide
  Sense strand starting at position 3076 of SEQ ID NO: 1245067
ugcaauggccauuacaaga

SEQ ID NO: 1533707 - RNA, 19 nt, Artificial Sequence
  Description of Artificial Sequence: Synthetic oligonucleotide
  Antisense strand to SEQ ID NO: 1533706
ucuuguaauggccauugca

SEQ ID NO: 1533708 - RNA, 19 nt, Artificial Sequence
  Description of Artificial Sequence: Synthetic oligonucleotide
  Sense strand starting at position 3111 of SEQ ID NO: 1245067
gugcaaauggcagaacaua

SEQ ID NO: 1533709 - RNA, 19 nt, Artificial Sequence
  Description of Artificial Sequence: Synthetic oligonucleotide
  Antisense strand to SEQ ID NO: 1533708
uauguucugccauuugcac

SEQ ID NO: 1533710 - RNA, 19 nt, Artificial Sequence
  Description of Artificial Sequence: Synthetic oligonucleotide
  Sense strand starting at position 3140 of SEQ ID NO: 1245067
uguuucgucucauugauuu

SEQ ID NO: 1533711 - RNA, 19 nt, Artificial Sequence
  Description of Artificial Sequence: Synthetic oligonucleotide
  Antisense strand to SEQ ID NO: 1533710
aaaucaaugagacgaaaca

SEQ ID NO: 1533712 - RNA, 19 nt, Artificial Sequence
  Description of Artificial Sequence: Synthetic oligonucleotide
  Sense strand starting at position 3144 of SEQ ID NO: 1245067
ucgucucauugauuuaucu

SEQ ID NO: 1533713 - RNA, 19 nt, Artificial Sequence
  Description of Artificial Sequence: Synthetic oligonucleotide
  Antisense strand to SEQ ID NO: 1533712
agauaaaucaaugagacga

SEQ ID NO: 1533714 - RNA, 19 nt, Artificial Sequence
  Description of Artificial Sequence: Synthetic oligonucleotide
  Sense strand starting at position 3175 of SEQ ID NO: 1245067
acugguauaucucugacga

SEQ ID NO: 1533715 - RNA, 19 nt, Artificial Sequence
  Description of Artificial Sequence: Synthetic oligonucleotide
  Antisense strand to SEQ ID NO: 1533714
ucgucagagauauaccagu

SEQ ID NO: 1533716 - RNA, 19 nt, Artificial Sequence
  Description of Artificial Sequence: Synthetic oligonucleotide
  Sense strand starting at position 3176 of SEQ ID NO: 1245067
cugguauaucucugacgaa

SEQ ID NO: 1533717 - RNA, 19 nt, Artificial Sequence
  Description of Artificial Sequence: Synthetic oligonucleotide
  Antisense strand to SEQ ID NO: 1533716
uucgucagagauauaccag

SEQ ID NO: 1533718 - RNA, 19 nt, Artificial Sequence
  Description of Artificial Sequence: Synthetic oligonucleotide
  Sense strand starting at position 3245 of SEQ ID NO: 1245067
aguuuaaacucacucaagu

SEQ ID NO: 1533719 - RNA, 19 nt, Artificial Sequence
  Description of Artificial Sequence: Synthetic oligonucleotide
  Antisense strand to SEQ ID NO: 1533718
acuugagugaguuuaaacu

SEQ ID NO: 1533720 - RNA, 19 nt, Artificial Sequence
  Description of Artificial Sequence: Synthetic oligonucleotide
  Sense strand starting at position 3271 of SEQ ID NO: 1245067
uuuggauaagccugaccaa

SEQ ID NO: 1533721 - RNA, 19 nt, Artificial Sequence
  Description of Artificial Sequence: Synthetic oligonucleotide
  Antisense strand to SEQ ID NO: 1533720
uuggucaggcuuauccaaa

SEQ ID NO: 1533722 - RNA, 19 nt, Artificial Sequence
  Description of Artificial Sequence: Synthetic oligonucleotide
  Sense strand starting at position 3274 of SEQ ID NO: 1245067
ggauaagccugaccaaaug

SEQ ID NO: 1533723 - RNA, 19 nt, Artificial Sequence
  Description of Artificial Sequence: Synthetic oligonucleotide
  Antisense strand to SEQ ID NO: 1533722
cauuuggucaggcuuaucc

SEQ ID NO: 1533724 - RNA, 19 nt, Artificial Sequence
  Description of Artificial Sequence: Synthetic oligonucleotide
  Sense strand starting at position 3357 of SEQ ID NO: 1245067
uguuguauuggucuccgua

SEQ ID NO: 1533725 - RNA, 19 nt, Artificial Sequence
  Description of Artificial Sequence: Synthetic oligonucleotide
  Antisense strand to SEQ ID NO: 1533724
uacggagaccaauacaaca

SEQ ID NO: 1533726 - RNA, 19 nt, Artificial Sequence
  Description of Artificial Sequence: Synthetic oligonucleotide
  Sense strand starting at position 3371 of SEQ ID NO: 1245067
ccguaagugggugauaaca

SEQ ID NO: 1533727 - RNA, 19 nt, Artificial Sequence
  Description of Artificial Sequence: Synthetic oligonucleotide
  Antisense strand to SEQ ID NO: 1533726
uguuaucacccacuuacgg

SEQ ID NO: 1533728 - RNA, 19 nt, Artificial Sequence
  Description of Artificial Sequence: Synthetic oligonucleotide
  Sense strand starting at position 3535 of SEQ ID NO: 1245067
ccaacaaucgcugaacaga

SEQ ID NO: 1533729 - RNA, 19 nt, Artificial Sequence
  Description of Artificial Sequence: Synthetic oligonucleotide
  Antisense strand to SEQ ID NO: 1533728
ucuguucagcgauuguugg

SEQ ID NO: 1533730 - RNA, 19 nt, Artificial Sequence
  Description of Artificial Sequence: Synthetic oligonucleotide
  Sense strand starting at position 3784 of SEQ ID NO: 1245067
uuaaauagccaaugggaau

SEQ ID NO: 1533731 - RNA, 19 nt, Artificial Sequence
  Description of Artificial Sequence: Synthetic oligonucleotide
  Antisense strand to SEQ ID NO: 1533730
auucccauuggcuauuuaa

SEQ ID NO: 1533732 - RNA, 19 nt, Artificial Sequence
  Description of Artificial Sequence: Synthetic oligonucleotide
  Sense strand starting at position 3830 of SEQ ID NO: 1245067
uggaaauagcucugugacu

SEQ ID NO: 1533733 - RNA, 19 nt, Artificial Sequence
  Description of Artificial Sequence: Synthetic oligonucleotide
  Antisense strand to SEQ ID NO: 1533732
agucacagagcuauuucca

SEQ ID NO: 1533734 - RNA, 19 nt, Artificial Sequence
  Description of Artificial Sequence: Synthetic oligonucleotide
  Sense strand starting at position 3831 of SEQ ID NO: 1245067
ggaaauagcucugugacug

SEQ ID NO: 1533735 - RNA, 19 nt, Artificial Sequence
  Description of Artificial Sequence: Synthetic oligonucleotide
  Antisense strand to SEQ ID NO: 1533734
cagucacagagcuauuucc

SEQ ID NO: 1533736 - RNA, 19 nt, Artificial Sequence
  Description of Artificial Sequence: Synthetic oligonucleotide
  Sense strand starting at position 368 of SEQ ID NO: 1245068
agacacuccuuguuaggaa

SEQ ID NO: 1533737 - RNA, 19 nt, Artificial Sequence
  Description of Artificial Sequence: Synthetic oligonucleotide
  Antisense strand to SEQ ID NO: 1533736
uuccuaacaaggagugucu

SEQ ID NO: 1533738 - RNA, 19 nt, Artificial Sequence
  Description of Artificial Sequence: Synthetic oligonucleotide
  Sense strand starting at position 376 of SEQ ID NO: 1245068
cuuguuaggaauuguagau

SEQ ID NO: 1533739 - RNA, 19 nt, Artificial Sequence
  Description of Artificial Sequence: Synthetic oligonucleotide
  Antisense strand to SEQ ID NO: 1533738
aucuacaauuccuaacaag

SEQ ID NO: 1533740 - RNA, 19 nt, Artificial Sequence
  Description of Artificial Sequence: Synthetic oligonucleotide
  Sense strand starting at position 458 of SEQ ID NO: 1245068
uacuauguggcuggaagua

SEQ ID NO: 1533741 - RNA, 19 nt, Artificial Sequence
  Description of Artificial Sequence: Synthetic oligonucleotide
  Antisense strand to SEQ ID NO: 1533740
uacuuccagccacauagua

SEQ ID NO: 1533742 - RNA, 19 nt, Artificial Sequence
  Description of Artificial Sequence: Synthetic oligonucleotide
  Sense strand starting at position 467 of SEQ ID NO: 1245068
gcuggaaguauguauacaa

SEQ ID NO: 1533743 - RNA, 19 nt, Artificial Sequence
  Description of Artificial Sequence: Synthetic oligonucleotide
  Antisense strand to SEQ ID NO: 1533742
uuguauacauacuuccagc

SEQ ID NO: 1533744 - RNA, 19 nt, Artificial Sequence
  Description of Artificial Sequence: Synthetic oligonucleotide
  Sense strand starting at position 571 of SEQ ID NO: 1245068
uucucuuauggugauauau

SEQ ID NO: 1533745 - RNA, 19 nt, Artificial Sequence
  Description of Artificial Sequence: Synthetic oligonucleotide
  Antisense strand to SEQ ID NO: 1533744
auauaucaccauaagagaa

SEQ ID NO: 1533746 - RNA, 19 nt, Artificial Sequence
  Description of Artificial Sequence: Synthetic oligonucleotide
  Sense strand starting at position 652 of SEQ ID NO: 1245068
uaccaugugcugcagauaa

SEQ ID NO: 1533747 - RNA, 19 nt, Artificial Sequence
  Description of Artificial Sequence: Synthetic oligonucleotide
  Antisense strand to SEQ ID NO: 1533746
uuaucugcagcacauggua

SEQ ID NO: 1533748 - RNA, 19 nt, Artificial Sequence
  Description of Artificial Sequence: Synthetic oligonucleotide
  Sense strand starting at position 654 of SEQ ID NO: 1245068
ccaugugcugcagauaaua

SEQ ID NO: 1533749 - RNA, 19 nt, Artificial Sequence
  Description of Artificial Sequence: Synthetic oligonucleotide
  Antisense strand to SEQ ID NO: 1533748
uauuaucugcagcacaugg

SEQ ID NO: 1533750 - RNA, 19 nt, Artificial Sequence
  Description of Artificial Sequence: Synthetic oligonucleotide
  Sense strand starting at position 798 of SEQ ID NO: 1245068
cuuauucuggaaugaguua

SEQ ID NO: 1533751 - RNA, 19 nt, Artificial Sequence
  Description of Artificial Sequence: Synthetic oligonucleotide
  Antisense strand to SEQ ID NO: 1533750
uaacucauuccagaauaag

SEQ ID NO: 1533752 - RNA, 19 nt, Artificial Sequence
  Description of Artificial Sequence: Synthetic oligonucleotide
  Sense strand starting at position 803 of SEQ ID NO: 1245068
ucuggaaugaguuagcaau

SEQ ID NO: 1533753 - RNA, 19 nt, Artificial Sequence
  Description of Artificial Sequence: Synthetic oligonucleotide
  Antisense strand to SEQ ID NO: 1533752
auugcuaacucauuccaga

SEQ ID NO: 1533754 - RNA, 19 nt, Artificial Sequence
  Description of Artificial Sequence: Synthetic oligonucleotide
  Sense strand starting at position 805 of SEQ ID NO: 1245068
uggaaugaguuagcaauau

SEQ ID NO: 1533755 - RNA, 19 nt, Artificial Sequence
  Description of Artificial Sequence: Synthetic oligonucleotide
  Antisense strand to SEQ ID NO: 1533754
auauugcuaacucauucca

SEQ ID NO: 1533756 - RNA, 19 nt, Artificial Sequence
  Description of Artificial Sequence: Synthetic oligonucleotide
  Sense strand starting at position 809 of SEQ ID NO: 1245068
augaguuagcaauauacac

SEQ ID NO: 1533757 - RNA, 19 nt, Artificial Sequence
  Description of Artificial Sequence: Synthetic oligonucleotide
  Antisense strand to SEQ ID NO: 1533756
guguauauugcuaacucau

SEQ ID NO: 1533758 - RNA, 19 nt, Artificial Sequence
  Description of Artificial Sequence: Synthetic oligonucleotide
  Sense strand starting at position 988 of SEQ ID NO: 1245068
uugagagaaucccugucua

SEQ ID NO: 1533759 - RNA, 19 nt, Artificial Sequence
  Description of Artificial Sequence: Synthetic oligonucleotide
  Antisense strand to SEQ ID NO: 1533758
uagacagggauucucucaa

SEQ ID NO: 1533760 - RNA, 19 nt, Artificial Sequence
  Description of Artificial Sequence: Synthetic oligonucleotide
  Sense strand starting at position 1001 of SEQ ID NO: 1245068
ugucuaccucaguacagua

SEQ ID NO: 1533761 - RNA, 19 nt, Artificial Sequence
  Description of Artificial Sequence: Synthetic oligonucleotide
  Antisense strand to SEQ ID NO: 1533760
uacuguacugagguagaca

SEQ ID NO: 1533762 - RNA, 19 nt, Artificial Sequence
  Description of Artificial Sequence: Synthetic oligonucleotide
  Sense strand starting at position 1014 of SEQ ID NO: 1245068
acaguaacaggauguauau

SEQ ID NO: 1533763 - RNA, 19 nt, Artificial Sequence
  Description of Artificial Sequence: Synthetic oligonucleotide
  Antisense strand to SEQ ID NO: 1533762
auauacauccuguuacugu

SEQ ID NO: 1533764 - RNA, 19 nt, Artificial Sequence
  Description of Artificial Sequence: Synthetic oligonucleotide
  Sense strand starting at position 1322 of SEQ ID NO: 1245068
ugcaauggccauuacaaga

SEQ ID NO: 1533765 - RNA, 19 nt, Artificial Sequence
  Description of Artificial Sequence: Synthetic oligonucleotide
  Antisense strand to SEQ ID NO: 1533764
ucuuguaauggccauugca

SEQ ID NO: 1533766 - RNA, 19 nt, Artificial Sequence
  Description of Artificial Sequence: Synthetic oligonucleotide
  Sense strand starting at position 1357 of SEQ ID NO: 1245068
gugcaaauggcagaacaua

SEQ ID NO: 1533767 - RNA, 19 nt, Artificial Sequence
  Description of Artificial Sequence: Synthetic oligonucleotide
  Antisense strand to SEQ ID NO: 1533766
uauguucugccauuugcac

SEQ ID NO: 1533768 - RNA, 19 nt, Artificial Sequence
  Description of Artificial Sequence: Synthetic oligonucleotide
  Sense strand starting at position 1386 of SEQ ID NO: 1245068
uguuucgucucauugauuu

SEQ ID NO: 1533769 - RNA, 19 nt, Artificial Sequence
  Description of Artificial Sequence: Synthetic oligonucleotide
  Antisense strand to SEQ ID NO: 1533768
aaaucaaugagacgaaaca

SEQ ID NO: 1533770 - RNA, 19 nt, Artificial Sequence
  Description of Artificial Sequence: Synthetic oligonucleotide
  Sense strand starting at position 1390 of SEQ ID NO: 1245068
ucgucucauugauuuaucu

SEQ ID NO: 1533771 - RNA, 19 nt, Artificial Sequence
  Description of Artificial Sequence: Synthetic oligonucleotide
  Antisense strand to SEQ ID NO: 1533770
agauaaaucaaugagacga

SEQ ID NO: 1533772 - RNA, 19 nt, Artificial Sequence
  Description of Artificial Sequence: Synthetic oligonucleotide
  Sense strand starting at position 1421 of SEQ ID NO: 1245068
acugguauaucucugacga

SEQ ID NO: 1533773 - RNA, 19 nt, Artificial Sequence
  Description of Artificial Sequence: Synthetic oligonucleotide
  Antisense strand to SEQ ID NO: 1533772
ucgucagagauauaccagu

SEQ ID NO: 1533774 - RNA, 19 nt, Artificial Sequence
  Description of Artificial Sequence: Synthetic oligonucleotide
  Sense strand starting at position 1422 of SEQ ID NO: 1245068
cugguauaucucugacgaa

SEQ ID NO: 1533775 - RNA, 19 nt, Artificial Sequence
  Description of Artificial Sequence: Synthetic oligonucleotide
  Antisense strand to SEQ ID NO: 1533774
uucgucagagauauaccag

SEQ ID NO: 1533776 - RNA, 19 nt, Artificial Sequence
  Description of Artificial Sequence: Synthetic oligonucleotide
  Sense strand starting at position 1491 of SEQ ID NO: 1245068
aguuuaaacucacucaagu

SEQ ID NO: 1533777 - RNA, 19 nt, Artificial Sequence
  Description of Artificial Sequence: Synthetic oligonucleotide
  Antisense strand to SEQ ID NO: 1533776
acuugagugaguuuaaacu

SEQ ID NO: 1533778 - RNA, 19 nt, Artificial Sequence
  Description of Artificial Sequence: Synthetic oligonucleotide
  Sense strand starting at position 1517 of SEQ ID NO: 1245068
uuuggauaagccugaccaa

SEQ ID NO: 1533779 - RNA, 19 nt, Artificial Sequence
  Description of Artificial Sequence: Synthetic oligonucleotide
  Antisense strand to SEQ ID NO: 1533778
uuggucaggcuuauccaaa

SEQ ID NO: 1533780 - RNA, 19 nt, Artificial Sequence
  Description of Artificial Sequence: Synthetic oligonucleotide
  Sense strand starting at position 1520 of SEQ ID NO: 1245068
ggauaagccugaccaaaug

SEQ ID NO: 1533781 - RNA, 19 nt, Artificial Sequence
  Description of Artificial Sequence: Synthetic oligonucleotide
  Antisense strand to SEQ ID NO: 1533780
cauuuggucaggcuuaucc

SEQ ID NO: 1533782 - RNA, 19 nt, Artificial Sequence
  Description of Artificial Sequence: Synthetic oligonucleotide
  Sense strand starting at position 1603 of SEQ ID NO: 1245068
uguuguauuggucuccgua

SEQ ID NO: 1533783 - RNA, 19 nt, Artificial Sequence
  Description of Artificial Sequence: Synthetic oligonucleotide
  Antisense strand to SEQ ID NO: 1533782
uacggagaccaauacaaca

SEQ ID NO: 1533784 - RNA, 19 nt, Artificial Sequence
  Description of Artificial Sequence: Synthetic oligonucleotide
  Sense strand starting at position 1615 of SEQ ID NO: 1245068
cuccguaagugggugauaa

SEQ ID NO: 1533785 - RNA, 19 nt, Artificial Sequence
  Description of Artificial Sequence: Synthetic oligonucleotide
  Antisense strand to SEQ ID NO: 1533784
uuaucacccacuuacggag

SEQ ID NO: 1533786 - RNA, 19 nt, Artificial Sequence
  Description of Artificial Sequence: Synthetic oligonucleotide
  Sense strand starting at position 1617 of SEQ ID NO: 1245068
ccguaagugggugauaaca

SEQ ID NO: 1533787 - RNA, 19 nt, Artificial Sequence
  Description of Artificial Sequence: Synthetic oligonucleotide
  Antisense strand to SEQ ID NO: 1533786
uguuaucacccacuuacgg

SEQ ID NO: 1533788 - RNA, 19 nt, Artificial Sequence
  Description of Artificial Sequence: Synthetic oligonucleotide
  Sense strand starting at position 1781 of SEQ ID NO: 1245068
ccaacaaucgcugaacaga

SEQ ID NO: 1533789 - RNA, 19 nt, Artificial Sequence
  Description of Artificial Sequence: Synthetic oligonucleotide
  Antisense strand to SEQ ID NO: 1533788
ucuguucagcgauuguugg

SEQ ID NO: 1533790 - RNA, 19 nt, Artificial Sequence
  Description of Artificial Sequence: Synthetic oligonucleotide
  Sense strand starting at position 2030 of SEQ ID NO: 1245068
uuaaauagccaaugggaau

SEQ ID NO: 1533791 - RNA, 19 nt, Artificial Sequence
  Description of Artificial Sequence: Synthetic oligonucleotide
  Antisense strand to SEQ ID NO: 1533790
auucccauuggcuauuuaa

SEQ ID NO: 1533792 - RNA, 19 nt, Artificial Sequence
  Description of Artificial Sequence: Synthetic oligonucleotide
  Sense strand starting at position 2076 of SEQ ID NO: 1245068
uggaaauagcucugugacu

SEQ ID NO: 1533793 - RNA, 19 nt, Artificial Sequence
  Description of Artificial Sequence: Synthetic oligonucleotide
  Antisense strand to SEQ ID NO: 1533792
agucacagagcuauuucca

SEQ ID NO: 1533794 - RNA, 19 nt, Artificial Sequence
  Description of Artificial Sequence: Synthetic oligonucleotide
  Sense strand starting at position 2077 of SEQ ID NO: 1245068
ggaaauagcucugugacug

SEQ ID NO: 1533795 - RNA, 19 nt, Artificial Sequence
  Description of Artificial Sequence: Synthetic oligonucleotide
  Antisense strand to SEQ ID NO: 1533794
cagucacagagcuauuucc

SEQ ID NO: 1533796 - RNA, 19 nt, Artificial Sequence
  Description of Artificial Sequence: Synthetic oligonucleotide
  Sense strand starting at position 2107 of SEQ ID NO: 1245068
aagggaacguuuguuuacu

SEQ ID NO: 1533797 - RNA, 19 nt, Artificial Sequence
  Description of Artificial Sequence: Synthetic oligonucleotide
  Antisense strand to SEQ ID NO: 1533796
aguaaacaaacguucccuu

SEQ ID NO: 1533798 - RNA, 19 nt, Artificial Sequence
  Description of Artificial Sequence: Synthetic oligonucleotide
  Sense strand starting at position 3076 of SEQ ID NO: 1245068
agcuauucucggccaguuu

SEQ ID NO: 1533799 - RNA, 19 nt, Artificial Sequence
  Description of Artificial Sequence: Synthetic oligonucleotide
  Antisense strand to SEQ ID NO: 1533798
aaacuggccgagaauagcu

SEQ ID NO: 1533800 - RNA, 19 nt, Artificial Sequence
  Description of Artificial Sequence: Synthetic oligonucleotide
  Sense strand starting at position 3501 of SEQ ID NO: 1245068
gaaagagggucauuguaca

SEQ ID NO: 1533801 - RNA, 19 nt, Artificial Sequence
  Description of Artificial Sequence: Synthetic oligonucleotide
  Antisense strand to SEQ ID NO: 1533800
uguacaaugacccucuuuc

SEQ ID NO: 1533802 - RNA, 19 nt, Artificial Sequence
  Description of Artificial Sequence: Synthetic oligonucleotide
  Sense strand starting at position 3644 of SEQ ID NO: 1245068
ugacccuaugagugaagau

SEQ ID NO: 1533803 - RNA, 19 nt, Artificial Sequence
  Description of Artificial Sequence: Synthetic oligonucleotide
  Antisense strand to SEQ ID NO: 1533802
aucuucacucauaggguca

SEQ ID NO: 1533804 - RNA, 19 nt, Artificial Sequence
  Description of Artificial Sequence: Synthetic oligonucleotide
  Sense strand starting at position 3653 of SEQ ID NO: 1245068
gagugaagauauccuugac

SEQ ID NO: 1533805 - RNA, 19 nt, Artificial Sequence
  Description of Artificial Sequence: Synthetic oligonucleotide
  Antisense strand to SEQ ID NO: 1533804
gucaaggauaucuucacuc

SEQ ID NO: 1533806 - RNA, 19 nt, Artificial Sequence
  Description of Artificial Sequence: Synthetic oligonucleotide
  Sense strand starting at position 3656 of SEQ ID NO: 1245068
ugaagauauccuugaccau

SEQ ID NO: 1533807 - RNA, 19 nt, Artificial Sequence
  Description of Artificial Sequence: Synthetic oligonucleotide
  Antisense strand to SEQ ID NO: 1533806
auggucaaggauaucuuca

SEQ ID NO: 1533808 - RNA, 19 nt, Artificial Sequence
  Description of Artificial Sequence: Synthetic oligonucleotide
  Sense strand starting at position 3708 of SEQ ID NO: 1245068
guuccaccaccauguaaua

SEQ ID NO: 1533809 - RNA, 19 nt, Artificial Sequence
  Description of Artificial Sequence: Synthetic oligonucleotide
  Antisense strand to SEQ ID NO: 1533808
uauuacauggugguggaac

SEQ ID NO: 1533810 - RNA, 19 nt, Artificial Sequence
  Description of Artificial Sequence: Synthetic oligonucleotide
  Sense strand starting at position 3724 of SEQ ID NO: 1245068
auacaauuguagucuuacu

SEQ ID NO: 1533811 - RNA, 19 nt, Artificial Sequence
  Description of Artificial Sequence: Synthetic oligonucleotide
  Antisense strand to SEQ ID NO: 1533810
aguaagacuacaauuguau

SEQ ID NO: 1533812 - RNA, 19 nt, Artificial Sequence
  Description of Artificial Sequence: Synthetic oligonucleotide
  Sense strand starting at position 3835 of SEQ ID NO: 1245068
ucaguuuagugguuaaaca

SEQ ID NO: 1533813 - RNA, 19 nt, Artificial Sequence
  Description of Artificial Sequence: Synthetic oligonucleotide
  Antisense strand to SEQ ID NO: 1533812
uguuuaaccacuaaacuga

SEQ ID NO: 1533814 - RNA, 19 nt, Artificial Sequence
  Description of Artificial Sequence: Synthetic oligonucleotide
  Sense strand starting at position 3836 of SEQ ID NO: 1245068
caguuuagugguuaaacac

SEQ ID NO: 1533815 - RNA, 19 nt, Artificial Sequence
  Description of Artificial Sequence: Synthetic oligonucleotide
  Antisense strand to SEQ ID NO: 1533814
guguuuaaccacuaaacug

SEQ ID NO: 1533816 - RNA, 19 nt, Artificial Sequence
  Description of Artificial Sequence: Synthetic oligonucleotide
  Sense strand starting at position 68 of SEQ ID NO: 1245069
guaguaaauuaucuuacca

SEQ ID NO: 1533817 - RNA, 19 nt, Artificial Sequence
  Description of Artificial Sequence: Synthetic oligonucleotide
  Antisense strand to SEQ ID NO: 1533816
ugguaagauaauuuacuac

SEQ ID NO: 1533818 - RNA, 19 nt, Artificial Sequence
  Description of Artificial Sequence: Synthetic oligonucleotide
  Sense strand starting at position 196 of SEQ ID NO: 1245069
ccuuuaaggucuucuaaug

SEQ ID NO: 1533819 - RNA, 19 nt, Artificial Sequence
  Description of Artificial Sequence: Synthetic oligonucleotide
  Antisense strand to SEQ ID NO: 1533818
cauuagaagaccuuaaagg

SEQ ID NO: 1533820 - RNA, 19 nt, Artificial Sequence
  Description of Artificial Sequence: Synthetic oligonucleotide
  Sense strand starting at position 496 of SEQ ID NO: 1245069
uuuacuggucucuaaauug

SEQ ID NO: 1533821 - RNA, 19 nt, Artificial Sequence
  Description of Artificial Sequence: Synthetic oligonucleotide
  Antisense strand to SEQ ID NO: 1533820
caauuuagagaccaguaaa

SEQ ID NO: 1533822 - RNA, 19 nt, Artificial Sequence
  Description of Artificial Sequence: Synthetic oligonucleotide
  Sense strand starting at position 592 of SEQ ID NO: 1245069
aagguauaccuuugaaguc

SEQ ID NO: 1533823 - RNA, 19 nt, Artificial Sequence
  Description of Artificial Sequence: Synthetic oligonucleotide
  Antisense strand to SEQ ID NO: 1533822
gacuucaaagguauaccuu

SEQ ID NO: 1533824 - RNA, 19 nt, Artificial Sequence
  Description of Artificial Sequence: Synthetic oligonucleotide
  Sense strand starting at position 775 of SEQ ID NO: 1245069
aauauacuggcccgggaau

SEQ ID NO: 1533825 - RNA, 19 nt, Artificial Sequence
  Description of Artificial Sequence: Synthetic oligonucleotide
  Antisense strand to SEQ ID NO: 1533824
auucccgggccaguauauu

SEQ ID NO: 1533826 - RNA, 19 nt, Artificial Sequence
  Description of Artificial Sequence: Synthetic oligonucleotide
  Sense strand starting at position 841 of SEQ ID NO: 1245069
gugucaucugaggaaugcu

SEQ ID NO: 1533827 - RNA, 19 nt, Artificial Sequence
  Description of Artificial Sequence: Synthetic oligonucleotide
  Antisense strand to SEQ ID NO: 1533826
agcauuccucagaugacac

SEQ ID NO: 1533828 - RNA, 19 nt, Artificial Sequence
  Description of Artificial Sequence: Synthetic oligonucleotide
  Sense strand starting at position 859 of SEQ ID NO: 1245069
uggcaaugccagcaggaau

SEQ ID NO: 1533829 - RNA, 19 nt, Artificial Sequence
  Description of Artificial Sequence: Synthetic oligonucleotide
  Antisense strand to SEQ ID NO: 1533828
auuccugcuggcauugcca

SEQ ID NO: 1533830 - RNA, 19 nt, Artificial Sequence
  Description of Artificial Sequence: Synthetic oligonucleotide
  Sense strand starting at position 923 of SEQ ID NO: 1245069
ggugcaaguccucccguuu

SEQ ID NO: 1533831 - RNA, 19 nt, Artificial Sequence
  Description of Artificial Sequence: Synthetic oligonucleotide
  Antisense strand to SEQ ID NO: 1533830
aaacgggaggacuugcacc

SEQ ID NO: 1533832 - RNA, 19 nt, Artificial Sequence
  Description of Artificial Sequence: Synthetic oligonucleotide
  Sense strand starting at position 965 of SEQ ID NO: 1245069
auugcaacacuguauguaa

SEQ ID NO: 1533833 - RNA, 19 nt, Artificial Sequence
  Description of Artificial Sequence: Synthetic oligonucleotide
  Antisense strand to SEQ ID NO: 1533832
uuacauacaguguugcaau

SEQ ID NO: 1533834 - RNA, 19 nt, Artificial Sequence
  Description of Artificial Sequence: Synthetic oligonucleotide
  Sense strand starting at position 980 of SEQ ID NO: 1245069
guaaacaagagugaucugu

SEQ ID NO: 1533835 - RNA, 19 nt, Artificial Sequence
  Description of Artificial Sequence: Synthetic oligonucleotide
  Antisense strand to SEQ ID NO: 1533834
acagaucacucuuguuuac

SEQ ID NO: 1533836 - RNA, 19 nt, Artificial Sequence
  Description of Artificial Sequence: Synthetic oligonucleotide
  Sense strand starting at position 982 of SEQ ID NO: 1245069
aaacaagagugaucuguuc

SEQ ID NO: 1533837 - RNA, 19 nt, Artificial Sequence
  Description of Artificial Sequence: Synthetic oligonucleotide
  Antisense strand to SEQ ID NO: 1533836
gaacagaucacucuuguuu

SEQ ID NO: 1533838 - RNA, 19 nt, Artificial Sequence
  Description of Artificial Sequence: Synthetic oligonucleotide
  Sense strand starting at position 991 of SEQ ID NO: 1245069
ugaucuguucagggauaag

SEQ ID NO: 1533839 - RNA, 19 nt, Artificial Sequence
  Description of Artificial Sequence: Synthetic oligonucleotide
  Antisense strand to SEQ ID NO: 1533838
cuuaucccugaacagauca

SEQ ID NO: 1533840 - RNA, 19 nt, Artificial Sequence
  Description of Artificial Sequence: Synthetic oligonucleotide
  Sense strand starting at position 1204 of SEQ ID NO: 1245069
guuucugucccaggauuuc

SEQ ID NO: 1533841 - RNA, 19 nt, Artificial Sequence
  Description of Artificial Sequence: Synthetic oligonucleotide
  Antisense strand to SEQ ID NO: 1533840
gaaauccugggacagaaac

SEQ ID NO: 1533842 - RNA, 19 nt, Artificial Sequence
  Description of Artificial Sequence: Synthetic oligonucleotide
  Sense strand starting at position 1506 of SEQ ID NO: 1245069
aacaguaauggacgugagu

SEQ ID NO: 1533843 - RNA, 19 nt, Artificial Sequence
  Description of Artificial Sequence: Synthetic oligonucleotide
  Antisense strand to SEQ ID NO: 1533842
acucacguccauuacuguu

SEQ ID NO: 1533844 - RNA, 19 nt, Artificial Sequence
  Description of Artificial Sequence: Synthetic oligonucleotide
  Sense strand starting at position 1519 of SEQ ID NO: 1245069
gugaguggaaacgaaucua

SEQ ID NO: 1533845 - RNA, 19 nt, Artificial Sequence
  Description of Artificial Sequence: Synthetic oligonucleotide
  Antisense strand to SEQ ID NO: 1533844
uagauucguuuccacucac

SEQ ID NO: 1533846 - RNA, 19 nt, Artificial Sequence
  Description of Artificial Sequence: Synthetic oligonucleotide
  Sense strand starting at position 1611 of SEQ ID NO: 1245069
uugggacucaugggucuuu

SEQ ID NO: 1533847 - RNA, 19 nt, Artificial Sequence
  Description of Artificial Sequence: Synthetic oligonucleotide
  Antisense strand to SEQ ID NO: 1533846
aaagacccaugagucccaa

SEQ ID NO: 1533848 - RNA, 19 nt, Artificial Sequence
  Description of Artificial Sequence: Synthetic oligonucleotide
  Sense strand starting at position 1623 of SEQ ID NO: 1245069
ggucuuugcagaugaauac

SEQ ID NO: 1533849 - RNA, 19 nt, Artificial Sequence
  Description of Artificial Sequence: Synthetic oligonucleotide
  Antisense strand to SEQ ID NO: 1533848
guauucaucugcaaagacc

SEQ ID NO: 1533850 - RNA, 19 nt, Artificial Sequence
  Description of Artificial Sequence: Synthetic oligonucleotide
  Sense strand starting at position 1624 of SEQ ID NO: 1245069
gucuuugcagaugaauaca

SEQ ID NO: 1533851 - RNA, 19 nt, Artificial Sequence
  Description of Artificial Sequence: Synthetic oligonucleotide
  Antisense strand to SEQ ID NO: 1533850
uguauucaucugcaaagac

SEQ ID NO: 1533852 - RNA, 19 nt, Artificial Sequence
  Description of Artificial Sequence: Synthetic oligonucleotide
  Sense strand starting at position 2441 of SEQ ID NO: 1245069
ccuuuaguggugggaaucu

SEQ ID NO: 1533853 - RNA, 19 nt, Artificial Sequence
  Description of Artificial Sequence: Synthetic oligonucleotide
  Antisense strand to SEQ ID NO: 1533852
agauucccaccacuaaagg

SEQ ID NO: 1533854 - RNA, 19 nt, Artificial Sequence
  Description of Artificial Sequence: Synthetic oligonucleotide
  Sense strand starting at position 2543 of SEQ ID NO: 1245069
ugugcagaugcguuucuaa

SEQ ID NO: 1533855 - RNA, 19 nt, Artificial Sequence
  Description of Artificial Sequence: Synthetic oligonucleotide
  Antisense strand to SEQ ID NO: 1533854
uuagaaacgcaucugcaca

SEQ ID NO: 1533856 - RNA, 19 nt, Artificial Sequence
  Description of Artificial Sequence: Synthetic oligonucleotide
  Sense strand starting at position 2568 of SEQ ID NO: 1245069
cugauagagcacuaagcaa

SEQ ID NO: 1533857 - RNA, 19 nt, Artificial Sequence
  Description of Artificial Sequence: Synthetic oligonucleotide
  Antisense strand to SEQ ID NO: 1533856
uugcuuagugcucuaucag

SEQ ID NO: 1533858 - RNA, 19 nt, Artificial Sequence
  Description of Artificial Sequence: Synthetic oligonucleotide
  Sense strand starting at position 2682 of SEQ ID NO: 1245069
uggugauaggugcauugga

SEQ ID NO: 1533859 - RNA, 19 nt, Artificial Sequence
  Description of Artificial Sequence: Synthetic oligonucleotide
  Antisense strand to SEQ ID NO: 1533858
uccaaugcaccuaucacca

SEQ ID NO: 1533860 - RNA, 19 nt, Artificial Sequence
  Description of Artificial Sequence: Synthetic oligonucleotide
  Sense strand starting at position 2737 of SEQ ID NO: 1245069
aggagaagucguuagguuu

SEQ ID NO: 1533861 - RNA, 19 nt, Artificial Sequence
  Description of Artificial Sequence: Synthetic oligonucleotide
  Antisense strand to SEQ ID NO: 1533860
aaaccuaacgacuucuccu

SEQ ID NO: 1533862 - RNA, 19 nt, Artificial Sequence
  Description of Artificial Sequence: Synthetic oligonucleotide
  Sense strand starting at position 2846 of SEQ ID NO: 1245069
gggagaauguuuguuacga

SEQ ID NO: 1533863 - RNA, 19 nt, Artificial Sequence
  Description of Artificial Sequence: Synthetic oligonucleotide
  Antisense strand to SEQ ID NO: 1533862
ucguaacaaacauucuccc

SEQ ID NO: 1533864 - RNA, 19 nt, Artificial Sequence
  Description of Artificial Sequence: Synthetic oligonucleotide
  Sense strand starting at position 2847 of SEQ ID NO: 1245069
ggagaauguuuguuacgag

SEQ ID NO: 1533865 - RNA, 19 nt, Artificial Sequence
  Description of Artificial Sequence: Synthetic oligonucleotide
  Antisense strand to SEQ ID NO: 1533864
cucguaacaaacauucucc

SEQ ID NO: 1533866 - RNA, 19 nt, Artificial Sequence
  Description of Artificial Sequence: Synthetic oligonucleotide
  Sense strand starting at position 2981 of SEQ ID NO: 1245069
ccgauaagccauggaagua

SEQ ID NO: 1533867 - RNA, 19 nt, Artificial Sequence
  Description of Artificial Sequence: Synthetic oligonucleotide
  Antisense strand to SEQ ID NO: 1533866
uacuuccauggcuuaucgg

SEQ ID NO: 1533868 - RNA, 19 nt, Artificial Sequence
  Description of Artificial Sequence: Synthetic oligonucleotide
  Sense strand starting at position 2982 of SEQ ID NO: 1245069
cgauaagccauggaaguau

SEQ ID NO: 1533869 - RNA, 19 nt, Artificial Sequence
  Description of Artificial Sequence: Synthetic oligonucleotide
  Antisense strand to SEQ ID NO: 1533868
auacuuccauggcuuaucg

SEQ ID NO: 1533870 - RNA, 19 nt, Artificial Sequence
  Description of Artificial Sequence: Synthetic oligonucleotide
  Sense strand starting at position 2993 of SEQ ID NO: 1245069
ggaaguauuaaaggugcau

SEQ ID NO: 1533871 - RNA, 19 nt, Artificial Sequence
  Description of Artificial Sequence: Synthetic oligonucleotide
  Antisense strand to SEQ ID NO: 1533870
augcaccuuuaauacuucc

SEQ ID NO: 1533872 - RNA, 19 nt, Artificial Sequence
  Description of Artificial Sequence: Synthetic oligonucleotide
  Sense strand starting at position 3179 of SEQ ID NO: 1245069
ggauuuggauauggauuga

SEQ ID NO: 1533873 - RNA, 19 nt, Artificial Sequence
  Description of Artificial Sequence: Synthetic oligonucleotide
  Antisense strand to SEQ ID NO: 1533872
ucaauccauauccaaaucc

SEQ ID NO: 1533874 - RNA, 19 nt, Artificial Sequence
  Description of Artificial Sequence: Synthetic oligonucleotide
  Sense strand starting at position 3188 of SEQ ID NO: 1245069
uauggauugaugugggauc

SEQ ID NO: 1533875 - RNA, 19 nt, Artificial Sequence
  Description of Artificial Sequence: Synthetic oligonucleotide
  Antisense strand to SEQ ID NO: 1533874
gaucccacaucaauccaua

SEQ ID NO: 1533876 - RNA, 19 nt, Artificial Sequence
  Description of Artificial Sequence: Synthetic oligonucleotide
  Sense strand starting at position 3263 of SEQ ID NO: 1245069
gaaggauuggguugccauu

SEQ ID NO: 1533877 - RNA, 19 nt, Artificial Sequence
  Description of Artificial Sequence: Synthetic oligonucleotide
  Antisense strand to SEQ ID NO: 1533876
aauggcaacccaauccuuc

SEQ ID NO: 1533878 - RNA, 19 nt, Artificial Sequence
  Description of Artificial Sequence: Synthetic oligonucleotide
  Sense strand starting at position 3265 of SEQ ID NO: 1245069
aggauuggguugccauuaa

SEQ ID NO: 1533879 - RNA, 19 nt, Artificial Sequence
  Description of Artificial Sequence: Synthetic oligonucleotide
  Antisense strand to SEQ ID NO: 1533878
uuaauggcaacccaauccu

SEQ ID NO: 1533880 - RNA, 19 nt, Artificial Sequence
  Description of Artificial Sequence: Synthetic oligonucleotide
  Sense strand starting at position 3269 of SEQ ID NO: 1245069
uuggguugccauuaauuac

SEQ ID NO: 1533881 - RNA, 19 nt, Artificial Sequence
  Description of Artificial Sequence: Synthetic oligonucleotide
  Antisense strand to SEQ ID NO: 1533880
guaauuaauggcaacccaa

SEQ ID NO: 1533882 - RNA, 19 nt, Artificial Sequence
  Description of Artificial Sequence: Synthetic oligonucleotide
  Sense strand starting at position 3272 of SEQ ID NO: 1245069
gguugccauuaauuacaaa

SEQ ID NO: 1533883 - RNA, 19 nt, Artificial Sequence
  Description of Artificial Sequence: Synthetic oligonucleotide
  Antisense strand to SEQ ID NO: 1533882
uuuguaauuaauggcaacc

SEQ ID NO: 1533884 - RNA, 19 nt, Artificial Sequence
  Description of Artificial Sequence: Synthetic oligonucleotide
  Sense strand starting at position 3352 of SEQ ID NO: 1245069
acuuguugacauugagaaa

SEQ ID NO: 1533885 - RNA, 19 nt, Artificial Sequence
  Description of Artificial Sequence: Synthetic oligonucleotide
  Antisense strand to SEQ ID NO: 1533884
uuucucaaugucaacaagu

SEQ ID NO: 1533886 - RNA, 19 nt, Artificial Sequence
  Description of Artificial Sequence: Synthetic oligonucleotide
  Sense strand starting at position 3441 of SEQ ID NO: 1245069
auuggaucuccaugagagu

SEQ ID NO: 1533887 - RNA, 19 nt, Artificial Sequence
  Description of Artificial Sequence: Synthetic oligonucleotide
  Antisense strand to SEQ ID NO: 1533886
acucucauggagauccaau

SEQ ID NO: 1533888 - RNA, 19 nt, Artificial Sequence
  Description of Artificial Sequence: Synthetic oligonucleotide
  Sense strand starting at position 3456 of SEQ ID NO: 1245069
gagugcauuuaggaagaaa

SEQ ID NO: 1533889 - RNA, 19 nt, Artificial Sequence
  Description of Artificial Sequence: Synthetic oligonucleotide
  Antisense strand to SEQ ID NO: 1533888
uuucuuccuaaaugcacuc

SEQ ID NO: 1533890 - RNA, 19 nt, Artificial Sequence
  Description of Artificial Sequence: Synthetic oligonucleotide
  Sense strand starting at position 3648 of SEQ ID NO: 1245069
guguuuaaugucuaaucag

SEQ ID NO: 1533891 - RNA, 19 nt, Artificial Sequence
  Description of Artificial Sequence: Synthetic oligonucleotide
  Antisense strand to SEQ ID NO: 1533890
cugauuagacauuaaacac

SEQ ID NO: 1533892 - RNA, 19 nt, Artificial Sequence
  Description of Artificial Sequence: Synthetic oligonucleotide
  Sense strand starting at position 3762 of SEQ ID NO: 1245069
acaauuguuugguuacuua

SEQ ID NO: 1533893 - RNA, 19 nt, Artificial Sequence
  Description of Artificial Sequence: Synthetic oligonucleotide
  Antisense strand to SEQ ID NO: 1533892
uaaguaaccaaacaauugu

SEQ ID NO: 1533894 - RNA, 19 nt, Artificial Sequence
  Description of Artificial Sequence: Synthetic oligonucleotide
  Sense strand starting at position 3765 of SEQ ID NO: 1245069
auuguuugguuacuuauga

SEQ ID NO: 1533895 - RNA, 19 nt, Artificial Sequence
  Description of Artificial Sequence: Synthetic oligonucleotide
  Antisense strand to SEQ ID NO: 1533894
ucauaaguaaccaaacaau

SEQ ID NO: 1533896 - RNA, 19 nt, Artificial Sequence
  Description of Artificial Sequence: Synthetic oligonucleotide
  Sense strand starting at position 1421 of SEQ ID NO: 1245070
gagucaaauuaggauuucu

SEQ ID NO: 1533897 - RNA, 19 nt, Artificial Sequence
  Description of Artificial Sequence: Synthetic oligonucleotide
  Antisense strand to SEQ ID NO: 1533896
agaaauccuaauuugacuc

SEQ ID NO: 1533898 - RNA, 19 nt, Artificial Sequence
  Description of Artificial Sequence: Synthetic oligonucleotide
  Sense strand starting at position 1528 of SEQ ID NO: 1245070
aguugaacuuucgaggcua

SEQ ID NO: 1533899 - RNA, 19 nt, Artificial Sequence
  Description of Artificial Sequence: Synthetic oligonucleotide
  Antisense strand to SEQ ID NO: 1533898
uagccucgaaaguucaacu

SEQ ID NO: 1533900 - RNA, 19 nt, Artificial Sequence
  Description of Artificial Sequence: Synthetic oligonucleotide
  Sense strand starting at position 1539 of SEQ ID NO: 1245070
cgaggcuaccgguaaacaa

SEQ ID NO: 1533901 - RNA, 19 nt, Artificial Sequence
  Description of Artificial Sequence: Synthetic oligonucleotide
  Antisense strand to SEQ ID NO: 1533900
uuguuuaccgguagccucg

SEQ ID NO: 1533902 - RNA, 19 nt, Artificial Sequence
  Description of Artificial Sequence: Synthetic oligonucleotide
  Sense strand starting at position 1707 of SEQ ID NO: 1245070
acgcuacgccguguguaau

SEQ ID NO: 1533903 - RNA, 19 nt, Artificial Sequence
  Description of Artificial Sequence: Synthetic oligonucleotide
  Antisense strand to SEQ ID NO: 1533902
auuacacacggcguagcgu

SEQ ID NO: 1533904 - RNA, 19 nt, Artificial Sequence
  Description of Artificial Sequence: Synthetic oligonucleotide
  Sense strand starting at position 1993 of SEQ ID NO: 1245070
cucaguguggcagaacuuu

SEQ ID NO: 1533905 - RNA, 19 nt, Artificial Sequence
  Description of Artificial Sequence: Synthetic oligonucleotide
  Antisense strand to SEQ ID NO: 1533904
aaaguucugccacacugag

SEQ ID NO: 1533906 - RNA, 19 nt, Artificial Sequence
  Description of Artificial Sequence: Synthetic oligonucleotide
  Sense strand starting at position 2002 of SEQ ID NO: 1245070
gcagaacuuugugcugaug

SEQ ID NO: 1533907 - RNA, 19 nt, Artificial Sequence
  Description of Artificial Sequence: Synthetic oligonucleotide
  Antisense strand to SEQ ID NO: 1533906
caucagcacaaaguucugc

SEQ ID NO: 1533908 - RNA, 19 nt, Artificial Sequence
  Description of Artificial Sequence: Synthetic oligonucleotide
  Sense strand starting at position 2005 of SEQ ID NO: 1245070
gaacuuugugcugaugaga

SEQ ID NO: 1533909 - RNA, 19 nt, Artificial Sequence
  Description of Artificial Sequence: Synthetic oligonucleotide
  Antisense strand to SEQ ID NO: 1533908
ucucaucagcacaaaguuc

SEQ ID NO: 1533910 - RNA, 19 nt, Artificial Sequence
  Description of Artificial Sequence: Synthetic oligonucleotide
  Sense strand starting at position 2008 of SEQ ID NO: 1245070
cuuugugcugaugagacaa

SEQ ID NO: 1533911 - RNA, 19 nt, Artificial Sequence
  Description of Artificial Sequence: Synthetic oligonucleotide
  Antisense strand to SEQ ID NO: 1533910
uugucucaucagcacaaag

SEQ ID NO: 1533912 - RNA, 19 nt, Artificial Sequence
  Description of Artificial Sequence: Synthetic oligonucleotide
  Sense strand starting at position 2010 of SEQ ID NO: 1245070
uugugcugaugagacaaua

SEQ ID NO: 1533913 - RNA, 19 nt, Artificial Sequence
  Description of Artificial Sequence: Synthetic oligonucleotide
  Antisense strand to SEQ ID NO: 1533912
uauugucucaucagcacaa

SEQ ID NO: 1533914 - RNA, 19 nt, Artificial Sequence
  Description of Artificial Sequence: Synthetic oligonucleotide
  Sense strand starting at position 2036 of SEQ ID NO: 1245070
gugcguuuccuacagggca

SEQ ID NO: 1533915 - RNA, 19 nt, Artificial Sequence
  Description of Artificial Sequence: Synthetic oligonucleotide
  Antisense strand to SEQ ID NO: 1533914
ugcccuguaggaaacgcac

SEQ ID NO: 1533916 - RNA, 19 nt, Artificial Sequence
  Description of Artificial Sequence: Synthetic oligonucleotide
  Sense strand starting at position 2038 of SEQ ID NO: 1245070
gcguuuccuacagggcaga

SEQ ID NO: 1533917 - RNA, 19 nt, Artificial Sequence
  Description of Artificial Sequence: Synthetic oligonucleotide
  Antisense strand to SEQ ID NO: 1533916
ucugcccuguaggaaacgc

SEQ ID NO: 1533918 - RNA, 19 nt, Artificial Sequence
  Description of Artificial Sequence: Synthetic oligonucleotide
  Sense strand starting at position 2573 of SEQ ID NO: 1245070
aguugcucugcucgucaau

SEQ ID NO: 1533919 - RNA, 19 nt, Artificial Sequence
  Description of Artificial Sequence: Synthetic oligonucleotide
  Antisense strand to SEQ ID NO: 1533918
auugacgagcagagcaacu

SEQ ID NO: 1533920 - RNA, 19 nt, Artificial Sequence
  Description of Artificial Sequence: Synthetic oligonucleotide
  Sense strand starting at position 2574 of SEQ ID NO: 1245070
guugcucugcucgucaauu

SEQ ID NO: 1533921 - RNA, 19 nt, Artificial Sequence
  Description of Artificial Sequence: Synthetic oligonucleotide
  Antisense strand to SEQ ID NO: 1533920
aauugacgagcagagcaac

SEQ ID NO: 1533922 - RNA, 19 nt, Artificial Sequence
  Description of Artificial Sequence: Synthetic oligonucleotide
  Sense strand starting at position 2707 of SEQ ID NO: 1245070
cuuuguacacuuugucaaa

SEQ ID NO: 1533923 - RNA, 19 nt, Artificial Sequence
  Description of Artificial Sequence: Synthetic oligonucleotide
  Antisense strand to SEQ ID NO: 1533922
uuugacaaaguguacaaag

SEQ ID NO: 1533924 - RNA, 19 nt, Artificial Sequence
  Description of Artificial Sequence: Synthetic oligonucleotide
  Sense strand starting at position 2779 of SEQ ID NO: 1245070
agagcaaauugccuuacuu

SEQ ID NO: 1533925 - RNA, 19 nt, Artificial Sequence
  Description of Artificial Sequence: Synthetic oligonucleotide
  Antisense strand to SEQ ID NO: 1533924
aaguaaggcaauuugcucu

SEQ ID NO: 1533926 - RNA, 19 nt, Artificial Sequence
  Description of Artificial Sequence: Synthetic oligonucleotide
  Sense strand starting at position 2805 of SEQ ID NO: 1245070
aaacgcuccggcuaaugaa

SEQ ID NO: 1533927 - RNA, 19 nt, Artificial Sequence
  Description of Artificial Sequence: Synthetic oligonucleotide
  Antisense strand to SEQ ID NO: 1533926
uucauuagccggagcguuu

SEQ ID NO: 1533928 - RNA, 19 nt, Artificial Sequence
  Description of Artificial Sequence: Synthetic oligonucleotide
  Sense strand starting at position 2923 of SEQ ID NO: 1245070
gacguguuugcguggaggu

SEQ ID NO: 1533929 - RNA, 19 nt, Artificial Sequence
  Description of Artificial Sequence: Synthetic oligonucleotide
  Antisense strand to SEQ ID NO: 1533928
accuccacgcaaacacguc

SEQ ID NO: 1533930 - RNA, 19 nt, Artificial Sequence
  Description of Artificial Sequence: Synthetic oligonucleotide
  Sense strand starting at position 3160 of SEQ ID NO: 1245070
cgagaugaacccgggugua

SEQ ID NO: 1533931 - RNA, 19 nt, Artificial Sequence
  Description of Artificial Sequence: Synthetic oligonucleotide
  Antisense strand to SEQ ID NO: 1533930
uacacccggguucaucucg

SEQ ID NO: 1533932 - RNA, 19 nt, Artificial Sequence
  Description of Artificial Sequence: Synthetic oligonucleotide
  Sense strand starting at position 3266 of SEQ ID NO: 1245070
cugaauaguuacgaucagu

SEQ ID NO: 1533933 - RNA, 19 nt, Artificial Sequence
  Description of Artificial Sequence: Synthetic oligonucleotide
  Antisense strand to SEQ ID NO: 1533932
acugaucguaacuauucag

SEQ ID NO: 1533934 - RNA, 19 nt, Artificial Sequence
  Description of Artificial Sequence: Synthetic oligonucleotide
  Sense strand starting at position 3269 of SEQ ID NO: 1245070
aauaguuacgaucaguauu

SEQ ID NO: 1533935 - RNA, 19 nt, Artificial Sequence
  Description of Artificial Sequence: Synthetic oligonucleotide
  Antisense strand to SEQ ID NO: 1533934
aauacugaucguaacuauu

SEQ ID NO: 1533936 - RNA, 19 nt, Artificial Sequence
  Description of Artificial Sequence: Synthetic oligonucleotide
  Sense strand starting at position 3313 of SEQ ID NO: 1245070
cgaaacuuuguaugaauaa

SEQ ID NO: 1533937 - RNA, 19 nt, Artificial Sequence
  Description of Artificial Sequence: Synthetic oligonucleotide
  Antisense strand to SEQ ID NO: 1533936
uuauucauacaaaguuucg

SEQ ID NO: 1533938 - RNA, 19 nt, Artificial Sequence
  Description of Artificial Sequence: Synthetic oligonucleotide
  Sense strand starting at position 3326 of SEQ ID NO: 1245070
gaauaaguuuguuaaaugg

SEQ ID NO: 1533939 - RNA, 19 nt, Artificial Sequence
  Description of Artificial Sequence: Synthetic oligonucleotide
  Antisense strand to SEQ ID NO: 1533938
ccauuuaacaaacuuauuc

SEQ ID NO: 1533940 - RNA, 19 nt, Artificial Sequence
  Description of Artificial Sequence: Synthetic oligonucleotide
  Sense strand starting at position 3459 of SEQ ID NO: 1245070
guaagucagccucaucuau

SEQ ID NO: 1533941 - RNA, 19 nt, Artificial Sequence
  Description of Artificial Sequence: Synthetic oligonucleotide
  Antisense strand to SEQ ID NO: 1533940
auagaugaggcugacuuac

SEQ ID NO: 1533942 - RNA, 19 nt, Artificial Sequence
  Description of Artificial Sequence: Synthetic oligonucleotide
  Sense strand starting at position 3472 of SEQ ID NO: 1245070
aucuauuaucagcguuaau

SEQ ID NO: 1533943 - RNA, 19 nt, Artificial Sequence
  Description of Artificial Sequence: Synthetic oligonucleotide
  Antisense strand to SEQ ID NO: 1533942
auuaacgcugauaauagau

SEQ ID NO: 1533944 - RNA, 19 nt, Artificial Sequence
  Description of Artificial Sequence: Synthetic oligonucleotide
  Sense strand starting at position 3475 of SEQ ID NO: 1245070
uauuaucagcguuaauaag

SEQ ID NO: 1533945 - RNA, 19 nt, Artificial Sequence
  Description of Artificial Sequence: Synthetic oligonucleotide
  Antisense strand to SEQ ID NO: 1533944
cuuauuaacgcugauaaua

SEQ ID NO: 1533946 - RNA, 19 nt, Artificial Sequence
  Description of Artificial Sequence: Synthetic oligonucleotide
  Sense strand starting at position 3536 of SEQ ID NO: 1245070
cuuacucauuccgcugaua

SEQ ID NO: 1533947 - RNA, 19 nt, Artificial Sequence
  Description of Artificial Sequence: Synthetic oligonucleotide
  Antisense strand to SEQ ID NO: 1533946
uaucagcggaaugaguaag

SEQ ID NO: 1533948 - RNA, 19 nt, Artificial Sequence
  Description of Artificial Sequence: Synthetic oligonucleotide
  Sense strand starting at position 3539 of SEQ ID NO: 1245070
acucauuccgcugauaaag

SEQ ID NO: 1533949 - RNA, 19 nt, Artificial Sequence
  Description of Artificial Sequence: Synthetic oligonucleotide
  Antisense strand to SEQ ID NO: 1533948
cuuuaucagcggaaugagu

SEQ ID NO: 1533950 - RNA, 19 nt, Artificial Sequence
  Description of Artificial Sequence: Synthetic oligonucleotide
  Sense strand starting at position 3663 of SEQ ID NO: 1245070
gcugcauuguugguuuaca

SEQ ID NO: 1533951 - RNA, 19 nt, Artificial Sequence
  Description of Artificial Sequence: Synthetic oligonucleotide
  Antisense strand to SEQ ID NO: 1533950
uguaaaccaacaaugcagc

SEQ ID NO: 1533952 - RNA, 19 nt, Artificial Sequence
  Description of Artificial Sequence: Synthetic oligonucleotide
  Sense strand starting at position 3664 of SEQ ID NO: 1245070
cugcauuguugguuuacau

SEQ ID NO: 1533953 - RNA, 19 nt, Artificial Sequence
  Description of Artificial Sequence: Synthetic oligonucleotide
  Antisense strand to SEQ ID NO: 1533952
auguaaaccaacaaugcag

SEQ ID NO: 1533954 - RNA, 19 nt, Artificial Sequence
  Description of Artificial Sequence: Synthetic oligonucleotide
  Sense strand starting at position 3697 of SEQ ID NO: 1245070
acugguguaaccuguggaa

SEQ ID NO: 1533955 - RNA, 19 nt, Artificial Sequence
  Description of Artificial Sequence: Synthetic oligonucleotide
  Antisense strand to SEQ ID NO: 1533954
uuccacagguuacaccagu

SEQ ID NO: 1533956 - RNA, 19 nt, Artificial Sequence
  Description of Artificial Sequence: Synthetic oligonucleotide
  Sense strand starting at position 3699 of SEQ ID NO: 1245070
ugguguaaccuguggaauu

SEQ ID NO: 1533957 - RNA, 19 nt, Artificial Sequence
  Description of Artificial Sequence: Synthetic oligonucleotide
  Antisense strand to SEQ ID NO: 1533956
aauuccacagguuacacca

SEQ ID NO: 1533958 - RNA, 19 nt, Artificial Sequence
  Description of Artificial Sequence: Synthetic oligonucleotide
  Sense strand starting at position 3700 of SEQ ID NO: 1245070
gguguaaccuguggaauuu

SEQ ID NO: 1533959 - RNA, 19 nt, Artificial Sequence
  Description of Artificial Sequence: Synthetic oligonucleotide
  Antisense strand to SEQ ID NO: 1533958
aaauuccacagguuacacc

SEQ ID NO: 1533960 - RNA, 19 nt, Artificial Sequence
  Description of Artificial Sequence: Synthetic oligonucleotide
  Sense strand starting at position 3907 of SEQ ID NO: 1245070
agguaaagugcuuacagga

SEQ ID NO: 1533961 - RNA, 19 nt, Artificial Sequence
  Description of Artificial Sequence: Synthetic oligonucleotide
  Antisense strand to SEQ ID NO: 1533960
uccuguaagcacuuuaccu

SEQ ID NO: 1533962 - RNA, 19 nt, Artificial Sequence
  Description of Artificial Sequence: Synthetic oligonucleotide
  Sense strand starting at position 3947 of SEQ ID NO: 1245070
aucuguuaacaugaucguu

SEQ ID NO: 1533963 - RNA, 19 nt, Artificial Sequence
  Description of Artificial Sequence: Synthetic oligonucleotide
  Antisense strand to SEQ ID NO: 1533962
aacgaucauguuaacagau

SEQ ID NO: 1533964 - RNA, 19 nt, Artificial Sequence
  Description of Artificial Sequence: Synthetic oligonucleotide
  Sense strand starting at position 3949 of SEQ ID NO: 1245070
cuguuaacaugaucguuua

SEQ ID NO: 1533965 - RNA, 19 nt, Artificial Sequence
  Description of Artificial Sequence: Synthetic oligonucleotide
  Antisense strand to SEQ ID NO: 1533964
uaaacgaucauguuaacag

SEQ ID NO: 1533966 - RNA, 19 nt, Artificial Sequence
  Description of Artificial Sequence: Synthetic oligonucleotide
  Sense strand starting at position 3950 of SEQ ID NO: 1245070
uguuaacaugaucguuuau

SEQ ID NO: 1533967 - RNA, 19 nt, Artificial Sequence
  Description of Artificial Sequence: Synthetic oligonucleotide
  Antisense strand to SEQ ID NO: 1533966
auaaacgaucauguuaaca

SEQ ID NO: 1533968 - RNA, 19 nt, Artificial Sequence
  Description of Artificial Sequence: Synthetic oligonucleotide
  Sense strand starting at position 3952 of SEQ ID NO: 1245070
uuaacaugaucguuuaucu

SEQ ID NO: 1533969 - RNA, 19 nt, Artificial Sequence
  Description of Artificial Sequence: Synthetic oligonucleotide
  Antisense strand to SEQ ID NO: 1533968
agauaaacgaucauguuaa

SEQ ID NO: 1533970 - RNA, 19 nt, Artificial Sequence
  Description of Artificial Sequence: Synthetic oligonucleotide
  Sense strand starting at position 3959 of SEQ ID NO: 1245070
gaucguuuaucuccagcca

SEQ ID NO: 1533971 - RNA, 19 nt, Artificial Sequence
  Description of Artificial Sequence: Synthetic oligonucleotide
  Antisense strand to SEQ ID NO: 1533970
uggcuggagauaaacgauc

SEQ ID NO: 1533972 - RNA, 19 nt, Artificial Sequence
  Description of Artificial Sequence: Synthetic oligonucleotide
  Sense strand starting at position 3960 of SEQ ID NO: 1245070
aucguuuaucuccagccaa

SEQ ID NO: 1533973 - RNA, 19 nt, Artificial Sequence
  Description of Artificial Sequence: Synthetic oligonucleotide
  Antisense strand to SEQ ID NO: 1533972
uuggcuggagauaaacgau

SEQ ID NO: 1533974 - RNA, 19 nt, Artificial Sequence
  Description of Artificial Sequence: Synthetic oligonucleotide
  Sense strand starting at position 3981 of SEQ ID NO: 1245070
auaggucaguucuuucuua

SEQ ID NO: 1533975 - RNA, 19 nt, Artificial Sequence
  Description of Artificial Sequence: Synthetic oligonucleotide
  Antisense strand to SEQ ID NO: 1533974
uaagaaagaacugaccuau

SEQ ID NO: 1533976 - RNA, 19 nt, Artificial Sequence
  Description of Artificial Sequence: Synthetic oligonucleotide
  Sense strand starting at position 495 of SEQ ID NO: 1245071
caguguuacaguggccaga

SEQ ID NO: 1533977 - RNA, 19 nt, Artificial Sequence
  Description of Artificial Sequence: Synthetic oligonucleotide
  Antisense strand to SEQ ID NO: 1533976
ucuggccacuguaacacug

SEQ ID NO: 1533978 - RNA, 19 nt, Artificial Sequence
  Description of Artificial Sequence: Synthetic oligonucleotide
  Sense strand starting at position 497 of SEQ ID NO: 1245071
guguuacaguggccagaua

SEQ ID NO: 1533979 - RNA, 19 nt, Artificial Sequence
  Description of Artificial Sequence: Synthetic oligonucleotide
  Antisense strand to SEQ ID NO: 1533978
uaucuggccacuguaacac

SEQ ID NO: 1533980 - RNA, 19 nt, Artificial Sequence
  Description of Artificial Sequence: Synthetic oligonucleotide
  Sense strand starting at position 555 of SEQ ID NO: 1245071
cccugcuguugaucauuaa

SEQ ID NO: 1533981 - RNA, 19 nt, Artificial Sequence
  Description of Artificial Sequence: Synthetic oligonucleotide
  Antisense strand to SEQ ID NO: 1533980
uuaaugaucaacagcaggg

SEQ ID NO: 1533982 - RNA, 19 nt, Artificial Sequence
  Description of Artificial Sequence: Synthetic oligonucleotide
  Sense strand starting at position 556 of SEQ ID NO: 1245071
ccugcuguugaucauuaaa

SEQ ID NO: 1533983 - RNA, 19 nt, Artificial Sequence
  Description of Artificial Sequence: Synthetic oligonucleotide
  Antisense strand to SEQ ID NO: 1533982
uuuaaugaucaacagcagg

SEQ ID NO: 1533984 - RNA, 19 nt, Artificial Sequence
  Description of Artificial Sequence: Synthetic oligonucleotide
  Sense strand starting at position 559 of SEQ ID NO: 1245071
gcuguugaucauuaaaccu

SEQ ID NO: 1533985 - RNA, 19 nt, Artificial Sequence
  Description of Artificial Sequence: Synthetic oligonucleotide
  Antisense strand to SEQ ID NO: 1533984
agguuuaaugaucaacagc

SEQ ID NO: 1533986 - RNA, 19 nt, Artificial Sequence
  Description of Artificial Sequence: Synthetic oligonucleotide
  Sense strand starting at position 751 of SEQ ID NO: 1245071
cacgcugacuuguuaauuu

SEQ ID NO: 1533987 - RNA, 19 nt, Artificial Sequence
  Description of Artificial Sequence: Synthetic oligonucleotide
  Antisense strand to SEQ ID NO: 1533986
aaauuaacaagucagcgug

SEQ ID NO: 1533988 - RNA, 19 nt, Artificial Sequence
  Description of Artificial Sequence: Synthetic oligonucleotide
  Sense strand starting at position 762 of SEQ ID NO: 1245071
guuaauuuccagugcuagg

SEQ ID NO: 1533989 - RNA, 19 nt, Artificial Sequence
  Description of Artificial Sequence: Synthetic oligonucleotide
  Antisense strand to SEQ ID NO: 1533988
ccuagcacuggaaauuaac

SEQ ID NO: 1533990 - RNA, 19 nt, Artificial Sequence
  Description of Artificial Sequence: Synthetic oligonucleotide
  Sense strand starting at position 1001 of SEQ ID NO: 1245071
ucugaaagugucuauacca

SEQ ID NO: 1533991 - RNA, 19 nt, Artificial Sequence
  Description of Artificial Sequence: Synthetic oligonucleotide
  Antisense strand to SEQ ID NO: 1533990
ugguauagacacuuucaga

SEQ ID NO: 1533992 - RNA, 19 nt, Artificial Sequence
  Description of Artificial Sequence: Synthetic oligonucleotide
  Sense strand starting at position 1168 of SEQ ID NO: 1245071
gcaagcgauuauuucuguu

SEQ ID NO: 1533993 - RNA, 19 nt, Artificial Sequence
  Description of Artificial Sequence: Synthetic oligonucleotide
  Antisense strand to SEQ ID NO: 1533992
aacagaaauaaucgcuugc

SEQ ID NO: 1533994 - RNA, 19 nt, Artificial Sequence
  Description of Artificial Sequence: Synthetic oligonucleotide
  Sense strand starting at position 1170 of SEQ ID NO: 1245071
aagcgauuauuucuguuau

SEQ ID NO: 1533995 - RNA, 19 nt, Artificial Sequence
  Description of Artificial Sequence: Synthetic oligonucleotide
  Antisense strand to SEQ ID NO: 1533994
auaacagaaauaaucgcuu

SEQ ID NO: 1533996 - RNA, 19 nt, Artificial Sequence
  Description of Artificial Sequence: Synthetic oligonucleotide
  Sense strand starting at position 1172 of SEQ ID NO: 1245071
gcgauuauuucuguuauac

SEQ ID NO: 1533997 - RNA, 19 nt, Artificial Sequence
  Description of Artificial Sequence: Synthetic oligonucleotide
  Antisense strand to SEQ ID NO: 1533996
guauaacagaaauaaucgc

SEQ ID NO: 1533998 - RNA, 19 nt, Artificial Sequence
  Description of Artificial Sequence: Synthetic oligonucleotide
  Sense strand starting at position 1285 of SEQ ID NO: 1245071
aaaggaugccaccgugaca

SEQ ID NO: 1533999 - RNA, 19 nt, Artificial Sequence
  Description of Artificial Sequence: Synthetic oligonucleotide
  Antisense strand to SEQ ID NO: 1533998
ugucacgguggcauccuuu

SEQ ID NO: 1534000 - RNA, 19 nt, Artificial Sequence
  Description of Artificial Sequence: Synthetic oligonucleotide
  Sense strand starting at position 1423 of SEQ ID NO: 1245071
cgucuaaacccuugacuac

SEQ ID NO: 1534001 - RNA, 19 nt, Artificial Sequence
  Description of Artificial Sequence: Synthetic oligonucleotide
  Antisense strand to SEQ ID NO: 1534000
guagucaaggguuuagacg

SEQ ID NO: 1534002 - RNA, 19 nt, Artificial Sequence
  Description of Artificial Sequence: Synthetic oligonucleotide
  Sense strand starting at position 1433 of SEQ ID NO: 1245071
cuugacuacgaguguaacu

SEQ ID NO: 1534003 - RNA, 19 nt, Artificial Sequence
  Description of Artificial Sequence: Synthetic oligonucleotide
  Antisense strand to SEQ ID NO: 1534002
aguuacacucguagucaag

SEQ ID NO: 1534004 - RNA, 19 nt, Artificial Sequence
  Description of Artificial Sequence: Synthetic oligonucleotide
  Sense strand starting at position 1435 of SEQ ID NO: 1245071
ugacuacgaguguaacuaa

SEQ ID NO: 1534005 - RNA, 19 nt, Artificial Sequence
  Description of Artificial Sequence: Synthetic oligonucleotide
  Antisense strand to SEQ ID NO: 1534004
uuaguuacacucguaguca

SEQ ID NO: 1534006 - RNA, 19 nt, Artificial Sequence
  Description of Artificial Sequence: Synthetic oligonucleotide
  Sense strand starting at position 1438 of SEQ ID NO: 1245071
cuacgaguguaacuaauga

SEQ ID NO: 1534007 - RNA, 19 nt, Artificial Sequence
  Description of Artificial Sequence: Synthetic oligonucleotide
  Antisense strand to SEQ ID NO: 1534006
ucauuaguuacacucguag

SEQ ID NO: 1534008 - RNA, 19 nt, Artificial Sequence
  Description of Artificial Sequence: Synthetic oligonucleotide
  Sense strand starting at position 2291 of SEQ ID NO: 1245071
ccuugcuuucgggaggauu

SEQ ID NO: 1534009 - RNA, 19 nt, Artificial Sequence
  Description of Artificial Sequence: Synthetic oligonucleotide
  Antisense strand to SEQ ID NO: 1534008
aauccucccgaaagcaagg

SEQ ID NO: 1534010 - RNA, 19 nt, Artificial Sequence
  Description of Artificial Sequence: Synthetic oligonucleotide
  Sense strand starting at position 2347 of SEQ ID NO: 1245071
gagcuucgucagggagaag

SEQ ID NO: 1534011 - RNA, 19 nt, Artificial Sequence
  Description of Artificial Sequence: Synthetic oligonucleotide
  Antisense strand to SEQ ID NO: 1534010
cuucucccugacgaagcuc

SEQ ID NO: 1534012 - RNA, 19 nt, Artificial Sequence
  Description of Artificial Sequence: Synthetic oligonucleotide
  Sense strand starting at position 2492 of SEQ ID NO: 1245071
gcauacacacuuuauuagu

SEQ ID NO: 1534013 - RNA, 19 nt, Artificial Sequence
  Description of Artificial Sequence: Synthetic oligonucleotide
  Antisense strand to SEQ ID NO: 1534012
acuaauaaaguguguaugc

SEQ ID NO: 1534014 - RNA, 19 nt, Artificial Sequence
  Description of Artificial Sequence: Synthetic oligonucleotide
  Sense strand starting at position 2590 of SEQ ID NO: 1245071
aaugaugcauuugagaaga

SEQ ID NO: 1534015 - RNA, 19 nt, Artificial Sequence
  Description of Artificial Sequence: Synthetic oligonucleotide
  Antisense strand to SEQ ID NO: 1534014
ucuucucaaaugcaucauu

SEQ ID NO: 1534016 - RNA, 19 nt, Artificial Sequence
  Description of Artificial Sequence: Synthetic oligonucleotide
  Sense strand starting at position 2592 of SEQ ID NO: 1245071
ugaugcauuugagaagaaa

SEQ ID NO: 1534017 - RNA, 19 nt, Artificial Sequence
  Description of Artificial Sequence: Synthetic oligonucleotide
  Antisense strand to SEQ ID NO: 1534016
uuucuucucaaaugcauca

SEQ ID NO: 1534018 - RNA, 19 nt, Artificial Sequence
  Description of Artificial Sequence: Synthetic oligonucleotide
  Sense strand starting at position 2633 of SEQ ID NO: 1245071
gcgauacauuucuaagaga

SEQ ID NO: 1534019 - RNA, 19 nt, Artificial Sequence
  Description of Artificial Sequence: Synthetic oligonucleotide
  Antisense strand to SEQ ID NO: 1534018
ucucuuagaaauguaucgc

SEQ ID NO: 1534020 - RNA, 19 nt, Artificial Sequence
  Description of Artificial Sequence: Synthetic oligonucleotide
  Sense strand starting at position 2636 of SEQ ID NO: 1245071
auacauuucuaagagaguc

SEQ ID NO: 1534021 - RNA, 19 nt, Artificial Sequence
  Description of Artificial Sequence: Synthetic oligonucleotide
  Antisense strand to SEQ ID NO: 1534020
gacucucuuagaaauguau

SEQ ID NO: 1534022 - RNA, 19 nt, Artificial Sequence
  Description of Artificial Sequence: Synthetic oligonucleotide
  Sense strand starting at position 2648 of SEQ ID NO: 1245071
gagagucacuaggagaaau

SEQ ID NO: 1534023 - RNA, 19 nt, Artificial Sequence
  Description of Artificial Sequence: Synthetic oligonucleotide
  Antisense strand to SEQ ID NO: 1534022
auuucuccuagugacucuc

SEQ ID NO: 1534024 - RNA, 19 nt, Artificial Sequence
  Description of Artificial Sequence: Synthetic oligonucleotide
  Sense strand starting at position 2682 of SEQ ID NO: 1245071
aaauuaguggaagguaagu

SEQ ID NO: 1534025 - RNA, 19 nt, Artificial Sequence
  Description of Artificial Sequence: Synthetic oligonucleotide
  Antisense strand to SEQ ID NO: 1534024
acuuaccuuccacuaauuu

SEQ ID NO: 1534026 - RNA, 19 nt, Artificial Sequence
  Description of Artificial Sequence: Synthetic oligonucleotide
  Sense strand starting at position 2688 of SEQ ID NO: 1245071
guggaagguaaguguuacu

SEQ ID NO: 1534027 - RNA, 19 nt, Artificial Sequence
  Description of Artificial Sequence: Synthetic oligonucleotide
  Antisense strand to SEQ ID NO: 1534026
aguaacacuuaccuuccac

SEQ ID NO: 1534028 - RNA, 19 nt, Artificial Sequence
  Description of Artificial Sequence: Synthetic oligonucleotide
  Sense strand starting at position 2693 of SEQ ID NO: 1245071
agguaaguguuacuuggga

SEQ ID NO: 1534029 - RNA, 19 nt, Artificial Sequence
  Description of Artificial Sequence: Synthetic oligonucleotide
  Antisense strand to SEQ ID NO: 1534028
ucccaaguaacacuuaccu

SEQ ID NO: 1534030 - RNA, 19 nt, Artificial Sequence
  Description of Artificial Sequence: Synthetic oligonucleotide
  Sense strand starting at position 2695 of SEQ ID NO: 1245071
guaaguguuacuugggaag

SEQ ID NO: 1534031 - RNA, 19 nt, Artificial Sequence
  Description of Artificial Sequence: Synthetic oligonucleotide
  Antisense strand to SEQ ID NO: 1534030
cuucccaaguaacacuuac

SEQ ID NO: 1534032 - RNA, 19 nt, Artificial Sequence
  Description of Artificial Sequence: Synthetic oligonucleotide
  Sense strand starting at position 2794 of SEQ ID NO: 1245071
gugccacucccagaggaau

SEQ ID NO: 1534033 - RNA, 19 nt, Artificial Sequence
  Description of Artificial Sequence: Synthetic oligonucleotide
  Antisense strand to SEQ ID NO: 1534032
auuccucugggaguggcac

SEQ ID NO: 1534034 - RNA, 19 nt, Artificial Sequence
  Description of Artificial Sequence: Synthetic oligonucleotide
  Sense strand starting at position 2818 of SEQ ID NO: 1245071
cugcuuauucccuguagga

SEQ ID NO: 1534035 - RNA, 19 nt, Artificial Sequence
  Description of Artificial Sequence: Synthetic oligonucleotide
  Antisense strand to SEQ ID NO: 1534034
uccuacagggaauaagcag

SEQ ID NO: 1534036 - RNA, 19 nt, Artificial Sequence
  Description of Artificial Sequence: Synthetic oligonucleotide
  Sense strand starting at position 2820 of SEQ ID NO: 1245071
gcuuauucccuguaggaaa

SEQ ID NO: 1534037 - RNA, 19 nt, Artificial Sequence
  Description of Artificial Sequence: Synthetic oligonucleotide
  Antisense strand to SEQ ID NO: 1534036
uuuccuacagggaauaagc

SEQ ID NO: 1534038 - RNA, 19 nt, Artificial Sequence
  Description of Artificial Sequence: Synthetic oligonucleotide
  Sense strand starting at position 2866 of SEQ ID NO: 1245071
cuacaauuucuccgguguu

SEQ ID NO: 1534039 - RNA, 19 nt, Artificial Sequence
  Description of Artificial Sequence: Synthetic oligonucleotide
  Antisense strand to SEQ ID NO: 1534038
aacaccggagaaauuguag

SEQ ID NO: 1534040 - RNA, 19 nt, Artificial Sequence
  Description of Artificial Sequence: Synthetic oligonucleotide
  Sense strand starting at position 2957 of SEQ ID NO: 1245071
agggaaaccuaauauagau

SEQ ID NO: 1534041 - RNA, 19 nt, Artificial Sequence
  Description of Artificial Sequence: Synthetic oligonucleotide
  Antisense strand to SEQ ID NO: 1534040
aucuauauuagguuucccu

SEQ ID NO: 1534042 - RNA, 19 nt, Artificial Sequence
  Description of Artificial Sequence: Synthetic oligonucleotide
  Sense strand starting at position 2969 of SEQ ID NO: 1245071
uauagauugugggucagca

SEQ ID NO: 1534043 - RNA, 19 nt, Artificial Sequence
  Description of Artificial Sequence: Synthetic oligonucleotide
  Antisense strand to SEQ ID NO: 1534042
ugcugacccacaaucuaua

SEQ ID NO: 1534044 - RNA, 19 nt, Artificial Sequence
  Description of Artificial Sequence: Synthetic oligonucleotide
  Sense strand starting at position 3187 of SEQ ID NO: 1245071
auuauuaugcuuuguagag

SEQ ID NO: 1534045 - RNA, 19 nt, Artificial Sequence
  Description of Artificial Sequence: Synthetic oligonucleotide
  Antisense strand to SEQ ID NO: 1534044
cucuacaaagcauaauaau

SEQ ID NO: 1534046 - RNA, 19 nt, Artificial Sequence
  Description of Artificial Sequence: Synthetic oligonucleotide
  Sense strand starting at position 3188 of SEQ ID NO: 1245071
uuauuaugcuuuguagaga

SEQ ID NO: 1534047 - RNA, 19 nt, Artificial Sequence
  Description of Artificial Sequence: Synthetic oligonucleotide
  Antisense strand to SEQ ID NO: 1534046
ucucuacaaagcauaauaa

SEQ ID NO: 1534048 - RNA, 19 nt, Artificial Sequence
  Description of Artificial Sequence: Synthetic oligonucleotide
  Sense strand starting at position 3629 of SEQ ID NO: 1245071
ugagguguucaguaguauc

SEQ ID NO: 1534049 - RNA, 19 nt, Artificial Sequence
  Description of Artificial Sequence: Synthetic oligonucleotide
  Antisense strand to SEQ ID NO: 1534048
gauacuacugaacaccuca

SEQ ID NO: 1534050 - RNA, 19 nt, Artificial Sequence
  Description of Artificial Sequence: Synthetic oligonucleotide
  Sense strand starting at position 3667 of SEQ ID NO: 1245071
ugaaauacguuuccagaaa

SEQ ID NO: 1534051 - RNA, 19 nt, Artificial Sequence
  Description of Artificial Sequence: Synthetic oligonucleotide
  Antisense strand to SEQ ID NO: 1534050
uuucuggaaacguauuuca

SEQ ID NO: 1534052 - RNA, 19 nt, Artificial Sequence
  Description of Artificial Sequence: Synthetic oligonucleotide
  Sense strand starting at position 3759 of SEQ ID NO: 1245071
guauuuguccauuaguguc

SEQ ID NO: 1534053 - RNA, 19 nt, Artificial Sequence
  Description of Artificial Sequence: Synthetic oligonucleotide
  Antisense strand to SEQ ID NO: 1534052
gacacuaauggacaaauac

SEQ ID NO: 1534054 - RNA, 19 nt, Artificial Sequence
  Description of Artificial Sequence: Synthetic oligonucleotide
  Sense strand starting at position 3947 of SEQ ID NO: 1245071
ugaauaaagcuaugcaaau

SEQ ID NO: 1534055 - RNA, 19 nt, Artificial Sequence
  Description of Artificial Sequence: Synthetic oligonucleotide
  Antisense strand to SEQ ID NO: 1534054
auuugcauagcuuuauuca

SEQ ID NO: 1534056 - RNA, 19 nt, Artificial Sequence
  Description of Artificial Sequence: Synthetic oligonucleotide
  Sense strand starting at position 50 of SEQ ID NO: 1245072
ccauuuguccauugcggga

SEQ ID NO: 1534057 - RNA, 19 nt, Artificial Sequence
  Description of Artificial Sequence: Synthetic oligonucleotide
  Antisense strand to SEQ ID NO: 1534056
ucccgcaauggacaaaugg

SEQ ID NO: 1534058 - RNA, 19 nt, Artificial Sequence
  Description of Artificial Sequence: Synthetic oligonucleotide
  Sense strand starting at position 63 of SEQ ID NO: 1245072
gcgggaggaaguuaaguuu

SEQ ID NO: 1534059 - RNA, 19 nt, Artificial Sequence
  Description of Artificial Sequence: Synthetic oligonucleotide
  Antisense strand to SEQ ID NO: 1534058
aaacuuaacuuccucccgc

SEQ ID NO: 1534060 - RNA, 19 nt, Artificial Sequence
  Description of Artificial Sequence: Synthetic oligonucleotide
  Sense strand starting at position 93 of SEQ ID NO: 1245072
ccuucuuacuugggccaga

SEQ ID NO: 1534061 - RNA, 19 nt, Artificial Sequence
  Description of Artificial Sequence: Synthetic oligonucleotide
  Antisense strand to SEQ ID NO: 1534060
ucuggcccaaguaagaagg

SEQ ID NO: 1534062 - RNA, 19 nt, Artificial Sequence
  Description of Artificial Sequence: Synthetic oligonucleotide
  Sense strand starting at position 94 of SEQ ID NO: 1245072
cuucuuacuugggccagau

SEQ ID NO: 1534063 - RNA, 19 nt, Artificial Sequence
  Description of Artificial Sequence: Synthetic oligonucleotide
  Antisense strand to SEQ ID NO: 1534062
aucuggcccaaguaagaag

SEQ ID NO: 1534064 - RNA, 19 nt, Artificial Sequence
  Description of Artificial Sequence: Synthetic oligonucleotide
  Sense strand starting at position 122 of SEQ ID NO: 1245072
agguaagcaugauaggaga

SEQ ID NO: 1534065 - RNA, 19 nt, Artificial Sequence
  Description of Artificial Sequence: Synthetic oligonucleotide
  Antisense strand to SEQ ID NO: 1534064
ucuccuaucaugcuuaccu

SEQ ID NO: 1534066 - RNA, 19 nt, Artificial Sequence
  Description of Artificial Sequence: Synthetic oligonucleotide
  Sense strand starting at position 141 of SEQ ID NO: 1245072
gagaaauucuagcagagaa

SEQ ID NO: 1534067 - RNA, 19 nt, Artificial Sequence
  Description of Artificial Sequence: Synthetic oligonucleotide
  Antisense strand to SEQ ID NO: 1534066
uucucugcuagaauuucuc

SEQ ID NO: 1534068 - RNA, 19 nt, Artificial Sequence
  Description of Artificial Sequence: Synthetic oligonucleotide
  Sense strand starting at position 216 of SEQ ID NO: 1245072
caagguagggucuaugcua

SEQ ID NO: 1534069 - RNA, 19 nt, Artificial Sequence
  Description of Artificial Sequence: Synthetic oligonucleotide
  Antisense strand to SEQ ID NO: 1534068
uagcauagacccuaccuug

SEQ ID NO: 1534070 - RNA, 19 nt, Artificial Sequence
  Description of Artificial Sequence: Synthetic oligonucleotide
  Sense strand starting at position 454 of SEQ ID NO: 1245072
cgccuaaugccgccagaua

SEQ ID NO: 1534071 - RNA, 19 nt, Artificial Sequence
  Description of Artificial Sequence: Synthetic oligonucleotide
  Antisense strand to SEQ ID NO: 1534070
uaucuggcggcauuaggcg

SEQ ID NO: 1534072 - RNA, 19 nt, Artificial Sequence
  Description of Artificial Sequence: Synthetic oligonucleotide
  Sense strand starting at position 455 of SEQ ID NO: 1245072
gccuaaugccgccagauaa

SEQ ID NO: 1534073 - RNA, 19 nt, Artificial Sequence
  Description of Artificial Sequence: Synthetic oligonucleotide
  Antisense strand to SEQ ID NO: 1534072
uuaucuggcggcauuaggc

SEQ ID NO: 1534074 - RNA, 19 nt, Artificial Sequence
  Description of Artificial Sequence: Synthetic oligonucleotide
  Sense strand starting at position 587 of SEQ ID NO: 1245072
ccuaguuggaggcaaugua

SEQ ID NO: 1534075 - RNA, 19 nt, Artificial Sequence
  Description of Artificial Sequence: Synthetic oligonucleotide
  Antisense strand to SEQ ID NO: 1534074
uacauugccuccaacuagg

SEQ ID NO: 1534076 - RNA, 19 nt, Artificial Sequence
  Description of Artificial Sequence: Synthetic oligonucleotide
  Sense strand starting at position 612 of SEQ ID NO: 1245072
acuuuccauugcucaggaa

SEQ ID NO: 1534077 - RNA, 19 nt, Artificial Sequence
  Description of Artificial Sequence: Synthetic oligonucleotide
  Antisense strand to SEQ ID NO: 1534076
uuccugagcaauggaaagu

SEQ ID NO: 1534078 - RNA, 19 nt, Artificial Sequence
  Description of Artificial Sequence: Synthetic oligonucleotide
  Sense strand starting at position 613 of SEQ ID NO: 1245072
cuuuccauugcucaggaaa

SEQ ID NO: 1534079 - RNA, 19 nt, Artificial Sequence
  Description of Artificial Sequence: Synthetic oligonucleotide
  Antisense strand to SEQ ID NO: 1534078
uuuccugagcaauggaaag

SEQ ID NO: 1534080 - RNA, 19 nt, Artificial Sequence
  Description of Artificial Sequence: Synthetic oligonucleotide
  Sense strand starting at position 616 of SEQ ID NO: 1245072
uccauugcucaggaaagca

SEQ ID NO: 1534081 - RNA, 19 nt, Artificial Sequence
  Description of Artificial Sequence: Synthetic oligonucleotide
  Antisense strand to SEQ ID NO: 1534080
ugcuuuccugagcaaugga

SEQ ID NO: 1534082 - RNA, 19 nt, Artificial Sequence
  Description of Artificial Sequence: Synthetic oligonucleotide
  Sense strand starting at position 833 of SEQ ID NO: 1245072
ucaggaaguuugugaucuc

SEQ ID NO: 1534083 - RNA, 19 nt, Artificial Sequence
  Description of Artificial Sequence: Synthetic oligonucleotide
  Antisense strand to SEQ ID NO: 1534082
gagaucacaaacuuccuga

SEQ ID NO: 1534084 - RNA, 19 nt, Artificial Sequence
  Description of Artificial Sequence: Synthetic oligonucleotide
  Sense strand starting at position 836 of SEQ ID NO: 1245072
ggaaguuugugaucucgug

SEQ ID NO: 1534085 - RNA, 19 nt, Artificial Sequence
  Description of Artificial Sequence: Synthetic oligonucleotide
  Antisense strand to SEQ ID NO: 1534084
cacgagaucacaaacuucc

SEQ ID NO: 1534086 - RNA, 19 nt, Artificial Sequence
  Description of Artificial Sequence: Synthetic oligonucleotide
  Sense strand starting at position 938 of SEQ ID NO: 1245072
gaaugcugggcucgugcaa

SEQ ID NO: 1534087 - RNA, 19 nt, Artificial Sequence
  Description of Artificial Sequence: Synthetic oligonucleotide
  Antisense strand to SEQ ID NO: 1534086
uugcacgagcccagcauuc

SEQ ID NO: 1534088 - RNA, 19 nt, Artificial Sequence
  Description of Artificial Sequence: Synthetic oligonucleotide
  Sense strand starting at position 2289 of SEQ ID NO: 1245072
ggccggguguccguauuua

SEQ ID NO: 1534089 - RNA, 19 nt, Artificial Sequence
  Description of Artificial Sequence: Synthetic oligonucleotide
  Antisense strand to SEQ ID NO: 1534088
uaaauacggacacccggcc

SEQ ID NO: 1534090 - RNA, 19 nt, Artificial Sequence
  Description of Artificial Sequence: Synthetic oligonucleotide
  Sense strand starting at position 2654 of SEQ ID NO: 1245072
cugugcuccugggagaguu

SEQ ID NO: 1534091 - RNA, 19 nt, Artificial Sequence
  Description of Artificial Sequence: Synthetic oligonucleotide
  Antisense strand to SEQ ID NO: 1534090
aacucucccaggagcacag

SEQ ID NO: 1534092 - RNA, 19 nt, Artificial Sequence
  Description of Artificial Sequence: Synthetic oligonucleotide
  Sense strand starting at position 2663 of SEQ ID NO: 1245072
ugggagaguugugggucua

SEQ ID NO: 1534093 - RNA, 19 nt, Artificial Sequence
  Description of Artificial Sequence: Synthetic oligonucleotide
  Antisense strand to SEQ ID NO: 1534092
uagacccacaacucuccca

SEQ ID NO: 1534094 - RNA, 19 nt, Artificial Sequence
  Description of Artificial Sequence: Synthetic oligonucleotide
  Sense strand starting at position 2664 of SEQ ID NO: 1245072
gggagaguugugggucuac

SEQ ID NO: 1534095 - RNA, 19 nt, Artificial Sequence
  Description of Artificial Sequence: Synthetic oligonucleotide
  Antisense strand to SEQ ID NO: 1534094
guagacccacaacucuccc

SEQ ID NO: 1534096 - RNA, 19 nt, Artificial Sequence
  Description of Artificial Sequence: Synthetic oligonucleotide
  Sense strand starting at position 2903 of SEQ ID NO: 1245072
cacgccuugggaugcauaa

SEQ ID NO: 1534097 - RNA, 19 nt, Artificial Sequence
  Description of Artificial Sequence: Synthetic oligonucleotide
  Antisense strand to SEQ ID NO: 1534096
uuaugcaucccaaggcgug

SEQ ID NO: 1534098 - RNA, 19 nt, Artificial Sequence
  Description of Artificial Sequence: Synthetic oligonucleotide
  Sense strand starting at position 2905 of SEQ ID NO: 1245072
cgccuugggaugcauaaga

SEQ ID NO: 1534099 - RNA, 19 nt, Artificial Sequence
  Description of Artificial Sequence: Synthetic oligonucleotide
  Antisense strand to SEQ ID NO: 1534098
ucuuaugcaucccaaggcg

SEQ ID NO: 1534100 - RNA, 19 nt, Artificial Sequence
  Description of Artificial Sequence: Synthetic oligonucleotide
  Sense strand starting at position 2932 of SEQ ID NO: 1245072
gcacgaacaucuuacaugu

SEQ ID NO: 1534101 - RNA, 19 nt, Artificial Sequence
  Description of Artificial Sequence: Synthetic oligonucleotide
  Antisense strand to SEQ ID NO: 1534100
acauguaagauguucgugc

SEQ ID NO: 1534102 - RNA, 19 nt, Artificial Sequence
  Description of Artificial Sequence: Synthetic oligonucleotide
  Sense strand starting at position 3040 of SEQ ID NO: 1245072
ucugaaaugugcuccauuu

SEQ ID NO: 1534103 - RNA, 19 nt, Artificial Sequence
  Description of Artificial Sequence: Synthetic oligonucleotide
  Antisense strand to SEQ ID NO: 1534102
aaauggagcacauuucaga

SEQ ID NO: 1534104 - RNA, 19 nt, Artificial Sequence
  Description of Artificial Sequence: Synthetic oligonucleotide
  Sense strand starting at position 3262 of SEQ ID NO: 1245072
cucugaaucugggaggagu

SEQ ID NO: 1534105 - RNA, 19 nt, Artificial Sequence
  Description of Artificial Sequence: Synthetic oligonucleotide
  Antisense strand to SEQ ID NO: 1534104
acuccucccagauucagag

SEQ ID NO: 1534106 - RNA, 19 nt, Artificial Sequence
  Description of Artificial Sequence: Synthetic oligonucleotide
  Sense strand starting at position 3440 of SEQ ID NO: 1245072
ugaauuaagcucugugaca

SEQ ID NO: 1534107 - RNA, 19 nt, Artificial Sequence
  Description of Artificial Sequence: Synthetic oligonucleotide
  Antisense strand to SEQ ID NO: 1534106
ugucacagagcuuaauuca

SEQ ID NO: 1534108 - RNA, 19 nt, Artificial Sequence
  Description of Artificial Sequence: Synthetic oligonucleotide
  Sense strand starting at position 3441 of SEQ ID NO: 1245072
gaauuaagcucugugacac

SEQ ID NO: 1534109 - RNA, 19 nt, Artificial Sequence
  Description of Artificial Sequence: Synthetic oligonucleotide
  Antisense strand to SEQ ID NO: 1534108
gugucacagagcuuaauuc

SEQ ID NO: 1534110 - RNA, 19 nt, Artificial Sequence
  Description of Artificial Sequence: Synthetic oligonucleotide
  Sense strand starting at position 3495 of SEQ ID NO: 1245072
uguguuucagaucaacgga

SEQ ID NO: 1534111 - RNA, 19 nt, Artificial Sequence
  Description of Artificial Sequence: Synthetic oligonucleotide
  Antisense strand to SEQ ID NO: 1534110
uccguugaucugaaacaca

SEQ ID NO: 1534112 - RNA, 19 nt, Artificial Sequence
  Description of Artificial Sequence: Synthetic oligonucleotide
  Sense strand starting at position 3680 of SEQ ID NO: 1245072
uacauuugcucaggacaga

SEQ ID NO: 1534113 - RNA, 19 nt, Artificial Sequence
  Description of Artificial Sequence: Synthetic oligonucleotide
  Antisense strand to SEQ ID NO: 1534112
ucuguccugagcaaaugua

SEQ ID NO: 1534114 - RNA, 19 nt, Artificial Sequence
  Description of Artificial Sequence: Synthetic oligonucleotide
  Sense strand starting at position 3709 of SEQ ID NO: 1245072
ggcccuuuacaugaacaau

SEQ ID NO: 1534115 - RNA, 19 nt, Artificial Sequence
  Description of Artificial Sequence: Synthetic oligonucleotide
  Antisense strand to SEQ ID NO: 1534114
auuguucauguaaagggcc

SEQ ID NO: 1534116 - RNA, 19 nt, Artificial Sequence
  Description of Artificial Sequence: Synthetic oligonucleotide
  Sense strand starting at position 3718 of SEQ ID NO: 1245072
caugaacaaucguuguuau

SEQ ID NO: 1534117 - RNA, 19 nt, Artificial Sequence
  Description of Artificial Sequence: Synthetic oligonucleotide
  Antisense strand to SEQ ID NO: 1534116
auaacaacgauuguucaug

SEQ ID NO: 1534118 - RNA, 19 nt, Artificial Sequence
  Description of Artificial Sequence: Synthetic oligonucleotide
  Sense strand starting at position 3719 of SEQ ID NO: 1245072
augaacaaucguuguuaua

SEQ ID NO: 1534119 - RNA, 19 nt, Artificial Sequence
  Description of Artificial Sequence: Synthetic oligonucleotide
  Antisense strand to SEQ ID NO: 1534118
uauaacaacgauuguucau

SEQ ID NO: 1534120 - RNA, 19 nt, Artificial Sequence
  Description of Artificial Sequence: Synthetic oligonucleotide
  Sense strand starting at position 3721 of SEQ ID NO: 1245072
gaacaaucguuguuauauu

SEQ ID NO: 1534121 - RNA, 19 nt, Artificial Sequence
  Description of Artificial Sequence: Synthetic oligonucleotide
  Antisense strand to SEQ ID NO: 1534120
aauauaacaacgauuguuc

SEQ ID NO: 1534122 - RNA, 19 nt, Artificial Sequence
  Description of Artificial Sequence: Synthetic oligonucleotide
  Sense strand starting at position 3775 of SEQ ID NO: 1245072
ggagccuggugucuguuua

SEQ ID NO: 1534123 - RNA, 19 nt, Artificial Sequence
  Description of Artificial Sequence: Synthetic oligonucleotide
  Antisense strand to SEQ ID NO: 1534122
uaaacagacaccaggcucc

SEQ ID NO: 1534124 - RNA, 19 nt, Artificial Sequence
  Description of Artificial Sequence: Synthetic oligonucleotide
  Sense strand starting at position 3825 of SEQ ID NO: 1245072
aauggccagcucugugaaa

SEQ ID NO: 1534125 - RNA, 19 nt, Artificial Sequence
  Description of Artificial Sequence: Synthetic oligonucleotide
  Antisense strand to SEQ ID NO: 1534124
uuucacagagcuggccauu

SEQ ID NO: 1534126 - RNA, 19 nt, Artificial Sequence
  Description of Artificial Sequence: Synthetic oligonucleotide
  Sense strand starting at position 3826 of SEQ ID NO: 1245072
auggccagcucugugaaau

SEQ ID NO: 1534127 - RNA, 19 nt, Artificial Sequence
  Description of Artificial Sequence: Synthetic oligonucleotide
  Antisense strand to SEQ ID NO: 1534126
auuucacagagcuggccau

SEQ ID NO: 1534128 - RNA, 19 nt, Artificial Sequence
  Description of Artificial Sequence: Synthetic oligonucleotide
  Sense strand starting at position 3827 of SEQ ID NO: 1245072
uggccagcucugugaaauu

SEQ ID NO: 1534129 - RNA, 19 nt, Artificial Sequence
  Description of Artificial Sequence: Synthetic oligonucleotide
  Antisense strand to SEQ ID NO: 1534128
aauuucacagagcuggcca

SEQ ID NO: 1534130 - RNA, 19 nt, Artificial Sequence
  Description of Artificial Sequence: Synthetic oligonucleotide
  Sense strand starting at position 3866 of SEQ ID NO: 1245072
uuggcuaacuaccuugaaa

SEQ ID NO: 1534131 - RNA, 19 nt, Artificial Sequence
  Description of Artificial Sequence: Synthetic oligonucleotide
  Antisense strand to SEQ ID NO: 1534130
uuucaagguaguuagccaa

SEQ ID NO: 1534132 - RNA, 19 nt, Artificial Sequence
  Description of Artificial Sequence: Synthetic oligonucleotide
  Sense strand starting at position 3868 of SEQ ID NO: 1245072
ggcuaacuaccuugaaacu

SEQ ID NO: 1534133 - RNA, 19 nt, Artificial Sequence
  Description of Artificial Sequence: Synthetic oligonucleotide
  Antisense strand to SEQ ID NO: 1534132
aguuucaagguaguuagcc

SEQ ID NO: 1534134 - RNA, 19 nt, Artificial Sequence
  Description of Artificial Sequence: Synthetic oligonucleotide
  Sense strand starting at position 3943 of SEQ ID NO: 1245072
ggcaguguuaagugaaaga

SEQ ID NO: 1534135 - RNA, 19 nt, Artificial Sequence
  Description of Artificial Sequence: Synthetic oligonucleotide
  Antisense strand to SEQ ID NO: 1534134
ucuuucacuuaacacugcc

SEQ ID NO: 1534136 - RNA, 19 nt, Artificial Sequence
  Description of Artificial Sequence: Synthetic oligonucleotide
  Sense strand starting at position 1090 of SEQ ID NO: 1245073
ggccggguguccguauuua

SEQ ID NO: 1534137 - RNA, 19 nt, Artificial Sequence
  Description of Artificial Sequence: Synthetic oligonucleotide
  Antisense strand to SEQ ID NO: 1534136
uaaauacggacacccggcc

SEQ ID NO: 1534138 - RNA, 19 nt, Artificial Sequence
  Description of Artificial Sequence: Synthetic oligonucleotide
  Sense strand starting at position 1455 of SEQ ID NO: 1245073
cugugcuccugggagaguu

SEQ ID NO: 1534139 - RNA, 19 nt, Artificial Sequence
  Description of Artificial Sequence: Synthetic oligonucleotide
  Antisense strand to SEQ ID NO: 1534138
aacucucccaggagcacag

SEQ ID NO: 1534140 - RNA, 19 nt, Artificial Sequence
  Description of Artificial Sequence: Synthetic oligonucleotide
  Sense strand starting at position 1464 of SEQ ID NO: 1245073
ugggagaguugugggucua

SEQ ID NO: 1534141 - RNA, 19 nt, Artificial Sequence
  Description of Artificial Sequence: Synthetic oligonucleotide
  Antisense strand to SEQ ID NO: 1534140
uagacccacaacucuccca

SEQ ID NO: 1534142 - RNA, 19 nt, Artificial Sequence
  Description of Artificial Sequence: Synthetic oligonucleotide
  Sense strand starting at position 1465 of SEQ ID NO: 1245073
gggagaguugugggucuac

SEQ ID NO: 1534143 - RNA, 19 nt, Artificial Sequence
  Description of Artificial Sequence: Synthetic oligonucleotide
  Antisense strand to SEQ ID NO: 1534142
guagacccacaacucuccc

SEQ ID NO: 1534144 - RNA, 19 nt, Artificial Sequence
  Description of Artificial Sequence: Synthetic oligonucleotide
  Sense strand starting at position 1626 of SEQ ID NO: 1245073
ccguaaagcuaucgcuaac

SEQ ID NO: 1534145 - RNA, 19 nt, Artificial Sequence
  Description of Artificial Sequence: Synthetic oligonucleotide
  Antisense strand to SEQ ID NO: 1534144
guuagcgauagcuuuacgg

SEQ ID NO: 1534146 - RNA, 19 nt, Artificial Sequence
  Description of Artificial Sequence: Synthetic oligonucleotide
  Sense strand starting at position 1704 of SEQ ID NO: 1245073
cacgccuugggaugcauaa

SEQ ID NO: 1534147 - RNA, 19 nt, Artificial Sequence
  Description of Artificial Sequence: Synthetic oligonucleotide
  Antisense strand to SEQ ID NO: 1534146
uuaugcaucccaaggcgug

SEQ ID NO: 1534148 - RNA, 19 nt, Artificial Sequence
  Description of Artificial Sequence: Synthetic oligonucleotide
  Sense strand starting at position 1706 of SEQ ID NO: 1245073
cgccuugggaugcauaaga

SEQ ID NO: 1534149 - RNA, 19 nt, Artificial Sequence
  Description of Artificial Sequence: Synthetic oligonucleotide
  Antisense strand to SEQ ID NO: 1534148
ucuuaugcaucccaaggcg

SEQ ID NO: 1534150 - RNA, 19 nt, Artificial Sequence
  Description of Artificial Sequence: Synthetic oligonucleotide
  Sense strand starting at position 1733 of SEQ ID NO: 1245073
gcacgaacaucuuacaugu

SEQ ID NO: 1534151 - RNA, 19 nt, Artificial Sequence
  Description of Artificial Sequence: Synthetic oligonucleotide
  Antisense strand to SEQ ID NO: 1534150
acauguaagauguucgugc

SEQ ID NO: 1534152 - RNA, 19 nt, Artificial Sequence
  Description of Artificial Sequence: Synthetic oligonucleotide
  Sense strand starting at position 1841 of SEQ ID NO: 1245073
ucugaaaugugcuccauuu

SEQ ID NO: 1534153 - RNA, 19 nt, Artificial Sequence
  Description of Artificial Sequence: Synthetic oligonucleotide
  Antisense strand to SEQ ID NO: 1534152
aaauggagcacauuucaga

SEQ ID NO: 1534154 - RNA, 19 nt, Artificial Sequence
  Description of Artificial Sequence: Synthetic oligonucleotide
  Sense strand starting at position 2063 of SEQ ID NO: 1245073
cucugaaucugggaggagu

SEQ ID NO: 1534155 - RNA, 19 nt, Artificial Sequence
  Description of Artificial Sequence: Synthetic oligonucleotide
  Antisense strand to SEQ ID NO: 1534154
acuccucccagauucagag

SEQ ID NO: 1534156 - RNA, 19 nt, Artificial Sequence
  Description of Artificial Sequence: Synthetic oligonucleotide
  Sense strand starting at position 2241 of SEQ ID NO: 1245073
ugaauuaagcucugugaca

SEQ ID NO: 1534157 - RNA, 19 nt, Artificial Sequence
  Description of Artificial Sequence: Synthetic oligonucleotide
  Antisense strand to SEQ ID NO: 1534156
ugucacagagcuuaauuca

SEQ ID NO: 1534158 - RNA, 19 nt, Artificial Sequence
  Description of Artificial Sequence: Synthetic oligonucleotide
  Sense strand starting at position 2242 of SEQ ID NO: 1245073
gaauuaagcucugugacac

SEQ ID NO: 1534159 - RNA, 19 nt, Artificial Sequence
  Description of Artificial Sequence: Synthetic oligonucleotide
  Antisense strand to SEQ ID NO: 1534158
gugucacagagcuuaauuc

SEQ ID NO: 1534160 - RNA, 19 nt, Artificial Sequence
  Description of Artificial Sequence: Synthetic oligonucleotide
  Sense strand starting at position 2296 of SEQ ID NO: 1245073
uguguuucagaucaacgga

SEQ ID NO: 1534161 - RNA, 19 nt, Artificial Sequence
  Description of Artificial Sequence: Synthetic oligonucleotide
  Antisense strand to SEQ ID NO: 1534160
uccguugaucugaaacaca

SEQ ID NO: 1534162 - RNA, 19 nt, Artificial Sequence
  Description of Artificial Sequence: Synthetic oligonucleotide
  Sense strand starting at position 2481 of SEQ ID NO: 1245073
uacauuugcucaggacaga

SEQ ID NO: 1534163 - RNA, 19 nt, Artificial Sequence
  Description of Artificial Sequence: Synthetic oligonucleotide
  Antisense strand to SEQ ID NO: 1534162
ucuguccugagcaaaugua

SEQ ID NO: 1534164 - RNA, 19 nt, Artificial Sequence
  Description of Artificial Sequence: Synthetic oligonucleotide
  Sense strand starting at position 2510 of SEQ ID NO: 1245073
ggcccuuuacaugaacaau

SEQ ID NO: 1534165 - RNA, 19 nt, Artificial Sequence
  Description of Artificial Sequence: Synthetic oligonucleotide
  Antisense strand to SEQ ID NO: 1534164
auuguucauguaaagggcc

SEQ ID NO: 1534166 - RNA, 19 nt, Artificial Sequence
  Description of Artificial Sequence: Synthetic oligonucleotide
  Sense strand starting at position 2519 of SEQ ID NO: 1245073
caugaacaaucguuguuau

SEQ ID NO: 1534167 - RNA, 19 nt, Artificial Sequence
  Description of Artificial Sequence: Synthetic oligonucleotide
  Antisense strand to SEQ ID NO: 1534166
auaacaacgauuguucaug

SEQ ID NO: 1534168 - RNA, 19 nt, Artificial Sequence
  Description of Artificial Sequence: Synthetic oligonucleotide
  Sense strand starting at position 2520 of SEQ ID NO: 1245073
augaacaaucguuguuaua

SEQ ID NO: 1534169 - RNA, 19 nt, Artificial Sequence
  Description of Artificial Sequence: Synthetic oligonucleotide
  Antisense strand to SEQ ID NO: 1534168
uauaacaacgauuguucau

SEQ ID NO: 1534170 - RNA, 19 nt, Artificial Sequence
  Description of Artificial Sequence: Synthetic oligonucleotide
  Sense strand starting at position 2522 of SEQ ID NO: 1245073
gaacaaucguuguuauauu

SEQ ID NO: 1534171 - RNA, 19 nt, Artificial Sequence
  Description of Artificial Sequence: Synthetic oligonucleotide
  Antisense strand to SEQ ID NO: 1534170
aauauaacaacgauuguuc

SEQ ID NO: 1534172 - RNA, 19 nt, Artificial Sequence
  Description of Artificial Sequence: Synthetic oligonucleotide
  Sense strand starting at position 2576 of SEQ ID NO: 1245073
ggagccuggugucuguuua

SEQ ID NO: 1534173 - RNA, 19 nt, Artificial Sequence
  Description of Artificial Sequence: Synthetic oligonucleotide
  Antisense strand to SEQ ID NO: 1534172
uaaacagacaccaggcucc

SEQ ID NO: 1534174 - RNA, 19 nt, Artificial Sequence
  Description of Artificial Sequence: Synthetic oligonucleotide
  Sense strand starting at position 2626 of SEQ ID NO: 1245073
aauggccagcucugugaaa

SEQ ID NO: 1534175 - RNA, 19 nt, Artificial Sequence
  Description of Artificial Sequence: Synthetic oligonucleotide
  Antisense strand to SEQ ID NO: 1534174
uuucacagagcuggccauu

SEQ ID NO: 1534176 - RNA, 19 nt, Artificial Sequence
  Description of Artificial Sequence: Synthetic oligonucleotide
  Sense strand starting at position 2627 of SEQ ID NO: 1245073
auggccagcucugugaaau

SEQ ID NO: 1534177 - RNA, 19 nt, Artificial Sequence
  Description of Artificial Sequence: Synthetic oligonucleotide
  Antisense strand to SEQ ID NO: 1534176
auuucacagagcuggccau

SEQ ID NO: 1534178 - RNA, 19 nt, Artificial Sequence
  Description of Artificial Sequence: Synthetic oligonucleotide
  Sense strand starting at position 2628 of SEQ ID NO: 1245073
uggccagcucugugaaauu

SEQ ID NO: 1534179 - RNA, 19 nt, Artificial Sequence
  Description of Artificial Sequence: Synthetic oligonucleotide
  Antisense strand to SEQ ID NO: 1534178
aauuucacagagcuggcca

SEQ ID NO: 1534180 - RNA, 19 nt, Artificial Sequence
  Description of Artificial Sequence: Synthetic oligonucleotide
  Sense strand starting at position 2667 of SEQ ID NO: 1245073
uuggcuaacuaccuugaaa

SEQ ID NO: 1534181 - RNA, 19 nt, Artificial Sequence
  Description of Artificial Sequence: Synthetic oligonucleotide
  Antisense strand to SEQ ID NO: 1534180
uuucaagguaguuagccaa

SEQ ID NO: 1534182 - RNA, 19 nt, Artificial Sequence
  Description of Artificial Sequence: Synthetic oligonucleotide
  Sense strand starting at position 2669 of SEQ ID NO: 1245073
ggcuaacuaccuugaaacu

SEQ ID NO: 1534183 - RNA, 19 nt, Artificial Sequence
  Description of Artificial Sequence: Synthetic oligonucleotide
  Antisense strand to SEQ ID NO: 1534182
aguuucaagguaguuagcc

SEQ ID NO: 1534184 - RNA, 19 nt, Artificial Sequence
  Description of Artificial Sequence: Synthetic oligonucleotide
  Sense strand starting at position 2744 of SEQ ID NO: 1245073
ggcaguguuaagugaaaga

SEQ ID NO: 1534185 - RNA, 19 nt, Artificial Sequence
  Description of Artificial Sequence: Synthetic oligonucleotide
  Antisense strand to SEQ ID NO: 1534184
ucuuucacuuaacacugcc

SEQ ID NO: 1534186 - RNA, 19 nt, Artificial Sequence
  Description of Artificial Sequence: Synthetic oligonucleotide
  Sense strand starting at position 2861 of SEQ ID NO: 1245073
ggguaucacuaacaauauc

SEQ ID NO: 1534187 - RNA, 19 nt, Artificial Sequence
  Description of Artificial Sequence: Synthetic oligonucleotide
  Antisense strand to SEQ ID NO: 1534186
gauauuguuagugauaccc

SEQ ID NO: 1534188 - RNA, 19 nt, Artificial Sequence
  Description of Artificial Sequence: Synthetic oligonucleotide
  Sense strand starting at position 2872 of SEQ ID NO: 1245073
acaauaucuucuguggaaa

SEQ ID NO: 1534189 - RNA, 19 nt, Artificial Sequence
  Description of Artificial Sequence: Synthetic oligonucleotide
  Antisense strand to SEQ ID NO: 1534188
uuuccacagaagauauugu

SEQ ID NO: 1534190 - RNA, 19 nt, Artificial Sequence
  Description of Artificial Sequence: Synthetic oligonucleotide
  Sense strand starting at position 3537 of SEQ ID NO: 1245073
acacguaugagcugucaua

SEQ ID NO: 1534191 - RNA, 19 nt, Artificial Sequence
  Description of Artificial Sequence: Synthetic oligonucleotide
  Antisense strand to SEQ ID NO: 1534190
uaugacagcucauacgugu

SEQ ID NO: 1534192 - RNA, 19 nt, Artificial Sequence
  Description of Artificial Sequence: Synthetic oligonucleotide
  Sense strand starting at position 3912 of SEQ ID NO: 1245073
ccugcuguguugugauuau

SEQ ID NO: 1534193 - RNA, 19 nt, Artificial Sequence
  Description of Artificial Sequence: Synthetic oligonucleotide
  Antisense strand to SEQ ID NO: 1534192
auaaucacaacacagcagg

SEQ ID NO: 1534194 - RNA, 19 nt, Artificial Sequence
  Description of Artificial Sequence: Synthetic oligonucleotide
  Sense strand starting at position 3916 of SEQ ID NO: 1245073
cuguguugugauuaucuuu

SEQ ID NO: 1534195 - RNA, 19 nt, Artificial Sequence
  Description of Artificial Sequence: Synthetic oligonucleotide
  Antisense strand to SEQ ID NO: 1534194
aaagauaaucacaacacag

SEQ ID NO: 1534196 - RNA, 19 nt, Artificial Sequence
  Description of Artificial Sequence: Synthetic oligonucleotide
  Sense strand starting at position 3919 of SEQ ID NO: 1245073
uguugugauuaucuuucca

SEQ ID NO: 1534197 - RNA, 19 nt, Artificial Sequence
  Description of Artificial Sequence: Synthetic oligonucleotide
  Antisense strand to SEQ ID NO: 1534196
uggaaagauaaucacaaca

SEQ ID NO: 1534198 - RNA, 19 nt, Artificial Sequence
  Description of Artificial Sequence: Synthetic oligonucleotide
  Sense strand starting at position 3921 of SEQ ID NO: 1245073
uugugauuaucuuuccaug

SEQ ID NO: 1534199 - RNA, 19 nt, Artificial Sequence
  Description of Artificial Sequence: Synthetic oligonucleotide
  Antisense strand to SEQ ID NO: 1534198
cauggaaagauaaucacaa

SEQ ID NO: 1534200 - RNA, 19 nt, Artificial Sequence
  Description of Artificial Sequence: Synthetic oligonucleotide
  Sense strand starting at position 3923 of SEQ ID NO: 1245073
gugauuaucuuuccaugua

SEQ ID NO: 1534201 - RNA, 19 nt, Artificial Sequence
  Description of Artificial Sequence: Synthetic oligonucleotide
  Antisense strand to SEQ ID NO: 1534200
uacauggaaagauaaucac

SEQ ID NO: 1534202 - RNA, 19 nt, Artificial Sequence
  Description of Artificial Sequence: Synthetic oligonucleotide
  Sense strand starting at position 3924 of SEQ ID NO: 1245073
ugauuaucuuuccauguag

SEQ ID NO: 1534203 - RNA, 19 nt, Artificial Sequence
  Description of Artificial Sequence: Synthetic oligonucleotide
  Antisense strand to SEQ ID NO: 1534202
cuacauggaaagauaauca

SEQ ID NO: 1534204 - RNA, 19 nt, Artificial Sequence
  Description of Artificial Sequence: Synthetic oligonucleotide
  Sense strand starting at position 438 of SEQ ID NO: 1245074
agcagauucuuuccaggac

SEQ ID NO: 1534205 - RNA, 19 nt, Artificial Sequence
  Description of Artificial Sequence: Synthetic oligonucleotide
  Antisense strand to SEQ ID NO: 1534204
guccuggaaagaaucugcu

SEQ ID NO: 1534206 - RNA, 19 nt, Artificial Sequence
  Description of Artificial Sequence: Synthetic oligonucleotide
  Sense strand starting at position 770 of SEQ ID NO: 1245074
caugguuauuucgcugaca

SEQ ID NO: 1534207 - RNA, 19 nt, Artificial Sequence
  Description of Artificial Sequence: Synthetic oligonucleotide
  Antisense strand to SEQ ID NO: 1534206
ugucagcgaaauaaccaug

SEQ ID NO: 1534208 - RNA, 19 nt, Artificial Sequence
  Description of Artificial Sequence: Synthetic oligonucleotide
  Sense strand starting at position 771 of SEQ ID NO: 1245074
augguuauuucgcugacau

SEQ ID NO: 1534209 - RNA, 19 nt, Artificial Sequence
  Description of Artificial Sequence: Synthetic oligonucleotide
  Antisense strand to SEQ ID NO: 1534208
augucagcgaaauaaccau

SEQ ID NO: 1534210 - RNA, 19 nt, Artificial Sequence
  Description of Artificial Sequence: Synthetic oligonucleotide
  Sense strand starting at position 772 of SEQ ID NO: 1245074
ugguuauuucgcugacaug

SEQ ID NO: 1534211 - RNA, 19 nt, Artificial Sequence
  Description of Artificial Sequence: Synthetic oligonucleotide
  Antisense strand to SEQ ID NO: 1534210
caugucagcgaaauaacca

SEQ ID NO: 1534212 - RNA, 19 nt, Artificial Sequence
  Description of Artificial Sequence: Synthetic oligonucleotide
  Sense strand starting at position 783 of SEQ ID NO: 1245074
cugacaugaguguguacaa

SEQ ID NO: 1534213 - RNA, 19 nt, Artificial Sequence
  Description of Artificial Sequence: Synthetic oligonucleotide
  Antisense strand to SEQ ID NO: 1534212
uuguacacacucaugucag

SEQ ID NO: 1534214 - RNA, 19 nt, Artificial Sequence
  Description of Artificial Sequence: Synthetic oligonucleotide
  Sense strand starting at position 784 of SEQ ID NO: 1245074
ugacaugaguguguacaaa

SEQ ID NO: 1534215 - RNA, 19 nt, Artificial Sequence
  Description of Artificial Sequence: Synthetic oligonucleotide
  Antisense strand to SEQ ID NO: 1534214
uuuguacacacucauguca

SEQ ID NO: 1534216 - RNA, 19 nt, Artificial Sequence
  Description of Artificial Sequence: Synthetic oligonucleotide
  Sense strand starting at position 831 of SEQ ID NO: 1245074
acagauuccuaguugaggu

SEQ ID NO: 1534217 - RNA, 19 nt, Artificial Sequence
  Description of Artificial Sequence: Synthetic oligonucleotide
  Antisense strand to SEQ ID NO: 1534216
accucaacuaggaaucugu

SEQ ID NO: 1534218 - RNA, 19 nt, Artificial Sequence
  Description of Artificial Sequence: Synthetic oligonucleotide
  Sense strand starting at position 1068 of SEQ ID NO: 1245074
guuacaaugccgcugucaa

SEQ ID NO: 1534219 - RNA, 19 nt, Artificial Sequence
  Description of Artificial Sequence: Synthetic oligonucleotide
  Antisense strand to SEQ ID NO: 1534218
uugacagcggcauuguaac

SEQ ID NO: 1534220 - RNA, 19 nt, Artificial Sequence
  Description of Artificial Sequence: Synthetic oligonucleotide
  Sense strand starting at position 1079 of SEQ ID NO: 1245074
gcugucaaugaagagucaa

SEQ ID NO: 1534221 - RNA, 19 nt, Artificial Sequence
  Description of Artificial Sequence: Synthetic oligonucleotide
  Antisense strand to SEQ ID NO: 1534220
uugacucuucauugacagc

SEQ ID NO: 1534222 - RNA, 19 nt, Artificial Sequence
  Description of Artificial Sequence: Synthetic oligonucleotide
  Sense strand starting at position 1115 of SEQ ID NO: 1245074
ggugucuuuaaauggaaau

SEQ ID NO: 1534223 - RNA, 19 nt, Artificial Sequence
  Description of Artificial Sequence: Synthetic oligonucleotide
  Antisense strand to SEQ ID NO: 1534222
auuuccauuuaaagacacc

SEQ ID NO: 1534224 - RNA, 19 nt, Artificial Sequence
  Description of Artificial Sequence: Synthetic oligonucleotide
  Sense strand starting at position 1116 of SEQ ID NO: 1245074
gugucuuuaaauggaaaug

SEQ ID NO: 1534225 - RNA, 19 nt, Artificial Sequence
  Description of Artificial Sequence: Synthetic oligonucleotide
  Antisense strand to SEQ ID NO: 1534224
cauuuccauuuaaagacac

SEQ ID NO: 1534226 - RNA, 19 nt, Artificial Sequence
  Description of Artificial Sequence: Synthetic oligonucleotide
  Sense strand starting at position 1147 of SEQ ID NO: 1245074
gguauacauugaucagaug

SEQ ID NO: 1534227 - RNA, 19 nt, Artificial Sequence
  Description of Artificial Sequence: Synthetic oligonucleotide
  Antisense strand to SEQ ID NO: 1534226
caucugaucaauguauacc

SEQ ID NO: 1534228 - RNA, 19 nt, Artificial Sequence
  Description of Artificial Sequence: Synthetic oligonucleotide
  Sense strand starting at position 1206 of SEQ ID NO: 1245074
ccauguauuugccuccgga

SEQ ID NO: 1534229 - RNA, 19 nt, Artificial Sequence
  Description of Artificial Sequence: Synthetic oligonucleotide
  Antisense strand to SEQ ID NO: 1534228
uccggaggcaaauacaugg

SEQ ID NO: 1534230 - RNA, 19 nt, Artificial Sequence
  Description of Artificial Sequence: Synthetic oligonucleotide
  Sense strand starting at position 1585 of SEQ ID NO: 1245074
ccuucuuauccaugugaga

SEQ ID NO: 1534231 - RNA, 19 nt, Artificial Sequence
  Description of Artificial Sequence: Synthetic oligonucleotide
  Antisense strand to SEQ ID NO: 1534230
ucucacauggauaagaagg

SEQ ID NO: 1534232 - RNA, 19 nt, Artificial Sequence
  Description of Artificial Sequence: Synthetic oligonucleotide
  Sense strand starting at position 1761 of SEQ ID NO: 1245074
caggcugagccucagagau

SEQ ID NO: 1534233 - RNA, 19 nt, Artificial Sequence
  Description of Artificial Sequence: Synthetic oligonucleotide
  Antisense strand to SEQ ID NO: 1534232
aucucugaggcucagccug

SEQ ID NO: 1534234 - RNA, 19 nt, Artificial Sequence
  Description of Artificial Sequence: Synthetic oligonucleotide
  Sense strand starting at position 2253 of SEQ ID NO: 1245074
gggagaugccaaugcuaau

SEQ ID NO: 1534235 - RNA, 19 nt, Artificial Sequence
  Description of Artificial Sequence: Synthetic oligonucleotide
  Antisense strand to SEQ ID NO: 1534234
auuagcauuggcaucuccc

SEQ ID NO: 1534236 - RNA, 19 nt, Artificial Sequence
  Description of Artificial Sequence: Synthetic oligonucleotide
  Sense strand starting at position 2314 of SEQ ID NO: 1245074
acuggagacuuccucacuu

SEQ ID NO: 1534237 - RNA, 19 nt, Artificial Sequence
  Description of Artificial Sequence: Synthetic oligonucleotide
  Antisense strand to SEQ ID NO: 1534236
aagugaggaagucuccagu

SEQ ID NO: 1534238 - RNA, 19 nt, Artificial Sequence
  Description of Artificial Sequence: Synthetic oligonucleotide
  Sense strand starting at position 2369 of SEQ ID NO: 1245074
guuugcuaggucuauaaua

SEQ ID NO: 1534239 - RNA, 19 nt, Artificial Sequence
  Description of Artificial Sequence: Synthetic oligonucleotide
  Antisense strand to SEQ ID NO: 1534238
uauuauagaccuagcaaac

SEQ ID NO: 1534240 - RNA, 19 nt, Artificial Sequence
  Description of Artificial Sequence: Synthetic oligonucleotide
  Sense strand starting at position 2371 of SEQ ID NO: 1245074
uugcuaggucuauaauaug

SEQ ID NO: 1534241 - RNA, 19 nt, Artificial Sequence
  Description of Artificial Sequence: Synthetic oligonucleotide
  Antisense strand to SEQ ID NO: 1534240
cauauuauagaccuagcaa

SEQ ID NO: 1534242 - RNA, 19 nt, Artificial Sequence
  Description of Artificial Sequence: Synthetic oligonucleotide
  Sense strand starting at position 2377 of SEQ ID NO: 1245074
ggucuauaauaugcauuau

SEQ ID NO: 1534243 - RNA, 19 nt, Artificial Sequence
  Description of Artificial Sequence: Synthetic oligonucleotide
  Antisense strand to SEQ ID NO: 1534242
auaaugcauauuauagacc

SEQ ID NO: 1534244 - RNA, 19 nt, Artificial Sequence
  Description of Artificial Sequence: Synthetic oligonucleotide
  Sense strand starting at position 2455 of SEQ ID NO: 1245074
gugauuuguuucccaacuc

SEQ ID NO: 1534245 - RNA, 19 nt, Artificial Sequence
  Description of Artificial Sequence: Synthetic oligonucleotide
  Antisense strand to SEQ ID NO: 1534244
gaguugggaaacaaaucac

SEQ ID NO: 1534246 - RNA, 19 nt, Artificial Sequence
  Description of Artificial Sequence: Synthetic oligonucleotide
  Sense strand starting at position 2662 of SEQ ID NO: 1245074
ugaaguuacgcauaacgaa

SEQ ID NO: 1534247 - RNA, 19 nt, Artificial Sequence
  Description of Artificial Sequence: Synthetic oligonucleotide
  Antisense strand to SEQ ID NO: 1534246
uucguuaugcguaacuuca

SEQ ID NO: 1534248 - RNA, 19 nt, Artificial Sequence
  Description of Artificial Sequence: Synthetic oligonucleotide
  Sense strand starting at position 2698 of SEQ ID NO: 1245074
agcucuacaggcuaaauua

SEQ ID NO: 1534249 - RNA, 19 nt, Artificial Sequence
  Description of Artificial Sequence: Synthetic oligonucleotide
  Antisense strand to SEQ ID NO: 1534248
uaauuuagccuguagagcu

SEQ ID NO: 1534250 - RNA, 19 nt, Artificial Sequence
  Description of Artificial Sequence: Synthetic oligonucleotide
  Sense strand starting at position 2852 of SEQ ID NO: 1245074
agucauucuguacacacau

SEQ ID NO: 1534251 - RNA, 19 nt, Artificial Sequence
  Description of Artificial Sequence: Synthetic oligonucleotide
  Antisense strand to SEQ ID NO: 1534250
auguguguacagaaugacu

SEQ ID NO: 1534252 - RNA, 19 nt, Artificial Sequence
  Description of Artificial Sequence: Synthetic oligonucleotide
  Sense strand starting at position 2939 of SEQ ID NO: 1245074
gcaaguguugaacaguaca

SEQ ID NO: 1534253 - RNA, 19 nt, Artificial Sequence
  Description of Artificial Sequence: Synthetic oligonucleotide
  Antisense strand to SEQ ID NO: 1534252
uguacuguucaacacuugc

SEQ ID NO: 1534254 - RNA, 19 nt, Artificial Sequence
  Description of Artificial Sequence: Synthetic oligonucleotide
  Sense strand starting at position 2951 of SEQ ID NO: 1245074
caguacagguguccagaaa

SEQ ID NO: 1534255 - RNA, 19 nt, Artificial Sequence
  Description of Artificial Sequence: Synthetic oligonucleotide
  Antisense strand to SEQ ID NO: 1534254
uuucuggacaccuguacug

SEQ ID NO: 1534256 - RNA, 19 nt, Artificial Sequence
  Description of Artificial Sequence: Synthetic oligonucleotide
  Sense strand starting at position 3090 of SEQ ID NO: 1245074
agggaucccugcucuacau

SEQ ID NO: 1534257 - RNA, 19 nt, Artificial Sequence
  Description of Artificial Sequence: Synthetic oligonucleotide
  Antisense strand to SEQ ID NO: 1534256
auguagagcagggaucccu

SEQ ID NO: 1534258 - RNA, 19 nt, Artificial Sequence
  Description of Artificial Sequence: Synthetic oligonucleotide
  Sense strand starting at position 3102 of SEQ ID NO: 1245074
ucuacaugacuuggugaga

SEQ ID NO: 1534259 - RNA, 19 nt, Artificial Sequence
  Description of Artificial Sequence: Synthetic oligonucleotide
  Antisense strand to SEQ ID NO: 1534258
ucucaccaagucauguaga

SEQ ID NO: 1534260 - RNA, 19 nt, Artificial Sequence
  Description of Artificial Sequence: Synthetic oligonucleotide
  Sense strand starting at position 3103 of SEQ ID NO: 1245074
cuacaugacuuggugagaa

SEQ ID NO: 1534261 - RNA, 19 nt, Artificial Sequence
  Description of Artificial Sequence: Synthetic oligonucleotide
  Antisense strand to SEQ ID NO: 1534260
uucucaccaagucauguag

SEQ ID NO: 1534262 - RNA, 19 nt, Artificial Sequence
  Description of Artificial Sequence: Synthetic oligonucleotide
  Sense strand starting at position 3214 of SEQ ID NO: 1245074
agagucccauuagauauuu

SEQ ID NO: 1534263 - RNA, 19 nt, Artificial Sequence
  Description of Artificial Sequence: Synthetic oligonucleotide
  Antisense strand to SEQ ID NO: 1534262
aaauaucuaaugggacucu

SEQ ID NO: 1534264 - RNA, 19 nt, Artificial Sequence
  Description of Artificial Sequence: Synthetic oligonucleotide
  Sense strand starting at position 3223 of SEQ ID NO: 1245074
uuagauauuuacugagaac

SEQ ID NO: 1534265 - RNA, 19 nt, Artificial Sequence
  Description of Artificial Sequence: Synthetic oligonucleotide
  Antisense strand to SEQ ID NO: 1534264
guucucaguaaauaucuaa

SEQ ID NO: 1534266 - RNA, 19 nt, Artificial Sequence
  Description of Artificial Sequence: Synthetic oligonucleotide
  Sense strand starting at position 3235 of SEQ ID NO: 1245074
ugagaacuauguucuaggu

SEQ ID NO: 1534267 - RNA, 19 nt, Artificial Sequence
  Description of Artificial Sequence: Synthetic oligonucleotide
  Antisense strand to SEQ ID NO: 1534266
accuagaacauaguucuca

SEQ ID NO: 1534268 - RNA, 19 nt, Artificial Sequence
  Description of Artificial Sequence: Synthetic oligonucleotide
  Sense strand starting at position 3241 of SEQ ID NO: 1245074
cuauguucuagguacugua

SEQ ID NO: 1534269 - RNA, 19 nt, Artificial Sequence
  Description of Artificial Sequence: Synthetic oligonucleotide
  Antisense strand to SEQ ID NO: 1534268
uacaguaccuagaacauag

SEQ ID NO: 1534270 - RNA, 19 nt, Artificial Sequence
  Description of Artificial Sequence: Synthetic oligonucleotide
  Sense strand starting at position 3255 of SEQ ID NO: 1245074
cuguaagugccuuacagag

SEQ ID NO: 1534271 - RNA, 19 nt, Artificial Sequence
  Description of Artificial Sequence: Synthetic oligonucleotide
  Antisense strand to SEQ ID NO: 1534270
cucuguaaggcacuuacag

SEQ ID NO: 1534272 - RNA, 19 nt, Artificial Sequence
  Description of Artificial Sequence: Synthetic oligonucleotide
  Sense strand starting at position 3366 of SEQ ID NO: 1245074
agauuaaggaaucggcaga

SEQ ID NO: 1534273 - RNA, 19 nt, Artificial Sequence
  Description of Artificial Sequence: Synthetic oligonucleotide
  Antisense strand to SEQ ID NO: 1534272
ucugccgauuccuuaaucu

SEQ ID NO: 1534274 - RNA, 19 nt, Artificial Sequence
  Description of Artificial Sequence: Synthetic oligonucleotide
  Sense strand starting at position 3367 of SEQ ID NO: 1245074
gauuaaggaaucggcagau

SEQ ID NO: 1534275 - RNA, 19 nt, Artificial Sequence
  Description of Artificial Sequence: Synthetic oligonucleotide
  Antisense strand to SEQ ID NO: 1534274
aucugccgauuccuuaauc

SEQ ID NO: 1534276 - RNA, 19 nt, Artificial Sequence
  Description of Artificial Sequence: Synthetic oligonucleotide
  Sense strand starting at position 3393 of SEQ ID NO: 1245074
gugcaauuucccuauggcu

SEQ ID NO: 1534277 - RNA, 19 nt, Artificial Sequence
  Description of Artificial Sequence: Synthetic oligonucleotide
  Antisense strand to SEQ ID NO: 1534276
agccauagggaaauugcac

SEQ ID NO: 1534278 - RNA, 19 nt, Artificial Sequence
  Description of Artificial Sequence: Synthetic oligonucleotide
  Sense strand starting at position 3411 of SEQ ID NO: 1245074
ucgguagaugaucaaguua

SEQ ID NO: 1534279 - RNA, 19 nt, Artificial Sequence
  Description of Artificial Sequence: Synthetic oligonucleotide
  Antisense strand to SEQ ID NO: 1534278
uaacuugaucaucuaccga

SEQ ID NO: 1534280 - RNA, 19 nt, Artificial Sequence
  Description of Artificial Sequence: Synthetic oligonucleotide
  Sense strand starting at position 3763 of SEQ ID NO: 1245074
gaaaucugauuugggacau

SEQ ID NO: 1534281 - RNA, 19 nt, Artificial Sequence
  Description of Artificial Sequence: Synthetic oligonucleotide
  Antisense strand to SEQ ID NO: 1534280
augucccaaaucagauuuc

SEQ ID NO: 1534282 - RNA, 19 nt, Artificial Sequence
  Description of Artificial Sequence: Synthetic oligonucleotide
  Sense strand starting at position 3773 of SEQ ID NO: 1245074
uugggacauuucuacaauu

SEQ ID NO: 1534283 - RNA, 19 nt, Artificial Sequence
  Description of Artificial Sequence: Synthetic oligonucleotide
  Antisense strand to SEQ ID NO: 1534282
aauuguagaaaugucccaa

SEQ ID NO: 1534284 - RNA, 19 nt, Artificial Sequence
  Description of Artificial Sequence: Synthetic oligonucleotide
  Sense strand starting at position 163 of SEQ ID NO: 1245075
auugcauggucucuuauuu

SEQ ID NO: 1534285 - RNA, 19 nt, Artificial Sequence
  Description of Artificial Sequence: Synthetic oligonucleotide
  Antisense strand to SEQ ID NO: 1534284
aaauaagagaccaugcaau

SEQ ID NO: 1534286 - RNA, 19 nt, Artificial Sequence
  Description of Artificial Sequence: Synthetic oligonucleotide
  Sense strand starting at position 174 of SEQ ID NO: 1245075
ucuuauuugugagagcuaa

SEQ ID NO: 1534287 - RNA, 19 nt, Artificial Sequence
  Description of Artificial Sequence: Synthetic oligonucleotide
  Antisense strand to SEQ ID NO: 1534286
uuagcucucacaaauaaga

SEQ ID NO: 1534288 - RNA, 19 nt, Artificial Sequence
  Description of Artificial Sequence: Synthetic oligonucleotide
  Sense strand starting at position 344 of SEQ ID NO: 1245075
gucuauagucaauaauugu

SEQ ID NO: 1534289 - RNA, 19 nt, Artificial Sequence
  Description of Artificial Sequence: Synthetic oligonucleotide
  Antisense strand to SEQ ID NO: 1534288
acaauuauugacuauagac

SEQ ID NO: 1534290 - RNA, 19 nt, Artificial Sequence
  Description of Artificial Sequence: Synthetic oligonucleotide
  Sense strand starting at position 449 of SEQ ID NO: 1245075
ugugauuaacauuguaugu

SEQ ID NO: 1534291 - RNA, 19 nt, Artificial Sequence
  Description of Artificial Sequence: Synthetic oligonucleotide
  Antisense strand to SEQ ID NO: 1534290
acauacaauguuaaucaca

SEQ ID NO: 1534292 - RNA, 19 nt, Artificial Sequence
  Description of Artificial Sequence: Synthetic oligonucleotide
  Sense strand starting at position 454 of SEQ ID NO: 1245075
uuaacauuguaugucugaa

SEQ ID NO: 1534293 - RNA, 19 nt, Artificial Sequence
  Description of Artificial Sequence: Synthetic oligonucleotide
  Antisense strand to SEQ ID NO: 1534292
uucagacauacaauguuaa

SEQ ID NO: 1534294 - RNA, 19 nt, Artificial Sequence
  Description of Artificial Sequence: Synthetic oligonucleotide
  Sense strand starting at position 594 of SEQ ID NO: 1245075
ggcagcaugacauguuuga

SEQ ID NO: 1534295 - RNA, 19 nt, Artificial Sequence
  Description of Artificial Sequence: Synthetic oligonucleotide
  Antisense strand to SEQ ID NO: 1534294
ucaaacaugucaugcugcc

SEQ ID NO: 1534296 - RNA, 19 nt, Artificial Sequence
  Description of Artificial Sequence: Synthetic oligonucleotide
  Sense strand starting at position 598 of SEQ ID NO: 1245075
gcaugacauguuugauaca

SEQ ID NO: 1534297 - RNA, 19 nt, Artificial Sequence
  Description of Artificial Sequence: Synthetic oligonucleotide
  Antisense strand to SEQ ID NO: 1534296
uguaucaaacaugucaugc

SEQ ID NO: 1534298 - RNA, 19 nt, Artificial Sequence
  Description of Artificial Sequence: Synthetic oligonucleotide
  Sense strand starting at position 687 of SEQ ID NO: 1245075
uacccaaagugaguagaua

SEQ ID NO: 1534299 - RNA, 19 nt, Artificial Sequence
  Description of Artificial Sequence: Synthetic oligonucleotide
  Antisense strand to SEQ ID NO: 1534298
uaucuacucacuuugggua

SEQ ID NO: 1534300 - RNA, 19 nt, Artificial Sequence
  Description of Artificial Sequence: Synthetic oligonucleotide
  Sense strand starting at position 1414 of SEQ ID NO: 1245075
cgccuuaagcgagaaauac

SEQ ID NO: 1534301 - RNA, 19 nt, Artificial Sequence
  Description of Artificial Sequence: Synthetic oligonucleotide
  Antisense strand to SEQ ID NO: 1534300
guauuucucgcuuaaggcg

SEQ ID NO: 1534302 - RNA, 19 nt, Artificial Sequence
  Description of Artificial Sequence: Synthetic oligonucleotide
  Sense strand starting at position 1423 of SEQ ID NO: 1245075
cgagaaauacgaugccuuu

SEQ ID NO: 1534303 - RNA, 19 nt, Artificial Sequence
  Description of Artificial Sequence: Synthetic oligonucleotide
  Antisense strand to SEQ ID NO: 1534302
aaaggcaucguauuucucg

SEQ ID NO: 1534304 - RNA, 19 nt, Artificial Sequence
  Description of Artificial Sequence: Synthetic oligonucleotide
  Sense strand starting at position 1545 of SEQ ID NO: 1245075
gcgcuaggucuguuuggga

SEQ ID NO: 1534305 - RNA, 19 nt, Artificial Sequence
  Description of Artificial Sequence: Synthetic oligonucleotide
  Antisense strand to SEQ ID NO: 1534304
ucccaaacagaccuagcgc

SEQ ID NO: 1534306 - RNA, 19 nt, Artificial Sequence
  Description of Artificial Sequence: Synthetic oligonucleotide
  Sense strand starting at position 1783 of SEQ ID NO: 1245075
gagacauaauggucuccga

SEQ ID NO: 1534307 - RNA, 19 nt, Artificial Sequence
  Description of Artificial Sequence: Synthetic oligonucleotide
  Antisense strand to SEQ ID NO: 1534306
ucggagaccauuaugucuc

SEQ ID NO: 1534308 - RNA, 19 nt, Artificial Sequence
  Description of Artificial Sequence: Synthetic oligonucleotide
  Sense strand starting at position 2183 of SEQ ID NO: 1245075
cucguuuggaaagaaagua

SEQ ID NO: 1534309 - RNA, 19 nt, Artificial Sequence
  Description of Artificial Sequence: Synthetic oligonucleotide
  Antisense strand to SEQ ID NO: 1534308
uacuuucuuuccaaacgag

SEQ ID NO: 1534310 - RNA, 19 nt, Artificial Sequence
  Description of Artificial Sequence: Synthetic oligonucleotide
  Sense strand starting at position 2280 of SEQ ID NO: 1245075
uucggucaccuuuaggaau

SEQ ID NO: 1534311 - RNA, 19 nt, Artificial Sequence
  Description of Artificial Sequence: Synthetic oligonucleotide
  Antisense strand to SEQ ID NO: 1534310
auuccuaaaggugaccgaa

SEQ ID NO: 1534312 - RNA, 19 nt, Artificial Sequence
  Description of Artificial Sequence: Synthetic oligonucleotide
  Sense strand starting at position 2297 of SEQ ID NO: 1245075
auaauaauuucugccacgu

SEQ ID NO: 1534313 - RNA, 19 nt, Artificial Sequence
  Description of Artificial Sequence: Synthetic oligonucleotide
  Antisense strand to SEQ ID NO: 1534312
acguggcagaaauuauuau

SEQ ID NO: 1534314 - RNA, 19 nt, Artificial Sequence
  Description of Artificial Sequence: Synthetic oligonucleotide
  Sense strand starting at position 2301 of SEQ ID NO: 1245075
uaauuucugccacguugua

SEQ ID NO: 1534315 - RNA, 19 nt, Artificial Sequence
  Description of Artificial Sequence: Synthetic oligonucleotide
  Antisense strand to SEQ ID NO: 1534314
uacaacguggcagaaauua

SEQ ID NO: 1534316 - RNA, 19 nt, Artificial Sequence
  Description of Artificial Sequence: Synthetic oligonucleotide
  Sense strand starting at position 2317 of SEQ ID NO: 1245075
guagacacacagugaauaa

SEQ ID NO: 1534317 - RNA, 19 nt, Artificial Sequence
  Description of Artificial Sequence: Synthetic oligonucleotide
  Antisense strand to SEQ ID NO: 1534316
uuauucacugugugucuac

SEQ ID NO: 1534318 - RNA, 19 nt, Artificial Sequence
  Description of Artificial Sequence: Synthetic oligonucleotide
  Sense strand starting at position 2329 of SEQ ID NO: 1245075
ugaauaauuguaugcaaca

SEQ ID NO: 1534319 - RNA, 19 nt, Artificial Sequence
  Description of Artificial Sequence: Synthetic oligonucleotide
  Antisense strand to SEQ ID NO: 1534318
uguugcauacaauuauuca

SEQ ID NO: 1534320 - RNA, 19 nt, Artificial Sequence
  Description of Artificial Sequence: Synthetic oligonucleotide
  Sense strand starting at position 2384 of SEQ ID NO: 1245075
gggaguucagcaugaaucc

SEQ ID NO: 1534321 - RNA, 19 nt, Artificial Sequence
  Description of Artificial Sequence: Synthetic oligonucleotide
  Antisense strand to SEQ ID NO: 1534320
ggauucaugcugaacuccc

SEQ ID NO: 1534322 - RNA, 19 nt, Artificial Sequence
  Description of Artificial Sequence: Synthetic oligonucleotide
  Sense strand starting at position 2467 of SEQ ID NO: 1245075
gcaacaagucaagguguua

SEQ ID NO: 1534323 - RNA, 19 nt, Artificial Sequence
  Description of Artificial Sequence: Synthetic oligonucleotide
  Antisense strand to SEQ ID NO: 1534322
uaacaccuugacuuguugc

SEQ ID NO: 1534324 - RNA, 19 nt, Artificial Sequence
  Description of Artificial Sequence: Synthetic oligonucleotide
  Sense strand starting at position 2892 of SEQ ID NO: 1245075
cauuuaggcucagguauuu

SEQ ID NO: 1534325 - RNA, 19 nt, Artificial Sequence
  Description of Artificial Sequence: Synthetic oligonucleotide
  Antisense strand to SEQ ID NO: 1534324
aaauaccugagccuaaaug

SEQ ID NO: 1534326 - RNA, 19 nt, Artificial Sequence
  Description of Artificial Sequence: Synthetic oligonucleotide
  Sense strand starting at position 2910 of SEQ ID NO: 1245075
ugggcugggcucuaaauaa

SEQ ID NO: 1534327 - RNA, 19 nt, Artificial Sequence
  Description of Artificial Sequence: Synthetic oligonucleotide
  Antisense strand to SEQ ID NO: 1534326
uuauuuagagcccagccca

SEQ ID NO: 1534328 - RNA, 19 nt, Artificial Sequence
  Description of Artificial Sequence: Synthetic oligonucleotide
  Sense strand starting at position 3120 of SEQ ID NO: 1245075
uccagagcacuuugcaaua

SEQ ID NO: 1534329 - RNA, 19 nt, Artificial Sequence
  Description of Artificial Sequence: Synthetic oligonucleotide
  Antisense strand to SEQ ID NO: 1534328
uauugcaaagugcucugga

SEQ ID NO: 1534330 - RNA, 19 nt, Artificial Sequence
  Description of Artificial Sequence: Synthetic oligonucleotide
  Sense strand starting at position 3151 of SEQ ID NO: 1245075
aggccucagucagcauuau

SEQ ID NO: 1534331 - RNA, 19 nt, Artificial Sequence
  Description of Artificial Sequence: Synthetic oligonucleotide
  Antisense strand to SEQ ID NO: 1534330
auaaugcugacugaggccu

SEQ ID NO: 1534332 - RNA, 19 nt, Artificial Sequence
  Description of Artificial Sequence: Synthetic oligonucleotide
  Sense strand starting at position 3225 of SEQ ID NO: 1245075
cccucuucucgggaaguuu

SEQ ID NO: 1534333 - RNA, 19 nt, Artificial Sequence
  Description of Artificial Sequence: Synthetic oligonucleotide
  Antisense strand to SEQ ID NO: 1534332
aaacuucccgagaagaggg

SEQ ID NO: 1534334 - RNA, 19 nt, Artificial Sequence
  Description of Artificial Sequence: Synthetic oligonucleotide
  Sense strand starting at position 3371 of SEQ ID NO: 1245075
ccagcaccacuuugguaau

SEQ ID NO: 1534335 - RNA, 19 nt, Artificial Sequence
  Description of Artificial Sequence: Synthetic oligonucleotide
  Antisense strand to SEQ ID NO: 1534334
auuaccaaaguggugcugg

SEQ ID NO: 1534336 - RNA, 19 nt, Artificial Sequence
  Description of Artificial Sequence: Synthetic oligonucleotide
  Sense strand starting at position 3400 of SEQ ID NO: 1245075
gugagaugaggcugucaug

SEQ ID NO: 1534337 - RNA, 19 nt, Artificial Sequence
  Description of Artificial Sequence: Synthetic oligonucleotide
  Antisense strand to SEQ ID NO: 1534336
caugacagccucaucucac

SEQ ID NO: 1534338 - RNA, 19 nt, Artificial Sequence
  Description of Artificial Sequence: Synthetic oligonucleotide
  Sense strand starting at position 3415 of SEQ ID NO: 1245075
caugauuucugauagcuug

SEQ ID NO: 1534339 - RNA, 19 nt, Artificial Sequence
  Description of Artificial Sequence: Synthetic oligonucleotide
  Antisense strand to SEQ ID NO: 1534338
caagcuaucagaaaucaug

SEQ ID NO: 1534340 - RNA, 19 nt, Artificial Sequence
  Description of Artificial Sequence: Synthetic oligonucleotide
  Sense strand starting at position 3421 of SEQ ID NO: 1245075
uucugauagcuugguuuau

SEQ ID NO: 1534341 - RNA, 19 nt, Artificial Sequence
  Description of Artificial Sequence: Synthetic oligonucleotide
  Antisense strand to SEQ ID NO: 1534340
auaaaccaagcuaucagaa

SEQ ID NO: 1534342 - RNA, 19 nt, Artificial Sequence
  Description of Artificial Sequence: Synthetic oligonucleotide
  Sense strand starting at position 3422 of SEQ ID NO: 1245075
ucugauagcuugguuuaua

SEQ ID NO: 1534343 - RNA, 19 nt, Artificial Sequence
  Description of Artificial Sequence: Synthetic oligonucleotide
  Antisense strand to SEQ ID NO: 1534342
uauaaaccaagcuaucaga

SEQ ID NO: 1534344 - RNA, 19 nt, Artificial Sequence
  Description of Artificial Sequence: Synthetic oligonucleotide
  Sense strand starting at position 3425 of SEQ ID NO: 1245075
gauagcuugguuuauaaca

SEQ ID NO: 1534345 - RNA, 19 nt, Artificial Sequence
  Description of Artificial Sequence: Synthetic oligonucleotide
  Antisense strand to SEQ ID NO: 1534344
uguuauaaaccaagcuauc

SEQ ID NO: 1534346 - RNA, 19 nt, Artificial Sequence
  Description of Artificial Sequence: Synthetic oligonucleotide
  Sense strand starting at position 3443 of SEQ ID NO: 1245075
acauuuaggugucagagac

SEQ ID NO: 1534347 - RNA, 19 nt, Artificial Sequence
  Description of Artificial Sequence: Synthetic oligonucleotide
  Antisense strand to SEQ ID NO: 1534346
gucucugacaccuaaaugu

SEQ ID NO: 1534348 - RNA, 19 nt, Artificial Sequence
  Description of Artificial Sequence: Synthetic oligonucleotide
  Sense strand starting at position 3549 of SEQ ID NO: 1245075
cuuggugggucaucucaaa

SEQ ID NO: 1534349 - RNA, 19 nt, Artificial Sequence
  Description of Artificial Sequence: Synthetic oligonucleotide
  Antisense strand to SEQ ID NO: 1534348
uuugagaugacccaccaag

SEQ ID NO: 1534350 - RNA, 19 nt, Artificial Sequence
  Description of Artificial Sequence: Synthetic oligonucleotide
  Sense strand starting at position 3569 of SEQ ID NO: 1245075
aucuauuagguguaaggua

SEQ ID NO: 1534351 - RNA, 19 nt, Artificial Sequence
  Description of Artificial Sequence: Synthetic oligonucleotide
  Antisense strand to SEQ ID NO: 1534350
uaccuuacaccuaauagau

SEQ ID NO: 1534352 - RNA, 19 nt, Artificial Sequence
  Description of Artificial Sequence: Synthetic oligonucleotide
  Sense strand starting at position 3574 of SEQ ID NO: 1245075
uuagguguaagguauuaug

SEQ ID NO: 1534353 - RNA, 19 nt, Artificial Sequence
  Description of Artificial Sequence: Synthetic oligonucleotide
  Antisense strand to SEQ ID NO: 1534352
cauaauaccuuacaccuaa

SEQ ID NO: 1534354 - RNA, 19 nt, Artificial Sequence
  Description of Artificial Sequence: Synthetic oligonucleotide
  Sense strand starting at position 3644 of SEQ ID NO: 1245075
gacuguuuggcugagucau

SEQ ID NO: 1534355 - RNA, 19 nt, Artificial Sequence
  Description of Artificial Sequence: Synthetic oligonucleotide
  Antisense strand to SEQ ID NO: 1534354
augacucagccaaacaguc

SEQ ID NO: 1534356 - RNA, 19 nt, Artificial Sequence
  Description of Artificial Sequence: Synthetic oligonucleotide
  Sense strand starting at position 3650 of SEQ ID NO: 1245075
uuggcugagucauucugaa

SEQ ID NO: 1534357 - RNA, 19 nt, Artificial Sequence
  Description of Artificial Sequence: Synthetic oligonucleotide
  Antisense strand to SEQ ID NO: 1534356
uucagaaugacucagccaa

SEQ ID NO: 1534358 - RNA, 19 nt, Artificial Sequence
  Description of Artificial Sequence: Synthetic oligonucleotide
  Sense strand starting at position 3717 of SEQ ID NO: 1245075
ugcccaucgcugcuuugau

SEQ ID NO: 1534359 - RNA, 19 nt, Artificial Sequence
  Description of Artificial Sequence: Synthetic oligonucleotide
  Antisense strand to SEQ ID NO: 1534358
aucaaagcagcgaugggca

SEQ ID NO: 1534360 - RNA, 19 nt, Artificial Sequence
  Description of Artificial Sequence: Synthetic oligonucleotide
  Sense strand starting at position 3878 of SEQ ID NO: 1245075
auccuuacccuauggaagu

SEQ ID NO: 1534361 - RNA, 19 nt, Artificial Sequence
  Description of Artificial Sequence: Synthetic oligonucleotide
  Antisense strand to SEQ ID NO: 1534360
acuuccauaggguaaggau

SEQ ID NO: 1534362 - RNA, 19 nt, Artificial Sequence
  Description of Artificial Sequence: Synthetic oligonucleotide
  Sense strand starting at position 3981 of SEQ ID NO: 1245075
acacacaugucgcuuauca

SEQ ID NO: 1534363 - RNA, 19 nt, Artificial Sequence
  Description of Artificial Sequence: Synthetic oligonucleotide
  Antisense strand to SEQ ID NO: 1534362
ugauaagcgacaugugugu

SEQ ID NO: 1534364 - RNA, 19 nt, Artificial Sequence
  Description of Artificial Sequence: Synthetic oligonucleotide
  Sense strand starting at position 1 of SEQ ID NO: 1245076
acaucaguuguaugggaga

SEQ ID NO: 1534365 - RNA, 19 nt, Artificial Sequence
  Description of Artificial Sequence: Synthetic oligonucleotide
  Antisense strand to SEQ ID NO: 1534364
ucucccauacaacugaugu

SEQ ID NO: 1534366 - RNA, 19 nt, Artificial Sequence
  Description of Artificial Sequence: Synthetic oligonucleotide
  Sense strand starting at position 3 of SEQ ID NO: 1245076
aucaguuguaugggagaac

SEQ ID NO: 1534367 - RNA, 19 nt, Artificial Sequence
  Description of Artificial Sequence: Synthetic oligonucleotide
  Antisense strand to SEQ ID NO: 1534366
guucucccauacaacugau

SEQ ID NO: 1534368 - RNA, 19 nt, Artificial Sequence
  Description of Artificial Sequence: Synthetic oligonucleotide
  Sense strand starting at position 146 of SEQ ID NO: 1245076
gguuaaguggcauaguuca

SEQ ID NO: 1534369 - RNA, 19 nt, Artificial Sequence
  Description of Artificial Sequence: Synthetic oligonucleotide
  Antisense strand to SEQ ID NO: 1534368
ugaacuaugccacuuaacc

SEQ ID NO: 1534370 - RNA, 19 nt, Artificial Sequence
  Description of Artificial Sequence: Synthetic oligonucleotide
  Sense strand starting at position 487 of SEQ ID NO: 1245076
uccagcacuguugacaaua

SEQ ID NO: 1534371 - RNA, 19 nt, Artificial Sequence
  Description of Artificial Sequence: Synthetic oligonucleotide
  Antisense strand to SEQ ID NO: 1534370
uauugucaacagugcugga

SEQ ID NO: 1534372 - RNA, 19 nt, Artificial Sequence
  Description of Artificial Sequence: Synthetic oligonucleotide
  Sense strand starting at position 691 of SEQ ID NO: 1245076
auugcauggucucuuauuu

SEQ ID NO: 1534373 - RNA, 19 nt, Artificial Sequence
  Description of Artificial Sequence: Synthetic oligonucleotide
  Antisense strand to SEQ ID NO: 1534372
aaauaagagaccaugcaau

SEQ ID NO: 1534374 - RNA, 19 nt, Artificial Sequence
  Description of Artificial Sequence: Synthetic oligonucleotide
  Sense strand starting at position 702 of SEQ ID NO: 1245076
ucuuauuugugagagcuaa

SEQ ID NO: 1534375 - RNA, 19 nt, Artificial Sequence
  Description of Artificial Sequence: Synthetic oligonucleotide
  Antisense strand to SEQ ID NO: 1534374
uuagcucucacaaauaaga

SEQ ID NO: 1534376 - RNA, 19 nt, Artificial Sequence
  Description of Artificial Sequence: Synthetic oligonucleotide
  Sense strand starting at position 872 of SEQ ID NO: 1245076
gucuauagucaauaauugu

SEQ ID NO: 1534377 - RNA, 19 nt, Artificial Sequence
  Description of Artificial Sequence: Synthetic oligonucleotide
  Antisense strand to SEQ ID NO: 1534376
acaauuauugacuauagac

SEQ ID NO: 1534378 - RNA, 19 nt, Artificial Sequence
  Description of Artificial Sequence: Synthetic oligonucleotide
  Sense strand starting at position 977 of SEQ ID NO: 1245076
ugugauuaacauuguaugu

SEQ ID NO: 1534379 - RNA, 19 nt, Artificial Sequence
  Description of Artificial Sequence: Synthetic oligonucleotide
  Antisense strand to SEQ ID NO: 1534378
acauacaauguuaaucaca

SEQ ID NO: 1534380 - RNA, 19 nt, Artificial Sequence
  Description of Artificial Sequence: Synthetic oligonucleotide
  Sense strand starting at position 982 of SEQ ID NO: 1245076
uuaacauuguaugucugaa

SEQ ID NO: 1534381 - RNA, 19 nt, Artificial Sequence
  Description of Artificial Sequence: Synthetic oligonucleotide
  Antisense strand to SEQ ID NO: 1534380
uucagacauacaauguuaa

SEQ ID NO: 1534382 - RNA, 19 nt, Artificial Sequence
  Description of Artificial Sequence: Synthetic oligonucleotide
  Sense strand starting at position 1122 of SEQ ID NO: 1245076
ggcagcaugacauguuuga

SEQ ID NO: 1534383 - RNA, 19 nt, Artificial Sequence
  Description of Artificial Sequence: Synthetic oligonucleotide
  Antisense strand to SEQ ID NO: 1534382
ucaaacaugucaugcugcc

SEQ ID NO: 1534384 - RNA, 19 nt, Artificial Sequence
  Description of Artificial Sequence: Synthetic oligonucleotide
  Sense strand starting at position 1126 of SEQ ID NO: 1245076
gcaugacauguuugauaca

SEQ ID NO: 1534385 - RNA, 19 nt, Artificial Sequence
  Description of Artificial Sequence: Synthetic oligonucleotide
  Antisense strand to SEQ ID NO: 1534384
uguaucaaacaugucaugc

SEQ ID NO: 1534386 - RNA, 19 nt, Artificial Sequence
  Description of Artificial Sequence: Synthetic oligonucleotide
  Sense strand starting at position 1215 of SEQ ID NO: 1245076
uacccaaagugaguagaua

SEQ ID NO: 1534387 - RNA, 19 nt, Artificial Sequence
  Description of Artificial Sequence: Synthetic oligonucleotide
  Antisense strand to SEQ ID NO: 1534386
uaucuacucacuuugggua

SEQ ID NO: 1534388 - RNA, 19 nt, Artificial Sequence
  Description of Artificial Sequence: Synthetic oligonucleotide
  Sense strand starting at position 1521 of SEQ ID NO: 1245076
cagcuagaguccgucucaa

SEQ ID NO: 1534389 - RNA, 19 nt, Artificial Sequence
  Description of Artificial Sequence: Synthetic oligonucleotide
  Antisense strand to SEQ ID NO: 1534388
uugagacggacucuagcug

SEQ ID NO: 1534390 - RNA, 19 nt, Artificial Sequence
  Description of Artificial Sequence: Synthetic oligonucleotide
  Sense strand starting at position 1942 of SEQ ID NO: 1245076
cgccuuaagcgagaaauac

SEQ ID NO: 1534391 - RNA, 19 nt, Artificial Sequence
  Description of Artificial Sequence: Synthetic oligonucleotide
  Antisense strand to SEQ ID NO: 1534390
guauuucucgcuuaaggcg

SEQ ID NO: 1534392 - RNA, 19 nt, Artificial Sequence
  Description of Artificial Sequence: Synthetic oligonucleotide
  Sense strand starting at position 1951 of SEQ ID NO: 1245076
cgagaaauacgaugccuuu

SEQ ID NO: 1534393 - RNA, 19 nt, Artificial Sequence
  Description of Artificial Sequence: Synthetic oligonucleotide
  Antisense strand to SEQ ID NO: 1534392
aaaggcaucguauuucucg

SEQ ID NO: 1534394 - RNA, 19 nt, Artificial Sequence
  Description of Artificial Sequence: Synthetic oligonucleotide
  Sense strand starting at position 2073 of SEQ ID NO: 1245076
gcgcuaggucuguuuggga

SEQ ID NO: 1534395 - RNA, 19 nt, Artificial Sequence
  Description of Artificial Sequence: Synthetic oligonucleotide
  Antisense strand to SEQ ID NO: 1534394
ucccaaacagaccuagcgc

SEQ ID NO: 1534396 - RNA, 19 nt, Artificial Sequence
  Description of Artificial Sequence: Synthetic oligonucleotide
  Sense strand starting at position 2311 of SEQ ID NO: 1245076
gagacauaauggucuccga

SEQ ID NO: 1534397 - RNA, 19 nt, Artificial Sequence
  Description of Artificial Sequence: Synthetic oligonucleotide
  Antisense strand to SEQ ID NO: 1534396
ucggagaccauuaugucuc

SEQ ID NO: 1534398 - RNA, 19 nt, Artificial Sequence
  Description of Artificial Sequence: Synthetic oligonucleotide
  Sense strand starting at position 2711 of SEQ ID NO: 1245076
cucguuuggaaagaaagua

SEQ ID NO: 1534399 - RNA, 19 nt, Artificial Sequence
  Description of Artificial Sequence: Synthetic oligonucleotide
  Antisense strand to SEQ ID NO: 1534398
uacuuucuuuccaaacgag

SEQ ID NO: 1534400 - RNA, 19 nt, Artificial Sequence
  Description of Artificial Sequence: Synthetic oligonucleotide
  Sense strand starting at position 2730 of SEQ ID NO: 1245076
agagauuuauggcagugcu

SEQ ID NO: 1534401 - RNA, 19 nt, Artificial Sequence
  Description of Artificial Sequence: Synthetic oligonucleotide
  Antisense strand to SEQ ID NO: 1534400
agcacugccauaaaucucu

SEQ ID NO: 1534402 - RNA, 19 nt, Artificial Sequence
  Description of Artificial Sequence: Synthetic oligonucleotide
  Sense strand starting at position 2808 of SEQ ID NO: 1245076
uucggucaccuuuaggaau

SEQ ID NO: 1534403 - RNA, 19 nt, Artificial Sequence
  Description of Artificial Sequence: Synthetic oligonucleotide
  Antisense strand to SEQ ID NO: 1534402
auuccuaaaggugaccgaa

SEQ ID NO: 1534404 - RNA, 19 nt, Artificial Sequence
  Description of Artificial Sequence: Synthetic oligonucleotide
  Sense strand starting at position 2825 of SEQ ID NO: 1245076
auaauaauuucugccacgu

SEQ ID NO: 1534405 - RNA, 19 nt, Artificial Sequence
  Description of Artificial Sequence: Synthetic oligonucleotide
  Antisense strand to SEQ ID NO: 1534404
acguggcagaaauuauuau

SEQ ID NO: 1534406 - RNA, 19 nt, Artificial Sequence
  Description of Artificial Sequence: Synthetic oligonucleotide
  Sense strand starting at position 2829 of SEQ ID NO: 1245076
uaauuucugccacguugua

SEQ ID NO: 1534407 - RNA, 19 nt, Artificial Sequence
  Description of Artificial Sequence: Synthetic oligonucleotide
  Antisense strand to SEQ ID NO: 1534406
uacaacguggcagaaauua

SEQ ID NO: 1534408 - RNA, 19 nt, Artificial Sequence
  Description of Artificial Sequence: Synthetic oligonucleotide
  Sense strand starting at position 2845 of SEQ ID NO: 1245076
guagacacacagugaauaa

SEQ ID NO: 1534409 - RNA, 19 nt, Artificial Sequence
  Description of Artificial Sequence: Synthetic oligonucleotide
  Antisense strand to SEQ ID NO: 1534408
uuauucacugugugucuac

SEQ ID NO: 1534410 - RNA, 19 nt, Artificial Sequence
  Description of Artificial Sequence: Synthetic oligonucleotide
  Sense strand starting at position 2857 of SEQ ID NO: 1245076
ugaauaauuguaugcaaca

SEQ ID NO: 1534411 - RNA, 19 nt, Artificial Sequence
  Description of Artificial Sequence: Synthetic oligonucleotide
  Antisense strand to SEQ ID NO: 1534410
uguugcauacaauuauuca

SEQ ID NO: 1534412 - RNA, 19 nt, Artificial Sequence
  Description of Artificial Sequence: Synthetic oligonucleotide
  Sense strand starting at position 2892 of SEQ ID NO: 1245076
gugaaacucgccuguggaa

SEQ ID NO: 1534413 - RNA, 19 nt, Artificial Sequence
  Description of Artificial Sequence: Synthetic oligonucleotide
  Antisense strand to SEQ ID NO: 1534412
uuccacaggcgaguuucac

SEQ ID NO: 1534414 - RNA, 19 nt, Artificial Sequence
  Description of Artificial Sequence: Synthetic oligonucleotide
  Sense strand starting at position 2912 of SEQ ID NO: 1245076
gggaguucagcaugaaucc

SEQ ID NO: 1534415 - RNA, 19 nt, Artificial Sequence
  Description of Artificial Sequence: Synthetic oligonucleotide
  Antisense strand to SEQ ID NO: 1534414
ggauucaugcugaacuccc

SEQ ID NO: 1534416 - RNA, 19 nt, Artificial Sequence
  Description of Artificial Sequence: Synthetic oligonucleotide
  Sense strand starting at position 2995 of SEQ ID NO: 1245076
gcaacaagucaagguguua

SEQ ID NO: 1534417 - RNA, 19 nt, Artificial Sequence
  Description of Artificial Sequence: Synthetic oligonucleotide
  Antisense strand to SEQ ID NO: 1534416
uaacaccuugacuuguugc

SEQ ID NO: 1534418 - RNA, 19 nt, Artificial Sequence
  Description of Artificial Sequence: Synthetic oligonucleotide
  Sense strand starting at position 3420 of SEQ ID NO: 1245076
cauuuaggcucagguauuu

SEQ ID NO: 1534419 - RNA, 19 nt, Artificial Sequence
  Description of Artificial Sequence: Synthetic oligonucleotide
  Antisense strand to SEQ ID NO: 1534418
aaauaccugagccuaaaug

SEQ ID NO: 1534420 - RNA, 19 nt, Artificial Sequence
  Description of Artificial Sequence: Synthetic oligonucleotide
  Sense strand starting at position 3438 of SEQ ID NO: 1245076
ugggcugggcucuaaauaa

SEQ ID NO: 1534421 - RNA, 19 nt, Artificial Sequence
  Description of Artificial Sequence: Synthetic oligonucleotide
  Antisense strand to SEQ ID NO: 1534420
uuauuuagagcccagccca

SEQ ID NO: 1534422 - RNA, 19 nt, Artificial Sequence
  Description of Artificial Sequence: Synthetic oligonucleotide
  Sense strand starting at position 3648 of SEQ ID NO: 1245076
uccagagcacuuugcaaua

SEQ ID NO: 1534423 - RNA, 19 nt, Artificial Sequence
  Description of Artificial Sequence: Synthetic oligonucleotide
  Antisense strand to SEQ ID NO: 1534422
uauugcaaagugcucugga

SEQ ID NO: 1534424 - RNA, 19 nt, Artificial Sequence
  Description of Artificial Sequence: Synthetic oligonucleotide
  Sense strand starting at position 3679 of SEQ ID NO: 1245076
aggccucagucagcauuau

SEQ ID NO: 1534425 - RNA, 19 nt, Artificial Sequence
  Description of Artificial Sequence: Synthetic oligonucleotide
  Antisense strand to SEQ ID NO: 1534424
auaaugcugacugaggccu

SEQ ID NO: 1534426 - RNA, 19 nt, Artificial Sequence
  Description of Artificial Sequence: Synthetic oligonucleotide
  Sense strand starting at position 3753 of SEQ ID NO: 1245076
cccucuucucgggaaguuu

SEQ ID NO: 1534427 - RNA, 19 nt, Artificial Sequence
  Description of Artificial Sequence: Synthetic oligonucleotide
  Antisense strand to SEQ ID NO: 1534426
aaacuucccgagaagaggg

SEQ ID NO: 1534428 - RNA, 19 nt, Artificial Sequence
  Description of Artificial Sequence: Synthetic oligonucleotide
  Sense strand starting at position 3856 of SEQ ID NO: 1245076
guuggugggucugcagaua

SEQ ID NO: 1534429 - RNA, 19 nt, Artificial Sequence
  Description of Artificial Sequence: Synthetic oligonucleotide
  Antisense strand to SEQ ID NO: 1534428
uaucugcagacccaccaac

SEQ ID NO: 1534430 - RNA, 19 nt, Artificial Sequence
  Description of Artificial Sequence: Synthetic oligonucleotide
  Sense strand starting at position 3899 of SEQ ID NO: 1245076
ccagcaccacuuugguaau

SEQ ID NO: 1534431 - RNA, 19 nt, Artificial Sequence
  Description of Artificial Sequence: Synthetic oligonucleotide
  Antisense strand to SEQ ID NO: 1534430
auuaccaaaguggugcugg

SEQ ID NO: 1534432 - RNA, 19 nt, Artificial Sequence
  Description of Artificial Sequence: Synthetic oligonucleotide
  Sense strand starting at position 3928 of SEQ ID NO: 1245076
gugagaugaggcugucaug

SEQ ID NO: 1534433 - RNA, 19 nt, Artificial Sequence
  Description of Artificial Sequence: Synthetic oligonucleotide
  Antisense strand to SEQ ID NO: 1534432
caugacagccucaucucac

SEQ ID NO: 1534434 - RNA, 19 nt, Artificial Sequence
  Description of Artificial Sequence: Synthetic oligonucleotide
  Sense strand starting at position 3943 of SEQ ID NO: 1245076
caugauuucugauagcuug

SEQ ID NO: 1534435 - RNA, 19 nt, Artificial Sequence
  Description of Artificial Sequence: Synthetic oligonucleotide
  Antisense strand to SEQ ID NO: 1534434
caagcuaucagaaaucaug

SEQ ID NO: 1534436 - RNA, 19 nt, Artificial Sequence
  Description of Artificial Sequence: Synthetic oligonucleotide
  Sense strand starting at position 3949 of SEQ ID NO: 1245076
uucugauagcuugguuuau

SEQ ID NO: 1534437 - RNA, 19 nt, Artificial Sequence
  Description of Artificial Sequence: Synthetic oligonucleotide
  Antisense strand to SEQ ID NO: 1534436
auaaaccaagcuaucagaa

SEQ ID NO: 1534438 - RNA, 19 nt, Artificial Sequence
  Description of Artificial Sequence: Synthetic oligonucleotide
  Sense strand starting at position 3950 of SEQ ID NO: 1245076
ucugauagcuugguuuaua

SEQ ID NO: 1534439 - RNA, 19 nt, Artificial Sequence
  Description of Artificial Sequence: Synthetic oligonucleotide
  Antisense strand to SEQ ID NO: 1534438
uauaaaccaagcuaucaga

SEQ ID NO: 1534440 - RNA, 19 nt, Artificial Sequence
  Description of Artificial Sequence: Synthetic oligonucleotide
  Sense strand starting at position 3953 of SEQ ID NO: 1245076
gauagcuugguuuauaaca

SEQ ID NO: 1534441 - RNA, 19 nt, Artificial Sequence
  Description of Artificial Sequence: Synthetic oligonucleotide
  Antisense strand to SEQ ID NO: 1534440
uguuauaaaccaagcuauc

SEQ ID NO: 1534442 - RNA, 19 nt, Artificial Sequence
  Description of Artificial Sequence: Synthetic oligonucleotide
  Sense strand starting at position 3971 of SEQ ID NO: 1245076
acauuuaggugucagagac

SEQ ID NO: 1534443 - RNA, 19 nt, Artificial Sequence
  Description of Artificial Sequence: Synthetic oligonucleotide
  Antisense strand to SEQ ID NO: 1534442
gucucugacaccuaaaugu

SEQ ID NO: 1534444 - RNA, 19 nt, Artificial Sequence
  Description of Artificial Sequence: Synthetic oligonucleotide
  Sense strand starting at position 593 of SEQ ID NO: 1245077
uggguuauucuccagcucu

SEQ ID NO: 1534445 - RNA, 19 nt, Artificial Sequence
  Description of Artificial Sequence: Synthetic oligonucleotide
  Antisense strand to SEQ ID NO: 1534444
agagcuggagaauaaccca

SEQ ID NO: 1534446 - RNA, 19 nt, Artificial Sequence
  Description of Artificial Sequence: Synthetic oligonucleotide
  Sense strand starting at position 924 of SEQ ID NO: 1245077
cagggagagucuucguuaa

SEQ ID NO: 1534447 - RNA, 19 nt, Artificial Sequence
  Description of Artificial Sequence: Synthetic oligonucleotide
  Antisense strand to SEQ ID NO: 1534446
uuaacgaagacucucccug

SEQ ID NO: 1534448 - RNA, 19 nt, Artificial Sequence
  Description of Artificial Sequence: Synthetic oligonucleotide
  Sense strand starting at position 989 of SEQ ID NO: 1245077
ggugguuaccuggaacauc

SEQ ID NO: 1534449 - RNA, 19 nt, Artificial Sequence
  Description of Artificial Sequence: Synthetic oligonucleotide
  Antisense strand to SEQ ID NO: 1534448
gauguuccagguaaccacc

SEQ ID NO: 1534450 - RNA, 19 nt, Artificial Sequence
  Description of Artificial Sequence: Synthetic oligonucleotide
  Sense strand starting at position 1031 of SEQ ID NO: 1245077
cgcgaaguugcucugcuua

SEQ ID NO: 1534451 - RNA, 19 nt, Artificial Sequence
  Description of Artificial Sequence: Synthetic oligonucleotide
  Antisense strand to SEQ ID NO: 1534450
uaagcagagcaacuucgcg

SEQ ID NO: 1534452 - RNA, 19 nt, Artificial Sequence
  Description of Artificial Sequence: Synthetic oligonucleotide
  Sense strand starting at position 1727 of SEQ ID NO: 1245077
gcuugagaauuugaugauu

SEQ ID NO: 1534453 - RNA, 19 nt, Artificial Sequence
  Description of Artificial Sequence: Synthetic oligonucleotide
  Antisense strand to SEQ ID NO: 1534452
aaucaucaaauucucaagc

SEQ ID NO: 1534454 - RNA, 19 nt, Artificial Sequence
  Description of Artificial Sequence: Synthetic oligonucleotide
  Sense strand starting at position 1741 of SEQ ID NO: 1245077
ugauuuaggagcugugguu

SEQ ID NO: 1534455 - RNA, 19 nt, Artificial Sequence
  Description of Artificial Sequence: Synthetic oligonucleotide
  Antisense strand to SEQ ID NO: 1534454
aaccacagcuccuaaauca

SEQ ID NO: 1534456 - RNA, 19 nt, Artificial Sequence
  Description of Artificial Sequence: Synthetic oligonucleotide
  Sense strand starting at position 1867 of SEQ ID NO: 1245077
ggcgcuugcgcuuauuuau

SEQ ID NO: 1534457 - RNA, 19 nt, Artificial Sequence
  Description of Artificial Sequence: Synthetic oligonucleotide
  Antisense strand to SEQ ID NO: 1534456
auaaauaagcgcaagcgcc

SEQ ID NO: 1534458 - RNA, 19 nt, Artificial Sequence
  Description of Artificial Sequence: Synthetic oligonucleotide
  Sense strand starting at position 1870 of SEQ ID NO: 1245077
gcuugcgcuuauuuauuaa

SEQ ID NO: 1534459 - RNA, 19 nt, Artificial Sequence
  Description of Artificial Sequence: Synthetic oligonucleotide
  Antisense strand to SEQ ID NO: 1534458
uuaauaaauaagcgcaagc

SEQ ID NO: 1534460 - RNA, 19 nt, Artificial Sequence
  Description of Artificial Sequence: Synthetic oligonucleotide
  Sense strand starting at position 2112 of SEQ ID NO: 1245077
cgcugaccucugcaauaau

SEQ ID NO: 1534461 - RNA, 19 nt, Artificial Sequence
  Description of Artificial Sequence: Synthetic oligonucleotide
  Antisense strand to SEQ ID NO: 1534460
auuauugcagaggucagcg

SEQ ID NO: 1534462 - RNA, 19 nt, Artificial Sequence
  Description of Artificial Sequence: Synthetic oligonucleotide
  Sense strand starting at position 2180 of SEQ ID NO: 1245077
ugaccagucuucccgguau

SEQ ID NO: 1534463 - RNA, 19 nt, Artificial Sequence
  Description of Artificial Sequence: Synthetic oligonucleotide
  Antisense strand to SEQ ID NO: 1534462
auaccgggaagacugguca

SEQ ID NO: 1534464 - RNA, 19 nt, Artificial Sequence
  Description of Artificial Sequence: Synthetic oligonucleotide
  Sense strand starting at position 2184 of SEQ ID NO: 1245077
cagucuucccgguauccuu

SEQ ID NO: 1534465 - RNA, 19 nt, Artificial Sequence
  Description of Artificial Sequence: Synthetic oligonucleotide
  Antisense strand to SEQ ID NO: 1534464
aaggauaccgggaagacug

SEQ ID NO: 1534466 - RNA, 19 nt, Artificial Sequence
  Description of Artificial Sequence: Synthetic oligonucleotide
  Sense strand starting at position 2303 of SEQ ID NO: 1245077
ugagguuaucaucgguuau

SEQ ID NO: 1534467 - RNA, 19 nt, Artificial Sequence
  Description of Artificial Sequence: Synthetic oligonucleotide
  Antisense strand to SEQ ID NO: 1534466
auaaccgaugauaaccuca

SEQ ID NO: 1534468 - RNA, 19 nt, Artificial Sequence
  Description of Artificial Sequence: Synthetic oligonucleotide
  Sense strand starting at position 2304 of SEQ ID NO: 1245077
gagguuaucaucgguuauu

SEQ ID NO: 1534469 - RNA, 19 nt, Artificial Sequence
  Description of Artificial Sequence: Synthetic oligonucleotide
  Antisense strand to SEQ ID NO: 1534468
aauaaccgaugauaaccuc

SEQ ID NO: 1534470 - RNA, 19 nt, Artificial Sequence
  Description of Artificial Sequence: Synthetic oligonucleotide
  Sense strand starting at position 2305 of SEQ ID NO: 1245077
agguuaucaucgguuauua

SEQ ID NO: 1534471 - RNA, 19 nt, Artificial Sequence
  Description of Artificial Sequence: Synthetic oligonucleotide
  Antisense strand to SEQ ID NO: 1534470
uaauaaccgaugauaaccu

SEQ ID NO: 1534472 - RNA, 19 nt, Artificial Sequence
  Description of Artificial Sequence: Synthetic oligonucleotide
  Sense strand starting at position 2307 of SEQ ID NO: 1245077
guuaucaucgguuauuauc

SEQ ID NO: 1534473 - RNA, 19 nt, Artificial Sequence
  Description of Artificial Sequence: Synthetic oligonucleotide
  Antisense strand to SEQ ID NO: 1534472
gauaauaaccgaugauaac

SEQ ID NO: 1534474 - RNA, 19 nt, Artificial Sequence
  Description of Artificial Sequence: Synthetic oligonucleotide
  Sense strand starting at position 2318 of SEQ ID NO: 1245077
uuauuaucgucggcacaac

SEQ ID NO: 1534475 - RNA, 19 nt, Artificial Sequence
  Description of Artificial Sequence: Synthetic oligonucleotide
  Antisense strand to SEQ ID NO: 1534474
guugugccgacgauaauaa

SEQ ID NO: 1534476 - RNA, 19 nt, Artificial Sequence
  Description of Artificial Sequence: Synthetic oligonucleotide
  Sense strand starting at position 2347 of SEQ ID NO: 1245077
acaacugggccguauaguu

SEQ ID NO: 1534477 - RNA, 19 nt, Artificial Sequence
  Description of Artificial Sequence: Synthetic oligonucleotide
  Antisense strand to SEQ ID NO: 1534476
aacuauacggcccaguugu

SEQ ID NO: 1534478 - RNA, 19 nt, Artificial Sequence
  Description of Artificial Sequence: Synthetic oligonucleotide
  Sense strand starting at position 2360 of SEQ ID NO: 1245077
auaguuuaugcuggucuaa

SEQ ID NO: 1534479 - RNA, 19 nt, Artificial Sequence
  Description of Artificial Sequence: Synthetic oligonucleotide
  Antisense strand to SEQ ID NO: 1534478
uuagaccagcauaaacuau

SEQ ID NO: 1534480 - RNA, 19 nt, Artificial Sequence
  Description of Artificial Sequence: Synthetic oligonucleotide
  Sense strand starting at position 2724 of SEQ ID NO: 1245077
aucucuaagcacuggagau

SEQ ID NO: 1534481 - RNA, 19 nt, Artificial Sequence
  Description of Artificial Sequence: Synthetic oligonucleotide
  Antisense strand to SEQ ID NO: 1534480
aucuccagugcuuagagau

SEQ ID NO: 1534482 - RNA, 19 nt, Artificial Sequence
  Description of Artificial Sequence: Synthetic oligonucleotide
  Sense strand starting at position 2775 of SEQ ID NO: 1245077
ugcagaaagucauugcaca

SEQ ID NO: 1534483 - RNA, 19 nt, Artificial Sequence
  Description of Artificial Sequence: Synthetic oligonucleotide
  Antisense strand to SEQ ID NO: 1534482
ugugcaaugacuuucugca

SEQ ID NO: 1534484 - RNA, 19 nt, Artificial Sequence
  Description of Artificial Sequence: Synthetic oligonucleotide
  Sense strand starting at position 2776 of SEQ ID NO: 1245077
gcagaaagucauugcacac

SEQ ID NO: 1534485 - RNA, 19 nt, Artificial Sequence
  Description of Artificial Sequence: Synthetic oligonucleotide
  Antisense strand to SEQ ID NO: 1534484
gugugcaaugacuuucugc

SEQ ID NO: 1534486 - RNA, 19 nt, Artificial Sequence
  Description of Artificial Sequence: Synthetic oligonucleotide
  Sense strand starting at position 2815 of SEQ ID NO: 1245077
uuaguauggguguaaggau

SEQ ID NO: 1534487 - RNA, 19 nt, Artificial Sequence
  Description of Artificial Sequence: Synthetic oligonucleotide
  Antisense strand to SEQ ID NO: 1534486
auccuuacacccauacuaa

SEQ ID NO: 1534488 - RNA, 19 nt, Artificial Sequence
  Description of Artificial Sequence: Synthetic oligonucleotide
  Sense strand starting at position 2823 of SEQ ID NO: 1245077
gguguaaggaugugauuaa

SEQ ID NO: 1534489 - RNA, 19 nt, Artificial Sequence
  Description of Artificial Sequence: Synthetic oligonucleotide
  Antisense strand to SEQ ID NO: 1534488
uuaaucacauccuuacacc

SEQ ID NO: 1534490 - RNA, 19 nt, Artificial Sequence
  Description of Artificial Sequence: Synthetic oligonucleotide
  Sense strand starting at position 2854 of SEQ ID NO: 1245077
gccaaaugcuuccugguua

SEQ ID NO: 1534491 - RNA, 19 nt, Artificial Sequence
  Description of Artificial Sequence: Synthetic oligonucleotide
  Antisense strand to SEQ ID NO: 1534490
uaaccaggaagcauuuggc

SEQ ID NO: 1534492 - RNA, 19 nt, Artificial Sequence
  Description of Artificial Sequence: Synthetic oligonucleotide
  Sense strand starting at position 2931 of SEQ ID NO: 1245077
agcuauacucacuguaaag

SEQ ID NO: 1534493 - RNA, 19 nt, Artificial Sequence
  Description of Artificial Sequence: Synthetic oligonucleotide
  Antisense strand to SEQ ID NO: 1534492
cuuuacagugaguauagcu

SEQ ID NO: 1534494 - RNA, 19 nt, Artificial Sequence
  Description of Artificial Sequence: Synthetic oligonucleotide
  Sense strand starting at position 2933 of SEQ ID NO: 1245077
cuauacucacuguaaagua

SEQ ID NO: 1534495 - RNA, 19 nt, Artificial Sequence
  Description of Artificial Sequence: Synthetic oligonucleotide
  Antisense strand to SEQ ID NO: 1534494
uacuuuacagugaguauag

SEQ ID NO: 1534496 - RNA, 19 nt, Artificial Sequence
  Description of Artificial Sequence: Synthetic oligonucleotide
  Sense strand starting at position 2972 of SEQ ID NO: 1245077
uuguaccaugcuggagaua

SEQ ID NO: 1534497 - RNA, 19 nt, Artificial Sequence
  Description of Artificial Sequence: Synthetic oligonucleotide
  Antisense strand to SEQ ID NO: 1534496
uaucuccagcaugguacaa

SEQ ID NO: 1534498 - RNA, 19 nt, Artificial Sequence
  Description of Artificial Sequence: Synthetic oligonucleotide
  Sense strand starting at position 2997 of SEQ ID NO: 1245077
ggcauuugccaggaugcuu

SEQ ID NO: 1534499 - RNA, 19 nt, Artificial Sequence
  Description of Artificial Sequence: Synthetic oligonucleotide
  Antisense strand to SEQ ID NO: 1534498
aagcauccuggcaaaugcc

SEQ ID NO: 1534500 - RNA, 19 nt, Artificial Sequence
  Description of Artificial Sequence: Synthetic oligonucleotide
  Sense strand starting at position 3058 of SEQ ID NO: 1245077
gugaguuuaacagagugga

SEQ ID NO: 1534501 - RNA, 19 nt, Artificial Sequence
  Description of Artificial Sequence: Synthetic oligonucleotide
  Antisense strand to SEQ ID NO: 1534500
uccacucuguuaaacucac

SEQ ID NO: 1534502 - RNA, 19 nt, Artificial Sequence
  Description of Artificial Sequence: Synthetic oligonucleotide
  Sense strand starting at position 3061 of SEQ ID NO: 1245077
aguuuaacagaguggaaau

SEQ ID NO: 1534503 - RNA, 19 nt, Artificial Sequence
  Description of Artificial Sequence: Synthetic oligonucleotide
  Antisense strand to SEQ ID NO: 1534502
auuuccacucuguuaaacu

SEQ ID NO: 1534504 - RNA, 19 nt, Artificial Sequence
  Description of Artificial Sequence: Synthetic oligonucleotide
  Sense strand starting at position 3124 of SEQ ID NO: 1245077
augugauagugucuuacug

SEQ ID NO: 1534505 - RNA, 19 nt, Artificial Sequence
  Description of Artificial Sequence: Synthetic oligonucleotide
  Antisense strand to SEQ ID NO: 1534504
caguaagacacuaucacau

SEQ ID NO: 1534506 - RNA, 19 nt, Artificial Sequence
  Description of Artificial Sequence: Synthetic oligonucleotide
  Sense strand starting at position 3128 of SEQ ID NO: 1245077
gauagugucuuacugucaa

SEQ ID NO: 1534507 - RNA, 19 nt, Artificial Sequence
  Description of Artificial Sequence: Synthetic oligonucleotide
  Antisense strand to SEQ ID NO: 1534506
uugacaguaagacacuauc

SEQ ID NO: 1534508 - RNA, 19 nt, Artificial Sequence
  Description of Artificial Sequence: Synthetic oligonucleotide
  Sense strand starting at position 3191 of SEQ ID NO: 1245077
aguguaagcauagauagca

SEQ ID NO: 1534509 - RNA, 19 nt, Artificial Sequence
  Description of Artificial Sequence: Synthetic oligonucleotide
  Antisense strand to SEQ ID NO: 1534508
ugcuaucuaugcuuacacu

SEQ ID NO: 1534510 - RNA, 19 nt, Artificial Sequence
  Description of Artificial Sequence: Synthetic oligonucleotide
  Sense strand starting at position 3298 of SEQ ID NO: 1245077
aucuguaaguccuuaaaua

SEQ ID NO: 1534511 - RNA, 19 nt, Artificial Sequence
  Description of Artificial Sequence: Synthetic oligonucleotide
  Antisense strand to SEQ ID NO: 1534510
uauuuaaggacuuacagau

SEQ ID NO: 1534512 - RNA, 19 nt, Artificial Sequence
  Description of Artificial Sequence: Synthetic oligonucleotide
  Sense strand starting at position 3299 of SEQ ID NO: 1245077
ucuguaaguccuuaaauag

SEQ ID NO: 1534513 - RNA, 19 nt, Artificial Sequence
  Description of Artificial Sequence: Synthetic oligonucleotide
  Antisense strand to SEQ ID NO: 1534512
cuauuuaaggacuuacaga

SEQ ID NO: 1534514 - RNA, 19 nt, Artificial Sequence
  Description of Artificial Sequence: Synthetic oligonucleotide
  Sense strand starting at position 3386 of SEQ ID NO: 1245077
augaacuaucgucaucaac

SEQ ID NO: 1534515 - RNA, 19 nt, Artificial Sequence
  Description of Artificial Sequence: Synthetic oligonucleotide
  Antisense strand to SEQ ID NO: 1534514
guugaugacgauaguucau

SEQ ID NO: 1534516 - RNA, 19 nt, Artificial Sequence
  Description of Artificial Sequence: Synthetic oligonucleotide
  Sense strand starting at position 3483 of SEQ ID NO: 1245077
cuaugugacuuauuggacu

SEQ ID NO: 1534517 - RNA, 19 nt, Artificial Sequence
  Description of Artificial Sequence: Synthetic oligonucleotide
  Antisense strand to SEQ ID NO: 1534516
aguccaauaagucacauag

SEQ ID NO: 1534518 - RNA, 19 nt, Artificial Sequence
  Description of Artificial Sequence: Synthetic oligonucleotide
  Sense strand starting at position 3538 of SEQ ID NO: 1245077
uaaacagguuagguuuaau

SEQ ID NO: 1534519 - RNA, 19 nt, Artificial Sequence
  Description of Artificial Sequence: Synthetic oligonucleotide
  Antisense strand to SEQ ID NO: 1534518
auuaaaccuaaccuguuua

SEQ ID NO: 1534520 - RNA, 19 nt, Artificial Sequence
  Description of Artificial Sequence: Synthetic oligonucleotide
  Sense strand starting at position 3548 of SEQ ID NO: 1245077
agguuuaauuuagacuaga

SEQ ID NO: 1534521 - RNA, 19 nt, Artificial Sequence
  Description of Artificial Sequence: Synthetic oligonucleotide
  Antisense strand to SEQ ID NO: 1534520
ucuagucuaaauuaaaccu

SEQ ID NO: 1534522 - RNA, 19 nt, Artificial Sequence
  Description of Artificial Sequence: Synthetic oligonucleotide
  Sense strand starting at position 3593 of SEQ ID NO: 1245077
auagcaaauugacagagaa

SEQ ID NO: 1534523 - RNA, 19 nt, Artificial Sequence
  Description of Artificial Sequence: Synthetic oligonucleotide
  Antisense strand to SEQ ID NO: 1534522
uucucugucaauuugcuau

SEQ ID NO: 1534524 - RNA, 19 nt, Artificial Sequence
  Description of Artificial Sequence: Synthetic oligonucleotide
  Sense strand starting at position 70 of SEQ ID NO: 1245078
ugauuugccugauuauugu

SEQ ID NO: 1534525 - RNA, 19 nt, Artificial Sequence
  Description of Artificial Sequence: Synthetic oligonucleotide
  Antisense strand to SEQ ID NO: 1534524
acaauaaucaggcaaauca

SEQ ID NO: 1534526 - RNA, 19 nt, Artificial Sequence
  Description of Artificial Sequence: Synthetic oligonucleotide
  Sense strand starting at position 117 of SEQ ID NO: 1245078
gcagaaguacgcgauguaa

SEQ ID NO: 1534527 - RNA, 19 nt, Artificial Sequence
  Description of Artificial Sequence: Synthetic oligonucleotide
  Antisense strand to SEQ ID NO: 1534526
uuacaucgcguacuucugc

SEQ ID NO: 1534528 - RNA, 19 nt, Artificial Sequence
  Description of Artificial Sequence: Synthetic oligonucleotide
  Sense strand starting at position 207 of SEQ ID NO: 1245078
ugcucucaccugcaagaaa

SEQ ID NO: 1534529 - RNA, 19 nt, Artificial Sequence
  Description of Artificial Sequence: Synthetic oligonucleotide
  Antisense strand to SEQ ID NO: 1534528
uuucuugcaggugagagca

SEQ ID NO: 1534530 - RNA, 19 nt, Artificial Sequence
  Description of Artificial Sequence: Synthetic oligonucleotide
  Sense strand starting at position 219 of SEQ ID NO: 1245078
caagaaacgcuaugauuga

SEQ ID NO: 1534531 - RNA, 19 nt, Artificial Sequence
  Description of Artificial Sequence: Synthetic oligonucleotide
  Antisense strand to SEQ ID NO: 1534530
ucaaucauagcguuucuug

SEQ ID NO: 1534532 - RNA, 19 nt, Artificial Sequence
  Description of Artificial Sequence: Synthetic oligonucleotide
  Sense strand starting at position 281 of SEQ ID NO: 1245078
ucaaguucguuucuaggga

SEQ ID NO: 1534533 - RNA, 19 nt, Artificial Sequence
  Description of Artificial Sequence: Synthetic oligonucleotide
  Antisense strand to SEQ ID NO: 1534532
ucccuagaaacgaacuuga

SEQ ID NO: 1534534 - RNA, 19 nt, Artificial Sequence
  Description of Artificial Sequence: Synthetic oligonucleotide
  Sense strand starting at position 321 of SEQ ID NO: 1245078
cucaguauuuauccuggca

SEQ ID NO: 1534535 - RNA, 19 nt, Artificial Sequence
  Description of Artificial Sequence: Synthetic oligonucleotide
  Antisense strand to SEQ ID NO: 1534534
ugccaggauaaauacugag

SEQ ID NO: 1534536 - RNA, 19 nt, Artificial Sequence
  Description of Artificial Sequence: Synthetic oligonucleotide
  Sense strand starting at position 351 of SEQ ID NO: 1245078
gcaugugagucuccagaga

SEQ ID NO: 1534537 - RNA, 19 nt, Artificial Sequence
  Description of Artificial Sequence: Synthetic oligonucleotide
  Antisense strand to SEQ ID NO: 1534536
ucucuggagacucacaugc

SEQ ID NO: 1534538 - RNA, 19 nt, Artificial Sequence
  Description of Artificial Sequence: Synthetic oligonucleotide
  Sense strand starting at position 379 of SEQ ID NO: 1245078
gugggcauaugaucacauu

SEQ ID NO: 1534539 - RNA, 19 nt, Artificial Sequence
  Description of Artificial Sequence: Synthetic oligonucleotide
  Antisense strand to SEQ ID NO: 1534538
aaugugaucauaugcccac

SEQ ID NO: 1534540 - RNA, 19 nt, Artificial Sequence
  Description of Artificial Sequence: Synthetic oligonucleotide
  Sense strand starting at position 421 of SEQ ID NO: 1245078
gcagauauccaauaaacgu

SEQ ID NO: 1534541 - RNA, 19 nt, Artificial Sequence
  Description of Artificial Sequence: Synthetic oligonucleotide
  Antisense strand to SEQ ID NO: 1534540
acguuuauuggauaucugc

SEQ ID NO: 1534542 - RNA, 19 nt, Artificial Sequence
  Description of Artificial Sequence: Synthetic oligonucleotide
  Sense strand starting at position 429 of SEQ ID NO: 1245078
ccaauaaacguuuaugggu

SEQ ID NO: 1534543 - RNA, 19 nt, Artificial Sequence
  Description of Artificial Sequence: Synthetic oligonucleotide
  Antisense strand to SEQ ID NO: 1534542
acccauaaacguuuauugg

SEQ ID NO: 1534544 - RNA, 19 nt, Artificial Sequence
  Description of Artificial Sequence: Synthetic oligonucleotide
  Sense strand starting at position 833 of SEQ ID NO: 1245078
caagaauugccuuguugac

SEQ ID NO: 1534545 - RNA, 19 nt, Artificial Sequence
  Description of Artificial Sequence: Synthetic oligonucleotide
  Antisense strand to SEQ ID NO: 1534544
gucaacaaggcaauucuug

SEQ ID NO: 1534546 - RNA, 19 nt, Artificial Sequence
  Description of Artificial Sequence: Synthetic oligonucleotide
  Sense strand starting at position 1229 of SEQ ID NO: 1245078
gugagcucgccugaagacu

SEQ ID NO: 1534547 - RNA, 19 nt, Artificial Sequence
  Description of Artificial Sequence: Synthetic oligonucleotide
  Antisense strand to SEQ ID NO: 1534546
agucuucaggcgagcucac

SEQ ID NO: 1534548 - RNA, 19 nt, Artificial Sequence
  Description of Artificial Sequence: Synthetic oligonucleotide
  Sense strand starting at position 1322 of SEQ ID NO: 1245078
uucgauucucagcgggaga

SEQ ID NO: 1534549 - RNA, 19 nt, Artificial Sequence
  Description of Artificial Sequence: Synthetic oligonucleotide
  Antisense strand to SEQ ID NO: 1534548
ucucccgcugagaaucgaa

SEQ ID NO: 1534550 - RNA, 19 nt, Artificial Sequence
  Description of Artificial Sequence: Synthetic oligonucleotide
  Sense strand starting at position 1639 of SEQ ID NO: 1245078
ggaagugucgcccaggaca

SEQ ID NO: 1534551 - RNA, 19 nt, Artificial Sequence
  Description of Artificial Sequence: Synthetic oligonucleotide
  Antisense strand to SEQ ID NO: 1534550
uguccugggcgacacuucc

SEQ ID NO: 1534552 - RNA, 19 nt, Artificial Sequence
  Description of Artificial Sequence: Synthetic oligonucleotide
  Sense strand starting at position 2495 of SEQ ID NO: 1245078
cccugagauuugcaacuau

SEQ ID NO: 1534553 - RNA, 19 nt, Artificial Sequence
  Description of Artificial Sequence: Synthetic oligonucleotide
  Antisense strand to SEQ ID NO: 1534552
auaguugcaaaucucaggg

SEQ ID NO: 1534554 - RNA, 19 nt, Artificial Sequence
  Description of Artificial Sequence: Synthetic oligonucleotide
  Sense strand starting at position 2528 of SEQ ID NO: 1245078
cucuuagauuaugugagga

SEQ ID NO: 1534555 - RNA, 19 nt, Artificial Sequence
  Description of Artificial Sequence: Synthetic oligonucleotide
  Antisense strand to SEQ ID NO: 1534554
uccucacauaaucuaagag

SEQ ID NO: 1534556 - RNA, 19 nt, Artificial Sequence
  Description of Artificial Sequence: Synthetic oligonucleotide
  Sense strand starting at position 2600 of SEQ ID NO: 1245078
gcgcuauuuauauagugua

SEQ ID NO: 1534557 - RNA, 19 nt, Artificial Sequence
  Description of Artificial Sequence: Synthetic oligonucleotide
  Antisense strand to SEQ ID NO: 1534556
uacacuauauaaauagcgc

SEQ ID NO: 1534558 - RNA, 19 nt, Artificial Sequence
  Description of Artificial Sequence: Synthetic oligonucleotide
  Sense strand starting at position 2642 of SEQ ID NO: 1245078
gaagaaaguucucugguug

SEQ ID NO: 1534559 - RNA, 19 nt, Artificial Sequence
  Description of Artificial Sequence: Synthetic oligonucleotide
  Antisense strand to SEQ ID NO: 1534558
caaccagagaacuuucuuc

SEQ ID NO: 1534560 - RNA, 19 nt, Artificial Sequence
  Description of Artificial Sequence: Synthetic oligonucleotide
  Sense strand starting at position 2643 of SEQ ID NO: 1245078
aagaaaguucucugguugu

SEQ ID NO: 1534561 - RNA, 19 nt, Artificial Sequence
  Description of Artificial Sequence: Synthetic oligonucleotide
  Antisense strand to SEQ ID NO: 1534560
acaaccagagaacuuucuu

SEQ ID NO: 1534562 - RNA, 19 nt, Artificial Sequence
  Description of Artificial Sequence: Synthetic oligonucleotide
  Sense strand starting at position 2701 of SEQ ID NO: 1245078
ucgaguucggaacaaguaa

SEQ ID NO: 1534563 - RNA, 19 nt, Artificial Sequence
  Description of Artificial Sequence: Synthetic oligonucleotide
  Antisense strand to SEQ ID NO: 1534562
uuacuuguuccgaacucga

SEQ ID NO: 1534564 - RNA, 19 nt, Artificial Sequence
  Description of Artificial Sequence: Synthetic oligonucleotide
  Sense strand starting at position 2867 of SEQ ID NO: 1245078
guaugcagccgcguugaua

SEQ ID NO: 1534565 - RNA, 19 nt, Artificial Sequence
  Description of Artificial Sequence: Synthetic oligonucleotide
  Antisense strand to SEQ ID NO: 1534564
uaucaacgcggcugcauac

SEQ ID NO: 1534566 - RNA, 19 nt, Artificial Sequence
  Description of Artificial Sequence: Synthetic oligonucleotide
  Sense strand starting at position 2876 of SEQ ID NO: 1245078
cgcguugauagguaacaag

SEQ ID NO: 1534567 - RNA, 19 nt, Artificial Sequence
  Description of Artificial Sequence: Synthetic oligonucleotide
  Antisense strand to SEQ ID NO: 1534566
cuuguuaccuaucaacgcg

SEQ ID NO: 1534568 - RNA, 19 nt, Artificial Sequence
  Description of Artificial Sequence: Synthetic oligonucleotide
  Sense strand starting at position 2932 of SEQ ID NO: 1245078
cggugacccuaauuguaau

SEQ ID NO: 1534569 - RNA, 19 nt, Artificial Sequence
  Description of Artificial Sequence: Synthetic oligonucleotide
  Antisense strand to SEQ ID NO: 1534568
auuacaauuagggucaccg

SEQ ID NO: 1534570 - RNA, 19 nt, Artificial Sequence
  Description of Artificial Sequence: Synthetic oligonucleotide
  Sense strand starting at position 2946 of SEQ ID NO: 1245078
guaauucgugugucagcaa

SEQ ID NO: 1534571 - RNA, 19 nt, Artificial Sequence
  Description of Artificial Sequence: Synthetic oligonucleotide
  Antisense strand to SEQ ID NO: 1534570
uugcugacacacgaauuac

SEQ ID NO: 1534572 - RNA, 19 nt, Artificial Sequence
  Description of Artificial Sequence: Synthetic oligonucleotide
  Sense strand starting at position 3023 of SEQ ID NO: 1245078
guggauguggcccagaaau

SEQ ID NO: 1534573 - RNA, 19 nt, Artificial Sequence
  Description of Artificial Sequence: Synthetic oligonucleotide
  Antisense strand to SEQ ID NO: 1534572
auuucugggccacauccac

SEQ ID NO: 1534574 - RNA, 19 nt, Artificial Sequence
  Description of Artificial Sequence: Synthetic oligonucleotide
  Sense strand starting at position 3146 of SEQ ID NO: 1245078
uguguaaauugguuaggua

SEQ ID NO: 1534575 - RNA, 19 nt, Artificial Sequence
  Description of Artificial Sequence: Synthetic oligonucleotide
  Antisense strand to SEQ ID NO: 1534574
uaccuaaccaauuuacaca

SEQ ID NO: 1534576 - RNA, 19 nt, Artificial Sequence
  Description of Artificial Sequence: Synthetic oligonucleotide
  Sense strand starting at position 3147 of SEQ ID NO: 1245078
guguaaauugguuagguaa

SEQ ID NO: 1534577 - RNA, 19 nt, Artificial Sequence
  Description of Artificial Sequence: Synthetic oligonucleotide
  Antisense strand to SEQ ID NO: 1534576
uuaccuaaccaauuuacac

SEQ ID NO: 1534578 - RNA, 19 nt, Artificial Sequence
  Description of Artificial Sequence: Synthetic oligonucleotide
  Sense strand starting at position 3182 of SEQ ID NO: 1245078
acagaauaugcuggucaac

SEQ ID NO: 1534579 - RNA, 19 nt, Artificial Sequence
  Description of Artificial Sequence: Synthetic oligonucleotide
  Antisense strand to SEQ ID NO: 1534578
guugaccagcauauucugu

SEQ ID NO: 1534580 - RNA, 19 nt, Artificial Sequence
  Description of Artificial Sequence: Synthetic oligonucleotide
  Sense strand starting at position 3184 of SEQ ID NO: 1245078
agaauaugcuggucaacug

SEQ ID NO: 1534581 - RNA, 19 nt, Artificial Sequence
  Description of Artificial Sequence: Synthetic oligonucleotide
  Antisense strand to SEQ ID NO: 1534580
caguugaccagcauauucu

SEQ ID NO: 1534582 - RNA, 19 nt, Artificial Sequence
  Description of Artificial Sequence: Synthetic oligonucleotide
  Sense strand starting at position 3185 of SEQ ID NO: 1245078
gaauaugcuggucaacuga

SEQ ID NO: 1534583 - RNA, 19 nt, Artificial Sequence
  Description of Artificial Sequence: Synthetic oligonucleotide
  Antisense strand to SEQ ID NO: 1534582
ucaguugaccagcauauuc

SEQ ID NO: 1534584 - RNA, 19 nt, Artificial Sequence
  Description of Artificial Sequence: Synthetic oligonucleotide
  Sense strand starting at position 3365 of SEQ ID NO: 1245078
ggauuacagaugcaugcuu

SEQ ID NO: 1534585 - RNA, 19 nt, Artificial Sequence
  Description of Artificial Sequence: Synthetic oligonucleotide
  Antisense strand to SEQ ID NO: 1534584
aagcaugcaucuguaaucc

SEQ ID NO: 1534586 - RNA, 19 nt, Artificial Sequence
  Description of Artificial Sequence: Synthetic oligonucleotide
  Sense strand starting at position 3560 of SEQ ID NO: 1245078
ugucauucuuccguagaau

SEQ ID NO: 1534587 - RNA, 19 nt, Artificial Sequence
  Description of Artificial Sequence: Synthetic oligonucleotide
  Antisense strand to SEQ ID NO: 1534586
auucuacggaagaaugaca

SEQ ID NO: 1534588 - RNA, 19 nt, Artificial Sequence
  Description of Artificial Sequence: Synthetic oligonucleotide
  Sense strand starting at position 3561 of SEQ ID NO: 1245078
gucauucuuccguagaaug

SEQ ID NO: 1534589 - RNA, 19 nt, Artificial Sequence
  Description of Artificial Sequence: Synthetic oligonucleotide
  Antisense strand to SEQ ID NO: 1534588
cauucuacggaagaaugac

SEQ ID NO: 1534590 - RNA, 19 nt, Artificial Sequence
  Description of Artificial Sequence: Synthetic oligonucleotide
  Sense strand starting at position 3563 of SEQ ID NO: 1245078
cauucuuccguagaaugcu

SEQ ID NO: 1534591 - RNA, 19 nt, Artificial Sequence
  Description of Artificial Sequence: Synthetic oligonucleotide
  Antisense strand to SEQ ID NO: 1534590
agcauucuacggaagaaug

SEQ ID NO: 1534592 - RNA, 19 nt, Artificial Sequence
  Description of Artificial Sequence: Synthetic oligonucleotide
  Sense strand starting at position 3648 of SEQ ID NO: 1245078
agcaucugauuucuuaguu

SEQ ID NO: 1534593 - RNA, 19 nt, Artificial Sequence
  Description of Artificial Sequence: Synthetic oligonucleotide
  Antisense strand to SEQ ID NO: 1534592
aacuaagaaaucagaugcu

SEQ ID NO: 1534594 - RNA, 19 nt, Artificial Sequence
  Description of Artificial Sequence: Synthetic oligonucleotide
  Sense strand starting at position 3649 of SEQ ID NO: 1245078
gcaucugauuucuuaguuc

SEQ ID NO: 1534595 - RNA, 19 nt, Artificial Sequence
  Description of Artificial Sequence: Synthetic oligonucleotide
  Antisense strand to SEQ ID NO: 1534594
gaacuaagaaaucagaugc

SEQ ID NO: 1534596 - RNA, 19 nt, Artificial Sequence
  Description of Artificial Sequence: Synthetic oligonucleotide
  Sense strand starting at position 3815 of SEQ ID NO: 1245078
acuggagagugaucaucau

SEQ ID NO: 1534597 - RNA, 19 nt, Artificial Sequence
  Description of Artificial Sequence: Synthetic oligonucleotide
  Antisense strand to SEQ ID NO: 1534596
augaugaucacucuccagu

SEQ ID NO: 1534598 - RNA, 19 nt, Artificial Sequence
  Description of Artificial Sequence: Synthetic oligonucleotide
  Sense strand starting at position 3890 of SEQ ID NO: 1245078
uuugguuuccuggaggagu

SEQ ID NO: 1534599 - RNA, 19 nt, Artificial Sequence
  Description of Artificial Sequence: Synthetic oligonucleotide
  Antisense strand to SEQ ID NO: 1534598
acuccuccaggaaaccaaa

SEQ ID NO: 1534600 - RNA, 19 nt, Artificial Sequence
  Description of Artificial Sequence: Synthetic oligonucleotide
  Sense strand starting at position 3892 of SEQ ID NO: 1245078
ugguuuccuggaggaguga

SEQ ID NO: 1534601 - RNA, 19 nt, Artificial Sequence
  Description of Artificial Sequence: Synthetic oligonucleotide
  Antisense strand to SEQ ID NO: 1534600
ucacuccuccaggaaacca

SEQ ID NO: 1534602 - RNA, 19 nt, Artificial Sequence
  Description of Artificial Sequence: Synthetic oligonucleotide
  Sense strand starting at position 3893 of SEQ ID NO: 1245078
gguuuccuggaggagugau

SEQ ID NO: 1534603 - RNA, 19 nt, Artificial Sequence
  Description of Artificial Sequence: Synthetic oligonucleotide
  Antisense strand to SEQ ID NO: 1534602
aucacuccuccaggaaacc

SEQ ID NO: 1534604 - RNA, 19 nt, Artificial Sequence
  Description of Artificial Sequence: Synthetic oligonucleotide
  Sense strand starting at position 800 of SEQ ID NO: 1245079
gugguuaguggcuacacua

SEQ ID NO: 1534605 - RNA, 19 nt, Artificial Sequence
  Description of Artificial Sequence: Synthetic oligonucleotide
  Antisense strand to SEQ ID NO: 1534604
uaguguagccacuaaccac

SEQ ID NO: 1534606 - RNA, 19 nt, Artificial Sequence
  Description of Artificial Sequence: Synthetic oligonucleotide
  Sense strand starting at position 851 of SEQ ID NO: 1245079
uguuguuguccacauguga

SEQ ID NO: 1534607 - RNA, 19 nt, Artificial Sequence
  Description of Artificial Sequence: Synthetic oligonucleotide
  Antisense strand to SEQ ID NO: 1534606
ucacauguggacaacaaca

SEQ ID NO: 1534608 - RNA, 19 nt, Artificial Sequence
  Description of Artificial Sequence: Synthetic oligonucleotide
  Sense strand starting at position 938 of SEQ ID NO: 1245079
ugaaauacaugagaaugaa

SEQ ID NO: 1534609 - RNA, 19 nt, Artificial Sequence
  Description of Artificial Sequence: Synthetic oligonucleotide
  Antisense strand to SEQ ID NO: 1534608
uucauucucauguauuuca

SEQ ID NO: 1534610 - RNA, 19 nt, Artificial Sequence
  Description of Artificial Sequence: Synthetic oligonucleotide
  Sense strand starting at position 1006 of SEQ ID NO: 1245079
aaagcuucuguauaagagu

SEQ ID NO: 1534611 - RNA, 19 nt, Artificial Sequence
  Description of Artificial Sequence: Synthetic oligonucleotide
  Antisense strand to SEQ ID NO: 1534610
acucuuauacagaagcuuu

SEQ ID NO: 1534612 - RNA, 19 nt, Artificial Sequence
  Description of Artificial Sequence: Synthetic oligonucleotide
  Sense strand starting at position 1235 of SEQ ID NO: 1245079
ucucaauuagagugcaauu

SEQ ID NO: 1534613 - RNA, 19 nt, Artificial Sequence
  Description of Artificial Sequence: Synthetic oligonucleotide
  Antisense strand to SEQ ID NO: 1534612
aauugcacucuaauugaga

SEQ ID NO: 1534614 - RNA, 19 nt, Artificial Sequence
  Description of Artificial Sequence: Synthetic oligonucleotide
  Sense strand starting at position 1256 of SEQ ID NO: 1245079
aucuucuagucacuaggaa

SEQ ID NO: 1534615 - RNA, 19 nt, Artificial Sequence
  Description of Artificial Sequence: Synthetic oligonucleotide
  Antisense strand to SEQ ID NO: 1534614
uuccuagugacuagaagau

SEQ ID NO: 1534616 - RNA, 19 nt, Artificial Sequence
  Description of Artificial Sequence: Synthetic oligonucleotide
  Sense strand starting at position 1257 of SEQ ID NO: 1245079
ucuucuagucacuaggaau

SEQ ID NO: 1534617 - RNA, 19 nt, Artificial Sequence
  Description of Artificial Sequence: Synthetic oligonucleotide
  Antisense strand to SEQ ID NO: 1534616
auuccuagugacuagaaga

SEQ ID NO: 1534618 - RNA, 19 nt, Artificial Sequence
  Description of Artificial Sequence: Synthetic oligonucleotide
  Sense strand starting at position 1382 of SEQ ID NO: 1245079
ugaucuaaauucucuggua

SEQ ID NO: 1534619 - RNA, 19 nt, Artificial Sequence
  Description of Artificial Sequence: Synthetic oligonucleotide
  Antisense strand to SEQ ID NO: 1534618
uaccagagaauuuagauca

SEQ ID NO: 1534620 - RNA, 19 nt, Artificial Sequence
  Description of Artificial Sequence: Synthetic oligonucleotide
  Sense strand starting at position 1397 of SEQ ID NO: 1245079
gguaccuuaugucccauaa

SEQ ID NO: 1534621 - RNA, 19 nt, Artificial Sequence
  Description of Artificial Sequence: Synthetic oligonucleotide
  Antisense strand to SEQ ID NO: 1534620
uuaugggacauaagguacc

SEQ ID NO: 1534622 - RNA, 19 nt, Artificial Sequence
  Description of Artificial Sequence: Synthetic oligonucleotide
  Sense strand starting at position 1425 of SEQ ID NO: 1245079
cuaguucguaaguagugau

SEQ ID NO: 1534623 - RNA, 19 nt, Artificial Sequence
  Description of Artificial Sequence: Synthetic oligonucleotide
  Antisense strand to SEQ ID NO: 1534622
aucacuacuuacgaacuag

SEQ ID NO: 1534624 - RNA, 19 nt, Artificial Sequence
  Description of Artificial Sequence: Synthetic oligonucleotide
  Sense strand starting at position 1445 of SEQ ID NO: 1245079
gcugcaguaaccgucuuau

SEQ ID NO: 1534625 - RNA, 19 nt, Artificial Sequence
  Description of Artificial Sequence: Synthetic oligonucleotide
  Antisense strand to SEQ ID NO: 1534624
auaagacgguuacugcagc

SEQ ID NO: 1534626 - RNA, 19 nt, Artificial Sequence
  Description of Artificial Sequence: Synthetic oligonucleotide
  Sense strand starting at position 1478 of SEQ ID NO: 1245079
uuuacaaaucauugucgua

SEQ ID NO: 1534627 - RNA, 19 nt, Artificial Sequence
  Description of Artificial Sequence: Synthetic oligonucleotide
  Antisense strand to SEQ ID NO: 1534626
uacgacaaugauuuguaaa

SEQ ID NO: 1534628 - RNA, 19 nt, Artificial Sequence
  Description of Artificial Sequence: Synthetic oligonucleotide
  Sense strand starting at position 1485 of SEQ ID NO: 1245079
aucauugucguauagaaga

SEQ ID NO: 1534629 - RNA, 19 nt, Artificial Sequence
  Description of Artificial Sequence: Synthetic oligonucleotide
  Antisense strand to SEQ ID NO: 1534628
ucuucuauacgacaaugau

SEQ ID NO: 1534630 - RNA, 19 nt, Artificial Sequence
  Description of Artificial Sequence: Synthetic oligonucleotide
  Sense strand starting at position 1778 of SEQ ID NO: 1245079
cgccucuuuccaggaauuu

SEQ ID NO: 1534631 - RNA, 19 nt, Artificial Sequence
  Description of Artificial Sequence: Synthetic oligonucleotide
  Antisense strand to SEQ ID NO: 1534630
aaauuccuggaaagaggcg

SEQ ID NO: 1534632 - RNA, 19 nt, Artificial Sequence
  Description of Artificial Sequence: Synthetic oligonucleotide
  Sense strand starting at position 1844 of SEQ ID NO: 1245079
aguaaaugaugugccagua

SEQ ID NO: 1534633 - RNA, 19 nt, Artificial Sequence
  Description of Artificial Sequence: Synthetic oligonucleotide
  Antisense strand to SEQ ID NO: 1534632
uacuggcacaucauuuacu

SEQ ID NO: 1534634 - RNA, 19 nt, Artificial Sequence
  Description of Artificial Sequence: Synthetic oligonucleotide
  Sense strand starting at position 2026 of SEQ ID NO: 1245079
cgcaaaggauucuuaagac

SEQ ID NO: 1534635 - RNA, 19 nt, Artificial Sequence
  Description of Artificial Sequence: Synthetic oligonucleotide
  Antisense strand to SEQ ID NO: 1534634
gucuuaagaauccuuugcg

SEQ ID NO: 1534636 - RNA, 19 nt, Artificial Sequence
  Description of Artificial Sequence: Synthetic oligonucleotide
  Sense strand starting at position 2579 of SEQ ID NO: 1245079
cucauuguggcagaaguuu

SEQ ID NO: 1534637 - RNA, 19 nt, Artificial Sequence
  Description of Artificial Sequence: Synthetic oligonucleotide
  Antisense strand to SEQ ID NO: 1534636
aaacuucugccacaaugag

SEQ ID NO: 1534638 - RNA, 19 nt, Artificial Sequence
  Description of Artificial Sequence: Synthetic oligonucleotide
  Sense strand starting at position 2609 of SEQ ID NO: 1245079
acuccuuugaugggcaaga

SEQ ID NO: 1534639 - RNA, 19 nt, Artificial Sequence
  Description of Artificial Sequence: Synthetic oligonucleotide
  Antisense strand to SEQ ID NO: 1534638
ucuugcccaucaaaggagu

SEQ ID NO: 1534640 - RNA, 19 nt, Artificial Sequence
  Description of Artificial Sequence: Synthetic oligonucleotide
  Sense strand starting at position 2610 of SEQ ID NO: 1245079
cuccuuugaugggcaagaa

SEQ ID NO: 1534641 - RNA, 19 nt, Artificial Sequence
  Description of Artificial Sequence: Synthetic oligonucleotide
  Antisense strand to SEQ ID NO: 1534640
uucuugcccaucaaaggag

SEQ ID NO: 1534642 - RNA, 19 nt, Artificial Sequence
  Description of Artificial Sequence: Synthetic oligonucleotide
  Sense strand starting at position 2684 of SEQ ID NO: 1245079
ucuugucacguuuaaggau

SEQ ID NO: 1534643 - RNA, 19 nt, Artificial Sequence
  Description of Artificial Sequence: Synthetic oligonucleotide
  Antisense strand to SEQ ID NO: 1534642
auccuuaaacgugacaaga

SEQ ID NO: 1534644 - RNA, 19 nt, Artificial Sequence
  Description of Artificial Sequence: Synthetic oligonucleotide
  Sense strand starting at position 2896 of SEQ ID NO: 1245079
ccguguaauaaguauuaga

SEQ ID NO: 1534645 - RNA, 19 nt, Artificial Sequence
  Description of Artificial Sequence: Synthetic oligonucleotide
  Antisense strand to SEQ ID NO: 1534644
ucuaauacuuauuacacgg

SEQ ID NO: 1534646 - RNA, 19 nt, Artificial Sequence
  Description of Artificial Sequence: Synthetic oligonucleotide
  Sense strand starting at position 2986 of SEQ ID NO: 1245079
ggaagagguaauugcuacu

SEQ ID NO: 1534647 - RNA, 19 nt, Artificial Sequence
  Description of Artificial Sequence: Synthetic oligonucleotide
  Antisense strand to SEQ ID NO: 1534646
aguagcaauuaccucuucc

SEQ ID NO: 1534648 - RNA, 19 nt, Artificial Sequence
  Description of Artificial Sequence: Synthetic oligonucleotide
  Sense strand starting at position 3102 of SEQ ID NO: 1245079
aaaggaacuguguguauua

SEQ ID NO: 1534649 - RNA, 19 nt, Artificial Sequence
  Description of Artificial Sequence: Synthetic oligonucleotide
  Antisense strand to SEQ ID NO: 1534648
uaauacacacaguuccuuu

SEQ ID NO: 1534650 - RNA, 19 nt, Artificial Sequence
  Description of Artificial Sequence: Synthetic oligonucleotide
  Sense strand starting at position 3104 of SEQ ID NO: 1245079
aggaacuguguguauuaga

SEQ ID NO: 1534651 - RNA, 19 nt, Artificial Sequence
  Description of Artificial Sequence: Synthetic oligonucleotide
  Antisense strand to SEQ ID NO: 1534650
ucuaauacacacaguuccu

SEQ ID NO: 1534652 - RNA, 19 nt, Artificial Sequence
  Description of Artificial Sequence: Synthetic oligonucleotide
  Sense strand starting at position 3123 of SEQ ID NO: 1245079
uuuauuggcuuaccuagaa

SEQ ID NO: 1534653 - RNA, 19 nt, Artificial Sequence
  Description of Artificial Sequence: Synthetic oligonucleotide
  Antisense strand to SEQ ID NO: 1534652
uucuagguaagccaauaaa

SEQ ID NO: 1534654 - RNA, 19 nt, Artificial Sequence
  Description of Artificial Sequence: Synthetic oligonucleotide
  Sense strand starting at position 3226 of SEQ ID NO: 1245079
ugggaugcaucagugauga

SEQ ID NO: 1534655 - RNA, 19 nt, Artificial Sequence
  Description of Artificial Sequence: Synthetic oligonucleotide
  Antisense strand to SEQ ID NO: 1534654
ucaucacugaugcauccca

SEQ ID NO: 1534656 - RNA, 19 nt, Artificial Sequence
  Description of Artificial Sequence: Synthetic oligonucleotide
  Sense strand starting at position 3254 of SEQ ID NO: 1245079
uagguugugaaaggucaaa

SEQ ID NO: 1534657 - RNA, 19 nt, Artificial Sequence
  Description of Artificial Sequence: Synthetic oligonucleotide
  Antisense strand to SEQ ID NO: 1534656
uuugaccuuucacaaccua

SEQ ID NO: 1534658 - RNA, 19 nt, Artificial Sequence
  Description of Artificial Sequence: Synthetic oligonucleotide
  Sense strand starting at position 3319 of SEQ ID NO: 1245079
agcauuuauuguguacauu

SEQ ID NO: 1534659 - RNA, 19 nt, Artificial Sequence
  Description of Artificial Sequence: Synthetic oligonucleotide
  Antisense strand to SEQ ID NO: 1534658
aauguacacaauaaaugcu

SEQ ID NO: 1534660 - RNA, 19 nt, Artificial Sequence
  Description of Artificial Sequence: Synthetic oligonucleotide
  Sense strand starting at position 3353 of SEQ ID NO: 1245079
aguuguuguacuugauaug

SEQ ID NO: 1534661 - RNA, 19 nt, Artificial Sequence
  Description of Artificial Sequence: Synthetic oligonucleotide
  Antisense strand to SEQ ID NO: 1534660
cauaucaaguacaacaacu

SEQ ID NO: 1534662 - RNA, 19 nt, Artificial Sequence
  Description of Artificial Sequence: Synthetic oligonucleotide
  Sense strand starting at position 3368 of SEQ ID NO: 1245079
uauggucgucuguaaagga

SEQ ID NO: 1534663 - RNA, 19 nt, Artificial Sequence
  Description of Artificial Sequence: Synthetic oligonucleotide
  Antisense strand to SEQ ID NO: 1534662
uccuuuacagacgaccaua

SEQ ID NO: 1534664 - RNA, 19 nt, Artificial Sequence
  Description of Artificial Sequence: Synthetic oligonucleotide
  Sense strand starting at position 3402 of SEQ ID NO: 1245079
gaugaaucgugaguauaca

SEQ ID NO: 1534665 - RNA, 19 nt, Artificial Sequence
  Description of Artificial Sequence: Synthetic oligonucleotide
  Antisense strand to SEQ ID NO: 1534664
uguauacucacgauucauc

SEQ ID NO: 1534666 - RNA, 19 nt, Artificial Sequence
  Description of Artificial Sequence: Synthetic oligonucleotide
  Sense strand starting at position 3403 of SEQ ID NO: 1245079
augaaucgugaguauacau

SEQ ID NO: 1534667 - RNA, 19 nt, Artificial Sequence
  Description of Artificial Sequence: Synthetic oligonucleotide
  Antisense strand to SEQ ID NO: 1534666
auguauacucacgauucau

SEQ ID NO: 1534668 - RNA, 19 nt, Artificial Sequence
  Description of Artificial Sequence: Synthetic oligonucleotide
  Sense strand starting at position 3532 of SEQ ID NO: 1245079
acuuguuguaagugaaggu

SEQ ID NO: 1534669 - RNA, 19 nt, Artificial Sequence
  Description of Artificial Sequence: Synthetic oligonucleotide
  Antisense strand to SEQ ID NO: 1534668
accuucacuuacaacaagu

SEQ ID NO: 1534670 - RNA, 19 nt, Artificial Sequence
  Description of Artificial Sequence: Synthetic oligonucleotide
  Sense strand starting at position 3668 of SEQ ID NO: 1245079
uuauauugaauggguguua

SEQ ID NO: 1534671 - RNA, 19 nt, Artificial Sequence
  Description of Artificial Sequence: Synthetic oligonucleotide
  Antisense strand to SEQ ID NO: 1534670
uaacacccauucaauauaa

SEQ ID NO: 1534672 - RNA, 19 nt, Artificial Sequence
  Description of Artificial Sequence: Synthetic oligonucleotide
  Sense strand starting at position 3717 of SEQ ID NO: 1245079
auaguaugacagcauuaau

SEQ ID NO: 1534673 - RNA, 19 nt, Artificial Sequence
  Description of Artificial Sequence: Synthetic oligonucleotide
  Antisense strand to SEQ ID NO: 1534672
auuaaugcugucauacuau

SEQ ID NO: 1534674 - RNA, 19 nt, Artificial Sequence
  Description of Artificial Sequence: Synthetic oligonucleotide
  Sense strand starting at position 3720 of SEQ ID NO: 1245079
guaugacagcauuaaucag

SEQ ID NO: 1534675 - RNA, 19 nt, Artificial Sequence
  Description of Artificial Sequence: Synthetic oligonucleotide
  Antisense strand to SEQ ID NO: 1534674
cugauuaaugcugucauac

SEQ ID NO: 1534676 - RNA, 19 nt, Artificial Sequence
  Description of Artificial Sequence: Synthetic oligonucleotide
  Sense strand starting at position 3734 of SEQ ID NO: 1245079
aucagccuugcuuauagua

SEQ ID NO: 1534677 - RNA, 19 nt, Artificial Sequence
  Description of Artificial Sequence: Synthetic oligonucleotide
  Antisense strand to SEQ ID NO: 1534676
uacuauaagcaaggcugau

SEQ ID NO: 1534678 - RNA, 19 nt, Artificial Sequence
  Description of Artificial Sequence: Synthetic oligonucleotide
  Sense strand starting at position 3742 of SEQ ID NO: 1245079
ugcuuauaguaagugagga

SEQ ID NO: 1534679 - RNA, 19 nt, Artificial Sequence
  Description of Artificial Sequence: Synthetic oligonucleotide
  Antisense strand to SEQ ID NO: 1534678
uccucacuuacuauaagca

SEQ ID NO: 1534680 - RNA, 19 nt, Artificial Sequence
  Description of Artificial Sequence: Synthetic oligonucleotide
  Sense strand starting at position 3857 of SEQ ID NO: 1245079
acaccaaacuugguguaua

SEQ ID NO: 1534681 - RNA, 19 nt, Artificial Sequence
  Description of Artificial Sequence: Synthetic oligonucleotide
  Antisense strand to SEQ ID NO: 1534680
uauacaccaaguuuggugu

SEQ ID NO: 1534682 - RNA, 19 nt, Artificial Sequence
  Description of Artificial Sequence: Synthetic oligonucleotide
  Sense strand starting at position 3899 of SEQ ID NO: 1245079
gggagugguagucaaggau

SEQ ID NO: 1534683 - RNA, 19 nt, Artificial Sequence
  Description of Artificial Sequence: Synthetic oligonucleotide
  Antisense strand to SEQ ID NO: 1534682
auccuugacuaccacuccc

SEQ ID NO: 1534684 - RNA, 19 nt, Artificial Sequence
  Description of Artificial Sequence: Synthetic oligonucleotide
  Sense strand starting at position 2 of SEQ ID NO: 1245080
aauuguggauauguaugua

SEQ ID NO: 1534685 - RNA, 19 nt, Artificial Sequence
  Description of Artificial Sequence: Synthetic oligonucleotide
  Antisense strand to SEQ ID NO: 1534684
uacauacauauccacaauu

SEQ ID NO: 1534686 - RNA, 19 nt, Artificial Sequence
  Description of Artificial Sequence: Synthetic oligonucleotide
  Sense strand starting at position 5 of SEQ ID NO: 1245080
uguggauauguauguaaau

SEQ ID NO: 1534687 - RNA, 19 nt, Artificial Sequence
  Description of Artificial Sequence: Synthetic oligonucleotide
  Antisense strand to SEQ ID NO: 1534686
auuuacauacauauccaca

SEQ ID NO: 1534688 - RNA, 19 nt, Artificial Sequence
  Description of Artificial Sequence: Synthetic oligonucleotide
  Sense strand starting at position 6 of SEQ ID NO: 1245080
guggauauguauguaaauc

SEQ ID NO: 1534689 - RNA, 19 nt, Artificial Sequence
  Description of Artificial Sequence: Synthetic oligonucleotide
  Antisense strand to SEQ ID NO: 1534688
gauuuacauacauauccac

SEQ ID NO: 1534690 - RNA, 19 nt, Artificial Sequence
  Description of Artificial Sequence: Synthetic oligonucleotide
  Sense strand starting at position 183 of SEQ ID NO: 1245080
auguuaagaugcucuauca

SEQ ID NO: 1534691 - RNA, 19 nt, Artificial Sequence
  Description of Artificial Sequence: Synthetic oligonucleotide
  Antisense strand to SEQ ID NO: 1534690
ugauagagcaucuuaacau

SEQ ID NO: 1534692 - RNA, 19 nt, Artificial Sequence
  Description of Artificial Sequence: Synthetic oligonucleotide
  Sense strand starting at position 211 of SEQ ID NO: 1245080
guucuauguauugaguaca

SEQ ID NO: 1534693 - RNA, 19 nt, Artificial Sequence
  Description of Artificial Sequence: Synthetic oligonucleotide
  Antisense strand to SEQ ID NO: 1534692
uguacucaauacauagaac

SEQ ID NO: 1534694 - RNA, 19 nt, Artificial Sequence
  Description of Artificial Sequence: Synthetic oligonucleotide
  Sense strand starting at position 438 of SEQ ID NO: 1245080
cuggcaucucuuuaggacu

SEQ ID NO: 1534695 - RNA, 19 nt, Artificial Sequence
  Description of Artificial Sequence: Synthetic oligonucleotide
  Antisense strand to SEQ ID NO: 1534694
aguccuaaagagaugccag

SEQ ID NO: 1534696 - RNA, 19 nt, Artificial Sequence
  Description of Artificial Sequence: Synthetic oligonucleotide
  Sense strand starting at position 518 of SEQ ID NO: 1245080
cuuguaauaucagcauaag

SEQ ID NO: 1534697 - RNA, 19 nt, Artificial Sequence
  Description of Artificial Sequence: Synthetic oligonucleotide
  Antisense strand to SEQ ID NO: 1534696
cuuaugcugauauuacaag

SEQ ID NO: 1534698 - RNA, 19 nt, Artificial Sequence
  Description of Artificial Sequence: Synthetic oligonucleotide
  Sense strand starting at position 519 of SEQ ID NO: 1245080
uuguaauaucagcauaaga

SEQ ID NO: 1534699 - RNA, 19 nt, Artificial Sequence
  Description of Artificial Sequence: Synthetic oligonucleotide
  Antisense strand to SEQ ID NO: 1534698
ucuuaugcugauauuacaa

SEQ ID NO: 1534700 - RNA, 19 nt, Artificial Sequence
  Description of Artificial Sequence: Synthetic oligonucleotide
  Sense strand starting at position 530 of SEQ ID NO: 1245080
gcauaagagauaugacgac

SEQ ID NO: 1534701 - RNA, 19 nt, Artificial Sequence
  Description of Artificial Sequence: Synthetic oligonucleotide
  Antisense strand to SEQ ID NO: 1534700
gucgucauaucucuuaugc

SEQ ID NO: 1534702 - RNA, 19 nt, Artificial Sequence
  Description of Artificial Sequence: Synthetic oligonucleotide
  Sense strand starting at position 551 of SEQ ID NO: 1245080
gagagcauuucuuguauuu

SEQ ID NO: 1534703 - RNA, 19 nt, Artificial Sequence
  Description of Artificial Sequence: Synthetic oligonucleotide
  Antisense strand to SEQ ID NO: 1534702
aaauacaagaaaugcucuc

SEQ ID NO: 1534704 - RNA, 19 nt, Artificial Sequence
  Description of Artificial Sequence: Synthetic oligonucleotide
  Sense strand starting at position 664 of SEQ ID NO: 1245080
ugucccagugaucaagcaa

SEQ ID NO: 1534705 - RNA, 19 nt, Artificial Sequence
  Description of Artificial Sequence: Synthetic oligonucleotide
  Antisense strand to SEQ ID NO: 1534704
uugcuugaucacugggaca

SEQ ID NO: 1534706 - RNA, 19 nt, Artificial Sequence
  Description of Artificial Sequence: Synthetic oligonucleotide
  Sense strand starting at position 1136 of SEQ ID NO: 1245080
uuugacgaaucuuucuuau

SEQ ID NO: 1534707 - RNA, 19 nt, Artificial Sequence
  Description of Artificial Sequence: Synthetic oligonucleotide
  Antisense strand to SEQ ID NO: 1534706
auaagaaagauucgucaaa

SEQ ID NO: 1534708 - RNA, 19 nt, Artificial Sequence
  Description of Artificial Sequence: Synthetic oligonucleotide
  Sense strand starting at position 1138 of SEQ ID NO: 1245080
ugacgaaucuuucuuauau

SEQ ID NO: 1534709 - RNA, 19 nt, Artificial Sequence
  Description of Artificial Sequence: Synthetic oligonucleotide
  Antisense strand to SEQ ID NO: 1534708
auauaagaaagauucguca

SEQ ID NO: 1534710 - RNA, 19 nt, Artificial Sequence
  Description of Artificial Sequence: Synthetic oligonucleotide
  Sense strand starting at position 1229 of SEQ ID NO: 1245080
ucccaaagguuuccagaga

SEQ ID NO: 1534711 - RNA, 19 nt, Artificial Sequence
  Description of Artificial Sequence: Synthetic oligonucleotide
  Antisense strand to SEQ ID NO: 1534710
ucucuggaaaccuuuggga

SEQ ID NO: 1534712 - RNA, 19 nt, Artificial Sequence
  Description of Artificial Sequence: Synthetic oligonucleotide
  Sense strand starting at position 1379 of SEQ ID NO: 1245080
ucaugcuaaguuugaaaua

SEQ ID NO: 1534713 - RNA, 19 nt, Artificial Sequence
  Description of Artificial Sequence: Synthetic oligonucleotide
  Antisense strand to SEQ ID NO: 1534712
uauuucaaacuuagcauga

SEQ ID NO: 1534714 - RNA, 19 nt, Artificial Sequence
  Description of Artificial Sequence: Synthetic oligonucleotide
  Sense strand starting at position 1416 of SEQ ID NO: 1245080
acaagaauuuagcaugaag

SEQ ID NO: 1534715 - RNA, 19 nt, Artificial Sequence
  Description of Artificial Sequence: Synthetic oligonucleotide
  Antisense strand to SEQ ID NO: 1534714
cuucaugcuaaauucuugu

SEQ ID NO: 1534716 - RNA, 19 nt, Artificial Sequence
  Description of Artificial Sequence: Synthetic oligonucleotide
  Sense strand starting at position 1593 of SEQ ID NO: 1245080
acuauuacugucuaaaugu

SEQ ID NO: 1534717 - RNA, 19 nt, Artificial Sequence
  Description of Artificial Sequence: Synthetic oligonucleotide
  Antisense strand to SEQ ID NO: 1534716
acauuuagacaguaauagu

SEQ ID NO: 1534718 - RNA, 19 nt, Artificial Sequence
  Description of Artificial Sequence: Synthetic oligonucleotide
  Sense strand starting at position 1606 of SEQ ID NO: 1245080
aaauguagagucgaaauuc

SEQ ID NO: 1534719 - RNA, 19 nt, Artificial Sequence
  Description of Artificial Sequence: Synthetic oligonucleotide
  Antisense strand to SEQ ID NO: 1534718
gaauuucgacucuacauuu

SEQ ID NO: 1534720 - RNA, 19 nt, Artificial Sequence
  Description of Artificial Sequence: Synthetic oligonucleotide
  Sense strand starting at position 1616 of SEQ ID NO: 1245080
ucgaaauucuuaccugagu

SEQ ID NO: 1534721 - RNA, 19 nt, Artificial Sequence
  Description of Artificial Sequence: Synthetic oligonucleotide
  Antisense strand to SEQ ID NO: 1534720
acucagguaagaauuucga

SEQ ID NO: 1534722 - RNA, 19 nt, Artificial Sequence
  Description of Artificial Sequence: Synthetic oligonucleotide
  Sense strand starting at position 1617 of SEQ ID NO: 1245080
cgaaauucuuaccugaguu

SEQ ID NO: 1534723 - RNA, 19 nt, Artificial Sequence
  Description of Artificial Sequence: Synthetic oligonucleotide
  Antisense strand to SEQ ID NO: 1534722
aacucagguaagaauuucg

SEQ ID NO: 1534724 - RNA, 19 nt, Artificial Sequence
  Description of Artificial Sequence: Synthetic oligonucleotide
  Sense strand starting at position 1674 of SEQ ID NO: 1245080
uaugacaaauugucaggau

SEQ ID NO: 1534725 - RNA, 19 nt, Artificial Sequence
  Description of Artificial Sequence: Synthetic oligonucleotide
  Antisense strand to SEQ ID NO: 1534724
auccugacaauuugucaua

SEQ ID NO: 1534726 - RNA, 19 nt, Artificial Sequence
  Description of Artificial Sequence: Synthetic oligonucleotide
  Sense strand starting at position 1835 of SEQ ID NO: 1245080
gcuguaccucagcaggaaa

SEQ ID NO: 1534727 - RNA, 19 nt, Artificial Sequence
  Description of Artificial Sequence: Synthetic oligonucleotide
  Antisense strand to SEQ ID NO: 1534726
uuuccugcugagguacagc

SEQ ID NO: 1534728 - RNA, 19 nt, Artificial Sequence
  Description of Artificial Sequence: Synthetic oligonucleotide
  Sense strand starting at position 2051 of SEQ ID NO: 1245080
aaagauucccauugguugu

SEQ ID NO: 1534729 - RNA, 19 nt, Artificial Sequence
  Description of Artificial Sequence: Synthetic oligonucleotide
  Antisense strand to SEQ ID NO: 1534728
acaaccaaugggaaucuuu

SEQ ID NO: 1534730 - RNA, 19 nt, Artificial Sequence
  Description of Artificial Sequence: Synthetic oligonucleotide
  Sense strand starting at position 2054 of SEQ ID NO: 1245080
gauucccauugguugugaa

SEQ ID NO: 1534731 - RNA, 19 nt, Artificial Sequence
  Description of Artificial Sequence: Synthetic oligonucleotide
  Antisense strand to SEQ ID NO: 1534730
uucacaaccaaugggaauc

SEQ ID NO: 1534732 - RNA, 19 nt, Artificial Sequence
  Description of Artificial Sequence: Synthetic oligonucleotide
  Sense strand starting at position 2141 of SEQ ID NO: 1245080
uuuaauguucccuaaguau

SEQ ID NO: 1534733 - RNA, 19 nt, Artificial Sequence
  Description of Artificial Sequence: Synthetic oligonucleotide
  Antisense strand to SEQ ID NO: 1534732
auacuuagggaacauuaaa

SEQ ID NO: 1534734 - RNA, 19 nt, Artificial Sequence
  Description of Artificial Sequence: Synthetic oligonucleotide
  Sense strand starting at position 2150 of SEQ ID NO: 1245080
cccuaaguaugguuaucca

SEQ ID NO: 1534735 - RNA, 19 nt, Artificial Sequence
  Description of Artificial Sequence: Synthetic oligonucleotide
  Antisense strand to SEQ ID NO: 1534734
uggauaaccauacuuaggg

SEQ ID NO: 1534736 - RNA, 19 nt, Artificial Sequence
  Description of Artificial Sequence: Synthetic oligonucleotide
  Sense strand starting at position 2153 of SEQ ID NO: 1245080
uaaguaugguuauccaaag

SEQ ID NO: 1534737 - RNA, 19 nt, Artificial Sequence
  Description of Artificial Sequence: Synthetic oligonucleotide
  Antisense strand to SEQ ID NO: 1534736
cuuuggauaaccauacuua

SEQ ID NO: 1534738 - RNA, 19 nt, Artificial Sequence
  Description of Artificial Sequence: Synthetic oligonucleotide
  Sense strand starting at position 2235 of SEQ ID NO: 1245080
auccacaaguguucuuaau

SEQ ID NO: 1534739 - RNA, 19 nt, Artificial Sequence
  Description of Artificial Sequence: Synthetic oligonucleotide
  Antisense strand to SEQ ID NO: 1534738
auuaagaacacuuguggau

SEQ ID NO: 1534740 - RNA, 19 nt, Artificial Sequence
  Description of Artificial Sequence: Synthetic oligonucleotide
  Sense strand starting at position 2521 of SEQ ID NO: 1245080
caggaauugugagcuguag

SEQ ID NO: 1534741 - RNA, 19 nt, Artificial Sequence
  Description of Artificial Sequence: Synthetic oligonucleotide
  Antisense strand to SEQ ID NO: 1534740
cuacagcucacaauuccug

SEQ ID NO: 1534742 - RNA, 19 nt, Artificial Sequence
  Description of Artificial Sequence: Synthetic oligonucleotide
  Sense strand starting at position 2683 of SEQ ID NO: 1245080
gcuucucugguugaaacua

SEQ ID NO: 1534743 - RNA, 19 nt, Artificial Sequence
  Description of Artificial Sequence: Synthetic oligonucleotide
  Antisense strand to SEQ ID NO: 1534742
uaguuucaaccagagaagc

SEQ ID NO: 1534744 - RNA, 19 nt, Artificial Sequence
  Description of Artificial Sequence: Synthetic oligonucleotide
  Sense strand starting at position 3121 of SEQ ID NO: 1245080
uucugucauggccaaauga

SEQ ID NO: 1534745 - RNA, 19 nt, Artificial Sequence
  Description of Artificial Sequence: Synthetic oligonucleotide
  Antisense strand to SEQ ID NO: 1534744
ucauuuggccaugacagaa

SEQ ID NO: 1534746 - RNA, 19 nt, Artificial Sequence
  Description of Artificial Sequence: Synthetic oligonucleotide
  Sense strand starting at position 3129 of SEQ ID NO: 1245080
uggccaaaugauugaaagu

SEQ ID NO: 1534747 - RNA, 19 nt, Artificial Sequence
  Description of Artificial Sequence: Synthetic oligonucleotide
  Antisense strand to SEQ ID NO: 1534746
acuuucaaucauuuggcca

SEQ ID NO: 1534748 - RNA, 19 nt, Artificial Sequence
  Description of Artificial Sequence: Synthetic oligonucleotide
  Sense strand starting at position 3139 of SEQ ID NO: 1245080
auugaaaguucuccagcca

SEQ ID NO: 1534749 - RNA, 19 nt, Artificial Sequence
  Description of Artificial Sequence: Synthetic oligonucleotide
  Antisense strand to SEQ ID NO: 1534748
uggcuggagaacuuucaau

SEQ ID NO: 1534750 - RNA, 19 nt, Artificial Sequence
  Description of Artificial Sequence: Synthetic oligonucleotide
  Sense strand starting at position 3140 of SEQ ID NO: 1245080
uugaaaguucuccagccaa

SEQ ID NO: 1534751 - RNA, 19 nt, Artificial Sequence
  Description of Artificial Sequence: Synthetic oligonucleotide
  Antisense strand to SEQ ID NO: 1534750
uuggcuggagaacuuucaa

SEQ ID NO: 1534752 - RNA, 19 nt, Artificial Sequence
  Description of Artificial Sequence: Synthetic oligonucleotide
  Sense strand starting at position 3354 of SEQ ID NO: 1245080
cuugucuuggcauaacacu

SEQ ID NO: 1534753 - RNA, 19 nt, Artificial Sequence
  Description of Artificial Sequence: Synthetic oligonucleotide
  Antisense strand to SEQ ID NO: 1534752
aguguuaugccaagacaag

SEQ ID NO: 1534754 - RNA, 19 nt, Artificial Sequence
  Description of Artificial Sequence: Synthetic oligonucleotide
  Sense strand starting at position 3459 of SEQ ID NO: 1245080
ucacauauguucuuagaua

SEQ ID NO: 1534755 - RNA, 19 nt, Artificial Sequence
  Description of Artificial Sequence: Synthetic oligonucleotide
  Antisense strand to SEQ ID NO: 1534754
uaucuaagaacauauguga

SEQ ID NO: 1534756 - RNA, 19 nt, Artificial Sequence
  Description of Artificial Sequence: Synthetic oligonucleotide
  Sense strand starting at position 3584 of SEQ ID NO: 1245080
cccaaugacugucugaauu

SEQ ID NO: 1534757 - RNA, 19 nt, Artificial Sequence
  Description of Artificial Sequence: Synthetic oligonucleotide
  Antisense strand to SEQ ID NO: 1534756
aauucagacagucauuggg

SEQ ID NO: 1534758 - RNA, 19 nt, Artificial Sequence
  Description of Artificial Sequence: Synthetic oligonucleotide
  Sense strand starting at position 3611 of SEQ ID NO: 1245080
ucauauuugucagcccacu

SEQ ID NO: 1534759 - RNA, 19 nt, Artificial Sequence
  Description of Artificial Sequence: Synthetic oligonucleotide
  Antisense strand to SEQ ID NO: 1534758
agugggcugacaaauauga

SEQ ID NO: 1534760 - RNA, 19 nt, Artificial Sequence
  Description of Artificial Sequence: Synthetic oligonucleotide
  Sense strand starting at position 3654 of SEQ ID NO: 1245080
cagauauggcaucagcuua

SEQ ID NO: 1534761 - RNA, 19 nt, Artificial Sequence
  Description of Artificial Sequence: Synthetic oligonucleotide
  Antisense strand to SEQ ID NO: 1534760
uaagcugaugccauaucug

SEQ ID NO: 1534762 - RNA, 19 nt, Artificial Sequence
  Description of Artificial Sequence: Synthetic oligonucleotide
  Sense strand starting at position 3659 of SEQ ID NO: 1245080
auggcaucagcuuaucuaa

SEQ ID NO: 1534763 - RNA, 19 nt, Artificial Sequence
  Description of Artificial Sequence: Synthetic oligonucleotide
  Antisense strand to SEQ ID NO: 1534762
uuagauaagcugaugccau

SEQ ID NO: 1534764 - RNA, 19 nt, Artificial Sequence
  Description of Artificial Sequence: Synthetic oligonucleotide
  Sense strand starting at position 45 of SEQ ID NO: 1245081
cagugaucagcauggaaca

SEQ ID NO: 1534765 - RNA, 19 nt, Artificial Sequence
  Description of Artificial Sequence: Synthetic oligonucleotide
  Antisense strand to SEQ ID NO: 1534764
uguuccaugcugaucacug

SEQ ID NO: 1534766 - RNA, 19 nt, Artificial Sequence
  Description of Artificial Sequence: Synthetic oligonucleotide
  Sense strand starting at position 268 of SEQ ID NO: 1245081
gcauuugagucucugucca

SEQ ID NO: 1534767 - RNA, 19 nt, Artificial Sequence
  Description of Artificial Sequence: Synthetic oligonucleotide
  Antisense strand to SEQ ID NO: 1534766
uggacagagacucaaaugc

SEQ ID NO: 1534768 - RNA, 19 nt, Artificial Sequence
  Description of Artificial Sequence: Synthetic oligonucleotide
  Sense strand starting at position 484 of SEQ ID NO: 1245081
caauuuguguuauugugca

SEQ ID NO: 1534769 - RNA, 19 nt, Artificial Sequence
  Description of Artificial Sequence: Synthetic oligonucleotide
  Antisense strand to SEQ ID NO: 1534768
ugcacaauaacacaaauug

SEQ ID NO: 1534770 - RNA, 19 nt, Artificial Sequence
  Description of Artificial Sequence: Synthetic oligonucleotide
  Sense strand starting at position 582 of SEQ ID NO: 1245081
ccagguauauaacccagau

SEQ ID NO: 1534771 - RNA, 19 nt, Artificial Sequence
  Description of Artificial Sequence: Synthetic oligonucleotide
  Antisense strand to SEQ ID NO: 1534770
aucuggguuauauaccugg

SEQ ID NO: 1534772 - RNA, 19 nt, Artificial Sequence
  Description of Artificial Sequence: Synthetic oligonucleotide
  Sense strand starting at position 586 of SEQ ID NO: 1245081
guauauaacccagaugcuu

SEQ ID NO: 1534773 - RNA, 19 nt, Artificial Sequence
  Description of Artificial Sequence: Synthetic oligonucleotide
  Antisense strand to SEQ ID NO: 1534772
aagcaucuggguuauauac

SEQ ID NO: 1534774 - RNA, 19 nt, Artificial Sequence
  Description of Artificial Sequence: Synthetic oligonucleotide
  Sense strand starting at position 802 of SEQ ID NO: 1245081
gucccauaagccuagauaa

SEQ ID NO: 1534775 - RNA, 19 nt, Artificial Sequence
  Description of Artificial Sequence: Synthetic oligonucleotide
  Antisense strand to SEQ ID NO: 1534774
uuaucuaggcuuaugggac

SEQ ID NO: 1534776 - RNA, 19 nt, Artificial Sequence
  Description of Artificial Sequence: Synthetic oligonucleotide
  Sense strand starting at position 851 of SEQ ID NO: 1245081
gaaauugucuuuccuagag

SEQ ID NO: 1534777 - RNA, 19 nt, Artificial Sequence
  Description of Artificial Sequence: Synthetic oligonucleotide
  Antisense strand to SEQ ID NO: 1534776
cucuaggaaagacaauuuc

SEQ ID NO: 1534778 - RNA, 19 nt, Artificial Sequence
  Description of Artificial Sequence: Synthetic oligonucleotide
  Sense strand starting at position 905 of SEQ ID NO: 1245081
auccacauagucugacauu

SEQ ID NO: 1534779 - RNA, 19 nt, Artificial Sequence
  Description of Artificial Sequence: Synthetic oligonucleotide
  Antisense strand to SEQ ID NO: 1534778
aaugucagacuauguggau

SEQ ID NO: 1534780 - RNA, 19 nt, Artificial Sequence
  Description of Artificial Sequence: Synthetic oligonucleotide
  Sense strand starting at position 920 of SEQ ID NO: 1245081
cauugcugucaaucguagu

SEQ ID NO: 1534781 - RNA, 19 nt, Artificial Sequence
  Description of Artificial Sequence: Synthetic oligonucleotide
  Antisense strand to SEQ ID NO: 1534780
acuacgauugacagcaaug

SEQ ID NO: 1534782 - RNA, 19 nt, Artificial Sequence
  Description of Artificial Sequence: Synthetic oligonucleotide
  Sense strand starting at position 996 of SEQ ID NO: 1245081
agaagaauucaucgagugu

SEQ ID NO: 1534783 - RNA, 19 nt, Artificial Sequence
  Description of Artificial Sequence: Synthetic oligonucleotide
  Antisense strand to SEQ ID NO: 1534782
acacucgaugaauucuucu

SEQ ID NO: 1534784 - RNA, 19 nt, Artificial Sequence
  Description of Artificial Sequence: Synthetic oligonucleotide
  Sense strand starting at position 1063 of SEQ ID NO: 1245081
gcucuuggaaaucaugguu

SEQ ID NO: 1534785 - RNA, 19 nt, Artificial Sequence
  Description of Artificial Sequence: Synthetic oligonucleotide
  Antisense strand to SEQ ID NO: 1534784
aaccaugauuuccaagagc

SEQ ID NO: 1534786 - RNA, 19 nt, Artificial Sequence
  Description of Artificial Sequence: Synthetic oligonucleotide
  Sense strand starting at position 1066 of SEQ ID NO: 1245081
cuuggaaaucaugguucua

SEQ ID NO: 1534787 - RNA, 19 nt, Artificial Sequence
  Description of Artificial Sequence: Synthetic oligonucleotide
  Antisense strand to SEQ ID NO: 1534786
uagaaccaugauuuccaag

SEQ ID NO: 1534788 - RNA, 19 nt, Artificial Sequence
  Description of Artificial Sequence: Synthetic oligonucleotide
  Sense strand starting at position 1077 of SEQ ID NO: 1245081
ugguucuagacugguggaa

SEQ ID NO: 1534789 - RNA, 19 nt, Artificial Sequence
  Description of Artificial Sequence: Synthetic oligonucleotide
  Antisense strand to SEQ ID NO: 1534788
uuccaccagucuagaacca

SEQ ID NO: 1534790 - RNA, 19 nt, Artificial Sequence
  Description of Artificial Sequence: Synthetic oligonucleotide
  Sense strand starting at position 1092 of SEQ ID NO: 1245081
ggaauaagccagugugaga

SEQ ID NO: 1534791 - RNA, 19 nt, Artificial Sequence
  Description of Artificial Sequence: Synthetic oligonucleotide
  Antisense strand to SEQ ID NO: 1534790
ucucacacuggcuuauucc

SEQ ID NO: 1534792 - RNA, 19 nt, Artificial Sequence
  Description of Artificial Sequence: Synthetic oligonucleotide
  Sense strand starting at position 1195 of SEQ ID NO: 1245081
aaauucugaggauguggua

SEQ ID NO: 1534793 - RNA, 19 nt, Artificial Sequence
  Description of Artificial Sequence: Synthetic oligonucleotide
  Antisense strand to SEQ ID NO: 1534792
uaccacauccucagaauuu

SEQ ID NO: 1534794 - RNA, 19 nt, Artificial Sequence
  Description of Artificial Sequence: Synthetic oligonucleotide
  Sense strand starting at position 1208 of SEQ ID NO: 1245081
gugguaacaaauuaguuga

SEQ ID NO: 1534795 - RNA, 19 nt, Artificial Sequence
  Description of Artificial Sequence: Synthetic oligonucleotide
  Antisense strand to SEQ ID NO: 1534794
ucaacuaauuuguuaccac

SEQ ID NO: 1534796 - RNA, 19 nt, Artificial Sequence
  Description of Artificial Sequence: Synthetic oligonucleotide
  Sense strand starting at position 1215 of SEQ ID NO: 1245081
caaauuaguugagucuaag

SEQ ID NO: 1534797 - RNA, 19 nt, Artificial Sequence
  Description of Artificial Sequence: Synthetic oligonucleotide
  Antisense strand to SEQ ID NO: 1534796
cuuagacucaacuaauuug

SEQ ID NO: 1534798 - RNA, 19 nt, Artificial Sequence
  Description of Artificial Sequence: Synthetic oligonucleotide
  Sense strand starting at position 1218 of SEQ ID NO: 1245081
auuaguugagucuaagguu

SEQ ID NO: 1534799 - RNA, 19 nt, Artificial Sequence
  Description of Artificial Sequence: Synthetic oligonucleotide
  Antisense strand to SEQ ID NO: 1534798
aaccuuagacucaacuaau

SEQ ID NO: 1534800 - RNA, 19 nt, Artificial Sequence
  Description of Artificial Sequence: Synthetic oligonucleotide
  Sense strand starting at position 1352 of SEQ ID NO: 1245081
ucgauaguucuggaaauua

SEQ ID NO: 1534801 - RNA, 19 nt, Artificial Sequence
  Description of Artificial Sequence: Synthetic oligonucleotide
  Antisense strand to SEQ ID NO: 1534800
uaauuuccagaacuaucga

SEQ ID NO: 1534802 - RNA, 19 nt, Artificial Sequence
  Description of Artificial Sequence: Synthetic oligonucleotide
  Sense strand starting at position 1393 of SEQ ID NO: 1245081
acuuuaugacugcaacagu

SEQ ID NO: 1534803 - RNA, 19 nt, Artificial Sequence
  Description of Artificial Sequence: Synthetic oligonucleotide
  Antisense strand to SEQ ID NO: 1534802
acuguugcagucauaaagu

SEQ ID NO: 1534804 - RNA, 19 nt, Artificial Sequence
  Description of Artificial Sequence: Synthetic oligonucleotide
  Sense strand starting at position 1396 of SEQ ID NO: 1245081
uuaugacugcaacaguaaa

SEQ ID NO: 1534805 - RNA, 19 nt, Artificial Sequence
  Description of Artificial Sequence: Synthetic oligonucleotide
  Antisense strand to SEQ ID NO: 1534804
uuuacuguugcagucauaa

SEQ ID NO: 1534806 - RNA, 19 nt, Artificial Sequence
  Description of Artificial Sequence: Synthetic oligonucleotide
  Sense strand starting at position 1633 of SEQ ID NO: 1245081
gaaugcuguauuuggguca

SEQ ID NO: 1534807 - RNA, 19 nt, Artificial Sequence
  Description of Artificial Sequence: Synthetic oligonucleotide
  Antisense strand to SEQ ID NO: 1534806
ugacccaaauacagcauuc

SEQ ID NO: 1534808 - RNA, 19 nt, Artificial Sequence
  Description of Artificial Sequence: Synthetic oligonucleotide
  Sense strand starting at position 1649 of SEQ ID NO: 1245081
ucaagaugcccagagcaau

SEQ ID NO: 1534809 - RNA, 19 nt, Artificial Sequence
  Description of Artificial Sequence: Synthetic oligonucleotide
  Antisense strand to SEQ ID NO: 1534808
auugcucugggcaucuuga

SEQ ID NO: 1534810 - RNA, 19 nt, Artificial Sequence
  Description of Artificial Sequence: Synthetic oligonucleotide
  Sense strand starting at position 1732 of SEQ ID NO: 1245081
uuuauugagcaguggauga

SEQ ID NO: 1534811 - RNA, 19 nt, Artificial Sequence
  Description of Artificial Sequence: Synthetic oligonucleotide
  Antisense strand to SEQ ID NO: 1534810
ucauccacugcucaauaaa

SEQ ID NO: 1534812 - RNA, 19 nt, Artificial Sequence
  Description of Artificial Sequence: Synthetic oligonucleotide
  Sense strand starting at position 1781 of SEQ ID NO: 1245081
ugaauuggcaaucgggaga

SEQ ID NO: 1534813 - RNA, 19 nt, Artificial Sequence
  Description of Artificial Sequence: Synthetic oligonucleotide
  Antisense strand to SEQ ID NO: 1534812
ucucccgauugccaauuca

SEQ ID NO: 1534814 - RNA, 19 nt, Artificial Sequence
  Description of Artificial Sequence: Synthetic oligonucleotide
  Sense strand starting at position 1786 of SEQ ID NO: 1245081
uggcaaucgggagauucuu

SEQ ID NO: 1534815 - RNA, 19 nt, Artificial Sequence
  Description of Artificial Sequence: Synthetic oligonucleotide
  Antisense strand to SEQ ID NO: 1534814
aagaaucucccgauugcca

SEQ ID NO: 1534816 - RNA, 19 nt, Artificial Sequence
  Description of Artificial Sequence: Synthetic oligonucleotide
  Sense strand starting at position 1801 of SEQ ID NO: 1245081
ucuuauauuccugaguuug

SEQ ID NO: 1534817 - RNA, 19 nt, Artificial Sequence
  Description of Artificial Sequence: Synthetic oligonucleotide
  Antisense strand to SEQ ID NO: 1534816
caaacucaggaauauaaga

SEQ ID NO: 1534818 - RNA, 19 nt, Artificial Sequence
  Description of Artificial Sequence: Synthetic oligonucleotide
  Sense strand starting at position 1806 of SEQ ID NO: 1245081
uauuccugaguuugaagau

SEQ ID NO: 1534819 - RNA, 19 nt, Artificial Sequence
  Description of Artificial Sequence: Synthetic oligonucleotide
  Antisense strand to SEQ ID NO: 1534818
aucuucaaacucaggaaua

SEQ ID NO: 1534820 - RNA, 19 nt, Artificial Sequence
  Description of Artificial Sequence: Synthetic oligonucleotide
  Sense strand starting at position 1813 of SEQ ID NO: 1245081
gaguuugaagauugcugga

SEQ ID NO: 1534821 - RNA, 19 nt, Artificial Sequence
  Description of Artificial Sequence: Synthetic oligonucleotide
  Antisense strand to SEQ ID NO: 1534820
uccagcaaucuucaaacuc

SEQ ID NO: 1534822 - RNA, 19 nt, Artificial Sequence
  Description of Artificial Sequence: Synthetic oligonucleotide
  Sense strand starting at position 1982 of SEQ ID NO: 1245081
ugacuugauugagcagaca

SEQ ID NO: 1534823 - RNA, 19 nt, Artificial Sequence
  Description of Artificial Sequence: Synthetic oligonucleotide
  Antisense strand to SEQ ID NO: 1534822
ugucugcucaaucaaguca

SEQ ID NO: 1534824 - RNA, 19 nt, Artificial Sequence
  Description of Artificial Sequence: Synthetic oligonucleotide
  Sense strand starting at position 1985 of SEQ ID NO: 1245081
cuugauugagcagacacuu

SEQ ID NO: 1534825 - RNA, 19 nt, Artificial Sequence
  Description of Artificial Sequence: Synthetic oligonucleotide
  Antisense strand to SEQ ID NO: 1534824
aagugucugcucaaucaag

SEQ ID NO: 1534826 - RNA, 19 nt, Artificial Sequence
  Description of Artificial Sequence: Synthetic oligonucleotide
  Sense strand starting at position 2651 of SEQ ID NO: 1245081
gucgguuaucccgugucca

SEQ ID NO: 1534827 - RNA, 19 nt, Artificial Sequence
  Description of Artificial Sequence: Synthetic oligonucleotide
  Antisense strand to SEQ ID NO: 1534826
uggacacgggauaaccgac

SEQ ID NO: 1534828 - RNA, 19 nt, Artificial Sequence
  Description of Artificial Sequence: Synthetic oligonucleotide
  Sense strand starting at position 2987 of SEQ ID NO: 1245081
ugccacuugggaugauaca

SEQ ID NO: 1534829 - RNA, 19 nt, Artificial Sequence
  Description of Artificial Sequence: Synthetic oligonucleotide
  Antisense strand to SEQ ID NO: 1534828
uguaucaucccaaguggca

SEQ ID NO: 1534830 - RNA, 19 nt, Artificial Sequence
  Description of Artificial Sequence: Synthetic oligonucleotide
  Sense strand starting at position 3425 of SEQ ID NO: 1245081
gugaauauacacugugaac

SEQ ID NO: 1534831 - RNA, 19 nt, Artificial Sequence
  Description of Artificial Sequence: Synthetic oligonucleotide
  Antisense strand to SEQ ID NO: 1534830
guucacaguguauauucac

SEQ ID NO: 1534832 - RNA, 19 nt, Artificial Sequence
  Description of Artificial Sequence: Synthetic oligonucleotide
  Sense strand starting at position 3427 of SEQ ID NO: 1245081
gaauauacacugugaacug

SEQ ID NO: 1534833 - RNA, 19 nt, Artificial Sequence
  Description of Artificial Sequence: Synthetic oligonucleotide
  Antisense strand to SEQ ID NO: 1534832
caguucacaguguauauuc

SEQ ID NO: 1534834 - RNA, 19 nt, Artificial Sequence
  Description of Artificial Sequence: Synthetic oligonucleotide
  Sense strand starting at position 3565 of SEQ ID NO: 1245081
uuagcauucucauccagag

SEQ ID NO: 1534835 - RNA, 19 nt, Artificial Sequence
  Description of Artificial Sequence: Synthetic oligonucleotide
  Antisense strand to SEQ ID NO: 1534834
cucuggaugagaaugcuaa

SEQ ID NO: 1534836 - RNA, 19 nt, Artificial Sequence
  Description of Artificial Sequence: Synthetic oligonucleotide
  Sense strand starting at position 3628 of SEQ ID NO: 1245081
aagguuaaaucagcaaagu

SEQ ID NO: 1534837 - RNA, 19 nt, Artificial Sequence
  Description of Artificial Sequence: Synthetic oligonucleotide
  Antisense strand to SEQ ID NO: 1534836
acuuugcugauuuaaccuu

SEQ ID NO: 1534838 - RNA, 19 nt, Artificial Sequence
  Description of Artificial Sequence: Synthetic oligonucleotide
  Sense strand starting at position 3629 of SEQ ID NO: 1245081
agguuaaaucagcaaaguc

SEQ ID NO: 1534839 - RNA, 19 nt, Artificial Sequence
  Description of Artificial Sequence: Synthetic oligonucleotide
  Antisense strand to SEQ ID NO: 1534838
gacuuugcugauuuaaccu

SEQ ID NO: 1534840 - RNA, 19 nt, Artificial Sequence
  Description of Artificial Sequence: Synthetic oligonucleotide
  Sense strand starting at position 3889 of SEQ ID NO: 1245081
gcuuguucucaauacaaug

SEQ ID NO: 1534841 - RNA, 19 nt, Artificial Sequence
  Description of Artificial Sequence: Synthetic oligonucleotide
  Antisense strand to SEQ ID NO: 1534840
cauuguauugagaacaagc

SEQ ID NO: 1534842 - RNA, 19 nt, Artificial Sequence
  Description of Artificial Sequence: Synthetic oligonucleotide
  Sense strand starting at position 3926 of SEQ ID NO: 1245081
gaaucauuugcaugccagu

SEQ ID NO: 1534843 - RNA, 19 nt, Artificial Sequence
  Description of Artificial Sequence: Synthetic oligonucleotide
  Antisense strand to SEQ ID NO: 1534842
acuggcaugcaaaugauuc

SEQ ID NO: 1534844 - RNA, 19 nt, Artificial Sequence
  Description of Artificial Sequence: Synthetic oligonucleotide
  Sense strand starting at position 162 of SEQ ID NO: 1245082
gucccauaagccuagauaa

SEQ ID NO: 1534845 - RNA, 19 nt, Artificial Sequence
  Description of Artificial Sequence: Synthetic oligonucleotide
  Antisense strand to SEQ ID NO: 1534844
uuaucuaggcuuaugggac

SEQ ID NO: 1534846 - RNA, 19 nt, Artificial Sequence
  Description of Artificial Sequence: Synthetic oligonucleotide
  Sense strand starting at position 211 of SEQ ID NO: 1245082
gaaauugucuuuccuagag

SEQ ID NO: 1534847 - RNA, 19 nt, Artificial Sequence
  Description of Artificial Sequence: Synthetic oligonucleotide
  Antisense strand to SEQ ID NO: 1534846
cucuaggaaagacaauuuc

SEQ ID NO: 1534848 - RNA, 19 nt, Artificial Sequence
  Description of Artificial Sequence: Synthetic oligonucleotide
  Sense strand starting at position 265 of SEQ ID NO: 1245082
auccacauagucugacauu

SEQ ID NO: 1534849 - RNA, 19 nt, Artificial Sequence
  Description of Artificial Sequence: Synthetic oligonucleotide
  Antisense strand to SEQ ID NO: 1534848
aaugucagacuauguggau

SEQ ID NO: 1534850 - RNA, 19 nt, Artificial Sequence
  Description of Artificial Sequence: Synthetic oligonucleotide
  Sense strand starting at position 280 of SEQ ID NO: 1245082
cauugcugucaaucguagu

SEQ ID NO: 1534851 - RNA, 19 nt, Artificial Sequence
  Description of Artificial Sequence: Synthetic oligonucleotide
  Antisense strand to SEQ ID NO: 1534850
acuacgauugacagcaaug

SEQ ID NO: 1534852 - RNA, 19 nt, Artificial Sequence
  Description of Artificial Sequence: Synthetic oligonucleotide
  Sense strand starting at position 356 of SEQ ID NO: 1245082
agaagaauucaucgagugu

SEQ ID NO: 1534853 - RNA, 19 nt, Artificial Sequence
  Description of Artificial Sequence: Synthetic oligonucleotide
  Antisense strand to SEQ ID NO: 1534852
acacucgaugaauucuucu

SEQ ID NO: 1534854 - RNA, 19 nt, Artificial Sequence
  Description of Artificial Sequence: Synthetic oligonucleotide
  Sense strand starting at position 402 of SEQ ID NO: 1245082
uugggaauuuaugagucca

SEQ ID NO: 1534855 - RNA, 19 nt, Artificial Sequence
  Description of Artificial Sequence: Synthetic oligonucleotide
  Antisense strand to SEQ ID NO: 1534854
uggacucauaaauucccaa

SEQ ID NO: 1534856 - RNA, 19 nt, Artificial Sequence
  Description of Artificial Sequence: Synthetic oligonucleotide
  Sense strand starting at position 423 of SEQ ID NO: 1245082
gcucuuggaaaucaugguu

SEQ ID NO: 1534857 - RNA, 19 nt, Artificial Sequence
  Description of Artificial Sequence: Synthetic oligonucleotide
  Antisense strand to SEQ ID NO: 1534856
aaccaugauuuccaagagc

SEQ ID NO: 1534858 - RNA, 19 nt, Artificial Sequence
  Description of Artificial Sequence: Synthetic oligonucleotide
  Sense strand starting at position 426 of SEQ ID NO: 1245082
cuuggaaaucaugguucua

SEQ ID NO: 1534859 - RNA, 19 nt, Artificial Sequence
  Description of Artificial Sequence: Synthetic oligonucleotide
  Antisense strand to SEQ ID NO: 1534858
uagaaccaugauuuccaag

SEQ ID NO: 1534860 - RNA, 19 nt, Artificial Sequence
  Description of Artificial Sequence: Synthetic oligonucleotide
  Sense strand starting at position 437 of SEQ ID NO: 1245082
ugguucuagacugguggaa

SEQ ID NO: 1534861 - RNA, 19 nt, Artificial Sequence
  Description of Artificial Sequence: Synthetic oligonucleotide
  Antisense strand to SEQ ID NO: 1534860
uuccaccagucuagaacca

SEQ ID NO: 1534862 - RNA, 19 nt, Artificial Sequence
  Description of Artificial Sequence: Synthetic oligonucleotide
  Sense strand starting at position 452 of SEQ ID NO: 1245082
ggaauaagccagugugaga

SEQ ID NO: 1534863 - RNA, 19 nt, Artificial Sequence
  Description of Artificial Sequence: Synthetic oligonucleotide
  Antisense strand to SEQ ID NO: 1534862
ucucacacuggcuuauucc

SEQ ID NO: 1534864 - RNA, 19 nt, Artificial Sequence
  Description of Artificial Sequence: Synthetic oligonucleotide
  Sense strand starting at position 555 of SEQ ID NO: 1245082
aaauucugaggauguggua

SEQ ID NO: 1534865 - RNA, 19 nt, Artificial Sequence
  Description of Artificial Sequence: Synthetic oligonucleotide
  Antisense strand to SEQ ID NO: 1534864
uaccacauccucagaauuu

SEQ ID NO: 1534866 - RNA, 19 nt, Artificial Sequence
  Description of Artificial Sequence: Synthetic oligonucleotide
  Sense strand starting at position 568 of SEQ ID NO: 1245082
gugguaacaaauuaguuga

SEQ ID NO: 1534867 - RNA, 19 nt, Artificial Sequence
  Description of Artificial Sequence: Synthetic oligonucleotide
  Antisense strand to SEQ ID NO: 1534866
ucaacuaauuuguuaccac

SEQ ID NO: 1534868 - RNA, 19 nt, Artificial Sequence
  Description of Artificial Sequence: Synthetic oligonucleotide
  Sense strand starting at position 575 of SEQ ID NO: 1245082
caaauuaguugagucuaag

SEQ ID NO: 1534869 - RNA, 19 nt, Artificial Sequence
  Description of Artificial Sequence: Synthetic oligonucleotide
  Antisense strand to SEQ ID NO: 1534868
cuuagacucaacuaauuug

SEQ ID NO: 1534870 - RNA, 19 nt, Artificial Sequence
  Description of Artificial Sequence: Synthetic oligonucleotide
  Sense strand starting at position 578 of SEQ ID NO: 1245082
auuaguugagucuaagguu

SEQ ID NO: 1534871 - RNA, 19 nt, Artificial Sequence
  Description of Artificial Sequence: Synthetic oligonucleotide
  Antisense strand to SEQ ID NO: 1534870
aaccuuagacucaacuaau

SEQ ID NO: 1534872 - RNA, 19 nt, Artificial Sequence
  Description of Artificial Sequence: Synthetic oligonucleotide
  Sense strand starting at position 623 of SEQ ID NO: 1245082
gagagaagucuggguugug

SEQ ID NO: 1534873 - RNA, 19 nt, Artificial Sequence
  Description of Artificial Sequence: Synthetic oligonucleotide
  Antisense strand to SEQ ID NO: 1534872
cacaacccagacuucucuc

SEQ ID NO: 1534874 - RNA, 19 nt, Artificial Sequence
  Description of Artificial Sequence: Synthetic oligonucleotide
  Sense strand starting at position 712 of SEQ ID NO: 1245082
ucgauaguucuggaaauua

SEQ ID NO: 1534875 - RNA, 19 nt, Artificial Sequence
  Description of Artificial Sequence: Synthetic oligonucleotide
  Antisense strand to SEQ ID NO: 1534874
uaauuuccagaacuaucga

SEQ ID NO: 1534876 - RNA, 19 nt, Artificial Sequence
  Description of Artificial Sequence: Synthetic oligonucleotide
  Sense strand starting at position 753 of SEQ ID NO: 1245082
acuuuaugacugcaacagu

SEQ ID NO: 1534877 - RNA, 19 nt, Artificial Sequence
  Description of Artificial Sequence: Synthetic oligonucleotide
  Antisense strand to SEQ ID NO: 1534876
acuguugcagucauaaagu

SEQ ID NO: 1534878 - RNA, 19 nt, Artificial Sequence
  Description of Artificial Sequence: Synthetic oligonucleotide
  Sense strand starting at position 756 of SEQ ID NO: 1245082
uuaugacugcaacaguaaa

SEQ ID NO: 1534879 - RNA, 19 nt, Artificial Sequence
  Description of Artificial Sequence: Synthetic oligonucleotide
  Antisense strand to SEQ ID NO: 1534878
uuuacuguugcagucauaa

SEQ ID NO: 1534880 - RNA, 19 nt, Artificial Sequence
  Description of Artificial Sequence: Synthetic oligonucleotide
  Sense strand starting at position 993 of SEQ ID NO: 1245082
gaaugcuguauuuggguca

SEQ ID NO: 1534881 - RNA, 19 nt, Artificial Sequence
  Description of Artificial Sequence: Synthetic oligonucleotide
  Antisense strand to SEQ ID NO: 1534880
ugacccaaauacagcauuc

SEQ ID NO: 1534882 - RNA, 19 nt, Artificial Sequence
  Description of Artificial Sequence: Synthetic oligonucleotide
  Sense strand starting at position 1009 of SEQ ID NO: 1245082
ucaagaugcccagagcaau

SEQ ID NO: 1534883 - RNA, 19 nt, Artificial Sequence
  Description of Artificial Sequence: Synthetic oligonucleotide
  Antisense strand to SEQ ID NO: 1534882
auugcucugggcaucuuga

SEQ ID NO: 1534884 - RNA, 19 nt, Artificial Sequence
  Description of Artificial Sequence: Synthetic oligonucleotide
  Sense strand starting at position 1092 of SEQ ID NO: 1245082
uuuauugagcaguggauga

SEQ ID NO: 1534885 - RNA, 19 nt, Artificial Sequence
  Description of Artificial Sequence: Synthetic oligonucleotide
  Antisense strand to SEQ ID NO: 1534884
ucauccacugcucaauaaa

SEQ ID NO: 1534886 - RNA, 19 nt, Artificial Sequence
  Description of Artificial Sequence: Synthetic oligonucleotide
  Sense strand starting at position 1141 of SEQ ID NO: 1245082
ugaauuggcaaucgggaga

SEQ ID NO: 1534887 - RNA, 19 nt, Artificial Sequence
  Description of Artificial Sequence: Synthetic oligonucleotide
  Antisense strand to SEQ ID NO: 1534886
ucucccgauugccaauuca

SEQ ID NO: 1534888 - RNA, 19 nt, Artificial Sequence
  Description of Artificial Sequence: Synthetic oligonucleotide
  Sense strand starting at position 1146 of SEQ ID NO: 1245082
uggcaaucgggagauucuu

SEQ ID NO: 1534889 - RNA, 19 nt, Artificial Sequence
  Description of Artificial Sequence: Synthetic oligonucleotide
  Antisense strand to SEQ ID NO: 1534888
aagaaucucccgauugcca

SEQ ID NO: 1534890 - RNA, 19 nt, Artificial Sequence
  Description of Artificial Sequence: Synthetic oligonucleotide
  Sense strand starting at position 1161 of SEQ ID NO: 1245082
ucuuauauuccugaguuug

SEQ ID NO: 1534891 - RNA, 19 nt, Artificial Sequence
  Description of Artificial Sequence: Synthetic oligonucleotide
  Antisense strand to SEQ ID NO: 1534890
caaacucaggaauauaaga

SEQ ID NO: 1534892 - RNA, 19 nt, Artificial Sequence
  Description of Artificial Sequence: Synthetic oligonucleotide
  Sense strand starting at position 1166 of SEQ ID NO: 1245082
uauuccugaguuugaagau

SEQ ID NO: 1534893 - RNA, 19 nt, Artificial Sequence
  Description of Artificial Sequence: Synthetic oligonucleotide
  Antisense strand to SEQ ID NO: 1534892
aucuucaaacucaggaaua

SEQ ID NO: 1534894 - RNA, 19 nt, Artificial Sequence
  Description of Artificial Sequence: Synthetic oligonucleotide
  Sense strand starting at position 1173 of SEQ ID NO: 1245082
gaguuugaagauugcugga

SEQ ID NO: 1534895 - RNA, 19 nt, Artificial Sequence
  Description of Artificial Sequence: Synthetic oligonucleotide
  Antisense strand to SEQ ID NO: 1534894
uccagcaaucuucaaacuc

SEQ ID NO: 1534896 - RNA, 19 nt, Artificial Sequence
  Description of Artificial Sequence: Synthetic oligonucleotide
  Sense strand starting at position 1342 of SEQ ID NO: 1245082
ugacuugauugagcagaca

SEQ ID NO: 1534897 - RNA, 19 nt, Artificial Sequence
  Description of Artificial Sequence: Synthetic oligonucleotide
  Antisense strand to SEQ ID NO: 1534896
ugucugcucaaucaaguca

SEQ ID NO: 1534898 - RNA, 19 nt, Artificial Sequence
  Description of Artificial Sequence: Synthetic oligonucleotide
  Sense strand starting at position 1345 of SEQ ID NO: 1245082
cuugauugagcagacacuu

SEQ ID NO: 1534899 - RNA, 19 nt, Artificial Sequence
  Description of Artificial Sequence: Synthetic oligonucleotide
  Antisense strand to SEQ ID NO: 1534898
aagugucugcucaaucaag

SEQ ID NO: 1534900 - RNA, 19 nt, Artificial Sequence
  Description of Artificial Sequence: Synthetic oligonucleotide
  Sense strand starting at position 2011 of SEQ ID NO: 1245082
gucgguuaucccgugucca

SEQ ID NO: 1534901 - RNA, 19 nt, Artificial Sequence
  Description of Artificial Sequence: Synthetic oligonucleotide
  Antisense strand to SEQ ID NO: 1534900
uggacacgggauaaccgac

SEQ ID NO: 1534902 - RNA, 19 nt, Artificial Sequence
  Description of Artificial Sequence: Synthetic oligonucleotide
  Sense strand starting at position 2347 of SEQ ID NO: 1245082
ugccacuugggaugauaca

SEQ ID NO: 1534903 - RNA, 19 nt, Artificial Sequence
  Description of Artificial Sequence: Synthetic oligonucleotide
  Antisense strand to SEQ ID NO: 1534902
uguaucaucccaaguggca

SEQ ID NO: 1534904 - RNA, 19 nt, Artificial Sequence
  Description of Artificial Sequence: Synthetic oligonucleotide
  Sense strand starting at position 2785 of SEQ ID NO: 1245082
gugaauauacacugugaac

SEQ ID NO: 1534905 - RNA, 19 nt, Artificial Sequence
  Description of Artificial Sequence: Synthetic oligonucleotide
  Antisense strand to SEQ ID NO: 1534904
guucacaguguauauucac

SEQ ID NO: 1534906 - RNA, 19 nt, Artificial Sequence
  Description of Artificial Sequence: Synthetic oligonucleotide
  Sense strand starting at position 2787 of SEQ ID NO: 1245082
gaauauacacugugaacug

SEQ ID NO: 1534907 - RNA, 19 nt, Artificial Sequence
  Description of Artificial Sequence: Synthetic oligonucleotide
  Antisense strand to SEQ ID NO: 1534906
caguucacaguguauauuc

SEQ ID NO: 1534908 - RNA, 19 nt, Artificial Sequence
  Description of Artificial Sequence: Synthetic oligonucleotide
  Sense strand starting at position 2925 of SEQ ID NO: 1245082
uuagcauucucauccagag

SEQ ID NO: 1534909 - RNA, 19 nt, Artificial Sequence
  Description of Artificial Sequence: Synthetic oligonucleotide
  Antisense strand to SEQ ID NO: 1534908
cucuggaugagaaugcuaa

SEQ ID NO: 1534910 - RNA, 19 nt, Artificial Sequence
  Description of Artificial Sequence: Synthetic oligonucleotide
  Sense strand starting at position 2988 of SEQ ID NO: 1245082
aagguuaaaucagcaaagu

SEQ ID NO: 1534911 - RNA, 19 nt, Artificial Sequence
  Description of Artificial Sequence: Synthetic oligonucleotide
  Antisense strand to SEQ ID NO: 1534910
acuuugcugauuuaaccuu

SEQ ID NO: 1534912 - RNA, 19 nt, Artificial Sequence
  Description of Artificial Sequence: Synthetic oligonucleotide
  Sense strand starting at position 2989 of SEQ ID NO: 1245082
agguuaaaucagcaaaguc

SEQ ID NO: 1534913 - RNA, 19 nt, Artificial Sequence
  Description of Artificial Sequence: Synthetic oligonucleotide
  Antisense strand to SEQ ID NO: 1534912
gacuuugcugauuuaaccu

SEQ ID NO: 1534914 - RNA, 19 nt, Artificial Sequence
  Description of Artificial Sequence: Synthetic oligonucleotide
  Sense strand starting at position 3249 of SEQ ID NO: 1245082
gcuuguucucaauacaaug

SEQ ID NO: 1534915 - RNA, 19 nt, Artificial Sequence
  Description of Artificial Sequence: Synthetic oligonucleotide
  Antisense strand to SEQ ID NO: 1534914
cauuguauugagaacaagc

SEQ ID NO: 1534916 - RNA, 19 nt, Artificial Sequence
  Description of Artificial Sequence: Synthetic oligonucleotide
  Sense strand starting at position 3286 of SEQ ID NO: 1245082
gaaucauuugcaugccagu

SEQ ID NO: 1534917 - RNA, 19 nt, Artificial Sequence
  Description of Artificial Sequence: Synthetic oligonucleotide
  Antisense strand to SEQ ID NO: 1534916
acuggcaugcaaaugauuc

SEQ ID NO: 1534918 - RNA, 19 nt, Artificial Sequence
  Description of Artificial Sequence: Synthetic oligonucleotide
  Sense strand starting at position 3533 of SEQ ID NO: 1245082
cuuuaaauuugguggauuu

SEQ ID NO: 1534919 - RNA, 19 nt, Artificial Sequence
  Description of Artificial Sequence: Synthetic oligonucleotide
  Antisense strand to SEQ ID NO: 1534918
aaauccaccaaauuuaaag

SEQ ID NO: 1534920 - RNA, 19 nt, Artificial Sequence
  Description of Artificial Sequence: Synthetic oligonucleotide
  Sense strand starting at position 3698 of SEQ ID NO: 1245082
aagggauauucucuauugu

SEQ ID NO: 1534921 - RNA, 19 nt, Artificial Sequence
  Description of Artificial Sequence: Synthetic oligonucleotide
  Antisense strand to SEQ ID NO: 1534920
acaauagagaauaucccuu

SEQ ID NO: 1534922 - RNA, 19 nt, Artificial Sequence
  Description of Artificial Sequence: Synthetic oligonucleotide
  Sense strand starting at position 3699 of SEQ ID NO: 1245082
agggauauucucuauuguc

SEQ ID NO: 1534923 - RNA, 19 nt, Artificial Sequence
  Description of Artificial Sequence: Synthetic oligonucleotide
  Antisense strand to SEQ ID NO: 1534922
gacaauagagaauaucccu

SEQ ID NO: 1534924 - RNA, 19 nt, Artificial Sequence
  Description of Artificial Sequence: Synthetic oligonucleotide
  Sense strand starting at position 256 of SEQ ID NO: 1245083
aacauugguuuguuggaga

SEQ ID NO: 1534925 - RNA, 19 nt, Artificial Sequence
  Description of Artificial Sequence: Synthetic oligonucleotide
  Antisense strand to SEQ ID NO: 1534924
ucuccaacaaaccaauguu

SEQ ID NO: 1534926 - RNA, 19 nt, Artificial Sequence
  Description of Artificial Sequence: Synthetic oligonucleotide
  Sense strand starting at position 261 of SEQ ID NO: 1245083
ugguuuguuggagaguuac

SEQ ID NO: 1534927 - RNA, 19 nt, Artificial Sequence
  Description of Artificial Sequence: Synthetic oligonucleotide
  Antisense strand to SEQ ID NO: 1534926
guaacucuccaacaaacca

SEQ ID NO: 1534928 - RNA, 19 nt, Artificial Sequence
  Description of Artificial Sequence: Synthetic oligonucleotide
  Sense strand starting at position 303 of SEQ ID NO: 1245083
uaggaaccuggauguuuaa

SEQ ID NO: 1534929 - RNA, 19 nt, Artificial Sequence
  Description of Artificial Sequence: Synthetic oligonucleotide
  Antisense strand to SEQ ID NO: 1534928
uuaaacauccagguuccua

SEQ ID NO: 1534930 - RNA, 19 nt, Artificial Sequence
  Description of Artificial Sequence: Synthetic oligonucleotide
  Sense strand starting at position 370 of SEQ ID NO: 1245083
aaauaagagguuggcucau

SEQ ID NO: 1534931 - RNA, 19 nt, Artificial Sequence
  Description of Artificial Sequence: Synthetic oligonucleotide
  Antisense strand to SEQ ID NO: 1534930
augagccaaccucuuauuu

SEQ ID NO: 1534932 - RNA, 19 nt, Artificial Sequence
  Description of Artificial Sequence: Synthetic oligonucleotide
  Sense strand starting at position 372 of SEQ ID NO: 1245083
auaagagguuggcucauau

SEQ ID NO: 1534933 - RNA, 19 nt, Artificial Sequence
  Description of Artificial Sequence: Synthetic oligonucleotide
  Antisense strand to SEQ ID NO: 1534932
auaugagccaaccucuuau

SEQ ID NO: 1534934 - RNA, 19 nt, Artificial Sequence
  Description of Artificial Sequence: Synthetic oligonucleotide
  Sense strand starting at position 466 of SEQ ID NO: 1245083
aggucuaccaaauggugaa

SEQ ID NO: 1534935 - RNA, 19 nt, Artificial Sequence
  Description of Artificial Sequence: Synthetic oligonucleotide
  Antisense strand to SEQ ID NO: 1534934
uucaccauuugguagaccu

SEQ ID NO: 1534936 - RNA, 19 nt, Artificial Sequence
  Description of Artificial Sequence: Synthetic oligonucleotide
  Sense strand starting at position 496 of SEQ ID NO: 1245083
auagccauggcauggaaua

SEQ ID NO: 1534937 - RNA, 19 nt, Artificial Sequence
  Description of Artificial Sequence: Synthetic oligonucleotide
  Antisense strand to SEQ ID NO: 1534936
uauuccaugccauggcuau

SEQ ID NO: 1534938 - RNA, 19 nt, Artificial Sequence
  Description of Artificial Sequence: Synthetic oligonucleotide
  Sense strand starting at position 497 of SEQ ID NO: 1245083
uagccauggcauggaauaa

SEQ ID NO: 1534939 - RNA, 19 nt, Artificial Sequence
  Description of Artificial Sequence: Synthetic oligonucleotide
  Antisense strand to SEQ ID NO: 1534938
uuauuccaugccauggcua

SEQ ID NO: 1534940 - RNA, 19 nt, Artificial Sequence
  Description of Artificial Sequence: Synthetic oligonucleotide
  Sense strand starting at position 627 of SEQ ID NO: 1245083
acgauuccaucuguaugaa

SEQ ID NO: 1534941 - RNA, 19 nt, Artificial Sequence
  Description of Artificial Sequence: Synthetic oligonucleotide
  Antisense strand to SEQ ID NO: 1534940
uucauacagauggaaucgu

SEQ ID NO: 1534942 - RNA, 19 nt, Artificial Sequence
  Description of Artificial Sequence: Synthetic oligonucleotide
  Sense strand starting at position 628 of SEQ ID NO: 1245083
cgauuccaucuguaugaaa

SEQ ID NO: 1534943 - RNA, 19 nt, Artificial Sequence
  Description of Artificial Sequence: Synthetic oligonucleotide
  Antisense strand to SEQ ID NO: 1534942
uuucauacagauggaaucg

SEQ ID NO: 1534944 - RNA, 19 nt, Artificial Sequence
  Description of Artificial Sequence: Synthetic oligonucleotide
  Sense strand starting at position 703 of SEQ ID NO: 1245083
gguaagaacggugagugau

SEQ ID NO: 1534945 - RNA, 19 nt, Artificial Sequence
  Description of Artificial Sequence: Synthetic oligonucleotide
  Antisense strand to SEQ ID NO: 1534944
aucacucaccguucuuacc

SEQ ID NO: 1534946 - RNA, 19 nt, Artificial Sequence
  Description of Artificial Sequence: Synthetic oligonucleotide
  Sense strand starting at position 1049 of SEQ ID NO: 1245083
ucuagauuauugucaucca

SEQ ID NO: 1534947 - RNA, 19 nt, Artificial Sequence
  Description of Artificial Sequence: Synthetic oligonucleotide
  Antisense strand to SEQ ID NO: 1534946
uggaugacaauaaucuaga

SEQ ID NO: 1534948 - RNA, 19 nt, Artificial Sequence
  Description of Artificial Sequence: Synthetic oligonucleotide
  Sense strand starting at position 1099 of SEQ ID NO: 1245083
ugaaauugauacuuagcua

SEQ ID NO: 1534949 - RNA, 19 nt, Artificial Sequence
  Description of Artificial Sequence: Synthetic oligonucleotide
  Antisense strand to SEQ ID NO: 1534948
uagcuaaguaucaauuuca

SEQ ID NO: 1534950 - RNA, 19 nt, Artificial Sequence
  Description of Artificial Sequence: Synthetic oligonucleotide
  Sense strand starting at position 1261 of SEQ ID NO: 1245083
aaggaaauaugugauuuga

SEQ ID NO: 1534951 - RNA, 19 nt, Artificial Sequence
  Description of Artificial Sequence: Synthetic oligonucleotide
  Antisense strand to SEQ ID NO: 1534950
ucaaaucacauauuuccuu

SEQ ID NO: 1534952 - RNA, 19 nt, Artificial Sequence
  Description of Artificial Sequence: Synthetic oligonucleotide
  Sense strand starting at position 1302 of SEQ ID NO: 1245083
gucgaaauugaauggauca

SEQ ID NO: 1534953 - RNA, 19 nt, Artificial Sequence
  Description of Artificial Sequence: Synthetic oligonucleotide
  Antisense strand to SEQ ID NO: 1534952
ugauccauucaauuucgac

SEQ ID NO: 1534954 - RNA, 19 nt, Artificial Sequence
  Description of Artificial Sequence: Synthetic oligonucleotide
  Sense strand starting at position 1318 of SEQ ID NO: 1245083
ucauuuauguggucuguaa

SEQ ID NO: 1534955 - RNA, 19 nt, Artificial Sequence
  Description of Artificial Sequence: Synthetic oligonucleotide
  Antisense strand to SEQ ID NO: 1534954
uuacagaccacauaaauga

SEQ ID NO: 1534956 - RNA, 19 nt, Artificial Sequence
  Description of Artificial Sequence: Synthetic oligonucleotide
  Sense strand starting at position 1322 of SEQ ID NO: 1245083
uuauguggucuguaaaucu

SEQ ID NO: 1534957 - RNA, 19 nt, Artificial Sequence
  Description of Artificial Sequence: Synthetic oligonucleotide
  Antisense strand to SEQ ID NO: 1534956
agauuuacagaccacauaa

SEQ ID NO: 1534958 - RNA, 19 nt, Artificial Sequence
  Description of Artificial Sequence: Synthetic oligonucleotide
  Sense strand starting at position 1364 of SEQ ID NO: 1245083
ggaggacuccaauguagua

SEQ ID NO: 1534959 - RNA, 19 nt, Artificial Sequence
  Description of Artificial Sequence: Synthetic oligonucleotide
  Antisense strand to SEQ ID NO: 1534958
uacuacauuggaguccucc

SEQ ID NO: 1534960 - RNA, 19 nt, Artificial Sequence
  Description of Artificial Sequence: Synthetic oligonucleotide
  Sense strand starting at position 1390 of SEQ ID NO: 1245083
ggaggauagaaaugugucu

SEQ ID NO: 1534961 - RNA, 19 nt, Artificial Sequence
  Description of Artificial Sequence: Synthetic oligonucleotide
  Antisense strand to SEQ ID NO: 1534960
agacacauuucuauccucc

SEQ ID NO: 1534962 - RNA, 19 nt, Artificial Sequence
  Description of Artificial Sequence: Synthetic oligonucleotide
  Sense strand starting at position 1392 of SEQ ID NO: 1245083
aggauagaaaugugucuga

SEQ ID NO: 1534963 - RNA, 19 nt, Artificial Sequence
  Description of Artificial Sequence: Synthetic oligonucleotide
  Antisense strand to SEQ ID NO: 1534962
ucagacacauuucuauccu

SEQ ID NO: 1534964 - RNA, 19 nt, Artificial Sequence
  Description of Artificial Sequence: Synthetic oligonucleotide
  Sense strand starting at position 1456 of SEQ ID NO: 1245083
cugguucucccacacagaa

SEQ ID NO: 1534965 - RNA, 19 nt, Artificial Sequence
  Description of Artificial Sequence: Synthetic oligonucleotide
  Antisense strand to SEQ ID NO: 1534964
uucugugugggagaaccag

SEQ ID NO: 1534966 - RNA, 19 nt, Artificial Sequence
  Description of Artificial Sequence: Synthetic oligonucleotide
  Sense strand starting at position 1471 of SEQ ID NO: 1245083
agaacacaguguccucaau

SEQ ID NO: 1534967 - RNA, 19 nt, Artificial Sequence
  Description of Artificial Sequence: Synthetic oligonucleotide
  Antisense strand to SEQ ID NO: 1534966
auugaggacacuguguucu

SEQ ID NO: 1534968 - RNA, 19 nt, Artificial Sequence
  Description of Artificial Sequence: Synthetic oligonucleotide
  Sense strand starting at position 1536 of SEQ ID NO: 1245083
uguaccaaauaguuucuaa

SEQ ID NO: 1534969 - RNA, 19 nt, Artificial Sequence
  Description of Artificial Sequence: Synthetic oligonucleotide
  Antisense strand to SEQ ID NO: 1534968
uuagaaacuauuugguaca

SEQ ID NO: 1534970 - RNA, 19 nt, Artificial Sequence
  Description of Artificial Sequence: Synthetic oligonucleotide
  Sense strand starting at position 1740 of SEQ ID NO: 1245083
ugauguaaauaucucaguu

SEQ ID NO: 1534971 - RNA, 19 nt, Artificial Sequence
  Description of Artificial Sequence: Synthetic oligonucleotide
  Antisense strand to SEQ ID NO: 1534970
aacugagauauuuacauca

SEQ ID NO: 1534972 - RNA, 19 nt, Artificial Sequence
  Description of Artificial Sequence: Synthetic oligonucleotide
  Sense strand starting at position 1744 of SEQ ID NO: 1245083
guaaauaucucaguucuaa

SEQ ID NO: 1534973 - RNA, 19 nt, Artificial Sequence
  Description of Artificial Sequence: Synthetic oligonucleotide
  Antisense strand to SEQ ID NO: 1534972
uuagaacugagauauuuac

SEQ ID NO: 1534974 - RNA, 19 nt, Artificial Sequence
  Description of Artificial Sequence: Synthetic oligonucleotide
  Sense strand starting at position 1930 of SEQ ID NO: 1245083
caauguugagcauacugua

SEQ ID NO: 1534975 - RNA, 19 nt, Artificial Sequence
  Description of Artificial Sequence: Synthetic oligonucleotide
  Antisense strand to SEQ ID NO: 1534974
uacaguaugcucaacauug

SEQ ID NO: 1534976 - RNA, 19 nt, Artificial Sequence
  Description of Artificial Sequence: Synthetic oligonucleotide
  Sense strand starting at position 2175 of SEQ ID NO: 1245083
cccugccuugggcagaaau

SEQ ID NO: 1534977 - RNA, 19 nt, Artificial Sequence
  Description of Artificial Sequence: Synthetic oligonucleotide
  Antisense strand to SEQ ID NO: 1534976
auuucugcccaaggcaggg

SEQ ID NO: 1534978 - RNA, 19 nt, Artificial Sequence
  Description of Artificial Sequence: Synthetic oligonucleotide
  Sense strand starting at position 2188 of SEQ ID NO: 1245083
agaaauuccucugugucag

SEQ ID NO: 1534979 - RNA, 19 nt, Artificial Sequence
  Description of Artificial Sequence: Synthetic oligonucleotide
  Antisense strand to SEQ ID NO: 1534978
cugacacagaggaauuucu

SEQ ID NO: 1534980 - RNA, 19 nt, Artificial Sequence
  Description of Artificial Sequence: Synthetic oligonucleotide
  Sense strand starting at position 2557 of SEQ ID NO: 1245083
uguucugauccuuauauuc

SEQ ID NO: 1534981 - RNA, 19 nt, Artificial Sequence
  Description of Artificial Sequence: Synthetic oligonucleotide
  Antisense strand to SEQ ID NO: 1534980
gaauauaaggaucagaaca

SEQ ID NO: 1534982 - RNA, 19 nt, Artificial Sequence
  Description of Artificial Sequence: Synthetic oligonucleotide
  Sense strand starting at position 2670 of SEQ ID NO: 1245083
guaagauaagaguguuccu

SEQ ID NO: 1534983 - RNA, 19 nt, Artificial Sequence
  Description of Artificial Sequence: Synthetic oligonucleotide
  Antisense strand to SEQ ID NO: 1534982
aggaacacucuuaucuuac

SEQ ID NO: 1534984 - RNA, 19 nt, Artificial Sequence
  Description of Artificial Sequence: Synthetic oligonucleotide
  Sense strand starting at position 2911 of SEQ ID NO: 1245083
ggcguuuaccgcaggacuu

SEQ ID NO: 1534985 - RNA, 19 nt, Artificial Sequence
  Description of Artificial Sequence: Synthetic oligonucleotide
  Antisense strand to SEQ ID NO: 1534984
aaguccugcgguaaacgcc

SEQ ID NO: 1534986 - RNA, 19 nt, Artificial Sequence
  Description of Artificial Sequence: Synthetic oligonucleotide
  Sense strand starting at position 2943 of SEQ ID NO: 1245083
cugaaauuagcaggcagaa

SEQ ID NO: 1534987 - RNA, 19 nt, Artificial Sequence
  Description of Artificial Sequence: Synthetic oligonucleotide
  Antisense strand to SEQ ID NO: 1534986
uucugccugcuaauuucag

SEQ ID NO: 1534988 - RNA, 19 nt, Artificial Sequence
  Description of Artificial Sequence: Synthetic oligonucleotide
  Sense strand starting at position 2973 of SEQ ID NO: 1245083
cccugacaaacggauugua

SEQ ID NO: 1534989 - RNA, 19 nt, Artificial Sequence
  Description of Artificial Sequence: Synthetic oligonucleotide
  Antisense strand to SEQ ID NO: 1534988
uacaauccguuugucaggg

SEQ ID NO: 1534990 - RNA, 19 nt, Artificial Sequence
  Description of Artificial Sequence: Synthetic oligonucleotide
  Sense strand starting at position 2976 of SEQ ID NO: 1245083
ugacaaacggauuguauaa

SEQ ID NO: 1534991 - RNA, 19 nt, Artificial Sequence
  Description of Artificial Sequence: Synthetic oligonucleotide
  Antisense strand to SEQ ID NO: 1534990
uuauacaauccguuuguca

SEQ ID NO: 1534992 - RNA, 19 nt, Artificial Sequence
  Description of Artificial Sequence: Synthetic oligonucleotide
  Sense strand starting at position 3075 of SEQ ID NO: 1245083
ggaagaaacuucucgccca

SEQ ID NO: 1534993 - RNA, 19 nt, Artificial Sequence
  Description of Artificial Sequence: Synthetic oligonucleotide
  Antisense strand to SEQ ID NO: 1534992
ugggcgagaaguuucuucc

SEQ ID NO: 1534994 - RNA, 19 nt, Artificial Sequence
  Description of Artificial Sequence: Synthetic oligonucleotide
  Sense strand starting at position 3113 of SEQ ID NO: 1245083
cgagguuuccagggaggau

SEQ ID NO: 1534995 - RNA, 19 nt, Artificial Sequence
  Description of Artificial Sequence: Synthetic oligonucleotide
  Antisense strand to SEQ ID NO: 1534994
auccucccuggaaaccucg

SEQ ID NO: 1534996 - RNA, 19 nt, Artificial Sequence
  Description of Artificial Sequence: Synthetic oligonucleotide
  Sense strand starting at position 3157 of SEQ ID NO: 1245083
caggaaauguccuugaugc

SEQ ID NO: 1534997 - RNA, 19 nt, Artificial Sequence
  Description of Artificial Sequence: Synthetic oligonucleotide
  Antisense strand to SEQ ID NO: 1534996
gcaucaaggacauuuccug

SEQ ID NO: 1534998 - RNA, 19 nt, Artificial Sequence
  Description of Artificial Sequence: Synthetic oligonucleotide
  Sense strand starting at position 3158 of SEQ ID NO: 1245083
aggaaauguccuugaugcc

SEQ ID NO: 1534999 - RNA, 19 nt, Artificial Sequence
  Description of Artificial Sequence: Synthetic oligonucleotide
  Antisense strand to SEQ ID NO: 1534998
ggcaucaaggacauuuccu

SEQ ID NO: 1535000 - RNA, 19 nt, Artificial Sequence
  Description of Artificial Sequence: Synthetic oligonucleotide
  Sense strand starting at position 3744 of SEQ ID NO: 1245083
gagagagucgucuauauac

SEQ ID NO: 1535001 - RNA, 19 nt, Artificial Sequence
  Description of Artificial Sequence: Synthetic oligonucleotide
  Antisense strand to SEQ ID NO: 1535000
guauauagacgacucucuc

SEQ ID NO: 1535002 - RNA, 19 nt, Artificial Sequence
  Description of Artificial Sequence: Synthetic oligonucleotide
  Sense strand starting at position 3850 of SEQ ID NO: 1245083
guggcucacgccuugguaa

SEQ ID NO: 1535003 - RNA, 19 nt, Artificial Sequence
  Description of Artificial Sequence: Synthetic oligonucleotide
  Antisense strand to SEQ ID NO: 1535002
uuaccaaggcgugagccac

SEQ ID NO: 1535004 - RNA, 19 nt, Artificial Sequence
  Description of Artificial Sequence: Synthetic oligonucleotide
  Sense strand starting at position 11 of SEQ ID NO: 1245084
agaacacaguguccucaau

SEQ ID NO: 1535005 - RNA, 19 nt, Artificial Sequence
  Description of Artificial Sequence: Synthetic oligonucleotide
  Antisense strand to SEQ ID NO: 1535004
auugaggacacuguguucu

SEQ ID NO: 1535006 - RNA, 19 nt, Artificial Sequence
  Description of Artificial Sequence: Synthetic oligonucleotide
  Sense strand starting at position 76 of SEQ ID NO: 1245084
uguaccaaauaguuucuaa

SEQ ID NO: 1535007 - RNA, 19 nt, Artificial Sequence
  Description of Artificial Sequence: Synthetic oligonucleotide
  Antisense strand to SEQ ID NO: 1535006
uuagaaacuauuugguaca

SEQ ID NO: 1535008 - RNA, 19 nt, Artificial Sequence
  Description of Artificial Sequence: Synthetic oligonucleotide
  Sense strand starting at position 280 of SEQ ID NO: 1245084
ugauguaaauaucucaguu

SEQ ID NO: 1535009 - RNA, 19 nt, Artificial Sequence
  Description of Artificial Sequence: Synthetic oligonucleotide
  Antisense strand to SEQ ID NO: 1535008
aacugagauauuuacauca

SEQ ID NO: 1535010 - RNA, 19 nt, Artificial Sequence
  Description of Artificial Sequence: Synthetic oligonucleotide
  Sense strand starting at position 284 of SEQ ID NO: 1245084
guaaauaucucaguucuaa

SEQ ID NO: 1535011 - RNA, 19 nt, Artificial Sequence
  Description of Artificial Sequence: Synthetic oligonucleotide
  Antisense strand to SEQ ID NO: 1535010
uuagaacugagauauuuac

SEQ ID NO: 1535012 - RNA, 19 nt, Artificial Sequence
  Description of Artificial Sequence: Synthetic oligonucleotide
  Sense strand starting at position 470 of SEQ ID NO: 1245084
caauguugagcauacugua

SEQ ID NO: 1535013 - RNA, 19 nt, Artificial Sequence
  Description of Artificial Sequence: Synthetic oligonucleotide
  Antisense strand to SEQ ID NO: 1535012
uacaguaugcucaacauug

SEQ ID NO: 1535014 - RNA, 19 nt, Artificial Sequence
  Description of Artificial Sequence: Synthetic oligonucleotide
  Sense strand starting at position 715 of SEQ ID NO: 1245084
cccugccuugggcagaaau

SEQ ID NO: 1535015 - RNA, 19 nt, Artificial Sequence
  Description of Artificial Sequence: Synthetic oligonucleotide
  Antisense strand to SEQ ID NO: 1535014
auuucugcccaaggcaggg

SEQ ID NO: 1535016 - RNA, 19 nt, Artificial Sequence
  Description of Artificial Sequence: Synthetic oligonucleotide
  Sense strand starting at position 728 of SEQ ID NO: 1245084
agaaauuccucugugucag

SEQ ID NO: 1535017 - RNA, 19 nt, Artificial Sequence
  Description of Artificial Sequence: Synthetic oligonucleotide
  Antisense strand to SEQ ID NO: 1535016
cugacacagaggaauuucu

SEQ ID NO: 1535018 - RNA, 19 nt, Artificial Sequence
  Description of Artificial Sequence: Synthetic oligonucleotide
  Sense strand starting at position 1097 of SEQ ID NO: 1245084
uguucugauccuuauauuc

SEQ ID NO: 1535019 - RNA, 19 nt, Artificial Sequence
  Description of Artificial Sequence: Synthetic oligonucleotide
  Antisense strand to SEQ ID NO: 1535018
gaauauaaggaucagaaca

SEQ ID NO: 1535020 - RNA, 19 nt, Artificial Sequence
  Description of Artificial Sequence: Synthetic oligonucleotide
  Sense strand starting at position 1483 of SEQ ID NO: 1245084
cugaaauuagcaggcagaa

SEQ ID NO: 1535021 - RNA, 19 nt, Artificial Sequence
  Description of Artificial Sequence: Synthetic oligonucleotide
  Antisense strand to SEQ ID NO: 1535020
uucugccugcuaauuucag

SEQ ID NO: 1535022 - RNA, 19 nt, Artificial Sequence
  Description of Artificial Sequence: Synthetic oligonucleotide
  Sense strand starting at position 1513 of SEQ ID NO: 1245084
cccugacaaacggauugua

SEQ ID NO: 1535023 - RNA, 19 nt, Artificial Sequence
  Description of Artificial Sequence: Synthetic oligonucleotide
  Antisense strand to SEQ ID NO: 1535022
uacaauccguuugucaggg

SEQ ID NO: 1535024 - RNA, 19 nt, Artificial Sequence
  Description of Artificial Sequence: Synthetic oligonucleotide
  Sense strand starting at position 1516 of SEQ ID NO: 1245084
ugacaaacggauuguauaa

SEQ ID NO: 1535025 - RNA, 19 nt, Artificial Sequence
  Description of Artificial Sequence: Synthetic oligonucleotide
  Antisense strand to SEQ ID NO: 1535024
uuauacaauccguuuguca

SEQ ID NO: 1535026 - RNA, 19 nt, Artificial Sequence
  Description of Artificial Sequence: Synthetic oligonucleotide
  Sense strand starting at position 1615 of SEQ ID NO: 1245084
ggaagaaacuucucgccca

SEQ ID NO: 1535027 - RNA, 19 nt, Artificial Sequence
  Description of Artificial Sequence: Synthetic oligonucleotide
  Antisense strand to SEQ ID NO: 1535026
ugggcgagaaguuucuucc

SEQ ID NO: 1535028 - RNA, 19 nt, Artificial Sequence
  Description of Artificial Sequence: Synthetic oligonucleotide
  Sense strand starting at position 1653 of SEQ ID NO: 1245084
cgagguuuccagggaggau

SEQ ID NO: 1535029 - RNA, 19 nt, Artificial Sequence
  Description of Artificial Sequence: Synthetic oligonucleotide
  Antisense strand to SEQ ID NO: 1535028
auccucccuggaaaccucg

SEQ ID NO: 1535030 - RNA, 19 nt, Artificial Sequence
  Description of Artificial Sequence: Synthetic oligonucleotide
  Sense strand starting at position 1697 of SEQ ID NO: 1245084
caggaaauguccuugaugc

SEQ ID NO: 1535031 - RNA, 19 nt, Artificial Sequence
  Description of Artificial Sequence: Synthetic oligonucleotide
  Antisense strand to SEQ ID NO: 1535030
gcaucaaggacauuuccug

SEQ ID NO: 1535032 - RNA, 19 nt, Artificial Sequence
  Description of Artificial Sequence: Synthetic oligonucleotide
  Sense strand starting at position 2284 of SEQ ID NO: 1245084
gagagagucgucuauauac

SEQ ID NO: 1535033 - RNA, 19 nt, Artificial Sequence
  Description of Artificial Sequence: Synthetic oligonucleotide
  Antisense strand to SEQ ID NO: 1535032
guauauagacgacucucuc

SEQ ID NO: 1535034 - RNA, 19 nt, Artificial Sequence
  Description of Artificial Sequence: Synthetic oligonucleotide
  Sense strand starting at position 2390 of SEQ ID NO: 1245084
guggcucacgccuugguaa

SEQ ID NO: 1535035 - RNA, 19 nt, Artificial Sequence
  Description of Artificial Sequence: Synthetic oligonucleotide
  Antisense strand to SEQ ID NO: 1535034
uuaccaaggcgugagccac

SEQ ID NO: 1535036 - RNA, 19 nt, Artificial Sequence
  Description of Artificial Sequence: Synthetic oligonucleotide
  Sense strand starting at position 2696 of SEQ ID NO: 1245084
cuuugacagcuguaaagaa

SEQ ID NO: 1535037 - RNA, 19 nt, Artificial Sequence
  Description of Artificial Sequence: Synthetic oligonucleotide
  Antisense strand to SEQ ID NO: 1535036
uucuuuacagcugucaaag

SEQ ID NO: 1535038 - RNA, 19 nt, Artificial Sequence
  Description of Artificial Sequence: Synthetic oligonucleotide
  Sense strand starting at position 2723 of SEQ ID NO: 1245084
aaguauugugaugaaguau

SEQ ID NO: 1535039 - RNA, 19 nt, Artificial Sequence
  Description of Artificial Sequence: Synthetic oligonucleotide
  Antisense strand to SEQ ID NO: 1535038
auacuucaucacaauacuu

SEQ ID NO: 1535040 - RNA, 19 nt, Artificial Sequence
  Description of Artificial Sequence: Synthetic oligonucleotide
  Sense strand starting at position 2831 of SEQ ID NO: 1245084
aggaaagacucagagauga

SEQ ID NO: 1535041 - RNA, 19 nt, Artificial Sequence
  Description of Artificial Sequence: Synthetic oligonucleotide
  Antisense strand to SEQ ID NO: 1535040
ucaucucugagucuuuccu

SEQ ID NO: 1535042 - RNA, 19 nt, Artificial Sequence
  Description of Artificial Sequence: Synthetic oligonucleotide
  Sense strand starting at position 2897 of SEQ ID NO: 1245084
ggugacuuaucacugguga

SEQ ID NO: 1535043 - RNA, 19 nt, Artificial Sequence
  Description of Artificial Sequence: Synthetic oligonucleotide
  Antisense strand to SEQ ID NO: 1535042
ucaccagugauaagucacc

SEQ ID NO: 1535044 - RNA, 19 nt, Artificial Sequence
  Description of Artificial Sequence: Synthetic oligonucleotide
  Sense strand starting at position 3006 of SEQ ID NO: 1245084
gcaugaauggcaugacuca

SEQ ID NO: 1535045 - RNA, 19 nt, Artificial Sequence
  Description of Artificial Sequence: Synthetic oligonucleotide
  Antisense strand to SEQ ID NO: 1535044
ugagucaugccauucaugc

SEQ ID NO: 1535046 - RNA, 19 nt, Artificial Sequence
  Description of Artificial Sequence: Synthetic oligonucleotide
  Sense strand starting at position 3158 of SEQ ID NO: 1245084
aguauuuguuaugucagua

SEQ ID NO: 1535047 - RNA, 19 nt, Artificial Sequence
  Description of Artificial Sequence: Synthetic oligonucleotide
  Antisense strand to SEQ ID NO: 1535046
uacugacauaacaaauacu

SEQ ID NO: 1535048 - RNA, 19 nt, Artificial Sequence
  Description of Artificial Sequence: Synthetic oligonucleotide
  Sense strand starting at position 3163 of SEQ ID NO: 1245084
uuguuaugucaguauggac

SEQ ID NO: 1535049 - RNA, 19 nt, Artificial Sequence
  Description of Artificial Sequence: Synthetic oligonucleotide
  Antisense strand to SEQ ID NO: 1535048
guccauacugacauaacaa

SEQ ID NO: 1535050 - RNA, 19 nt, Artificial Sequence
  Description of Artificial Sequence: Synthetic oligonucleotide
  Sense strand starting at position 3196 of SEQ ID NO: 1245084
uuuauacuuugggcuagaa

SEQ ID NO: 1535051 - RNA, 19 nt, Artificial Sequence
  Description of Artificial Sequence: Synthetic oligonucleotide
  Antisense strand to SEQ ID NO: 1535050
uucuagcccaaaguauaaa

SEQ ID NO: 1535052 - RNA, 19 nt, Artificial Sequence
  Description of Artificial Sequence: Synthetic oligonucleotide
  Sense strand starting at position 3433 of SEQ ID NO: 1245084
cugggaauccuaugauuac

SEQ ID NO: 1535053 - RNA, 19 nt, Artificial Sequence
  Description of Artificial Sequence: Synthetic oligonucleotide
  Antisense strand to SEQ ID NO: 1535052
guaaucauaggauucccag

SEQ ID NO: 1535054 - RNA, 19 nt, Artificial Sequence
  Description of Artificial Sequence: Synthetic oligonucleotide
  Sense strand starting at position 3462 of SEQ ID NO: 1245084
cacaguuagagaggaaugu

SEQ ID NO: 1535055 - RNA, 19 nt, Artificial Sequence
  Description of Artificial Sequence: Synthetic oligonucleotide
  Antisense strand to SEQ ID NO: 1535054
acauuccucucuaacugug

SEQ ID NO: 1535056 - RNA, 19 nt, Artificial Sequence
  Description of Artificial Sequence: Synthetic oligonucleotide
  Sense strand starting at position 3466 of SEQ ID NO: 1245084
guuagagaggaauguuauu

SEQ ID NO: 1535057 - RNA, 19 nt, Artificial Sequence
  Description of Artificial Sequence: Synthetic oligonucleotide
  Antisense strand to SEQ ID NO: 1535056
aauaacauuccucucuaac

SEQ ID NO: 1535058 - RNA, 19 nt, Artificial Sequence
  Description of Artificial Sequence: Synthetic oligonucleotide
  Sense strand starting at position 3510 of SEQ ID NO: 1245084
uguagauugugacccaauu

SEQ ID NO: 1535059 - RNA, 19 nt, Artificial Sequence
  Description of Artificial Sequence: Synthetic oligonucleotide
  Antisense strand to SEQ ID NO: 1535058
aauugggucacaaucuaca

SEQ ID NO: 1535060 - RNA, 19 nt, Artificial Sequence
  Description of Artificial Sequence: Synthetic oligonucleotide
  Sense strand starting at position 3516 of SEQ ID NO: 1245084
uugugacccaauuggagaa

SEQ ID NO: 1535061 - RNA, 19 nt, Artificial Sequence
  Description of Artificial Sequence: Synthetic oligonucleotide
  Antisense strand to SEQ ID NO: 1535060
uucuccaauugggucacaa

SEQ ID NO: 1535062 - RNA, 19 nt, Artificial Sequence
  Description of Artificial Sequence: Synthetic oligonucleotide
  Sense strand starting at position 3537 of SEQ ID NO: 1245084
gaaaguugaugguucuuag

SEQ ID NO: 1535063 - RNA, 19 nt, Artificial Sequence
  Description of Artificial Sequence: Synthetic oligonucleotide
  Antisense strand to SEQ ID NO: 1535062
cuaagaaccaucaacuuuc

SEQ ID NO: 1535064 - RNA, 19 nt, Artificial Sequence
  Description of Artificial Sequence: Synthetic oligonucleotide
  Sense strand starting at position 3583 of SEQ ID NO: 1245084
gguucuaguaaauagaugu

SEQ ID NO: 1535065 - RNA, 19 nt, Artificial Sequence
  Description of Artificial Sequence: Synthetic oligonucleotide
  Antisense strand to SEQ ID NO: 1535064
acaucuauuuacuagaacc

SEQ ID NO: 1535066 - RNA, 19 nt, Artificial Sequence
  Description of Artificial Sequence: Synthetic oligonucleotide
  Sense strand starting at position 3587 of SEQ ID NO: 1245084
cuaguaaauagauguaugu

SEQ ID NO: 1535067 - RNA, 19 nt, Artificial Sequence
  Description of Artificial Sequence: Synthetic oligonucleotide
  Antisense strand to SEQ ID NO: 1535066
acauacaucuauuuacuag

SEQ ID NO: 1535068 - RNA, 19 nt, Artificial Sequence
  Description of Artificial Sequence: Synthetic oligonucleotide
  Sense strand starting at position 3615 of SEQ ID NO: 1245084
gacaaaucguguuccaaag

SEQ ID NO: 1535069 - RNA, 19 nt, Artificial Sequence
  Description of Artificial Sequence: Synthetic oligonucleotide
  Antisense strand to SEQ ID NO: 1535068
cuuuggaacacgauuuguc

SEQ ID NO: 1535070 - RNA, 19 nt, Artificial Sequence
  Description of Artificial Sequence: Synthetic oligonucleotide
  Sense strand starting at position 3629 of SEQ ID NO: 1245084
caaagauagccauggaugu

SEQ ID NO: 1535071 - RNA, 19 nt, Artificial Sequence
  Description of Artificial Sequence: Synthetic oligonucleotide
  Antisense strand to SEQ ID NO: 1535070
acauccauggcuaucuuug

SEQ ID NO: 1535072 - RNA, 19 nt, Artificial Sequence
  Description of Artificial Sequence: Synthetic oligonucleotide
  Sense strand starting at position 3630 of SEQ ID NO: 1245084
aaagauagccauggauguu

SEQ ID NO: 1535073 - RNA, 19 nt, Artificial Sequence
  Description of Artificial Sequence: Synthetic oligonucleotide
  Antisense strand to SEQ ID NO: 1535072
aacauccauggcuaucuuu

SEQ ID NO: 1535074 - RNA, 19 nt, Artificial Sequence
  Description of Artificial Sequence: Synthetic oligonucleotide
  Sense strand starting at position 3633 of SEQ ID NO: 1245084
gauagccauggauguuuau

SEQ ID NO: 1535075 - RNA, 19 nt, Artificial Sequence
  Description of Artificial Sequence: Synthetic oligonucleotide
  Antisense strand to SEQ ID NO: 1535074
auaaacauccauggcuauc

SEQ ID NO: 1535076 - RNA, 19 nt, Artificial Sequence
  Description of Artificial Sequence: Synthetic oligonucleotide
  Sense strand starting at position 3676 of SEQ ID NO: 1245084
ccagcuguugaggaucauu

SEQ ID NO: 1535077 - RNA, 19 nt, Artificial Sequence
  Description of Artificial Sequence: Synthetic oligonucleotide
  Antisense strand to SEQ ID NO: 1535076
aaugauccucaacagcugg

SEQ ID NO: 1535078 - RNA, 19 nt, Artificial Sequence
  Description of Artificial Sequence: Synthetic oligonucleotide
  Sense strand starting at position 3906 of SEQ ID NO: 1245084
ugaaguaccagugaguacu

SEQ ID NO: 1535079 - RNA, 19 nt, Artificial Sequence
  Description of Artificial Sequence: Synthetic oligonucleotide
  Antisense strand to SEQ ID NO: 1535078
aguacucacugguacuuca

SEQ ID NO: 1535080 - RNA, 19 nt, Artificial Sequence
  Description of Artificial Sequence: Synthetic oligonucleotide
  Sense strand starting at position 3912 of SEQ ID NO: 1245084
accagugaguacuccagaa

SEQ ID NO: 1535081 - RNA, 19 nt, Artificial Sequence
  Description of Artificial Sequence: Synthetic oligonucleotide
  Antisense strand to SEQ ID NO: 1535080
uucuggaguacucacuggu

SEQ ID NO: 1535082 - RNA, 19 nt, Artificial Sequence
  Description of Artificial Sequence: Synthetic oligonucleotide
  Sense strand starting at position 3914 of SEQ ID NO: 1245084
cagugaguacuccagaacu

SEQ ID NO: 1535083 - RNA, 19 nt, Artificial Sequence
  Description of Artificial Sequence: Synthetic oligonucleotide
  Antisense strand to SEQ ID NO: 1535082
aguucuggaguacucacug

SEQ ID NO: 1535084 - RNA, 19 nt, Artificial Sequence
  Description of Artificial Sequence: Synthetic oligonucleotide
  Sense strand starting at position 185 of SEQ ID NO: 1245085
gguagaaccuucccuguca

SEQ ID NO: 1535085 - RNA, 19 nt, Artificial Sequence
  Description of Artificial Sequence: Synthetic oligonucleotide
  Antisense strand to SEQ ID NO: 1535084
ugacagggaagguucuacc

SEQ ID NO: 1535086 - RNA, 19 nt, Artificial Sequence
  Description of Artificial Sequence: Synthetic oligonucleotide
  Sense strand starting at position 247 of SEQ ID NO: 1245085
cccagaugucucuaugguu

SEQ ID NO: 1535087 - RNA, 19 nt, Artificial Sequence
  Description of Artificial Sequence: Synthetic oligonucleotide
  Antisense strand to SEQ ID NO: 1535086
aaccauagagacaucuggg

SEQ ID NO: 1535088 - RNA, 19 nt, Artificial Sequence
  Description of Artificial Sequence: Synthetic oligonucleotide
  Sense strand starting at position 284 of SEQ ID NO: 1245085
ucuccuagugucuacucaa

SEQ ID NO: 1535089 - RNA, 19 nt, Artificial Sequence
  Description of Artificial Sequence: Synthetic oligonucleotide
  Antisense strand to SEQ ID NO: 1535088
uugaguagacacuaggaga

SEQ ID NO: 1535090 - RNA, 19 nt, Artificial Sequence
  Description of Artificial Sequence: Synthetic oligonucleotide
  Sense strand starting at position 287 of SEQ ID NO: 1245085
ccuagugucuacucaauga

SEQ ID NO: 1535091 - RNA, 19 nt, Artificial Sequence
  Description of Artificial Sequence: Synthetic oligonucleotide
  Antisense strand to SEQ ID NO: 1535090
ucauugaguagacacuagg

SEQ ID NO: 1535092 - RNA, 19 nt, Artificial Sequence
  Description of Artificial Sequence: Synthetic oligonucleotide
  Sense strand starting at position 347 of SEQ ID NO: 1245085
gauggagaaucugcucuga

SEQ ID NO: 1535093 - RNA, 19 nt, Artificial Sequence
  Description of Artificial Sequence: Synthetic oligonucleotide
  Antisense strand to SEQ ID NO: 1535092
ucagagcagauucuccauc

SEQ ID NO: 1535094 - RNA, 19 nt, Artificial Sequence
  Description of Artificial Sequence: Synthetic oligonucleotide
  Sense strand starting at position 349 of SEQ ID NO: 1245085
uggagaaucugcucugaua

SEQ ID NO: 1535095 - RNA, 19 nt, Artificial Sequence
  Description of Artificial Sequence: Synthetic oligonucleotide
  Antisense strand to SEQ ID NO: 1535094
uaucagagcagauucucca

SEQ ID NO: 1535096 - RNA, 19 nt, Artificial Sequence
  Description of Artificial Sequence: Synthetic oligonucleotide
  Sense strand starting at position 371 of SEQ ID NO: 1245085
uucgacacuugcuuggaaa

SEQ ID NO: 1535097 - RNA, 19 nt, Artificial Sequence
  Description of Artificial Sequence: Synthetic oligonucleotide
  Antisense strand to SEQ ID NO: 1535096
uuuccaagcaagugucgaa

SEQ ID NO: 1535098 - RNA, 19 nt, Artificial Sequence
  Description of Artificial Sequence: Synthetic oligonucleotide
  Sense strand starting at position 475 of SEQ ID NO: 1245085
gugugagaggucguuugcu

SEQ ID NO: 1535099 - RNA, 19 nt, Artificial Sequence
  Description of Artificial Sequence: Synthetic oligonucleotide
  Antisense strand to SEQ ID NO: 1535098
agcaaacgaccucucacac

SEQ ID NO: 1535100 - RNA, 19 nt, Artificial Sequence
  Description of Artificial Sequence: Synthetic oligonucleotide
  Sense strand starting at position 551 of SEQ ID NO: 1245085
uguuaagaggcucauacuu

SEQ ID NO: 1535101 - RNA, 19 nt, Artificial Sequence
  Description of Artificial Sequence: Synthetic oligonucleotide
  Antisense strand to SEQ ID NO: 1535100
aaguaugagccucuuaaca

SEQ ID NO: 1535102 - RNA, 19 nt, Artificial Sequence
  Description of Artificial Sequence: Synthetic oligonucleotide
  Sense strand starting at position 571 of SEQ ID NO: 1245085
caguaagauuuccacagga

SEQ ID NO: 1535103 - RNA, 19 nt, Artificial Sequence
  Description of Artificial Sequence: Synthetic oligonucleotide
  Antisense strand to SEQ ID NO: 1535102
uccuguggaaaucuuacug

SEQ ID NO: 1535104 - RNA, 19 nt, Artificial Sequence
  Description of Artificial Sequence: Synthetic oligonucleotide
  Sense strand starting at position 1170 of SEQ ID NO: 1245085
uaaacaguuugguuggaga

SEQ ID NO: 1535105 - RNA, 19 nt, Artificial Sequence
  Description of Artificial Sequence: Synthetic oligonucleotide
  Antisense strand to SEQ ID NO: 1535104
ucuccaaccaaacuguuua

SEQ ID NO: 1535106 - RNA, 19 nt, Artificial Sequence
  Description of Artificial Sequence: Synthetic oligonucleotide
  Sense strand starting at position 1172 of SEQ ID NO: 1245085
aacaguuugguuggagaca

SEQ ID NO: 1535107 - RNA, 19 nt, Artificial Sequence
  Description of Artificial Sequence: Synthetic oligonucleotide
  Antisense strand to SEQ ID NO: 1535106
ugucuccaaccaaacuguu

SEQ ID NO: 1535108 - RNA, 19 nt, Artificial Sequence
  Description of Artificial Sequence: Synthetic oligonucleotide
  Sense strand starting at position 1194 of SEQ ID NO: 1245085
augcucacuugguuacaua

SEQ ID NO: 1535109 - RNA, 19 nt, Artificial Sequence
  Description of Artificial Sequence: Synthetic oligonucleotide
  Antisense strand to SEQ ID NO: 1535108
uauguaaccaagugagcau

SEQ ID NO: 1535110 - RNA, 19 nt, Artificial Sequence
  Description of Artificial Sequence: Synthetic oligonucleotide
  Sense strand starting at position 1339 of SEQ ID NO: 1245085
aacccuugaguaggauaau

SEQ ID NO: 1535111 - RNA, 19 nt, Artificial Sequence
  Description of Artificial Sequence: Synthetic oligonucleotide
  Antisense strand to SEQ ID NO: 1535110
auuauccuacucaaggguu

SEQ ID NO: 1535112 - RNA, 19 nt, Artificial Sequence
  Description of Artificial Sequence: Synthetic oligonucleotide
  Sense strand starting at position 1401 of SEQ ID NO: 1245085
uucagucuugcuggagaga

SEQ ID NO: 1535113 - RNA, 19 nt, Artificial Sequence
  Description of Artificial Sequence: Synthetic oligonucleotide
  Antisense strand to SEQ ID NO: 1535112
ucucuccagcaagacugaa

SEQ ID NO: 1535114 - RNA, 19 nt, Artificial Sequence
  Description of Artificial Sequence: Synthetic oligonucleotide
  Sense strand starting at position 1402 of SEQ ID NO: 1245085
ucagucuugcuggagagaa

SEQ ID NO: 1535115 - RNA, 19 nt, Artificial Sequence
  Description of Artificial Sequence: Synthetic oligonucleotide
  Antisense strand to SEQ ID NO: 1535114
uucucuccagcaagacuga

SEQ ID NO: 1535116 - RNA, 19 nt, Artificial Sequence
  Description of Artificial Sequence: Synthetic oligonucleotide
  Sense strand starting at position 1754 of SEQ ID NO: 1245085
cuaaccuugagaugugagu

SEQ ID NO: 1535117 - RNA, 19 nt, Artificial Sequence
  Description of Artificial Sequence: Synthetic oligonucleotide
  Antisense strand to SEQ ID NO: 1535116
acucacaucucaagguuag

SEQ ID NO: 1535118 - RNA, 19 nt, Artificial Sequence
  Description of Artificial Sequence: Synthetic oligonucleotide
  Sense strand starting at position 1795 of SEQ ID NO: 1245085
cccaucugcgucuugguua

SEQ ID NO: 1535119 - RNA, 19 nt, Artificial Sequence
  Description of Artificial Sequence: Synthetic oligonucleotide
  Antisense strand to SEQ ID NO: 1535118
uaaccaagacgcagauggg

SEQ ID NO: 1535120 - RNA, 19 nt, Artificial Sequence
  Description of Artificial Sequence: Synthetic oligonucleotide
  Sense strand starting at position 2173 of SEQ ID NO: 1245085
uuguucuagcucuaaauag

SEQ ID NO: 1535121 - RNA, 19 nt, Artificial Sequence
  Description of Artificial Sequence: Synthetic oligonucleotide
  Antisense strand to SEQ ID NO: 1535120
cuauuuagagcuagaacaa

SEQ ID NO: 1535122 - RNA, 19 nt, Artificial Sequence
  Description of Artificial Sequence: Synthetic oligonucleotide
  Sense strand starting at position 2205 of SEQ ID NO: 1245085
cgccgaaaucaguuuguuu

SEQ ID NO: 1535123 - RNA, 19 nt, Artificial Sequence
  Description of Artificial Sequence: Synthetic oligonucleotide
  Antisense strand to SEQ ID NO: 1535122
aaacaaacugauuucggcg

SEQ ID NO: 1535124 - RNA, 19 nt, Artificial Sequence
  Description of Artificial Sequence: Synthetic oligonucleotide
  Sense strand starting at position 2333 of SEQ ID NO: 1245085
cggucuuacuuucuagaua

SEQ ID NO: 1535125 - RNA, 19 nt, Artificial Sequence
  Description of Artificial Sequence: Synthetic oligonucleotide
  Antisense strand to SEQ ID NO: 1535124
uaucuagaaaguaagaccg

SEQ ID NO: 1535126 - RNA, 19 nt, Artificial Sequence
  Description of Artificial Sequence: Synthetic oligonucleotide
  Sense strand starting at position 2416 of SEQ ID NO: 1245085
gaacgaacccugcauguuu

SEQ ID NO: 1535127 - RNA, 19 nt, Artificial Sequence
  Description of Artificial Sequence: Synthetic oligonucleotide
  Antisense strand to SEQ ID NO: 1535126
aaacaugcaggguucguuc

SEQ ID NO: 1535128 - RNA, 19 nt, Artificial Sequence
  Description of Artificial Sequence: Synthetic oligonucleotide
  Sense strand starting at position 2611 of SEQ ID NO: 1245085
ggacguuugacaggugaga

SEQ ID NO: 1535129 - RNA, 19 nt, Artificial Sequence
  Description of Artificial Sequence: Synthetic oligonucleotide
  Antisense strand to SEQ ID NO: 1535128
ucucaccugucaaacgucc

SEQ ID NO: 1535130 - RNA, 19 nt, Artificial Sequence
  Description of Artificial Sequence: Synthetic oligonucleotide
  Sense strand starting at position 2613 of SEQ ID NO: 1245085
acguuugacaggugagaag

SEQ ID NO: 1535131 - RNA, 19 nt, Artificial Sequence
  Description of Artificial Sequence: Synthetic oligonucleotide
  Antisense strand to SEQ ID NO: 1535130
cuucucaccugucaaacgu

SEQ ID NO: 1535132 - RNA, 19 nt, Artificial Sequence
  Description of Artificial Sequence: Synthetic oligonucleotide
  Sense strand starting at position 2773 of SEQ ID NO: 1245085
agacuuauugugggccaga

SEQ ID NO: 1535133 - RNA, 19 nt, Artificial Sequence
  Description of Artificial Sequence: Synthetic oligonucleotide
  Antisense strand to SEQ ID NO: 1535132
ucuggcccacaauaagucu

SEQ ID NO: 1535134 - RNA, 19 nt, Artificial Sequence
  Description of Artificial Sequence: Synthetic oligonucleotide
  Sense strand starting at position 2774 of SEQ ID NO: 1245085
gacuuauugugggccagag

SEQ ID NO: 1535135 - RNA, 19 nt, Artificial Sequence
  Description of Artificial Sequence: Synthetic oligonucleotide
  Antisense strand to SEQ ID NO: 1535134
cucuggcccacaauaaguc

SEQ ID NO: 1535136 - RNA, 19 nt, Artificial Sequence
  Description of Artificial Sequence: Synthetic oligonucleotide
  Sense strand starting at position 2799 of SEQ ID NO: 1245085
agaguagccuucucaaaca

SEQ ID NO: 1535137 - RNA, 19 nt, Artificial Sequence
  Description of Artificial Sequence: Synthetic oligonucleotide
  Antisense strand to SEQ ID NO: 1535136
uguuugagaaggcuacucu

SEQ ID NO: 1535138 - RNA, 19 nt, Artificial Sequence
  Description of Artificial Sequence: Synthetic oligonucleotide
  Sense strand starting at position 2875 of SEQ ID NO: 1245085
augucuuacugacuugcaa

SEQ ID NO: 1535139 - RNA, 19 nt, Artificial Sequence
  Description of Artificial Sequence: Synthetic oligonucleotide
  Antisense strand to SEQ ID NO: 1535138
uugcaagucaguaagacau

SEQ ID NO: 1535140 - RNA, 19 nt, Artificial Sequence
  Description of Artificial Sequence: Synthetic oligonucleotide
  Sense strand starting at position 2901 of SEQ ID NO: 1245085
gucauugaugacugccauu

SEQ ID NO: 1535141 - RNA, 19 nt, Artificial Sequence
  Description of Artificial Sequence: Synthetic oligonucleotide
  Antisense strand to SEQ ID NO: 1535140
aauggcagucaucaaugac

SEQ ID NO: 1535142 - RNA, 19 nt, Artificial Sequence
  Description of Artificial Sequence: Synthetic oligonucleotide
  Sense strand starting at position 2974 of SEQ ID NO: 1245085
uccaacuuacauuguguaa

SEQ ID NO: 1535143 - RNA, 19 nt, Artificial Sequence
  Description of Artificial Sequence: Synthetic oligonucleotide
  Antisense strand to SEQ ID NO: 1535142
uuacacaauguaaguugga

SEQ ID NO: 1535144 - RNA, 19 nt, Artificial Sequence
  Description of Artificial Sequence: Synthetic oligonucleotide
  Sense strand starting at position 2995 of SEQ ID NO: 1245085
ugaggacaaugcucuaaug

SEQ ID NO: 1535145 - RNA, 19 nt, Artificial Sequence
  Description of Artificial Sequence: Synthetic oligonucleotide
  Antisense strand to SEQ ID NO: 1535144
cauuagagcauuguccuca

SEQ ID NO: 1535146 - RNA, 19 nt, Artificial Sequence
  Description of Artificial Sequence: Synthetic oligonucleotide
  Sense strand starting at position 3033 of SEQ ID NO: 1245085
ggaguuuccucaccucuua

SEQ ID NO: 1535147 - RNA, 19 nt, Artificial Sequence
  Description of Artificial Sequence: Synthetic oligonucleotide
  Antisense strand to SEQ ID NO: 1535146
uaagaggugaggaaacucc

SEQ ID NO: 1535148 - RNA, 19 nt, Artificial Sequence
  Description of Artificial Sequence: Synthetic oligonucleotide
  Sense strand starting at position 3069 of SEQ ID NO: 1245085
aggucucagcuccaaugua

SEQ ID NO: 1535149 - RNA, 19 nt, Artificial Sequence
  Description of Artificial Sequence: Synthetic oligonucleotide
  Antisense strand to SEQ ID NO: 1535148
uacauuggagcugagaccu

SEQ ID NO: 1535150 - RNA, 19 nt, Artificial Sequence
  Description of Artificial Sequence: Synthetic oligonucleotide
  Sense strand starting at position 3117 of SEQ ID NO: 1245085
uccugugaguuuccugaga

SEQ ID NO: 1535151 - RNA, 19 nt, Artificial Sequence
  Description of Artificial Sequence: Synthetic oligonucleotide
  Antisense strand to SEQ ID NO: 1535150
ucucaggaaacucacagga

SEQ ID NO: 1535152 - RNA, 19 nt, Artificial Sequence
  Description of Artificial Sequence: Synthetic oligonucleotide
  Sense strand starting at position 3334 of SEQ ID NO: 1245085
ugacuuccaucuguaaggu

SEQ ID NO: 1535153 - RNA, 19 nt, Artificial Sequence
  Description of Artificial Sequence: Synthetic oligonucleotide
  Antisense strand to SEQ ID NO: 1535152
accuuacagauggaaguca

SEQ ID NO: 1535154 - RNA, 19 nt, Artificial Sequence
  Description of Artificial Sequence: Synthetic oligonucleotide
  Sense strand starting at position 3335 of SEQ ID NO: 1245085
gacuuccaucuguaagguu

SEQ ID NO: 1535155 - RNA, 19 nt, Artificial Sequence
  Description of Artificial Sequence: Synthetic oligonucleotide
  Antisense strand to SEQ ID NO: 1535154
aaccuuacagauggaaguc

SEQ ID NO: 1535156 - RNA, 19 nt, Artificial Sequence
  Description of Artificial Sequence: Synthetic oligonucleotide
  Sense strand starting at position 3343 of SEQ ID NO: 1245085
ucuguaagguuuccauauu

SEQ ID NO: 1535157 - RNA, 19 nt, Artificial Sequence
  Description of Artificial Sequence: Synthetic oligonucleotide
  Antisense strand to SEQ ID NO: 1535156
aauauggaaaccuuacaga

SEQ ID NO: 1535158 - RNA, 19 nt, Artificial Sequence
  Description of Artificial Sequence: Synthetic oligonucleotide
  Sense strand starting at position 3569 of SEQ ID NO: 1245085
ucacacaucggcugaaaca

SEQ ID NO: 1535159 - RNA, 19 nt, Artificial Sequence
  Description of Artificial Sequence: Synthetic oligonucleotide
  Antisense strand to SEQ ID NO: 1535158
uguuucagccgauguguga

SEQ ID NO: 1535160 - RNA, 19 nt, Artificial Sequence
  Description of Artificial Sequence: Synthetic oligonucleotide
  Sense strand starting at position 3631 of SEQ ID NO: 1245085
ccuaucuaucgugacagua

SEQ ID NO: 1535161 - RNA, 19 nt, Artificial Sequence
  Description of Artificial Sequence: Synthetic oligonucleotide
  Antisense strand to SEQ ID NO: 1535160
uacugucacgauagauagg

SEQ ID NO: 1535162 - RNA, 19 nt, Artificial Sequence
  Description of Artificial Sequence: Synthetic oligonucleotide
  Sense strand starting at position 3939 of SEQ ID NO: 1245085
uguuucucuguagagguuu

SEQ ID NO: 1535163 - RNA, 19 nt, Artificial Sequence
  Description of Artificial Sequence: Synthetic oligonucleotide
  Antisense strand to SEQ ID NO: 1535162
aaaccucuacagagaaaca

SEQ ID NO: 1535164 - RNA, 19 nt, Artificial Sequence
  Description of Artificial Sequence: Synthetic oligonucleotide
  Sense strand starting at position 88 of SEQ ID NO: 1245086
ugaauacugcuauguaaug

SEQ ID NO: 1535165 - RNA, 19 nt, Artificial Sequence
  Description of Artificial Sequence: Synthetic oligonucleotide
  Antisense strand to SEQ ID NO: 1535164
cauuacauagcaguauuca

SEQ ID NO: 1535166 - RNA, 19 nt, Artificial Sequence
  Description of Artificial Sequence: Synthetic oligonucleotide
  Sense strand starting at position 139 of SEQ ID NO: 1245086
cuaagaucaugaguggcaa

SEQ ID NO: 1535167 - RNA, 19 nt, Artificial Sequence
  Description of Artificial Sequence: Synthetic oligonucleotide
  Antisense strand to SEQ ID NO: 1535166
uugccacucaugaucuuag

SEQ ID NO: 1535168 - RNA, 19 nt, Artificial Sequence
  Description of Artificial Sequence: Synthetic oligonucleotide
  Sense strand starting at position 140 of SEQ ID NO: 1245086
uaagaucaugaguggcaaa

SEQ ID NO: 1535169 - RNA, 19 nt, Artificial Sequence
  Description of Artificial Sequence: Synthetic oligonucleotide
  Antisense strand to SEQ ID NO: 1535168
uuugccacucaugaucuua

SEQ ID NO: 1535170 - RNA, 19 nt, Artificial Sequence
  Description of Artificial Sequence: Synthetic oligonucleotide
  Sense strand starting at position 209 of SEQ ID NO: 1245086
gcuguauuaggagaaauuc

SEQ ID NO: 1535171 - RNA, 19 nt, Artificial Sequence
  Description of Artificial Sequence: Synthetic oligonucleotide
  Antisense strand to SEQ ID NO: 1535170
gaauuucuccuaauacagc

SEQ ID NO: 1535172 - RNA, 19 nt, Artificial Sequence
  Description of Artificial Sequence: Synthetic oligonucleotide
  Sense strand starting at position 236 of SEQ ID NO: 1245086
uggaucugguuucuuaaua

SEQ ID NO: 1535173 - RNA, 19 nt, Artificial Sequence
  Description of Artificial Sequence: Synthetic oligonucleotide
  Antisense strand to SEQ ID NO: 1535172
uauuaagaaaccagaucca

SEQ ID NO: 1535174 - RNA, 19 nt, Artificial Sequence
  Description of Artificial Sequence: Synthetic oligonucleotide
  Sense strand starting at position 237 of SEQ ID NO: 1245086
ggaucugguuucuuaauaa

SEQ ID NO: 1535175 - RNA, 19 nt, Artificial Sequence
  Description of Artificial Sequence: Synthetic oligonucleotide
  Antisense strand to SEQ ID NO: 1535174
uuauuaagaaaccagaucc

SEQ ID NO: 1535176 - RNA, 19 nt, Artificial Sequence
  Description of Artificial Sequence: Synthetic oligonucleotide
  Sense strand starting at position 328 of SEQ ID NO: 1245086
auguuucuugaggaaaugu

SEQ ID NO: 1535177 - RNA, 19 nt, Artificial Sequence
  Description of Artificial Sequence: Synthetic oligonucleotide
  Antisense strand to SEQ ID NO: 1535176
acauuuccucaagaaacau

SEQ ID NO: 1535178 - RNA, 19 nt, Artificial Sequence
  Description of Artificial Sequence: Synthetic oligonucleotide
  Sense strand starting at position 482 of SEQ ID NO: 1245086
uuuacuaauguguaagacu

SEQ ID NO: 1535179 - RNA, 19 nt, Artificial Sequence
  Description of Artificial Sequence: Synthetic oligonucleotide
  Antisense strand to SEQ ID NO: 1535178
agucuuacacauuaguaaa

SEQ ID NO: 1535180 - RNA, 19 nt, Artificial Sequence
  Description of Artificial Sequence: Synthetic oligonucleotide
  Sense strand starting at position 547 of SEQ ID NO: 1245086
uuauaaaggcuugguaaag

SEQ ID NO: 1535181 - RNA, 19 nt, Artificial Sequence
  Description of Artificial Sequence: Synthetic oligonucleotide
  Antisense strand to SEQ ID NO: 1535180
cuuuaccaagccuuuauaa

SEQ ID NO: 1535182 - RNA, 19 nt, Artificial Sequence
  Description of Artificial Sequence: Synthetic oligonucleotide
  Sense strand starting at position 548 of SEQ ID NO: 1245086
uauaaaggcuugguaaagu

SEQ ID NO: 1535183 - RNA, 19 nt, Artificial Sequence
  Description of Artificial Sequence: Synthetic oligonucleotide
  Antisense strand to SEQ ID NO: 1535182
acuuuaccaagccuuuaua

SEQ ID NO: 1535184 - RNA, 19 nt, Artificial Sequence
  Description of Artificial Sequence: Synthetic oligonucleotide
  Sense strand starting at position 587 of SEQ ID NO: 1245086
aggagaucuggugguuucu

SEQ ID NO: 1535185 - RNA, 19 nt, Artificial Sequence
  Description of Artificial Sequence: Synthetic oligonucleotide
  Antisense strand to SEQ ID NO: 1535184
agaaaccaccagaucuccu

SEQ ID NO: 1535186 - RNA, 19 nt, Artificial Sequence
  Description of Artificial Sequence: Synthetic oligonucleotide
  Sense strand starting at position 589 of SEQ ID NO: 1245086
gagaucuggugguuucuaa

SEQ ID NO: 1535187 - RNA, 19 nt, Artificial Sequence
  Description of Artificial Sequence: Synthetic oligonucleotide
  Antisense strand to SEQ ID NO: 1535186
uuagaaaccaccagaucuc

SEQ ID NO: 1535188 - RNA, 19 nt, Artificial Sequence
  Description of Artificial Sequence: Synthetic oligonucleotide
  Sense strand starting at position 767 of SEQ ID NO: 1245086
aggcauacugcugauaauu

SEQ ID NO: 1535189 - RNA, 19 nt, Artificial Sequence
  Description of Artificial Sequence: Synthetic oligonucleotide
  Antisense strand to SEQ ID NO: 1535188
aauuaucagcaguaugccu

SEQ ID NO: 1535190 - RNA, 19 nt, Artificial Sequence
  Description of Artificial Sequence: Synthetic oligonucleotide
  Sense strand starting at position 983 of SEQ ID NO: 1245086
uugccacucuauuuaggua

SEQ ID NO: 1535191 - RNA, 19 nt, Artificial Sequence
  Description of Artificial Sequence: Synthetic oligonucleotide
  Antisense strand to SEQ ID NO: 1535190
uaccuaaauagaguggcaa

SEQ ID NO: 1535192 - RNA, 19 nt, Artificial Sequence
  Description of Artificial Sequence: Synthetic oligonucleotide
  Sense strand starting at position 1390 of SEQ ID NO: 1245086
ugaugacaacucuauuguu

SEQ ID NO: 1535193 - RNA, 19 nt, Artificial Sequence
  Description of Artificial Sequence: Synthetic oligonucleotide
  Antisense strand to SEQ ID NO: 1535192
aacaauagaguugucauca

SEQ ID NO: 1535194 - RNA, 19 nt, Artificial Sequence
  Description of Artificial Sequence: Synthetic oligonucleotide
  Sense strand starting at position 1416 of SEQ ID NO: 1245086
ccugauauacaugguaaau

SEQ ID NO: 1535195 - RNA, 19 nt, Artificial Sequence
  Description of Artificial Sequence: Synthetic oligonucleotide
  Antisense strand to SEQ ID NO: 1535194
auuuaccauguauaucagg

SEQ ID NO: 1535196 - RNA, 19 nt, Artificial Sequence
  Description of Artificial Sequence: Synthetic oligonucleotide
  Sense strand starting at position 1595 of SEQ ID NO: 1245086
ggagaacuguucucacaaa

SEQ ID NO: 1535197 - RNA, 19 nt, Artificial Sequence
  Description of Artificial Sequence: Synthetic oligonucleotide
  Antisense strand to SEQ ID NO: 1535196
uuugugagaacaguucucc

SEQ ID NO: 1535198 - RNA, 19 nt, Artificial Sequence
  Description of Artificial Sequence: Synthetic oligonucleotide
  Sense strand starting at position 1768 of SEQ ID NO: 1245086
aaagaugaugcauguaguu

SEQ ID NO: 1535199 - RNA, 19 nt, Artificial Sequence
  Description of Artificial Sequence: Synthetic oligonucleotide
  Antisense strand to SEQ ID NO: 1535198
aacuacaugcaucaucuuu

SEQ ID NO: 1535200 - RNA, 19 nt, Artificial Sequence
  Description of Artificial Sequence: Synthetic oligonucleotide
  Sense strand starting at position 1770 of SEQ ID NO: 1245086
agaugaugcauguaguuua

SEQ ID NO: 1535201 - RNA, 19 nt, Artificial Sequence
  Description of Artificial Sequence: Synthetic oligonucleotide
  Antisense strand to SEQ ID NO: 1535200
uaaacuacaugcaucaucu

SEQ ID NO: 1535202 - RNA, 19 nt, Artificial Sequence
  Description of Artificial Sequence: Synthetic oligonucleotide
  Sense strand starting at position 1863 of SEQ ID NO: 1245086
cuucguguuggacacauaa

SEQ ID NO: 1535203 - RNA, 19 nt, Artificial Sequence
  Description of Artificial Sequence: Synthetic oligonucleotide
  Antisense strand to SEQ ID NO: 1535202
uuauguguccaacacgaag

SEQ ID NO: 1535204 - RNA, 19 nt, Artificial Sequence
  Description of Artificial Sequence: Synthetic oligonucleotide
  Sense strand starting at position 2028 of SEQ ID NO: 1245086
guucucugaguagagucau

SEQ ID NO: 1535205 - RNA, 19 nt, Artificial Sequence
  Description of Artificial Sequence: Synthetic oligonucleotide
  Antisense strand to SEQ ID NO: 1535204
augacucuacucagagaac

SEQ ID NO: 1535206 - RNA, 19 nt, Artificial Sequence
  Description of Artificial Sequence: Synthetic oligonucleotide
  Sense strand starting at position 2133 of SEQ ID NO: 1245086
guaguaugagcugauuauc

SEQ ID NO: 1535207 - RNA, 19 nt, Artificial Sequence
  Description of Artificial Sequence: Synthetic oligonucleotide
  Antisense strand to SEQ ID NO: 1535206
gauaaucagcucauacuac

SEQ ID NO: 1535208 - RNA, 19 nt, Artificial Sequence
  Description of Artificial Sequence: Synthetic oligonucleotide
  Sense strand starting at position 2136 of SEQ ID NO: 1245086
guaugagcugauuaucuuu

SEQ ID NO: 1535209 - RNA, 19 nt, Artificial Sequence
  Description of Artificial Sequence: Synthetic oligonucleotide
  Antisense strand to SEQ ID NO: 1535208
aaagauaaucagcucauac

SEQ ID NO: 1535210 - RNA, 19 nt, Artificial Sequence
  Description of Artificial Sequence: Synthetic oligonucleotide
  Sense strand starting at position 2201 of SEQ ID NO: 1245086
acuuauuggccugaguuga

SEQ ID NO: 1535211 - RNA, 19 nt, Artificial Sequence
  Description of Artificial Sequence: Synthetic oligonucleotide
  Antisense strand to SEQ ID NO: 1535210
ucaacucaggccaauaagu

SEQ ID NO: 1535212 - RNA, 19 nt, Artificial Sequence
  Description of Artificial Sequence: Synthetic oligonucleotide
  Sense strand starting at position 2205 of SEQ ID NO: 1245086
auuggccugaguugauaaa

SEQ ID NO: 1535213 - RNA, 19 nt, Artificial Sequence
  Description of Artificial Sequence: Synthetic oligonucleotide
  Antisense strand to SEQ ID NO: 1535212
uuuaucaacucaggccaau

SEQ ID NO: 1535214 - RNA, 19 nt, Artificial Sequence
  Description of Artificial Sequence: Synthetic oligonucleotide
  Sense strand starting at position 2380 of SEQ ID NO: 1245086
uuucuuaauucggucauuu

SEQ ID NO: 1535215 - RNA, 19 nt, Artificial Sequence
  Description of Artificial Sequence: Synthetic oligonucleotide
  Antisense strand to SEQ ID NO: 1535214
aaaugaccgaauuaagaaa

SEQ ID NO: 1535216 - RNA, 19 nt, Artificial Sequence
  Description of Artificial Sequence: Synthetic oligonucleotide
  Sense strand starting at position 2389 of SEQ ID NO: 1245086
ucggucauuucuccucaga

SEQ ID NO: 1535217 - RNA, 19 nt, Artificial Sequence
  Description of Artificial Sequence: Synthetic oligonucleotide
  Antisense strand to SEQ ID NO: 1535216
ucugaggagaaaugaccga

SEQ ID NO: 1535218 - RNA, 19 nt, Artificial Sequence
  Description of Artificial Sequence: Synthetic oligonucleotide
  Sense strand starting at position 2766 of SEQ ID NO: 1245086
aaagcuauaugggcaguaa

SEQ ID NO: 1535219 - RNA, 19 nt, Artificial Sequence
  Description of Artificial Sequence: Synthetic oligonucleotide
  Antisense strand to SEQ ID NO: 1535218
uuacugcccauauagcuuu

SEQ ID NO: 1535220 - RNA, 19 nt, Artificial Sequence
  Description of Artificial Sequence: Synthetic oligonucleotide
  Sense strand starting at position 2767 of SEQ ID NO: 1245086
aagcuauaugggcaguaaa

SEQ ID NO: 1535221 - RNA, 19 nt, Artificial Sequence
  Description of Artificial Sequence: Synthetic oligonucleotide
  Antisense strand to SEQ ID NO: 1535220
uuuacugcccauauagcuu

SEQ ID NO: 1535222 - RNA, 19 nt, Artificial Sequence
  Description of Artificial Sequence: Synthetic oligonucleotide
  Sense strand starting at position 2770 of SEQ ID NO: 1245086
cuauaugggcaguaaagua

SEQ ID NO: 1535223 - RNA, 19 nt, Artificial Sequence
  Description of Artificial Sequence: Synthetic oligonucleotide
  Antisense strand to SEQ ID NO: 1535222
uacuuuacugcccauauag

SEQ ID NO: 1535224 - RNA, 19 nt, Artificial Sequence
  Description of Artificial Sequence: Synthetic oligonucleotide
  Sense strand starting at position 2889 of SEQ ID NO: 1245086
auccuaugagguugugaau

SEQ ID NO: 1535225 - RNA, 19 nt, Artificial Sequence
  Description of Artificial Sequence: Synthetic oligonucleotide
  Antisense strand to SEQ ID NO: 1535224
auucacaaccucauaggau

SEQ ID NO: 1535226 - RNA, 19 nt, Artificial Sequence
  Description of Artificial Sequence: Synthetic oligonucleotide
  Sense strand starting at position 3157 of SEQ ID NO: 1245086
gguggagauaccuguuuaa

SEQ ID NO: 1535227 - RNA, 19 nt, Artificial Sequence
  Description of Artificial Sequence: Synthetic oligonucleotide
  Antisense strand to SEQ ID NO: 1535226
uuaaacagguaucuccacc

SEQ ID NO: 1535228 - RNA, 19 nt, Artificial Sequence
  Description of Artificial Sequence: Synthetic oligonucleotide
  Sense strand starting at position 3221 of SEQ ID NO: 1245086
ggauuucuguaagaaucua

SEQ ID NO: 1535229 - RNA, 19 nt, Artificial Sequence
  Description of Artificial Sequence: Synthetic oligonucleotide
  Antisense strand to SEQ ID NO: 1535228
uagauucuuacagaaaucc

SEQ ID NO: 1535230 - RNA, 19 nt, Artificial Sequence
  Description of Artificial Sequence: Synthetic oligonucleotide
  Sense strand starting at position 3388 of SEQ ID NO: 1245086
acaauuugcugcccugauu

SEQ ID NO: 1535231 - RNA, 19 nt, Artificial Sequence
  Description of Artificial Sequence: Synthetic oligonucleotide
  Antisense strand to SEQ ID NO: 1535230
aaucagggcagcaaauugu

SEQ ID NO: 1535232 - RNA, 19 nt, Artificial Sequence
  Description of Artificial Sequence: Synthetic oligonucleotide
  Sense strand starting at position 3475 of SEQ ID NO: 1245086
gaagguacagugugaaacu

SEQ ID NO: 1535233 - RNA, 19 nt, Artificial Sequence
  Description of Artificial Sequence: Synthetic oligonucleotide
  Antisense strand to SEQ ID NO: 1535232
aguuucacacuguaccuuc

SEQ ID NO: 1535234 - RNA, 19 nt, Artificial Sequence
  Description of Artificial Sequence: Synthetic oligonucleotide
  Sense strand starting at position 3505 of SEQ ID NO: 1245086
guagaauaucauuaacagc

SEQ ID NO: 1535235 - RNA, 19 nt, Artificial Sequence
  Description of Artificial Sequence: Synthetic oligonucleotide
  Antisense strand to SEQ ID NO: 1535234
gcuguuaaugauauucuac

SEQ ID NO: 1535236 - RNA, 19 nt, Artificial Sequence
  Description of Artificial Sequence: Synthetic oligonucleotide
  Sense strand starting at position 3567 of SEQ ID NO: 1245086
aggaacuaguugcuguaaa

SEQ ID NO: 1535237 - RNA, 19 nt, Artificial Sequence
  Description of Artificial Sequence: Synthetic oligonucleotide
  Antisense strand to SEQ ID NO: 1535236
uuuacagcaacuaguuccu

SEQ ID NO: 1535238 - RNA, 19 nt, Artificial Sequence
  Description of Artificial Sequence: Synthetic oligonucleotide
  Sense strand starting at position 3579 of SEQ ID NO: 1245086
cuguaaauugcuuaagaaa

SEQ ID NO: 1535239 - RNA, 19 nt, Artificial Sequence
  Description of Artificial Sequence: Synthetic oligonucleotide
  Antisense strand to SEQ ID NO: 1535238
uuucuuaagcaauuuacag

SEQ ID NO: 1535240 - RNA, 19 nt, Artificial Sequence
  Description of Artificial Sequence: Synthetic oligonucleotide
  Sense strand starting at position 3716 of SEQ ID NO: 1245086
aucagauaagcuuagugau

SEQ ID NO: 1535241 - RNA, 19 nt, Artificial Sequence
  Description of Artificial Sequence: Synthetic oligonucleotide
  Antisense strand to SEQ ID NO: 1535240
aucacuaagcuuaucugau

SEQ ID NO: 1535242 - RNA, 19 nt, Artificial Sequence
  Description of Artificial Sequence: Synthetic oligonucleotide
  Sense strand starting at position 3718 of SEQ ID NO: 1245086
cagauaagcuuagugauua

SEQ ID NO: 1535243 - RNA, 19 nt, Artificial Sequence
  Description of Artificial Sequence: Synthetic oligonucleotide
  Antisense strand to SEQ ID NO: 1535242
uaaucacuaagcuuaucug

SEQ ID NO: 1535244 - RNA, 19 nt, Artificial Sequence
  Description of Artificial Sequence: Synthetic oligonucleotide
  Sense strand starting at position 624 of SEQ ID NO: 1245087
ggaggagccucuuaguaga

SEQ ID NO: 1535245 - RNA, 19 nt, Artificial Sequence
  Description of Artificial Sequence: Synthetic oligonucleotide
  Antisense strand to SEQ ID NO: 1535244
ucuacuaagaggcuccucc

SEQ ID NO: 1535246 - RNA, 19 nt, Artificial Sequence
  Description of Artificial Sequence: Synthetic oligonucleotide
  Sense strand starting at position 627 of SEQ ID NO: 1245087
ggagccucuuaguagagau

SEQ ID NO: 1535247 - RNA, 19 nt, Artificial Sequence
  Description of Artificial Sequence: Synthetic oligonucleotide
  Antisense strand to SEQ ID NO: 1535246
aucucuacuaagaggcucc

SEQ ID NO: 1535248 - RNA, 19 nt, Artificial Sequence
  Description of Artificial Sequence: Synthetic oligonucleotide
  Sense strand starting at position 629 of SEQ ID NO: 1245087
agccucuuaguagagauua

SEQ ID NO: 1535249 - RNA, 19 nt, Artificial Sequence
  Description of Artificial Sequence: Synthetic oligonucleotide
  Antisense strand to SEQ ID NO: 1535248
uaaucucuacuaagaggcu

SEQ ID NO: 1535250 - RNA, 19 nt, Artificial Sequence
  Description of Artificial Sequence: Synthetic oligonucleotide
  Sense strand starting at position 788 of SEQ ID NO: 1245087
ggagauacuaggcgugaga

SEQ ID NO: 1535251 - RNA, 19 nt, Artificial Sequence
  Description of Artificial Sequence: Synthetic oligonucleotide
  Antisense strand to SEQ ID NO: 1535250
ucucacgccuaguaucucc

SEQ ID NO: 1535252 - RNA, 19 nt, Artificial Sequence
  Description of Artificial Sequence: Synthetic oligonucleotide
  Sense strand starting at position 806 of SEQ ID NO: 1245087
aggccagacucguucuaca

SEQ ID NO: 1535253 - RNA, 19 nt, Artificial Sequence
  Description of Artificial Sequence: Synthetic oligonucleotide
  Antisense strand to SEQ ID NO: 1535252
uguagaacgagucuggccu

SEQ ID NO: 1535254 - RNA, 19 nt, Artificial Sequence
  Description of Artificial Sequence: Synthetic oligonucleotide
  Sense strand starting at position 841 of SEQ ID NO: 1245087
cagagacuccuccgggcaa

SEQ ID NO: 1535255 - RNA, 19 nt, Artificial Sequence
  Description of Artificial Sequence: Synthetic oligonucleotide
  Antisense strand to SEQ ID NO: 1535254
uugcccggaggagucucug

SEQ ID NO: 1535256 - RNA, 19 nt, Artificial Sequence
  Description of Artificial Sequence: Synthetic oligonucleotide
  Sense strand starting at position 843 of SEQ ID NO: 1245087
gagacuccuccgggcaaga

SEQ ID NO: 1535257 - RNA, 19 nt, Artificial Sequence
  Description of Artificial Sequence: Synthetic oligonucleotide
  Antisense strand to SEQ ID NO: 1535256
ucuugcccggaggagucuc

SEQ ID NO: 1535258 - RNA, 19 nt, Artificial Sequence
  Description of Artificial Sequence: Synthetic oligonucleotide
  Sense strand starting at position 896 of SEQ ID NO: 1245087
gaauauugugagggcaaga

SEQ ID NO: 1535259 - RNA, 19 nt, Artificial Sequence
  Description of Artificial Sequence: Synthetic oligonucleotide
  Antisense strand to SEQ ID NO: 1535258
ucuugcccucacaauauuc

SEQ ID NO: 1535260 - RNA, 19 nt, Artificial Sequence
  Description of Artificial Sequence: Synthetic oligonucleotide
  Sense strand starting at position 930 of SEQ ID NO: 1245087
gcaacuccagacugggaua

SEQ ID NO: 1535261 - RNA, 19 nt, Artificial Sequence
  Description of Artificial Sequence: Synthetic oligonucleotide
  Antisense strand to SEQ ID NO: 1535260
uaucccagucuggaguugc

SEQ ID NO: 1535262 - RNA, 19 nt, Artificial Sequence
  Description of Artificial Sequence: Synthetic oligonucleotide
  Sense strand starting at position 1015 of SEQ ID NO: 1245087
aggcaagucccguaacuaa

SEQ ID NO: 1535263 - RNA, 19 nt, Artificial Sequence
  Description of Artificial Sequence: Synthetic oligonucleotide
  Antisense strand to SEQ ID NO: 1535262
uuaguuacgggacuugccu

SEQ ID NO: 1535264 - RNA, 19 nt, Artificial Sequence
  Description of Artificial Sequence: Synthetic oligonucleotide
  Sense strand starting at position 1041 of SEQ ID NO: 1245087
gagugagaauuccuacugu

SEQ ID NO: 1535265 - RNA, 19 nt, Artificial Sequence
  Description of Artificial Sequence: Synthetic oligonucleotide
  Antisense strand to SEQ ID NO: 1535264
acaguaggaauucucacuc

SEQ ID NO: 1535266 - RNA, 19 nt, Artificial Sequence
  Description of Artificial Sequence: Synthetic oligonucleotide
  Sense strand starting at position 1056 of SEQ ID NO: 1245087
cuguaaacucgcgacccau

SEQ ID NO: 1535267 - RNA, 19 nt, Artificial Sequence
  Description of Artificial Sequence: Synthetic oligonucleotide
  Antisense strand to SEQ ID NO: 1535266
augggucgcgaguuuacag

SEQ ID NO: 1535268 - RNA, 19 nt, Artificial Sequence
  Description of Artificial Sequence: Synthetic oligonucleotide
  Sense strand starting at position 1729 of SEQ ID NO: 1245087
gagcgagcugaugacaaau

SEQ ID NO: 1535269 - RNA, 19 nt, Artificial Sequence
  Description of Artificial Sequence: Synthetic oligonucleotide
  Antisense strand to SEQ ID NO: 1535268
auuugucaucagcucgcuc

SEQ ID NO: 1535270 - RNA, 19 nt, Artificial Sequence
  Description of Artificial Sequence: Synthetic oligonucleotide
  Sense strand starting at position 1772 of SEQ ID NO: 1245087
ucgcaccaggaguaauaaa

SEQ ID NO: 1535271 - RNA, 19 nt, Artificial Sequence
  Description of Artificial Sequence: Synthetic oligonucleotide
  Antisense strand to SEQ ID NO: 1535270
uuuauuacuccuggugcga

SEQ ID NO: 1535272 - RNA, 19 nt, Artificial Sequence
  Description of Artificial Sequence: Synthetic oligonucleotide
  Sense strand starting at position 2808 of SEQ ID NO: 1245087
uagggaaucuaauggagau

SEQ ID NO: 1535273 - RNA, 19 nt, Artificial Sequence
  Description of Artificial Sequence: Synthetic oligonucleotide
  Antisense strand to SEQ ID NO: 1535272
aucuccauuagauucccua

SEQ ID NO: 1535274 - RNA, 19 nt, Artificial Sequence
  Description of Artificial Sequence: Synthetic oligonucleotide
  Sense strand starting at position 2870 of SEQ ID NO: 1245087
aacguacgcuucuuuauuu

SEQ ID NO: 1535275 - RNA, 19 nt, Artificial Sequence
  Description of Artificial Sequence: Synthetic oligonucleotide
  Antisense strand to SEQ ID NO: 1535274
aaauaaagaagcguacguu

SEQ ID NO: 1535276 - RNA, 19 nt, Artificial Sequence
  Description of Artificial Sequence: Synthetic oligonucleotide
  Sense strand starting at position 2887 of SEQ ID NO: 1245087
uuugucauucuuuggagau

SEQ ID NO: 1535277 - RNA, 19 nt, Artificial Sequence
  Description of Artificial Sequence: Synthetic oligonucleotide
  Antisense strand to SEQ ID NO: 1535276
aucuccaaagaaugacaaa

SEQ ID NO: 1535278 - RNA, 19 nt, Artificial Sequence
  Description of Artificial Sequence: Synthetic oligonucleotide
  Sense strand starting at position 2893 of SEQ ID NO: 1245087
auucuuuggagauggguaa

SEQ ID NO: 1535279 - RNA, 19 nt, Artificial Sequence
  Description of Artificial Sequence: Synthetic oligonucleotide
  Antisense strand to SEQ ID NO: 1535278
uuacccaucuccaaagaau

SEQ ID NO: 1535280 - RNA, 19 nt, Artificial Sequence
  Description of Artificial Sequence: Synthetic oligonucleotide
  Sense strand starting at position 2894 of SEQ ID NO: 1245087
uucuuuggagauggguaau

SEQ ID NO: 1535281 - RNA, 19 nt, Artificial Sequence
  Description of Artificial Sequence: Synthetic oligonucleotide
  Antisense strand to SEQ ID NO: 1535280
auuacccaucuccaaagaa

SEQ ID NO: 1535282 - RNA, 19 nt, Artificial Sequence
  Description of Artificial Sequence: Synthetic oligonucleotide
  Sense strand starting at position 2905 of SEQ ID NO: 1245087
uggguaaucuuuccuggca

SEQ ID NO: 1535283 - RNA, 19 nt, Artificial Sequence
  Description of Artificial Sequence: Synthetic oligonucleotide
  Antisense strand to SEQ ID NO: 1535282
ugccaggaaagauuaccca

SEQ ID NO: 1535284 - RNA, 19 nt, Artificial Sequence
  Description of Artificial Sequence: Synthetic oligonucleotide
  Sense strand starting at position 2906 of SEQ ID NO: 1245087
ggguaaucuuuccuggcag

SEQ ID NO: 1535285 - RNA, 19 nt, Artificial Sequence
  Description of Artificial Sequence: Synthetic oligonucleotide
  Antisense strand to SEQ ID NO: 1535284
cugccaggaaagauuaccc

SEQ ID NO: 1535286 - RNA, 19 nt, Artificial Sequence
  Description of Artificial Sequence: Synthetic oligonucleotide
  Sense strand starting at position 3130 of SEQ ID NO: 1245087
ggaguuugagagugcaugu

SEQ ID NO: 1535287 - RNA, 19 nt, Artificial Sequence
  Description of Artificial Sequence: Synthetic oligonucleotide
  Antisense strand to SEQ ID NO: 1535286
acaugcacucucaaacucc

SEQ ID NO: 1535288 - RNA, 19 nt, Artificial Sequence
  Description of Artificial Sequence: Synthetic oligonucleotide
  Sense strand starting at position 3137 of SEQ ID NO: 1245087
gagagugcauguuuguuau

SEQ ID NO: 1535289 - RNA, 19 nt, Artificial Sequence
  Description of Artificial Sequence: Synthetic oligonucleotide
  Antisense strand to SEQ ID NO: 1535288
auaacaaacaugcacucuc

SEQ ID NO: 1535290 - RNA, 19 nt, Artificial Sequence
  Description of Artificial Sequence: Synthetic oligonucleotide
  Sense strand starting at position 3139 of SEQ ID NO: 1245087
gagugcauguuuguuauuu

SEQ ID NO: 1535291 - RNA, 19 nt, Artificial Sequence
  Description of Artificial Sequence: Synthetic oligonucleotide
  Antisense strand to SEQ ID NO: 1535290
aaauaacaaacaugcacuc

SEQ ID NO: 1535292 - RNA, 19 nt, Artificial Sequence
  Description of Artificial Sequence: Synthetic oligonucleotide
  Sense strand starting at position 3343 of SEQ ID NO: 1245087
acagaauucucaccacgua

SEQ ID NO: 1535293 - RNA, 19 nt, Artificial Sequence
  Description of Artificial Sequence: Synthetic oligonucleotide
  Antisense strand to SEQ ID NO: 1535292
uacguggugagaauucugu

SEQ ID NO: 1535294 - RNA, 19 nt, Artificial Sequence
  Description of Artificial Sequence: Synthetic oligonucleotide
  Sense strand starting at position 3346 of SEQ ID NO: 1245087
gaauucucaccacguaaag

SEQ ID NO: 1535295 - RNA, 19 nt, Artificial Sequence
  Description of Artificial Sequence: Synthetic oligonucleotide
  Antisense strand to SEQ ID NO: 1535294
cuuuacguggugagaauuc

SEQ ID NO: 1535296 - RNA, 19 nt, Artificial Sequence
  Description of Artificial Sequence: Synthetic oligonucleotide
  Sense strand starting at position 3372 of SEQ ID NO: 1245087
gcuggcuuccuuuaaggca

SEQ ID NO: 1535297 - RNA, 19 nt, Artificial Sequence
  Description of Artificial Sequence: Synthetic oligonucleotide
  Antisense strand to SEQ ID NO: 1535296
ugccuuaaaggaagccagc

SEQ ID NO: 1535298 - RNA, 19 nt, Artificial Sequence
  Description of Artificial Sequence: Synthetic oligonucleotide
  Sense strand starting at position 3379 of SEQ ID NO: 1245087
uccuuuaaggcaugaacuu

SEQ ID NO: 1535299 - RNA, 19 nt, Artificial Sequence
  Description of Artificial Sequence: Synthetic oligonucleotide
  Antisense strand to SEQ ID NO: 1535298
aaguucaugccuuaaagga

SEQ ID NO: 1535300 - RNA, 19 nt, Artificial Sequence
  Description of Artificial Sequence: Synthetic oligonucleotide
  Sense strand starting at position 3418 of SEQ ID NO: 1245087
acuuuacaaguuugaguca

SEQ ID NO: 1535301 - RNA, 19 nt, Artificial Sequence
  Description of Artificial Sequence: Synthetic oligonucleotide
  Antisense strand to SEQ ID NO: 1535300
ugacucaaacuuguaaagu

SEQ ID NO: 1535302 - RNA, 19 nt, Artificial Sequence
  Description of Artificial Sequence: Synthetic oligonucleotide
  Sense strand starting at position 3421 of SEQ ID NO: 1245087
uuacaaguuugagucacaa

SEQ ID NO: 1535303 - RNA, 19 nt, Artificial Sequence
  Description of Artificial Sequence: Synthetic oligonucleotide
  Antisense strand to SEQ ID NO: 1535302
uugugacucaaacuuguaa

SEQ ID NO: 1535304 - RNA, 19 nt, Artificial Sequence
  Description of Artificial Sequence: Synthetic oligonucleotide
  Sense strand starting at position 3485 of SEQ ID NO: 1245087
ucuaauucuggugagguaa

SEQ ID NO: 1535305 - RNA, 19 nt, Artificial Sequence
  Description of Artificial Sequence: Synthetic oligonucleotide
  Antisense strand to SEQ ID NO: 1535304
uuaccucaccagaauuaga

SEQ ID NO: 1535306 - RNA, 19 nt, Artificial Sequence
  Description of Artificial Sequence: Synthetic oligonucleotide
  Sense strand starting at position 3526 of SEQ ID NO: 1245087
aagaaagguuuacaaguaa

SEQ ID NO: 1535307 - RNA, 19 nt, Artificial Sequence
  Description of Artificial Sequence: Synthetic oligonucleotide
  Antisense strand to SEQ ID NO: 1535306
uuacuuguaaaccuuucuu

SEQ ID NO: 1535308 - RNA, 19 nt, Artificial Sequence
  Description of Artificial Sequence: Synthetic oligonucleotide
  Sense strand starting at position 3580 of SEQ ID NO: 1245087
uugggagaucggugaacuu

SEQ ID NO: 1535309 - RNA, 19 nt, Artificial Sequence
  Description of Artificial Sequence: Synthetic oligonucleotide
  Antisense strand to SEQ ID NO: 1535308
aaguucaccgaucucccaa

SEQ ID NO: 1535310 - RNA, 19 nt, Artificial Sequence
  Description of Artificial Sequence: Synthetic oligonucleotide
  Sense strand starting at position 3589 of SEQ ID NO: 1245087
cggugaacuucauugcagu

SEQ ID NO: 1535311 - RNA, 19 nt, Artificial Sequence
  Description of Artificial Sequence: Synthetic oligonucleotide
  Antisense strand to SEQ ID NO: 1535310
acugcaaugaaguucaccg

SEQ ID NO: 1535312 - RNA, 19 nt, Artificial Sequence
  Description of Artificial Sequence: Synthetic oligonucleotide
  Sense strand starting at position 3640 of SEQ ID NO: 1245087
uucugcuuugggugacuga

SEQ ID NO: 1535313 - RNA, 19 nt, Artificial Sequence
  Description of Artificial Sequence: Synthetic oligonucleotide
  Antisense strand to SEQ ID NO: 1535312
ucagucacccaaagcagaa

SEQ ID NO: 1535314 - RNA, 19 nt, Artificial Sequence
  Description of Artificial Sequence: Synthetic oligonucleotide
  Sense strand starting at position 3643 of SEQ ID NO: 1245087
ugcuuugggugacugaaau

SEQ ID NO: 1535315 - RNA, 19 nt, Artificial Sequence
  Description of Artificial Sequence: Synthetic oligonucleotide
  Antisense strand to SEQ ID NO: 1535314
auuucagucacccaaagca

SEQ ID NO: 1535316 - RNA, 19 nt, Artificial Sequence
  Description of Artificial Sequence: Synthetic oligonucleotide
  Sense strand starting at position 3694 of SEQ ID NO: 1245087
auuuaagaaucugaugaug

SEQ ID NO: 1535317 - RNA, 19 nt, Artificial Sequence
  Description of Artificial Sequence: Synthetic oligonucleotide
  Antisense strand to SEQ ID NO: 1535316
caucaucagauucuuaaau

SEQ ID NO: 1535318 - RNA, 19 nt, Artificial Sequence
  Description of Artificial Sequence: Synthetic oligonucleotide
  Sense strand starting at position 3696 of SEQ ID NO: 1245087
uuaagaaucugaugaugaa

SEQ ID NO: 1535319 - RNA, 19 nt, Artificial Sequence
  Description of Artificial Sequence: Synthetic oligonucleotide
  Antisense strand to SEQ ID NO: 1535318
uucaucaucagauucuuaa

SEQ ID NO: 1535320 - RNA, 19 nt, Artificial Sequence
  Description of Artificial Sequence: Synthetic oligonucleotide
  Sense strand starting at position 3741 of SEQ ID NO: 1245087
ugacauaacugauacagcu

SEQ ID NO: 1535321 - RNA, 19 nt, Artificial Sequence
  Description of Artificial Sequence: Synthetic oligonucleotide
  Antisense strand to SEQ ID NO: 1535320
agcuguaucaguuauguca

SEQ ID NO: 1535322 - RNA, 19 nt, Artificial Sequence
  Description of Artificial Sequence: Synthetic oligonucleotide
  Sense strand starting at position 3956 of SEQ ID NO: 1245087
aucagaagugcuuguucuu

SEQ ID NO: 1535323 - RNA, 19 nt, Artificial Sequence
  Description of Artificial Sequence: Synthetic oligonucleotide
  Antisense strand to SEQ ID NO: 1535322
aagaacaagcacuucugau

SEQ ID NO: 1535324 - RNA, 19 nt, Artificial Sequence
  Description of Artificial Sequence: Synthetic oligonucleotide
  Sense strand starting at position 4 of SEQ ID NO: 1245088
uccagaaagggauggucuu

SEQ ID NO: 1535325 - RNA, 19 nt, Artificial Sequence
  Description of Artificial Sequence: Synthetic oligonucleotide
  Antisense strand to SEQ ID NO: 1535324
aagaccaucccuuucugga

SEQ ID NO: 1535326 - RNA, 19 nt, Artificial Sequence
  Description of Artificial Sequence: Synthetic oligonucleotide
  Sense strand starting at position 250 of SEQ ID NO: 1245088
uugauucuggcauaggacu

SEQ ID NO: 1535327 - RNA, 19 nt, Artificial Sequence
  Description of Artificial Sequence: Synthetic oligonucleotide
  Antisense strand to SEQ ID NO: 1535326
aguccuaugccagaaucaa

SEQ ID NO: 1535328 - RNA, 19 nt, Artificial Sequence
  Description of Artificial Sequence: Synthetic oligonucleotide
  Sense strand starting at position 341 of SEQ ID NO: 1245088
ggaaauaaugggugggugu

SEQ ID NO: 1535329 - RNA, 19 nt, Artificial Sequence
  Description of Artificial Sequence: Synthetic oligonucleotide
  Antisense strand to SEQ ID NO: 1535328
acacccacccauuauuucc

SEQ ID NO: 1535330 - RNA, 19 nt, Artificial Sequence
  Description of Artificial Sequence: Synthetic oligonucleotide
  Sense strand starting at position 342 of SEQ ID NO: 1245088
gaaauaauggguggguguu

SEQ ID NO: 1535331 - RNA, 19 nt, Artificial Sequence
  Description of Artificial Sequence: Synthetic oligonucleotide
  Antisense strand to SEQ ID NO: 1535330
aacacccacccauuauuuc

SEQ ID NO: 1535332 - RNA, 19 nt, Artificial Sequence
  Description of Artificial Sequence: Synthetic oligonucleotide
  Sense strand starting at position 364 of SEQ ID NO: 1245088
gcagacuacguuuaggaga

SEQ ID NO: 1535333 - RNA, 19 nt, Artificial Sequence
  Description of Artificial Sequence: Synthetic oligonucleotide
  Antisense strand to SEQ ID NO: 1535332
ucuccuaaacguagucugc

SEQ ID NO: 1535334 - RNA, 19 nt, Artificial Sequence
  Description of Artificial Sequence: Synthetic oligonucleotide
  Sense strand starting at position 391 of SEQ ID NO: 1245088
aagaguuucuuacuggaca

SEQ ID NO: 1535335 - RNA, 19 nt, Artificial Sequence
  Description of Artificial Sequence: Synthetic oligonucleotide
  Antisense strand to SEQ ID NO: 1535334
uguccaguaagaaacucuu

SEQ ID NO: 1535336 - RNA, 19 nt, Artificial Sequence
  Description of Artificial Sequence: Synthetic oligonucleotide
  Sense strand starting at position 432 of SEQ ID NO: 1245088
aguagauguggagauguca

SEQ ID NO: 1535337 - RNA, 19 nt, Artificial Sequence
  Description of Artificial Sequence: Synthetic oligonucleotide
  Antisense strand to SEQ ID NO: 1535336
ugacaucuccacaucuacu

SEQ ID NO: 1535338 - RNA, 19 nt, Artificial Sequence
  Description of Artificial Sequence: Synthetic oligonucleotide
  Sense strand starting at position 448 of SEQ ID NO: 1245088
ucacaugugcaguagaauu

SEQ ID NO: 1535339 - RNA, 19 nt, Artificial Sequence
  Description of Artificial Sequence: Synthetic oligonucleotide
  Antisense strand to SEQ ID NO: 1535338
aauucuacugcacauguga

SEQ ID NO: 1535340 - RNA, 19 nt, Artificial Sequence
  Description of Artificial Sequence: Synthetic oligonucleotide
  Sense strand starting at position 477 of SEQ ID NO: 1245088
aguggucuaagccagagau

SEQ ID NO: 1535341 - RNA, 19 nt, Artificial Sequence
  Description of Artificial Sequence: Synthetic oligonucleotide
  Antisense strand to SEQ ID NO: 1535340
aucucuggcuuagaccacu

SEQ ID NO: 1535342 - RNA, 19 nt, Artificial Sequence
  Description of Artificial Sequence: Synthetic oligonucleotide
  Sense strand starting at position 560 of SEQ ID NO: 1245088
gggaaugaguguguggaga

SEQ ID NO: 1535343 - RNA, 19 nt, Artificial Sequence
  Description of Artificial Sequence: Synthetic oligonucleotide
  Antisense strand to SEQ ID NO: 1535342
ucuccacacacucauuccc

SEQ ID NO: 1535344 - RNA, 19 nt, Artificial Sequence
  Description of Artificial Sequence: Synthetic oligonucleotide
  Sense strand starting at position 826 of SEQ ID NO: 1245088
ccagauaccuggguuaaga

SEQ ID NO: 1535345 - RNA, 19 nt, Artificial Sequence
  Description of Artificial Sequence: Synthetic oligonucleotide
  Antisense strand to SEQ ID NO: 1535344
ucuuaacccagguaucugg

SEQ ID NO: 1535346 - RNA, 19 nt, Artificial Sequence
  Description of Artificial Sequence: Synthetic oligonucleotide
  Sense strand starting at position 1276 of SEQ ID NO: 1245088
augcuaagaucuucugaaa

SEQ ID NO: 1535347 - RNA, 19 nt, Artificial Sequence
  Description of Artificial Sequence: Synthetic oligonucleotide
  Antisense strand to SEQ ID NO: 1535346
uuucagaagaucuuagcau

SEQ ID NO: 1535348 - RNA, 19 nt, Artificial Sequence
  Description of Artificial Sequence: Synthetic oligonucleotide
  Sense strand starting at position 1332 of SEQ ID NO: 1245088
aggcaauaccucuggaaau

SEQ ID NO: 1535349 - RNA, 19 nt, Artificial Sequence
  Description of Artificial Sequence: Synthetic oligonucleotide
  Antisense strand to SEQ ID NO: 1535348
auuuccagagguauugccu

SEQ ID NO: 1535350 - RNA, 19 nt, Artificial Sequence
  Description of Artificial Sequence: Synthetic oligonucleotide
  Sense strand starting at position 1398 of SEQ ID NO: 1245088
cuucuuguauuuccaaguu

SEQ ID NO: 1535351 - RNA, 19 nt, Artificial Sequence
  Description of Artificial Sequence: Synthetic oligonucleotide
  Antisense strand to SEQ ID NO: 1535350
aacuuggaaauacaagaag

SEQ ID NO: 1535352 - RNA, 19 nt, Artificial Sequence
  Description of Artificial Sequence: Synthetic oligonucleotide
  Sense strand starting at position 1572 of SEQ ID NO: 1245088
ucagacuggucucugacaa

SEQ ID NO: 1535353 - RNA, 19 nt, Artificial Sequence
  Description of Artificial Sequence: Synthetic oligonucleotide
  Antisense strand to SEQ ID NO: 1535352
uugucagagaccagucuga

SEQ ID NO: 1535354 - RNA, 19 nt, Artificial Sequence
  Description of Artificial Sequence: Synthetic oligonucleotide
  Sense strand starting at position 1573 of SEQ ID NO: 1245088
cagacuggucucugacaaa

SEQ ID NO: 1535355 - RNA, 19 nt, Artificial Sequence
  Description of Artificial Sequence: Synthetic oligonucleotide
  Antisense strand to SEQ ID NO: 1535354
uuugucagagaccagucug

SEQ ID NO: 1535356 - RNA, 19 nt, Artificial Sequence
  Description of Artificial Sequence: Synthetic oligonucleotide
  Sense strand starting at position 1666 of SEQ ID NO: 1245088
cuaggucaacuuugauacu

SEQ ID NO: 1535357 - RNA, 19 nt, Artificial Sequence
  Description of Artificial Sequence: Synthetic oligonucleotide
  Antisense strand to SEQ ID NO: 1535356
aguaucaaaguugaccuag

SEQ ID NO: 1535358 - RNA, 19 nt, Artificial Sequence
  Description of Artificial Sequence: Synthetic oligonucleotide
  Sense strand starting at position 1718 of SEQ ID NO: 1245088
ggucauuucuacuuggcau

SEQ ID NO: 1535359 - RNA, 19 nt, Artificial Sequence
  Description of Artificial Sequence: Synthetic oligonucleotide
  Antisense strand to SEQ ID NO: 1535358
augccaaguagaaaugacc

SEQ ID NO: 1535360 - RNA, 19 nt, Artificial Sequence
  Description of Artificial Sequence: Synthetic oligonucleotide
  Sense strand starting at position 1740 of SEQ ID NO: 1245088
uuaccuugccgacauacaa

SEQ ID NO: 1535361 - RNA, 19 nt, Artificial Sequence
  Description of Artificial Sequence: Synthetic oligonucleotide
  Antisense strand to SEQ ID NO: 1535360
uuguaugucggcaagguaa

SEQ ID NO: 1535362 - RNA, 19 nt, Artificial Sequence
  Description of Artificial Sequence: Synthetic oligonucleotide
  Sense strand starting at position 2029 of SEQ ID NO: 1245088
gcaacuggaacuugaguau

SEQ ID NO: 1535363 - RNA, 19 nt, Artificial Sequence
  Description of Artificial Sequence: Synthetic oligonucleotide
  Antisense strand to SEQ ID NO: 1535362
auacucaaguuccaguugc

SEQ ID NO: 1535364 - RNA, 19 nt, Artificial Sequence
  Description of Artificial Sequence: Synthetic oligonucleotide
  Sense strand starting at position 2082 of SEQ ID NO: 1245088
ggacacuuaugcuuccuaa

SEQ ID NO: 1535365 - RNA, 19 nt, Artificial Sequence
  Description of Artificial Sequence: Synthetic oligonucleotide
  Antisense strand to SEQ ID NO: 1535364
uuaggaagcauaagugucc

SEQ ID NO: 1535366 - RNA, 19 nt, Artificial Sequence
  Description of Artificial Sequence: Synthetic oligonucleotide
  Sense strand starting at position 2264 of SEQ ID NO: 1245088
agguuauugcuuuagaaau

SEQ ID NO: 1535367 - RNA, 19 nt, Artificial Sequence
  Description of Artificial Sequence: Synthetic oligonucleotide
  Antisense strand to SEQ ID NO: 1535366
auuucuaaagcaauaaccu

SEQ ID NO: 1535368 - RNA, 19 nt, Artificial Sequence
  Description of Artificial Sequence: Synthetic oligonucleotide
  Sense strand starting at position 2351 of SEQ ID NO: 1245088
gauauagauucggugggaa

SEQ ID NO: 1535369 - RNA, 19 nt, Artificial Sequence
  Description of Artificial Sequence: Synthetic oligonucleotide
  Antisense strand to SEQ ID NO: 1535368
uucccaccgaaucuauauc

SEQ ID NO: 1535370 - RNA, 19 nt, Artificial Sequence
  Description of Artificial Sequence: Synthetic oligonucleotide
  Sense strand starting at position 2353 of SEQ ID NO: 1245088
uauagauucggugggaaua

SEQ ID NO: 1535371 - RNA, 19 nt, Artificial Sequence
  Description of Artificial Sequence: Synthetic oligonucleotide
  Antisense strand to SEQ ID NO: 1535370
uauucccaccgaaucuaua

SEQ ID NO: 1535372 - RNA, 19 nt, Artificial Sequence
  Description of Artificial Sequence: Synthetic oligonucleotide
  Sense strand starting at position 2354 of SEQ ID NO: 1245088
auagauucggugggaauaa

SEQ ID NO: 1535373 - RNA, 19 nt, Artificial Sequence
  Description of Artificial Sequence: Synthetic oligonucleotide
  Antisense strand to SEQ ID NO: 1535372
uuauucccaccgaaucuau

SEQ ID NO: 1535374 - RNA, 19 nt, Artificial Sequence
  Description of Artificial Sequence: Synthetic oligonucleotide
  Sense strand starting at position 2400 of SEQ ID NO: 1245088
guaacuuagcuggaggguu

SEQ ID NO: 1535375 - RNA, 19 nt, Artificial Sequence
  Description of Artificial Sequence: Synthetic oligonucleotide
  Antisense strand to SEQ ID NO: 1535374
aacccuccagcuaaguuac

SEQ ID NO: 1535376 - RNA, 19 nt, Artificial Sequence
  Description of Artificial Sequence: Synthetic oligonucleotide
  Sense strand starting at position 2413 of SEQ ID NO: 1245088
aggguuauacuguauuauu

SEQ ID NO: 1535377 - RNA, 19 nt, Artificial Sequence
  Description of Artificial Sequence: Synthetic oligonucleotide
  Antisense strand to SEQ ID NO: 1535376
aauaauacaguauaacccu

SEQ ID NO: 1535378 - RNA, 19 nt, Artificial Sequence
  Description of Artificial Sequence: Synthetic oligonucleotide
  Sense strand starting at position 2607 of SEQ ID NO: 1245088
uuuggucacccacaaugau

SEQ ID NO: 1535379 - RNA, 19 nt, Artificial Sequence
  Description of Artificial Sequence: Synthetic oligonucleotide
  Antisense strand to SEQ ID NO: 1535378
aucauugugggugaccaaa

SEQ ID NO: 1535380 - RNA, 19 nt, Artificial Sequence
  Description of Artificial Sequence: Synthetic oligonucleotide
  Sense strand starting at position 2653 of SEQ ID NO: 1245088
gcuagaaaucuuggacuuc

SEQ ID NO: 1535381 - RNA, 19 nt, Artificial Sequence
  Description of Artificial Sequence: Synthetic oligonucleotide
  Antisense strand to SEQ ID NO: 1535380
gaaguccaagauuucuagc

SEQ ID NO: 1535382 - RNA, 19 nt, Artificial Sequence
  Description of Artificial Sequence: Synthetic oligonucleotide
  Sense strand starting at position 2807 of SEQ ID NO: 1245088
uggucaguugaucauuaua

SEQ ID NO: 1535383 - RNA, 19 nt, Artificial Sequence
  Description of Artificial Sequence: Synthetic oligonucleotide
  Antisense strand to SEQ ID NO: 1535382
uauaaugaucaacugacca

SEQ ID NO: 1535384 - RNA, 19 nt, Artificial Sequence
  Description of Artificial Sequence: Synthetic oligonucleotide
  Sense strand starting at position 2854 of SEQ ID NO: 1245088
uagucacaugccuauggga

SEQ ID NO: 1535385 - RNA, 19 nt, Artificial Sequence
  Description of Artificial Sequence: Synthetic oligonucleotide
  Antisense strand to SEQ ID NO: 1535384
ucccauaggcaugugacua

SEQ ID NO: 1535386 - RNA, 19 nt, Artificial Sequence
  Description of Artificial Sequence: Synthetic oligonucleotide
  Sense strand starting at position 3021 of SEQ ID NO: 1245088
gggcuauggccucaucaau

SEQ ID NO: 1535387 - RNA, 19 nt, Artificial Sequence
  Description of Artificial Sequence: Synthetic oligonucleotide
  Antisense strand to SEQ ID NO: 1535386
auugaugaggccauagccc

SEQ ID NO: 1535388 - RNA, 19 nt, Artificial Sequence
  Description of Artificial Sequence: Synthetic oligonucleotide
  Sense strand starting at position 3062 of SEQ ID NO: 1245088
gguuuaaugagauggcaua

SEQ ID NO: 1535389 - RNA, 19 nt, Artificial Sequence
  Description of Artificial Sequence: Synthetic oligonucleotide
  Antisense strand to SEQ ID NO: 1535388
uaugccaucucauuaaacc

SEQ ID NO: 1535390 - RNA, 19 nt, Artificial Sequence
  Description of Artificial Sequence: Synthetic oligonucleotide
  Sense strand starting at position 3063 of SEQ ID NO: 1245088
guuuaaugagauggcauaa

SEQ ID NO: 1535391 - RNA, 19 nt, Artificial Sequence
  Description of Artificial Sequence: Synthetic oligonucleotide
  Antisense strand to SEQ ID NO: 1535390
uuaugccaucucauuaaac

SEQ ID NO: 1535392 - RNA, 19 nt, Artificial Sequence
  Description of Artificial Sequence: Synthetic oligonucleotide
  Sense strand starting at position 3166 of SEQ ID NO: 1245088
ugagaacaaauguguguau

SEQ ID NO: 1535393 - RNA, 19 nt, Artificial Sequence
  Description of Artificial Sequence: Synthetic oligonucleotide
  Antisense strand to SEQ ID NO: 1535392
auacacacauuuguucuca

SEQ ID NO: 1535394 - RNA, 19 nt, Artificial Sequence
  Description of Artificial Sequence: Synthetic oligonucleotide
  Sense strand starting at position 3241 of SEQ ID NO: 1245088
agugaaugcauugaugcua

SEQ ID NO: 1535395 - RNA, 19 nt, Artificial Sequence
  Description of Artificial Sequence: Synthetic oligonucleotide
  Antisense strand to SEQ ID NO: 1535394
uagcaucaaugcauucacu

SEQ ID NO: 1535396 - RNA, 19 nt, Artificial Sequence
  Description of Artificial Sequence: Synthetic oligonucleotide
  Sense strand starting at position 3496 of SEQ ID NO: 1245088
aaggcagauugaguguuaa

SEQ ID NO: 1535397 - RNA, 19 nt, Artificial Sequence
  Description of Artificial Sequence: Synthetic oligonucleotide
  Antisense strand to SEQ ID NO: 1535396
uuaacacucaaucugccuu

SEQ ID NO: 1535398 - RNA, 19 nt, Artificial Sequence
  Description of Artificial Sequence: Synthetic oligonucleotide
  Sense strand starting at position 3844 of SEQ ID NO: 1245088
gaaugcugugauuaguaaa

SEQ ID NO: 1535399 - RNA, 19 nt, Artificial Sequence
  Description of Artificial Sequence: Synthetic oligonucleotide
  Antisense strand to SEQ ID NO: 1535398
uuuacuaaucacagcauuc

SEQ ID NO: 1535400 - RNA, 19 nt, Artificial Sequence
  Description of Artificial Sequence: Synthetic oligonucleotide
  Sense strand starting at position 3870 of SEQ ID NO: 1245088
agcaauauucuguauauug

SEQ ID NO: 1535401 - RNA, 19 nt, Artificial Sequence
  Description of Artificial Sequence: Synthetic oligonucleotide
  Antisense strand to SEQ ID NO: 1535400
caauauacagaauauugcu

SEQ ID NO: 1535402 - RNA, 19 nt, Artificial Sequence
  Description of Artificial Sequence: Synthetic oligonucleotide
  Sense strand starting at position 3913 of SEQ ID NO: 1245088
cucaaagugcauuagacua

SEQ ID NO: 1535403 - RNA, 19 nt, Artificial Sequence
  Description of Artificial Sequence: Synthetic oligonucleotide
  Antisense strand to SEQ ID NO: 1535402
uagucuaaugcacuuugag

SEQ ID NO: 1535404 - RNA, 19 nt, Artificial Sequence
  Description of Artificial Sequence: Synthetic oligonucleotide
  Sense strand starting at position 155 of SEQ ID NO: 1245089
cuagcuuucccagauaaga

SEQ ID NO: 1535405 - RNA, 19 nt, Artificial Sequence
  Description of Artificial Sequence: Synthetic oligonucleotide
  Antisense strand to SEQ ID NO: 1535404
ucuuaucugggaaagcuag

SEQ ID NO: 1535406 - RNA, 19 nt, Artificial Sequence
  Description of Artificial Sequence: Synthetic oligonucleotide
  Sense strand starting at position 182 of SEQ ID NO: 1245089
guuggauguuaccuaauug

SEQ ID NO: 1535407 - RNA, 19 nt, Artificial Sequence
  Description of Artificial Sequence: Synthetic oligonucleotide
  Antisense strand to SEQ ID NO: 1535406
caauuagguaacauccaac

SEQ ID NO: 1535408 - RNA, 19 nt, Artificial Sequence
  Description of Artificial Sequence: Synthetic oligonucleotide
  Sense strand starting at position 239 of SEQ ID NO: 1245089
gcaagacuuccacaaaguu

SEQ ID NO: 1535409 - RNA, 19 nt, Artificial Sequence
  Description of Artificial Sequence: Synthetic oligonucleotide
  Antisense strand to SEQ ID NO: 1535408
aacuuuguggaagucuugc

SEQ ID NO: 1535410 - RNA, 19 nt, Artificial Sequence
  Description of Artificial Sequence: Synthetic oligonucleotide
  Sense strand starting at position 395 of SEQ ID NO: 1245089
ucuaacuaguucuuuagga

SEQ ID NO: 1535411 - RNA, 19 nt, Artificial Sequence
  Description of Artificial Sequence: Synthetic oligonucleotide
  Antisense strand to SEQ ID NO: 1535410
uccuaaagaacuaguuaga

SEQ ID NO: 1535412 - RNA, 19 nt, Artificial Sequence
  Description of Artificial Sequence: Synthetic oligonucleotide
  Sense strand starting at position 396 of SEQ ID NO: 1245089
cuaacuaguucuuuaggaa

SEQ ID NO: 1535413 - RNA, 19 nt, Artificial Sequence
  Description of Artificial Sequence: Synthetic oligonucleotide
  Antisense strand to SEQ ID NO: 1535412
uuccuaaagaacuaguuag

SEQ ID NO: 1535414 - RNA, 19 nt, Artificial Sequence
  Description of Artificial Sequence: Synthetic oligonucleotide
  Sense strand starting at position 419 of SEQ ID NO: 1245089
guaauucuuggugaguuac

SEQ ID NO: 1535415 - RNA, 19 nt, Artificial Sequence
  Description of Artificial Sequence: Synthetic oligonucleotide
  Antisense strand to SEQ ID NO: 1535414
guaacucaccaagaauuac

SEQ ID NO: 1535416 - RNA, 19 nt, Artificial Sequence
  Description of Artificial Sequence: Synthetic oligonucleotide
  Sense strand starting at position 525 of SEQ ID NO: 1245089
agauauugugucuaugcaa

SEQ ID NO: 1535417 - RNA, 19 nt, Artificial Sequence
  Description of Artificial Sequence: Synthetic oligonucleotide
  Antisense strand to SEQ ID NO: 1535416
uugcauagacacaauaucu

SEQ ID NO: 1535418 - RNA, 19 nt, Artificial Sequence
  Description of Artificial Sequence: Synthetic oligonucleotide
  Sense strand starting at position 645 of SEQ ID NO: 1245089
uggcaagggccauauauua

SEQ ID NO: 1535419 - RNA, 19 nt, Artificial Sequence
  Description of Artificial Sequence: Synthetic oligonucleotide
  Antisense strand to SEQ ID NO: 1535418
uaauauauggcccuugcca

SEQ ID NO: 1535420 - RNA, 19 nt, Artificial Sequence
  Description of Artificial Sequence: Synthetic oligonucleotide
  Sense strand starting at position 771 of SEQ ID NO: 1245089
acaagucuuacguaaaggu

SEQ ID NO: 1535421 - RNA, 19 nt, Artificial Sequence
  Description of Artificial Sequence: Synthetic oligonucleotide
  Antisense strand to SEQ ID NO: 1535420
accuuuacguaagacuugu

SEQ ID NO: 1535422 - RNA, 19 nt, Artificial Sequence
  Description of Artificial Sequence: Synthetic oligonucleotide
  Sense strand starting at position 901 of SEQ ID NO: 1245089
ccuugaugguuucucaaua

SEQ ID NO: 1535423 - RNA, 19 nt, Artificial Sequence
  Description of Artificial Sequence: Synthetic oligonucleotide
  Antisense strand to SEQ ID NO: 1535422
uauugagaaaccaucaagg

SEQ ID NO: 1535424 - RNA, 19 nt, Artificial Sequence
  Description of Artificial Sequence: Synthetic oligonucleotide
  Sense strand starting at position 902 of SEQ ID NO: 1245089
cuugaugguuucucaauag

SEQ ID NO: 1535425 - RNA, 19 nt, Artificial Sequence
  Description of Artificial Sequence: Synthetic oligonucleotide
  Antisense strand to SEQ ID NO: 1535424
cuauugagaaaccaucaag

SEQ ID NO: 1535426 - RNA, 19 nt, Artificial Sequence
  Description of Artificial Sequence: Synthetic oligonucleotide
  Sense strand starting at position 906 of SEQ ID NO: 1245089
augguuucucaauaguuug

SEQ ID NO: 1535427 - RNA, 19 nt, Artificial Sequence
  Description of Artificial Sequence: Synthetic oligonucleotide
  Antisense strand to SEQ ID NO: 1535426
caaacuauugagaaaccau

SEQ ID NO: 1535428 - RNA, 19 nt, Artificial Sequence
  Description of Artificial Sequence: Synthetic oligonucleotide
  Sense strand starting at position 941 of SEQ ID NO: 1245089
gggugaacucauugccaau

SEQ ID NO: 1535429 - RNA, 19 nt, Artificial Sequence
  Description of Artificial Sequence: Synthetic oligonucleotide
  Antisense strand to SEQ ID NO: 1535428
auuggcaaugaguucaccc

SEQ ID NO: 1535430 - RNA, 19 nt, Artificial Sequence
  Description of Artificial Sequence: Synthetic oligonucleotide
  Sense strand starting at position 986 of SEQ ID NO: 1245089
aagaaauccguaggguuaa

SEQ ID NO: 1535431 - RNA, 19 nt, Artificial Sequence
  Description of Artificial Sequence: Synthetic oligonucleotide
  Antisense strand to SEQ ID NO: 1535430
uuaacccuacggauuucuu

SEQ ID NO: 1535432 - RNA, 19 nt, Artificial Sequence
  Description of Artificial Sequence: Synthetic oligonucleotide
  Sense strand starting at position 1106 of SEQ ID NO: 1245089
gaagaaguccaccaugcau

SEQ ID NO: 1535433 - RNA, 19 nt, Artificial Sequence
  Description of Artificial Sequence: Synthetic oligonucleotide
  Antisense strand to SEQ ID NO: 1535432
augcaugguggacuucuuc

SEQ ID NO: 1535434 - RNA, 19 nt, Artificial Sequence
  Description of Artificial Sequence: Synthetic oligonucleotide
  Sense strand starting at position 1288 of SEQ ID NO: 1245089
gagcgaaugguucaaagga

SEQ ID NO: 1535435 - RNA, 19 nt, Artificial Sequence
  Description of Artificial Sequence: Synthetic oligonucleotide
  Antisense strand to SEQ ID NO: 1535434
uccuuugaaccauucgcuc

SEQ ID NO: 1535436 - RNA, 19 nt, Artificial Sequence
  Description of Artificial Sequence: Synthetic oligonucleotide
  Sense strand starting at position 1583 of SEQ ID NO: 1245089
gccuguccugccuugcaga

SEQ ID NO: 1535437 - RNA, 19 nt, Artificial Sequence
  Description of Artificial Sequence: Synthetic oligonucleotide
  Antisense strand to SEQ ID NO: 1535436
ucugcaaggcaggacaggc

SEQ ID NO: 1535438 - RNA, 19 nt, Artificial Sequence
  Description of Artificial Sequence: Synthetic oligonucleotide
  Sense strand starting at position 2381 of SEQ ID NO: 1245089
cggaucuguacagauggau

SEQ ID NO: 1535439 - RNA, 19 nt, Artificial Sequence
  Description of Artificial Sequence: Synthetic oligonucleotide
  Antisense strand to SEQ ID NO: 1535438
auccaucuguacagauccg

SEQ ID NO: 1535440 - RNA, 19 nt, Artificial Sequence
  Description of Artificial Sequence: Synthetic oligonucleotide
  Sense strand starting at position 2394 of SEQ ID NO: 1245089
auggauuccuucgcaggaa

SEQ ID NO: 1535441 - RNA, 19 nt, Artificial Sequence
  Description of Artificial Sequence: Synthetic oligonucleotide
  Antisense strand to SEQ ID NO: 1535440
uuccugcgaaggaauccau

SEQ ID NO: 1535442 - RNA, 19 nt, Artificial Sequence
  Description of Artificial Sequence: Synthetic oligonucleotide
  Sense strand starting at position 2468 of SEQ ID NO: 1245089
ggcauuugcaucugaaagc

SEQ ID NO: 1535443 - RNA, 19 nt, Artificial Sequence
  Description of Artificial Sequence: Synthetic oligonucleotide
  Antisense strand to SEQ ID NO: 1535442
gcuuucagaugcaaaugcc

SEQ ID NO: 1535444 - RNA, 19 nt, Artificial Sequence
  Description of Artificial Sequence: Synthetic oligonucleotide
  Sense strand starting at position 2742 of SEQ ID NO: 1245089
acuuccaaaguguaugauu

SEQ ID NO: 1535445 - RNA, 19 nt, Artificial Sequence
  Description of Artificial Sequence: Synthetic oligonucleotide
  Antisense strand to SEQ ID NO: 1535444
aaucauacacuuuggaagu

SEQ ID NO: 1535446 - RNA, 19 nt, Artificial Sequence
  Description of Artificial Sequence: Synthetic oligonucleotide
  Sense strand starting at position 2753 of SEQ ID NO: 1245089
guaugauuuacucgcagug

SEQ ID NO: 1535447 - RNA, 19 nt, Artificial Sequence
  Description of Artificial Sequence: Synthetic oligonucleotide
  Antisense strand to SEQ ID NO: 1535446
cacugcgaguaaaucauac

SEQ ID NO: 1535448 - RNA, 19 nt, Artificial Sequence
  Description of Artificial Sequence: Synthetic oligonucleotide
  Sense strand starting at position 2890 of SEQ ID NO: 1245089
ucuggugcucgcuuuaauc

SEQ ID NO: 1535449 - RNA, 19 nt, Artificial Sequence
  Description of Artificial Sequence: Synthetic oligonucleotide
  Antisense strand to SEQ ID NO: 1535448
gauuaaagcgagcaccaga

SEQ ID NO: 1535450 - RNA, 19 nt, Artificial Sequence
  Description of Artificial Sequence: Synthetic oligonucleotide
  Sense strand starting at position 2993 of SEQ ID NO: 1245089
aauggaaaguguccucuuu

SEQ ID NO: 1535451 - RNA, 19 nt, Artificial Sequence
  Description of Artificial Sequence: Synthetic oligonucleotide
  Antisense strand to SEQ ID NO: 1535450
aaagaggacacuuuccauu

SEQ ID NO: 1535452 - RNA, 19 nt, Artificial Sequence
  Description of Artificial Sequence: Synthetic oligonucleotide
  Sense strand starting at position 3046 of SEQ ID NO: 1245089
uaauucuucggauaccagu

SEQ ID NO: 1535453 - RNA, 19 nt, Artificial Sequence
  Description of Artificial Sequence: Synthetic oligonucleotide
  Antisense strand to SEQ ID NO: 1535452
acugguauccgaagaauua

SEQ ID NO: 1535454 - RNA, 19 nt, Artificial Sequence
  Description of Artificial Sequence: Synthetic oligonucleotide
  Sense strand starting at position 3070 of SEQ ID NO: 1245089
gggcuuaggcuuguccgua

SEQ ID NO: 1535455 - RNA, 19 nt, Artificial Sequence
  Description of Artificial Sequence: Synthetic oligonucleotide
  Antisense strand to SEQ ID NO: 1535454
uacggacaagccuaagccc

SEQ ID NO: 1535456 - RNA, 19 nt, Artificial Sequence
  Description of Artificial Sequence: Synthetic oligonucleotide
  Sense strand starting at position 3098 of SEQ ID NO: 1245089
cugauuucuugugcaguca

SEQ ID NO: 1535457 - RNA, 19 nt, Artificial Sequence
  Description of Artificial Sequence: Synthetic oligonucleotide
  Antisense strand to SEQ ID NO: 1535456
ugacugcacaagaaaucag

SEQ ID NO: 1535458 - RNA, 19 nt, Artificial Sequence
  Description of Artificial Sequence: Synthetic oligonucleotide
  Sense strand starting at position 3212 of SEQ ID NO: 1245089
accgaauucuaugcuaaua

SEQ ID NO: 1535459 - RNA, 19 nt, Artificial Sequence
  Description of Artificial Sequence: Synthetic oligonucleotide
  Antisense strand to SEQ ID NO: 1535458
uauuagcauagaauucggu

SEQ ID NO: 1535460 - RNA, 19 nt, Artificial Sequence
  Description of Artificial Sequence: Synthetic oligonucleotide
  Sense strand starting at position 3255 of SEQ ID NO: 1245089
uguuaaguuccagauacca

SEQ ID NO: 1535461 - RNA, 19 nt, Artificial Sequence
  Description of Artificial Sequence: Synthetic oligonucleotide
  Antisense strand to SEQ ID NO: 1535460
ugguaucuggaacuuaaca

SEQ ID NO: 1535462 - RNA, 19 nt, Artificial Sequence
  Description of Artificial Sequence: Synthetic oligonucleotide
  Sense strand starting at position 3439 of SEQ ID NO: 1245089
uuuagauauuagcuuggau

SEQ ID NO: 1535463 - RNA, 19 nt, Artificial Sequence
  Description of Artificial Sequence: Synthetic oligonucleotide
  Antisense strand to SEQ ID NO: 1535462
auccaagcuaauaucuaaa

SEQ ID NO: 1535464 - RNA, 19 nt, Artificial Sequence
  Description of Artificial Sequence: Synthetic oligonucleotide
  Sense strand starting at position 3500 of SEQ ID NO: 1245089
cugguagccagguaucaaa

SEQ ID NO: 1535465 - RNA, 19 nt, Artificial Sequence
  Description of Artificial Sequence: Synthetic oligonucleotide
  Antisense strand to SEQ ID NO: 1535464
uuugauaccuggcuaccag

SEQ ID NO: 1535466 - RNA, 19 nt, Artificial Sequence
  Description of Artificial Sequence: Synthetic oligonucleotide
  Sense strand starting at position 3531 of SEQ ID NO: 1245089
cuuugagcucuuugaaaua

SEQ ID NO: 1535467 - RNA, 19 nt, Artificial Sequence
  Description of Artificial Sequence: Synthetic oligonucleotide
  Antisense strand to SEQ ID NO: 1535466
uauuucaaagagcucaaag

SEQ ID NO: 1535468 - RNA, 19 nt, Artificial Sequence
  Description of Artificial Sequence: Synthetic oligonucleotide
  Sense strand starting at position 3587 of SEQ ID NO: 1245089
guaguacaaucuuuagauu

SEQ ID NO: 1535469 - RNA, 19 nt, Artificial Sequence
  Description of Artificial Sequence: Synthetic oligonucleotide
  Antisense strand to SEQ ID NO: 1535468
aaucuaaagauuguacuac

SEQ ID NO: 1535470 - RNA, 19 nt, Artificial Sequence
  Description of Artificial Sequence: Synthetic oligonucleotide
  Sense strand starting at position 3631 of SEQ ID NO: 1245089
acauauauuugccuuguuu

SEQ ID NO: 1535471 - RNA, 19 nt, Artificial Sequence
  Description of Artificial Sequence: Synthetic oligonucleotide
  Antisense strand to SEQ ID NO: 1535470
aaacaaggcaaauauaugu

SEQ ID NO: 1535472 - RNA, 19 nt, Artificial Sequence
  Description of Artificial Sequence: Synthetic oligonucleotide
  Sense strand starting at position 3710 of SEQ ID NO: 1245089
ucaggagggcugugauuaa

SEQ ID NO: 1535473 - RNA, 19 nt, Artificial Sequence
  Description of Artificial Sequence: Synthetic oligonucleotide
  Antisense strand to SEQ ID NO: 1535472
uuaaucacagcccuccuga

SEQ ID NO: 1535474 - RNA, 19 nt, Artificial Sequence
  Description of Artificial Sequence: Synthetic oligonucleotide
  Sense strand starting at position 3714 of SEQ ID NO: 1245089
gagggcugugauuaauauu

SEQ ID NO: 1535475 - RNA, 19 nt, Artificial Sequence
  Description of Artificial Sequence: Synthetic oligonucleotide
  Antisense strand to SEQ ID NO: 1535474
aauauuaaucacagcccuc

SEQ ID NO: 1535476 - RNA, 19 nt, Artificial Sequence
  Description of Artificial Sequence: Synthetic oligonucleotide
  Sense strand starting at position 3781 of SEQ ID NO: 1245089
ugaauaaagaaguguuugu

SEQ ID NO: 1535477 - RNA, 19 nt, Artificial Sequence
  Description of Artificial Sequence: Synthetic oligonucleotide
  Antisense strand to SEQ ID NO: 1535476
acaaacacuucuuuauuca

SEQ ID NO: 1535478 - RNA, 19 nt, Artificial Sequence
  Description of Artificial Sequence: Synthetic oligonucleotide
  Sense strand starting at position 3874 of SEQ ID NO: 1245089
ucaucuauaggaggucaua

SEQ ID NO: 1535479 - RNA, 19 nt, Artificial Sequence
  Description of Artificial Sequence: Synthetic oligonucleotide
  Antisense strand to SEQ ID NO: 1535478
uaugaccuccuauagauga

SEQ ID NO: 1535480 - RNA, 19 nt, Artificial Sequence
  Description of Artificial Sequence: Synthetic oligonucleotide
  Sense strand starting at position 3887 of SEQ ID NO: 1245089
gucauauugugauugggaa

SEQ ID NO: 1535481 - RNA, 19 nt, Artificial Sequence
  Description of Artificial Sequence: Synthetic oligonucleotide
  Antisense strand to SEQ ID NO: 1535480
uucccaaucacaauaugac

SEQ ID NO: 1535482 - RNA, 19 nt, Artificial Sequence
  Description of Artificial Sequence: Synthetic oligonucleotide
  Sense strand starting at position 3888 of SEQ ID NO: 1245089
ucauauugugauugggaau

SEQ ID NO: 1535483 - RNA, 19 nt, Artificial Sequence
  Description of Artificial Sequence: Synthetic oligonucleotide
  Antisense strand to SEQ ID NO: 1535482
auucccaaucacaauauga

SEQ ID NO: 1535484 - RNA, 19 nt, Artificial Sequence
  Description of Artificial Sequence: Synthetic oligonucleotide
  Sense strand starting at position 102 of SEQ ID NO: 1245090
acaagucuuacguaaaggu

SEQ ID NO: 1535485 - RNA, 19 nt, Artificial Sequence
  Description of Artificial Sequence: Synthetic oligonucleotide
  Antisense strand to SEQ ID NO: 1535484
accuuuacguaagacuugu

SEQ ID NO: 1535486 - RNA, 19 nt, Artificial Sequence
  Description of Artificial Sequence: Synthetic oligonucleotide
  Sense strand starting at position 232 of SEQ ID NO: 1245090
ccuugaugguuucucaaua

SEQ ID NO: 1535487 - RNA, 19 nt, Artificial Sequence
  Description of Artificial Sequence: Synthetic oligonucleotide
  Antisense strand to SEQ ID NO: 1535486
uauugagaaaccaucaagg

SEQ ID NO: 1535488 - RNA, 19 nt, Artificial Sequence
  Description of Artificial Sequence: Synthetic oligonucleotide
  Sense strand starting at position 233 of SEQ ID NO: 1245090
cuugaugguuucucaauag

SEQ ID NO: 1535489 - RNA, 19 nt, Artificial Sequence
  Description of Artificial Sequence: Synthetic oligonucleotide
  Antisense strand to SEQ ID NO: 1535488
cuauugagaaaccaucaag

SEQ ID NO: 1535490 - RNA, 19 nt, Artificial Sequence
  Description of Artificial Sequence: Synthetic oligonucleotide
  Sense strand starting at position 237 of SEQ ID NO: 1245090
augguuucucaauaguuug

SEQ ID NO: 1535491 - RNA, 19 nt, Artificial Sequence
  Description of Artificial Sequence: Synthetic oligonucleotide
  Antisense strand to SEQ ID NO: 1535490
caaacuauugagaaaccau

SEQ ID NO: 1535492 - RNA, 19 nt, Artificial Sequence
  Description of Artificial Sequence: Synthetic oligonucleotide
  Sense strand starting at position 272 of SEQ ID NO: 1245090
gggugaacucauugccaau

SEQ ID NO: 1535493 - RNA, 19 nt, Artificial Sequence
  Description of Artificial Sequence: Synthetic oligonucleotide
  Antisense strand to SEQ ID NO: 1535492
auuggcaaugaguucaccc

SEQ ID NO: 1535494 - RNA, 19 nt, Artificial Sequence
  Description of Artificial Sequence: Synthetic oligonucleotide
  Sense strand starting at position 317 of SEQ ID NO: 1245090
aagaaauccguaggguuaa

SEQ ID NO: 1535495 - RNA, 19 nt, Artificial Sequence
  Description of Artificial Sequence: Synthetic oligonucleotide
  Antisense strand to SEQ ID NO: 1535494
uuaacccuacggauuucuu

SEQ ID NO: 1535496 - RNA, 19 nt, Artificial Sequence
  Description of Artificial Sequence: Synthetic oligonucleotide
  Sense strand starting at position 346 of SEQ ID NO: 1245090
cgugaagcgguacagaaua

SEQ ID NO: 1535497 - RNA, 19 nt, Artificial Sequence
  Description of Artificial Sequence: Synthetic oligonucleotide
  Antisense strand to SEQ ID NO: 1535496
uauucuguaccgcuucacg

SEQ ID NO: 1535498 - RNA, 19 nt, Artificial Sequence
  Description of Artificial Sequence: Synthetic oligonucleotide
  Sense strand starting at position 437 of SEQ ID NO: 1245090
gaagaaguccaccaugcau

SEQ ID NO: 1535499 - RNA, 19 nt, Artificial Sequence
  Description of Artificial Sequence: Synthetic oligonucleotide
  Antisense strand to SEQ ID NO: 1535498
augcaugguggacuucuuc

SEQ ID NO: 1535500 - RNA, 19 nt, Artificial Sequence
  Description of Artificial Sequence: Synthetic oligonucleotide
  Sense strand starting at position 619 of SEQ ID NO: 1245090
gagcgaaugguucaaagga

SEQ ID NO: 1535501 - RNA, 19 nt, Artificial Sequence
  Description of Artificial Sequence: Synthetic oligonucleotide
  Antisense strand to SEQ ID NO: 1535500
uccuuugaaccauucgcuc

SEQ ID NO: 1535502 - RNA, 19 nt, Artificial Sequence
  Description of Artificial Sequence: Synthetic oligonucleotide
  Sense strand starting at position 914 of SEQ ID NO: 1245090
gccuguccugccuugcaga

SEQ ID NO: 1535503 - RNA, 19 nt, Artificial Sequence
  Description of Artificial Sequence: Synthetic oligonucleotide
  Antisense strand to SEQ ID NO: 1535502
ucugcaaggcaggacaggc

SEQ ID NO: 1535504 - RNA, 19 nt, Artificial Sequence
  Description of Artificial Sequence: Synthetic oligonucleotide
  Sense strand starting at position 1712 of SEQ ID NO: 1245090
cggaucuguacagauggau

SEQ ID NO: 1535505 - RNA, 19 nt, Artificial Sequence
  Description of Artificial Sequence: Synthetic oligonucleotide
  Antisense strand to SEQ ID NO: 1535504
auccaucuguacagauccg

SEQ ID NO: 1535506 - RNA, 19 nt, Artificial Sequence
  Description of Artificial Sequence: Synthetic oligonucleotide
  Sense strand starting at position 1724 of SEQ ID NO: 1245090
gauggauuccuucgcagga

SEQ ID NO: 1535507 - RNA, 19 nt, Artificial Sequence
  Description of Artificial Sequence: Synthetic oligonucleotide
  Antisense strand to SEQ ID NO: 1535506
uccugcgaaggaauccauc

SEQ ID NO: 1535508 - RNA, 19 nt, Artificial Sequence
  Description of Artificial Sequence: Synthetic oligonucleotide
  Sense strand starting at position 1725 of SEQ ID NO: 1245090
auggauuccuucgcaggaa

SEQ ID NO: 1535509 - RNA, 19 nt, Artificial Sequence
  Description of Artificial Sequence: Synthetic oligonucleotide
  Antisense strand to SEQ ID NO: 1535508
uuccugcgaaggaauccau

SEQ ID NO: 1535510 - RNA, 19 nt, Artificial Sequence
  Description of Artificial Sequence: Synthetic oligonucleotide
  Sense strand starting at position 1799 of SEQ ID NO: 1245090
ggcauuugcaucugaaagc

SEQ ID NO: 1535511 - RNA, 19 nt, Artificial Sequence
  Description of Artificial Sequence: Synthetic oligonucleotide
  Antisense strand to SEQ ID NO: 1535510
gcuuucagaugcaaaugcc

SEQ ID NO: 1535512 - RNA, 19 nt, Artificial Sequence
  Description of Artificial Sequence: Synthetic oligonucleotide
  Sense strand starting at position 2073 of SEQ ID NO: 1245090
acuuccaaaguguaugauu

SEQ ID NO: 1535513 - RNA, 19 nt, Artificial Sequence
  Description of Artificial Sequence: Synthetic oligonucleotide
  Antisense strand to SEQ ID NO: 1535512
aaucauacacuuuggaagu

SEQ ID NO: 1535514 - RNA, 19 nt, Artificial Sequence
  Description of Artificial Sequence: Synthetic oligonucleotide
  Sense strand starting at position 2084 of SEQ ID NO: 1245090
guaugauuuacucgcagug

SEQ ID NO: 1535515 - RNA, 19 nt, Artificial Sequence
  Description of Artificial Sequence: Synthetic oligonucleotide
  Antisense strand to SEQ ID NO: 1535514
cacugcgaguaaaucauac

SEQ ID NO: 1535516 - RNA, 19 nt, Artificial Sequence
  Description of Artificial Sequence: Synthetic oligonucleotide
  Sense strand starting at position 2221 of SEQ ID NO: 1245090
ucuggugcucgcuuuaauc

SEQ ID NO: 1535517 - RNA, 19 nt, Artificial Sequence
  Description of Artificial Sequence: Synthetic oligonucleotide
  Antisense strand to SEQ ID NO: 1535516
gauuaaagcgagcaccaga

SEQ ID NO: 1535518 - RNA, 19 nt, Artificial Sequence
  Description of Artificial Sequence: Synthetic oligonucleotide
  Sense strand starting at position 2324 of SEQ ID NO: 1245090
aauggaaaguguccucuuu

SEQ ID NO: 1535519 - RNA, 19 nt, Artificial Sequence
  Description of Artificial Sequence: Synthetic oligonucleotide
  Antisense strand to SEQ ID NO: 1535518
aaagaggacacuuuccauu

SEQ ID NO: 1535520 - RNA, 19 nt, Artificial Sequence
  Description of Artificial Sequence: Synthetic oligonucleotide
  Sense strand starting at position 2377 of SEQ ID NO: 1245090
uaauucuucggauaccagu

SEQ ID NO: 1535521 - RNA, 19 nt, Artificial Sequence
  Description of Artificial Sequence: Synthetic oligonucleotide
  Antisense strand to SEQ ID NO: 1535520
acugguauccgaagaauua

SEQ ID NO: 1535522 - RNA, 19 nt, Artificial Sequence
  Description of Artificial Sequence: Synthetic oligonucleotide
  Sense strand starting at position 2401 of SEQ ID NO: 1245090
gggcuuaggcuuguccgua

SEQ ID NO: 1535523 - RNA, 19 nt, Artificial Sequence
  Description of Artificial Sequence: Synthetic oligonucleotide
  Antisense strand to SEQ ID NO: 1535522
uacggacaagccuaagccc

SEQ ID NO: 1535524 - RNA, 19 nt, Artificial Sequence
  Description of Artificial Sequence: Synthetic oligonucleotide
  Sense strand starting at position 2429 of SEQ ID NO: 1245090
cugauuucuugugcaguca

SEQ ID NO: 1535525 - RNA, 19 nt, Artificial Sequence
  Description of Artificial Sequence: Synthetic oligonucleotide
  Antisense strand to SEQ ID NO: 1535524
ugacugcacaagaaaucag

SEQ ID NO: 1535526 - RNA, 19 nt, Artificial Sequence
  Description of Artificial Sequence: Synthetic oligonucleotide
  Sense strand starting at position 2543 of SEQ ID NO: 1245090
accgaauucuaugcuaaua

SEQ ID NO: 1535527 - RNA, 19 nt, Artificial Sequence
  Description of Artificial Sequence: Synthetic oligonucleotide
  Antisense strand to SEQ ID NO: 1535526
uauuagcauagaauucggu

SEQ ID NO: 1535528 - RNA, 19 nt, Artificial Sequence
  Description of Artificial Sequence: Synthetic oligonucleotide
  Sense strand starting at position 2586 of SEQ ID NO: 1245090
uguuaaguuccagauacca

SEQ ID NO: 1535529 - RNA, 19 nt, Artificial Sequence
  Description of Artificial Sequence: Synthetic oligonucleotide
  Antisense strand to SEQ ID NO: 1535528
ugguaucuggaacuuaaca

SEQ ID NO: 1535530 - RNA, 19 nt, Artificial Sequence
  Description of Artificial Sequence: Synthetic oligonucleotide
  Sense strand starting at position 2770 of SEQ ID NO: 1245090
uuuagauauuagcuuggau

SEQ ID NO: 1535531 - RNA, 19 nt, Artificial Sequence
  Description of Artificial Sequence: Synthetic oligonucleotide
  Antisense strand to SEQ ID NO: 1535530
auccaagcuaauaucuaaa

SEQ ID NO: 1535532 - RNA, 19 nt, Artificial Sequence
  Description of Artificial Sequence: Synthetic oligonucleotide
  Sense strand starting at position 2831 of SEQ ID NO: 1245090
cugguagccagguaucaaa

SEQ ID NO: 1535533 - RNA, 19 nt, Artificial Sequence
  Description of Artificial Sequence: Synthetic oligonucleotide
  Antisense strand to SEQ ID NO: 1535532
uuugauaccuggcuaccag

SEQ ID NO: 1535534 - RNA, 19 nt, Artificial Sequence
  Description of Artificial Sequence: Synthetic oligonucleotide
  Sense strand starting at position 2862 of SEQ ID NO: 1245090
cuuugagcucuuugaaaua

SEQ ID NO: 1535535 - RNA, 19 nt, Artificial Sequence
  Description of Artificial Sequence: Synthetic oligonucleotide
  Antisense strand to SEQ ID NO: 1535534
uauuucaaagagcucaaag

SEQ ID NO: 1535536 - RNA, 19 nt, Artificial Sequence
  Description of Artificial Sequence: Synthetic oligonucleotide
  Sense strand starting at position 2918 of SEQ ID NO: 1245090
guaguacaaucuuuagauu

SEQ ID NO: 1535537 - RNA, 19 nt, Artificial Sequence
  Description of Artificial Sequence: Synthetic oligonucleotide
  Antisense strand to SEQ ID NO: 1535536
aaucuaaagauuguacuac

SEQ ID NO: 1535538 - RNA, 19 nt, Artificial Sequence
  Description of Artificial Sequence: Synthetic oligonucleotide
  Sense strand starting at position 2962 of SEQ ID NO: 1245090
acauauauuugccuuguuu

SEQ ID NO: 1535539 - RNA, 19 nt, Artificial Sequence
  Description of Artificial Sequence: Synthetic oligonucleotide
  Antisense strand to SEQ ID NO: 1535538
aaacaaggcaaauauaugu

SEQ ID NO: 1535540 - RNA, 19 nt, Artificial Sequence
  Description of Artificial Sequence: Synthetic oligonucleotide
  Sense strand starting at position 3041 of SEQ ID NO: 1245090
ucaggagggcugugauuaa

SEQ ID NO: 1535541 - RNA, 19 nt, Artificial Sequence
  Description of Artificial Sequence: Synthetic oligonucleotide
  Antisense strand to SEQ ID NO: 1535540
uuaaucacagcccuccuga

SEQ ID NO: 1535542 - RNA, 19 nt, Artificial Sequence
  Description of Artificial Sequence: Synthetic oligonucleotide
  Sense strand starting at position 3045 of SEQ ID NO: 1245090
gagggcugugauuaauauu

SEQ ID NO: 1535543 - RNA, 19 nt, Artificial Sequence
  Description of Artificial Sequence: Synthetic oligonucleotide
  Antisense strand to SEQ ID NO: 1535542
aauauuaaucacagcccuc

SEQ ID NO: 1535544 - RNA, 19 nt, Artificial Sequence
  Description of Artificial Sequence: Synthetic oligonucleotide
  Sense strand starting at position 3112 of SEQ ID NO: 1245090
ugaauaaagaaguguuugu

SEQ ID NO: 1535545 - RNA, 19 nt, Artificial Sequence
  Description of Artificial Sequence: Synthetic oligonucleotide
  Antisense strand to SEQ ID NO: 1535544
acaaacacuucuuuauuca

SEQ ID NO: 1535546 - RNA, 19 nt, Artificial Sequence
  Description of Artificial Sequence: Synthetic oligonucleotide
  Sense strand starting at position 3205 of SEQ ID NO: 1245090
ucaucuauaggaggucaua

SEQ ID NO: 1535547 - RNA, 19 nt, Artificial Sequence
  Description of Artificial Sequence: Synthetic oligonucleotide
  Antisense strand to SEQ ID NO: 1535546
uaugaccuccuauagauga

SEQ ID NO: 1535548 - RNA, 19 nt, Artificial Sequence
  Description of Artificial Sequence: Synthetic oligonucleotide
  Sense strand starting at position 3218 of SEQ ID NO: 1245090
gucauauugugauugggaa

SEQ ID NO: 1535549 - RNA, 19 nt, Artificial Sequence
  Description of Artificial Sequence: Synthetic oligonucleotide
  Antisense strand to SEQ ID NO: 1535548
uucccaaucacaauaugac

SEQ ID NO: 1535550 - RNA, 19 nt, Artificial Sequence
  Description of Artificial Sequence: Synthetic oligonucleotide
  Sense strand starting at position 3219 of SEQ ID NO: 1245090
ucauauugugauugggaau

SEQ ID NO: 1535551 - RNA, 19 nt, Artificial Sequence
  Description of Artificial Sequence: Synthetic oligonucleotide
  Antisense strand to SEQ ID NO: 1535550
auucccaaucacaauauga

SEQ ID NO: 1535552 - RNA, 19 nt, Artificial Sequence
  Description of Artificial Sequence: Synthetic oligonucleotide
  Sense strand starting at position 3521 of SEQ ID NO: 1245090
aacagcuguugaucuuaga

SEQ ID NO: 1535553 - RNA, 19 nt, Artificial Sequence
  Description of Artificial Sequence: Synthetic oligonucleotide
  Antisense strand to SEQ ID NO: 1535552
ucuaagaucaacagcuguu

SEQ ID NO: 1535554 - RNA, 19 nt, Artificial Sequence
  Description of Artificial Sequence: Synthetic oligonucleotide
  Sense strand starting at position 3662 of SEQ ID NO: 1245090
ggcacauaggcugaaaugu

SEQ ID NO: 1535555 - RNA, 19 nt, Artificial Sequence
  Description of Artificial Sequence: Synthetic oligonucleotide
  Antisense strand to SEQ ID NO: 1535554
acauuucagccuaugugcc

SEQ ID NO: 1535556 - RNA, 19 nt, Artificial Sequence
  Description of Artificial Sequence: Synthetic oligonucleotide
  Sense strand starting at position 3852 of SEQ ID NO: 1245090
cuuccaggcccugaaagau

SEQ ID NO: 1535557 - RNA, 19 nt, Artificial Sequence
  Description of Artificial Sequence: Synthetic oligonucleotide
  Antisense strand to SEQ ID NO: 1535556
aucuuucagggccuggaag

SEQ ID NO: 1535558 - RNA, 19 nt, Artificial Sequence
  Description of Artificial Sequence: Synthetic oligonucleotide
  Sense strand starting at position 3858 of SEQ ID NO: 1245090
ggcccugaaagauguuuau

SEQ ID NO: 1535559 - RNA, 19 nt, Artificial Sequence
  Description of Artificial Sequence: Synthetic oligonucleotide
  Antisense strand to SEQ ID NO: 1535558
auaaacaucuuucagggcc

SEQ ID NO: 1535560 - RNA, 19 nt, Artificial Sequence
  Description of Artificial Sequence: Synthetic oligonucleotide
  Sense strand starting at position 3861 of SEQ ID NO: 1245090
ccugaaagauguuuauauu

SEQ ID NO: 1535561 - RNA, 19 nt, Artificial Sequence
  Description of Artificial Sequence: Synthetic oligonucleotide
  Antisense strand to SEQ ID NO: 1535560
aauauaaacaucuuucagg

SEQ ID NO: 1535562 - RNA, 19 nt, Artificial Sequence
  Description of Artificial Sequence: Synthetic oligonucleotide
  Sense strand starting at position 3931 of SEQ ID NO: 1245090
gcuuaagcuguugucaagu

SEQ ID NO: 1535563 - RNA, 19 nt, Artificial Sequence
  Description of Artificial Sequence: Synthetic oligonucleotide
  Antisense strand to SEQ ID NO: 1535562
acuugacaacagcuuaagc

SEQ ID NO: 1535564 - RNA, 19 nt, Artificial Sequence
  Description of Artificial Sequence: Synthetic oligonucleotide
  Sense strand starting at position 240 of SEQ ID NO: 1245091
auauauuacuguuaggaag

SEQ ID NO: 1535565 - RNA, 19 nt, Artificial Sequence
  Description of Artificial Sequence: Synthetic oligonucleotide
  Antisense strand to SEQ ID NO: 1535564
cuuccuaacaguaauauau

SEQ ID NO: 1535566 - RNA, 19 nt, Artificial Sequence
  Description of Artificial Sequence: Synthetic oligonucleotide
  Sense strand starting at position 268 of SEQ ID NO: 1245091
gggcuaauuucgucaccca

SEQ ID NO: 1535567 - RNA, 19 nt, Artificial Sequence
  Description of Artificial Sequence: Synthetic oligonucleotide
  Antisense strand to SEQ ID NO: 1535566
ugggugacgaaauuagccc

SEQ ID NO: 1535568 - RNA, 19 nt, Artificial Sequence
  Description of Artificial Sequence: Synthetic oligonucleotide
  Sense strand starting at position 373 of SEQ ID NO: 1245091
ggacaauucccaugaccac

SEQ ID NO: 1535569 - RNA, 19 nt, Artificial Sequence
  Description of Artificial Sequence: Synthetic oligonucleotide
  Antisense strand to SEQ ID NO: 1535568
guggucaugggaauugucc

SEQ ID NO: 1535570 - RNA, 19 nt, Artificial Sequence
  Description of Artificial Sequence: Synthetic oligonucleotide
  Sense strand starting at position 449 of SEQ ID NO: 1245091
agcacucacuggcaaugau

SEQ ID NO: 1535571 - RNA, 19 nt, Artificial Sequence
  Description of Artificial Sequence: Synthetic oligonucleotide
  Antisense strand to SEQ ID NO: 1535570
aucauugccagugagugcu

SEQ ID NO: 1535572 - RNA, 19 nt, Artificial Sequence
  Description of Artificial Sequence: Synthetic oligonucleotide
  Sense strand starting at position 491 of SEQ ID NO: 1245091
cuauaaagcucucugcaug

SEQ ID NO: 1535573 - RNA, 19 nt, Artificial Sequence
  Description of Artificial Sequence: Synthetic oligonucleotide
  Antisense strand to SEQ ID NO: 1535572
caugcagagagcuuuauag

SEQ ID NO: 1535574 - RNA, 19 nt, Artificial Sequence
  Description of Artificial Sequence: Synthetic oligonucleotide
  Sense strand starting at position 506 of SEQ ID NO: 1245091
cauggugaguuugggauaa

SEQ ID NO: 1535575 - RNA, 19 nt, Artificial Sequence
  Description of Artificial Sequence: Synthetic oligonucleotide
  Antisense strand to SEQ ID NO: 1535574
uuaucccaaacucaccaug

SEQ ID NO: 1535576 - RNA, 19 nt, Artificial Sequence
  Description of Artificial Sequence: Synthetic oligonucleotide
  Sense strand starting at position 508 of SEQ ID NO: 1245091
uggugaguuugggauaaau

SEQ ID NO: 1535577 - RNA, 19 nt, Artificial Sequence
  Description of Artificial Sequence: Synthetic oligonucleotide
  Antisense strand to SEQ ID NO: 1535576
auuuaucccaaacucacca

SEQ ID NO: 1535578 - RNA, 19 nt, Artificial Sequence
  Description of Artificial Sequence: Synthetic oligonucleotide
  Sense strand starting at position 641 of SEQ ID NO: 1245091
auggcugguuccuugcuaa

SEQ ID NO: 1535579 - RNA, 19 nt, Artificial Sequence
  Description of Artificial Sequence: Synthetic oligonucleotide
  Antisense strand to SEQ ID NO: 1535578
uuagcaaggaaccagccau

SEQ ID NO: 1535580 - RNA, 19 nt, Artificial Sequence
  Description of Artificial Sequence: Synthetic oligonucleotide
  Sense strand starting at position 655 of SEQ ID NO: 1245091
gcuaauucuugccuuaggu

SEQ ID NO: 1535581 - RNA, 19 nt, Artificial Sequence
  Description of Artificial Sequence: Synthetic oligonucleotide
  Antisense strand to SEQ ID NO: 1535580
accuaaggcaagaauuagc

SEQ ID NO: 1535582 - RNA, 19 nt, Artificial Sequence
  Description of Artificial Sequence: Synthetic oligonucleotide
  Sense strand starting at position 761 of SEQ ID NO: 1245091
gcucgacagggagaguuua

SEQ ID NO: 1535583 - RNA, 19 nt, Artificial Sequence
  Description of Artificial Sequence: Synthetic oligonucleotide
  Antisense strand to SEQ ID NO: 1535582
uaaacucucccugucgagc

SEQ ID NO: 1535584 - RNA, 19 nt, Artificial Sequence
  Description of Artificial Sequence: Synthetic oligonucleotide
  Sense strand starting at position 769 of SEQ ID NO: 1245091
gggagaguuuacuguuaca

SEQ ID NO: 1535585 - RNA, 19 nt, Artificial Sequence
  Description of Artificial Sequence: Synthetic oligonucleotide
  Antisense strand to SEQ ID NO: 1535584
uguaacaguaaacucuccc

SEQ ID NO: 1535586 - RNA, 19 nt, Artificial Sequence
  Description of Artificial Sequence: Synthetic oligonucleotide
  Sense strand starting at position 772 of SEQ ID NO: 1245091
agaguuuacuguuacauuu

SEQ ID NO: 1535587 - RNA, 19 nt, Artificial Sequence
  Description of Artificial Sequence: Synthetic oligonucleotide
  Antisense strand to SEQ ID NO: 1535586
aaauguaacaguaaacucu

SEQ ID NO: 1535588 - RNA, 19 nt, Artificial Sequence
  Description of Artificial Sequence: Synthetic oligonucleotide
  Sense strand starting at position 1211 of SEQ ID NO: 1245091
cgaggcuuccucucgcuua

SEQ ID NO: 1535589 - RNA, 19 nt, Artificial Sequence
  Description of Artificial Sequence: Synthetic oligonucleotide
  Antisense strand to SEQ ID NO: 1535588
uaagcgagaggaagccucg

SEQ ID NO: 1535590 - RNA, 19 nt, Artificial Sequence
  Description of Artificial Sequence: Synthetic oligonucleotide
  Sense strand starting at position 1351 of SEQ ID NO: 1245091
accguaagcucguagauuu

SEQ ID NO: 1535591 - RNA, 19 nt, Artificial Sequence
  Description of Artificial Sequence: Synthetic oligonucleotide
  Antisense strand to SEQ ID NO: 1535590
aaaucuacgagcuuacggu

SEQ ID NO: 1535592 - RNA, 19 nt, Artificial Sequence
  Description of Artificial Sequence: Synthetic oligonucleotide
  Sense strand starting at position 1369 of SEQ ID NO: 1245091
uugccaaacuccucgaaga

SEQ ID NO: 1535593 - RNA, 19 nt, Artificial Sequence
  Description of Artificial Sequence: Synthetic oligonucleotide
  Antisense strand to SEQ ID NO: 1535592
ucuucgaggaguuuggcaa

SEQ ID NO: 1535594 - RNA, 19 nt, Artificial Sequence
  Description of Artificial Sequence: Synthetic oligonucleotide
  Sense strand starting at position 1454 of SEQ ID NO: 1245091
gguccuucaugggaauggu

SEQ ID NO: 1535595 - RNA, 19 nt, Artificial Sequence
  Description of Artificial Sequence: Synthetic oligonucleotide
  Antisense strand to SEQ ID NO: 1535594
accauucccaugaaggacc

SEQ ID NO: 1535596 - RNA, 19 nt, Artificial Sequence
  Description of Artificial Sequence: Synthetic oligonucleotide
  Sense strand starting at position 1491 of SEQ ID NO: 1245091
guggcuuaauccguucaug

SEQ ID NO: 1535597 - RNA, 19 nt, Artificial Sequence
  Description of Artificial Sequence: Synthetic oligonucleotide
  Antisense strand to SEQ ID NO: 1535596
caugaacggauuaagccac

SEQ ID NO: 1535598 - RNA, 19 nt, Artificial Sequence
  Description of Artificial Sequence: Synthetic oligonucleotide
  Sense strand starting at position 1565 of SEQ ID NO: 1245091
cagccuguccguuugcuaa

SEQ ID NO: 1535599 - RNA, 19 nt, Artificial Sequence
  Description of Artificial Sequence: Synthetic oligonucleotide
  Antisense strand to SEQ ID NO: 1535598
uuagcaaacggacaggcug

SEQ ID NO: 1535600 - RNA, 19 nt, Artificial Sequence
  Description of Artificial Sequence: Synthetic oligonucleotide
  Sense strand starting at position 1972 of SEQ ID NO: 1245091
ucuguccuuuccguuuaaa

SEQ ID NO: 1535601 - RNA, 19 nt, Artificial Sequence
  Description of Artificial Sequence: Synthetic oligonucleotide
  Antisense strand to SEQ ID NO: 1535600
uuuaaacggaaaggacaga

SEQ ID NO: 1535602 - RNA, 19 nt, Artificial Sequence
  Description of Artificial Sequence: Synthetic oligonucleotide
  Sense strand starting at position 1975 of SEQ ID NO: 1245091
guccuuuccguuuaaacag

SEQ ID NO: 1535603 - RNA, 19 nt, Artificial Sequence
  Description of Artificial Sequence: Synthetic oligonucleotide
  Antisense strand to SEQ ID NO: 1535602
cuguuuaaacggaaaggac

SEQ ID NO: 1535604 - RNA, 19 nt, Artificial Sequence
  Description of Artificial Sequence: Synthetic oligonucleotide
  Sense strand starting at position 2411 of SEQ ID NO: 1245091
ggcuuuauccaccaagcua

SEQ ID NO: 1535605 - RNA, 19 nt, Artificial Sequence
  Description of Artificial Sequence: Synthetic oligonucleotide
  Antisense strand to SEQ ID NO: 1535604
uagcuugguggauaaagcc

SEQ ID NO: 1535606 - RNA, 19 nt, Artificial Sequence
  Description of Artificial Sequence: Synthetic oligonucleotide
  Sense strand starting at position 2590 of SEQ ID NO: 1245091
gcgcauucaucagugucga

SEQ ID NO: 1535607 - RNA, 19 nt, Artificial Sequence
  Description of Artificial Sequence: Synthetic oligonucleotide
  Antisense strand to SEQ ID NO: 1535606
ucgacacugaugaaugcgc

SEQ ID NO: 1535608 - RNA, 19 nt, Artificial Sequence
  Description of Artificial Sequence: Synthetic oligonucleotide
  Sense strand starting at position 2594 of SEQ ID NO: 1245091
auucaucagugucgagaga

SEQ ID NO: 1535609 - RNA, 19 nt, Artificial Sequence
  Description of Artificial Sequence: Synthetic oligonucleotide
  Antisense strand to SEQ ID NO: 1535608
ucucucgacacugaugaau

SEQ ID NO: 1535610 - RNA, 19 nt, Artificial Sequence
  Description of Artificial Sequence: Synthetic oligonucleotide
  Sense strand starting at position 2595 of SEQ ID NO: 1245091
uucaucagugucgagagaa

SEQ ID NO: 1535611 - RNA, 19 nt, Artificial Sequence
  Description of Artificial Sequence: Synthetic oligonucleotide
  Antisense strand to SEQ ID NO: 1535610
uucucucgacacugaugaa

SEQ ID NO: 1535612 - RNA, 19 nt, Artificial Sequence
  Description of Artificial Sequence: Synthetic oligonucleotide
  Sense strand starting at position 3084 of SEQ ID NO: 1245091
gcuuuacggguucaaauag

SEQ ID NO: 1535613 - RNA, 19 nt, Artificial Sequence
  Description of Artificial Sequence: Synthetic oligonucleotide
  Antisense strand to SEQ ID NO: 1535612
cuauuugaacccguaaagc

SEQ ID NO: 1535614 - RNA, 19 nt, Artificial Sequence
  Description of Artificial Sequence: Synthetic oligonucleotide
  Sense strand starting at position 3398 of SEQ ID NO: 1245091
ggugaauacugguggugaa

SEQ ID NO: 1535615 - RNA, 19 nt, Artificial Sequence
  Description of Artificial Sequence: Synthetic oligonucleotide
  Antisense strand to SEQ ID NO: 1535614
uucaccaccaguauucacc

SEQ ID NO: 1535616 - RNA, 19 nt, Artificial Sequence
  Description of Artificial Sequence: Synthetic oligonucleotide
  Sense strand starting at position 3401 of SEQ ID NO: 1245091
gaauacugguggugaacuu

SEQ ID NO: 1535617 - RNA, 19 nt, Artificial Sequence
  Description of Artificial Sequence: Synthetic oligonucleotide
  Antisense strand to SEQ ID NO: 1535616
aaguucaccaccaguauuc

SEQ ID NO: 1535618 - RNA, 19 nt, Artificial Sequence
  Description of Artificial Sequence: Synthetic oligonucleotide
  Sense strand starting at position 3438 of SEQ ID NO: 1245091
ucacguuaaugauauuuac

SEQ ID NO: 1535619 - RNA, 19 nt, Artificial Sequence
  Description of Artificial Sequence: Synthetic oligonucleotide
  Antisense strand to SEQ ID NO: 1535618
guaaauaucauuaacguga

SEQ ID NO: 1535620 - RNA, 19 nt, Artificial Sequence
  Description of Artificial Sequence: Synthetic oligonucleotide
  Sense strand starting at position 3655 of SEQ ID NO: 1245091
cucggauuacauuacguua

SEQ ID NO: 1535621 - RNA, 19 nt, Artificial Sequence
  Description of Artificial Sequence: Synthetic oligonucleotide
  Antisense strand to SEQ ID NO: 1535620
uaacguaauguaauccgag

SEQ ID NO: 1535622 - RNA, 19 nt, Artificial Sequence
  Description of Artificial Sequence: Synthetic oligonucleotide
  Sense strand starting at position 3658 of SEQ ID NO: 1245091
ggauuacauuacguuacua

SEQ ID NO: 1535623 - RNA, 19 nt, Artificial Sequence
  Description of Artificial Sequence: Synthetic oligonucleotide
  Antisense strand to SEQ ID NO: 1535622
uaguaacguaauguaaucc

SEQ ID NO: 1535624 - RNA, 19 nt, Artificial Sequence
  Description of Artificial Sequence: Synthetic oligonucleotide
  Sense strand starting at position 3660 of SEQ ID NO: 1245091
auuacauuacguuacuaga

SEQ ID NO: 1535625 - RNA, 19 nt, Artificial Sequence
  Description of Artificial Sequence: Synthetic oligonucleotide
  Antisense strand to SEQ ID NO: 1535624
ucuaguaacguaauguaau

SEQ ID NO: 1535626 - RNA, 19 nt, Artificial Sequence
  Description of Artificial Sequence: Synthetic oligonucleotide
  Sense strand starting at position 3663 of SEQ ID NO: 1245091
acauuacguuacuagagga

SEQ ID NO: 1535627 - RNA, 19 nt, Artificial Sequence
  Description of Artificial Sequence: Synthetic oligonucleotide
  Antisense strand to SEQ ID NO: 1535626
uccucuaguaacguaaugu

SEQ ID NO: 1535628 - RNA, 19 nt, Artificial Sequence
  Description of Artificial Sequence: Synthetic oligonucleotide
  Sense strand starting at position 3676 of SEQ ID NO: 1245091
agaggauaugucugcaauu

SEQ ID NO: 1535629 - RNA, 19 nt, Artificial Sequence
  Description of Artificial Sequence: Synthetic oligonucleotide
  Antisense strand to SEQ ID NO: 1535628
aauugcagacauauccucu

SEQ ID NO: 1535630 - RNA, 19 nt, Artificial Sequence
  Description of Artificial Sequence: Synthetic oligonucleotide
  Sense strand starting at position 3924 of SEQ ID NO: 1245091
ugccuuugcuugccggaau

SEQ ID NO: 1535631 - RNA, 19 nt, Artificial Sequence
  Description of Artificial Sequence: Synthetic oligonucleotide
  Antisense strand to SEQ ID NO: 1535630
auuccggcaagcaaaggca

SEQ ID NO: 1535632 - RNA, 19 nt, Artificial Sequence
  Description of Artificial Sequence: Synthetic oligonucleotide
  Sense strand starting at position 3935 of SEQ ID NO: 1245091
gccggaaucggguguaagu

SEQ ID NO: 1535633 - RNA, 19 nt, Artificial Sequence
  Description of Artificial Sequence: Synthetic oligonucleotide
  Antisense strand to SEQ ID NO: 1535632
acuuacacccgauuccggc

SEQ ID NO: 1535634 - RNA, 19 nt, Artificial Sequence
  Description of Artificial Sequence: Synthetic oligonucleotide
  Sense strand starting at position 3937 of SEQ ID NO: 1245091
cggaaucggguguaaguau

SEQ ID NO: 1535635 - RNA, 19 nt, Artificial Sequence
  Description of Artificial Sequence: Synthetic oligonucleotide
  Antisense strand to SEQ ID NO: 1535634
auacuuacacccgauuccg

SEQ ID NO: 1535636 - RNA, 19 nt, Artificial Sequence
  Description of Artificial Sequence: Synthetic oligonucleotide
  Sense strand starting at position 3946 of SEQ ID NO: 1245091
guguaaguaugguuaauuc

SEQ ID NO: 1535637 - RNA, 19 nt, Artificial Sequence
  Description of Artificial Sequence: Synthetic oligonucleotide
  Antisense strand to SEQ ID NO: 1535636
gaauuaaccauacuuacac

SEQ ID NO: 1535638 - RNA, 19 nt, Artificial Sequence
  Description of Artificial Sequence: Synthetic oligonucleotide
  Sense strand starting at position 3953 of SEQ ID NO: 1245091
uaugguuaauucgucacuu

SEQ ID NO: 1535639 - RNA, 19 nt, Artificial Sequence
  Description of Artificial Sequence: Synthetic oligonucleotide
  Antisense strand to SEQ ID NO: 1535638
aagugacgaauuaaccaua

SEQ ID NO: 1535640 - RNA, 19 nt, Artificial Sequence
  Description of Artificial Sequence: Synthetic oligonucleotide
  Sense strand starting at position 3954 of SEQ ID NO: 1245091
augguuaauucgucacuug

SEQ ID NO: 1535641 - RNA, 19 nt, Artificial Sequence
  Description of Artificial Sequence: Synthetic oligonucleotide
  Antisense strand to SEQ ID NO: 1535640
caagugacgaauuaaccau

SEQ ID NO: 1535642 - RNA, 19 nt, Artificial Sequence
  Description of Artificial Sequence: Synthetic oligonucleotide
  Sense strand starting at position 3957 of SEQ ID NO: 1245091
guuaauucgucacuugguu

SEQ ID NO: 1535643 - RNA, 19 nt, Artificial Sequence
  Description of Artificial Sequence: Synthetic oligonucleotide
  Antisense strand to SEQ ID NO: 1535642
aaccaagugacgaauuaac

SEQ ID NO: 1535644 - RNA, 19 nt, Artificial Sequence
  Description of Artificial Sequence: Synthetic oligonucleotide
  Sense strand starting at position 26 of SEQ ID NO: 1245092
ccaaauggcucucugacau

SEQ ID NO: 1535645 - RNA, 19 nt, Artificial Sequence
  Description of Artificial Sequence: Synthetic oligonucleotide
  Antisense strand to SEQ ID NO: 1535644
augucagagagccauuugg

SEQ ID NO: 1535646 - RNA, 19 nt, Artificial Sequence
  Description of Artificial Sequence: Synthetic oligonucleotide
  Sense strand starting at position 512 of SEQ ID NO: 1245092
ucuacuuggcaccaagaau

SEQ ID NO: 1535647 - RNA, 19 nt, Artificial Sequence
  Description of Artificial Sequence: Synthetic oligonucleotide
  Antisense strand to SEQ ID NO: 1535646
auucuuggugccaaguaga

SEQ ID NO: 1535648 - RNA, 19 nt, Artificial Sequence
  Description of Artificial Sequence: Synthetic oligonucleotide
  Sense strand starting at position 575 of SEQ ID NO: 1245092
ugucaacuacgauaguguu

SEQ ID NO: 1535649 - RNA, 19 nt, Artificial Sequence
  Description of Artificial Sequence: Synthetic oligonucleotide
  Antisense strand to SEQ ID NO: 1535648
aacacuaucguaguugaca

SEQ ID NO: 1535650 - RNA, 19 nt, Artificial Sequence
  Description of Artificial Sequence: Synthetic oligonucleotide
  Sense strand starting at position 642 of SEQ ID NO: 1245092
cgggaagauuccucaagau

SEQ ID NO: 1535651 - RNA, 19 nt, Artificial Sequence
  Description of Artificial Sequence: Synthetic oligonucleotide
  Antisense strand to SEQ ID NO: 1535650
aucuugaggaaucuucccg

SEQ ID NO: 1535652 - RNA, 19 nt, Artificial Sequence
  Description of Artificial Sequence: Synthetic oligonucleotide
  Sense strand starting at position 825 of SEQ ID NO: 1245092
ugaacugaguggcuauauu

SEQ ID NO: 1535653 - RNA, 19 nt, Artificial Sequence
  Description of Artificial Sequence: Synthetic oligonucleotide
  Antisense strand to SEQ ID NO: 1535652
aauauagccacucaguuca

SEQ ID NO: 1535654 - RNA, 19 nt, Artificial Sequence
  Description of Artificial Sequence: Synthetic oligonucleotide
  Sense strand starting at position 905 of SEQ ID NO: 1245092
auuacauuccuagguacau

SEQ ID NO: 1535655 - RNA, 19 nt, Artificial Sequence
  Description of Artificial Sequence: Synthetic oligonucleotide
  Antisense strand to SEQ ID NO: 1535654
auguaccuaggaauguaau

SEQ ID NO: 1535656 - RNA, 19 nt, Artificial Sequence
  Description of Artificial Sequence: Synthetic oligonucleotide
  Sense strand starting at position 906 of SEQ ID NO: 1245092
uuacauuccuagguacaua

SEQ ID NO: 1535657 - RNA, 19 nt, Artificial Sequence
  Description of Artificial Sequence: Synthetic oligonucleotide
  Antisense strand to SEQ ID NO: 1535656
uauguaccuaggaauguaa

SEQ ID NO: 1535658 - RNA, 19 nt, Artificial Sequence
  Description of Artificial Sequence: Synthetic oligonucleotide
  Sense strand starting at position 934 of SEQ ID NO: 1245092
ugacuauagucauuaaucg

SEQ ID NO: 1535659 - RNA, 19 nt, Artificial Sequence
  Description of Artificial Sequence: Synthetic oligonucleotide
  Antisense strand to SEQ ID NO: 1535658
cgauuaaugacuauaguca

SEQ ID NO: 1535660 - RNA, 19 nt, Artificial Sequence
  Description of Artificial Sequence: Synthetic oligonucleotide
  Sense strand starting at position 935 of SEQ ID NO: 1245092
gacuauagucauuaaucgu

SEQ ID NO: 1535661 - RNA, 19 nt, Artificial Sequence
  Description of Artificial Sequence: Synthetic oligonucleotide
  Antisense strand to SEQ ID NO: 1535660
acgauuaaugacuauaguc

SEQ ID NO: 1535662 - RNA, 19 nt, Artificial Sequence
  Description of Artificial Sequence: Synthetic oligonucleotide
  Sense strand starting at position 1218 of SEQ ID NO: 1245092
acagcuguucuccaaacga

SEQ ID NO: 1535663 - RNA, 19 nt, Artificial Sequence
  Description of Artificial Sequence: Synthetic oligonucleotide
  Antisense strand to SEQ ID NO: 1535662
ucguuuggagaacagcugu

SEQ ID NO: 1535664 - RNA, 19 nt, Artificial Sequence
  Description of Artificial Sequence: Synthetic oligonucleotide
  Sense strand starting at position 1243 of SEQ ID NO: 1245092
ugaagagguccucauguuu

SEQ ID NO: 1535665 - RNA, 19 nt, Artificial Sequence
  Description of Artificial Sequence: Synthetic oligonucleotide
  Antisense strand to SEQ ID NO: 1535664
aaacaugaggaccucuuca

SEQ ID NO: 1535666 - RNA, 19 nt, Artificial Sequence
  Description of Artificial Sequence: Synthetic oligonucleotide
  Sense strand starting at position 1325 of SEQ ID NO: 1245092
ucacguucuguugauaaug

SEQ ID NO: 1535667 - RNA, 19 nt, Artificial Sequence
  Description of Artificial Sequence: Synthetic oligonucleotide
  Antisense strand to SEQ ID NO: 1535666
cauuaucaacagaacguga

SEQ ID NO: 1535668 - RNA, 19 nt, Artificial Sequence
  Description of Artificial Sequence: Synthetic oligonucleotide
  Sense strand starting at position 1354 of SEQ ID NO: 1245092
caaggaauguagguaaacu

SEQ ID NO: 1535669 - RNA, 19 nt, Artificial Sequence
  Description of Artificial Sequence: Synthetic oligonucleotide
  Antisense strand to SEQ ID NO: 1535668
aguuuaccuacauuccuug

SEQ ID NO: 1535670 - RNA, 19 nt, Artificial Sequence
  Description of Artificial Sequence: Synthetic oligonucleotide
  Sense strand starting at position 1432 of SEQ ID NO: 1245092
agggcauuaaguuaaguua

SEQ ID NO: 1535671 - RNA, 19 nt, Artificial Sequence
  Description of Artificial Sequence: Synthetic oligonucleotide
  Antisense strand to SEQ ID NO: 1535670
uaacuuaacuuaaugcccu

SEQ ID NO: 1535672 - RNA, 19 nt, Artificial Sequence
  Description of Artificial Sequence: Synthetic oligonucleotide
  Sense strand starting at position 1435 of SEQ ID NO: 1245092
gcauuaaguuaaguuaaca

SEQ ID NO: 1535673 - RNA, 19 nt, Artificial Sequence
  Description of Artificial Sequence: Synthetic oligonucleotide
  Antisense strand to SEQ ID NO: 1535672
uguuaacuuaacuuaaugc

SEQ ID NO: 1535674 - RNA, 19 nt, Artificial Sequence
  Description of Artificial Sequence: Synthetic oligonucleotide
  Sense strand starting at position 1443 of SEQ ID NO: 1245092
uuaaguuaacaagguuacu

SEQ ID NO: 1535675 - RNA, 19 nt, Artificial Sequence
  Description of Artificial Sequence: Synthetic oligonucleotide
  Antisense strand to SEQ ID NO: 1535674
aguaaccuuguuaacuuaa

SEQ ID NO: 1535676 - RNA, 19 nt, Artificial Sequence
  Description of Artificial Sequence: Synthetic oligonucleotide
  Sense strand starting at position 1455 of SEQ ID NO: 1245092
gguuacuuccugggucaga

SEQ ID NO: 1535677 - RNA, 19 nt, Artificial Sequence
  Description of Artificial Sequence: Synthetic oligonucleotide
  Antisense strand to SEQ ID NO: 1535676
ucugacccaggaaguaacc

SEQ ID NO: 1535678 - RNA, 19 nt, Artificial Sequence
  Description of Artificial Sequence: Synthetic oligonucleotide
  Sense strand starting at position 1456 of SEQ ID NO: 1245092
guuacuuccugggucagaa

SEQ ID NO: 1535679 - RNA, 19 nt, Artificial Sequence
  Description of Artificial Sequence: Synthetic oligonucleotide
  Antisense strand to SEQ ID NO: 1535678
uucugacccaggaaguaac

SEQ ID NO: 1535680 - RNA, 19 nt, Artificial Sequence
  Description of Artificial Sequence: Synthetic oligonucleotide
  Sense strand starting at position 1458 of SEQ ID NO: 1245092
uacuuccugggucagaauu

SEQ ID NO: 1535681 - RNA, 19 nt, Artificial Sequence
  Description of Artificial Sequence: Synthetic oligonucleotide
  Antisense strand to SEQ ID NO: 1535680
aauucugacccaggaagua

SEQ ID NO: 1535682 - RNA, 19 nt, Artificial Sequence
  Description of Artificial Sequence: Synthetic oligonucleotide
  Sense strand starting at position 1523 of SEQ ID NO: 1245092
ggaaacaucaccggucacu

SEQ ID NO: 1535683 - RNA, 19 nt, Artificial Sequence
  Description of Artificial Sequence: Synthetic oligonucleotide
  Antisense strand to SEQ ID NO: 1535682
agugaccggugauguuucc

SEQ ID NO: 1535684 - RNA, 19 nt, Artificial Sequence
  Description of Artificial Sequence: Synthetic oligonucleotide
  Sense strand starting at position 1687 of SEQ ID NO: 1245092
cacagaggcgugcaauuaa

SEQ ID NO: 1535685 - RNA, 19 nt, Artificial Sequence
  Description of Artificial Sequence: Synthetic oligonucleotide
  Antisense strand to SEQ ID NO: 1535684
uuaauugcacgccucugug

SEQ ID NO: 1535686 - RNA, 19 nt, Artificial Sequence
  Description of Artificial Sequence: Synthetic oligonucleotide
  Sense strand starting at position 2354 of SEQ ID NO: 1245092
ucacucuaugcgcaaagaa

SEQ ID NO: 1535687 - RNA, 19 nt, Artificial Sequence
  Description of Artificial Sequence: Synthetic oligonucleotide
  Antisense strand to SEQ ID NO: 1535686
uucuuugcgcauagaguga

SEQ ID NO: 1535688 - RNA, 19 nt, Artificial Sequence
  Description of Artificial Sequence: Synthetic oligonucleotide
  Sense strand starting at position 2449 of SEQ ID NO: 1245092
cgcugaaaggcgucagguu

SEQ ID NO: 1535689 - RNA, 19 nt, Artificial Sequence
  Description of Artificial Sequence: Synthetic oligonucleotide
  Antisense strand to SEQ ID NO: 1535688
aaccugacgccuuucagcg

SEQ ID NO: 1535690 - RNA, 19 nt, Artificial Sequence
  Description of Artificial Sequence: Synthetic oligonucleotide
  Sense strand starting at position 2482 of SEQ ID NO: 1245092
cuaauuccucgggauccaa

SEQ ID NO: 1535691 - RNA, 19 nt, Artificial Sequence
  Description of Artificial Sequence: Synthetic oligonucleotide
  Antisense strand to SEQ ID NO: 1535690
uuggaucccgaggaauuag

SEQ ID NO: 1535692 - RNA, 19 nt, Artificial Sequence
  Description of Artificial Sequence: Synthetic oligonucleotide
  Sense strand starting at position 2522 of SEQ ID NO: 1245092
ucuagucgccucuuuguga

SEQ ID NO: 1535693 - RNA, 19 nt, Artificial Sequence
  Description of Artificial Sequence: Synthetic oligonucleotide
  Antisense strand to SEQ ID NO: 1535692
ucacaaagaggcgacuaga

SEQ ID NO: 1535694 - RNA, 19 nt, Artificial Sequence
  Description of Artificial Sequence: Synthetic oligonucleotide
  Sense strand starting at position 2831 of SEQ ID NO: 1245092
uuuagaagucccuagaccu

SEQ ID NO: 1535695 - RNA, 19 nt, Artificial Sequence
  Description of Artificial Sequence: Synthetic oligonucleotide
  Antisense strand to SEQ ID NO: 1535694
aggucuagggacuucuaaa

SEQ ID NO: 1535696 - RNA, 19 nt, Artificial Sequence
  Description of Artificial Sequence: Synthetic oligonucleotide
  Sense strand starting at position 2838 of SEQ ID NO: 1245092
gucccuagaccugagguua

SEQ ID NO: 1535697 - RNA, 19 nt, Artificial Sequence
  Description of Artificial Sequence: Synthetic oligonucleotide
  Antisense strand to SEQ ID NO: 1535696
uaaccucaggucuagggac

SEQ ID NO: 1535698 - RNA, 19 nt, Artificial Sequence
  Description of Artificial Sequence: Synthetic oligonucleotide
  Sense strand starting at position 2864 of SEQ ID NO: 1245092
gggaaagacgucuguuuac

SEQ ID NO: 1535699 - RNA, 19 nt, Artificial Sequence
  Description of Artificial Sequence: Synthetic oligonucleotide
  Antisense strand to SEQ ID NO: 1535698
guaaacagacgucuuuccc

SEQ ID NO: 1535700 - RNA, 19 nt, Artificial Sequence
  Description of Artificial Sequence: Synthetic oligonucleotide
  Sense strand starting at position 2873 of SEQ ID NO: 1245092
gucuguuuacuugaccacu

SEQ ID NO: 1535701 - RNA, 19 nt, Artificial Sequence
  Description of Artificial Sequence: Synthetic oligonucleotide
  Antisense strand to SEQ ID NO: 1535700
aguggucaaguaaacagac

SEQ ID NO: 1535702 - RNA, 19 nt, Artificial Sequence
  Description of Artificial Sequence: Synthetic oligonucleotide
  Sense strand starting at position 2917 of SEQ ID NO: 1245092
ccugucauucuuggauauc

SEQ ID NO: 1535703 - RNA, 19 nt, Artificial Sequence
  Description of Artificial Sequence: Synthetic oligonucleotide
  Antisense strand to SEQ ID NO: 1535702
gauauccaagaaugacagg

SEQ ID NO: 1535704 - RNA, 19 nt, Artificial Sequence
  Description of Artificial Sequence: Synthetic oligonucleotide
  Sense strand starting at position 3358 of SEQ ID NO: 1245092
uugucaaacucagugauau

SEQ ID NO: 1535705 - RNA, 19 nt, Artificial Sequence
  Description of Artificial Sequence: Synthetic oligonucleotide
  Antisense strand to SEQ ID NO: 1535704
auaucacugaguuugacaa

SEQ ID NO: 1535706 - RNA, 19 nt, Artificial Sequence
  Description of Artificial Sequence: Synthetic oligonucleotide
  Sense strand starting at position 3359 of SEQ ID NO: 1245092
ugucaaacucagugauauc

SEQ ID NO: 1535707 - RNA, 19 nt, Artificial Sequence
  Description of Artificial Sequence: Synthetic oligonucleotide
  Antisense strand to SEQ ID NO: 1535706
gauaucacugaguuugaca

SEQ ID NO: 1535708 - RNA, 19 nt, Artificial Sequence
  Description of Artificial Sequence: Synthetic oligonucleotide
  Sense strand starting at position 3410 of SEQ ID NO: 1245092
cagccuugguauuugcaaa

SEQ ID NO: 1535709 - RNA, 19 nt, Artificial Sequence
  Description of Artificial Sequence: Synthetic oligonucleotide
  Antisense strand to SEQ ID NO: 1535708
uuugcaaauaccaaggcug

SEQ ID NO: 1535710 - RNA, 19 nt, Artificial Sequence
  Description of Artificial Sequence: Synthetic oligonucleotide
  Sense strand starting at position 3423 of SEQ ID NO: 1245092
ugcaaagaguaauuaccuu

SEQ ID NO: 1535711 - RNA, 19 nt, Artificial Sequence
  Description of Artificial Sequence: Synthetic oligonucleotide
  Antisense strand to SEQ ID NO: 1535710
aagguaauuacucuuugca

SEQ ID NO: 1535712 - RNA, 19 nt, Artificial Sequence
  Description of Artificial Sequence: Synthetic oligonucleotide
  Sense strand starting at position 3586 of SEQ ID NO: 1245092
aggugaacugcuuaaaugu

SEQ ID NO: 1535713 - RNA, 19 nt, Artificial Sequence
  Description of Artificial Sequence: Synthetic oligonucleotide
  Antisense strand to SEQ ID NO: 1535712
acauuuaagcaguucaccu

SEQ ID NO: 1535714 - RNA, 19 nt, Artificial Sequence
  Description of Artificial Sequence: Synthetic oligonucleotide
  Sense strand starting at position 3596 of SEQ ID NO: 1245092
cuuaaaugugucuacaggu

SEQ ID NO: 1535715 - RNA, 19 nt, Artificial Sequence
  Description of Artificial Sequence: Synthetic oligonucleotide
  Antisense strand to SEQ ID NO: 1535714
accuguagacacauuuaag

SEQ ID NO: 1535716 - RNA, 19 nt, Artificial Sequence
  Description of Artificial Sequence: Synthetic oligonucleotide
  Sense strand starting at position 3857 of SEQ ID NO: 1245092
gccgguuuccuugucugua

SEQ ID NO: 1535717 - RNA, 19 nt, Artificial Sequence
  Description of Artificial Sequence: Synthetic oligonucleotide
  Antisense strand to SEQ ID NO: 1535716
uacagacaaggaaaccggc

SEQ ID NO: 1535718 - RNA, 19 nt, Artificial Sequence
  Description of Artificial Sequence: Synthetic oligonucleotide
  Sense strand starting at position 3904 of SEQ ID NO: 1245092
agaggcuuacugugaggau

SEQ ID NO: 1535719 - RNA, 19 nt, Artificial Sequence
  Description of Artificial Sequence: Synthetic oligonucleotide
  Antisense strand to SEQ ID NO: 1535718
auccucacaguaagccucu

SEQ ID NO: 1535720 - RNA, 19 nt, Artificial Sequence
  Description of Artificial Sequence: Synthetic oligonucleotide
  Sense strand starting at position 3926 of SEQ ID NO: 1245092
aagcuacuucuguaaggua

SEQ ID NO: 1535721 - RNA, 19 nt, Artificial Sequence
  Description of Artificial Sequence: Synthetic oligonucleotide
  Antisense strand to SEQ ID NO: 1535720
uaccuuacagaaguagcuu

SEQ ID NO: 1535722 - RNA, 19 nt, Artificial Sequence
  Description of Artificial Sequence: Synthetic oligonucleotide
  Sense strand starting at position 3934 of SEQ ID NO: 1245092
ucuguaagguaucuagaaa

SEQ ID NO: 1535723 - RNA, 19 nt, Artificial Sequence
  Description of Artificial Sequence: Synthetic oligonucleotide
  Antisense strand to SEQ ID NO: 1535722
uuucuagauaccuuacaga

SEQ ID NO: 1535724 - RNA, 19 nt, Artificial Sequence
  Description of Artificial Sequence: Synthetic oligonucleotide
  Sense strand starting at position 24 of SEQ ID NO: 1245093
agagcuagccuauacuuga

SEQ ID NO: 1535725 - RNA, 19 nt, Artificial Sequence
  Description of Artificial Sequence: Synthetic oligonucleotide
  Antisense strand to SEQ ID NO: 1535724
ucaaguauaggcuagcucu

SEQ ID NO: 1535726 - RNA, 19 nt, Artificial Sequence
  Description of Artificial Sequence: Synthetic oligonucleotide
  Sense strand starting at position 201 of SEQ ID NO: 1245093
ucaucacaucgucaaugau

SEQ ID NO: 1535727 - RNA, 19 nt, Artificial Sequence
  Description of Artificial Sequence: Synthetic oligonucleotide
  Antisense strand to SEQ ID NO: 1535726
aucauugacgaugugauga

SEQ ID NO: 1535728 - RNA, 19 nt, Artificial Sequence
  Description of Artificial Sequence: Synthetic oligonucleotide
  Sense strand starting at position 228 of SEQ ID NO: 1245093
gucuaagggcuuugaucaa

SEQ ID NO: 1535729 - RNA, 19 nt, Artificial Sequence
  Description of Artificial Sequence: Synthetic oligonucleotide
  Antisense strand to SEQ ID NO: 1535728
uugaucaaagcccuuagac

SEQ ID NO: 1535730 - RNA, 19 nt, Artificial Sequence
  Description of Artificial Sequence: Synthetic oligonucleotide
  Sense strand starting at position 380 of SEQ ID NO: 1245093
gucaaauacugcuucugaa

SEQ ID NO: 1535731 - RNA, 19 nt, Artificial Sequence
  Description of Artificial Sequence: Synthetic oligonucleotide
  Antisense strand to SEQ ID NO: 1535730
uucagaagcaguauuugac

SEQ ID NO: 1535732 - RNA, 19 nt, Artificial Sequence
  Description of Artificial Sequence: Synthetic oligonucleotide
  Sense strand starting at position 442 of SEQ ID NO: 1245093
acaauugaaugggaacaaa

SEQ ID NO: 1535733 - RNA, 19 nt, Artificial Sequence
  Description of Artificial Sequence: Synthetic oligonucleotide
  Antisense strand to SEQ ID NO: 1535732
uuuguucccauucaauugu

SEQ ID NO: 1535734 - RNA, 19 nt, Artificial Sequence
  Description of Artificial Sequence: Synthetic oligonucleotide
  Sense strand starting at position 501 of SEQ ID NO: 1245093
agaaauagucuccacuggu

SEQ ID NO: 1535735 - RNA, 19 nt, Artificial Sequence
  Description of Artificial Sequence: Synthetic oligonucleotide
  Antisense strand to SEQ ID NO: 1535734
accaguggagacuauuucu

SEQ ID NO: 1535736 - RNA, 19 nt, Artificial Sequence
  Description of Artificial Sequence: Synthetic oligonucleotide
  Sense strand starting at position 655 of SEQ ID NO: 1245093
cuuugaucugccuaaugau

SEQ ID NO: 1535737 - RNA, 19 nt, Artificial Sequence
  Description of Artificial Sequence: Synthetic oligonucleotide
  Antisense strand to SEQ ID NO: 1535736
aucauuaggcagaucaaag

SEQ ID NO: 1535738 - RNA, 19 nt, Artificial Sequence
  Description of Artificial Sequence: Synthetic oligonucleotide
  Sense strand starting at position 701 of SEQ ID NO: 1245093
guagauguguaaccucaag

SEQ ID NO: 1535739 - RNA, 19 nt, Artificial Sequence
  Description of Artificial Sequence: Synthetic oligonucleotide
  Antisense strand to SEQ ID NO: 1535738
cuugagguuacacaucuac

SEQ ID NO: 1535740 - RNA, 19 nt, Artificial Sequence
  Description of Artificial Sequence: Synthetic oligonucleotide
  Sense strand starting at position 747 of SEQ ID NO: 1245093
uuucgucaccgauaagaau

SEQ ID NO: 1535741 - RNA, 19 nt, Artificial Sequence
  Description of Artificial Sequence: Synthetic oligonucleotide
  Antisense strand to SEQ ID NO: 1535740
auucuuaucggugacgaaa

SEQ ID NO: 1535742 - RNA, 19 nt, Artificial Sequence
  Description of Artificial Sequence: Synthetic oligonucleotide
  Sense strand starting at position 996 of SEQ ID NO: 1245093
gagaauugcugauugaagc

SEQ ID NO: 1535743 - RNA, 19 nt, Artificial Sequence
  Description of Artificial Sequence: Synthetic oligonucleotide
  Antisense strand to SEQ ID NO: 1535742
gcuucaaucagcaauucuc

SEQ ID NO: 1535744 - RNA, 19 nt, Artificial Sequence
  Description of Artificial Sequence: Synthetic oligonucleotide
  Sense strand starting at position 997 of SEQ ID NO: 1245093
agaauugcugauugaagcu

SEQ ID NO: 1535745 - RNA, 19 nt, Artificial Sequence
  Description of Artificial Sequence: Synthetic oligonucleotide
  Antisense strand to SEQ ID NO: 1535744
agcuucaaucagcaauucu

SEQ ID NO: 1535746 - RNA, 19 nt, Artificial Sequence
  Description of Artificial Sequence: Synthetic oligonucleotide
  Sense strand starting at position 1042 of SEQ ID NO: 1245093
auguuucagcgguaaagaa

SEQ ID NO: 1535747 - RNA, 19 nt, Artificial Sequence
  Description of Artificial Sequence: Synthetic oligonucleotide
  Antisense strand to SEQ ID NO: 1535746
uucuuuaccgcugaaacau

SEQ ID NO: 1535748 - RNA, 19 nt, Artificial Sequence
  Description of Artificial Sequence: Synthetic oligonucleotide
  Sense strand starting at position 1419 of SEQ ID NO: 1245093
uccagaagucgcucgcuaa

SEQ ID NO: 1535749 - RNA, 19 nt, Artificial Sequence
  Description of Artificial Sequence: Synthetic oligonucleotide
  Antisense strand to SEQ ID NO: 1535748
uuagcgagcgacuucugga

SEQ ID NO: 1535750 - RNA, 19 nt, Artificial Sequence
  Description of Artificial Sequence: Synthetic oligonucleotide
  Sense strand starting at position 2631 of SEQ ID NO: 1245093
uguguucguacguucuaga

SEQ ID NO: 1535751 - RNA, 19 nt, Artificial Sequence
  Description of Artificial Sequence: Synthetic oligonucleotide
  Antisense strand to SEQ ID NO: 1535750
ucuagaacguacgaacaca

SEQ ID NO: 1535752 - RNA, 19 nt, Artificial Sequence
  Description of Artificial Sequence: Synthetic oligonucleotide
  Sense strand starting at position 2632 of SEQ ID NO: 1245093
guguucguacguucuagau

SEQ ID NO: 1535753 - RNA, 19 nt, Artificial Sequence
  Description of Artificial Sequence: Synthetic oligonucleotide
  Antisense strand to SEQ ID NO: 1535752
aucuagaacguacgaacac

SEQ ID NO: 1535754 - RNA, 19 nt, Artificial Sequence
  Description of Artificial Sequence: Synthetic oligonucleotide
  Sense strand starting at position 2693 of SEQ ID NO: 1245093
uagaaagucuuucuacgac

SEQ ID NO: 1535755 - RNA, 19 nt, Artificial Sequence
  Description of Artificial Sequence: Synthetic oligonucleotide
  Antisense strand to SEQ ID NO: 1535754
gucguagaaagacuuucua

SEQ ID NO: 1535756 - RNA, 19 nt, Artificial Sequence
  Description of Artificial Sequence: Synthetic oligonucleotide
  Sense strand starting at position 2746 of SEQ ID NO: 1245093
cguuguuaaccggagaacu

SEQ ID NO: 1535757 - RNA, 19 nt, Artificial Sequence
  Description of Artificial Sequence: Synthetic oligonucleotide
  Antisense strand to SEQ ID NO: 1535756
aguucuccgguuaacaacg

SEQ ID NO: 1535758 - RNA, 19 nt, Artificial Sequence
  Description of Artificial Sequence: Synthetic oligonucleotide
  Sense strand starting at position 2748 of SEQ ID NO: 1245093
uuguuaaccggagaacuac

SEQ ID NO: 1535759 - RNA, 19 nt, Artificial Sequence
  Description of Artificial Sequence: Synthetic oligonucleotide
  Antisense strand to SEQ ID NO: 1535758
guaguucuccgguuaacaa

SEQ ID NO: 1535760 - RNA, 19 nt, Artificial Sequence
  Description of Artificial Sequence: Synthetic oligonucleotide
  Sense strand starting at position 2899 of SEQ ID NO: 1245093
uuuacacuguaguuggaaa

SEQ ID NO: 1535761 - RNA, 19 nt, Artificial Sequence
  Description of Artificial Sequence: Synthetic oligonucleotide
  Antisense strand to SEQ ID NO: 1535760
uuuccaacuacaguguaaa

SEQ ID NO: 1535762 - RNA, 19 nt, Artificial Sequence
  Description of Artificial Sequence: Synthetic oligonucleotide
  Sense strand starting at position 2906 of SEQ ID NO: 1245093
uguaguuggaaacauguaa

SEQ ID NO: 1535763 - RNA, 19 nt, Artificial Sequence
  Description of Artificial Sequence: Synthetic oligonucleotide
  Antisense strand to SEQ ID NO: 1535762
uuacauguuuccaacuaca

SEQ ID NO: 1535764 - RNA, 19 nt, Artificial Sequence
  Description of Artificial Sequence: Synthetic oligonucleotide
  Sense strand starting at position 2949 of SEQ ID NO: 1245093
agaagcuugaaaggguaua

SEQ ID NO: 1535765 - RNA, 19 nt, Artificial Sequence
  Description of Artificial Sequence: Synthetic oligonucleotide
  Antisense strand to SEQ ID NO: 1535764
uauacccuuucaagcuucu

SEQ ID NO: 1535766 - RNA, 19 nt, Artificial Sequence
  Description of Artificial Sequence: Synthetic oligonucleotide
  Sense strand starting at position 2995 of SEQ ID NO: 1245093
agggacagauggcuuguua

SEQ ID NO: 1535767 - RNA, 19 nt, Artificial Sequence
  Description of Artificial Sequence: Synthetic oligonucleotide
  Antisense strand to SEQ ID NO: 1535766
uaacaagccaucugucccu

SEQ ID NO: 1535768 - RNA, 19 nt, Artificial Sequence
  Description of Artificial Sequence: Synthetic oligonucleotide
  Sense strand starting at position 2999 of SEQ ID NO: 1245093
acagauggcuuguuaagaa

SEQ ID NO: 1535769 - RNA, 19 nt, Artificial Sequence
  Description of Artificial Sequence: Synthetic oligonucleotide
  Antisense strand to SEQ ID NO: 1535768
uucuuaacaagccaucugu

SEQ ID NO: 1535770 - RNA, 19 nt, Artificial Sequence
  Description of Artificial Sequence: Synthetic oligonucleotide
  Sense strand starting at position 3220 of SEQ ID NO: 1245093
acuguuuggagugguauaa

SEQ ID NO: 1535771 - RNA, 19 nt, Artificial Sequence
  Description of Artificial Sequence: Synthetic oligonucleotide
  Antisense strand to SEQ ID NO: 1535770
uuauaccacuccaaacagu

SEQ ID NO: 1535772 - RNA, 19 nt, Artificial Sequence
  Description of Artificial Sequence: Synthetic oligonucleotide
  Sense strand starting at position 3231 of SEQ ID NO: 1245093
ugguauaaggcuggagaga

SEQ ID NO: 1535773 - RNA, 19 nt, Artificial Sequence
  Description of Artificial Sequence: Synthetic oligonucleotide
  Antisense strand to SEQ ID NO: 1535772
ucucuccagccuuauacca

SEQ ID NO: 1535774 - RNA, 19 nt, Artificial Sequence
  Description of Artificial Sequence: Synthetic oligonucleotide
  Sense strand starting at position 3347 of SEQ ID NO: 1245093
agauguguaaggugaagaa

SEQ ID NO: 1535775 - RNA, 19 nt, Artificial Sequence
  Description of Artificial Sequence: Synthetic oligonucleotide
  Antisense strand to SEQ ID NO: 1535774
uucuucaccuuacacaucu

SEQ ID NO: 1535776 - RNA, 19 nt, Artificial Sequence
  Description of Artificial Sequence: Synthetic oligonucleotide
  Sense strand starting at position 3363 of SEQ ID NO: 1245093
gaaaguguauguuuggauu

SEQ ID NO: 1535777 - RNA, 19 nt, Artificial Sequence
  Description of Artificial Sequence: Synthetic oligonucleotide
  Antisense strand to SEQ ID NO: 1535776
aauccaaacauacacuuuc

SEQ ID NO: 1535778 - RNA, 19 nt, Artificial Sequence
  Description of Artificial Sequence: Synthetic oligonucleotide
  Sense strand starting at position 3413 of SEQ ID NO: 1245093
aacaguuaccagugaagug

SEQ ID NO: 1535779 - RNA, 19 nt, Artificial Sequence
  Description of Artificial Sequence: Synthetic oligonucleotide
  Antisense strand to SEQ ID NO: 1535778
cacuucacugguaacuguu

SEQ ID NO: 1535780 - RNA, 19 nt, Artificial Sequence
  Description of Artificial Sequence: Synthetic oligonucleotide
  Sense strand starting at position 3418 of SEQ ID NO: 1245093
uuaccagugaaguggugaa

SEQ ID NO: 1535781 - RNA, 19 nt, Artificial Sequence
  Description of Artificial Sequence: Synthetic oligonucleotide
  Antisense strand to SEQ ID NO: 1535780
uucaccacuucacugguaa

SEQ ID NO: 1535782 - RNA, 19 nt, Artificial Sequence
  Description of Artificial Sequence: Synthetic oligonucleotide
  Sense strand starting at position 3446 of SEQ ID NO: 1245093
cauauuggaguggguugaa

SEQ ID NO: 1535783 - RNA, 19 nt, Artificial Sequence
  Description of Artificial Sequence: Synthetic oligonucleotide
  Antisense strand to SEQ ID NO: 1535782
uucaacccacuccaauaug

SEQ ID NO: 1535784 - RNA, 19 nt, Artificial Sequence
  Description of Artificial Sequence: Synthetic oligonucleotide
  Sense strand starting at position 3449 of SEQ ID NO: 1245093
auuggaguggguugaauga

SEQ ID NO: 1535785 - RNA, 19 nt, Artificial Sequence
  Description of Artificial Sequence: Synthetic oligonucleotide
  Antisense strand to SEQ ID NO: 1535784
ucauucaacccacuccaau

SEQ ID NO: 1535786 - RNA, 19 nt, Artificial Sequence
  Description of Artificial Sequence: Synthetic oligonucleotide
  Sense strand starting at position 3451 of SEQ ID NO: 1245093
uggaguggguugaaugaau

SEQ ID NO: 1535787 - RNA, 19 nt, Artificial Sequence
  Description of Artificial Sequence: Synthetic oligonucleotide
  Antisense strand to SEQ ID NO: 1535786
auucauucaacccacucca

SEQ ID NO: 1535788 - RNA, 19 nt, Artificial Sequence
  Description of Artificial Sequence: Synthetic oligonucleotide
  Sense strand starting at position 3487 of SEQ ID NO: 1245093
agauuuggguuguauaaua

SEQ ID NO: 1535789 - RNA, 19 nt, Artificial Sequence
  Description of Artificial Sequence: Synthetic oligonucleotide
  Antisense strand to SEQ ID NO: 1535788
uauuauacaacccaaaucu

SEQ ID NO: 1535790 - RNA, 19 nt, Artificial Sequence
  Description of Artificial Sequence: Synthetic oligonucleotide
  Sense strand starting at position 3832 of SEQ ID NO: 1245093
gagauaaaguuucugcuua

SEQ ID NO: 1535791 - RNA, 19 nt, Artificial Sequence
  Description of Artificial Sequence: Synthetic oligonucleotide
  Antisense strand to SEQ ID NO: 1535790
uaagcagaaacuuuaucuc

SEQ ID NO: 1535792 - RNA, 19 nt, Artificial Sequence
  Description of Artificial Sequence: Synthetic oligonucleotide
  Sense strand starting at position 3834 of SEQ ID NO: 1245093
gauaaaguuucugcuuaug

SEQ ID NO: 1535793 - RNA, 19 nt, Artificial Sequence
  Description of Artificial Sequence: Synthetic oligonucleotide
  Antisense strand to SEQ ID NO: 1535792
cauaagcagaaacuuuauc

SEQ ID NO: 1535794 - RNA, 19 nt, Artificial Sequence
  Description of Artificial Sequence: Synthetic oligonucleotide
  Sense strand starting at position 3857 of SEQ ID NO: 1245093
cguggacgacuuggagaau

SEQ ID NO: 1535795 - RNA, 19 nt, Artificial Sequence
  Description of Artificial Sequence: Synthetic oligonucleotide
  Antisense strand to SEQ ID NO: 1535794
auucuccaagucguccacg

SEQ ID NO: 1535796 - RNA, 19 nt, Artificial Sequence
  Description of Artificial Sequence: Synthetic oligonucleotide
  Sense strand starting at position 3895 of SEQ ID NO: 1245093
aagaaaugagguugcaguu

SEQ ID NO: 1535797 - RNA, 19 nt, Artificial Sequence
  Description of Artificial Sequence: Synthetic oligonucleotide
  Antisense strand to SEQ ID NO: 1535796
aacugcaaccucauuucuu

SEQ ID NO: 1535798 - RNA, 19 nt, Artificial Sequence
  Description of Artificial Sequence: Synthetic oligonucleotide
  Sense strand starting at position 3954 of SEQ ID NO: 1245093
aagauauuagagcauguuu

SEQ ID NO: 1535799 - RNA, 19 nt, Artificial Sequence
  Description of Artificial Sequence: Synthetic oligonucleotide
  Antisense strand to SEQ ID NO: 1535798
aaacaugcucuaauaucuu

SEQ ID NO: 1535800 - RNA, 19 nt, Artificial Sequence
  Description of Artificial Sequence: Synthetic oligonucleotide
  Sense strand starting at position 3956 of SEQ ID NO: 1245093
gauauuagagcauguuuac

SEQ ID NO: 1535801 - RNA, 19 nt, Artificial Sequence
  Description of Artificial Sequence: Synthetic oligonucleotide
  Antisense strand to SEQ ID NO: 1535800
guaaacaugcucuaauauc

SEQ ID NO: 1535802 - RNA, 19 nt, Artificial Sequence
  Description of Artificial Sequence: Synthetic oligonucleotide
  Sense strand starting at position 3965 of SEQ ID NO: 1245093
gcauguuuacgugcugaug

SEQ ID NO: 1535803 - RNA, 19 nt, Artificial Sequence
  Description of Artificial Sequence: Synthetic oligonucleotide
  Antisense strand to SEQ ID NO: 1535802
caucagcacguaaacaugc

SEQ ID NO: 1535804 - RNA, 19 nt, Artificial Sequence
  Description of Artificial Sequence: Synthetic oligonucleotide
  Sense strand starting at position 7 of SEQ ID NO: 1245094
gcuaguacugccgcuuuga

SEQ ID NO: 1535805 - RNA, 19 nt, Artificial Sequence
  Description of Artificial Sequence: Synthetic oligonucleotide
  Antisense strand to SEQ ID NO: 1535804
ucaaagcggcaguacuagc

SEQ ID NO: 1535806 - RNA, 19 nt, Artificial Sequence
  Description of Artificial Sequence: Synthetic oligonucleotide
  Sense strand starting at position 47 of SEQ ID NO: 1245094
gaauuaagcccaggguagu

SEQ ID NO: 1535807 - RNA, 19 nt, Artificial Sequence
  Description of Artificial Sequence: Synthetic oligonucleotide
  Antisense strand to SEQ ID NO: 1535806
acuacccugggcuuaauuc

SEQ ID NO: 1535808 - RNA, 19 nt, Artificial Sequence
  Description of Artificial Sequence: Synthetic oligonucleotide
  Sense strand starting at position 120 of SEQ ID NO: 1245094
agugaaauguucccagaau

SEQ ID NO: 1535809 - RNA, 19 nt, Artificial Sequence
  Description of Artificial Sequence: Synthetic oligonucleotide
  Antisense strand to SEQ ID NO: 1535808
auucugggaacauuucacu

SEQ ID NO: 1535810 - RNA, 19 nt, Artificial Sequence
  Description of Artificial Sequence: Synthetic oligonucleotide
  Sense strand starting at position 129 of SEQ ID NO: 1245094
uucccagaauuugagcauu

SEQ ID NO: 1535811 - RNA, 19 nt, Artificial Sequence
  Description of Artificial Sequence: Synthetic oligonucleotide
  Antisense strand to SEQ ID NO: 1535810
aaugcucaaauucugggaa

SEQ ID NO: 1535812 - RNA, 19 nt, Artificial Sequence
  Description of Artificial Sequence: Synthetic oligonucleotide
  Sense strand starting at position 171 of SEQ ID NO: 1245094
ggauuuaauuuagguuuag

SEQ ID NO: 1535813 - RNA, 19 nt, Artificial Sequence
  Description of Artificial Sequence: Synthetic oligonucleotide
  Antisense strand to SEQ ID NO: 1535812
cuaaaccuaaauuaaaucc

SEQ ID NO: 1535814 - RNA, 19 nt, Artificial Sequence
  Description of Artificial Sequence: Synthetic oligonucleotide
  Sense strand starting at position 314 of SEQ ID NO: 1245094
ucagauuuguagcuaugca

SEQ ID NO: 1535815 - RNA, 19 nt, Artificial Sequence
  Description of Artificial Sequence: Synthetic oligonucleotide
  Antisense strand to SEQ ID NO: 1535814
ugcauagcuacaaaucuga

SEQ ID NO: 1535816 - RNA, 19 nt, Artificial Sequence
  Description of Artificial Sequence: Synthetic oligonucleotide
  Sense strand starting at position 525 of SEQ ID NO: 1245094
aaggauuagcagggagagu

SEQ ID NO: 1535817 - RNA, 19 nt, Artificial Sequence
  Description of Artificial Sequence: Synthetic oligonucleotide
  Antisense strand to SEQ ID NO: 1535816
acucucccugcuaauccuu

SEQ ID NO: 1535818 - RNA, 19 nt, Artificial Sequence
  Description of Artificial Sequence: Synthetic oligonucleotide
  Sense strand starting at position 534 of SEQ ID NO: 1245094
cagggagagugucucauaa

SEQ ID NO: 1535819 - RNA, 19 nt, Artificial Sequence
  Description of Artificial Sequence: Synthetic oligonucleotide
  Antisense strand to SEQ ID NO: 1535818
uuaugagacacucucccug

SEQ ID NO: 1535820 - RNA, 19 nt, Artificial Sequence
  Description of Artificial Sequence: Synthetic oligonucleotide
  Sense strand starting at position 560 of SEQ ID NO: 1245094
guaauaagaugacuaaggu

SEQ ID NO: 1535821 - RNA, 19 nt, Artificial Sequence
  Description of Artificial Sequence: Synthetic oligonucleotide
  Antisense strand to SEQ ID NO: 1535820
accuuagucaucuuauuac

SEQ ID NO: 1535822 - RNA, 19 nt, Artificial Sequence
  Description of Artificial Sequence: Synthetic oligonucleotide
  Sense strand starting at position 575 of SEQ ID NO: 1245094
agguuauaauaguccaaua

SEQ ID NO: 1535823 - RNA, 19 nt, Artificial Sequence
  Description of Artificial Sequence: Synthetic oligonucleotide
  Antisense strand to SEQ ID NO: 1535822
uauuggacuauuauaaccu

SEQ ID NO: 1535824 - RNA, 19 nt, Artificial Sequence
  Description of Artificial Sequence: Synthetic oligonucleotide
  Sense strand starting at position 742 of SEQ ID NO: 1245094
cuuugcuugggccaguauu

SEQ ID NO: 1535825 - RNA, 19 nt, Artificial Sequence
  Description of Artificial Sequence: Synthetic oligonucleotide
  Antisense strand to SEQ ID NO: 1535824
aauacuggcccaagcaaag

SEQ ID NO: 1535826 - RNA, 19 nt, Artificial Sequence
  Description of Artificial Sequence: Synthetic oligonucleotide
  Sense strand starting at position 840 of SEQ ID NO: 1245094
aagaaucauuugcagguau

SEQ ID NO: 1535827 - RNA, 19 nt, Artificial Sequence
  Description of Artificial Sequence: Synthetic oligonucleotide
  Antisense strand to SEQ ID NO: 1535826
auaccugcaaaugauucuu

SEQ ID NO: 1535828 - RNA, 19 nt, Artificial Sequence
  Description of Artificial Sequence: Synthetic oligonucleotide
  Sense strand starting at position 2125 of SEQ ID NO: 1245094
cgggaucuugcuuaggcga

SEQ ID NO: 1535829 - RNA, 19 nt, Artificial Sequence
  Description of Artificial Sequence: Synthetic oligonucleotide
  Antisense strand to SEQ ID NO: 1535828
ucgccuaagcaagaucccg

SEQ ID NO: 1535830 - RNA, 19 nt, Artificial Sequence
  Description of Artificial Sequence: Synthetic oligonucleotide
  Sense strand starting at position 2128 of SEQ ID NO: 1245094
gaucuugcuuaggcgagaa

SEQ ID NO: 1535831 - RNA, 19 nt, Artificial Sequence
  Description of Artificial Sequence: Synthetic oligonucleotide
  Antisense strand to SEQ ID NO: 1535830
uucucgccuaagcaagauc

SEQ ID NO: 1535832 - RNA, 19 nt, Artificial Sequence
  Description of Artificial Sequence: Synthetic oligonucleotide
  Sense strand starting at position 2170 of SEQ ID NO: 1245094
accgguuuccacgaguuga

SEQ ID NO: 1535833 - RNA, 19 nt, Artificial Sequence
  Description of Artificial Sequence: Synthetic oligonucleotide
  Antisense strand to SEQ ID NO: 1535832
ucaacucguggaaaccggu

SEQ ID NO: 1535834 - RNA, 19 nt, Artificial Sequence
  Description of Artificial Sequence: Synthetic oligonucleotide
  Sense strand starting at position 2221 of SEQ ID NO: 1245094
aguugucuucuguaaucca

SEQ ID NO: 1535835 - RNA, 19 nt, Artificial Sequence
  Description of Artificial Sequence: Synthetic oligonucleotide
  Antisense strand to SEQ ID NO: 1535834
uggauuacagaagacaacu

SEQ ID NO: 1535836 - RNA, 19 nt, Artificial Sequence
  Description of Artificial Sequence: Synthetic oligonucleotide
  Sense strand starting at position 2251 of SEQ ID NO: 1245094
aguucuuuccaagauaugu

SEQ ID NO: 1535837 - RNA, 19 nt, Artificial Sequence
  Description of Artificial Sequence: Synthetic oligonucleotide
  Antisense strand to SEQ ID NO: 1535836
acauaucuuggaaagaacu

SEQ ID NO: 1535838 - RNA, 19 nt, Artificial Sequence
  Description of Artificial Sequence: Synthetic oligonucleotide
  Sense strand starting at position 2676 of SEQ ID NO: 1245094
acagguccuaaggguaaau

SEQ ID NO: 1535839 - RNA, 19 nt, Artificial Sequence
  Description of Artificial Sequence: Synthetic oligonucleotide
  Antisense strand to SEQ ID NO: 1535838
auuuacccuuaggaccugu

SEQ ID NO: 1535840 - RNA, 19 nt, Artificial Sequence
  Description of Artificial Sequence: Synthetic oligonucleotide
  Sense strand starting at position 2686 of SEQ ID NO: 1245094
aggguaaauuuaggauaau

SEQ ID NO: 1535841 - RNA, 19 nt, Artificial Sequence
  Description of Artificial Sequence: Synthetic oligonucleotide
  Antisense strand to SEQ ID NO: 1535840
auuauccuaaauuuacccu

SEQ ID NO: 1535842 - RNA, 19 nt, Artificial Sequence
  Description of Artificial Sequence: Synthetic oligonucleotide
  Sense strand starting at position 2687 of SEQ ID NO: 1245094
ggguaaauuuaggauaauc

SEQ ID NO: 1535843 - RNA, 19 nt, Artificial Sequence
  Description of Artificial Sequence: Synthetic oligonucleotide
  Antisense strand to SEQ ID NO: 1535842
gauuauccuaaauuuaccc

SEQ ID NO: 1535844 - RNA, 19 nt, Artificial Sequence
  Description of Artificial Sequence: Synthetic oligonucleotide
  Sense strand starting at position 2699 of SEQ ID NO: 1245094
gauaaucaagauugagugu

SEQ ID NO: 1535845 - RNA, 19 nt, Artificial Sequence
  Description of Artificial Sequence: Synthetic oligonucleotide
  Antisense strand to SEQ ID NO: 1535844
acacucaaucuugauuauc

SEQ ID NO: 1535846 - RNA, 19 nt, Artificial Sequence
  Description of Artificial Sequence: Synthetic oligonucleotide
  Sense strand starting at position 2702 of SEQ ID NO: 1245094
aaucaagauugagugugau

SEQ ID NO: 1535847 - RNA, 19 nt, Artificial Sequence
  Description of Artificial Sequence: Synthetic oligonucleotide
  Antisense strand to SEQ ID NO: 1535846
aucacacucaaucuugauu

SEQ ID NO: 1535848 - RNA, 19 nt, Artificial Sequence
  Description of Artificial Sequence: Synthetic oligonucleotide
  Sense strand starting at position 2705 of SEQ ID NO: 1245094
caagauugagugugaucac

SEQ ID NO: 1535849 - RNA, 19 nt, Artificial Sequence
  Description of Artificial Sequence: Synthetic oligonucleotide
  Antisense strand to SEQ ID NO: 1535848
gugaucacacucaaucuug

SEQ ID NO: 1535850 - RNA, 19 nt, Artificial Sequence
  Description of Artificial Sequence: Synthetic oligonucleotide
  Sense strand starting at position 2714 of SEQ ID NO: 1245094
gugugaucacuugacauuc

SEQ ID NO: 1535851 - RNA, 19 nt, Artificial Sequence
  Description of Artificial Sequence: Synthetic oligonucleotide
  Antisense strand to SEQ ID NO: 1535850
gaaugucaagugaucacac

SEQ ID NO: 1535852 - RNA, 19 nt, Artificial Sequence
  Description of Artificial Sequence: Synthetic oligonucleotide
  Sense strand starting at position 2838 of SEQ ID NO: 1245094
guagaaguuugucuccuga

SEQ ID NO: 1535853 - RNA, 19 nt, Artificial Sequence
  Description of Artificial Sequence: Synthetic oligonucleotide
  Antisense strand to SEQ ID NO: 1535852
ucaggagacaaacuucuac

SEQ ID NO: 1535854 - RNA, 19 nt, Artificial Sequence
  Description of Artificial Sequence: Synthetic oligonucleotide
  Sense strand starting at position 2884 of SEQ ID NO: 1245094
ucuggcauguucucaaaua

SEQ ID NO: 1535855 - RNA, 19 nt, Artificial Sequence
  Description of Artificial Sequence: Synthetic oligonucleotide
  Antisense strand to SEQ ID NO: 1535854
uauuugagaacaugccaga

SEQ ID NO: 1535856 - RNA, 19 nt, Artificial Sequence
  Description of Artificial Sequence: Synthetic oligonucleotide
  Sense strand starting at position 3108 of SEQ ID NO: 1245094
caaucagagcugugcugaa

SEQ ID NO: 1535857 - RNA, 19 nt, Artificial Sequence
  Description of Artificial Sequence: Synthetic oligonucleotide
  Antisense strand to SEQ ID NO: 1535856
uucagcacagcucugauug

SEQ ID NO: 1535858 - RNA, 19 nt, Artificial Sequence
  Description of Artificial Sequence: Synthetic oligonucleotide
  Sense strand starting at position 3285 of SEQ ID NO: 1245094
caaggaauugccuguagaa

SEQ ID NO: 1535859 - RNA, 19 nt, Artificial Sequence
  Description of Artificial Sequence: Synthetic oligonucleotide
  Antisense strand to SEQ ID NO: 1535858
uucuacaggcaauuccuug

SEQ ID NO: 1535860 - RNA, 19 nt, Artificial Sequence
  Description of Artificial Sequence: Synthetic oligonucleotide
  Sense strand starting at position 3287 of SEQ ID NO: 1245094
aggaauugccuguagaauu

SEQ ID NO: 1535861 - RNA, 19 nt, Artificial Sequence
  Description of Artificial Sequence: Synthetic oligonucleotide
  Antisense strand to SEQ ID NO: 1535860
aauucuacaggcaauuccu

SEQ ID NO: 1535862 - RNA, 19 nt, Artificial Sequence
  Description of Artificial Sequence: Synthetic oligonucleotide
  Sense strand starting at position 3298 of SEQ ID NO: 1245094
guagaauuacuuugcauuc

SEQ ID NO: 1535863 - RNA, 19 nt, Artificial Sequence
  Description of Artificial Sequence: Synthetic oligonucleotide
  Antisense strand to SEQ ID NO: 1535862
gaaugcaaaguaauucuac

SEQ ID NO: 1535864 - RNA, 19 nt, Artificial Sequence
  Description of Artificial Sequence: Synthetic oligonucleotide
  Sense strand starting at position 3423 of SEQ ID NO: 1245094
guaaccuaugaagguuaca

SEQ ID NO: 1535865 - RNA, 19 nt, Artificial Sequence
  Description of Artificial Sequence: Synthetic oligonucleotide
  Antisense strand to SEQ ID NO: 1535864
uguaaccuucauagguuac

SEQ ID NO: 1535866 - RNA, 19 nt, Artificial Sequence
  Description of Artificial Sequence: Synthetic oligonucleotide
  Sense strand starting at position 3452 of SEQ ID NO: 1245094
cuuugaagaguuuguguua

SEQ ID NO: 1535867 - RNA, 19 nt, Artificial Sequence
  Description of Artificial Sequence: Synthetic oligonucleotide
  Antisense strand to SEQ ID NO: 1535866
uaacacaaacucuucaaag

SEQ ID NO: 1535868 - RNA, 19 nt, Artificial Sequence
  Description of Artificial Sequence: Synthetic oligonucleotide
  Sense strand starting at position 3453 of SEQ ID NO: 1245094
uuugaagaguuuguguuaa

SEQ ID NO: 1535869 - RNA, 19 nt, Artificial Sequence
  Description of Artificial Sequence: Synthetic oligonucleotide
  Antisense strand to SEQ ID NO: 1535868
uuaacacaaacucuucaaa

SEQ ID NO: 1535870 - RNA, 19 nt, Artificial Sequence
  Description of Artificial Sequence: Synthetic oligonucleotide
  Sense strand starting at position 3455 of SEQ ID NO: 1245094
ugaagaguuuguguuaaag

SEQ ID NO: 1535871 - RNA, 19 nt, Artificial Sequence
  Description of Artificial Sequence: Synthetic oligonucleotide
  Antisense strand to SEQ ID NO: 1535870
cuuuaacacaaacucuuca

SEQ ID NO: 1535872 - RNA, 19 nt, Artificial Sequence
  Description of Artificial Sequence: Synthetic oligonucleotide
  Sense strand starting at position 3659 of SEQ ID NO: 1245094
gaguaugaggcacgggaau

SEQ ID NO: 1535873 - RNA, 19 nt, Artificial Sequence
  Description of Artificial Sequence: Synthetic oligonucleotide
  Antisense strand to SEQ ID NO: 1535872
auucccgugccucauacuc

SEQ ID NO: 1535874 - RNA, 19 nt, Artificial Sequence
  Description of Artificial Sequence: Synthetic oligonucleotide
  Sense strand starting at position 3807 of SEQ ID NO: 1245094
cacaguagguagguuaaua

SEQ ID NO: 1535875 - RNA, 19 nt, Artificial Sequence
  Description of Artificial Sequence: Synthetic oligonucleotide
  Antisense strand to SEQ ID NO: 1535874
uauuaaccuaccuacugug

SEQ ID NO: 1535876 - RNA, 19 nt, Artificial Sequence
  Description of Artificial Sequence: Synthetic oligonucleotide
  Sense strand starting at position 3849 of SEQ ID NO: 1245094
acaauuaagguugguccua

SEQ ID NO: 1535877 - RNA, 19 nt, Artificial Sequence
  Description of Artificial Sequence: Synthetic oligonucleotide
  Antisense strand to SEQ ID NO: 1535876
uaggaccaaccuuaauugu

SEQ ID NO: 1535878 - RNA, 19 nt, Artificial Sequence
  Description of Artificial Sequence: Synthetic oligonucleotide
  Sense strand starting at position 3850 of SEQ ID NO: 1245094
caauuaagguugguccuaa

SEQ ID NO: 1535879 - RNA, 19 nt, Artificial Sequence
  Description of Artificial Sequence: Synthetic oligonucleotide
  Antisense strand to SEQ ID NO: 1535878
uuaggaccaaccuuaauug

SEQ ID NO: 1535880 - RNA, 19 nt, Artificial Sequence
  Description of Artificial Sequence: Synthetic oligonucleotide
  Sense strand starting at position 3851 of SEQ ID NO: 1245094
aauuaagguugguccuaaa

SEQ ID NO: 1535881 - RNA, 19 nt, Artificial Sequence
  Description of Artificial Sequence: Synthetic oligonucleotide
  Antisense strand to SEQ ID NO: 1535880
uuuaggaccaaccuuaauu

SEQ ID NO: 1535882 - RNA, 19 nt, Artificial Sequence
  Description of Artificial Sequence: Synthetic oligonucleotide
  Sense strand starting at position 3954 of SEQ ID NO: 1245094
gucagauauuguuuacaug

SEQ ID NO: 1535883 - RNA, 19 nt, Artificial Sequence
  Description of Artificial Sequence: Synthetic oligonucleotide
  Antisense strand to SEQ ID NO: 1535882
cauguaaacaauaucugac

SEQ ID NO: 1535884 - RNA, 19 nt, Artificial Sequence
  Description of Artificial Sequence: Synthetic oligonucleotide
  Sense strand starting at position 219 of SEQ ID NO: 1245095
ucuucuuaggugcaaagua

SEQ ID NO: 1535885 - RNA, 19 nt, Artificial Sequence
  Description of Artificial Sequence: Synthetic oligonucleotide
  Antisense strand to SEQ ID NO: 1535884
uacuuugcaccuaagaaga

SEQ ID NO: 1535886 - RNA, 19 nt, Artificial Sequence
  Description of Artificial Sequence: Synthetic oligonucleotide
  Sense strand starting at position 290 of SEQ ID NO: 1245095
auugguucccaacacaagu

SEQ ID NO: 1535887 - RNA, 19 nt, Artificial Sequence
  Description of Artificial Sequence: Synthetic oligonucleotide
  Antisense strand to SEQ ID NO: 1535886
acuuguguugggaaccaau

SEQ ID NO: 1535888 - RNA, 19 nt, Artificial Sequence
  Description of Artificial Sequence: Synthetic oligonucleotide
  Sense strand starting at position 383 of SEQ ID NO: 1245095
caugaaguguguuuauaau

SEQ ID NO: 1535889 - RNA, 19 nt, Artificial Sequence
  Description of Artificial Sequence: Synthetic oligonucleotide
  Antisense strand to SEQ ID NO: 1535888
auuauaaacacacuucaug

SEQ ID NO: 1535890 - RNA, 19 nt, Artificial Sequence
  Description of Artificial Sequence: Synthetic oligonucleotide
  Sense strand starting at position 491 of SEQ ID NO: 1245095
aggucuauagguugacuga

SEQ ID NO: 1535891 - RNA, 19 nt, Artificial Sequence
  Description of Artificial Sequence: Synthetic oligonucleotide
  Antisense strand to SEQ ID NO: 1535890
ucagucaaccuauagaccu

SEQ ID NO: 1535892 - RNA, 19 nt, Artificial Sequence
  Description of Artificial Sequence: Synthetic oligonucleotide
  Sense strand starting at position 492 of SEQ ID NO: 1245095
ggucuauagguugacugaa

SEQ ID NO: 1535893 - RNA, 19 nt, Artificial Sequence
  Description of Artificial Sequence: Synthetic oligonucleotide
  Antisense strand to SEQ ID NO: 1535892
uucagucaaccuauagacc

SEQ ID NO: 1535894 - RNA, 19 nt, Artificial Sequence
  Description of Artificial Sequence: Synthetic oligonucleotide
  Sense strand starting at position 494 of SEQ ID NO: 1245095
ucuauagguugacugaagu

SEQ ID NO: 1535895 - RNA, 19 nt, Artificial Sequence
  Description of Artificial Sequence: Synthetic oligonucleotide
  Antisense strand to SEQ ID NO: 1535894
acuucagucaaccuauaga

SEQ ID NO: 1535896 - RNA, 19 nt, Artificial Sequence
  Description of Artificial Sequence: Synthetic oligonucleotide
  Sense strand starting at position 521 of SEQ ID NO: 1245095
ugcacuguggagcauaaua

SEQ ID NO: 1535897 - RNA, 19 nt, Artificial Sequence
  Description of Artificial Sequence: Synthetic oligonucleotide
  Antisense strand to SEQ ID NO: 1535896
uauuaugcuccacagugca

SEQ ID NO: 1535898 - RNA, 19 nt, Artificial Sequence
  Description of Artificial Sequence: Synthetic oligonucleotide
  Sense strand starting at position 647 of SEQ ID NO: 1245095
uugcaauuggauuacaagu

SEQ ID NO: 1535899 - RNA, 19 nt, Artificial Sequence
  Description of Artificial Sequence: Synthetic oligonucleotide
  Antisense strand to SEQ ID NO: 1535898
acuuguaauccaauugcaa

SEQ ID NO: 1535900 - RNA, 19 nt, Artificial Sequence
  Description of Artificial Sequence: Synthetic oligonucleotide
  Sense strand starting at position 840 of SEQ ID NO: 1245095
aauuaccuucgagguaaug

SEQ ID NO: 1535901 - RNA, 19 nt, Artificial Sequence
  Description of Artificial Sequence: Synthetic oligonucleotide
  Antisense strand to SEQ ID NO: 1535900
cauuaccucgaagguaauu

SEQ ID NO: 1535902 - RNA, 19 nt, Artificial Sequence
  Description of Artificial Sequence: Synthetic oligonucleotide
  Sense strand starting at position 842 of SEQ ID NO: 1245095
uuaccuucgagguaaugaa

SEQ ID NO: 1535903 - RNA, 19 nt, Artificial Sequence
  Description of Artificial Sequence: Synthetic oligonucleotide
  Antisense strand to SEQ ID NO: 1535902
uucauuaccucgaagguaa

SEQ ID NO: 1535904 - RNA, 19 nt, Artificial Sequence
  Description of Artificial Sequence: Synthetic oligonucleotide
  Sense strand starting at position 991 of SEQ ID NO: 1245095
agggauacuugacuuguau

SEQ ID NO: 1535905 - RNA, 19 nt, Artificial Sequence
  Description of Artificial Sequence: Synthetic oligonucleotide
  Antisense strand to SEQ ID NO: 1535904
auacaagucaaguaucccu

SEQ ID NO: 1535906 - RNA, 19 nt, Artificial Sequence
  Description of Artificial Sequence: Synthetic oligonucleotide
  Sense strand starting at position 1047 of SEQ ID NO: 1245095
guuaaccuuccaggaucau

SEQ ID NO: 1535907 - RNA, 19 nt, Artificial Sequence
  Description of Artificial Sequence: Synthetic oligonucleotide
  Antisense strand to SEQ ID NO: 1535906
augauccuggaagguuaac

SEQ ID NO: 1535908 - RNA, 19 nt, Artificial Sequence
  Description of Artificial Sequence: Synthetic oligonucleotide
  Sense strand starting at position 1193 of SEQ ID NO: 1245095
gaccaauagugucugaggu

SEQ ID NO: 1535909 - RNA, 19 nt, Artificial Sequence
  Description of Artificial Sequence: Synthetic oligonucleotide
  Antisense strand to SEQ ID NO: 1535908
accucagacacuauugguc

SEQ ID NO: 1535910 - RNA, 19 nt, Artificial Sequence
  Description of Artificial Sequence: Synthetic oligonucleotide
  Sense strand starting at position 1194 of SEQ ID NO: 1245095
accaauagugucugagguu

SEQ ID NO: 1535911 - RNA, 19 nt, Artificial Sequence
  Description of Artificial Sequence: Synthetic oligonucleotide
  Antisense strand to SEQ ID NO: 1535910
aaccucagacacuauuggu

SEQ ID NO: 1535912 - RNA, 19 nt, Artificial Sequence
  Description of Artificial Sequence: Synthetic oligonucleotide
  Sense strand starting at position 1312 of SEQ ID NO: 1245095
ggacacuucuguccagcaa

SEQ ID NO: 1535913 - RNA, 19 nt, Artificial Sequence
  Description of Artificial Sequence: Synthetic oligonucleotide
  Antisense strand to SEQ ID NO: 1535912
uugcuggacagaagugucc

SEQ ID NO: 1535914 - RNA, 19 nt, Artificial Sequence
  Description of Artificial Sequence: Synthetic oligonucleotide
  Sense strand starting at position 1329 of SEQ ID NO: 1245095
aaugguuacugguugaguu

SEQ ID NO: 1535915 - RNA, 19 nt, Artificial Sequence
  Description of Artificial Sequence: Synthetic oligonucleotide
  Antisense strand to SEQ ID NO: 1535914
aacucaaccaguaaccauu

SEQ ID NO: 1535916 - RNA, 19 nt, Artificial Sequence
  Description of Artificial Sequence: Synthetic oligonucleotide
  Sense strand starting at position 1531 of SEQ ID NO: 1245095
cggugucuuggagacugaa

SEQ ID NO: 1535917 - RNA, 19 nt, Artificial Sequence
  Description of Artificial Sequence: Synthetic oligonucleotide
  Antisense strand to SEQ ID NO: 1535916
uucagucuccaagacaccg

SEQ ID NO: 1535918 - RNA, 19 nt, Artificial Sequence
  Description of Artificial Sequence: Synthetic oligonucleotide
  Sense strand starting at position 1553 of SEQ ID NO: 1245095
cccuaagaucccuaguggu

SEQ ID NO: 1535919 - RNA, 19 nt, Artificial Sequence
  Description of Artificial Sequence: Synthetic oligonucleotide
  Antisense strand to SEQ ID NO: 1535918
accacuagggaucuuaggg

SEQ ID NO: 1535920 - RNA, 19 nt, Artificial Sequence
  Description of Artificial Sequence: Synthetic oligonucleotide
  Sense strand starting at position 1811 of SEQ ID NO: 1245095
uagggucuggcagacauau

SEQ ID NO: 1535921 - RNA, 19 nt, Artificial Sequence
  Description of Artificial Sequence: Synthetic oligonucleotide
  Antisense strand to SEQ ID NO: 1535920
auaugucugccagacccua

SEQ ID NO: 1535922 - RNA, 19 nt, Artificial Sequence
  Description of Artificial Sequence: Synthetic oligonucleotide
  Sense strand starting at position 1822 of SEQ ID NO: 1245095
agacauauccugugcuuac

SEQ ID NO: 1535923 - RNA, 19 nt, Artificial Sequence
  Description of Artificial Sequence: Synthetic oligonucleotide
  Antisense strand to SEQ ID NO: 1535922
guaagcacaggauaugucu

SEQ ID NO: 1535924 - RNA, 19 nt, Artificial Sequence
  Description of Artificial Sequence: Synthetic oligonucleotide
  Sense strand starting at position 2192 of SEQ ID NO: 1245095
gguucaucagaauggcaga

SEQ ID NO: 1535925 - RNA, 19 nt, Artificial Sequence
  Description of Artificial Sequence: Synthetic oligonucleotide
  Antisense strand to SEQ ID NO: 1535924
ucugccauucugaugaacc

SEQ ID NO: 1535926 - RNA, 19 nt, Artificial Sequence
  Description of Artificial Sequence: Synthetic oligonucleotide
  Sense strand starting at position 2254 of SEQ ID NO: 1245095
ccaguugacuuugcuauuu

SEQ ID NO: 1535927 - RNA, 19 nt, Artificial Sequence
  Description of Artificial Sequence: Synthetic oligonucleotide
  Antisense strand to SEQ ID NO: 1535926
aaauagcaaagucaacugg

SEQ ID NO: 1535928 - RNA, 19 nt, Artificial Sequence
  Description of Artificial Sequence: Synthetic oligonucleotide
  Sense strand starting at position 2336 of SEQ ID NO: 1245095
uugcacuaucuguagguua

SEQ ID NO: 1535929 - RNA, 19 nt, Artificial Sequence
  Description of Artificial Sequence: Synthetic oligonucleotide
  Antisense strand to SEQ ID NO: 1535928
uaaccuacagauagugcaa

SEQ ID NO: 1535930 - RNA, 19 nt, Artificial Sequence
  Description of Artificial Sequence: Synthetic oligonucleotide
  Sense strand starting at position 2341 of SEQ ID NO: 1245095
cuaucuguagguuaaucuu

SEQ ID NO: 1535931 - RNA, 19 nt, Artificial Sequence
  Description of Artificial Sequence: Synthetic oligonucleotide
  Antisense strand to SEQ ID NO: 1535930
aagauuaaccuacagauag

SEQ ID NO: 1535932 - RNA, 19 nt, Artificial Sequence
  Description of Artificial Sequence: Synthetic oligonucleotide
  Sense strand starting at position 2344 of SEQ ID NO: 1245095
ucuguagguuaaucuugau

SEQ ID NO: 1535933 - RNA, 19 nt, Artificial Sequence
  Description of Artificial Sequence: Synthetic oligonucleotide
  Antisense strand to SEQ ID NO: 1535932
aucaagauuaaccuacaga

SEQ ID NO: 1535934 - RNA, 19 nt, Artificial Sequence
  Description of Artificial Sequence: Synthetic oligonucleotide
  Sense strand starting at position 2351 of SEQ ID NO: 1245095
guuaaucuugaugacggua

SEQ ID NO: 1535935 - RNA, 19 nt, Artificial Sequence
  Description of Artificial Sequence: Synthetic oligonucleotide
  Antisense strand to SEQ ID NO: 1535934
uaccgucaucaagauuaac

SEQ ID NO: 1535936 - RNA, 19 nt, Artificial Sequence
  Description of Artificial Sequence: Synthetic oligonucleotide
  Sense strand starting at position 2354 of SEQ ID NO: 1245095
aaucuugaugacgguaaua

SEQ ID NO: 1535937 - RNA, 19 nt, Artificial Sequence
  Description of Artificial Sequence: Synthetic oligonucleotide
  Antisense strand to SEQ ID NO: 1535936
uauuaccgucaucaagauu

SEQ ID NO: 1535938 - RNA, 19 nt, Artificial Sequence
  Description of Artificial Sequence: Synthetic oligonucleotide
  Sense strand starting at position 2356 of SEQ ID NO: 1245095
ucuugaugacgguaauaau

SEQ ID NO: 1535939 - RNA, 19 nt, Artificial Sequence
  Description of Artificial Sequence: Synthetic oligonucleotide
  Antisense strand to SEQ ID NO: 1535938
auuauuaccgucaucaaga

SEQ ID NO: 1535940 - RNA, 19 nt, Artificial Sequence
  Description of Artificial Sequence: Synthetic oligonucleotide
  Sense strand starting at position 2394 of SEQ ID NO: 1245095
uguguaguucuuuacaauu

SEQ ID NO: 1535941 - RNA, 19 nt, Artificial Sequence
  Description of Artificial Sequence: Synthetic oligonucleotide
  Antisense strand to SEQ ID NO: 1535940
aauuguaaagaacuacaca

SEQ ID NO: 1535942 - RNA, 19 nt, Artificial Sequence
  Description of Artificial Sequence: Synthetic oligonucleotide
  Sense strand starting at position 2746 of SEQ ID NO: 1245095
aauaucuuacaggguugau

SEQ ID NO: 1535943 - RNA, 19 nt, Artificial Sequence
  Description of Artificial Sequence: Synthetic oligonucleotide
  Antisense strand to SEQ ID NO: 1535942
aucaacccuguaagauauu

SEQ ID NO: 1535944 - RNA, 19 nt, Artificial Sequence
  Description of Artificial Sequence: Synthetic oligonucleotide
  Sense strand starting at position 2749 of SEQ ID NO: 1245095
aucuuacaggguugauaga

SEQ ID NO: 1535945 - RNA, 19 nt, Artificial Sequence
  Description of Artificial Sequence: Synthetic oligonucleotide
  Antisense strand to SEQ ID NO: 1535944
ucuaucaacccuguaagau

SEQ ID NO: 1535946 - RNA, 19 nt, Artificial Sequence
  Description of Artificial Sequence: Synthetic oligonucleotide
  Sense strand starting at position 2887 of SEQ ID NO: 1245095
ccuauuugccauuggcaga

SEQ ID NO: 1535947 - RNA, 19 nt, Artificial Sequence
  Description of Artificial Sequence: Synthetic oligonucleotide
  Antisense strand to SEQ ID NO: 1535946
ucugccaauggcaaauagg

SEQ ID NO: 1535948 - RNA, 19 nt, Artificial Sequence
  Description of Artificial Sequence: Synthetic oligonucleotide
  Sense strand starting at position 2976 of SEQ ID NO: 1245095
ccugguggagcauaauuaa

SEQ ID NO: 1535949 - RNA, 19 nt, Artificial Sequence
  Description of Artificial Sequence: Synthetic oligonucleotide
  Antisense strand to SEQ ID NO: 1535948
uuaauuaugcuccaccagg

SEQ ID NO: 1535950 - RNA, 19 nt, Artificial Sequence
  Description of Artificial Sequence: Synthetic oligonucleotide
  Sense strand starting at position 2988 of SEQ ID NO: 1245095
uaauuaagagucugagggu

SEQ ID NO: 1535951 - RNA, 19 nt, Artificial Sequence
  Description of Artificial Sequence: Synthetic oligonucleotide
  Antisense strand to SEQ ID NO: 1535950
acccucagacucuuaauua

SEQ ID NO: 1535952 - RNA, 19 nt, Artificial Sequence
  Description of Artificial Sequence: Synthetic oligonucleotide
  Sense strand starting at position 3044 of SEQ ID NO: 1245095
aguaacugguuucugagaa

SEQ ID NO: 1535953 - RNA, 19 nt, Artificial Sequence
  Description of Artificial Sequence: Synthetic oligonucleotide
  Antisense strand to SEQ ID NO: 1535952
uucucagaaaccaguuacu

SEQ ID NO: 1535954 - RNA, 19 nt, Artificial Sequence
  Description of Artificial Sequence: Synthetic oligonucleotide
  Sense strand starting at position 3148 of SEQ ID NO: 1245095
ucaagagcaaggugguaau

SEQ ID NO: 1535955 - RNA, 19 nt, Artificial Sequence
  Description of Artificial Sequence: Synthetic oligonucleotide
  Antisense strand to SEQ ID NO: 1535954
auuaccaccuugcucuuga

SEQ ID NO: 1535956 - RNA, 19 nt, Artificial Sequence
  Description of Artificial Sequence: Synthetic oligonucleotide
  Sense strand starting at position 3175 of SEQ ID NO: 1245095
gccaauuaagaaugacacu

SEQ ID NO: 1535957 - RNA, 19 nt, Artificial Sequence
  Description of Artificial Sequence: Synthetic oligonucleotide
  Antisense strand to SEQ ID NO: 1535956
agugucauucuuaauuggc

SEQ ID NO: 1535958 - RNA, 19 nt, Artificial Sequence
  Description of Artificial Sequence: Synthetic oligonucleotide
  Sense strand starting at position 3377 of SEQ ID NO: 1245095
ugugguauguuucuaaaua

SEQ ID NO: 1535959 - RNA, 19 nt, Artificial Sequence
  Description of Artificial Sequence: Synthetic oligonucleotide
  Antisense strand to SEQ ID NO: 1535958
uauuuagaaacauaccaca

SEQ ID NO: 1535960 - RNA, 19 nt, Artificial Sequence
  Description of Artificial Sequence: Synthetic oligonucleotide
  Sense strand starting at position 3528 of SEQ ID NO: 1245095
auuugcauuuacuaagagu

SEQ ID NO: 1535961 - RNA, 19 nt, Artificial Sequence
  Description of Artificial Sequence: Synthetic oligonucleotide
  Antisense strand to SEQ ID NO: 1535960
acucuuaguaaaugcaaau

SEQ ID NO: 1535962 - RNA, 19 nt, Artificial Sequence
  Description of Artificial Sequence: Synthetic oligonucleotide
  Sense strand starting at position 3726 of SEQ ID NO: 1245095
cgaaguacggcuugggaaa

SEQ ID NO: 1535963 - RNA, 19 nt, Artificial Sequence
  Description of Artificial Sequence: Synthetic oligonucleotide
  Antisense strand to SEQ ID NO: 1535962
uuucccaagccguacuucg

SEQ ID NO: 1535964 - RNA, 19 nt, Artificial Sequence
  Description of Artificial Sequence: Synthetic oligonucleotide
  Sense strand starting at position 2190 of SEQ ID NO: 1245096
auucuaacgcauuagucaa

SEQ ID NO: 1535965 - RNA, 19 nt, Artificial Sequence
  Description of Artificial Sequence: Synthetic oligonucleotide
  Antisense strand to SEQ ID NO: 1535964
uugacuaaugcguuagaau

SEQ ID NO: 1535966 - RNA, 19 nt, Artificial Sequence
  Description of Artificial Sequence: Synthetic oligonucleotide
  Sense strand starting at position 2228 of SEQ ID NO: 1245096
ccacgcacuuuccuaguaa

SEQ ID NO: 1535967 - RNA, 19 nt, Artificial Sequence
  Description of Artificial Sequence: Synthetic oligonucleotide
  Antisense strand to SEQ ID NO: 1535966
uuacuaggaaagugcgugg

SEQ ID NO: 1535968 - RNA, 19 nt, Artificial Sequence
  Description of Artificial Sequence: Synthetic oligonucleotide
  Sense strand starting at position 2316 of SEQ ID NO: 1245096
ggcuuuauaaagggugacu

SEQ ID NO: 1535969 - RNA, 19 nt, Artificial Sequence
  Description of Artificial Sequence: Synthetic oligonucleotide
  Antisense strand to SEQ ID NO: 1535968
agucacccuuuauaaagcc

SEQ ID NO: 1535970 - RNA, 19 nt, Artificial Sequence
  Description of Artificial Sequence: Synthetic oligonucleotide
  Sense strand starting at position 2364 of SEQ ID NO: 1245096
cagcuaggucuucgcacua

SEQ ID NO: 1535971 - RNA, 19 nt, Artificial Sequence
  Description of Artificial Sequence: Synthetic oligonucleotide
  Antisense strand to SEQ ID NO: 1535970
uagugcgaagaccuagcug

SEQ ID NO: 1535972 - RNA, 19 nt, Artificial Sequence
  Description of Artificial Sequence: Synthetic oligonucleotide
  Sense strand starting at position 2377 of SEQ ID NO: 1245096
gcacuaacgcuugcuuuau

SEQ ID NO: 1535973 - RNA, 19 nt, Artificial Sequence
  Description of Artificial Sequence: Synthetic oligonucleotide
  Antisense strand to SEQ ID NO: 1535972
auaaagcaagcguuagugc

SEQ ID NO: 1535974 - RNA, 19 nt, Artificial Sequence
  Description of Artificial Sequence: Synthetic oligonucleotide
  Sense strand starting at position 2379 of SEQ ID NO: 1245096
acuaacgcuugcuuuauua

SEQ ID NO: 1535975 - RNA, 19 nt, Artificial Sequence
  Description of Artificial Sequence: Synthetic oligonucleotide
  Antisense strand to SEQ ID NO: 1535974
uaauaaagcaagcguuagu

SEQ ID NO: 1535976 - RNA, 19 nt, Artificial Sequence
  Description of Artificial Sequence: Synthetic oligonucleotide
  Sense strand starting at position 2389 of SEQ ID NO: 1245096
gcuuuauuagcauggguaa

SEQ ID NO: 1535977 - RNA, 19 nt, Artificial Sequence
  Description of Artificial Sequence: Synthetic oligonucleotide
  Antisense strand to SEQ ID NO: 1535976
uuacccaugcuaauaaagc

SEQ ID NO: 1535978 - RNA, 19 nt, Artificial Sequence
  Description of Artificial Sequence: Synthetic oligonucleotide
  Sense strand starting at position 2390 of SEQ ID NO: 1245096
cuuuauuagcauggguaau

SEQ ID NO: 1535979 - RNA, 19 nt, Artificial Sequence
  Description of Artificial Sequence: Synthetic oligonucleotide
  Antisense strand to SEQ ID NO: 1535978
auuacccaugcuaauaaag

SEQ ID NO: 1535980 - RNA, 19 nt, Artificial Sequence
  Description of Artificial Sequence: Synthetic oligonucleotide
  Sense strand starting at position 2485 of SEQ ID NO: 1245096
gucauugacgcgucuccau

SEQ ID NO: 1535981 - RNA, 19 nt, Artificial Sequence
  Description of Artificial Sequence: Synthetic oligonucleotide
  Antisense strand to SEQ ID NO: 1535980
auggagacgcgucaaugac

SEQ ID NO: 1535982 - RNA, 19 nt, Artificial Sequence
  Description of Artificial Sequence: Synthetic oligonucleotide
  Sense strand starting at position 2494 of SEQ ID NO: 1245096
gcgucuccaucuuugacua

SEQ ID NO: 1535983 - RNA, 19 nt, Artificial Sequence
  Description of Artificial Sequence: Synthetic oligonucleotide
  Antisense strand to SEQ ID NO: 1535982
uagucaaagauggagacgc

SEQ ID NO: 1535984 - RNA, 19 nt, Artificial Sequence
  Description of Artificial Sequence: Synthetic oligonucleotide
  Sense strand starting at position 2508 of SEQ ID NO: 1245096
gacuacaauuugugcuaga

SEQ ID NO: 1535985 - RNA, 19 nt, Artificial Sequence
  Description of Artificial Sequence: Synthetic oligonucleotide
  Antisense strand to SEQ ID NO: 1535984
ucuagcacaaauuguaguc

SEQ ID NO: 1535986 - RNA, 19 nt, Artificial Sequence
  Description of Artificial Sequence: Synthetic oligonucleotide
  Sense strand starting at position 2511 of SEQ ID NO: 1245096
uacaauuugugcuagaguu

SEQ ID NO: 1535987 - RNA, 19 nt, Artificial Sequence
  Description of Artificial Sequence: Synthetic oligonucleotide
  Antisense strand to SEQ ID NO: 1535986
aacucuagcacaaauugua

SEQ ID NO: 1535988 - RNA, 19 nt, Artificial Sequence
  Description of Artificial Sequence: Synthetic oligonucleotide
  Sense strand starting at position 2521 of SEQ ID NO: 1245096
gcuagaguucuguaauauc

SEQ ID NO: 1535989 - RNA, 19 nt, Artificial Sequence
  Description of Artificial Sequence: Synthetic oligonucleotide
  Antisense strand to SEQ ID NO: 1535988
gauauuacagaacucuagc

SEQ ID NO: 1535990 - RNA, 19 nt, Artificial Sequence
  Description of Artificial Sequence: Synthetic oligonucleotide
  Sense strand starting at position 2591 of SEQ ID NO: 1245096
uuauacuuugucuggaagu

SEQ ID NO: 1535991 - RNA, 19 nt, Artificial Sequence
  Description of Artificial Sequence: Synthetic oligonucleotide
  Antisense strand to SEQ ID NO: 1535990
acuuccagacaaaguauaa

SEQ ID NO: 1535992 - RNA, 19 nt, Artificial Sequence
  Description of Artificial Sequence: Synthetic oligonucleotide
  Sense strand starting at position 2593 of SEQ ID NO: 1245096
auacuuugucuggaaguuc

SEQ ID NO: 1535993 - RNA, 19 nt, Artificial Sequence
  Description of Artificial Sequence: Synthetic oligonucleotide
  Antisense strand to SEQ ID NO: 1535992
gaacuuccagacaaaguau

SEQ ID NO: 1535994 - RNA, 19 nt, Artificial Sequence
  Description of Artificial Sequence: Synthetic oligonucleotide
  Sense strand starting at position 2621 of SEQ ID NO: 1245096
gugaguugccagcaauuau

SEQ ID NO: 1535995 - RNA, 19 nt, Artificial Sequence
  Description of Artificial Sequence: Synthetic oligonucleotide
  Antisense strand to SEQ ID NO: 1535994
auaauugcuggcaacucac

SEQ ID NO: 1535996 - RNA, 19 nt, Artificial Sequence
  Description of Artificial Sequence: Synthetic oligonucleotide
  Sense strand starting at position 2648 of SEQ ID NO: 1245096
cgucccgugguuuaguaau

SEQ ID NO: 1535997 - RNA, 19 nt, Artificial Sequence
  Description of Artificial Sequence: Synthetic oligonucleotide
  Antisense strand to SEQ ID NO: 1535996
auuacuaaaccacgggacg

SEQ ID NO: 1535998 - RNA, 19 nt, Artificial Sequence
  Description of Artificial Sequence: Synthetic oligonucleotide
  Sense strand starting at position 2650 of SEQ ID NO: 1245096
ucccgugguuuaguaauaa

SEQ ID NO: 1535999 - RNA, 19 nt, Artificial Sequence
  Description of Artificial Sequence: Synthetic oligonucleotide
  Antisense strand to SEQ ID NO: 1535998
uuauuacuaaaccacggga

SEQ ID NO: 1536000 - RNA, 19 nt, Artificial Sequence
  Description of Artificial Sequence: Synthetic oligonucleotide
  Sense strand starting at position 2740 of SEQ ID NO: 1245096
auuuaaguuugacaggcua

SEQ ID NO: 1536001 - RNA, 19 nt, Artificial Sequence
  Description of Artificial Sequence: Synthetic oligonucleotide
  Antisense strand to SEQ ID NO: 1536000
uagccugucaaacuuaaau

SEQ ID NO: 1536002 - RNA, 19 nt, Artificial Sequence
  Description of Artificial Sequence: Synthetic oligonucleotide
  Sense strand starting at position 2784 of SEQ ID NO: 1245096
agaguauguugagauauca

SEQ ID NO: 1536003 - RNA, 19 nt, Artificial Sequence
  Description of Artificial Sequence: Synthetic oligonucleotide
  Antisense strand to SEQ ID NO: 1536002
ugauaucucaacauacucu

SEQ ID NO: 1536004 - RNA, 19 nt, Artificial Sequence
  Description of Artificial Sequence: Synthetic oligonucleotide
  Sense strand starting at position 2905 of SEQ ID NO: 1245096
uuagaaagauuccuccgau

SEQ ID NO: 1536005 - RNA, 19 nt, Artificial Sequence
  Description of Artificial Sequence: Synthetic oligonucleotide
  Antisense strand to SEQ ID NO: 1536004
aucggaggaaucuuucuaa

SEQ ID NO: 1536006 - RNA, 19 nt, Artificial Sequence
  Description of Artificial Sequence: Synthetic oligonucleotide
  Sense strand starting at position 2911 of SEQ ID NO: 1245096
agauuccuccgauacagca

SEQ ID NO: 1536007 - RNA, 19 nt, Artificial Sequence
  Description of Artificial Sequence: Synthetic oligonucleotide
  Antisense strand to SEQ ID NO: 1536006
ugcuguaucggaggaaucu

SEQ ID NO: 1536008 - RNA, 19 nt, Artificial Sequence
  Description of Artificial Sequence: Synthetic oligonucleotide
  Sense strand starting at position 2947 of SEQ ID NO: 1245096
ccaaaucugcccuaaugag

SEQ ID NO: 1536009 - RNA, 19 nt, Artificial Sequence
  Description of Artificial Sequence: Synthetic oligonucleotide
  Antisense strand to SEQ ID NO: 1536008
cucauuagggcagauuugg

SEQ ID NO: 1536010 - RNA, 19 nt, Artificial Sequence
  Description of Artificial Sequence: Synthetic oligonucleotide
  Sense strand starting at position 2976 of SEQ ID NO: 1245096
aaugaacucugagagcgaa

SEQ ID NO: 1536011 - RNA, 19 nt, Artificial Sequence
  Description of Artificial Sequence: Synthetic oligonucleotide
  Antisense strand to SEQ ID NO: 1536010
uucgcucucagaguucauu

SEQ ID NO: 1536012 - RNA, 19 nt, Artificial Sequence
  Description of Artificial Sequence: Synthetic oligonucleotide
  Sense strand starting at position 2989 of SEQ ID NO: 1245096
agcgaauucuguuuagaga

SEQ ID NO: 1536013 - RNA, 19 nt, Artificial Sequence
  Description of Artificial Sequence: Synthetic oligonucleotide
  Antisense strand to SEQ ID NO: 1536012
ucucuaaacagaauucgcu

SEQ ID NO: 1536014 - RNA, 19 nt, Artificial Sequence
  Description of Artificial Sequence: Synthetic oligonucleotide
  Sense strand starting at position 2990 of SEQ ID NO: 1245096
gcgaauucuguuuagagau

SEQ ID NO: 1536015 - RNA, 19 nt, Artificial Sequence
  Description of Artificial Sequence: Synthetic oligonucleotide
  Antisense strand to SEQ ID NO: 1536014
aucucuaaacagaauucgc

SEQ ID NO: 1536016 - RNA, 19 nt, Artificial Sequence
  Description of Artificial Sequence: Synthetic oligonucleotide
  Sense strand starting at position 2992 of SEQ ID NO: 1245096
gaauucuguuuagagauca

SEQ ID NO: 1536017 - RNA, 19 nt, Artificial Sequence
  Description of Artificial Sequence: Synthetic oligonucleotide
  Antisense strand to SEQ ID NO: 1536016
ugaucucuaaacagaauuc

SEQ ID NO: 1536018 - RNA, 19 nt, Artificial Sequence
  Description of Artificial Sequence: Synthetic oligonucleotide
  Sense strand starting at position 3034 of SEQ ID NO: 1245096
ucgcuuagcuuccugugau

SEQ ID NO: 1536019 - RNA, 19 nt, Artificial Sequence
  Description of Artificial Sequence: Synthetic oligonucleotide
  Antisense strand to SEQ ID NO: 1536018
aucacaggaagcuaagcga

SEQ ID NO: 1536020 - RNA, 19 nt, Artificial Sequence
  Description of Artificial Sequence: Synthetic oligonucleotide
  Sense strand starting at position 3047 of SEQ ID NO: 1245096
ugugauagcuugccaguca

SEQ ID NO: 1536021 - RNA, 19 nt, Artificial Sequence
  Description of Artificial Sequence: Synthetic oligonucleotide
  Antisense strand to SEQ ID NO: 1536020
ugacuggcaagcuaucaca

SEQ ID NO: 1536022 - RNA, 19 nt, Artificial Sequence
  Description of Artificial Sequence: Synthetic oligonucleotide
  Sense strand starting at position 3076 of SEQ ID NO: 1245096
acaagaccuucugaagaca

SEQ ID NO: 1536023 - RNA, 19 nt, Artificial Sequence
  Description of Artificial Sequence: Synthetic oligonucleotide
  Antisense strand to SEQ ID NO: 1536022
ugucuucagaaggucuugu

SEQ ID NO: 1536024 - RNA, 19 nt, Artificial Sequence
  Description of Artificial Sequence: Synthetic oligonucleotide
  Sense strand starting at position 3089 of SEQ ID NO: 1245096
aagacauagcucugauguu

SEQ ID NO: 1536025 - RNA, 19 nt, Artificial Sequence
  Description of Artificial Sequence: Synthetic oligonucleotide
  Antisense strand to SEQ ID NO: 1536024
aacaucagagcuaugucuu

SEQ ID NO: 1536026 - RNA, 19 nt, Artificial Sequence
  Description of Artificial Sequence: Synthetic oligonucleotide
  Sense strand starting at position 3223 of SEQ ID NO: 1245096
ugagcauuauuugcgucau

SEQ ID NO: 1536027 - RNA, 19 nt, Artificial Sequence
  Description of Artificial Sequence: Synthetic oligonucleotide
  Antisense strand to SEQ ID NO: 1536026
augacgcaaauaaugcuca

SEQ ID NO: 1536028 - RNA, 19 nt, Artificial Sequence
  Description of Artificial Sequence: Synthetic oligonucleotide
  Sense strand starting at position 3290 of SEQ ID NO: 1245096
guuccuguugccuggauuu

SEQ ID NO: 1536029 - RNA, 19 nt, Artificial Sequence
  Description of Artificial Sequence: Synthetic oligonucleotide
  Antisense strand to SEQ ID NO: 1536028
aaauccaggcaacaggaac

SEQ ID NO: 1536030 - RNA, 19 nt, Artificial Sequence
  Description of Artificial Sequence: Synthetic oligonucleotide
  Sense strand starting at position 3439 of SEQ ID NO: 1245096
guguauaggucaccuguua

SEQ ID NO: 1536031 - RNA, 19 nt, Artificial Sequence
  Description of Artificial Sequence: Synthetic oligonucleotide
  Antisense strand to SEQ ID NO: 1536030
uaacaggugaccuauacac

SEQ ID NO: 1536032 - RNA, 19 nt, Artificial Sequence
  Description of Artificial Sequence: Synthetic oligonucleotide
  Sense strand starting at position 3451 of SEQ ID NO: 1245096
ccuguuacagugugaacua

SEQ ID NO: 1536033 - RNA, 19 nt, Artificial Sequence
  Description of Artificial Sequence: Synthetic oligonucleotide
  Antisense strand to SEQ ID NO: 1536032
uaguucacacuguaacagg

SEQ ID NO: 1536034 - RNA, 19 nt, Artificial Sequence
  Description of Artificial Sequence: Synthetic oligonucleotide
  Sense strand starting at position 3547 of SEQ ID NO: 1245096
gauggcguugcugaauuua

SEQ ID NO: 1536035 - RNA, 19 nt, Artificial Sequence
  Description of Artificial Sequence: Synthetic oligonucleotide
  Antisense strand to SEQ ID NO: 1536034
uaaauucagcaacgccauc

SEQ ID NO: 1536036 - RNA, 19 nt, Artificial Sequence
  Description of Artificial Sequence: Synthetic oligonucleotide
  Sense strand starting at position 3580 of SEQ ID NO: 1245096
gggauaggauguuacccua

SEQ ID NO: 1536037 - RNA, 19 nt, Artificial Sequence
  Description of Artificial Sequence: Synthetic oligonucleotide
  Antisense strand to SEQ ID NO: 1536036
uaggguaacauccuauccc

SEQ ID NO: 1536038 - RNA, 19 nt, Artificial Sequence
  Description of Artificial Sequence: Synthetic oligonucleotide
  Sense strand starting at position 3583 of SEQ ID NO: 1245096
auaggauguuacccuaguu

SEQ ID NO: 1536039 - RNA, 19 nt, Artificial Sequence
  Description of Artificial Sequence: Synthetic oligonucleotide
  Antisense strand to SEQ ID NO: 1536038
aacuaggguaacauccuau

SEQ ID NO: 1536040 - RNA, 19 nt, Artificial Sequence
  Description of Artificial Sequence: Synthetic oligonucleotide
  Sense strand starting at position 3597 of SEQ ID NO: 1245096
uaguuagcagcuuagcuau

SEQ ID NO: 1536041 - RNA, 19 nt, Artificial Sequence
  Description of Artificial Sequence: Synthetic oligonucleotide
  Antisense strand to SEQ ID NO: 1536040
auagcuaagcugcuaacua

SEQ ID NO: 1536042 - RNA, 19 nt, Artificial Sequence
  Description of Artificial Sequence: Synthetic oligonucleotide
  Sense strand starting at position 3800 of SEQ ID NO: 1245096
ggaguuugcaaacaaguuu

SEQ ID NO: 1536043 - RNA, 19 nt, Artificial Sequence
  Description of Artificial Sequence: Synthetic oligonucleotide
  Antisense strand to SEQ ID NO: 1536042
aaacuuguuugcaaacucc

SEQ ID NO: 1536044 - RNA, 19 nt, Artificial Sequence
  Description of Artificial Sequence: Synthetic oligonucleotide
  Sense strand starting at position 18 of SEQ ID NO: 1245097
aacauugugcuguaaguga

SEQ ID NO: 1536045 - RNA, 19 nt, Artificial Sequence
  Description of Artificial Sequence: Synthetic oligonucleotide
  Antisense strand to SEQ ID NO: 1536044
ucacuuacagcacaauguu

SEQ ID NO: 1536046 - RNA, 19 nt, Artificial Sequence
  Description of Artificial Sequence: Synthetic oligonucleotide
  Sense strand starting at position 44 of SEQ ID NO: 1245097
agaacagaugguugguaau

SEQ ID NO: 1536047 - RNA, 19 nt, Artificial Sequence
  Description of Artificial Sequence: Synthetic oligonucleotide
  Antisense strand to SEQ ID NO: 1536046
auuaccaaccaucuguucu

SEQ ID NO: 1536048 - RNA, 19 nt, Artificial Sequence
  Description of Artificial Sequence: Synthetic oligonucleotide
  Sense strand starting at position 46 of SEQ ID NO: 1245097
aacagaugguugguaauga

SEQ ID NO: 1536049 - RNA, 19 nt, Artificial Sequence
  Description of Artificial Sequence: Synthetic oligonucleotide
  Antisense strand to SEQ ID NO: 1536048
ucauuaccaaccaucuguu

SEQ ID NO: 1536050 - RNA, 19 nt, Artificial Sequence
  Description of Artificial Sequence: Synthetic oligonucleotide
  Sense strand starting at position 249 of SEQ ID NO: 1245097
gugugcuauuucuuauuga

SEQ ID NO: 1536051 - RNA, 19 nt, Artificial Sequence
  Description of Artificial Sequence: Synthetic oligonucleotide
  Antisense strand to SEQ ID NO: 1536050
ucaauaagaaauagcacac

SEQ ID NO: 1536052 - RNA, 19 nt, Artificial Sequence
  Description of Artificial Sequence: Synthetic oligonucleotide
  Sense strand starting at position 252 of SEQ ID NO: 1245097
ugcuauuucuuauugacga

SEQ ID NO: 1536053 - RNA, 19 nt, Artificial Sequence
  Description of Artificial Sequence: Synthetic oligonucleotide
  Antisense strand to SEQ ID NO: 1536052
ucgucaauaagaaauagca

SEQ ID NO: 1536054 - RNA, 19 nt, Artificial Sequence
  Description of Artificial Sequence: Synthetic oligonucleotide
  Sense strand starting at position 259 of SEQ ID NO: 1245097
ucuuauugacgauaugcaa

SEQ ID NO: 1536055 - RNA, 19 nt, Artificial Sequence
  Description of Artificial Sequence: Synthetic oligonucleotide
  Antisense strand to SEQ ID NO: 1536054
uugcauaucgucaauaaga

SEQ ID NO: 1536056 - RNA, 19 nt, Artificial Sequence
  Description of Artificial Sequence: Synthetic oligonucleotide
  Sense strand starting at position 362 of SEQ ID NO: 1245097
gaucguaugguguagaauu

SEQ ID NO: 1536057 - RNA, 19 nt, Artificial Sequence
  Description of Artificial Sequence: Synthetic oligonucleotide
  Antisense strand to SEQ ID NO: 1536056
aauucuacaccauacgauc

SEQ ID NO: 1536058 - RNA, 19 nt, Artificial Sequence
  Description of Artificial Sequence: Synthetic oligonucleotide
  Sense strand starting at position 523 of SEQ ID NO: 1245097
ugguguuaugauuagguac

SEQ ID NO: 1536059 - RNA, 19 nt, Artificial Sequence
  Description of Artificial Sequence: Synthetic oligonucleotide
  Antisense strand to SEQ ID NO: 1536058
guaccuaaucauaacacca

SEQ ID NO: 1536060 - RNA, 19 nt, Artificial Sequence
  Description of Artificial Sequence: Synthetic oligonucleotide
  Sense strand starting at position 531 of SEQ ID NO: 1245097
ugauuagguacuggaauua

SEQ ID NO: 1536061 - RNA, 19 nt, Artificial Sequence
  Description of Artificial Sequence: Synthetic oligonucleotide
  Antisense strand to SEQ ID NO: 1536060
uaauuccaguaccuaauca

SEQ ID NO: 1536062 - RNA, 19 nt, Artificial Sequence
  Description of Artificial Sequence: Synthetic oligonucleotide
  Sense strand starting at position 608 of SEQ ID NO: 1245097
uuuggauguguauauguga

SEQ ID NO: 1536063 - RNA, 19 nt, Artificial Sequence
  Description of Artificial Sequence: Synthetic oligonucleotide
  Antisense strand to SEQ ID NO: 1536062
ucacauauacacauccaaa

SEQ ID NO: 1536064 - RNA, 19 nt, Artificial Sequence
  Description of Artificial Sequence: Synthetic oligonucleotide
  Sense strand starting at position 804 of SEQ ID NO: 1245097
ugauuuggaucugauagca

SEQ ID NO: 1536065 - RNA, 19 nt, Artificial Sequence
  Description of Artificial Sequence: Synthetic oligonucleotide
  Antisense strand to SEQ ID NO: 1536064
ugcuaucagauccaaauca

SEQ ID NO: 1536066 - RNA, 19 nt, Artificial Sequence
  Description of Artificial Sequence: Synthetic oligonucleotide
  Sense strand starting at position 846 of SEQ ID NO: 1245097
acacacauuguguauuauu

SEQ ID NO: 1536067 - RNA, 19 nt, Artificial Sequence
  Description of Artificial Sequence: Synthetic oligonucleotide
  Antisense strand to SEQ ID NO: 1536066
aauaauacacaaugugugu

SEQ ID NO: 1536068 - RNA, 19 nt, Artificial Sequence
  Description of Artificial Sequence: Synthetic oligonucleotide
  Sense strand starting at position 907 of SEQ ID NO: 1245097
aguauguuugugggaggga

SEQ ID NO: 1536069 - RNA, 19 nt, Artificial Sequence
  Description of Artificial Sequence: Synthetic oligonucleotide
  Antisense strand to SEQ ID NO: 1536068
ucccucccacaaacauacu

SEQ ID NO: 1536070 - RNA, 19 nt, Artificial Sequence
  Description of Artificial Sequence: Synthetic oligonucleotide
  Sense strand starting at position 986 of SEQ ID NO: 1245097
cugugaacuuaguuggaaa

SEQ ID NO: 1536071 - RNA, 19 nt, Artificial Sequence
  Description of Artificial Sequence: Synthetic oligonucleotide
  Antisense strand to SEQ ID NO: 1536070
uuuccaacuaaguucacag

SEQ ID NO: 1536072 - RNA, 19 nt, Artificial Sequence
  Description of Artificial Sequence: Synthetic oligonucleotide
  Sense strand starting at position 1282 of SEQ ID NO: 1245097
ggaguuugagacugacgca

SEQ ID NO: 1536073 - RNA, 19 nt, Artificial Sequence
  Description of Artificial Sequence: Synthetic oligonucleotide
  Antisense strand to SEQ ID NO: 1536072
ugcgucagucucaaacucc

SEQ ID NO: 1536074 - RNA, 19 nt, Artificial Sequence
  Description of Artificial Sequence: Synthetic oligonucleotide
  Sense strand starting at position 1283 of SEQ ID NO: 1245097
gaguuugagacugacgcaa

SEQ ID NO: 1536075 - RNA, 19 nt, Artificial Sequence
  Description of Artificial Sequence: Synthetic oligonucleotide
  Antisense strand to SEQ ID NO: 1536074
uugcgucagucucaaacuc

SEQ ID NO: 1536076 - RNA, 19 nt, Artificial Sequence
  Description of Artificial Sequence: Synthetic oligonucleotide
  Sense strand starting at position 1845 of SEQ ID NO: 1245097
gcagcuucggaggaaacuu

SEQ ID NO: 1536077 - RNA, 19 nt, Artificial Sequence
  Description of Artificial Sequence: Synthetic oligonucleotide
  Antisense strand to SEQ ID NO: 1536076
aaguuuccuccgaagcugc

SEQ ID NO: 1536078 - RNA, 19 nt, Artificial Sequence
  Description of Artificial Sequence: Synthetic oligonucleotide
  Sense strand starting at position 2241 of SEQ ID NO: 1245097
ggaagugauuacccuagca

SEQ ID NO: 1536079 - RNA, 19 nt, Artificial Sequence
  Description of Artificial Sequence: Synthetic oligonucleotide
  Antisense strand to SEQ ID NO: 1536078
ugcuaggguaaucacuucc

SEQ ID NO: 1536080 - RNA, 19 nt, Artificial Sequence
  Description of Artificial Sequence: Synthetic oligonucleotide
  Sense strand starting at position 2243 of SEQ ID NO: 1245097
aagugauuacccuagcagu

SEQ ID NO: 1536081 - RNA, 19 nt, Artificial Sequence
  Description of Artificial Sequence: Synthetic oligonucleotide
  Antisense strand to SEQ ID NO: 1536080
acugcuaggguaaucacuu

SEQ ID NO: 1536082 - RNA, 19 nt, Artificial Sequence
  Description of Artificial Sequence: Synthetic oligonucleotide
  Sense strand starting at position 2335 of SEQ ID NO: 1245097
ggaacacguccauagguua

SEQ ID NO: 1536083 - RNA, 19 nt, Artificial Sequence
  Description of Artificial Sequence: Synthetic oligonucleotide
  Antisense strand to SEQ ID NO: 1536082
uaaccuauggacguguucc

SEQ ID NO: 1536084 - RNA, 19 nt, Artificial Sequence
  Description of Artificial Sequence: Synthetic oligonucleotide
  Sense strand starting at position 2338 of SEQ ID NO: 1245097
acacguccauagguuagaa

SEQ ID NO: 1536085 - RNA, 19 nt, Artificial Sequence
  Description of Artificial Sequence: Synthetic oligonucleotide
  Antisense strand to SEQ ID NO: 1536084
uucuaaccuauggacgugu

SEQ ID NO: 1536086 - RNA, 19 nt, Artificial Sequence
  Description of Artificial Sequence: Synthetic oligonucleotide
  Sense strand starting at position 2412 of SEQ ID NO: 1245097
ggugauguucguuuguuua

SEQ ID NO: 1536087 - RNA, 19 nt, Artificial Sequence
  Description of Artificial Sequence: Synthetic oligonucleotide
  Antisense strand to SEQ ID NO: 1536086
uaaacaaacgaacaucacc

SEQ ID NO: 1536088 - RNA, 19 nt, Artificial Sequence
  Description of Artificial Sequence: Synthetic oligonucleotide
  Sense strand starting at position 2415 of SEQ ID NO: 1245097
gauguucguuuguuuauuu

SEQ ID NO: 1536089 - RNA, 19 nt, Artificial Sequence
  Description of Artificial Sequence: Synthetic oligonucleotide
  Antisense strand to SEQ ID NO: 1536088
aaauaaacaaacgaacauc

SEQ ID NO: 1536090 - RNA, 19 nt, Artificial Sequence
  Description of Artificial Sequence: Synthetic oligonucleotide
  Sense strand starting at position 2903 of SEQ ID NO: 1245097
augaauccuugauugcuua

SEQ ID NO: 1536091 - RNA, 19 nt, Artificial Sequence
  Description of Artificial Sequence: Synthetic oligonucleotide
  Antisense strand to SEQ ID NO: 1536090
uaagcaaucaaggauucau

SEQ ID NO: 1536092 - RNA, 19 nt, Artificial Sequence
  Description of Artificial Sequence: Synthetic oligonucleotide
  Sense strand starting at position 2904 of SEQ ID NO: 1245097
ugaauccuugauugcuuau

SEQ ID NO: 1536093 - RNA, 19 nt, Artificial Sequence
  Description of Artificial Sequence: Synthetic oligonucleotide
  Antisense strand to SEQ ID NO: 1536092
auaagcaaucaaggauuca

SEQ ID NO: 1536094 - RNA, 19 nt, Artificial Sequence
  Description of Artificial Sequence: Synthetic oligonucleotide
  Sense strand starting at position 3043 of SEQ ID NO: 1245097
cugaaauauuagccuuaug

SEQ ID NO: 1536095 - RNA, 19 nt, Artificial Sequence
  Description of Artificial Sequence: Synthetic oligonucleotide
  Antisense strand to SEQ ID NO: 1536094
cauaaggcuaauauuucag

SEQ ID NO: 1536096 - RNA, 19 nt, Artificial Sequence
  Description of Artificial Sequence: Synthetic oligonucleotide
  Sense strand starting at position 3074 of SEQ ID NO: 1245097
gucuuauucuuauuaaugg

SEQ ID NO: 1536097 - RNA, 19 nt, Artificial Sequence
  Description of Artificial Sequence: Synthetic oligonucleotide
  Antisense strand to SEQ ID NO: 1536096
ccauuaauaagaauaagac

SEQ ID NO: 1536098 - RNA, 19 nt, Artificial Sequence
  Description of Artificial Sequence: Synthetic oligonucleotide
  Sense strand starting at position 3108 of SEQ ID NO: 1245097
ucugguaguagugaacuuu

SEQ ID NO: 1536099 - RNA, 19 nt, Artificial Sequence
  Description of Artificial Sequence: Synthetic oligonucleotide
  Antisense strand to SEQ ID NO: 1536098
aaaguucacuacuaccaga

SEQ ID NO: 1536100 - RNA, 19 nt, Artificial Sequence
  Description of Artificial Sequence: Synthetic oligonucleotide
  Sense strand starting at position 3120 of SEQ ID NO: 1245097
gaacuuugguucuuugaag

SEQ ID NO: 1536101 - RNA, 19 nt, Artificial Sequence
  Description of Artificial Sequence: Synthetic oligonucleotide
  Antisense strand to SEQ ID NO: 1536100
cuucaaagaaccaaaguuc

SEQ ID NO: 1536102 - RNA, 19 nt, Artificial Sequence
  Description of Artificial Sequence: Synthetic oligonucleotide
  Sense strand starting at position 3121 of SEQ ID NO: 1245097
aacuuugguucuuugaaga

SEQ ID NO: 1536103 - RNA, 19 nt, Artificial Sequence
  Description of Artificial Sequence: Synthetic oligonucleotide
  Antisense strand to SEQ ID NO: 1536102
ucuucaaagaaccaaaguu

SEQ ID NO: 1536104 - RNA, 19 nt, Artificial Sequence
  Description of Artificial Sequence: Synthetic oligonucleotide
  Sense strand starting at position 3429 of SEQ ID NO: 1245097
cuaugaauuugacaauguu

SEQ ID NO: 1536105 - RNA, 19 nt, Artificial Sequence
  Description of Artificial Sequence: Synthetic oligonucleotide
  Antisense strand to SEQ ID NO: 1536104
aacauugucaaauucauag

SEQ ID NO: 1536106 - RNA, 19 nt, Artificial Sequence
  Description of Artificial Sequence: Synthetic oligonucleotide
  Sense strand starting at position 3435 of SEQ ID NO: 1245097
auuugacaauguuagaucu

SEQ ID NO: 1536107 - RNA, 19 nt, Artificial Sequence
  Description of Artificial Sequence: Synthetic oligonucleotide
  Antisense strand to SEQ ID NO: 1536106
agaucuaacauugucaaau

SEQ ID NO: 1536108 - RNA, 19 nt, Artificial Sequence
  Description of Artificial Sequence: Synthetic oligonucleotide
  Sense strand starting at position 3443 of SEQ ID NO: 1245097
auguuagaucucugauaug

SEQ ID NO: 1536109 - RNA, 19 nt, Artificial Sequence
  Description of Artificial Sequence: Synthetic oligonucleotide
  Antisense strand to SEQ ID NO: 1536108
cauaucagagaucuaacau

SEQ ID NO: 1536110 - RNA, 19 nt, Artificial Sequence
  Description of Artificial Sequence: Synthetic oligonucleotide
  Sense strand starting at position 3737 of SEQ ID NO: 1245097
acuugcugauuuguuauua

SEQ ID NO: 1536111 - RNA, 19 nt, Artificial Sequence
  Description of Artificial Sequence: Synthetic oligonucleotide
  Antisense strand to SEQ ID NO: 1536110
uaauaacaaaucagcaagu

SEQ ID NO: 1536112 - RNA, 19 nt, Artificial Sequence
  Description of Artificial Sequence: Synthetic oligonucleotide
  Sense strand starting at position 3738 of SEQ ID NO: 1245097
cuugcugauuuguuauuaa

SEQ ID NO: 1536113 - RNA, 19 nt, Artificial Sequence
  Description of Artificial Sequence: Synthetic oligonucleotide
  Antisense strand to SEQ ID NO: 1536112
uuaauaacaaaucagcaag

SEQ ID NO: 1536114 - RNA, 19 nt, Artificial Sequence
  Description of Artificial Sequence: Synthetic oligonucleotide
  Sense strand starting at position 3741 of SEQ ID NO: 1245097
gcugauuuguuauuaacuu

SEQ ID NO: 1536115 - RNA, 19 nt, Artificial Sequence
  Description of Artificial Sequence: Synthetic oligonucleotide
  Antisense strand to SEQ ID NO: 1536114
aaguuaauaacaaaucagc

SEQ ID NO: 1536116 - RNA, 19 nt, Artificial Sequence
  Description of Artificial Sequence: Synthetic oligonucleotide
  Sense strand starting at position 3814 of SEQ ID NO: 1245097
aauguuuccugaguugaaa

SEQ ID NO: 1536117 - RNA, 19 nt, Artificial Sequence
  Description of Artificial Sequence: Synthetic oligonucleotide
  Antisense strand to SEQ ID NO: 1536116
uuucaacucaggaaacauu

SEQ ID NO: 1536118 - RNA, 19 nt, Artificial Sequence
  Description of Artificial Sequence: Synthetic oligonucleotide
  Sense strand starting at position 3816 of SEQ ID NO: 1245097
uguuuccugaguugaaaga

SEQ ID NO: 1536119 - RNA, 19 nt, Artificial Sequence
  Description of Artificial Sequence: Synthetic oligonucleotide
  Antisense strand to SEQ ID NO: 1536118
ucuuucaacucaggaaaca

SEQ ID NO: 1536120 - RNA, 19 nt, Artificial Sequence
  Description of Artificial Sequence: Synthetic oligonucleotide
  Sense strand starting at position 3964 of SEQ ID NO: 1245097
uucuaugaauucuuggagu

SEQ ID NO: 1536121 - RNA, 19 nt, Artificial Sequence
  Description of Artificial Sequence: Synthetic oligonucleotide
  Antisense strand to SEQ ID NO: 1536120
acuccaagaauucauagaa

SEQ ID NO: 1536122 - RNA, 19 nt, Artificial Sequence
  Description of Artificial Sequence: Synthetic oligonucleotide
  Sense strand starting at position 3966 of SEQ ID NO: 1245097
cuaugaauucuuggaguug

SEQ ID NO: 1536123 - RNA, 19 nt, Artificial Sequence
  Description of Artificial Sequence: Synthetic oligonucleotide
  Antisense strand to SEQ ID NO: 1536122
caacuccaagaauucauag

SEQ ID NO: 1536124 - RNA, 19 nt, Artificial Sequence
  Description of Artificial Sequence: Synthetic oligonucleotide
  Sense strand starting at position 182 of SEQ ID NO: 1245098
cuuccaguuuaguuuggua

SEQ ID NO: 1536125 - RNA, 19 nt, Artificial Sequence
  Description of Artificial Sequence: Synthetic oligonucleotide
  Antisense strand to SEQ ID NO: 1536124
uaccaaacuaaacuggaag

SEQ ID NO: 1536126 - RNA, 19 nt, Artificial Sequence
  Description of Artificial Sequence: Synthetic oligonucleotide
  Sense strand starting at position 305 of SEQ ID NO: 1245098
guaguucagccuggaagca

SEQ ID NO: 1536127 - RNA, 19 nt, Artificial Sequence
  Description of Artificial Sequence: Synthetic oligonucleotide
  Antisense strand to SEQ ID NO: 1536126
ugcuuccaggcugaacuac

SEQ ID NO: 1536128 - RNA, 19 nt, Artificial Sequence
  Description of Artificial Sequence: Synthetic oligonucleotide
  Sense strand starting at position 344 of SEQ ID NO: 1245098
agcaacagcuuguccauaa

SEQ ID NO: 1536129 - RNA, 19 nt, Artificial Sequence
  Description of Artificial Sequence: Synthetic oligonucleotide
  Antisense strand to SEQ ID NO: 1536128
uuauggacaagcuguugcu

SEQ ID NO: 1536130 - RNA, 19 nt, Artificial Sequence
  Description of Artificial Sequence: Synthetic oligonucleotide
  Sense strand starting at position 397 of SEQ ID NO: 1245098
cuggaaggaauguguccua

SEQ ID NO: 1536131 - RNA, 19 nt, Artificial Sequence
  Description of Artificial Sequence: Synthetic oligonucleotide
  Antisense strand to SEQ ID NO: 1536130
uaggacacauuccuuccag

SEQ ID NO: 1536132 - RNA, 19 nt, Artificial Sequence
  Description of Artificial Sequence: Synthetic oligonucleotide
  Sense strand starting at position 400 of SEQ ID NO: 1245098
gaaggaauguguccuagga

SEQ ID NO: 1536133 - RNA, 19 nt, Artificial Sequence
  Description of Artificial Sequence: Synthetic oligonucleotide
  Antisense strand to SEQ ID NO: 1536132
uccuaggacacauuccuuc

SEQ ID NO: 1536134 - RNA, 19 nt, Artificial Sequence
  Description of Artificial Sequence: Synthetic oligonucleotide
  Sense strand starting at position 402 of SEQ ID NO: 1245098
aggaauguguccuaggaga

SEQ ID NO: 1536135 - RNA, 19 nt, Artificial Sequence
  Description of Artificial Sequence: Synthetic oligonucleotide
  Antisense strand to SEQ ID NO: 1536134
ucuccuaggacacauuccu

SEQ ID NO: 1536136 - RNA, 19 nt, Artificial Sequence
  Description of Artificial Sequence: Synthetic oligonucleotide
  Sense strand starting at position 404 of SEQ ID NO: 1245098
gaauguguccuaggagacu

SEQ ID NO: 1536137 - RNA, 19 nt, Artificial Sequence
  Description of Artificial Sequence: Synthetic oligonucleotide
  Antisense strand to SEQ ID NO: 1536136
agucuccuaggacacauuc

SEQ ID NO: 1536138 - RNA, 19 nt, Artificial Sequence
  Description of Artificial Sequence: Synthetic oligonucleotide
  Sense strand starting at position 777 of SEQ ID NO: 1245098
uaggccuaagcguguuaau

SEQ ID NO: 1536139 - RNA, 19 nt, Artificial Sequence
  Description of Artificial Sequence: Synthetic oligonucleotide
  Antisense strand to SEQ ID NO: 1536138
auuaacacgcuuaggccua

SEQ ID NO: 1536140 - RNA, 19 nt, Artificial Sequence
  Description of Artificial Sequence: Synthetic oligonucleotide
  Sense strand starting at position 786 of SEQ ID NO: 1245098
gcguguuaaugaccauaca

SEQ ID NO: 1536141 - RNA, 19 nt, Artificial Sequence
  Description of Artificial Sequence: Synthetic oligonucleotide
  Antisense strand to SEQ ID NO: 1536140
uguauggucauuaacacgc

SEQ ID NO: 1536142 - RNA, 19 nt, Artificial Sequence
  Description of Artificial Sequence: Synthetic oligonucleotide
  Sense strand starting at position 789 of SEQ ID NO: 1245098
uguuaaugaccauacacga

SEQ ID NO: 1536143 - RNA, 19 nt, Artificial Sequence
  Description of Artificial Sequence: Synthetic oligonucleotide
  Antisense strand to SEQ ID NO: 1536142
ucguguauggucauuaaca

SEQ ID NO: 1536144 - RNA, 19 nt, Artificial Sequence
  Description of Artificial Sequence: Synthetic oligonucleotide
  Sense strand starting at position 927 of SEQ ID NO: 1245098
auuggaagcucauagauug

SEQ ID NO: 1536145 - RNA, 19 nt, Artificial Sequence
  Description of Artificial Sequence: Synthetic oligonucleotide
  Antisense strand to SEQ ID NO: 1536144
caaucuaugagcuuccaau

SEQ ID NO: 1536146 - RNA, 19 nt, Artificial Sequence
  Description of Artificial Sequence: Synthetic oligonucleotide
  Sense strand starting at position 1053 of SEQ ID NO: 1245098
gcaaaugguucucuauccu

SEQ ID NO: 1536147 - RNA, 19 nt, Artificial Sequence
  Description of Artificial Sequence: Synthetic oligonucleotide
  Antisense strand to SEQ ID NO: 1536146
aggauagagaaccauuugc

SEQ ID NO: 1536148 - RNA, 19 nt, Artificial Sequence
  Description of Artificial Sequence: Synthetic oligonucleotide
  Sense strand starting at position 1160 of SEQ ID NO: 1245098
caagaauuggcuugggucu

SEQ ID NO: 1536149 - RNA, 19 nt, Artificial Sequence
  Description of Artificial Sequence: Synthetic oligonucleotide
  Antisense strand to SEQ ID NO: 1536148
agacccaagccaauucuug

SEQ ID NO: 1536150 - RNA, 19 nt, Artificial Sequence
  Description of Artificial Sequence: Synthetic oligonucleotide
  Sense strand starting at position 1172 of SEQ ID NO: 1245098
ugggucuguugggauauga

SEQ ID NO: 1536151 - RNA, 19 nt, Artificial Sequence
  Description of Artificial Sequence: Synthetic oligonucleotide
  Antisense strand to SEQ ID NO: 1536150
ucauaucccaacagaccca

SEQ ID NO: 1536152 - RNA, 19 nt, Artificial Sequence
  Description of Artificial Sequence: Synthetic oligonucleotide
  Sense strand starting at position 1176 of SEQ ID NO: 1245098
ucuguugggauaugaauau

SEQ ID NO: 1536153 - RNA, 19 nt, Artificial Sequence
  Description of Artificial Sequence: Synthetic oligonucleotide
  Antisense strand to SEQ ID NO: 1536152
auauucauaucccaacaga

SEQ ID NO: 1536154 - RNA, 19 nt, Artificial Sequence
  Description of Artificial Sequence: Synthetic oligonucleotide
  Sense strand starting at position 1183 of SEQ ID NO: 1245098
ggauaugaauauuaaccca

SEQ ID NO: 1536155 - RNA, 19 nt, Artificial Sequence
  Description of Artificial Sequence: Synthetic oligonucleotide
  Antisense strand to SEQ ID NO: 1536154
uggguuaauauucauaucc

SEQ ID NO: 1536156 - RNA, 19 nt, Artificial Sequence
  Description of Artificial Sequence: Synthetic oligonucleotide
  Sense strand starting at position 2420 of SEQ ID NO: 1245098
gcugguucccugcagggau

SEQ ID NO: 1536157 - RNA, 19 nt, Artificial Sequence
  Description of Artificial Sequence: Synthetic oligonucleotide
  Antisense strand to SEQ ID NO: 1536156
aucccugcagggaaccagc

SEQ ID NO: 1536158 - RNA, 19 nt, Artificial Sequence
  Description of Artificial Sequence: Synthetic oligonucleotide
  Sense strand starting at position 2522 of SEQ ID NO: 1245098
aaggccaugucaugagcau

SEQ ID NO: 1536159 - RNA, 19 nt, Artificial Sequence
  Description of Artificial Sequence: Synthetic oligonucleotide
  Antisense strand to SEQ ID NO: 1536158
augcucaugacauggccuu

SEQ ID NO: 1536160 - RNA, 19 nt, Artificial Sequence
  Description of Artificial Sequence: Synthetic oligonucleotide
  Sense strand starting at position 2523 of SEQ ID NO: 1245098
aggccaugucaugagcauu

SEQ ID NO: 1536161 - RNA, 19 nt, Artificial Sequence
  Description of Artificial Sequence: Synthetic oligonucleotide
  Antisense strand to SEQ ID NO: 1536160
aaugcucaugacauggccu

SEQ ID NO: 1536162 - RNA, 19 nt, Artificial Sequence
  Description of Artificial Sequence: Synthetic oligonucleotide
  Sense strand starting at position 2582 of SEQ ID NO: 1245098
gagccuuuggacugcauga

SEQ ID NO: 1536163 - RNA, 19 nt, Artificial Sequence
  Description of Artificial Sequence: Synthetic oligonucleotide
  Antisense strand to SEQ ID NO: 1536162
ucaugcaguccaaaggcuc

SEQ ID NO: 1536164 - RNA, 19 nt, Artificial Sequence
  Description of Artificial Sequence: Synthetic oligonucleotide
  Sense strand starting at position 2584 of SEQ ID NO: 1245098
gccuuuggacugcaugaau

SEQ ID NO: 1536165 - RNA, 19 nt, Artificial Sequence
  Description of Artificial Sequence: Synthetic oligonucleotide
  Antisense strand to SEQ ID NO: 1536164
auucaugcaguccaaaggc

SEQ ID NO: 1536166 - RNA, 19 nt, Artificial Sequence
  Description of Artificial Sequence: Synthetic oligonucleotide
  Sense strand starting at position 2696 of SEQ ID NO: 1245098
caugguuguucccaucgga

SEQ ID NO: 1536167 - RNA, 19 nt, Artificial Sequence
  Description of Artificial Sequence: Synthetic oligonucleotide
  Antisense strand to SEQ ID NO: 1536166
uccgaugggaacaaccaug

SEQ ID NO: 1536168 - RNA, 19 nt, Artificial Sequence
  Description of Artificial Sequence: Synthetic oligonucleotide
  Sense strand starting at position 2699 of SEQ ID NO: 1245098
gguuguucccaucggaaga

SEQ ID NO: 1536169 - RNA, 19 nt, Artificial Sequence
  Description of Artificial Sequence: Synthetic oligonucleotide
  Antisense strand to SEQ ID NO: 1536168
ucuuccgaugggaacaacc

SEQ ID NO: 1536170 - RNA, 19 nt, Artificial Sequence
  Description of Artificial Sequence: Synthetic oligonucleotide
  Sense strand starting at position 2730 of SEQ ID NO: 1245098
cucugagaccuccgaggaa

SEQ ID NO: 1536171 - RNA, 19 nt, Artificial Sequence
  Description of Artificial Sequence: Synthetic oligonucleotide
  Antisense strand to SEQ ID NO: 1536170
uuccucggaggucucagag

SEQ ID NO: 1536172 - RNA, 19 nt, Artificial Sequence
  Description of Artificial Sequence: Synthetic oligonucleotide
  Sense strand starting at position 2829 of SEQ ID NO: 1245098
ggcaguaagagguguaacu

SEQ ID NO: 1536173 - RNA, 19 nt, Artificial Sequence
  Description of Artificial Sequence: Synthetic oligonucleotide
  Antisense strand to SEQ ID NO: 1536172
aguuacaccucuuacugcc

SEQ ID NO: 1536174 - RNA, 19 nt, Artificial Sequence
  Description of Artificial Sequence: Synthetic oligonucleotide
  Sense strand starting at position 2831 of SEQ ID NO: 1245098
caguaagagguguaacuuu

SEQ ID NO: 1536175 - RNA, 19 nt, Artificial Sequence
  Description of Artificial Sequence: Synthetic oligonucleotide
  Antisense strand to SEQ ID NO: 1536174
aaaguuacaccucuuacug

SEQ ID NO: 1536176 - RNA, 19 nt, Artificial Sequence
  Description of Artificial Sequence: Synthetic oligonucleotide
  Sense strand starting at position 2838 of SEQ ID NO: 1245098
agguguaacuuucugggau

SEQ ID NO: 1536177 - RNA, 19 nt, Artificial Sequence
  Description of Artificial Sequence: Synthetic oligonucleotide
  Antisense strand to SEQ ID NO: 1536176
aucccagaaaguuacaccu

SEQ ID NO: 1536178 - RNA, 19 nt, Artificial Sequence
  Description of Artificial Sequence: Synthetic oligonucleotide
  Sense strand starting at position 2839 of SEQ ID NO: 1245098
gguguaacuuucugggaug

SEQ ID NO: 1536179 - RNA, 19 nt, Artificial Sequence
  Description of Artificial Sequence: Synthetic oligonucleotide
  Antisense strand to SEQ ID NO: 1536178
caucccagaaaguuacacc

SEQ ID NO: 1536180 - RNA, 19 nt, Artificial Sequence
  Description of Artificial Sequence: Synthetic oligonucleotide
  Sense strand starting at position 2841 of SEQ ID NO: 1245098
uguaacuuucugggaugga

SEQ ID NO: 1536181 - RNA, 19 nt, Artificial Sequence
  Description of Artificial Sequence: Synthetic oligonucleotide
  Antisense strand to SEQ ID NO: 1536180
uccaucccagaaaguuaca

SEQ ID NO: 1536182 - RNA, 19 nt, Artificial Sequence
  Description of Artificial Sequence: Synthetic oligonucleotide
  Sense strand starting at position 2854 of SEQ ID NO: 1245098
gauggaggcuugcuaggau

SEQ ID NO: 1536183 - RNA, 19 nt, Artificial Sequence
  Description of Artificial Sequence: Synthetic oligonucleotide
  Antisense strand to SEQ ID NO: 1536182
auccuagcaagccuccauc

SEQ ID NO: 1536184 - RNA, 19 nt, Artificial Sequence
  Description of Artificial Sequence: Synthetic oligonucleotide
  Sense strand starting at position 2857 of SEQ ID NO: 1245098
ggaggcuugcuaggauauc

SEQ ID NO: 1536185 - RNA, 19 nt, Artificial Sequence
  Description of Artificial Sequence: Synthetic oligonucleotide
  Antisense strand to SEQ ID NO: 1536184
gauauccuagcaagccucc

SEQ ID NO: 1536186 - RNA, 19 nt, Artificial Sequence
  Description of Artificial Sequence: Synthetic oligonucleotide
  Sense strand starting at position 2975 of SEQ ID NO: 1245098
cugaccugaucucuuaaga

SEQ ID NO: 1536187 - RNA, 19 nt, Artificial Sequence
  Description of Artificial Sequence: Synthetic oligonucleotide
  Antisense strand to SEQ ID NO: 1536186
ucuuaagagaucaggucag

SEQ ID NO: 1536188 - RNA, 19 nt, Artificial Sequence
  Description of Artificial Sequence: Synthetic oligonucleotide
  Sense strand starting at position 3048 of SEQ ID NO: 1245098
gucaacaagccuugugacu

SEQ ID NO: 1536189 - RNA, 19 nt, Artificial Sequence
  Description of Artificial Sequence: Synthetic oligonucleotide
  Antisense strand to SEQ ID NO: 1536188
agucacaaggcuuguugac

SEQ ID NO: 1536190 - RNA, 19 nt, Artificial Sequence
  Description of Artificial Sequence: Synthetic oligonucleotide
  Sense strand starting at position 3055 of SEQ ID NO: 1245098
agccuugugacuugcagga

SEQ ID NO: 1536191 - RNA, 19 nt, Artificial Sequence
  Description of Artificial Sequence: Synthetic oligonucleotide
  Antisense strand to SEQ ID NO: 1536190
uccugcaagucacaaggcu

SEQ ID NO: 1536192 - RNA, 19 nt, Artificial Sequence
  Description of Artificial Sequence: Synthetic oligonucleotide
  Sense strand starting at position 3419 of SEQ ID NO: 1245098
ggguaacacugugagacua

SEQ ID NO: 1536193 - RNA, 19 nt, Artificial Sequence
  Description of Artificial Sequence: Synthetic oligonucleotide
  Antisense strand to SEQ ID NO: 1536192
uagucucacaguguuaccc

SEQ ID NO: 1536194 - RNA, 19 nt, Artificial Sequence
  Description of Artificial Sequence: Synthetic oligonucleotide
  Sense strand starting at position 3427 of SEQ ID NO: 1245098
cugugagacuacuaucucu

SEQ ID NO: 1536195 - RNA, 19 nt, Artificial Sequence
  Description of Artificial Sequence: Synthetic oligonucleotide
  Antisense strand to SEQ ID NO: 1536194
agagauaguagucucacag

SEQ ID NO: 1536196 - RNA, 19 nt, Artificial Sequence
  Description of Artificial Sequence: Synthetic oligonucleotide
  Sense strand starting at position 3626 of SEQ ID NO: 1245098
aaaucuguuuguguguaua

SEQ ID NO: 1536197 - RNA, 19 nt, Artificial Sequence
  Description of Artificial Sequence: Synthetic oligonucleotide
  Antisense strand to SEQ ID NO: 1536196
uauacacacaaacagauuu

SEQ ID NO: 1536198 - RNA, 19 nt, Artificial Sequence
  Description of Artificial Sequence: Synthetic oligonucleotide
  Sense strand starting at position 3829 of SEQ ID NO: 1245098
uagcuugcaucucuggaga

SEQ ID NO: 1536199 - RNA, 19 nt, Artificial Sequence
  Description of Artificial Sequence: Synthetic oligonucleotide
  Antisense strand to SEQ ID NO: 1536198
ucuccagagaugcaagcua

SEQ ID NO: 1536200 - RNA, 19 nt, Artificial Sequence
  Description of Artificial Sequence: Synthetic oligonucleotide
  Sense strand starting at position 3831 of SEQ ID NO: 1245098
gcuugcaucucuggagaaa

SEQ ID NO: 1536201 - RNA, 19 nt, Artificial Sequence
  Description of Artificial Sequence: Synthetic oligonucleotide
  Antisense strand to SEQ ID NO: 1536200
uuucuccagagaugcaagc

SEQ ID NO: 1536202 - RNA, 19 nt, Artificial Sequence
  Description of Artificial Sequence: Synthetic oligonucleotide
  Sense strand starting at position 3852 of SEQ ID NO: 1245098
aggacaugaucucauacau

SEQ ID NO: 1536203 - RNA, 19 nt, Artificial Sequence
  Description of Artificial Sequence: Synthetic oligonucleotide
  Antisense strand to SEQ ID NO: 1536202
auguaugagaucauguccu

SEQ ID NO: 1536204 - RNA, 19 nt, Artificial Sequence
  Description of Artificial Sequence: Synthetic oligonucleotide
  Sense strand starting at position 224 of SEQ ID NO: 1245099
ggcauaugaguggaucuca

SEQ ID NO: 1536205 - RNA, 19 nt, Artificial Sequence
  Description of Artificial Sequence: Synthetic oligonucleotide
  Antisense strand to SEQ ID NO: 1536204
ugagauccacucauaugcc

SEQ ID NO: 1536206 - RNA, 19 nt, Artificial Sequence
  Description of Artificial Sequence: Synthetic oligonucleotide
  Sense strand starting at position 420 of SEQ ID NO: 1245099
uguuguaaauuauccaaga

SEQ ID NO: 1536207 - RNA, 19 nt, Artificial Sequence
  Description of Artificial Sequence: Synthetic oligonucleotide
  Antisense strand to SEQ ID NO: 1536206
ucuuggauaauuuacaaca

SEQ ID NO: 1536208 - RNA, 19 nt, Artificial Sequence
  Description of Artificial Sequence: Synthetic oligonucleotide
  Sense strand starting at position 421 of SEQ ID NO: 1245099
guuguaaauuauccaagag

SEQ ID NO: 1536209 - RNA, 19 nt, Artificial Sequence
  Description of Artificial Sequence: Synthetic oligonucleotide
  Antisense strand to SEQ ID NO: 1536208
cucuuggauaauuuacaac

SEQ ID NO: 1536210 - RNA, 19 nt, Artificial Sequence
  Description of Artificial Sequence: Synthetic oligonucleotide
  Sense strand starting at position 489 of SEQ ID NO: 1245099
gcugauacugccuagagga

SEQ ID NO: 1536211 - RNA, 19 nt, Artificial Sequence
  Description of Artificial Sequence: Synthetic oligonucleotide
  Antisense strand to SEQ ID NO: 1536210
uccucuaggcaguaucagc

SEQ ID NO: 1536212 - RNA, 19 nt, Artificial Sequence
  Description of Artificial Sequence: Synthetic oligonucleotide
  Sense strand starting at position 634 of SEQ ID NO: 1245099
caucucacuguuugaggga

SEQ ID NO: 1536213 - RNA, 19 nt, Artificial Sequence
  Description of Artificial Sequence: Synthetic oligonucleotide
  Antisense strand to SEQ ID NO: 1536212
ucccucaaacagugagaug

SEQ ID NO: 1536214 - RNA, 19 nt, Artificial Sequence
  Description of Artificial Sequence: Synthetic oligonucleotide
  Sense strand starting at position 691 of SEQ ID NO: 1245099
cgcaaaguuuaagugauuu

SEQ ID NO: 1536215 - RNA, 19 nt, Artificial Sequence
  Description of Artificial Sequence: Synthetic oligonucleotide
  Antisense strand to SEQ ID NO: 1536214
aaaucacuuaaacuuugcg

SEQ ID NO: 1536216 - RNA, 19 nt, Artificial Sequence
  Description of Artificial Sequence: Synthetic oligonucleotide
  Sense strand starting at position 886 of SEQ ID NO: 1245099
cauuaauguugaguuugaa

SEQ ID NO: 1536217 - RNA, 19 nt, Artificial Sequence
  Description of Artificial Sequence: Synthetic oligonucleotide
  Antisense strand to SEQ ID NO: 1536216
uucaaacucaacauuaaug

SEQ ID NO: 1536218 - RNA, 19 nt, Artificial Sequence
  Description of Artificial Sequence: Synthetic oligonucleotide
  Sense strand starting at position 1041 of SEQ ID NO: 1245099
uaggcuaagcuagaguaau

SEQ ID NO: 1536219 - RNA, 19 nt, Artificial Sequence
  Description of Artificial Sequence: Synthetic oligonucleotide
  Antisense strand to SEQ ID NO: 1536218
auuacucuagcuuagccua

SEQ ID NO: 1536220 - RNA, 19 nt, Artificial Sequence
  Description of Artificial Sequence: Synthetic oligonucleotide
  Sense strand starting at position 1053 of SEQ ID NO: 1245099
gaguaaucgguuuaaggua

SEQ ID NO: 1536221 - RNA, 19 nt, Artificial Sequence
  Description of Artificial Sequence: Synthetic oligonucleotide
  Antisense strand to SEQ ID NO: 1536220
uaccuuaaaccgauuacuc

SEQ ID NO: 1536222 - RNA, 19 nt, Artificial Sequence
  Description of Artificial Sequence: Synthetic oligonucleotide
  Sense strand starting at position 1186 of SEQ ID NO: 1245099
ucaaguugggcugauaauu

SEQ ID NO: 1536223 - RNA, 19 nt, Artificial Sequence
  Description of Artificial Sequence: Synthetic oligonucleotide
  Antisense strand to SEQ ID NO: 1536222
aauuaucagcccaacuuga

SEQ ID NO: 1536224 - RNA, 19 nt, Artificial Sequence
  Description of Artificial Sequence: Synthetic oligonucleotide
  Sense strand starting at position 1191 of SEQ ID NO: 1245099
uugggcugauaauuccaua

SEQ ID NO: 1536225 - RNA, 19 nt, Artificial Sequence
  Description of Artificial Sequence: Synthetic oligonucleotide
  Antisense strand to SEQ ID NO: 1536224
uauggaauuaucagcccaa

SEQ ID NO: 1536226 - RNA, 19 nt, Artificial Sequence
  Description of Artificial Sequence: Synthetic oligonucleotide
  Sense strand starting at position 1218 of SEQ ID NO: 1245099
gagcauugauaguuagaug

SEQ ID NO: 1536227 - RNA, 19 nt, Artificial Sequence
  Description of Artificial Sequence: Synthetic oligonucleotide
  Antisense strand to SEQ ID NO: 1536226
caucuaacuaucaaugcuc

SEQ ID NO: 1536228 - RNA, 19 nt, Artificial Sequence
  Description of Artificial Sequence: Synthetic oligonucleotide
  Sense strand starting at position 1219 of SEQ ID NO: 1245099
agcauugauaguuagaugu

SEQ ID NO: 1536229 - RNA, 19 nt, Artificial Sequence
  Description of Artificial Sequence: Synthetic oligonucleotide
  Antisense strand to SEQ ID NO: 1536228
acaucuaacuaucaaugcu

SEQ ID NO: 1536230 - RNA, 19 nt, Artificial Sequence
  Description of Artificial Sequence: Synthetic oligonucleotide
  Sense strand starting at position 1223 of SEQ ID NO: 1245099
uugauaguuagaugugauc

SEQ ID NO: 1536231 - RNA, 19 nt, Artificial Sequence
  Description of Artificial Sequence: Synthetic oligonucleotide
  Antisense strand to SEQ ID NO: 1536230
gaucacaucuaacuaucaa

SEQ ID NO: 1536232 - RNA, 19 nt, Artificial Sequence
  Description of Artificial Sequence: Synthetic oligonucleotide
  Sense strand starting at position 1802 of SEQ ID NO: 1245099
ucuggcucuccggagaaau

SEQ ID NO: 1536233 - RNA, 19 nt, Artificial Sequence
  Description of Artificial Sequence: Synthetic oligonucleotide
  Antisense strand to SEQ ID NO: 1536232
auuucuccggagagccaga

SEQ ID NO: 1536234 - RNA, 19 nt, Artificial Sequence
  Description of Artificial Sequence: Synthetic oligonucleotide
  Sense strand starting at position 2301 of SEQ ID NO: 1245099
gaaggaaugugggcucacu

SEQ ID NO: 1536235 - RNA, 19 nt, Artificial Sequence
  Description of Artificial Sequence: Synthetic oligonucleotide
  Antisense strand to SEQ ID NO: 1536234
agugagcccacauuccuuc

SEQ ID NO: 1536236 - RNA, 19 nt, Artificial Sequence
  Description of Artificial Sequence: Synthetic oligonucleotide
  Sense strand starting at position 2352 of SEQ ID NO: 1245099
cagaaauagggaugcuuau

SEQ ID NO: 1536237 - RNA, 19 nt, Artificial Sequence
  Description of Artificial Sequence: Synthetic oligonucleotide
  Antisense strand to SEQ ID NO: 1536236
auaagcaucccuauuucug

SEQ ID NO: 1536238 - RNA, 19 nt, Artificial Sequence
  Description of Artificial Sequence: Synthetic oligonucleotide
  Sense strand starting at position 2442 of SEQ ID NO: 1245099
ccacgagucauagguagaa

SEQ ID NO: 1536239 - RNA, 19 nt, Artificial Sequence
  Description of Artificial Sequence: Synthetic oligonucleotide
  Antisense strand to SEQ ID NO: 1536238
uucuaccuaugacucgugg

SEQ ID NO: 1536240 - RNA, 19 nt, Artificial Sequence
  Description of Artificial Sequence: Synthetic oligonucleotide
  Sense strand starting at position 2770 of SEQ ID NO: 1245099
guuaaagggcccuacaauu

SEQ ID NO: 1536241 - RNA, 19 nt, Artificial Sequence
  Description of Artificial Sequence: Synthetic oligonucleotide
  Antisense strand to SEQ ID NO: 1536240
aauuguagggcccuuuaac

SEQ ID NO: 1536242 - RNA, 19 nt, Artificial Sequence
  Description of Artificial Sequence: Synthetic oligonucleotide
  Sense strand starting at position 2825 of SEQ ID NO: 1245099
uccguauuccuggaugaug

SEQ ID NO: 1536243 - RNA, 19 nt, Artificial Sequence
  Description of Artificial Sequence: Synthetic oligonucleotide
  Antisense strand to SEQ ID NO: 1536242
caucauccaggaauacgga

SEQ ID NO: 1536244 - RNA, 19 nt, Artificial Sequence
  Description of Artificial Sequence: Synthetic oligonucleotide
  Sense strand starting at position 2827 of SEQ ID NO: 1245099
cguauuccuggaugaugaa

SEQ ID NO: 1536245 - RNA, 19 nt, Artificial Sequence
  Description of Artificial Sequence: Synthetic oligonucleotide
  Antisense strand to SEQ ID NO: 1536244
uucaucauccaggaauacg

SEQ ID NO: 1536246 - RNA, 19 nt, Artificial Sequence
  Description of Artificial Sequence: Synthetic oligonucleotide
  Sense strand starting at position 2904 of SEQ ID NO: 1245099
gugugugaggaagauucau

SEQ ID NO: 1536247 - RNA, 19 nt, Artificial Sequence
  Description of Artificial Sequence: Synthetic oligonucleotide
  Antisense strand to SEQ ID NO: 1536246
augaaucuuccucacacac

SEQ ID NO: 1536248 - RNA, 19 nt, Artificial Sequence
  Description of Artificial Sequence: Synthetic oligonucleotide
  Sense strand starting at position 3002 of SEQ ID NO: 1245099
gcuggaccucuuuaaauua

SEQ ID NO: 1536249 - RNA, 19 nt, Artificial Sequence
  Description of Artificial Sequence: Synthetic oligonucleotide
  Antisense strand to SEQ ID NO: 1536248
uaauuuaaagagguccagc

SEQ ID NO: 1536250 - RNA, 19 nt, Artificial Sequence
  Description of Artificial Sequence: Synthetic oligonucleotide
  Sense strand starting at position 3168 of SEQ ID NO: 1245099
ggcugaugacuuugauacu

SEQ ID NO: 1536251 - RNA, 19 nt, Artificial Sequence
  Description of Artificial Sequence: Synthetic oligonucleotide
  Antisense strand to SEQ ID NO: 1536250
aguaucaaagucaucagcc

SEQ ID NO: 1536252 - RNA, 19 nt, Artificial Sequence
  Description of Artificial Sequence: Synthetic oligonucleotide
  Sense strand starting at position 3180 of SEQ ID NO: 1245099
ugauacuucuaccugagau

SEQ ID NO: 1536253 - RNA, 19 nt, Artificial Sequence
  Description of Artificial Sequence: Synthetic oligonucleotide
  Antisense strand to SEQ ID NO: 1536252
aucucagguagaaguauca

SEQ ID NO: 1536254 - RNA, 19 nt, Artificial Sequence
  Description of Artificial Sequence: Synthetic oligonucleotide
  Sense strand starting at position 3255 of SEQ ID NO: 1245099
agcacuuaaugccuaagaa

SEQ ID NO: 1536255 - RNA, 19 nt, Artificial Sequence
  Description of Artificial Sequence: Synthetic oligonucleotide
  Antisense strand to SEQ ID NO: 1536254
uucuuaggcauuaagugcu

SEQ ID NO: 1536256 - RNA, 19 nt, Artificial Sequence
  Description of Artificial Sequence: Synthetic oligonucleotide
  Sense strand starting at position 3256 of SEQ ID NO: 1245099
gcacuuaaugccuaagaau

SEQ ID NO: 1536257 - RNA, 19 nt, Artificial Sequence
  Description of Artificial Sequence: Synthetic oligonucleotide
  Antisense strand to SEQ ID NO: 1536256
auucuuaggcauuaagugc

SEQ ID NO: 1536258 - RNA, 19 nt, Artificial Sequence
  Description of Artificial Sequence: Synthetic oligonucleotide
  Sense strand starting at position 3419 of SEQ ID NO: 1245099
gguugccuugaugauuaga

SEQ ID NO: 1536259 - RNA, 19 nt, Artificial Sequence
  Description of Artificial Sequence: Synthetic oligonucleotide
  Antisense strand to SEQ ID NO: 1536258
ucuaaucaucaaggcaacc

SEQ ID NO: 1536260 - RNA, 19 nt, Artificial Sequence
  Description of Artificial Sequence: Synthetic oligonucleotide
  Sense strand starting at position 3421 of SEQ ID NO: 1245099
uugccuugaugauuagaga

SEQ ID NO: 1536261 - RNA, 19 nt, Artificial Sequence
  Description of Artificial Sequence: Synthetic oligonucleotide
  Antisense strand to SEQ ID NO: 1536260
ucucuaaucaucaaggcaa

SEQ ID NO: 1536262 - RNA, 19 nt, Artificial Sequence
  Description of Artificial Sequence: Synthetic oligonucleotide
  Sense strand starting at position 3430 of SEQ ID NO: 1245099
ugauuagagacguauucca

SEQ ID NO: 1536263 - RNA, 19 nt, Artificial Sequence
  Description of Artificial Sequence: Synthetic oligonucleotide
  Antisense strand to SEQ ID NO: 1536262
uggaauacgucucuaauca

SEQ ID NO: 1536264 - RNA, 19 nt, Artificial Sequence
  Description of Artificial Sequence: Synthetic oligonucleotide
  Sense strand starting at position 3535 of SEQ ID NO: 1245099
guagccuucucauuuaggu

SEQ ID NO: 1536265 - RNA, 19 nt, Artificial Sequence
  Description of Artificial Sequence: Synthetic oligonucleotide
  Antisense strand to SEQ ID NO: 1536264
accuaaaugagaaggcuac

SEQ ID NO: 1536266 - RNA, 19 nt, Artificial Sequence
  Description of Artificial Sequence: Synthetic oligonucleotide
  Sense strand starting at position 3658 of SEQ ID NO: 1245099
cccagucuccauggagaaa

SEQ ID NO: 1536267 - RNA, 19 nt, Artificial Sequence
  Description of Artificial Sequence: Synthetic oligonucleotide
  Antisense strand to SEQ ID NO: 1536266
uuucuccauggagacuggg

SEQ ID NO: 1536268 - RNA, 19 nt, Artificial Sequence
  Description of Artificial Sequence: Synthetic oligonucleotide
  Sense strand starting at position 3669 of SEQ ID NO: 1245099
uggagaaagacuugccucu

SEQ ID NO: 1536269 - RNA, 19 nt, Artificial Sequence
  Description of Artificial Sequence: Synthetic oligonucleotide
  Antisense strand to SEQ ID NO: 1536268
agaggcaagucuuucucca

SEQ ID NO: 1536270 - RNA, 19 nt, Artificial Sequence
  Description of Artificial Sequence: Synthetic oligonucleotide
  Sense strand starting at position 3675 of SEQ ID NO: 1245099
aagacuugccucuggagaa

SEQ ID NO: 1536271 - RNA, 19 nt, Artificial Sequence
  Description of Artificial Sequence: Synthetic oligonucleotide
  Antisense strand to SEQ ID NO: 1536270
uucuccagaggcaagucuu

SEQ ID NO: 1536272 - RNA, 19 nt, Artificial Sequence
  Description of Artificial Sequence: Synthetic oligonucleotide
  Sense strand starting at position 3700 of SEQ ID NO: 1245099
gaggaauguacuggagguu

SEQ ID NO: 1536273 - RNA, 19 nt, Artificial Sequence
  Description of Artificial Sequence: Synthetic oligonucleotide
  Antisense strand to SEQ ID NO: 1536272
aaccuccaguacauuccuc

SEQ ID NO: 1536274 - RNA, 19 nt, Artificial Sequence
  Description of Artificial Sequence: Synthetic oligonucleotide
  Sense strand starting at position 3767 of SEQ ID NO: 1245099
agcaccauugguuaaguau

SEQ ID NO: 1536275 - RNA, 19 nt, Artificial Sequence
  Description of Artificial Sequence: Synthetic oligonucleotide
  Antisense strand to SEQ ID NO: 1536274
auacuuaaccaauggugcu

SEQ ID NO: 1536276 - RNA, 19 nt, Artificial Sequence
  Description of Artificial Sequence: Synthetic oligonucleotide
  Sense strand starting at position 3807 of SEQ ID NO: 1245099
uuuauugacugggcaauua

SEQ ID NO: 1536277 - RNA, 19 nt, Artificial Sequence
  Description of Artificial Sequence: Synthetic oligonucleotide
  Antisense strand to SEQ ID NO: 1536276
uaauugcccagucaauaaa

SEQ ID NO: 1536278 - RNA, 19 nt, Artificial Sequence
  Description of Artificial Sequence: Synthetic oligonucleotide
  Sense strand starting at position 3961 of SEQ ID NO: 1245099
acuuacuagguagguaaua

SEQ ID NO: 1536279 - RNA, 19 nt, Artificial Sequence
  Description of Artificial Sequence: Synthetic oligonucleotide
  Antisense strand to SEQ ID NO: 1536278
uauuaccuaccuaguaagu

SEQ ID NO: 1536280 - RNA, 19 nt, Artificial Sequence
  Description of Artificial Sequence: Synthetic oligonucleotide
  Sense strand starting at position 3962 of SEQ ID NO: 1245099
cuuacuagguagguaauau

SEQ ID NO: 1536281 - RNA, 19 nt, Artificial Sequence
  Description of Artificial Sequence: Synthetic oligonucleotide
  Antisense strand to SEQ ID NO: 1536280
auauuaccuaccuaguaag

SEQ ID NO: 1536282 - RNA, 19 nt, Artificial Sequence
  Description of Artificial Sequence: Synthetic oligonucleotide
  Sense strand starting at position 3973 of SEQ ID NO: 1245099
gguaauauugcacaaauua

SEQ ID NO: 1536283 - RNA, 19 nt, Artificial Sequence
  Description of Artificial Sequence: Synthetic oligonucleotide
  Antisense strand to SEQ ID NO: 1536282
uaauuugugcaauauuacc

SEQ ID NO: 1536284 - RNA, 19 nt, Artificial Sequence
  Description of Artificial Sequence: Synthetic oligonucleotide
  Sense strand starting at position 233 of SEQ ID NO: 1245100
ugcacagauuacucuaaug

SEQ ID NO: 1536285 - RNA, 19 nt, Artificial Sequence
  Description of Artificial Sequence: Synthetic oligonucleotide
  Antisense strand to SEQ ID NO: 1536284
cauuagaguaaucugugca

SEQ ID NO: 1536286 - RNA, 19 nt, Artificial Sequence
  Description of Artificial Sequence: Synthetic oligonucleotide
  Sense strand starting at position 294 of SEQ ID NO: 1245100
uagagcugugcugagauga

SEQ ID NO: 1536287 - RNA, 19 nt, Artificial Sequence
  Description of Artificial Sequence: Synthetic oligonucleotide
  Antisense strand to SEQ ID NO: 1536286
ucaucucagcacagcucua

SEQ ID NO: 1536288 - RNA, 19 nt, Artificial Sequence
  Description of Artificial Sequence: Synthetic oligonucleotide
  Sense strand starting at position 404 of SEQ ID NO: 1245100
cagagacgugauuggaauu

SEQ ID NO: 1536289 - RNA, 19 nt, Artificial Sequence
  Description of Artificial Sequence: Synthetic oligonucleotide
  Antisense strand to SEQ ID NO: 1536288
aauuccaaucacgucucug

SEQ ID NO: 1536290 - RNA, 19 nt, Artificial Sequence
  Description of Artificial Sequence: Synthetic oligonucleotide
  Sense strand starting at position 449 of SEQ ID NO: 1245100
ucaggaugaccugguuuaa

SEQ ID NO: 1536291 - RNA, 19 nt, Artificial Sequence
  Description of Artificial Sequence: Synthetic oligonucleotide
  Antisense strand to SEQ ID NO: 1536290
uuaaaccaggucauccuga

SEQ ID NO: 1536292 - RNA, 19 nt, Artificial Sequence
  Description of Artificial Sequence: Synthetic oligonucleotide
  Sense strand starting at position 497 of SEQ ID NO: 1245100
agcgaauaugguuaucucu

SEQ ID NO: 1536293 - RNA, 19 nt, Artificial Sequence
  Description of Artificial Sequence: Synthetic oligonucleotide
  Antisense strand to SEQ ID NO: 1536292
agagauaaccauauucgcu

SEQ ID NO: 1536294 - RNA, 19 nt, Artificial Sequence
  Description of Artificial Sequence: Synthetic oligonucleotide
  Sense strand starting at position 843 of SEQ ID NO: 1245100
gcuaaugugccugagacau

SEQ ID NO: 1536295 - RNA, 19 nt, Artificial Sequence
  Description of Artificial Sequence: Synthetic oligonucleotide
  Antisense strand to SEQ ID NO: 1536294
augucucaggcacauuagc

SEQ ID NO: 1536296 - RNA, 19 nt, Artificial Sequence
  Description of Artificial Sequence: Synthetic oligonucleotide
  Sense strand starting at position 864 of SEQ ID NO: 1245100
ggaagcuugaaauguaagu

SEQ ID NO: 1536297 - RNA, 19 nt, Artificial Sequence
  Description of Artificial Sequence: Synthetic oligonucleotide
  Antisense strand to SEQ ID NO: 1536296
acuuacauuucaagcuucc

SEQ ID NO: 1536298 - RNA, 19 nt, Artificial Sequence
  Description of Artificial Sequence: Synthetic oligonucleotide
  Sense strand starting at position 1501 of SEQ ID NO: 1245100
ccauuaugcuaugugaaua

SEQ ID NO: 1536299 - RNA, 19 nt, Artificial Sequence
  Description of Artificial Sequence: Synthetic oligonucleotide
  Antisense strand to SEQ ID NO: 1536298
uauucacauagcauaaugg

SEQ ID NO: 1536300 - RNA, 19 nt, Artificial Sequence
  Description of Artificial Sequence: Synthetic oligonucleotide
  Sense strand starting at position 1511 of SEQ ID NO: 1245100
augugaauagugcacaguu

SEQ ID NO: 1536301 - RNA, 19 nt, Artificial Sequence
  Description of Artificial Sequence: Synthetic oligonucleotide
  Antisense strand to SEQ ID NO: 1536300
aacugugcacuauucacau

SEQ ID NO: 1536302 - RNA, 19 nt, Artificial Sequence
  Description of Artificial Sequence: Synthetic oligonucleotide
  Sense strand starting at position 1513 of SEQ ID NO: 1245100
gugaauagugcacaguuaa

SEQ ID NO: 1536303 - RNA, 19 nt, Artificial Sequence
  Description of Artificial Sequence: Synthetic oligonucleotide
  Antisense strand to SEQ ID NO: 1536302
uuaacugugcacuauucac

SEQ ID NO: 1536304 - RNA, 19 nt, Artificial Sequence
  Description of Artificial Sequence: Synthetic oligonucleotide
  Sense strand starting at position 1566 of SEQ ID NO: 1245100
aguuuaauucgauacacau

SEQ ID NO: 1536305 - RNA, 19 nt, Artificial Sequence
  Description of Artificial Sequence: Synthetic oligonucleotide
  Antisense strand to SEQ ID NO: 1536304
auguguaucgaauuaaacu

SEQ ID NO: 1536306 - RNA, 19 nt, Artificial Sequence
  Description of Artificial Sequence: Synthetic oligonucleotide
  Sense strand starting at position 1573 of SEQ ID NO: 1245100
uucgauacacauuaguuau

SEQ ID NO: 1536307 - RNA, 19 nt, Artificial Sequence
  Description of Artificial Sequence: Synthetic oligonucleotide
  Antisense strand to SEQ ID NO: 1536306
auaacuaauguguaucgaa

SEQ ID NO: 1536308 - RNA, 19 nt, Artificial Sequence
  Description of Artificial Sequence: Synthetic oligonucleotide
  Sense strand starting at position 1575 of SEQ ID NO: 1245100
cgauacacauuaguuauaa

SEQ ID NO: 1536309 - RNA, 19 nt, Artificial Sequence
  Description of Artificial Sequence: Synthetic oligonucleotide
  Antisense strand to SEQ ID NO: 1536308
uuauaacuaauguguaucg

SEQ ID NO: 1536310 - RNA, 19 nt, Artificial Sequence
  Description of Artificial Sequence: Synthetic oligonucleotide
  Sense strand starting at position 1715 of SEQ ID NO: 1245100
auauuuaucugcuuuacgu

SEQ ID NO: 1536311 - RNA, 19 nt, Artificial Sequence
  Description of Artificial Sequence: Synthetic oligonucleotide
  Antisense strand to SEQ ID NO: 1536310
acguaaagcagauaaauau

SEQ ID NO: 1536312 - RNA, 19 nt, Artificial Sequence
  Description of Artificial Sequence: Synthetic oligonucleotide
  Sense strand starting at position 2026 of SEQ ID NO: 1245100
gggauuuagcuguguccua

SEQ ID NO: 1536313 - RNA, 19 nt, Artificial Sequence
  Description of Artificial Sequence: Synthetic oligonucleotide
  Antisense strand to SEQ ID NO: 1536312
uaggacacagcuaaauccc

SEQ ID NO: 1536314 - RNA, 19 nt, Artificial Sequence
  Description of Artificial Sequence: Synthetic oligonucleotide
  Sense strand starting at position 2027 of SEQ ID NO: 1245100
ggauuuagcuguguccuau

SEQ ID NO: 1536315 - RNA, 19 nt, Artificial Sequence
  Description of Artificial Sequence: Synthetic oligonucleotide
  Antisense strand to SEQ ID NO: 1536314
auaggacacagcuaaaucc

SEQ ID NO: 1536316 - RNA, 19 nt, Artificial Sequence
  Description of Artificial Sequence: Synthetic oligonucleotide
  Sense strand starting at position 2177 of SEQ ID NO: 1245100
ugggcuaccuuccuauaua

SEQ ID NO: 1536317 - RNA, 19 nt, Artificial Sequence
  Description of Artificial Sequence: Synthetic oligonucleotide
  Antisense strand to SEQ ID NO: 1536316
uauauaggaagguagccca

SEQ ID NO: 1536318 - RNA, 19 nt, Artificial Sequence
  Description of Artificial Sequence: Synthetic oligonucleotide
  Sense strand starting at position 2318 of SEQ ID NO: 1245100
augugaaagugaguaaacu

SEQ ID NO: 1536319 - RNA, 19 nt, Artificial Sequence
  Description of Artificial Sequence: Synthetic oligonucleotide
  Antisense strand to SEQ ID NO: 1536318
aguuuacucacuuucacau

SEQ ID NO: 1536320 - RNA, 19 nt, Artificial Sequence
  Description of Artificial Sequence: Synthetic oligonucleotide
  Sense strand starting at position 2425 of SEQ ID NO: 1245100
aguauaugaagcgauauaa

SEQ ID NO: 1536321 - RNA, 19 nt, Artificial Sequence
  Description of Artificial Sequence: Synthetic oligonucleotide
  Antisense strand to SEQ ID NO: 1536320
uuauaucgcuucauauacu

SEQ ID NO: 1536322 - RNA, 19 nt, Artificial Sequence
  Description of Artificial Sequence: Synthetic oligonucleotide
  Sense strand starting at position 2452 of SEQ ID NO: 1245100
agugauaaagucuagcaua

SEQ ID NO: 1536323 - RNA, 19 nt, Artificial Sequence
  Description of Artificial Sequence: Synthetic oligonucleotide
  Antisense strand to SEQ ID NO: 1536322
uaugcuagacuuuaucacu

SEQ ID NO: 1536324 - RNA, 19 nt, Artificial Sequence
  Description of Artificial Sequence: Synthetic oligonucleotide
  Sense strand starting at position 2718 of SEQ ID NO: 1245100
caggucagaccuugacaau

SEQ ID NO: 1536325 - RNA, 19 nt, Artificial Sequence
  Description of Artificial Sequence: Synthetic oligonucleotide
  Antisense strand to SEQ ID NO: 1536324
auugucaaggucugaccug

SEQ ID NO: 1536326 - RNA, 19 nt, Artificial Sequence
  Description of Artificial Sequence: Synthetic oligonucleotide
  Sense strand starting at position 2796 of SEQ ID NO: 1245100
acaugcagucuggaguuua

SEQ ID NO: 1536327 - RNA, 19 nt, Artificial Sequence
  Description of Artificial Sequence: Synthetic oligonucleotide
  Antisense strand to SEQ ID NO: 1536326
uaaacuccagacugcaugu

SEQ ID NO: 1536328 - RNA, 19 nt, Artificial Sequence
  Description of Artificial Sequence: Synthetic oligonucleotide
  Sense strand starting at position 2918 of SEQ ID NO: 1245100
acucuuagcucucuuggaa

SEQ ID NO: 1536329 - RNA, 19 nt, Artificial Sequence
  Description of Artificial Sequence: Synthetic oligonucleotide
  Antisense strand to SEQ ID NO: 1536328
uuccaagagagcuaagagu

SEQ ID NO: 1536330 - RNA, 19 nt, Artificial Sequence
  Description of Artificial Sequence: Synthetic oligonucleotide
  Sense strand starting at position 2982 of SEQ ID NO: 1245100
agccuaaugucacuuauga

SEQ ID NO: 1536331 - RNA, 19 nt, Artificial Sequence
  Description of Artificial Sequence: Synthetic oligonucleotide
  Antisense strand to SEQ ID NO: 1536330
ucauaagugacauuaggcu

SEQ ID NO: 1536332 - RNA, 19 nt, Artificial Sequence
  Description of Artificial Sequence: Synthetic oligonucleotide
  Sense strand starting at position 2989 of SEQ ID NO: 1245100
ugucacuuaugagcaacua

SEQ ID NO: 1536333 - RNA, 19 nt, Artificial Sequence
  Description of Artificial Sequence: Synthetic oligonucleotide
  Antisense strand to SEQ ID NO: 1536332
uaguugcucauaagugaca

SEQ ID NO: 1536334 - RNA, 19 nt, Artificial Sequence
  Description of Artificial Sequence: Synthetic oligonucleotide
  Sense strand starting at position 3030 of SEQ ID NO: 1245100
guguccuauccugaaagau

SEQ ID NO: 1536335 - RNA, 19 nt, Artificial Sequence
  Description of Artificial Sequence: Synthetic oligonucleotide
  Antisense strand to SEQ ID NO: 1536334
aucuuucaggauaggacac

SEQ ID NO: 1536336 - RNA, 19 nt, Artificial Sequence
  Description of Artificial Sequence: Synthetic oligonucleotide
  Sense strand starting at position 3038 of SEQ ID NO: 1245100
uccugaaagaugcaugguu

SEQ ID NO: 1536337 - RNA, 19 nt, Artificial Sequence
  Description of Artificial Sequence: Synthetic oligonucleotide
  Antisense strand to SEQ ID NO: 1536336
aaccaugcaucuuucagga

SEQ ID NO: 1536338 - RNA, 19 nt, Artificial Sequence
  Description of Artificial Sequence: Synthetic oligonucleotide
  Sense strand starting at position 3051 of SEQ ID NO: 1245100
augguuggccaauggaaga

SEQ ID NO: 1536339 - RNA, 19 nt, Artificial Sequence
  Description of Artificial Sequence: Synthetic oligonucleotide
  Antisense strand to SEQ ID NO: 1536338
ucuuccauuggccaaccau

SEQ ID NO: 1536340 - RNA, 19 nt, Artificial Sequence
  Description of Artificial Sequence: Synthetic oligonucleotide
  Sense strand starting at position 3129 of SEQ ID NO: 1245100
auaggaaauuguccagcuu

SEQ ID NO: 1536341 - RNA, 19 nt, Artificial Sequence
  Description of Artificial Sequence: Synthetic oligonucleotide
  Antisense strand to SEQ ID NO: 1536340
aagcuggacaauuuccuau

SEQ ID NO: 1536342 - RNA, 19 nt, Artificial Sequence
  Description of Artificial Sequence: Synthetic oligonucleotide
  Sense strand starting at position 3130 of SEQ ID NO: 1245100
uaggaaauuguccagcuuu

SEQ ID NO: 1536343 - RNA, 19 nt, Artificial Sequence
  Description of Artificial Sequence: Synthetic oligonucleotide
  Antisense strand to SEQ ID NO: 1536342
aaagcuggacaauuuccua

SEQ ID NO: 1536344 - RNA, 19 nt, Artificial Sequence
  Description of Artificial Sequence: Synthetic oligonucleotide
  Sense strand starting at position 3165 of SEQ ID NO: 1245100
accauugcucauuaguuua

SEQ ID NO: 1536345 - RNA, 19 nt, Artificial Sequence
  Description of Artificial Sequence: Synthetic oligonucleotide
  Antisense strand to SEQ ID NO: 1536344
uaaacuaaugagcaauggu

SEQ ID NO: 1536346 - RNA, 19 nt, Artificial Sequence
  Description of Artificial Sequence: Synthetic oligonucleotide
  Sense strand starting at position 3364 of SEQ ID NO: 1245100
agagcaauuucucagaaca

SEQ ID NO: 1536347 - RNA, 19 nt, Artificial Sequence
  Description of Artificial Sequence: Synthetic oligonucleotide
  Antisense strand to SEQ ID NO: 1536346
uguucugagaaauugcucu

SEQ ID NO: 1536348 - RNA, 19 nt, Artificial Sequence
  Description of Artificial Sequence: Synthetic oligonucleotide
  Sense strand starting at position 3366 of SEQ ID NO: 1245100
agcaauuucucagaacaga

SEQ ID NO: 1536349 - RNA, 19 nt, Artificial Sequence
  Description of Artificial Sequence: Synthetic oligonucleotide
  Antisense strand to SEQ ID NO: 1536348
ucuguucugagaaauugcu

SEQ ID NO: 1536350 - RNA, 19 nt, Artificial Sequence
  Description of Artificial Sequence: Synthetic oligonucleotide
  Sense strand starting at position 3484 of SEQ ID NO: 1245100
uguucuuaagauuaagcaa

SEQ ID NO: 1536351 - RNA, 19 nt, Artificial Sequence
  Description of Artificial Sequence: Synthetic oligonucleotide
  Antisense strand to SEQ ID NO: 1536350
uugcuuaaucuuaagaaca

SEQ ID NO: 1536352 - RNA, 19 nt, Artificial Sequence
  Description of Artificial Sequence: Synthetic oligonucleotide
  Sense strand starting at position 3585 of SEQ ID NO: 1245100
gcugcuugauaauuaagga

SEQ ID NO: 1536353 - RNA, 19 nt, Artificial Sequence
  Description of Artificial Sequence: Synthetic oligonucleotide
  Antisense strand to SEQ ID NO: 1536352
uccuuaauuaucaagcagc

SEQ ID NO: 1536354 - RNA, 19 nt, Artificial Sequence
  Description of Artificial Sequence: Synthetic oligonucleotide
  Sense strand starting at position 3598 of SEQ ID NO: 1245100
uaaggagauuuagaagcaa

SEQ ID NO: 1536355 - RNA, 19 nt, Artificial Sequence
  Description of Artificial Sequence: Synthetic oligonucleotide
  Antisense strand to SEQ ID NO: 1536354
uugcuucuaaaucuccuua

SEQ ID NO: 1536356 - RNA, 19 nt, Artificial Sequence
  Description of Artificial Sequence: Synthetic oligonucleotide
  Sense strand starting at position 3694 of SEQ ID NO: 1245100
aaaugucagguuuauuguu

SEQ ID NO: 1536357 - RNA, 19 nt, Artificial Sequence
  Description of Artificial Sequence: Synthetic oligonucleotide
  Antisense strand to SEQ ID NO: 1536356
aacaauaaaccugacauuu

SEQ ID NO: 1536358 - RNA, 19 nt, Artificial Sequence
  Description of Artificial Sequence: Synthetic oligonucleotide
  Sense strand starting at position 3740 of SEQ ID NO: 1245100
uuagaugcauggccauaaa

SEQ ID NO: 1536359 - RNA, 19 nt, Artificial Sequence
  Description of Artificial Sequence: Synthetic oligonucleotide
  Antisense strand to SEQ ID NO: 1536358
uuuauggccaugcaucuaa

SEQ ID NO: 1536360 - RNA, 19 nt, Artificial Sequence
  Description of Artificial Sequence: Synthetic oligonucleotide
  Sense strand starting at position 3743 of SEQ ID NO: 1245100
gaugcauggccauaaaggu

SEQ ID NO: 1536361 - RNA, 19 nt, Artificial Sequence
  Description of Artificial Sequence: Synthetic oligonucleotide
  Antisense strand to SEQ ID NO: 1536360
accuuuauggccaugcauc

SEQ ID NO: 1536362 - RNA, 19 nt, Artificial Sequence
  Description of Artificial Sequence: Synthetic oligonucleotide
  Sense strand starting at position 3967 of SEQ ID NO: 1245100
guagacaccagcuaggauu

SEQ ID NO: 1536363 - RNA, 19 nt, Artificial Sequence
  Description of Artificial Sequence: Synthetic oligonucleotide
  Antisense strand to SEQ ID NO: 1536362
aauccuagcuggugucuac

SEQ ID NO: 1536364 - RNA, 19 nt, Artificial Sequence
  Description of Artificial Sequence: Synthetic oligonucleotide
  Sense strand starting at position 380 of SEQ ID NO: 1245101
ggguauuauauugagucca

SEQ ID NO: 1536365 - RNA, 19 nt, Artificial Sequence
  Description of Artificial Sequence: Synthetic oligonucleotide
  Antisense strand to SEQ ID NO: 1536364
uggacucaauauaauaccc

SEQ ID NO: 1536366 - RNA, 19 nt, Artificial Sequence
  Description of Artificial Sequence: Synthetic oligonucleotide
  Sense strand starting at position 382 of SEQ ID NO: 1245101
guauuauauugaguccaaa

SEQ ID NO: 1536367 - RNA, 19 nt, Artificial Sequence
  Description of Artificial Sequence: Synthetic oligonucleotide
  Antisense strand to SEQ ID NO: 1536366
uuuggacucaauauaauac

SEQ ID NO: 1536368 - RNA, 19 nt, Artificial Sequence
  Description of Artificial Sequence: Synthetic oligonucleotide
  Sense strand starting at position 807 of SEQ ID NO: 1245101
agugaaauguccucuucua

SEQ ID NO: 1536369 - RNA, 19 nt, Artificial Sequence
  Description of Artificial Sequence: Synthetic oligonucleotide
  Antisense strand to SEQ ID NO: 1536368
uagaagaggacauuucacu

SEQ ID NO: 1536370 - RNA, 19 nt, Artificial Sequence
  Description of Artificial Sequence: Synthetic oligonucleotide
  Sense strand starting at position 911 of SEQ ID NO: 1245101
ugagguucuuucucucaga

SEQ ID NO: 1536371 - RNA, 19 nt, Artificial Sequence
  Description of Artificial Sequence: Synthetic oligonucleotide
  Antisense strand to SEQ ID NO: 1536370
ucugagagaaagaaccuca

SEQ ID NO: 1536372 - RNA, 19 nt, Artificial Sequence
  Description of Artificial Sequence: Synthetic oligonucleotide
  Sense strand starting at position 1080 of SEQ ID NO: 1245101
gagagucuucuacguauca

SEQ ID NO: 1536373 - RNA, 19 nt, Artificial Sequence
  Description of Artificial Sequence: Synthetic oligonucleotide
  Antisense strand to SEQ ID NO: 1536372
ugauacguagaagacucuc

SEQ ID NO: 1536374 - RNA, 19 nt, Artificial Sequence
  Description of Artificial Sequence: Synthetic oligonucleotide
  Sense strand starting at position 1081 of SEQ ID NO: 1245101
agagucuucuacguaucaa

SEQ ID NO: 1536375 - RNA, 19 nt, Artificial Sequence
  Description of Artificial Sequence: Synthetic oligonucleotide
  Antisense strand to SEQ ID NO: 1536374
uugauacguagaagacucu

SEQ ID NO: 1536376 - RNA, 19 nt, Artificial Sequence
  Description of Artificial Sequence: Synthetic oligonucleotide
  Sense strand starting at position 1139 of SEQ ID NO: 1245101
uguguuugcaauggaaaua

SEQ ID NO: 1536377 - RNA, 19 nt, Artificial Sequence
  Description of Artificial Sequence: Synthetic oligonucleotide
  Antisense strand to SEQ ID NO: 1536376
uauuuccauugcaaacaca

SEQ ID NO: 1536378 - RNA, 19 nt, Artificial Sequence
  Description of Artificial Sequence: Synthetic oligonucleotide
  Sense strand starting at position 1140 of SEQ ID NO: 1245101
guguuugcaauggaaauaa

SEQ ID NO: 1536379 - RNA, 19 nt, Artificial Sequence
  Description of Artificial Sequence: Synthetic oligonucleotide
  Antisense strand to SEQ ID NO: 1536378
uuauuuccauugcaaacac

SEQ ID NO: 1536380 - RNA, 19 nt, Artificial Sequence
  Description of Artificial Sequence: Synthetic oligonucleotide
  Sense strand starting at position 1179 of SEQ ID NO: 1245101
cuuuccaaguagucuggaa

SEQ ID NO: 1536381 - RNA, 19 nt, Artificial Sequence
  Description of Artificial Sequence: Synthetic oligonucleotide
  Antisense strand to SEQ ID NO: 1536380
uuccagacuacuuggaaag

SEQ ID NO: 1536382 - RNA, 19 nt, Artificial Sequence
  Description of Artificial Sequence: Synthetic oligonucleotide
  Sense strand starting at position 1181 of SEQ ID NO: 1245101
uuccaaguagucuggaaca

SEQ ID NO: 1536383 - RNA, 19 nt, Artificial Sequence
  Description of Artificial Sequence: Synthetic oligonucleotide
  Antisense strand to SEQ ID NO: 1536382
uguuccagacuacuuggaa

SEQ ID NO: 1536384 - RNA, 19 nt, Artificial Sequence
  Description of Artificial Sequence: Synthetic oligonucleotide
  Sense strand starting at position 1280 of SEQ ID NO: 1245101
agguuugcaccugaaccau

SEQ ID NO: 1536385 - RNA, 19 nt, Artificial Sequence
  Description of Artificial Sequence: Synthetic oligonucleotide
  Antisense strand to SEQ ID NO: 1536384
augguucaggugcaaaccu

SEQ ID NO: 1536386 - RNA, 19 nt, Artificial Sequence
  Description of Artificial Sequence: Synthetic oligonucleotide
  Sense strand starting at position 1297 of SEQ ID NO: 1245101
auggaaaccucgccgagaa

SEQ ID NO: 1536387 - RNA, 19 nt, Artificial Sequence
  Description of Artificial Sequence: Synthetic oligonucleotide
  Antisense strand to SEQ ID NO: 1536386
uucucggcgagguuuccau

SEQ ID NO: 1536388 - RNA, 19 nt, Artificial Sequence
  Description of Artificial Sequence: Synthetic oligonucleotide
  Sense strand starting at position 1298 of SEQ ID NO: 1245101
uggaaaccucgccgagaaa

SEQ ID NO: 1536389 - RNA, 19 nt, Artificial Sequence
  Description of Artificial Sequence: Synthetic oligonucleotide
  Antisense strand to SEQ ID NO: 1536388
uuucucggcgagguuucca

SEQ ID NO: 1536390 - RNA, 19 nt, Artificial Sequence
  Description of Artificial Sequence: Synthetic oligonucleotide
  Sense strand starting at position 1324 of SEQ ID NO: 1245101
ggugauuuagcccggugau

SEQ ID NO: 1536391 - RNA, 19 nt, Artificial Sequence
  Description of Artificial Sequence: Synthetic oligonucleotide
  Antisense strand to SEQ ID NO: 1536390
aucaccgggcuaaaucacc

SEQ ID NO: 1536392 - RNA, 19 nt, Artificial Sequence
  Description of Artificial Sequence: Synthetic oligonucleotide
  Sense strand starting at position 1325 of SEQ ID NO: 1245101
gugauuuagcccggugauu

SEQ ID NO: 1536393 - RNA, 19 nt, Artificial Sequence
  Description of Artificial Sequence: Synthetic oligonucleotide
  Antisense strand to SEQ ID NO: 1536392
aaucaccgggcuaaaucac

SEQ ID NO: 1536394 - RNA, 19 nt, Artificial Sequence
  Description of Artificial Sequence: Synthetic oligonucleotide
  Sense strand starting at position 1327 of SEQ ID NO: 1245101
gauuuagcccggugauuag

SEQ ID NO: 1536395 - RNA, 19 nt, Artificial Sequence
  Description of Artificial Sequence: Synthetic oligonucleotide
  Antisense strand to SEQ ID NO: 1536394
cuaaucaccgggcuaaauc

SEQ ID NO: 1536396 - RNA, 19 nt, Artificial Sequence
  Description of Artificial Sequence: Synthetic oligonucleotide
  Sense strand starting at position 1603 of SEQ ID NO: 1245101
ccacauuccucggccaaga

SEQ ID NO: 1536397 - RNA, 19 nt, Artificial Sequence
  Description of Artificial Sequence: Synthetic oligonucleotide
  Antisense strand to SEQ ID NO: 1536396
ucuuggccgaggaaugugg

SEQ ID NO: 1536398 - RNA, 19 nt, Artificial Sequence
  Description of Artificial Sequence: Synthetic oligonucleotide
  Sense strand starting at position 1698 of SEQ ID NO: 1245101
acaugcucccgggacaaau

SEQ ID NO: 1536399 - RNA, 19 nt, Artificial Sequence
  Description of Artificial Sequence: Synthetic oligonucleotide
  Antisense strand to SEQ ID NO: 1536398
auuugucccgggagcaugu

SEQ ID NO: 1536400 - RNA, 19 nt, Artificial Sequence
  Description of Artificial Sequence: Synthetic oligonucleotide
  Sense strand starting at position 2054 of SEQ ID NO: 1245101
cccaaagucaugugauguc

SEQ ID NO: 1536401 - RNA, 19 nt, Artificial Sequence
  Description of Artificial Sequence: Synthetic oligonucleotide
  Antisense strand to SEQ ID NO: 1536400
gacaucacaugacuuuggg

SEQ ID NO: 1536402 - RNA, 19 nt, Artificial Sequence
  Description of Artificial Sequence: Synthetic oligonucleotide
  Sense strand starting at position 2133 of SEQ ID NO: 1245101
gugugucaucucugagagg

SEQ ID NO: 1536403 - RNA, 19 nt, Artificial Sequence
  Description of Artificial Sequence: Synthetic oligonucleotide
  Antisense strand to SEQ ID NO: 1536402
ccucucagagaugacacac

SEQ ID NO: 1536404 - RNA, 19 nt, Artificial Sequence
  Description of Artificial Sequence: Synthetic oligonucleotide
  Sense strand starting at position 2138 of SEQ ID NO: 1245101
ucaucucugagagggagua

SEQ ID NO: 1536405 - RNA, 19 nt, Artificial Sequence
  Description of Artificial Sequence: Synthetic oligonucleotide
  Antisense strand to SEQ ID NO: 1536404
uacucccucucagagauga

SEQ ID NO: 1536406 - RNA, 19 nt, Artificial Sequence
  Description of Artificial Sequence: Synthetic oligonucleotide
  Sense strand starting at position 2250 of SEQ ID NO: 1245101
ggcccuugugauggaaugu

SEQ ID NO: 1536407 - RNA, 19 nt, Artificial Sequence
  Description of Artificial Sequence: Synthetic oligonucleotide
  Antisense strand to SEQ ID NO: 1536406
acauuccaucacaagggcc

SEQ ID NO: 1536408 - RNA, 19 nt, Artificial Sequence
  Description of Artificial Sequence: Synthetic oligonucleotide
  Sense strand starting at position 2251 of SEQ ID NO: 1245101
gcccuugugauggaauguu

SEQ ID NO: 1536409 - RNA, 19 nt, Artificial Sequence
  Description of Artificial Sequence: Synthetic oligonucleotide
  Antisense strand to SEQ ID NO: 1536408
aacauuccaucacaagggc

SEQ ID NO: 1536410 - RNA, 19 nt, Artificial Sequence
  Description of Artificial Sequence: Synthetic oligonucleotide
  Sense strand starting at position 2263 of SEQ ID NO: 1245101
gaauguuacggccgaggau

SEQ ID NO: 1536411 - RNA, 19 nt, Artificial Sequence
  Description of Artificial Sequence: Synthetic oligonucleotide
  Antisense strand to SEQ ID NO: 1536410
auccucggccguaacauuc

SEQ ID NO: 1536412 - RNA, 19 nt, Artificial Sequence
  Description of Artificial Sequence: Synthetic oligonucleotide
  Sense strand starting at position 2264 of SEQ ID NO: 1245101
aauguuacggccgaggauu

SEQ ID NO: 1536413 - RNA, 19 nt, Artificial Sequence
  Description of Artificial Sequence: Synthetic oligonucleotide
  Antisense strand to SEQ ID NO: 1536412
aauccucggccguaacauu

SEQ ID NO: 1536414 - RNA, 19 nt, Artificial Sequence
  Description of Artificial Sequence: Synthetic oligonucleotide
  Sense strand starting at position 2576 of SEQ ID NO: 1245101
ggaggauucagugggcuug

SEQ ID NO: 1536415 - RNA, 19 nt, Artificial Sequence
  Description of Artificial Sequence: Synthetic oligonucleotide
  Antisense strand to SEQ ID NO: 1536414
caagcccacugaauccucc

SEQ ID NO: 1536416 - RNA, 19 nt, Artificial Sequence
  Description of Artificial Sequence: Synthetic oligonucleotide
  Sense strand starting at position 2577 of SEQ ID NO: 1245101
gaggauucagugggcuuga

SEQ ID NO: 1536417 - RNA, 19 nt, Artificial Sequence
  Description of Artificial Sequence: Synthetic oligonucleotide
  Antisense strand to SEQ ID NO: 1536416
ucaagcccacugaauccuc

SEQ ID NO: 1536418 - RNA, 19 nt, Artificial Sequence
  Description of Artificial Sequence: Synthetic oligonucleotide
  Sense strand starting at position 2578 of SEQ ID NO: 1245101
aggauucagugggcuugaa

SEQ ID NO: 1536419 - RNA, 19 nt, Artificial Sequence
  Description of Artificial Sequence: Synthetic oligonucleotide
  Antisense strand to SEQ ID NO: 1536418
uucaagcccacugaauccu

SEQ ID NO: 1536420 - RNA, 19 nt, Artificial Sequence
  Description of Artificial Sequence: Synthetic oligonucleotide
  Sense strand starting at position 2748 of SEQ ID NO: 1245101
ucuucuuuggugggucaga

SEQ ID NO: 1536421 - RNA, 19 nt, Artificial Sequence
  Description of Artificial Sequence: Synthetic oligonucleotide
  Antisense strand to SEQ ID NO: 1536420
ucugacccaccaaagaaga

SEQ ID NO: 1536422 - RNA, 19 nt, Artificial Sequence
  Description of Artificial Sequence: Synthetic oligonucleotide
  Sense strand starting at position 2757 of SEQ ID NO: 1245101
gugggucagacuugaagga

SEQ ID NO: 1536423 - RNA, 19 nt, Artificial Sequence
  Description of Artificial Sequence: Synthetic oligonucleotide
  Antisense strand to SEQ ID NO: 1536422
uccuucaagucugacccac

SEQ ID NO: 1536424 - RNA, 19 nt, Artificial Sequence
  Description of Artificial Sequence: Synthetic oligonucleotide
  Sense strand starting at position 2789 of SEQ ID NO: 1245101
caggaacucugggagagau

SEQ ID NO: 1536425 - RNA, 19 nt, Artificial Sequence
  Description of Artificial Sequence: Synthetic oligonucleotide
  Antisense strand to SEQ ID NO: 1536424
aucucucccagaguuccug

SEQ ID NO: 1536426 - RNA, 19 nt, Artificial Sequence
  Description of Artificial Sequence: Synthetic oligonucleotide
  Sense strand starting at position 3079 of SEQ ID NO: 1245101
ccuugucuuguacaagcau

SEQ ID NO: 1536427 - RNA, 19 nt, Artificial Sequence
  Description of Artificial Sequence: Synthetic oligonucleotide
  Antisense strand to SEQ ID NO: 1536426
augcuuguacaagacaagg

SEQ ID NO: 1536428 - RNA, 19 nt, Artificial Sequence
  Description of Artificial Sequence: Synthetic oligonucleotide
  Sense strand starting at position 3153 of SEQ ID NO: 1245101
uccagauugucccuucuca

SEQ ID NO: 1536429 - RNA, 19 nt, Artificial Sequence
  Description of Artificial Sequence: Synthetic oligonucleotide
  Antisense strand to SEQ ID NO: 1536428
ugagaagggacaaucugga

SEQ ID NO: 1536430 - RNA, 19 nt, Artificial Sequence
  Description of Artificial Sequence: Synthetic oligonucleotide
  Sense strand starting at position 3175 of SEQ ID NO: 1245101
ggacacaguuguguguaau

SEQ ID NO: 1536431 - RNA, 19 nt, Artificial Sequence
  Description of Artificial Sequence: Synthetic oligonucleotide
  Antisense strand to SEQ ID NO: 1536430
auuacacacaacugugucc

SEQ ID NO: 1536432 - RNA, 19 nt, Artificial Sequence
  Description of Artificial Sequence: Synthetic oligonucleotide
  Sense strand starting at position 3176 of SEQ ID NO: 1245101
gacacaguuguguguaauc

SEQ ID NO: 1536433 - RNA, 19 nt, Artificial Sequence
  Description of Artificial Sequence: Synthetic oligonucleotide
  Antisense strand to SEQ ID NO: 1536432
gauuacacacaacuguguc

SEQ ID NO: 1536434 - RNA, 19 nt, Artificial Sequence
  Description of Artificial Sequence: Synthetic oligonucleotide
  Sense strand starting at position 3178 of SEQ ID NO: 1245101
cacaguuguguguaaucag

SEQ ID NO: 1536435 - RNA, 19 nt, Artificial Sequence
  Description of Artificial Sequence: Synthetic oligonucleotide
  Antisense strand to SEQ ID NO: 1536434
cugauuacacacaacugug

SEQ ID NO: 1536436 - RNA, 19 nt, Artificial Sequence
  Description of Artificial Sequence: Synthetic oligonucleotide
  Sense strand starting at position 3214 of SEQ ID NO: 1245101
augugaccuuaucuaaaga

SEQ ID NO: 1536437 - RNA, 19 nt, Artificial Sequence
  Description of Artificial Sequence: Synthetic oligonucleotide
  Antisense strand to SEQ ID NO: 1536436
ucuuuagauaaggucacau

SEQ ID NO: 1536438 - RNA, 19 nt, Artificial Sequence
  Description of Artificial Sequence: Synthetic oligonucleotide
  Sense strand starting at position 3474 of SEQ ID NO: 1245101
acucuaacuguuugcugaa

SEQ ID NO: 1536439 - RNA, 19 nt, Artificial Sequence
  Description of Artificial Sequence: Synthetic oligonucleotide
  Antisense strand to SEQ ID NO: 1536438
uucagcaaacaguuagagu

SEQ ID NO: 1536440 - RNA, 19 nt, Artificial Sequence
  Description of Artificial Sequence: Synthetic oligonucleotide
  Sense strand starting at position 3475 of SEQ ID NO: 1245101
cucuaacuguuugcugaau

SEQ ID NO: 1536441 - RNA, 19 nt, Artificial Sequence
  Description of Artificial Sequence: Synthetic oligonucleotide
  Antisense strand to SEQ ID NO: 1536440
auucagcaaacaguuagag

SEQ ID NO: 1536442 - RNA, 19 nt, Artificial Sequence
  Description of Artificial Sequence: Synthetic oligonucleotide
  Sense strand starting at position 3527 of SEQ ID NO: 1245101
aaagaaaucucuggaaagg

SEQ ID NO: 1536443 - RNA, 19 nt, Artificial Sequence
  Description of Artificial Sequence: Synthetic oligonucleotide
  Antisense strand to SEQ ID NO: 1536442
ccuuuccagagauuucuuu

SEQ ID NO: 1536444 - RNA, 19 nt, Artificial Sequence
  Description of Artificial Sequence: Synthetic oligonucleotide
  Sense strand starting at position 43 of SEQ ID NO: 1245102
acuuguggcgucuugucaa

SEQ ID NO: 1536445 - RNA, 19 nt, Artificial Sequence
  Description of Artificial Sequence: Synthetic oligonucleotide
  Antisense strand to SEQ ID NO: 1536444
uugacaagacgccacaagu

SEQ ID NO: 1536446 - RNA, 19 nt, Artificial Sequence
  Description of Artificial Sequence: Synthetic oligonucleotide
  Sense strand starting at position 255 of SEQ ID NO: 1245102
gaguuucuguuuguggaca

SEQ ID NO: 1536447 - RNA, 19 nt, Artificial Sequence
  Description of Artificial Sequence: Synthetic oligonucleotide
  Antisense strand to SEQ ID NO: 1536446
uguccacaaacagaaacuc

SEQ ID NO: 1536448 - RNA, 19 nt, Artificial Sequence
  Description of Artificial Sequence: Synthetic oligonucleotide
  Sense strand starting at position 260 of SEQ ID NO: 1245102
ucuguuuguggacaagaag

SEQ ID NO: 1536449 - RNA, 19 nt, Artificial Sequence
  Description of Artificial Sequence: Synthetic oligonucleotide
  Antisense strand to SEQ ID NO: 1536448
cuucuuguccacaaacaga

SEQ ID NO: 1536450 - RNA, 19 nt, Artificial Sequence
  Description of Artificial Sequence: Synthetic oligonucleotide
  Sense strand starting at position 407 of SEQ ID NO: 1245102
ugugcuuuggguuaaagau

SEQ ID NO: 1536451 - RNA, 19 nt, Artificial Sequence
  Description of Artificial Sequence: Synthetic oligonucleotide
  Antisense strand to SEQ ID NO: 1536450
aucuuuaacccaaagcaca

SEQ ID NO: 1536452 - RNA, 19 nt, Artificial Sequence
  Description of Artificial Sequence: Synthetic oligonucleotide
  Sense strand starting at position 433 of SEQ ID NO: 1245102
acuguuuguacugagggaa

SEQ ID NO: 1536453 - RNA, 19 nt, Artificial Sequence
  Description of Artificial Sequence: Synthetic oligonucleotide
  Antisense strand to SEQ ID NO: 1536452
uucccucaguacaaacagu

SEQ ID NO: 1536454 - RNA, 19 nt, Artificial Sequence
  Description of Artificial Sequence: Synthetic oligonucleotide
  Sense strand starting at position 1011 of SEQ ID NO: 1245102
guaccagguuccguaaaua

SEQ ID NO: 1536455 - RNA, 19 nt, Artificial Sequence
  Description of Artificial Sequence: Synthetic oligonucleotide
  Antisense strand to SEQ ID NO: 1536454
uauuuacggaaccugguac

SEQ ID NO: 1536456 - RNA, 19 nt, Artificial Sequence
  Description of Artificial Sequence: Synthetic oligonucleotide
  Sense strand starting at position 1037 of SEQ ID NO: 1245102
aucugaaugugacuaaauu

SEQ ID NO: 1536457 - RNA, 19 nt, Artificial Sequence
  Description of Artificial Sequence: Synthetic oligonucleotide
  Antisense strand to SEQ ID NO: 1536456
aauuuagucacauucagau

SEQ ID NO: 1536458 - RNA, 19 nt, Artificial Sequence
  Description of Artificial Sequence: Synthetic oligonucleotide
  Sense strand starting at position 1104 of SEQ ID NO: 1245102
gcuuauuuaucaucccgac

SEQ ID NO: 1536459 - RNA, 19 nt, Artificial Sequence
  Description of Artificial Sequence: Synthetic oligonucleotide
  Antisense strand to SEQ ID NO: 1536458
gucgggaugauaaauaagc

SEQ ID NO: 1536460 - RNA, 19 nt, Artificial Sequence
  Description of Artificial Sequence: Synthetic oligonucleotide
  Sense strand starting at position 1175 of SEQ ID NO: 1245102
aucuguaauguauguacga

SEQ ID NO: 1536461 - RNA, 19 nt, Artificial Sequence
  Description of Artificial Sequence: Synthetic oligonucleotide
  Antisense strand to SEQ ID NO: 1536460
ucguacauacauuacagau

SEQ ID NO: 1536462 - RNA, 19 nt, Artificial Sequence
  Description of Artificial Sequence: Synthetic oligonucleotide
  Sense strand starting at position 1176 of SEQ ID NO: 1245102
ucuguaauguauguacgaa

SEQ ID NO: 1536463 - RNA, 19 nt, Artificial Sequence
  Description of Artificial Sequence: Synthetic oligonucleotide
  Antisense strand to SEQ ID NO: 1536462
uucguacauacauuacaga

SEQ ID NO: 1536464 - RNA, 19 nt, Artificial Sequence
  Description of Artificial Sequence: Synthetic oligonucleotide
  Sense strand starting at position 1177 of SEQ ID NO: 1245102
cuguaauguauguacgaag

SEQ ID NO: 1536465 - RNA, 19 nt, Artificial Sequence
  Description of Artificial Sequence: Synthetic oligonucleotide
  Antisense strand to SEQ ID NO: 1536464
cuucguacauacauuacag

SEQ ID NO: 1536466 - RNA, 19 nt, Artificial Sequence
  Description of Artificial Sequence: Synthetic oligonucleotide
  Sense strand starting at position 1394 of SEQ ID NO: 1245102
aguguaaccuaugccauaa

SEQ ID NO: 1536467 - RNA, 19 nt, Artificial Sequence
  Description of Artificial Sequence: Synthetic oligonucleotide
  Antisense strand to SEQ ID NO: 1536466
uuauggcauagguuacacu

SEQ ID NO: 1536468 - RNA, 19 nt, Artificial Sequence
  Description of Artificial Sequence: Synthetic oligonucleotide
  Sense strand starting at position 1427 of SEQ ID NO: 1245102
acagaucucuaggcagauc

SEQ ID NO: 1536469 - RNA, 19 nt, Artificial Sequence
  Description of Artificial Sequence: Synthetic oligonucleotide
  Antisense strand to SEQ ID NO: 1536468
gaucugccuagagaucugu

SEQ ID NO: 1536470 - RNA, 19 nt, Artificial Sequence
  Description of Artificial Sequence: Synthetic oligonucleotide
  Sense strand starting at position 1456 of SEQ ID NO: 1245102
ggauuuaaauggcauaauu

SEQ ID NO: 1536471 - RNA, 19 nt, Artificial Sequence
  Description of Artificial Sequence: Synthetic oligonucleotide
  Antisense strand to SEQ ID NO: 1536470
aauuaugccauuuaaaucc

SEQ ID NO: 1536472 - RNA, 19 nt, Artificial Sequence
  Description of Artificial Sequence: Synthetic oligonucleotide
  Sense strand starting at position 2032 of SEQ ID NO: 1245102
ucuguuauugcagaggaua

SEQ ID NO: 1536473 - RNA, 19 nt, Artificial Sequence
  Description of Artificial Sequence: Synthetic oligonucleotide
  Antisense strand to SEQ ID NO: 1536472
uauccucugcaauaacaga

SEQ ID NO: 1536474 - RNA, 19 nt, Artificial Sequence
  Description of Artificial Sequence: Synthetic oligonucleotide
  Sense strand starting at position 2034 of SEQ ID NO: 1245102
uguuauugcagaggauaua

SEQ ID NO: 1536475 - RNA, 19 nt, Artificial Sequence
  Description of Artificial Sequence: Synthetic oligonucleotide
  Antisense strand to SEQ ID NO: 1536474
uauauccucugcaauaaca

SEQ ID NO: 1536476 - RNA, 19 nt, Artificial Sequence
  Description of Artificial Sequence: Synthetic oligonucleotide
  Sense strand starting at position 2147 of SEQ ID NO: 1245102
guuuaagaaaguugaugau

SEQ ID NO: 1536477 - RNA, 19 nt, Artificial Sequence
  Description of Artificial Sequence: Synthetic oligonucleotide
  Antisense strand to SEQ ID NO: 1536476
aucaucaacuuucuuaaac

SEQ ID NO: 1536478 - RNA, 19 nt, Artificial Sequence
  Description of Artificial Sequence: Synthetic oligonucleotide
  Sense strand starting at position 2159 of SEQ ID NO: 1245102
ugaugaucuuaguccagaa

SEQ ID NO: 1536479 - RNA, 19 nt, Artificial Sequence
  Description of Artificial Sequence: Synthetic oligonucleotide
  Antisense strand to SEQ ID NO: 1536478
uucuggacuaagaucauca

SEQ ID NO: 1536480 - RNA, 19 nt, Artificial Sequence
  Description of Artificial Sequence: Synthetic oligonucleotide
  Sense strand starting at position 2549 of SEQ ID NO: 1245102
gagcauuguuuccuuggua

SEQ ID NO: 1536481 - RNA, 19 nt, Artificial Sequence
  Description of Artificial Sequence: Synthetic oligonucleotide
  Antisense strand to SEQ ID NO: 1536480
uaccaaggaaacaaugcuc

SEQ ID NO: 1536482 - RNA, 19 nt, Artificial Sequence
  Description of Artificial Sequence: Synthetic oligonucleotide
  Sense strand starting at position 2552 of SEQ ID NO: 1245102
cauuguuuccuugguauag

SEQ ID NO: 1536483 - RNA, 19 nt, Artificial Sequence
  Description of Artificial Sequence: Synthetic oligonucleotide
  Antisense strand to SEQ ID NO: 1536482
cuauaccaaggaaacaaug

SEQ ID NO: 1536484 - RNA, 19 nt, Artificial Sequence
  Description of Artificial Sequence: Synthetic oligonucleotide
  Sense strand starting at position 2664 of SEQ ID NO: 1245102
gaugaaaucgcagggcacu

SEQ ID NO: 1536485 - RNA, 19 nt, Artificial Sequence
  Description of Artificial Sequence: Synthetic oligonucleotide
  Antisense strand to SEQ ID NO: 1536484
agugcccugcgauuucauc

SEQ ID NO: 1536486 - RNA, 19 nt, Artificial Sequence
  Description of Artificial Sequence: Synthetic oligonucleotide
  Sense strand starting at position 2694 of SEQ ID NO: 1245102
augugauuucuaugugggu

SEQ ID NO: 1536487 - RNA, 19 nt, Artificial Sequence
  Description of Artificial Sequence: Synthetic oligonucleotide
  Antisense strand to SEQ ID NO: 1536486
acccacauagaaaucacau

SEQ ID NO: 1536488 - RNA, 19 nt, Artificial Sequence
  Description of Artificial Sequence: Synthetic oligonucleotide
  Sense strand starting at position 2700 of SEQ ID NO: 1245102
uuucuaugugggugggaca

SEQ ID NO: 1536489 - RNA, 19 nt, Artificial Sequence
  Description of Artificial Sequence: Synthetic oligonucleotide
  Antisense strand to SEQ ID NO: 1536488
ugucccacccacauagaaa

SEQ ID NO: 1536490 - RNA, 19 nt, Artificial Sequence
  Description of Artificial Sequence: Synthetic oligonucleotide
  Sense strand starting at position 2772 of SEQ ID NO: 1245102
agagcauggaaugguuaua

SEQ ID NO: 1536491 - RNA, 19 nt, Artificial Sequence
  Description of Artificial Sequence: Synthetic oligonucleotide
  Antisense strand to SEQ ID NO: 1536490
uauaaccauuccaugcucu

SEQ ID NO: 1536492 - RNA, 19 nt, Artificial Sequence
  Description of Artificial Sequence: Synthetic oligonucleotide
  Sense strand starting at position 2871 of SEQ ID NO: 1245102
uggagaggcguuuaucagu

SEQ ID NO: 1536493 - RNA, 19 nt, Artificial Sequence
  Description of Artificial Sequence: Synthetic oligonucleotide
  Antisense strand to SEQ ID NO: 1536492
acugauaaacgccucucca

SEQ ID NO: 1536494 - RNA, 19 nt, Artificial Sequence
  Description of Artificial Sequence: Synthetic oligonucleotide
  Sense strand starting at position 3007 of SEQ ID NO: 1245102
cuggguuccugguuauuaa

SEQ ID NO: 1536495 - RNA, 19 nt, Artificial Sequence
  Description of Artificial Sequence: Synthetic oligonucleotide
  Antisense strand to SEQ ID NO: 1536494
uuaauaaccaggaacccag

SEQ ID NO: 1536496 - RNA, 19 nt, Artificial Sequence
  Description of Artificial Sequence: Synthetic oligonucleotide
  Sense strand starting at position 3008 of SEQ ID NO: 1245102
uggguuccugguuauuaaa

SEQ ID NO: 1536497 - RNA, 19 nt, Artificial Sequence
  Description of Artificial Sequence: Synthetic oligonucleotide
  Antisense strand to SEQ ID NO: 1536496
uuuaauaaccaggaaccca

SEQ ID NO: 1536498 - RNA, 19 nt, Artificial Sequence
  Description of Artificial Sequence: Synthetic oligonucleotide
  Sense strand starting at position 3010 of SEQ ID NO: 1245102
gguuccugguuauuaaaug

SEQ ID NO: 1536499 - RNA, 19 nt, Artificial Sequence
  Description of Artificial Sequence: Synthetic oligonucleotide
  Antisense strand to SEQ ID NO: 1536498
cauuuaauaaccaggaacc

SEQ ID NO: 1536500 - RNA, 19 nt, Artificial Sequence
  Description of Artificial Sequence: Synthetic oligonucleotide
  Sense strand starting at position 3048 of SEQ ID NO: 1245102
ugugguacauucucauuaa

SEQ ID NO: 1536501 - RNA, 19 nt, Artificial Sequence
  Description of Artificial Sequence: Synthetic oligonucleotide
  Antisense strand to SEQ ID NO: 1536500
uuaaugagaauguaccaca

SEQ ID NO: 1536502 - RNA, 19 nt, Artificial Sequence
  Description of Artificial Sequence: Synthetic oligonucleotide
  Sense strand starting at position 3071 of SEQ ID NO: 1245102
auucucuuguagucaaauu

SEQ ID NO: 1536503 - RNA, 19 nt, Artificial Sequence
  Description of Artificial Sequence: Synthetic oligonucleotide
  Antisense strand to SEQ ID NO: 1536502
aauuugacuacaagagaau

SEQ ID NO: 1536504 - RNA, 19 nt, Artificial Sequence
  Description of Artificial Sequence: Synthetic oligonucleotide
  Sense strand starting at position 3205 of SEQ ID NO: 1245102
cugucuagauauguuuaga

SEQ ID NO: 1536505 - RNA, 19 nt, Artificial Sequence
  Description of Artificial Sequence: Synthetic oligonucleotide
  Antisense strand to SEQ ID NO: 1536504
ucuaaacauaucuagacag

SEQ ID NO: 1536506 - RNA, 19 nt, Artificial Sequence
  Description of Artificial Sequence: Synthetic oligonucleotide
  Sense strand starting at position 3436 of SEQ ID NO: 1245102
gcaacauaugacuguaauu

SEQ ID NO: 1536507 - RNA, 19 nt, Artificial Sequence
  Description of Artificial Sequence: Synthetic oligonucleotide
  Antisense strand to SEQ ID NO: 1536506
aauuacagucauauguugc

SEQ ID NO: 1536508 - RNA, 19 nt, Artificial Sequence
  Description of Artificial Sequence: Synthetic oligonucleotide
  Sense strand starting at position 3449 of SEQ ID NO: 1245102
guaauuaucuaaguuacga

SEQ ID NO: 1536509 - RNA, 19 nt, Artificial Sequence
  Description of Artificial Sequence: Synthetic oligonucleotide
  Antisense strand to SEQ ID NO: 1536508
ucguaacuuagauaauuac

SEQ ID NO: 1536510 - RNA, 19 nt, Artificial Sequence
  Description of Artificial Sequence: Synthetic oligonucleotide
  Sense strand starting at position 3489 of SEQ ID NO: 1245102
cagggaucagauuguucca

SEQ ID NO: 1536511 - RNA, 19 nt, Artificial Sequence
  Description of Artificial Sequence: Synthetic oligonucleotide
  Antisense strand to SEQ ID NO: 1536510
uggaacaaucugaucccug

SEQ ID NO: 1536512 - RNA, 19 nt, Artificial Sequence
  Description of Artificial Sequence: Synthetic oligonucleotide
  Sense strand starting at position 3492 of SEQ ID NO: 1245102
ggaucagauuguuccacca

SEQ ID NO: 1536513 - RNA, 19 nt, Artificial Sequence
  Description of Artificial Sequence: Synthetic oligonucleotide
  Antisense strand to SEQ ID NO: 1536512
ugguggaacaaucugaucc

SEQ ID NO: 1536514 - RNA, 19 nt, Artificial Sequence
  Description of Artificial Sequence: Synthetic oligonucleotide
  Sense strand starting at position 3500 of SEQ ID NO: 1245102
uuguuccaccaucagagau

SEQ ID NO: 1536515 - RNA, 19 nt, Artificial Sequence
  Description of Artificial Sequence: Synthetic oligonucleotide
  Antisense strand to SEQ ID NO: 1536514
aucucugaugguggaacaa

SEQ ID NO: 1536516 - RNA, 19 nt, Artificial Sequence
  Description of Artificial Sequence: Synthetic oligonucleotide
  Sense strand starting at position 3508 of SEQ ID NO: 1245102
ccaucagagaugggcuaaa

SEQ ID NO: 1536517 - RNA, 19 nt, Artificial Sequence
  Description of Artificial Sequence: Synthetic oligonucleotide
  Antisense strand to SEQ ID NO: 1536516
uuuagcccaucucugaugg

SEQ ID NO: 1536518 - RNA, 19 nt, Artificial Sequence
  Description of Artificial Sequence: Synthetic oligonucleotide
  Sense strand starting at position 3704 of SEQ ID NO: 1245102
gcaguaugcugauuuaagc

SEQ ID NO: 1536519 - RNA, 19 nt, Artificial Sequence
  Description of Artificial Sequence: Synthetic oligonucleotide
  Antisense strand to SEQ ID NO: 1536518
gcuuaaaucagcauacugc

SEQ ID NO: 1536520 - RNA, 19 nt, Artificial Sequence
  Description of Artificial Sequence: Synthetic oligonucleotide
  Sense strand starting at position 3804 of SEQ ID NO: 1245102
agagacagguugucauucu

SEQ ID NO: 1536521 - RNA, 19 nt, Artificial Sequence
  Description of Artificial Sequence: Synthetic oligonucleotide
  Antisense strand to SEQ ID NO: 1536520
agaaugacaaccugucucu

SEQ ID NO: 1536522 - RNA, 19 nt, Artificial Sequence
  Description of Artificial Sequence: Synthetic oligonucleotide
  Sense strand starting at position 3977 of SEQ ID NO: 1245102
ggguuugcucguguuacuc

SEQ ID NO: 1536523 - RNA, 19 nt, Artificial Sequence
  Description of Artificial Sequence: Synthetic oligonucleotide
  Antisense strand to SEQ ID NO: 1536522
gaguaacacgagcaaaccc

SEQ ID NO: 1536524 - RNA, 19 nt, Artificial Sequence
  Description of Artificial Sequence: Synthetic oligonucleotide
  Sense strand starting at position 113 of SEQ ID NO: 1245103
gcaacauaugacuguaauu

SEQ ID NO: 1536525 - RNA, 19 nt, Artificial Sequence
  Description of Artificial Sequence: Synthetic oligonucleotide
  Antisense strand to SEQ ID NO: 1536524
aauuacagucauauguugc

SEQ ID NO: 1536526 - RNA, 19 nt, Artificial Sequence
  Description of Artificial Sequence: Synthetic oligonucleotide
  Sense strand starting at position 126 of SEQ ID NO: 1245103
guaauuaucuaaguuacga

SEQ ID NO: 1536527 - RNA, 19 nt, Artificial Sequence
  Description of Artificial Sequence: Synthetic oligonucleotide
  Antisense strand to SEQ ID NO: 1536526
ucguaacuuagauaauuac

SEQ ID NO: 1536528 - RNA, 19 nt, Artificial Sequence
  Description of Artificial Sequence: Synthetic oligonucleotide
  Sense strand starting at position 166 of SEQ ID NO: 1245103
cagggaucagauuguucca

SEQ ID NO: 1536529 - RNA, 19 nt, Artificial Sequence
  Description of Artificial Sequence: Synthetic oligonucleotide
  Antisense strand to SEQ ID NO: 1536528
uggaacaaucugaucccug

SEQ ID NO: 1536530 - RNA, 19 nt, Artificial Sequence
  Description of Artificial Sequence: Synthetic oligonucleotide
  Sense strand starting at position 169 of SEQ ID NO: 1245103
ggaucagauuguuccacca

SEQ ID NO: 1536531 - RNA, 19 nt, Artificial Sequence
  Description of Artificial Sequence: Synthetic oligonucleotide
  Antisense strand to SEQ ID NO: 1536530
ugguggaacaaucugaucc

SEQ ID NO: 1536532 - RNA, 19 nt, Artificial Sequence
  Description of Artificial Sequence: Synthetic oligonucleotide
  Sense strand starting at position 177 of SEQ ID NO: 1245103
uuguuccaccaucagagau

SEQ ID NO: 1536533 - RNA, 19 nt, Artificial Sequence
  Description of Artificial Sequence: Synthetic oligonucleotide
  Antisense strand to SEQ ID NO: 1536532
aucucugaugguggaacaa

SEQ ID NO: 1536534 - RNA, 19 nt, Artificial Sequence
  Description of Artificial Sequence: Synthetic oligonucleotide
  Sense strand starting at position 185 of SEQ ID NO: 1245103
ccaucagagaugggcuaaa

SEQ ID NO: 1536535 - RNA, 19 nt, Artificial Sequence
  Description of Artificial Sequence: Synthetic oligonucleotide
  Antisense strand to SEQ ID NO: 1536534
uuuagcccaucucugaugg

SEQ ID NO: 1536536 - RNA, 19 nt, Artificial Sequence
  Description of Artificial Sequence: Synthetic oligonucleotide
  Sense strand starting at position 381 of SEQ ID NO: 1245103
gcaguaugcugauuuaagc

SEQ ID NO: 1536537 - RNA, 19 nt, Artificial Sequence
  Description of Artificial Sequence: Synthetic oligonucleotide
  Antisense strand to SEQ ID NO: 1536536
gcuuaaaucagcauacugc

SEQ ID NO: 1536538 - RNA, 19 nt, Artificial Sequence
  Description of Artificial Sequence: Synthetic oligonucleotide
  Sense strand starting at position 481 of SEQ ID NO: 1245103
agagacagguugucauucu

SEQ ID NO: 1536539 - RNA, 19 nt, Artificial Sequence
  Description of Artificial Sequence: Synthetic oligonucleotide
  Antisense strand to SEQ ID NO: 1536538
agaaugacaaccugucucu

SEQ ID NO: 1536540 - RNA, 19 nt, Artificial Sequence
  Description of Artificial Sequence: Synthetic oligonucleotide
  Sense strand starting at position 654 of SEQ ID NO: 1245103
ggguuugcucguguuacuc

SEQ ID NO: 1536541 - RNA, 19 nt, Artificial Sequence
  Description of Artificial Sequence: Synthetic oligonucleotide
  Antisense strand to SEQ ID NO: 1536540
gaguaacacgagcaaaccc

SEQ ID NO: 1536542 - RNA, 19 nt, Artificial Sequence
  Description of Artificial Sequence: Synthetic oligonucleotide
  Sense strand starting at position 845 of SEQ ID NO: 1245103
acaaaugagucuucuaguu

SEQ ID NO: 1536543 - RNA, 19 nt, Artificial Sequence
  Description of Artificial Sequence: Synthetic oligonucleotide
  Antisense strand to SEQ ID NO: 1536542
aacuagaagacucauuugu

SEQ ID NO: 1536544 - RNA, 19 nt, Artificial Sequence
  Description of Artificial Sequence: Synthetic oligonucleotide
  Sense strand starting at position 850 of SEQ ID NO: 1245103
ugagucuucuaguucugag

SEQ ID NO: 1536545 - RNA, 19 nt, Artificial Sequence
  Description of Artificial Sequence: Synthetic oligonucleotide
  Antisense strand to SEQ ID NO: 1536544
cucagaacuagaagacuca

SEQ ID NO: 1536546 - RNA, 19 nt, Artificial Sequence
  Description of Artificial Sequence: Synthetic oligonucleotide
  Sense strand starting at position 887 of SEQ ID NO: 1245103
uugauaauugaaggcauau

SEQ ID NO: 1536547 - RNA, 19 nt, Artificial Sequence
  Description of Artificial Sequence: Synthetic oligonucleotide
  Antisense strand to SEQ ID NO: 1536546
auaugccuucaauuaucaa

SEQ ID NO: 1536548 - RNA, 19 nt, Artificial Sequence
  Description of Artificial Sequence: Synthetic oligonucleotide
  Sense strand starting at position 977 of SEQ ID NO: 1245103
gcuagaacuugaucccuaa

SEQ ID NO: 1536549 - RNA, 19 nt, Artificial Sequence
  Description of Artificial Sequence: Synthetic oligonucleotide
  Antisense strand to SEQ ID NO: 1536548
uuagggaucaaguucuagc

SEQ ID NO: 1536550 - RNA, 19 nt, Artificial Sequence
  Description of Artificial Sequence: Synthetic oligonucleotide
  Sense strand starting at position 980 of SEQ ID NO: 1245103
agaacuugaucccuaagca

SEQ ID NO: 1536551 - RNA, 19 nt, Artificial Sequence
  Description of Artificial Sequence: Synthetic oligonucleotide
  Antisense strand to SEQ ID NO: 1536550
ugcuuagggaucaaguucu

SEQ ID NO: 1536552 - RNA, 19 nt, Artificial Sequence
  Description of Artificial Sequence: Synthetic oligonucleotide
  Sense strand starting at position 1091 of SEQ ID NO: 1245103
cagucuaugcuuggaugau

SEQ ID NO: 1536553 - RNA, 19 nt, Artificial Sequence
  Description of Artificial Sequence: Synthetic oligonucleotide
  Antisense strand to SEQ ID NO: 1536552
aucauccaagcauagacug

SEQ ID NO: 1536554 - RNA, 19 nt, Artificial Sequence
  Description of Artificial Sequence: Synthetic oligonucleotide
  Sense strand starting at position 1101 of SEQ ID NO: 1245103
uuggaugaucuacggaauc

SEQ ID NO: 1536555 - RNA, 19 nt, Artificial Sequence
  Description of Artificial Sequence: Synthetic oligonucleotide
  Antisense strand to SEQ ID NO: 1536554
gauuccguagaucauccaa

SEQ ID NO: 1536556 - RNA, 19 nt, Artificial Sequence
  Description of Artificial Sequence: Synthetic oligonucleotide
  Sense strand starting at position 1396 of SEQ ID NO: 1245103
aagggauccguuggagaaa

SEQ ID NO: 1536557 - RNA, 19 nt, Artificial Sequence
  Description of Artificial Sequence: Synthetic oligonucleotide
  Antisense strand to SEQ ID NO: 1536556
uuucuccaacggaucccuu

SEQ ID NO: 1536558 - RNA, 19 nt, Artificial Sequence
  Description of Artificial Sequence: Synthetic oligonucleotide
  Sense strand starting at position 2199 of SEQ ID NO: 1245103
ggcggagauuucguggguu

SEQ ID NO: 1536559 - RNA, 19 nt, Artificial Sequence
  Description of Artificial Sequence: Synthetic oligonucleotide
  Antisense strand to SEQ ID NO: 1536558
aacccacgaaaucuccgcc

SEQ ID NO: 1536560 - RNA, 19 nt, Artificial Sequence
  Description of Artificial Sequence: Synthetic oligonucleotide
  Sense strand starting at position 2331 of SEQ ID NO: 1245103
ccgagaagucgccugcagu

SEQ ID NO: 1536561 - RNA, 19 nt, Artificial Sequence
  Description of Artificial Sequence: Synthetic oligonucleotide
  Antisense strand to SEQ ID NO: 1536560
acugcaggcgacuucucgg

SEQ ID NO: 1536562 - RNA, 19 nt, Artificial Sequence
  Description of Artificial Sequence: Synthetic oligonucleotide
  Sense strand starting at position 2517 of SEQ ID NO: 1245103
caaugagaggucggucuga

SEQ ID NO: 1536563 - RNA, 19 nt, Artificial Sequence
  Description of Artificial Sequence: Synthetic oligonucleotide
  Antisense strand to SEQ ID NO: 1536562
ucagaccgaccucucauug

SEQ ID NO: 1536564 - RNA, 19 nt, Artificial Sequence
  Description of Artificial Sequence: Synthetic oligonucleotide
  Sense strand starting at position 2561 of SEQ ID NO: 1245103
caucguuaccaguagugga

SEQ ID NO: 1536565 - RNA, 19 nt, Artificial Sequence
  Description of Artificial Sequence: Synthetic oligonucleotide
  Antisense strand to SEQ ID NO: 1536564
uccacuacugguaacgaug

SEQ ID NO: 1536566 - RNA, 19 nt, Artificial Sequence
  Description of Artificial Sequence: Synthetic oligonucleotide
  Sense strand starting at position 2565 of SEQ ID NO: 1245103
guuaccaguaguggaaaua

SEQ ID NO: 1536567 - RNA, 19 nt, Artificial Sequence
  Description of Artificial Sequence: Synthetic oligonucleotide
  Antisense strand to SEQ ID NO: 1536566
uauuuccacuacugguaac

SEQ ID NO: 1536568 - RNA, 19 nt, Artificial Sequence
  Description of Artificial Sequence: Synthetic oligonucleotide
  Sense strand starting at position 2585 of SEQ ID NO: 1245103
uuuaguauuugugucccau

SEQ ID NO: 1536569 - RNA, 19 nt, Artificial Sequence
  Description of Artificial Sequence: Synthetic oligonucleotide
  Antisense strand to SEQ ID NO: 1536568
augggacacaaauacuaaa

SEQ ID NO: 1536570 - RNA, 19 nt, Artificial Sequence
  Description of Artificial Sequence: Synthetic oligonucleotide
  Sense strand starting at position 2587 of SEQ ID NO: 1245103
uaguauuugugucccauga

SEQ ID NO: 1536571 - RNA, 19 nt, Artificial Sequence
  Description of Artificial Sequence: Synthetic oligonucleotide
  Antisense strand to SEQ ID NO: 1536570
ucaugggacacaaauacua

SEQ ID NO: 1536572 - RNA, 19 nt, Artificial Sequence
  Description of Artificial Sequence: Synthetic oligonucleotide
  Sense strand starting at position 2731 of SEQ ID NO: 1245103
ccaauagaguguucucaaa

SEQ ID NO: 1536573 - RNA, 19 nt, Artificial Sequence
  Description of Artificial Sequence: Synthetic oligonucleotide
  Antisense strand to SEQ ID NO: 1536572
uuugagaacacucuauugg

SEQ ID NO: 1536574 - RNA, 19 nt, Artificial Sequence
  Description of Artificial Sequence: Synthetic oligonucleotide
  Sense strand starting at position 2792 of SEQ ID NO: 1245103
gugauggcucgggaguuau

SEQ ID NO: 1536575 - RNA, 19 nt, Artificial Sequence
  Description of Artificial Sequence: Synthetic oligonucleotide
  Antisense strand to SEQ ID NO: 1536574
auaacucccgagccaucac

SEQ ID NO: 1536576 - RNA, 19 nt, Artificial Sequence
  Description of Artificial Sequence: Synthetic oligonucleotide
  Sense strand starting at position 2796 of SEQ ID NO: 1245103
uggcucgggaguuauuauu

SEQ ID NO: 1536577 - RNA, 19 nt, Artificial Sequence
  Description of Artificial Sequence: Synthetic oligonucleotide
  Antisense strand to SEQ ID NO: 1536576
aauaauaacucccgagcca

SEQ ID NO: 1536578 - RNA, 19 nt, Artificial Sequence
  Description of Artificial Sequence: Synthetic oligonucleotide
  Sense strand starting at position 2832 of SEQ ID NO: 1245103
auaguuguaagagauguau

SEQ ID NO: 1536579 - RNA, 19 nt, Artificial Sequence
  Description of Artificial Sequence: Synthetic oligonucleotide
  Antisense strand to SEQ ID NO: 1536578
auacaucucuuacaacuau

SEQ ID NO: 1536580 - RNA, 19 nt, Artificial Sequence
  Description of Artificial Sequence: Synthetic oligonucleotide
  Sense strand starting at position 2834 of SEQ ID NO: 1245103
aguuguaagagauguauac

SEQ ID NO: 1536581 - RNA, 19 nt, Artificial Sequence
  Description of Artificial Sequence: Synthetic oligonucleotide
  Antisense strand to SEQ ID NO: 1536580
guauacaucucuuacaacu

SEQ ID NO: 1536582 - RNA, 19 nt, Artificial Sequence
  Description of Artificial Sequence: Synthetic oligonucleotide
  Sense strand starting at position 2836 of SEQ ID NO: 1245103
uuguaagagauguauacgu

SEQ ID NO: 1536583 - RNA, 19 nt, Artificial Sequence
  Description of Artificial Sequence: Synthetic oligonucleotide
  Antisense strand to SEQ ID NO: 1536582
acguauacaucucuuacaa

SEQ ID NO: 1536584 - RNA, 19 nt, Artificial Sequence
  Description of Artificial Sequence: Synthetic oligonucleotide
  Sense strand starting at position 2838 of SEQ ID NO: 1245103
guaagagauguauacguuc

SEQ ID NO: 1536585 - RNA, 19 nt, Artificial Sequence
  Description of Artificial Sequence: Synthetic oligonucleotide
  Antisense strand to SEQ ID NO: 1536584
gaacguauacaucucuuac

SEQ ID NO: 1536586 - RNA, 19 nt, Artificial Sequence
  Description of Artificial Sequence: Synthetic oligonucleotide
  Sense strand starting at position 3131 of SEQ ID NO: 1245103
ucaccauauuggucaagau

SEQ ID NO: 1536587 - RNA, 19 nt, Artificial Sequence
  Description of Artificial Sequence: Synthetic oligonucleotide
  Antisense strand to SEQ ID NO: 1536586
aucuugaccaauaugguga

SEQ ID NO: 1536588 - RNA, 19 nt, Artificial Sequence
  Description of Artificial Sequence: Synthetic oligonucleotide
  Sense strand starting at position 3395 of SEQ ID NO: 1245103
agaugagauuaggcauguu

SEQ ID NO: 1536589 - RNA, 19 nt, Artificial Sequence
  Description of Artificial Sequence: Synthetic oligonucleotide
  Antisense strand to SEQ ID NO: 1536588
aacaugccuaaucucaucu

SEQ ID NO: 1536590 - RNA, 19 nt, Artificial Sequence
  Description of Artificial Sequence: Synthetic oligonucleotide
  Sense strand starting at position 3398 of SEQ ID NO: 1245103
ugagauuaggcauguucag

SEQ ID NO: 1536591 - RNA, 19 nt, Artificial Sequence
  Description of Artificial Sequence: Synthetic oligonucleotide
  Antisense strand to SEQ ID NO: 1536590
cugaacaugccuaaucuca

SEQ ID NO: 1536592 - RNA, 19 nt, Artificial Sequence
  Description of Artificial Sequence: Synthetic oligonucleotide
  Sense strand starting at position 3563 of SEQ ID NO: 1245103
guaaacauugguggaagau

SEQ ID NO: 1536593 - RNA, 19 nt, Artificial Sequence
  Description of Artificial Sequence: Synthetic oligonucleotide
  Antisense strand to SEQ ID NO: 1536592
aucuuccaccaauguuuac

SEQ ID NO: 1536594 - RNA, 19 nt, Artificial Sequence
  Description of Artificial Sequence: Synthetic oligonucleotide
  Sense strand starting at position 3723 of SEQ ID NO: 1245103
agaagugauuuagaguaga

SEQ ID NO: 1536595 - RNA, 19 nt, Artificial Sequence
  Description of Artificial Sequence: Synthetic oligonucleotide
  Antisense strand to SEQ ID NO: 1536594
ucuacucuaaaucacuucu

SEQ ID NO: 1536596 - RNA, 19 nt, Artificial Sequence
  Description of Artificial Sequence: Synthetic oligonucleotide
  Sense strand starting at position 3874 of SEQ ID NO: 1245103
guacucaguguugaagaag

SEQ ID NO: 1536597 - RNA, 19 nt, Artificial Sequence
  Description of Artificial Sequence: Synthetic oligonucleotide
  Antisense strand to SEQ ID NO: 1536596
cuucuucaacacugaguac

SEQ ID NO: 1536598 - RNA, 19 nt, Artificial Sequence
  Description of Artificial Sequence: Synthetic oligonucleotide
  Sense strand starting at position 3882 of SEQ ID NO: 1245103
uguugaagaaguuggugaa

SEQ ID NO: 1536599 - RNA, 19 nt, Artificial Sequence
  Description of Artificial Sequence: Synthetic oligonucleotide
  Antisense strand to SEQ ID NO: 1536598
uucaccaacuucuucaaca

SEQ ID NO: 1536600 - RNA, 19 nt, Artificial Sequence
  Description of Artificial Sequence: Synthetic oligonucleotide
  Sense strand starting at position 3896 of SEQ ID NO: 1245103
gugaacauguuucuccuau

SEQ ID NO: 1536601 - RNA, 19 nt, Artificial Sequence
  Description of Artificial Sequence: Synthetic oligonucleotide
  Antisense strand to SEQ ID NO: 1536600
auaggagaaacauguucac

SEQ ID NO: 1536602 - RNA, 19 nt, Artificial Sequence
  Description of Artificial Sequence: Synthetic oligonucleotide
  Sense strand starting at position 3968 of SEQ ID NO: 1245103
gaacccuguuaccuggaaa

SEQ ID NO: 1536603 - RNA, 19 nt, Artificial Sequence
  Description of Artificial Sequence: Synthetic oligonucleotide
  Antisense strand to SEQ ID NO: 1536602
uuuccagguaacaggguuc

SEQ ID NO: 1536604 - RNA, 19 nt, Artificial Sequence
  Description of Artificial Sequence: Synthetic oligonucleotide
  Sense strand starting at position 76 of SEQ ID NO: 1245104
ccaucugguccagaaugca

SEQ ID NO: 1536605 - RNA, 19 nt, Artificial Sequence
  Description of Artificial Sequence: Synthetic oligonucleotide
  Antisense strand to SEQ ID NO: 1536604
ugcauucuggaccagaugg

SEQ ID NO: 1536606 - RNA, 19 nt, Artificial Sequence
  Description of Artificial Sequence: Synthetic oligonucleotide
  Sense strand starting at position 119 of SEQ ID NO: 1245104
uuaggacuucuggguaugu

SEQ ID NO: 1536607 - RNA, 19 nt, Artificial Sequence
  Description of Artificial Sequence: Synthetic oligonucleotide
  Antisense strand to SEQ ID NO: 1536606
acauacccagaaguccuaa

SEQ ID NO: 1536608 - RNA, 19 nt, Artificial Sequence
  Description of Artificial Sequence: Synthetic oligonucleotide
  Sense strand starting at position 120 of SEQ ID NO: 1245104
uaggacuucuggguauguu

SEQ ID NO: 1536609 - RNA, 19 nt, Artificial Sequence
  Description of Artificial Sequence: Synthetic oligonucleotide
  Antisense strand to SEQ ID NO: 1536608
aacauacccagaaguccua

SEQ ID NO: 1536610 - RNA, 19 nt, Artificial Sequence
  Description of Artificial Sequence: Synthetic oligonucleotide
  Sense strand starting at position 121 of SEQ ID NO: 1245104
aggacuucuggguauguuu

SEQ ID NO: 1536611 - RNA, 19 nt, Artificial Sequence
  Description of Artificial Sequence: Synthetic oligonucleotide
  Antisense strand to SEQ ID NO: 1536610
aaacauacccagaaguccu

SEQ ID NO: 1536612 - RNA, 19 nt, Artificial Sequence
  Description of Artificial Sequence: Synthetic oligonucleotide
  Sense strand starting at position 174 of SEQ ID NO: 1245104
gugcaauagcgguccuuua

SEQ ID NO: 1536613 - RNA, 19 nt, Artificial Sequence
  Description of Artificial Sequence: Synthetic oligonucleotide
  Antisense strand to SEQ ID NO: 1536612
uaaaggaccgcuauugcac

SEQ ID NO: 1536614 - RNA, 19 nt, Artificial Sequence
  Description of Artificial Sequence: Synthetic oligonucleotide
  Sense strand starting at position 252 of SEQ ID NO: 1245104
guggguaggugguuaaucu

SEQ ID NO: 1536615 - RNA, 19 nt, Artificial Sequence
  Description of Artificial Sequence: Synthetic oligonucleotide
  Antisense strand to SEQ ID NO: 1536614
agauuaaccaccuacccac

SEQ ID NO: 1536616 - RNA, 19 nt, Artificial Sequence
  Description of Artificial Sequence: Synthetic oligonucleotide
  Sense strand starting at position 253 of SEQ ID NO: 1245104
uggguaggugguuaaucuu

SEQ ID NO: 1536617 - RNA, 19 nt, Artificial Sequence
  Description of Artificial Sequence: Synthetic oligonucleotide
  Antisense strand to SEQ ID NO: 1536616
aagauuaaccaccuaccca

SEQ ID NO: 1536618 - RNA, 19 nt, Artificial Sequence
  Description of Artificial Sequence: Synthetic oligonucleotide
  Sense strand starting at position 259 of SEQ ID NO: 1245104
ggugguuaaucuucccaag

SEQ ID NO: 1536619 - RNA, 19 nt, Artificial Sequence
  Description of Artificial Sequence: Synthetic oligonucleotide
  Antisense strand to SEQ ID NO: 1536618
cuugggaagauuaaccacc

SEQ ID NO: 1536620 - RNA, 19 nt, Artificial Sequence
  Description of Artificial Sequence: Synthetic oligonucleotide
  Sense strand starting at position 261 of SEQ ID NO: 1245104
ugguuaaucuucccaaguu

SEQ ID NO: 1536621 - RNA, 19 nt, Artificial Sequence
  Description of Artificial Sequence: Synthetic oligonucleotide
  Antisense strand to SEQ ID NO: 1536620
aacuugggaagauuaacca

SEQ ID NO: 1536622 - RNA, 19 nt, Artificial Sequence
  Description of Artificial Sequence: Synthetic oligonucleotide
  Sense strand starting at position 292 of SEQ ID NO: 1245104
ggucuuaaugaccagcaga

SEQ ID NO: 1536623 - RNA, 19 nt, Artificial Sequence
  Description of Artificial Sequence: Synthetic oligonucleotide
  Antisense strand to SEQ ID NO: 1536622
ucugcuggucauuaagacc

SEQ ID NO: 1536624 - RNA, 19 nt, Artificial Sequence
  Description of Artificial Sequence: Synthetic oligonucleotide
  Sense strand starting at position 370 of SEQ ID NO: 1245104
auucuuuccuuucuaggga

SEQ ID NO: 1536625 - RNA, 19 nt, Artificial Sequence
  Description of Artificial Sequence: Synthetic oligonucleotide
  Antisense strand to SEQ ID NO: 1536624
ucccuagaaaggaaagaau

SEQ ID NO: 1536626 - RNA, 19 nt, Artificial Sequence
  Description of Artificial Sequence: Synthetic oligonucleotide
  Sense strand starting at position 383 of SEQ ID NO: 1245104
uagggagucuccucaauca

SEQ ID NO: 1536627 - RNA, 19 nt, Artificial Sequence
  Description of Artificial Sequence: Synthetic oligonucleotide
  Antisense strand to SEQ ID NO: 1536626
ugauugaggagacucccua

SEQ ID NO: 1536628 - RNA, 19 nt, Artificial Sequence
  Description of Artificial Sequence: Synthetic oligonucleotide
  Sense strand starting at position 432 of SEQ ID NO: 1245104
gaauguaaaugagggaaga

SEQ ID NO: 1536629 - RNA, 19 nt, Artificial Sequence
  Description of Artificial Sequence: Synthetic oligonucleotide
  Antisense strand to SEQ ID NO: 1536628
ucuucccucauuuacauuc

SEQ ID NO: 1536630 - RNA, 19 nt, Artificial Sequence
  Description of Artificial Sequence: Synthetic oligonucleotide
  Sense strand starting at position 494 of SEQ ID NO: 1245104
gaaauucucuagguaggca

SEQ ID NO: 1536631 - RNA, 19 nt, Artificial Sequence
  Description of Artificial Sequence: Synthetic oligonucleotide
  Antisense strand to SEQ ID NO: 1536630
ugccuaccuagagaauuuc

SEQ ID NO: 1536632 - RNA, 19 nt, Artificial Sequence
  Description of Artificial Sequence: Synthetic oligonucleotide
  Sense strand starting at position 509 of SEQ ID NO: 1245104
ggcaguuguaucgugucuu

SEQ ID NO: 1536633 - RNA, 19 nt, Artificial Sequence
  Description of Artificial Sequence: Synthetic oligonucleotide
  Antisense strand to SEQ ID NO: 1536632
aagacacgauacaacugcc

SEQ ID NO: 1536634 - RNA, 19 nt, Artificial Sequence
  Description of Artificial Sequence: Synthetic oligonucleotide
  Sense strand starting at position 625 of SEQ ID NO: 1245104
gggagugaauugguaggau

SEQ ID NO: 1536635 - RNA, 19 nt, Artificial Sequence
  Description of Artificial Sequence: Synthetic oligonucleotide
  Antisense strand to SEQ ID NO: 1536634
auccuaccaauucacuccc

SEQ ID NO: 1536636 - RNA, 19 nt, Artificial Sequence
  Description of Artificial Sequence: Synthetic oligonucleotide
  Sense strand starting at position 628 of SEQ ID NO: 1245104
agugaauugguaggauauc

SEQ ID NO: 1536637 - RNA, 19 nt, Artificial Sequence
  Description of Artificial Sequence: Synthetic oligonucleotide
  Antisense strand to SEQ ID NO: 1536636
gauauccuaccaauucacu

SEQ ID NO: 1536638 - RNA, 19 nt, Artificial Sequence
  Description of Artificial Sequence: Synthetic oligonucleotide
  Sense strand starting at position 943 of SEQ ID NO: 1245104
ugcgguuacuuaucucaua

SEQ ID NO: 1536639 - RNA, 19 nt, Artificial Sequence
  Description of Artificial Sequence: Synthetic oligonucleotide
  Antisense strand to SEQ ID NO: 1536638
uaugagauaaguaaccgca

SEQ ID NO: 1536640 - RNA, 19 nt, Artificial Sequence
  Description of Artificial Sequence: Synthetic oligonucleotide
  Sense strand starting at position 944 of SEQ ID NO: 1245104
gcgguuacuuaucucauac

SEQ ID NO: 1536641 - RNA, 19 nt, Artificial Sequence
  Description of Artificial Sequence: Synthetic oligonucleotide
  Antisense strand to SEQ ID NO: 1536640
guaugagauaaguaaccgc

SEQ ID NO: 1536642 - RNA, 19 nt, Artificial Sequence
  Description of Artificial Sequence: Synthetic oligonucleotide
  Sense strand starting at position 968 of SEQ ID NO: 1245104
ucaggauuccgcugacaaa

SEQ ID NO: 1536643 - RNA, 19 nt, Artificial Sequence
  Description of Artificial Sequence: Synthetic oligonucleotide
  Antisense strand to SEQ ID NO: 1536642
uuugucagcggaauccuga

SEQ ID NO: 1536644 - RNA, 19 nt, Artificial Sequence
  Description of Artificial Sequence: Synthetic oligonucleotide
  Sense strand starting at position 969 of SEQ ID NO: 1245104
caggauuccgcugacaaau

SEQ ID NO: 1536645 - RNA, 19 nt, Artificial Sequence
  Description of Artificial Sequence: Synthetic oligonucleotide
  Antisense strand to SEQ ID NO: 1536644
auuugucagcggaauccug

SEQ ID NO: 1536646 - RNA, 19 nt, Artificial Sequence
  Description of Artificial Sequence: Synthetic oligonucleotide
  Sense strand starting at position 979 of SEQ ID NO: 1245104
cugacaaaucuccguguuu

SEQ ID NO: 1536647 - RNA, 19 nt, Artificial Sequence
  Description of Artificial Sequence: Synthetic oligonucleotide
  Antisense strand to SEQ ID NO: 1536646
aaacacggagauuugucag

SEQ ID NO: 1536648 - RNA, 19 nt, Artificial Sequence
  Description of Artificial Sequence: Synthetic oligonucleotide
  Sense strand starting at position 980 of SEQ ID NO: 1245104
ugacaaaucuccguguuuc

SEQ ID NO: 1536649 - RNA, 19 nt, Artificial Sequence
  Description of Artificial Sequence: Synthetic oligonucleotide
  Antisense strand to SEQ ID NO: 1536648
gaaacacggagauuuguca

SEQ ID NO: 1536650 - RNA, 19 nt, Artificial Sequence
  Description of Artificial Sequence: Synthetic oligonucleotide
  Sense strand starting at position 981 of SEQ ID NO: 1245104
gacaaaucuccguguuucc

SEQ ID NO: 1536651 - RNA, 19 nt, Artificial Sequence
  Description of Artificial Sequence: Synthetic oligonucleotide
  Antisense strand to SEQ ID NO: 1536650
ggaaacacggagauuuguc

SEQ ID NO: 1536652 - RNA, 19 nt, Artificial Sequence
  Description of Artificial Sequence: Synthetic oligonucleotide
  Sense strand starting at position 990 of SEQ ID NO: 1245104
ccguguuuccacuaaacag

SEQ ID NO: 1536653 - RNA, 19 nt, Artificial Sequence
  Description of Artificial Sequence: Synthetic oligonucleotide
  Antisense strand to SEQ ID NO: 1536652
cuguuuaguggaaacacgg

SEQ ID NO: 1536654 - RNA, 19 nt, Artificial Sequence
  Description of Artificial Sequence: Synthetic oligonucleotide
  Sense strand starting at position 1263 of SEQ ID NO: 1245104
gcaccuaaucauugccaga

SEQ ID NO: 1536655 - RNA, 19 nt, Artificial Sequence
  Description of Artificial Sequence: Synthetic oligonucleotide
  Antisense strand to SEQ ID NO: 1536654
ucuggcaaugauuaggugc

SEQ ID NO: 1536656 - RNA, 19 nt, Artificial Sequence
  Description of Artificial Sequence: Synthetic oligonucleotide
  Sense strand starting at position 1265 of SEQ ID NO: 1245104
accuaaucauugccagaug

SEQ ID NO: 1536657 - RNA, 19 nt, Artificial Sequence
  Description of Artificial Sequence: Synthetic oligonucleotide
  Antisense strand to SEQ ID NO: 1536656
caucuggcaaugauuaggu

SEQ ID NO: 1536658 - RNA, 19 nt, Artificial Sequence
  Description of Artificial Sequence: Synthetic oligonucleotide
  Sense strand starting at position 2442 of SEQ ID NO: 1245104
cugguugacgccugaagga

SEQ ID NO: 1536659 - RNA, 19 nt, Artificial Sequence
  Description of Artificial Sequence: Synthetic oligonucleotide
  Antisense strand to SEQ ID NO: 1536658
uccuucaggcgucaaccag

SEQ ID NO: 1536660 - RNA, 19 nt, Artificial Sequence
  Description of Artificial Sequence: Synthetic oligonucleotide
  Sense strand starting at position 2517 of SEQ ID NO: 1245104
auccgaagucaccauuaga

SEQ ID NO: 1536661 - RNA, 19 nt, Artificial Sequence
  Description of Artificial Sequence: Synthetic oligonucleotide
  Antisense strand to SEQ ID NO: 1536660
ucuaauggugacuucggau

SEQ ID NO: 1536662 - RNA, 19 nt, Artificial Sequence
  Description of Artificial Sequence: Synthetic oligonucleotide
  Sense strand starting at position 2673 of SEQ ID NO: 1245104
cugagaggcucccugaguu

SEQ ID NO: 1536663 - RNA, 19 nt, Artificial Sequence
  Description of Artificial Sequence: Synthetic oligonucleotide
  Antisense strand to SEQ ID NO: 1536662
aacucagggagccucucag

SEQ ID NO: 1536664 - RNA, 19 nt, Artificial Sequence
  Description of Artificial Sequence: Synthetic oligonucleotide
  Sense strand starting at position 2697 of SEQ ID NO: 1245104
cguggucgcccgucacauu

SEQ ID NO: 1536665 - RNA, 19 nt, Artificial Sequence
  Description of Artificial Sequence: Synthetic oligonucleotide
  Antisense strand to SEQ ID NO: 1536664
aaugugacgggcgaccacg

SEQ ID NO: 1536666 - RNA, 19 nt, Artificial Sequence
  Description of Artificial Sequence: Synthetic oligonucleotide
  Sense strand starting at position 2731 of SEQ ID NO: 1245104
uaauaaagcccguguuuau

SEQ ID NO: 1536667 - RNA, 19 nt, Artificial Sequence
  Description of Artificial Sequence: Synthetic oligonucleotide
  Antisense strand to SEQ ID NO: 1536666
auaaacacgggcuuuauua

SEQ ID NO: 1536668 - RNA, 19 nt, Artificial Sequence
  Description of Artificial Sequence: Synthetic oligonucleotide
  Sense strand starting at position 2742 of SEQ ID NO: 1245104
guguuuaucuuucucuuua

SEQ ID NO: 1536669 - RNA, 19 nt, Artificial Sequence
  Description of Artificial Sequence: Synthetic oligonucleotide
  Antisense strand to SEQ ID NO: 1536668
uaaagagaaagauaaacac

SEQ ID NO: 1536670 - RNA, 19 nt, Artificial Sequence
  Description of Artificial Sequence: Synthetic oligonucleotide
  Sense strand starting at position 2954 of SEQ ID NO: 1245104
uccugaggacuugguaaca

SEQ ID NO: 1536671 - RNA, 19 nt, Artificial Sequence
  Description of Artificial Sequence: Synthetic oligonucleotide
  Antisense strand to SEQ ID NO: 1536670
uguuaccaaguccucagga

SEQ ID NO: 1536672 - RNA, 19 nt, Artificial Sequence
  Description of Artificial Sequence: Synthetic oligonucleotide
  Sense strand starting at position 2988 of SEQ ID NO: 1245104
auugguucccucuaaguag

SEQ ID NO: 1536673 - RNA, 19 nt, Artificial Sequence
  Description of Artificial Sequence: Synthetic oligonucleotide
  Antisense strand to SEQ ID NO: 1536672
cuacuuagagggaaccaau

SEQ ID NO: 1536674 - RNA, 19 nt, Artificial Sequence
  Description of Artificial Sequence: Synthetic oligonucleotide
  Sense strand starting at position 3007 of SEQ ID NO: 1245104
gggauucuuugcucuagua

SEQ ID NO: 1536675 - RNA, 19 nt, Artificial Sequence
  Description of Artificial Sequence: Synthetic oligonucleotide
  Antisense strand to SEQ ID NO: 1536674
uacuagagcaaagaauccc

SEQ ID NO: 1536676 - RNA, 19 nt, Artificial Sequence
  Description of Artificial Sequence: Synthetic oligonucleotide
  Sense strand starting at position 3065 of SEQ ID NO: 1245104
cauagauucuccguuccag

SEQ ID NO: 1536677 - RNA, 19 nt, Artificial Sequence
  Description of Artificial Sequence: Synthetic oligonucleotide
  Antisense strand to SEQ ID NO: 1536676
cuggaacggagaaucuaug

SEQ ID NO: 1536678 - RNA, 19 nt, Artificial Sequence
  Description of Artificial Sequence: Synthetic oligonucleotide
  Sense strand starting at position 3071 of SEQ ID NO: 1245104
uucuccguuccaggagauu

SEQ ID NO: 1536679 - RNA, 19 nt, Artificial Sequence
  Description of Artificial Sequence: Synthetic oligonucleotide
  Antisense strand to SEQ ID NO: 1536678
aaucuccuggaacggagaa

SEQ ID NO: 1536680 - RNA, 19 nt, Artificial Sequence
  Description of Artificial Sequence: Synthetic oligonucleotide
  Sense strand starting at position 3189 of SEQ ID NO: 1245104
acugucugcaguugaugaa

SEQ ID NO: 1536681 - RNA, 19 nt, Artificial Sequence
  Description of Artificial Sequence: Synthetic oligonucleotide
  Antisense strand to SEQ ID NO: 1536680
uucaucaacugcagacagu

SEQ ID NO: 1536682 - RNA, 19 nt, Artificial Sequence
  Description of Artificial Sequence: Synthetic oligonucleotide
  Sense strand starting at position 3190 of SEQ ID NO: 1245104
cugucugcaguugaugaaa

SEQ ID NO: 1536683 - RNA, 19 nt, Artificial Sequence
  Description of Artificial Sequence: Synthetic oligonucleotide
  Antisense strand to SEQ ID NO: 1536682
uuucaucaacugcagacag

SEQ ID NO: 1536684 - RNA, 19 nt, Artificial Sequence
  Description of Artificial Sequence: Synthetic oligonucleotide
  Sense strand starting at position 36 of SEQ ID NO: 1245105
gcugauugacuguaugauu

SEQ ID NO: 1536685 - RNA, 19 nt, Artificial Sequence
  Description of Artificial Sequence: Synthetic oligonucleotide
  Antisense strand to SEQ ID NO: 1536684
aaucauacagucaaucagc

SEQ ID NO: 1536686 - RNA, 19 nt, Artificial Sequence
  Description of Artificial Sequence: Synthetic oligonucleotide
  Sense strand starting at position 68 of SEQ ID NO: 1245105
cuuugaucuguccagauau

SEQ ID NO: 1536687 - RNA, 19 nt, Artificial Sequence
  Description of Artificial Sequence: Synthetic oligonucleotide
  Antisense strand to SEQ ID NO: 1536686
auaucuggacagaucaaag

SEQ ID NO: 1536688 - RNA, 19 nt, Artificial Sequence
  Description of Artificial Sequence: Synthetic oligonucleotide
  Sense strand starting at position 101 of SEQ ID NO: 1245105
cuaggacauuaguuaauca

SEQ ID NO: 1536689 - RNA, 19 nt, Artificial Sequence
  Description of Artificial Sequence: Synthetic oligonucleotide
  Antisense strand to SEQ ID NO: 1536688
ugauuaacuaauguccuag

SEQ ID NO: 1536690 - RNA, 19 nt, Artificial Sequence
  Description of Artificial Sequence: Synthetic oligonucleotide
  Sense strand starting at position 154 of SEQ ID NO: 1245105
ugaacauauuaggugauau

SEQ ID NO: 1536691 - RNA, 19 nt, Artificial Sequence
  Description of Artificial Sequence: Synthetic oligonucleotide
  Antisense strand to SEQ ID NO: 1536690
auaucaccuaauauguuca

SEQ ID NO: 1536692 - RNA, 19 nt, Artificial Sequence
  Description of Artificial Sequence: Synthetic oligonucleotide
  Sense strand starting at position 213 of SEQ ID NO: 1245105
uagccuacuugaucugaga

SEQ ID NO: 1536693 - RNA, 19 nt, Artificial Sequence
  Description of Artificial Sequence: Synthetic oligonucleotide
  Antisense strand to SEQ ID NO: 1536692
ucucagaucaaguaggcua

SEQ ID NO: 1536694 - RNA, 19 nt, Artificial Sequence
  Description of Artificial Sequence: Synthetic oligonucleotide
  Sense strand starting at position 448 of SEQ ID NO: 1245105
cuagguagucuauaagcca

SEQ ID NO: 1536695 - RNA, 19 nt, Artificial Sequence
  Description of Artificial Sequence: Synthetic oligonucleotide
  Antisense strand to SEQ ID NO: 1536694
uggcuuauagacuaccuag

SEQ ID NO: 1536696 - RNA, 19 nt, Artificial Sequence
  Description of Artificial Sequence: Synthetic oligonucleotide
  Sense strand starting at position 494 of SEQ ID NO: 1245105
caagguuuccacuaaacgu

SEQ ID NO: 1536697 - RNA, 19 nt, Artificial Sequence
  Description of Artificial Sequence: Synthetic oligonucleotide
  Antisense strand to SEQ ID NO: 1536696
acguuuaguggaaaccuug

SEQ ID NO: 1536698 - RNA, 19 nt, Artificial Sequence
  Description of Artificial Sequence: Synthetic oligonucleotide
  Sense strand starting at position 565 of SEQ ID NO: 1245105
ucaucuuagcgauaggauu

SEQ ID NO: 1536699 - RNA, 19 nt, Artificial Sequence
  Description of Artificial Sequence: Synthetic oligonucleotide
  Antisense strand to SEQ ID NO: 1536698
aauccuaucgcuaagauga

SEQ ID NO: 1536700 - RNA, 19 nt, Artificial Sequence
  Description of Artificial Sequence: Synthetic oligonucleotide
  Sense strand starting at position 598 of SEQ ID NO: 1245105
guaauugaucauuagcaaa

SEQ ID NO: 1536701 - RNA, 19 nt, Artificial Sequence
  Description of Artificial Sequence: Synthetic oligonucleotide
  Antisense strand to SEQ ID NO: 1536700
uuugcuaaugaucaauuac

SEQ ID NO: 1536702 - RNA, 19 nt, Artificial Sequence
  Description of Artificial Sequence: Synthetic oligonucleotide
  Sense strand starting at position 926 of SEQ ID NO: 1245105
gggugaaguacaugacauc

SEQ ID NO: 1536703 - RNA, 19 nt, Artificial Sequence
  Description of Artificial Sequence: Synthetic oligonucleotide
  Antisense strand to SEQ ID NO: 1536702
gaugucauguacuucaccc

SEQ ID NO: 1536704 - RNA, 19 nt, Artificial Sequence
  Description of Artificial Sequence: Synthetic oligonucleotide
  Sense strand starting at position 1043 of SEQ ID NO: 1245105
guggguauuuguccuacua

SEQ ID NO: 1536705 - RNA, 19 nt, Artificial Sequence
  Description of Artificial Sequence: Synthetic oligonucleotide
  Antisense strand to SEQ ID NO: 1536704
uaguaggacaaauacccac

SEQ ID NO: 1536706 - RNA, 19 nt, Artificial Sequence
  Description of Artificial Sequence: Synthetic oligonucleotide
  Sense strand starting at position 1239 of SEQ ID NO: 1245105
agguauaaggucugaauuc

SEQ ID NO: 1536707 - RNA, 19 nt, Artificial Sequence
  Description of Artificial Sequence: Synthetic oligonucleotide
  Antisense strand to SEQ ID NO: 1536706
gaauucagaccuuauaccu

SEQ ID NO: 1536708 - RNA, 19 nt, Artificial Sequence
  Description of Artificial Sequence: Synthetic oligonucleotide
  Sense strand starting at position 1246 of SEQ ID NO: 1245105
aggucugaauucuuacaau

SEQ ID NO: 1536709 - RNA, 19 nt, Artificial Sequence
  Description of Artificial Sequence: Synthetic oligonucleotide
  Antisense strand to SEQ ID NO: 1536708
auuguaagaauucagaccu

SEQ ID NO: 1536710 - RNA, 19 nt, Artificial Sequence
  Description of Artificial Sequence: Synthetic oligonucleotide
  Sense strand starting at position 1281 of SEQ ID NO: 1245105
ugcuaagagggugaaguuu

SEQ ID NO: 1536711 - RNA, 19 nt, Artificial Sequence
  Description of Artificial Sequence: Synthetic oligonucleotide
  Antisense strand to SEQ ID NO: 1536710
aaacuucacccucuuagca

SEQ ID NO: 1536712 - RNA, 19 nt, Artificial Sequence
  Description of Artificial Sequence: Synthetic oligonucleotide
  Sense strand starting at position 1480 of SEQ ID NO: 1245105
uagggaaccguuuacuuua

SEQ ID NO: 1536713 - RNA, 19 nt, Artificial Sequence
  Description of Artificial Sequence: Synthetic oligonucleotide
  Antisense strand to SEQ ID NO: 1536712
uaaaguaaacgguucccua

SEQ ID NO: 1536714 - RNA, 19 nt, Artificial Sequence
  Description of Artificial Sequence: Synthetic oligonucleotide
  Sense strand starting at position 1482 of SEQ ID NO: 1245105
gggaaccguuuacuuuaga

SEQ ID NO: 1536715 - RNA, 19 nt, Artificial Sequence
  Description of Artificial Sequence: Synthetic oligonucleotide
  Antisense strand to SEQ ID NO: 1536714
ucuaaaguaaacgguuccc

SEQ ID NO: 1536716 - RNA, 19 nt, Artificial Sequence
  Description of Artificial Sequence: Synthetic oligonucleotide
  Sense strand starting at position 1483 of SEQ ID NO: 1245105
ggaaccguuuacuuuagaa

SEQ ID NO: 1536717 - RNA, 19 nt, Artificial Sequence
  Description of Artificial Sequence: Synthetic oligonucleotide
  Antisense strand to SEQ ID NO: 1536716
uucuaaaguaaacgguucc

SEQ ID NO: 1536718 - RNA, 19 nt, Artificial Sequence
  Description of Artificial Sequence: Synthetic oligonucleotide
  Sense strand starting at position 1485 of SEQ ID NO: 1245105
aaccguuuacuuuagaaga

SEQ ID NO: 1536719 - RNA, 19 nt, Artificial Sequence
  Description of Artificial Sequence: Synthetic oligonucleotide
  Antisense strand to SEQ ID NO: 1536718
ucuucuaaaguaaacgguu

SEQ ID NO: 1536720 - RNA, 19 nt, Artificial Sequence
  Description of Artificial Sequence: Synthetic oligonucleotide
  Sense strand starting at position 1771 of SEQ ID NO: 1245105
ucuuuaccugguuacuuau

SEQ ID NO: 1536721 - RNA, 19 nt, Artificial Sequence
  Description of Artificial Sequence: Synthetic oligonucleotide
  Antisense strand to SEQ ID NO: 1536720
auaaguaaccagguaaaga

SEQ ID NO: 1536722 - RNA, 19 nt, Artificial Sequence
  Description of Artificial Sequence: Synthetic oligonucleotide
  Sense strand starting at position 2010 of SEQ ID NO: 1245105
uggugaacuccuuaguaua

SEQ ID NO: 1536723 - RNA, 19 nt, Artificial Sequence
  Description of Artificial Sequence: Synthetic oligonucleotide
  Antisense strand to SEQ ID NO: 1536722
uauacuaaggaguucacca

SEQ ID NO: 1536724 - RNA, 19 nt, Artificial Sequence
  Description of Artificial Sequence: Synthetic oligonucleotide
  Sense strand starting at position 2021 of SEQ ID NO: 1245105
uuaguauauagaggcagau

SEQ ID NO: 1536725 - RNA, 19 nt, Artificial Sequence
  Description of Artificial Sequence: Synthetic oligonucleotide
  Antisense strand to SEQ ID NO: 1536724
aucugccucuauauacuaa

SEQ ID NO: 1536726 - RNA, 19 nt, Artificial Sequence
  Description of Artificial Sequence: Synthetic oligonucleotide
  Sense strand starting at position 2207 of SEQ ID NO: 1245105
aucagagcugacugauuau

SEQ ID NO: 1536727 - RNA, 19 nt, Artificial Sequence
  Description of Artificial Sequence: Synthetic oligonucleotide
  Antisense strand to SEQ ID NO: 1536726
auaaucagucagcucugau

SEQ ID NO: 1536728 - RNA, 19 nt, Artificial Sequence
  Description of Artificial Sequence: Synthetic oligonucleotide
  Sense strand starting at position 2210 of SEQ ID NO: 1245105
agagcugacugauuauaua

SEQ ID NO: 1536729 - RNA, 19 nt, Artificial Sequence
  Description of Artificial Sequence: Synthetic oligonucleotide
  Antisense strand to SEQ ID NO: 1536728
uauauaaucagucagcucu

SEQ ID NO: 1536730 - RNA, 19 nt, Artificial Sequence
  Description of Artificial Sequence: Synthetic oligonucleotide
  Sense strand starting at position 2281 of SEQ ID NO: 1245105
aacugaguccaaugagacu

SEQ ID NO: 1536731 - RNA, 19 nt, Artificial Sequence
  Description of Artificial Sequence: Synthetic oligonucleotide
  Antisense strand to SEQ ID NO: 1536730
agucucauuggacucaguu

SEQ ID NO: 1536732 - RNA, 19 nt, Artificial Sequence
  Description of Artificial Sequence: Synthetic oligonucleotide
  Sense strand starting at position 2399 of SEQ ID NO: 1245105
gcuugaauucgguuugcuu

SEQ ID NO: 1536733 - RNA, 19 nt, Artificial Sequence
  Description of Artificial Sequence: Synthetic oligonucleotide
  Antisense strand to SEQ ID NO: 1536732
aagcaaaccgaauucaagc

SEQ ID NO: 1536734 - RNA, 19 nt, Artificial Sequence
  Description of Artificial Sequence: Synthetic oligonucleotide
  Sense strand starting at position 2484 of SEQ ID NO: 1245105
uugguuuacaucuggaaga

SEQ ID NO: 1536735 - RNA, 19 nt, Artificial Sequence
  Description of Artificial Sequence: Synthetic oligonucleotide
  Antisense strand to SEQ ID NO: 1536734
ucuuccagauguaaaccaa

SEQ ID NO: 1536736 - RNA, 19 nt, Artificial Sequence
  Description of Artificial Sequence: Synthetic oligonucleotide
  Sense strand starting at position 2524 of SEQ ID NO: 1245105
uggaaauauuacuugucua

SEQ ID NO: 1536737 - RNA, 19 nt, Artificial Sequence
  Description of Artificial Sequence: Synthetic oligonucleotide
  Antisense strand to SEQ ID NO: 1536736
uagacaaguaauauuucca

SEQ ID NO: 1536738 - RNA, 19 nt, Artificial Sequence
  Description of Artificial Sequence: Synthetic oligonucleotide
  Sense strand starting at position 2544 of SEQ ID NO: 1245105
auggaaaugaugugcuuga

SEQ ID NO: 1536739 - RNA, 19 nt, Artificial Sequence
  Description of Artificial Sequence: Synthetic oligonucleotide
  Antisense strand to SEQ ID NO: 1536738
ucaagcacaucauuuccau

SEQ ID NO: 1536740 - RNA, 19 nt, Artificial Sequence
  Description of Artificial Sequence: Synthetic oligonucleotide
  Sense strand starting at position 2549 of SEQ ID NO: 1245105
aaugaugugcuugacacuu

SEQ ID NO: 1536741 - RNA, 19 nt, Artificial Sequence
  Description of Artificial Sequence: Synthetic oligonucleotide
  Antisense strand to SEQ ID NO: 1536740
aagugucaagcacaucauu

SEQ ID NO: 1536742 - RNA, 19 nt, Artificial Sequence
  Description of Artificial Sequence: Synthetic oligonucleotide
  Sense strand starting at position 2571 of SEQ ID NO: 1245105
ggcucugauccagaaggua

SEQ ID NO: 1536743 - RNA, 19 nt, Artificial Sequence
  Description of Artificial Sequence: Synthetic oligonucleotide
  Antisense strand to SEQ ID NO: 1536742
uaccuucuggaucagagcc

SEQ ID NO: 1536744 - RNA, 19 nt, Artificial Sequence
  Description of Artificial Sequence: Synthetic oligonucleotide
  Sense strand starting at position 2592 of SEQ ID NO: 1245105
accauuaugugagucaaau

SEQ ID NO: 1536745 - RNA, 19 nt, Artificial Sequence
  Description of Artificial Sequence: Synthetic oligonucleotide
  Antisense strand to SEQ ID NO: 1536744
auuugacucacauaauggu

SEQ ID NO: 1536746 - RNA, 19 nt, Artificial Sequence
  Description of Artificial Sequence: Synthetic oligonucleotide
  Sense strand starting at position 2673 of SEQ ID NO: 1245105
auuuaagcucacuggugua

SEQ ID NO: 1536747 - RNA, 19 nt, Artificial Sequence
  Description of Artificial Sequence: Synthetic oligonucleotide
  Antisense strand to SEQ ID NO: 1536746
uacaccagugagcuuaaau

SEQ ID NO: 1536748 - RNA, 19 nt, Artificial Sequence
  Description of Artificial Sequence: Synthetic oligonucleotide
  Sense strand starting at position 2683 of SEQ ID NO: 1245105
acugguguacuuggaugaa

SEQ ID NO: 1536749 - RNA, 19 nt, Artificial Sequence
  Description of Artificial Sequence: Synthetic oligonucleotide
  Antisense strand to SEQ ID NO: 1536748
uucauccaaguacaccagu

SEQ ID NO: 1536750 - RNA, 19 nt, Artificial Sequence
  Description of Artificial Sequence: Synthetic oligonucleotide
  Sense strand starting at position 2686 of SEQ ID NO: 1245105
gguguacuuggaugaaacu

SEQ ID NO: 1536751 - RNA, 19 nt, Artificial Sequence
  Description of Artificial Sequence: Synthetic oligonucleotide
  Antisense strand to SEQ ID NO: 1536750
aguuucauccaaguacacc

SEQ ID NO: 1536752 - RNA, 19 nt, Artificial Sequence
  Description of Artificial Sequence: Synthetic oligonucleotide
  Sense strand starting at position 2761 of SEQ ID NO: 1245105
ggaagaguugaguauggcu

SEQ ID NO: 1536753 - RNA, 19 nt, Artificial Sequence
  Description of Artificial Sequence: Synthetic oligonucleotide
  Antisense strand to SEQ ID NO: 1536752
agccauacucaacucuucc

SEQ ID NO: 1536754 - RNA, 19 nt, Artificial Sequence
  Description of Artificial Sequence: Synthetic oligonucleotide
  Sense strand starting at position 3042 of SEQ ID NO: 1245105
aaagauaauuuagggugaa

SEQ ID NO: 1536755 - RNA, 19 nt, Artificial Sequence
  Description of Artificial Sequence: Synthetic oligonucleotide
  Antisense strand to SEQ ID NO: 1536754
uucacccuaaauuaucuuu

SEQ ID NO: 1536756 - RNA, 19 nt, Artificial Sequence
  Description of Artificial Sequence: Synthetic oligonucleotide
  Sense strand starting at position 3043 of SEQ ID NO: 1245105
aagauaauuuagggugaaa

SEQ ID NO: 1536757 - RNA, 19 nt, Artificial Sequence
  Description of Artificial Sequence: Synthetic oligonucleotide
  Antisense strand to SEQ ID NO: 1536756
uuucacccuaaauuaucuu

SEQ ID NO: 1536758 - RNA, 19 nt, Artificial Sequence
  Description of Artificial Sequence: Synthetic oligonucleotide
  Sense strand starting at position 3280 of SEQ ID NO: 1245105
gucuguucggucuacauuu

SEQ ID NO: 1536759 - RNA, 19 nt, Artificial Sequence
  Description of Artificial Sequence: Synthetic oligonucleotide
  Antisense strand to SEQ ID NO: 1536758
aaauguagaccgaacagac

SEQ ID NO: 1536760 - RNA, 19 nt, Artificial Sequence
  Description of Artificial Sequence: Synthetic oligonucleotide
  Sense strand starting at position 3343 of SEQ ID NO: 1245105
aauuccauuguaugaggaa

SEQ ID NO: 1536761 - RNA, 19 nt, Artificial Sequence
  Description of Artificial Sequence: Synthetic oligonucleotide
  Antisense strand to SEQ ID NO: 1536760
uuccucauacaauggaauu

SEQ ID NO: 1536762 - RNA, 19 nt, Artificial Sequence
  Description of Artificial Sequence: Synthetic oligonucleotide
  Sense strand starting at position 3588 of SEQ ID NO: 1245105
agguaauuccauugagaau

SEQ ID NO: 1536763 - RNA, 19 nt, Artificial Sequence
  Description of Artificial Sequence: Synthetic oligonucleotide
  Antisense strand to SEQ ID NO: 1536762
auucucaauggaauuaccu

SEQ ID NO: 1536764 - RNA, 19 nt, Artificial Sequence
  Description of Artificial Sequence: Synthetic oligonucleotide
  Sense strand starting at position 118 of SEQ ID NO: 1245106
uugccuuuguggagggaga

SEQ ID NO: 1536765 - RNA, 19 nt, Artificial Sequence
  Description of Artificial Sequence: Synthetic oligonucleotide
  Antisense strand to SEQ ID NO: 1536764
ucucccuccacaaaggcaa

SEQ ID NO: 1536766 - RNA, 19 nt, Artificial Sequence
  Description of Artificial Sequence: Synthetic oligonucleotide
  Sense strand starting at position 228 of SEQ ID NO: 1245106
cccugugaggaucaguuaa

SEQ ID NO: 1536767 - RNA, 19 nt, Artificial Sequence
  Description of Artificial Sequence: Synthetic oligonucleotide
  Antisense strand to SEQ ID NO: 1536766
uuaacugauccucacaggg

SEQ ID NO: 1536768 - RNA, 19 nt, Artificial Sequence
  Description of Artificial Sequence: Synthetic oligonucleotide
  Sense strand starting at position 366 of SEQ ID NO: 1245106
ccaacaaaguuggaggaua

SEQ ID NO: 1536769 - RNA, 19 nt, Artificial Sequence
  Description of Artificial Sequence: Synthetic oligonucleotide
  Antisense strand to SEQ ID NO: 1536768
uauccuccaacuuuguugg

SEQ ID NO: 1536770 - RNA, 19 nt, Artificial Sequence
  Description of Artificial Sequence: Synthetic oligonucleotide
  Sense strand starting at position 438 of SEQ ID NO: 1245106
gggaaugcugucugccaaa

SEQ ID NO: 1536771 - RNA, 19 nt, Artificial Sequence
  Description of Artificial Sequence: Synthetic oligonucleotide
  Antisense strand to SEQ ID NO: 1536770
uuuggcagacagcauuccc

SEQ ID NO: 1536772 - RNA, 19 nt, Artificial Sequence
  Description of Artificial Sequence: Synthetic oligonucleotide
  Sense strand starting at position 837 of SEQ ID NO: 1245106
cuuuaaguuucugcugaag

SEQ ID NO: 1536773 - RNA, 19 nt, Artificial Sequence
  Description of Artificial Sequence: Synthetic oligonucleotide
  Antisense strand to SEQ ID NO: 1536772
cuucagcagaaacuuaaag

SEQ ID NO: 1536774 - RNA, 19 nt, Artificial Sequence
  Description of Artificial Sequence: Synthetic oligonucleotide
  Sense strand starting at position 840 of SEQ ID NO: 1245106
uaaguuucugcugaagcuu

SEQ ID NO: 1536775 - RNA, 19 nt, Artificial Sequence
  Description of Artificial Sequence: Synthetic oligonucleotide
  Antisense strand to SEQ ID NO: 1536774
aagcuucagcagaaacuua

SEQ ID NO: 1536776 - RNA, 19 nt, Artificial Sequence
  Description of Artificial Sequence: Synthetic oligonucleotide
  Sense strand starting at position 1118 of SEQ ID NO: 1245106
uuaucaucauccguuacau

SEQ ID NO: 1536777 - RNA, 19 nt, Artificial Sequence
  Description of Artificial Sequence: Synthetic oligonucleotide
  Antisense strand to SEQ ID NO: 1536776
auguaacggaugaugauaa

SEQ ID NO: 1536778 - RNA, 19 nt, Artificial Sequence
  Description of Artificial Sequence: Synthetic oligonucleotide
  Sense strand starting at position 1120 of SEQ ID NO: 1245106
aucaucauccguuacaucu

SEQ ID NO: 1536779 - RNA, 19 nt, Artificial Sequence
  Description of Artificial Sequence: Synthetic oligonucleotide
  Antisense strand to SEQ ID NO: 1536778
agauguaacggaugaugau

SEQ ID NO: 1536780 - RNA, 19 nt, Artificial Sequence
  Description of Artificial Sequence: Synthetic oligonucleotide
  Sense strand starting at position 1421 of SEQ ID NO: 1245106
ucagcuacuugugauuuga

SEQ ID NO: 1536781 - RNA, 19 nt, Artificial Sequence
  Description of Artificial Sequence: Synthetic oligonucleotide
  Antisense strand to SEQ ID NO: 1536780
ucaaaucacaaguagcuga

SEQ ID NO: 1536782 - RNA, 19 nt, Artificial Sequence
  Description of Artificial Sequence: Synthetic oligonucleotide
  Sense strand starting at position 1475 of SEQ ID NO: 1245106
uuggaaauauccgccauca

SEQ ID NO: 1536783 - RNA, 19 nt, Artificial Sequence
  Description of Artificial Sequence: Synthetic oligonucleotide
  Antisense strand to SEQ ID NO: 1536782
ugauggcggauauuuccaa

SEQ ID NO: 1536784 - RNA, 19 nt, Artificial Sequence
  Description of Artificial Sequence: Synthetic oligonucleotide
  Sense strand starting at position 1477 of SEQ ID NO: 1245106
ggaaauauccgccaucaau

SEQ ID NO: 1536785 - RNA, 19 nt, Artificial Sequence
  Description of Artificial Sequence: Synthetic oligonucleotide
  Antisense strand to SEQ ID NO: 1536784
auugauggcggauauuucc

SEQ ID NO: 1536786 - RNA, 19 nt, Artificial Sequence
  Description of Artificial Sequence: Synthetic oligonucleotide
  Sense strand starting at position 1594 of SEQ ID NO: 1245106
gcagguugccuccaaacuu

SEQ ID NO: 1536787 - RNA, 19 nt, Artificial Sequence
  Description of Artificial Sequence: Synthetic oligonucleotide
  Antisense strand to SEQ ID NO: 1536786
aaguuuggaggcaaccugc

SEQ ID NO: 1536788 - RNA, 19 nt, Artificial Sequence
  Description of Artificial Sequence: Synthetic oligonucleotide
  Sense strand starting at position 1780 of SEQ ID NO: 1245106
ccgacucguaacugaucua

SEQ ID NO: 1536789 - RNA, 19 nt, Artificial Sequence
  Description of Artificial Sequence: Synthetic oligonucleotide
  Antisense strand to SEQ ID NO: 1536788
uagaucaguuacgagucgg

SEQ ID NO: 1536790 - RNA, 19 nt, Artificial Sequence
  Description of Artificial Sequence: Synthetic oligonucleotide
  Sense strand starting at position 1781 of SEQ ID NO: 1245106
cgacucguaacugaucuaa

SEQ ID NO: 1536791 - RNA, 19 nt, Artificial Sequence
  Description of Artificial Sequence: Synthetic oligonucleotide
  Antisense strand to SEQ ID NO: 1536790
uuagaucaguuacgagucg

SEQ ID NO: 1536792 - RNA, 19 nt, Artificial Sequence
  Description of Artificial Sequence: Synthetic oligonucleotide
  Sense strand starting at position 2011 of SEQ ID NO: 1245106
gcaguaaccucggccacaa

SEQ ID NO: 1536793 - RNA, 19 nt, Artificial Sequence
  Description of Artificial Sequence: Synthetic oligonucleotide
  Antisense strand to SEQ ID NO: 1536792
uuguggccgagguuacugc

SEQ ID NO: 1536794 - RNA, 19 nt, Artificial Sequence
  Description of Artificial Sequence: Synthetic oligonucleotide
  Sense strand starting at position 2046 of SEQ ID NO: 1245106
cgcagcauuccguuuggaa

SEQ ID NO: 1536795 - RNA, 19 nt, Artificial Sequence
  Description of Artificial Sequence: Synthetic oligonucleotide
  Antisense strand to SEQ ID NO: 1536794
uuccaaacggaaugcugcg

SEQ ID NO: 1536796 - RNA, 19 nt, Artificial Sequence
  Description of Artificial Sequence: Synthetic oligonucleotide
  Sense strand starting at position 2467 of SEQ ID NO: 1245106
caguaucuguggcugaaau

SEQ ID NO: 1536797 - RNA, 19 nt, Artificial Sequence
  Description of Artificial Sequence: Synthetic oligonucleotide
  Antisense strand to SEQ ID NO: 1536796
auuucagccacagauacug

SEQ ID NO: 1536798 - RNA, 19 nt, Artificial Sequence
  Description of Artificial Sequence: Synthetic oligonucleotide
  Sense strand starting at position 2468 of SEQ ID NO: 1245106
aguaucuguggcugaaaua

SEQ ID NO: 1536799 - RNA, 19 nt, Artificial Sequence
  Description of Artificial Sequence: Synthetic oligonucleotide
  Antisense strand to SEQ ID NO: 1536798
uauuucagccacagauacu

SEQ ID NO: 1536800 - RNA, 19 nt, Artificial Sequence
  Description of Artificial Sequence: Synthetic oligonucleotide
  Sense strand starting at position 2469 of SEQ ID NO: 1245106
guaucuguggcugaaauaa

SEQ ID NO: 1536801 - RNA, 19 nt, Artificial Sequence
  Description of Artificial Sequence: Synthetic oligonucleotide
  Antisense strand to SEQ ID NO: 1536800
uuauuucagccacagauac

SEQ ID NO: 1536802 - RNA, 19 nt, Artificial Sequence
  Description of Artificial Sequence: Synthetic oligonucleotide
  Sense strand starting at position 2507 of SEQ ID NO: 1245106
aagauuaugcccuauggua

SEQ ID NO: 1536803 - RNA, 19 nt, Artificial Sequence
  Description of Artificial Sequence: Synthetic oligonucleotide
  Antisense strand to SEQ ID NO: 1536802
uaccauagggcauaaucuu

SEQ ID NO: 1536804 - RNA, 19 nt, Artificial Sequence
  Description of Artificial Sequence: Synthetic oligonucleotide
  Sense strand starting at position 2509 of SEQ ID NO: 1245106
gauuaugcccuaugguaaa

SEQ ID NO: 1536805 - RNA, 19 nt, Artificial Sequence
  Description of Artificial Sequence: Synthetic oligonucleotide
  Antisense strand to SEQ ID NO: 1536804
uuuaccauagggcauaauc

SEQ ID NO: 1536806 - RNA, 19 nt, Artificial Sequence
  Description of Artificial Sequence: Synthetic oligonucleotide
  Sense strand starting at position 2522 of SEQ ID NO: 1245106
gguaaauucugauagguaa

SEQ ID NO: 1536807 - RNA, 19 nt, Artificial Sequence
  Description of Artificial Sequence: Synthetic oligonucleotide
  Antisense strand to SEQ ID NO: 1536806
uuaccuaucagaauuuacc

SEQ ID NO: 1536808 - RNA, 19 nt, Artificial Sequence
  Description of Artificial Sequence: Synthetic oligonucleotide
  Sense strand starting at position 2682 of SEQ ID NO: 1245106
ucagcugucccauguacaa

SEQ ID NO: 1536809 - RNA, 19 nt, Artificial Sequence
  Description of Artificial Sequence: Synthetic oligonucleotide
  Antisense strand to SEQ ID NO: 1536808
uuguacaugggacagcuga

SEQ ID NO: 1536810 - RNA, 19 nt, Artificial Sequence
  Description of Artificial Sequence: Synthetic oligonucleotide
  Sense strand starting at position 2732 of SEQ ID NO: 1245106
ccaggacucuuagaacagu

SEQ ID NO: 1536811 - RNA, 19 nt, Artificial Sequence
  Description of Artificial Sequence: Synthetic oligonucleotide
  Antisense strand to SEQ ID NO: 1536810
acuguucuaagaguccugg

SEQ ID NO: 1536812 - RNA, 19 nt, Artificial Sequence
  Description of Artificial Sequence: Synthetic oligonucleotide
  Sense strand starting at position 2755 of SEQ ID NO: 1245106
gcacauagagagugauucu

SEQ ID NO: 1536813 - RNA, 19 nt, Artificial Sequence
  Description of Artificial Sequence: Synthetic oligonucleotide
  Antisense strand to SEQ ID NO: 1536812
agaaucacucucuaugugc

SEQ ID NO: 1536814 - RNA, 19 nt, Artificial Sequence
  Description of Artificial Sequence: Synthetic oligonucleotide
  Sense strand starting at position 2758 of SEQ ID NO: 1245106
cauagagagugauucucuu

SEQ ID NO: 1536815 - RNA, 19 nt, Artificial Sequence
  Description of Artificial Sequence: Synthetic oligonucleotide
  Antisense strand to SEQ ID NO: 1536814
aagagaaucacucucuaug

SEQ ID NO: 1536816 - RNA, 19 nt, Artificial Sequence
  Description of Artificial Sequence: Synthetic oligonucleotide
  Sense strand starting at position 2762 of SEQ ID NO: 1245106
gagagugauucucuuaccu

SEQ ID NO: 1536817 - RNA, 19 nt, Artificial Sequence
  Description of Artificial Sequence: Synthetic oligonucleotide
  Antisense strand to SEQ ID NO: 1536816
agguaagagaaucacucuc

SEQ ID NO: 1536818 - RNA, 19 nt, Artificial Sequence
  Description of Artificial Sequence: Synthetic oligonucleotide
  Sense strand starting at position 2892 of SEQ ID NO: 1245106
ucaacucaucuggaaagcu

SEQ ID NO: 1536819 - RNA, 19 nt, Artificial Sequence
  Description of Artificial Sequence: Synthetic oligonucleotide
  Antisense strand to SEQ ID NO: 1536818
agcuuuccagaugaguuga

SEQ ID NO: 1536820 - RNA, 19 nt, Artificial Sequence
  Description of Artificial Sequence: Synthetic oligonucleotide
  Sense strand starting at position 2926 of SEQ ID NO: 1245106
ggguaugcccacuagguua

SEQ ID NO: 1536821 - RNA, 19 nt, Artificial Sequence
  Description of Artificial Sequence: Synthetic oligonucleotide
  Antisense strand to SEQ ID NO: 1536820
uaaccuagugggcauaccc

SEQ ID NO: 1536822 - RNA, 19 nt, Artificial Sequence
  Description of Artificial Sequence: Synthetic oligonucleotide
  Sense strand starting at position 2928 of SEQ ID NO: 1245106
guaugcccacuagguuaua

SEQ ID NO: 1536823 - RNA, 19 nt, Artificial Sequence
  Description of Artificial Sequence: Synthetic oligonucleotide
  Antisense strand to SEQ ID NO: 1536822
uauaaccuagugggcauac

SEQ ID NO: 1536824 - RNA, 19 nt, Artificial Sequence
  Description of Artificial Sequence: Synthetic oligonucleotide
  Sense strand starting at position 2931 of SEQ ID NO: 1245106
ugcccacuagguuauaaau

SEQ ID NO: 1536825 - RNA, 19 nt, Artificial Sequence
  Description of Artificial Sequence: Synthetic oligonucleotide
  Antisense strand to SEQ ID NO: 1536824
auuuauaaccuagugggca

SEQ ID NO: 1536826 - RNA, 19 nt, Artificial Sequence
  Description of Artificial Sequence: Synthetic oligonucleotide
  Sense strand starting at position 2979 of SEQ ID NO: 1245106
ucuggacagucaucuugga

SEQ ID NO: 1536827 - RNA, 19 nt, Artificial Sequence
  Description of Artificial Sequence: Synthetic oligonucleotide
  Antisense strand to SEQ ID NO: 1536826
uccaagaugacuguccaga

SEQ ID NO: 1536828 - RNA, 19 nt, Artificial Sequence
  Description of Artificial Sequence: Synthetic oligonucleotide
  Sense strand starting at position 2983 of SEQ ID NO: 1245106
gacagucaucuuggaaaua

SEQ ID NO: 1536829 - RNA, 19 nt, Artificial Sequence
  Description of Artificial Sequence: Synthetic oligonucleotide
  Antisense strand to SEQ ID NO: 1536828
uauuuccaagaugacuguc

SEQ ID NO: 1536830 - RNA, 19 nt, Artificial Sequence
  Description of Artificial Sequence: Synthetic oligonucleotide
  Sense strand starting at position 2984 of SEQ ID NO: 1245106
acagucaucuuggaaauau

SEQ ID NO: 1536831 - RNA, 19 nt, Artificial Sequence
  Description of Artificial Sequence: Synthetic oligonucleotide
  Antisense strand to SEQ ID NO: 1536830
auauuuccaagaugacugu

SEQ ID NO: 1536832 - RNA, 19 nt, Artificial Sequence
  Description of Artificial Sequence: Synthetic oligonucleotide
  Sense strand starting at position 3168 of SEQ ID NO: 1245106
ucaggagcuccugaaccuu

SEQ ID NO: 1536833 - RNA, 19 nt, Artificial Sequence
  Description of Artificial Sequence: Synthetic oligonucleotide
  Antisense strand to SEQ ID NO: 1536832
aagguucaggagcuccuga

SEQ ID NO: 1536834 - RNA, 19 nt, Artificial Sequence
  Description of Artificial Sequence: Synthetic oligonucleotide
  Sense strand starting at position 3359 of SEQ ID NO: 1245106
gccaucauuccacagagca

SEQ ID NO: 1536835 - RNA, 19 nt, Artificial Sequence
  Description of Artificial Sequence: Synthetic oligonucleotide
  Antisense strand to SEQ ID NO: 1536834
ugcucuguggaaugauggc

SEQ ID NO: 1536836 - RNA, 19 nt, Artificial Sequence
  Description of Artificial Sequence: Synthetic oligonucleotide
  Sense strand starting at position 3426 of SEQ ID NO: 1245106
cgcauauuuguauaguucu

SEQ ID NO: 1536837 - RNA, 19 nt, Artificial Sequence
  Description of Artificial Sequence: Synthetic oligonucleotide
  Antisense strand to SEQ ID NO: 1536836
agaacuauacaaauaugcg

SEQ ID NO: 1536838 - RNA, 19 nt, Artificial Sequence
  Description of Artificial Sequence: Synthetic oligonucleotide
  Sense strand starting at position 3471 of SEQ ID NO: 1245106
agcugacugcauuagaauu

SEQ ID NO: 1536839 - RNA, 19 nt, Artificial Sequence
  Description of Artificial Sequence: Synthetic oligonucleotide
  Antisense strand to SEQ ID NO: 1536838
aauucuaaugcagucagcu

SEQ ID NO: 1536840 - RNA, 19 nt, Artificial Sequence
  Description of Artificial Sequence: Synthetic oligonucleotide
  Sense strand starting at position 3473 of SEQ ID NO: 1245106
cugacugcauuagaauuua

SEQ ID NO: 1536841 - RNA, 19 nt, Artificial Sequence
  Description of Artificial Sequence: Synthetic oligonucleotide
  Antisense strand to SEQ ID NO: 1536840
uaaauucuaaugcagucag

SEQ ID NO: 1536842 - RNA, 19 nt, Artificial Sequence
  Description of Artificial Sequence: Synthetic oligonucleotide
  Sense strand starting at position 3492 of SEQ ID NO: 1245106
aaggccucugggugacaaa

SEQ ID NO: 1536843 - RNA, 19 nt, Artificial Sequence
  Description of Artificial Sequence: Synthetic oligonucleotide
  Antisense strand to SEQ ID NO: 1536842
uuugucacccagaggccuu

SEQ ID NO: 1536844 - RNA, 19 nt, Artificial Sequence
  Description of Artificial Sequence: Synthetic oligonucleotide
  Sense strand starting at position 32 of SEQ ID NO: 1245107
guggauucugcccaugcuu

SEQ ID NO: 1536845 - RNA, 19 nt, Artificial Sequence
  Description of Artificial Sequence: Synthetic oligonucleotide
  Antisense strand to SEQ ID NO: 1536844
aagcaugggcagaauccac

SEQ ID NO: 1536846 - RNA, 19 nt, Artificial Sequence
  Description of Artificial Sequence: Synthetic oligonucleotide
  Sense strand starting at position 61 of SEQ ID NO: 1245107
gugcguguuauuugcauaa

SEQ ID NO: 1536847 - RNA, 19 nt, Artificial Sequence
  Description of Artificial Sequence: Synthetic oligonucleotide
  Antisense strand to SEQ ID NO: 1536846
uuaugcaaauaacacgcac

SEQ ID NO: 1536848 - RNA, 19 nt, Artificial Sequence
  Description of Artificial Sequence: Synthetic oligonucleotide
  Sense strand starting at position 107 of SEQ ID NO: 1245107
acacgauaaucagucuaua

SEQ ID NO: 1536849 - RNA, 19 nt, Artificial Sequence
  Description of Artificial Sequence: Synthetic oligonucleotide
  Antisense strand to SEQ ID NO: 1536848
uauagacugauuaucgugu

SEQ ID NO: 1536850 - RNA, 19 nt, Artificial Sequence
  Description of Artificial Sequence: Synthetic oligonucleotide
  Sense strand starting at position 154 of SEQ ID NO: 1245107
cuugcucucccagauaaag

SEQ ID NO: 1536851 - RNA, 19 nt, Artificial Sequence
  Description of Artificial Sequence: Synthetic oligonucleotide
  Antisense strand to SEQ ID NO: 1536850
cuuuaucugggagagcaag

SEQ ID NO: 1536852 - RNA, 19 nt, Artificial Sequence
  Description of Artificial Sequence: Synthetic oligonucleotide
  Sense strand starting at position 165 of SEQ ID NO: 1245107
agauaaagaucucaggaau

SEQ ID NO: 1536853 - RNA, 19 nt, Artificial Sequence
  Description of Artificial Sequence: Synthetic oligonucleotide
  Antisense strand to SEQ ID NO: 1536852
auuccugagaucuuuaucu

SEQ ID NO: 1536854 - RNA, 19 nt, Artificial Sequence
  Description of Artificial Sequence: Synthetic oligonucleotide
  Sense strand starting at position 211 of SEQ ID NO: 1245107
uggucaagauaagucaauu

SEQ ID NO: 1536855 - RNA, 19 nt, Artificial Sequence
  Description of Artificial Sequence: Synthetic oligonucleotide
  Antisense strand to SEQ ID NO: 1536854
aauugacuuaucuugacca

SEQ ID NO: 1536856 - RNA, 19 nt, Artificial Sequence
  Description of Artificial Sequence: Synthetic oligonucleotide
  Sense strand starting at position 243 of SEQ ID NO: 1245107
cgugcaauucugggaacuu

SEQ ID NO: 1536857 - RNA, 19 nt, Artificial Sequence
  Description of Artificial Sequence: Synthetic oligonucleotide
  Antisense strand to SEQ ID NO: 1536856
aaguucccagaauugcacg

SEQ ID NO: 1536858 - RNA, 19 nt, Artificial Sequence
  Description of Artificial Sequence: Synthetic oligonucleotide
  Sense strand starting at position 252 of SEQ ID NO: 1245107
cugggaacuugcuuaguaa

SEQ ID NO: 1536859 - RNA, 19 nt, Artificial Sequence
  Description of Artificial Sequence: Synthetic oligonucleotide
  Antisense strand to SEQ ID NO: 1536858
uuacuaagcaaguucccag

SEQ ID NO: 1536860 - RNA, 19 nt, Artificial Sequence
  Description of Artificial Sequence: Synthetic oligonucleotide
  Sense strand starting at position 253 of SEQ ID NO: 1245107
ugggaacuugcuuaguaaa

SEQ ID NO: 1536861 - RNA, 19 nt, Artificial Sequence
  Description of Artificial Sequence: Synthetic oligonucleotide
  Antisense strand to SEQ ID NO: 1536860
uuuacuaagcaaguuccca

SEQ ID NO: 1536862 - RNA, 19 nt, Artificial Sequence
  Description of Artificial Sequence: Synthetic oligonucleotide
  Sense strand starting at position 296 of SEQ ID NO: 1245107
agagucaaugacgguugaa

SEQ ID NO: 1536863 - RNA, 19 nt, Artificial Sequence
  Description of Artificial Sequence: Synthetic oligonucleotide
  Antisense strand to SEQ ID NO: 1536862
uucaaccgucauugacucu

SEQ ID NO: 1536864 - RNA, 19 nt, Artificial Sequence
  Description of Artificial Sequence: Synthetic oligonucleotide
  Sense strand starting at position 315 of SEQ ID NO: 1245107
ggcaguuccucuucccuga

SEQ ID NO: 1536865 - RNA, 19 nt, Artificial Sequence
  Description of Artificial Sequence: Synthetic oligonucleotide
  Antisense strand to SEQ ID NO: 1536864
ucagggaagaggaacugcc

SEQ ID NO: 1536866 - RNA, 19 nt, Artificial Sequence
  Description of Artificial Sequence: Synthetic oligonucleotide
  Sense strand starting at position 568 of SEQ ID NO: 1245107
auggaauuaugcccaauau

SEQ ID NO: 1536867 - RNA, 19 nt, Artificial Sequence
  Description of Artificial Sequence: Synthetic oligonucleotide
  Antisense strand to SEQ ID NO: 1536866
auauugggcauaauuccau

SEQ ID NO: 1536868 - RNA, 19 nt, Artificial Sequence
  Description of Artificial Sequence: Synthetic oligonucleotide
  Sense strand starting at position 569 of SEQ ID NO: 1245107
uggaauuaugcccaauauu

SEQ ID NO: 1536869 - RNA, 19 nt, Artificial Sequence
  Description of Artificial Sequence: Synthetic oligonucleotide
  Antisense strand to SEQ ID NO: 1536868
aauauugggcauaauucca

SEQ ID NO: 1536870 - RNA, 19 nt, Artificial Sequence
  Description of Artificial Sequence: Synthetic oligonucleotide
  Sense strand starting at position 610 of SEQ ID NO: 1245107
acaaucuauuauggaaaga

SEQ ID NO: 1536871 - RNA, 19 nt, Artificial Sequence
  Description of Artificial Sequence: Synthetic oligonucleotide
  Antisense strand to SEQ ID NO: 1536870
ucuuuccauaauagauugu

SEQ ID NO: 1536872 - RNA, 19 nt, Artificial Sequence
  Description of Artificial Sequence: Synthetic oligonucleotide
  Sense strand starting at position 621 of SEQ ID NO: 1245107
uggaaagacuuccauauuu

SEQ ID NO: 1536873 - RNA, 19 nt, Artificial Sequence
  Description of Artificial Sequence: Synthetic oligonucleotide
  Antisense strand to SEQ ID NO: 1536872
aaauauggaagucuuucca

SEQ ID NO: 1536874 - RNA, 19 nt, Artificial Sequence
  Description of Artificial Sequence: Synthetic oligonucleotide
  Sense strand starting at position 796 of SEQ ID NO: 1245107
aacaguguugggcguggaa

SEQ ID NO: 1536875 - RNA, 19 nt, Artificial Sequence
  Description of Artificial Sequence: Synthetic oligonucleotide
  Antisense strand to SEQ ID NO: 1536874
uuccacgcccaacacuguu

SEQ ID NO: 1536876 - RNA, 19 nt, Artificial Sequence
  Description of Artificial Sequence: Synthetic oligonucleotide
  Sense strand starting at position 884 of SEQ ID NO: 1245107
caaguuguucgaggguuag

SEQ ID NO: 1536877 - RNA, 19 nt, Artificial Sequence
  Description of Artificial Sequence: Synthetic oligonucleotide
  Antisense strand to SEQ ID NO: 1536876
cuaacccucgaacaacuug

SEQ ID NO: 1536878 - RNA, 19 nt, Artificial Sequence
  Description of Artificial Sequence: Synthetic oligonucleotide
  Sense strand starting at position 894 of SEQ ID NO: 1245107
gaggguuagcuguaaauug

SEQ ID NO: 1536879 - RNA, 19 nt, Artificial Sequence
  Description of Artificial Sequence: Synthetic oligonucleotide
  Antisense strand to SEQ ID NO: 1536878
caauuuacagcuaacccuc

SEQ ID NO: 1536880 - RNA, 19 nt, Artificial Sequence
  Description of Artificial Sequence: Synthetic oligonucleotide
  Sense strand starting at position 899 of SEQ ID NO: 1245107
uuagcuguaaauuguguau

SEQ ID NO: 1536881 - RNA, 19 nt, Artificial Sequence
  Description of Artificial Sequence: Synthetic oligonucleotide
  Antisense strand to SEQ ID NO: 1536880
auacacaauuuacagcuaa

SEQ ID NO: 1536882 - RNA, 19 nt, Artificial Sequence
  Description of Artificial Sequence: Synthetic oligonucleotide
  Sense strand starting at position 902 of SEQ ID NO: 1245107
gcuguaaauuguguauaaa

SEQ ID NO: 1536883 - RNA, 19 nt, Artificial Sequence
  Description of Artificial Sequence: Synthetic oligonucleotide
  Antisense strand to SEQ ID NO: 1536882
uuuauacacaauuuacagc

SEQ ID NO: 1536884 - RNA, 19 nt, Artificial Sequence
  Description of Artificial Sequence: Synthetic oligonucleotide
  Sense strand starting at position 903 of SEQ ID NO: 1245107
cuguaaauuguguauaaag

SEQ ID NO: 1536885 - RNA, 19 nt, Artificial Sequence
  Description of Artificial Sequence: Synthetic oligonucleotide
  Antisense strand to SEQ ID NO: 1536884
cuuuauacacaauuuacag

SEQ ID NO: 1536886 - RNA, 19 nt, Artificial Sequence
  Description of Artificial Sequence: Synthetic oligonucleotide
  Sense strand starting at position 937 of SEQ ID NO: 1245107
acucaacguccuggagaaa

SEQ ID NO: 1536887 - RNA, 19 nt, Artificial Sequence
  Description of Artificial Sequence: Synthetic oligonucleotide
  Antisense strand to SEQ ID NO: 1536886
uuucuccaggacguugagu

SEQ ID NO: 1536888 - RNA, 19 nt, Artificial Sequence
  Description of Artificial Sequence: Synthetic oligonucleotide
  Sense strand starting at position 938 of SEQ ID NO: 1245107
cucaacguccuggagaaau

SEQ ID NO: 1536889 - RNA, 19 nt, Artificial Sequence
  Description of Artificial Sequence: Synthetic oligonucleotide
  Antisense strand to SEQ ID NO: 1536888
auuucuccaggacguugag

SEQ ID NO: 1536890 - RNA, 19 nt, Artificial Sequence
  Description of Artificial Sequence: Synthetic oligonucleotide
  Sense strand starting at position 957 of SEQ ID NO: 1245107
ccaucacuguuggcuuuaa

SEQ ID NO: 1536891 - RNA, 19 nt, Artificial Sequence
  Description of Artificial Sequence: Synthetic oligonucleotide
  Antisense strand to SEQ ID NO: 1536890
uuaaagccaacagugaugg

SEQ ID NO: 1536892 - RNA, 19 nt, Artificial Sequence
  Description of Artificial Sequence: Synthetic oligonucleotide
  Sense strand starting at position 961 of SEQ ID NO: 1245107
cacuguuggcuuuaagcaa

SEQ ID NO: 1536893 - RNA, 19 nt, Artificial Sequence
  Description of Artificial Sequence: Synthetic oligonucleotide
  Antisense strand to SEQ ID NO: 1536892
uugcuuaaagccaacagug

SEQ ID NO: 1536894 - RNA, 19 nt, Artificial Sequence
  Description of Artificial Sequence: Synthetic oligonucleotide
  Sense strand starting at position 1122 of SEQ ID NO: 1245107
ucaacaagugacugaaucu

SEQ ID NO: 1536895 - RNA, 19 nt, Artificial Sequence
  Description of Artificial Sequence: Synthetic oligonucleotide
  Antisense strand to SEQ ID NO: 1536894
agauucagucacuuguuga

SEQ ID NO: 1536896 - RNA, 19 nt, Artificial Sequence
  Description of Artificial Sequence: Synthetic oligonucleotide
  Sense strand starting at position 1151 of SEQ ID NO: 1245107
aacuguguuccacaaaggu

SEQ ID NO: 1536897 - RNA, 19 nt, Artificial Sequence
  Description of Artificial Sequence: Synthetic oligonucleotide
  Antisense strand to SEQ ID NO: 1536896
accuuuguggaacacaguu

SEQ ID NO: 1536898 - RNA, 19 nt, Artificial Sequence
  Description of Artificial Sequence: Synthetic oligonucleotide
  Sense strand starting at position 1232 of SEQ ID NO: 1245107
ggcagugucaucuggacca

SEQ ID NO: 1536899 - RNA, 19 nt, Artificial Sequence
  Description of Artificial Sequence: Synthetic oligonucleotide
  Antisense strand to SEQ ID NO: 1536898
ugguccagaugacacugcc

SEQ ID NO: 1536900 - RNA, 19 nt, Artificial Sequence
  Description of Artificial Sequence: Synthetic oligonucleotide
  Sense strand starting at position 1234 of SEQ ID NO: 1245107
cagugucaucuggaccaca

SEQ ID NO: 1536901 - RNA, 19 nt, Artificial Sequence
  Description of Artificial Sequence: Synthetic oligonucleotide
  Antisense strand to SEQ ID NO: 1536900
ugugguccagaugacacug

SEQ ID NO: 1536902 - RNA, 19 nt, Artificial Sequence
  Description of Artificial Sequence: Synthetic oligonucleotide
  Sense strand starting at position 1408 of SEQ ID NO: 1245107
cgcuccuuccuggaucuau

SEQ ID NO: 1536903 - RNA, 19 nt, Artificial Sequence
  Description of Artificial Sequence: Synthetic oligonucleotide
  Antisense strand to SEQ ID NO: 1536902
auagauccaggaaggagcg

SEQ ID NO: 1536904 - RNA, 19 nt, Artificial Sequence
  Description of Artificial Sequence: Synthetic oligonucleotide
  Sense strand starting at position 1450 of SEQ ID NO: 1245107
caggaacaccuccggaaau

SEQ ID NO: 1536905 - RNA, 19 nt, Artificial Sequence
  Description of Artificial Sequence: Synthetic oligonucleotide
  Antisense strand to SEQ ID NO: 1536904
auuuccggagguguuccug

SEQ ID NO: 1536906 - RNA, 19 nt, Artificial Sequence
  Description of Artificial Sequence: Synthetic oligonucleotide
  Sense strand starting at position 1588 of SEQ ID NO: 1245107
uguggcuuucucuaaggca

SEQ ID NO: 1536907 - RNA, 19 nt, Artificial Sequence
  Description of Artificial Sequence: Synthetic oligonucleotide
  Antisense strand to SEQ ID NO: 1536906
ugccuuagagaaagccaca

SEQ ID NO: 1536908 - RNA, 19 nt, Artificial Sequence
  Description of Artificial Sequence: Synthetic oligonucleotide
  Sense strand starting at position 2414 of SEQ ID NO: 1245107
ccaccucucccuggaguuu

SEQ ID NO: 1536909 - RNA, 19 nt, Artificial Sequence
  Description of Artificial Sequence: Synthetic oligonucleotide
  Antisense strand to SEQ ID NO: 1536908
aaacuccagggagaggugg

SEQ ID NO: 1536910 - RNA, 19 nt, Artificial Sequence
  Description of Artificial Sequence: Synthetic oligonucleotide
  Sense strand starting at position 2423 of SEQ ID NO: 1245107
ccuggaguuucuguucuca

SEQ ID NO: 1536911 - RNA, 19 nt, Artificial Sequence
  Description of Artificial Sequence: Synthetic oligonucleotide
  Antisense strand to SEQ ID NO: 1536910
ugagaacagaaacuccagg

SEQ ID NO: 1536912 - RNA, 19 nt, Artificial Sequence
  Description of Artificial Sequence: Synthetic oligonucleotide
  Sense strand starting at position 2532 of SEQ ID NO: 1245107
uucggugcuacggaaacau

SEQ ID NO: 1536913 - RNA, 19 nt, Artificial Sequence
  Description of Artificial Sequence: Synthetic oligonucleotide
  Antisense strand to SEQ ID NO: 1536912
auguuuccguagcaccgaa

SEQ ID NO: 1536914 - RNA, 19 nt, Artificial Sequence
  Description of Artificial Sequence: Synthetic oligonucleotide
  Sense strand starting at position 2693 of SEQ ID NO: 1245107
guuccuuagccacgaaaca

SEQ ID NO: 1536915 - RNA, 19 nt, Artificial Sequence
  Description of Artificial Sequence: Synthetic oligonucleotide
  Antisense strand to SEQ ID NO: 1536914
uguuucguggcuaaggaac

SEQ ID NO: 1536916 - RNA, 19 nt, Artificial Sequence
  Description of Artificial Sequence: Synthetic oligonucleotide
  Sense strand starting at position 2817 of SEQ ID NO: 1245107
gaugacucuugugcucaca

SEQ ID NO: 1536917 - RNA, 19 nt, Artificial Sequence
  Description of Artificial Sequence: Synthetic oligonucleotide
  Antisense strand to SEQ ID NO: 1536916
ugugagcacaagagucauc

SEQ ID NO: 1536918 - RNA, 19 nt, Artificial Sequence
  Description of Artificial Sequence: Synthetic oligonucleotide
  Sense strand starting at position 2933 of SEQ ID NO: 1245107
caguaacuucgugucgcua

SEQ ID NO: 1536919 - RNA, 19 nt, Artificial Sequence
  Description of Artificial Sequence: Synthetic oligonucleotide
  Antisense strand to SEQ ID NO: 1536918
uagcgacacgaaguuacug

SEQ ID NO: 1536920 - RNA, 19 nt, Artificial Sequence
  Description of Artificial Sequence: Synthetic oligonucleotide
  Sense strand starting at position 3003 of SEQ ID NO: 1245107
gguggugacuauccaguuu

SEQ ID NO: 1536921 - RNA, 19 nt, Artificial Sequence
  Description of Artificial Sequence: Synthetic oligonucleotide
  Antisense strand to SEQ ID NO: 1536920
aaacuggauagucaccacc

SEQ ID NO: 1536922 - RNA, 19 nt, Artificial Sequence
  Description of Artificial Sequence: Synthetic oligonucleotide
  Sense strand starting at position 3672 of SEQ ID NO: 1245107
guacgugcgcguguaaaua

SEQ ID NO: 1536923 - RNA, 19 nt, Artificial Sequence
  Description of Artificial Sequence: Synthetic oligonucleotide
  Antisense strand to SEQ ID NO: 1536922
uauuuacacgcgcacguac

SEQ ID NO: 1536924 - RNA, 19 nt, Artificial Sequence
  Description of Artificial Sequence: Synthetic oligonucleotide
  Sense strand starting at position 785 of SEQ ID NO: 1245108
ccaccucucccuggaguuu

SEQ ID NO: 1536925 - RNA, 19 nt, Artificial Sequence
  Description of Artificial Sequence: Synthetic oligonucleotide
  Antisense strand to SEQ ID NO: 1536924
aaacuccagggagaggugg

SEQ ID NO: 1536926 - RNA, 19 nt, Artificial Sequence
  Description of Artificial Sequence: Synthetic oligonucleotide
  Sense strand starting at position 794 of SEQ ID NO: 1245108
ccuggaguuucuguucuca

SEQ ID NO: 1536927 - RNA, 19 nt, Artificial Sequence
  Description of Artificial Sequence: Synthetic oligonucleotide
  Antisense strand to SEQ ID NO: 1536926
ugagaacagaaacuccagg

SEQ ID NO: 1536928 - RNA, 19 nt, Artificial Sequence
  Description of Artificial Sequence: Synthetic oligonucleotide
  Sense strand starting at position 903 of SEQ ID NO: 1245108
uucggugcuacggaaacau

SEQ ID NO: 1536929 - RNA, 19 nt, Artificial Sequence
  Description of Artificial Sequence: Synthetic oligonucleotide
  Antisense strand to SEQ ID NO: 1536928
auguuuccguagcaccgaa

SEQ ID NO: 1536930 - RNA, 19 nt, Artificial Sequence
  Description of Artificial Sequence: Synthetic oligonucleotide
  Sense strand starting at position 1064 of SEQ ID NO: 1245108
guuccuuagccacgaaaca

SEQ ID NO: 1536931 - RNA, 19 nt, Artificial Sequence
  Description of Artificial Sequence: Synthetic oligonucleotide
  Antisense strand to SEQ ID NO: 1536930
uguuucguggcuaaggaac

SEQ ID NO: 1536932 - RNA, 19 nt, Artificial Sequence
  Description of Artificial Sequence: Synthetic oligonucleotide
  Sense strand starting at position 1188 of SEQ ID NO: 1245108
gaugacucuugugcucaca

SEQ ID NO: 1536933 - RNA, 19 nt, Artificial Sequence
  Description of Artificial Sequence: Synthetic oligonucleotide
  Antisense strand to SEQ ID NO: 1536932
ugugagcacaagagucauc

SEQ ID NO: 1536934 - RNA, 19 nt, Artificial Sequence
  Description of Artificial Sequence: Synthetic oligonucleotide
  Sense strand starting at position 1304 of SEQ ID NO: 1245108
caguaacuucgugucgcua

SEQ ID NO: 1536935 - RNA, 19 nt, Artificial Sequence
  Description of Artificial Sequence: Synthetic oligonucleotide
  Antisense strand to SEQ ID NO: 1536934
uagcgacacgaaguuacug

SEQ ID NO: 1536936 - RNA, 19 nt, Artificial Sequence
  Description of Artificial Sequence: Synthetic oligonucleotide
  Sense strand starting at position 1374 of SEQ ID NO: 1245108
gguggugacuauccaguuu

SEQ ID NO: 1536937 - RNA, 19 nt, Artificial Sequence
  Description of Artificial Sequence: Synthetic oligonucleotide
  Antisense strand to SEQ ID NO: 1536936
aaacuggauagucaccacc

SEQ ID NO: 1536938 - RNA, 19 nt, Artificial Sequence
  Description of Artificial Sequence: Synthetic oligonucleotide
  Sense strand starting at position 2043 of SEQ ID NO: 1245108
guacgugcgcguguaaaua

SEQ ID NO: 1536939 - RNA, 19 nt, Artificial Sequence
  Description of Artificial Sequence: Synthetic oligonucleotide
  Antisense strand to SEQ ID NO: 1536938
uauuuacacgcgcacguac

SEQ ID NO: 1536940 - RNA, 19 nt, Artificial Sequence
  Description of Artificial Sequence: Synthetic oligonucleotide
  Sense strand starting at position 2355 of SEQ ID NO: 1245108
cuacgaguuccggcaugca

SEQ ID NO: 1536941 - RNA, 19 nt, Artificial Sequence
  Description of Artificial Sequence: Synthetic oligonucleotide
  Antisense strand to SEQ ID NO: 1536940
ugcaugccggaacucguag

SEQ ID NO: 1536942 - RNA, 19 nt, Artificial Sequence
  Description of Artificial Sequence: Synthetic oligonucleotide
  Sense strand starting at position 2746 of SEQ ID NO: 1245108
gccgcaaguggcuuacuaa

SEQ ID NO: 1536943 - RNA, 19 nt, Artificial Sequence
  Description of Artificial Sequence: Synthetic oligonucleotide
  Antisense strand to SEQ ID NO: 1536942
uuaguaagccacuugcggc

SEQ ID NO: 1536944 - RNA, 19 nt, Artificial Sequence
  Description of Artificial Sequence: Synthetic oligonucleotide
  Sense strand starting at position 2747 of SEQ ID NO: 1245108
ccgcaaguggcuuacuaaa

SEQ ID NO: 1536945 - RNA, 19 nt, Artificial Sequence
  Description of Artificial Sequence: Synthetic oligonucleotide
  Antisense strand to SEQ ID NO: 1536944
uuuaguaagccacuugcgg

SEQ ID NO: 1536946 - RNA, 19 nt, Artificial Sequence
  Description of Artificial Sequence: Synthetic oligonucleotide
  Sense strand starting at position 2774 of SEQ ID NO: 1245108
uuucuacguuugucuggaa

SEQ ID NO: 1536947 - RNA, 19 nt, Artificial Sequence
  Description of Artificial Sequence: Synthetic oligonucleotide
  Antisense strand to SEQ ID NO: 1536946
uuccagacaaacguagaaa

SEQ ID NO: 1536948 - RNA, 19 nt, Artificial Sequence
  Description of Artificial Sequence: Synthetic oligonucleotide
  Sense strand starting at position 2775 of SEQ ID NO: 1245108
uucuacguuugucuggaau

SEQ ID NO: 1536949 - RNA, 19 nt, Artificial Sequence
  Description of Artificial Sequence: Synthetic oligonucleotide
  Antisense strand to SEQ ID NO: 1536948
auuccagacaaacguagaa

SEQ ID NO: 1536950 - RNA, 19 nt, Artificial Sequence
  Description of Artificial Sequence: Synthetic oligonucleotide
  Sense strand starting at position 3079 of SEQ ID NO: 1245108
cuauguaucuuuguccuua

SEQ ID NO: 1536951 - RNA, 19 nt, Artificial Sequence
  Description of Artificial Sequence: Synthetic oligonucleotide
  Antisense strand to SEQ ID NO: 1536950
uaaggacaaagauacauag

SEQ ID NO: 1536952 - RNA, 19 nt, Artificial Sequence
  Description of Artificial Sequence: Synthetic oligonucleotide
  Sense strand starting at position 3087 of SEQ ID NO: 1245108
cuuuguccuuacguauaua

SEQ ID NO: 1536953 - RNA, 19 nt, Artificial Sequence
  Description of Artificial Sequence: Synthetic oligonucleotide
  Antisense strand to SEQ ID NO: 1536952
uauauacguaaggacaaag

SEQ ID NO: 1536954 - RNA, 19 nt, Artificial Sequence
  Description of Artificial Sequence: Synthetic oligonucleotide
  Sense strand starting at position 3090 of SEQ ID NO: 1245108
uguccuuacguauauaaau

SEQ ID NO: 1536955 - RNA, 19 nt, Artificial Sequence
  Description of Artificial Sequence: Synthetic oligonucleotide
  Antisense strand to SEQ ID NO: 1536954
auuuauauacguaaggaca

SEQ ID NO: 1536956 - RNA, 19 nt, Artificial Sequence
  Description of Artificial Sequence: Synthetic oligonucleotide
  Sense strand starting at position 3171 of SEQ ID NO: 1245108
uucucauguuaggcugaau

SEQ ID NO: 1536957 - RNA, 19 nt, Artificial Sequence
  Description of Artificial Sequence: Synthetic oligonucleotide
  Antisense strand to SEQ ID NO: 1536956
auucagccuaacaugagaa

SEQ ID NO: 1536958 - RNA, 19 nt, Artificial Sequence
  Description of Artificial Sequence: Synthetic oligonucleotide
  Sense strand starting at position 3174 of SEQ ID NO: 1245108
ucauguuaggcugaauacu

SEQ ID NO: 1536959 - RNA, 19 nt, Artificial Sequence
  Description of Artificial Sequence: Synthetic oligonucleotide
  Antisense strand to SEQ ID NO: 1536958
aguauucagccuaacauga

SEQ ID NO: 1536960 - RNA, 19 nt, Artificial Sequence
  Description of Artificial Sequence: Synthetic oligonucleotide
  Sense strand starting at position 3200 of SEQ ID NO: 1245108
uggaaacugucggccugaa

SEQ ID NO: 1536961 - RNA, 19 nt, Artificial Sequence
  Description of Artificial Sequence: Synthetic oligonucleotide
  Antisense strand to SEQ ID NO: 1536960
uucaggccgacaguuucca

SEQ ID NO: 1536962 - RNA, 19 nt, Artificial Sequence
  Description of Artificial Sequence: Synthetic oligonucleotide
  Sense strand starting at position 3228 of SEQ ID NO: 1245108
agacacaguuucucuaagu

SEQ ID NO: 1536963 - RNA, 19 nt, Artificial Sequence
  Description of Artificial Sequence: Synthetic oligonucleotide
  Antisense strand to SEQ ID NO: 1536962
acuuagagaaacugugucu

SEQ ID NO: 1536964 - RNA, 19 nt, Artificial Sequence
  Description of Artificial Sequence: Synthetic oligonucleotide
  Sense strand starting at position 3233 of SEQ ID NO: 1245108
caguuucucuaaguagaga

SEQ ID NO: 1536965 - RNA, 19 nt, Artificial Sequence
  Description of Artificial Sequence: Synthetic oligonucleotide
  Antisense strand to SEQ ID NO: 1536964
ucucuacuuagagaaacug

SEQ ID NO: 1536966 - RNA, 19 nt, Artificial Sequence
  Description of Artificial Sequence: Synthetic oligonucleotide
  Sense strand starting at position 3262 of SEQ ID NO: 1245108
gccacacuugagcacaaau

SEQ ID NO: 1536967 - RNA, 19 nt, Artificial Sequence
  Description of Artificial Sequence: Synthetic oligonucleotide
  Antisense strand to SEQ ID NO: 1536966
auuugugcucaaguguggc

SEQ ID NO: 1536968 - RNA, 19 nt, Artificial Sequence
  Description of Artificial Sequence: Synthetic oligonucleotide
  Sense strand starting at position 3291 of SEQ ID NO: 1245108
cugaauguguacuccgauu

SEQ ID NO: 1536969 - RNA, 19 nt, Artificial Sequence
  Description of Artificial Sequence: Synthetic oligonucleotide
  Antisense strand to SEQ ID NO: 1536968
aaucggaguacacauucag

SEQ ID NO: 1536970 - RNA, 19 nt, Artificial Sequence
  Description of Artificial Sequence: Synthetic oligonucleotide
  Sense strand starting at position 3293 of SEQ ID NO: 1245108
gaauguguacuccgauuag

SEQ ID NO: 1536971 - RNA, 19 nt, Artificial Sequence
  Description of Artificial Sequence: Synthetic oligonucleotide
  Antisense strand to SEQ ID NO: 1536970
cuaaucggaguacacauuc

SEQ ID NO: 1536972 - RNA, 19 nt, Artificial Sequence
  Description of Artificial Sequence: Synthetic oligonucleotide
  Sense strand starting at position 3297 of SEQ ID NO: 1245108
guguacuccgauuagcagu

SEQ ID NO: 1536973 - RNA, 19 nt, Artificial Sequence
  Description of Artificial Sequence: Synthetic oligonucleotide
  Antisense strand to SEQ ID NO: 1536972
acugcuaaucggaguacac

SEQ ID NO: 1536974 - RNA, 19 nt, Artificial Sequence
  Description of Artificial Sequence: Synthetic oligonucleotide
  Sense strand starting at position 3304 of SEQ ID NO: 1245108
ccgauuagcaguuaacagu

SEQ ID NO: 1536975 - RNA, 19 nt, Artificial Sequence
  Description of Artificial Sequence: Synthetic oligonucleotide
  Antisense strand to SEQ ID NO: 1536974
acuguuaacugcuaaucgg

SEQ ID NO: 1536976 - RNA, 19 nt, Artificial Sequence
  Description of Artificial Sequence: Synthetic oligonucleotide
  Sense strand starting at position 3369 of SEQ ID NO: 1245108
cuuguuugugaggaauucu

SEQ ID NO: 1536977 - RNA, 19 nt, Artificial Sequence
  Description of Artificial Sequence: Synthetic oligonucleotide
  Antisense strand to SEQ ID NO: 1536976
agaauuccucacaaacaag

SEQ ID NO: 1536978 - RNA, 19 nt, Artificial Sequence
  Description of Artificial Sequence: Synthetic oligonucleotide
  Sense strand starting at position 3378 of SEQ ID NO: 1245108
gaggaauucucacugguuu

SEQ ID NO: 1536979 - RNA, 19 nt, Artificial Sequence
  Description of Artificial Sequence: Synthetic oligonucleotide
  Antisense strand to SEQ ID NO: 1536978
aaaccagugagaauuccuc

SEQ ID NO: 1536980 - RNA, 19 nt, Artificial Sequence
  Description of Artificial Sequence: Synthetic oligonucleotide
  Sense strand starting at position 3408 of SEQ ID NO: 1245108
auugauuagugacugacua

SEQ ID NO: 1536981 - RNA, 19 nt, Artificial Sequence
  Description of Artificial Sequence: Synthetic oligonucleotide
  Antisense strand to SEQ ID NO: 1536980
uagucagucacuaaucaau

SEQ ID NO: 1536982 - RNA, 19 nt, Artificial Sequence
  Description of Artificial Sequence: Synthetic oligonucleotide
  Sense strand starting at position 3409 of SEQ ID NO: 1245108
uugauuagugacugacuau

SEQ ID NO: 1536983 - RNA, 19 nt, Artificial Sequence
  Description of Artificial Sequence: Synthetic oligonucleotide
  Antisense strand to SEQ ID NO: 1536982
auagucagucacuaaucaa

SEQ ID NO: 1536984 - RNA, 19 nt, Artificial Sequence
  Description of Artificial Sequence: Synthetic oligonucleotide
  Sense strand starting at position 3437 of SEQ ID NO: 1245108
agcuauugaguguggguau

SEQ ID NO: 1536985 - RNA, 19 nt, Artificial Sequence
  Description of Artificial Sequence: Synthetic oligonucleotide
  Antisense strand to SEQ ID NO: 1536984
auacccacacucaauagcu

SEQ ID NO: 1536986 - RNA, 19 nt, Artificial Sequence
  Description of Artificial Sequence: Synthetic oligonucleotide
  Sense strand starting at position 3440 of SEQ ID NO: 1245108
uauugaguguggguauagu

SEQ ID NO: 1536987 - RNA, 19 nt, Artificial Sequence
  Description of Artificial Sequence: Synthetic oligonucleotide
  Antisense strand to SEQ ID NO: 1536986
acuauacccacacucaaua

SEQ ID NO: 1536988 - RNA, 19 nt, Artificial Sequence
  Description of Artificial Sequence: Synthetic oligonucleotide
  Sense strand starting at position 3459 of SEQ ID NO: 1245108
guccauuguggcgucauua

SEQ ID NO: 1536989 - RNA, 19 nt, Artificial Sequence
  Description of Artificial Sequence: Synthetic oligonucleotide
  Antisense strand to SEQ ID NO: 1536988
uaaugacgccacaauggac

SEQ ID NO: 1536990 - RNA, 19 nt, Artificial Sequence
  Description of Artificial Sequence: Synthetic oligonucleotide
  Sense strand starting at position 3518 of SEQ ID NO: 1245108
gcaguuuaaagaggugaac

SEQ ID NO: 1536991 - RNA, 19 nt, Artificial Sequence
  Description of Artificial Sequence: Synthetic oligonucleotide
  Antisense strand to SEQ ID NO: 1536990
guucaccucuuuaaacugc

SEQ ID NO: 1536992 - RNA, 19 nt, Artificial Sequence
  Description of Artificial Sequence: Synthetic oligonucleotide
  Sense strand starting at position 3562 of SEQ ID NO: 1245108
auugucgccucauuugaau

SEQ ID NO: 1536993 - RNA, 19 nt, Artificial Sequence
  Description of Artificial Sequence: Synthetic oligonucleotide
  Antisense strand to SEQ ID NO: 1536992
auucaaaugaggcgacaau

SEQ ID NO: 1536994 - RNA, 19 nt, Artificial Sequence
  Description of Artificial Sequence: Synthetic oligonucleotide
  Sense strand starting at position 3568 of SEQ ID NO: 1245108
gccucauuugaaugucucu

SEQ ID NO: 1536995 - RNA, 19 nt, Artificial Sequence
  Description of Artificial Sequence: Synthetic oligonucleotide
  Antisense strand to SEQ ID NO: 1536994
agagacauucaaaugaggc

SEQ ID NO: 1536996 - RNA, 19 nt, Artificial Sequence
  Description of Artificial Sequence: Synthetic oligonucleotide
  Sense strand starting at position 3583 of SEQ ID NO: 1245108
cucucucggccugauaauu

SEQ ID NO: 1536997 - RNA, 19 nt, Artificial Sequence
  Description of Artificial Sequence: Synthetic oligonucleotide
  Antisense strand to SEQ ID NO: 1536996
aauuaucaggccgagagag

SEQ ID NO: 1536998 - RNA, 19 nt, Artificial Sequence
  Description of Artificial Sequence: Synthetic oligonucleotide
  Sense strand starting at position 3608 of SEQ ID NO: 1245108
acucgcguuccucagauaa

SEQ ID NO: 1536999 - RNA, 19 nt, Artificial Sequence
  Description of Artificial Sequence: Synthetic oligonucleotide
  Antisense strand to SEQ ID NO: 1536998
uuaucugaggaacgcgagu

SEQ ID NO: 1537000 - RNA, 19 nt, Artificial Sequence
  Description of Artificial Sequence: Synthetic oligonucleotide
  Sense strand starting at position 3646 of SEQ ID NO: 1245108
ccauuuaaaugugguaauu

SEQ ID NO: 1537001 - RNA, 19 nt, Artificial Sequence
  Description of Artificial Sequence: Synthetic oligonucleotide
  Antisense strand to SEQ ID NO: 1537000
aauuaccacauuuaaaugg

SEQ ID NO: 1537002 - RNA, 19 nt, Artificial Sequence
  Description of Artificial Sequence: Synthetic oligonucleotide
  Sense strand starting at position 3712 of SEQ ID NO: 1245108
ugcucuuaggagugcauuu

SEQ ID NO: 1537003 - RNA, 19 nt, Artificial Sequence
  Description of Artificial Sequence: Synthetic oligonucleotide
  Antisense strand to SEQ ID NO: 1537002
aaaugcacuccuaagagca

SEQ ID NO: 1537004 - RNA, 19 nt, Artificial Sequence
  Description of Artificial Sequence: Synthetic oligonucleotide
  Sense strand starting at position 894 of SEQ ID NO: 1245109
accacaaccguugggaaua

SEQ ID NO: 1537005 - RNA, 19 nt, Artificial Sequence
  Description of Artificial Sequence: Synthetic oligonucleotide
  Antisense strand to SEQ ID NO: 1537004
uauucccaacgguuguggu

SEQ ID NO: 1537006 - RNA, 19 nt, Artificial Sequence
  Description of Artificial Sequence: Synthetic oligonucleotide
  Sense strand starting at position 1698 of SEQ ID NO: 1245109
gcaagcugagaugacuaua

SEQ ID NO: 1537007 - RNA, 19 nt, Artificial Sequence
  Description of Artificial Sequence: Synthetic oligonucleotide
  Antisense strand to SEQ ID NO: 1537006
uauagucaucucagcuugc

SEQ ID NO: 1537008 - RNA, 19 nt, Artificial Sequence
  Description of Artificial Sequence: Synthetic oligonucleotide
  Sense strand starting at position 2332 of SEQ ID NO: 1245109
uccgaaaggcuuuaaggau

SEQ ID NO: 1537009 - RNA, 19 nt, Artificial Sequence
  Description of Artificial Sequence: Synthetic oligonucleotide
  Antisense strand to SEQ ID NO: 1537008
auccuuaaagccuuucgga

SEQ ID NO: 1537010 - RNA, 19 nt, Artificial Sequence
  Description of Artificial Sequence: Synthetic oligonucleotide
  Sense strand starting at position 2369 of SEQ ID NO: 1245109
agugcaaagucugugcuaa

SEQ ID NO: 1537011 - RNA, 19 nt, Artificial Sequence
  Description of Artificial Sequence: Synthetic oligonucleotide
  Antisense strand to SEQ ID NO: 1537010
uuagcacagacuuugcacu

SEQ ID NO: 1537012 - RNA, 19 nt, Artificial Sequence
  Description of Artificial Sequence: Synthetic oligonucleotide
  Sense strand starting at position 2371 of SEQ ID NO: 1245109
ugcaaagucugugcuaaug

SEQ ID NO: 1537013 - RNA, 19 nt, Artificial Sequence
  Description of Artificial Sequence: Synthetic oligonucleotide
  Antisense strand to SEQ ID NO: 1537012
cauuagcacagacuuugca

SEQ ID NO: 1537014 - RNA, 19 nt, Artificial Sequence
  Description of Artificial Sequence: Synthetic oligonucleotide
  Sense strand starting at position 2377 of SEQ ID NO: 1245109
gucugugcuaauggcagau

SEQ ID NO: 1537015 - RNA, 19 nt, Artificial Sequence
  Description of Artificial Sequence: Synthetic oligonucleotide
  Antisense strand to SEQ ID NO: 1537014
aucugccauuagcacagac

SEQ ID NO: 1537016 - RNA, 19 nt, Artificial Sequence
  Description of Artificial Sequence: Synthetic oligonucleotide
  Sense strand starting at position 2381 of SEQ ID NO: 1245109
gugcuaauggcagaugaaa

SEQ ID NO: 1537017 - RNA, 19 nt, Artificial Sequence
  Description of Artificial Sequence: Synthetic oligonucleotide
  Antisense strand to SEQ ID NO: 1537016
uuucaucugccauuagcac

SEQ ID NO: 1537018 - RNA, 19 nt, Artificial Sequence
  Description of Artificial Sequence: Synthetic oligonucleotide
  Sense strand starting at position 2425 of SEQ ID NO: 1245109
gcccaaguggcgugauuaa

SEQ ID NO: 1537019 - RNA, 19 nt, Artificial Sequence
  Description of Artificial Sequence: Synthetic oligonucleotide
  Antisense strand to SEQ ID NO: 1537018
uuaaucacgccacuugggc

SEQ ID NO: 1537020 - RNA, 19 nt, Artificial Sequence
  Description of Artificial Sequence: Synthetic oligonucleotide
  Sense strand starting at position 2434 of SEQ ID NO: 1245109
gcgugauuaaugcugcacu

SEQ ID NO: 1537021 - RNA, 19 nt, Artificial Sequence
  Description of Artificial Sequence: Synthetic oligonucleotide
  Antisense strand to SEQ ID NO: 1537020
agugcagcauuaaucacgc

SEQ ID NO: 1537022 - RNA, 19 nt, Artificial Sequence
  Description of Artificial Sequence: Synthetic oligonucleotide
  Sense strand starting at position 2437 of SEQ ID NO: 1245109
ugauuaaugcugcacuaaa

SEQ ID NO: 1537023 - RNA, 19 nt, Artificial Sequence
  Description of Artificial Sequence: Synthetic oligonucleotide
  Antisense strand to SEQ ID NO: 1537022
uuuagugcagcauuaauca

SEQ ID NO: 1537024 - RNA, 19 nt, Artificial Sequence
  Description of Artificial Sequence: Synthetic oligonucleotide
  Sense strand starting at position 2459 of SEQ ID NO: 1245109
caccgucgguuauugagau

SEQ ID NO: 1537025 - RNA, 19 nt, Artificial Sequence
  Description of Artificial Sequence: Synthetic oligonucleotide
  Antisense strand to SEQ ID NO: 1537024
aucucaauaaccgacggug

SEQ ID NO: 1537026 - RNA, 19 nt, Artificial Sequence
  Description of Artificial Sequence: Synthetic oligonucleotide
  Sense strand starting at position 2465 of SEQ ID NO: 1245109
cgguuauugagaugcauau

SEQ ID NO: 1537027 - RNA, 19 nt, Artificial Sequence
  Description of Artificial Sequence: Synthetic oligonucleotide
  Antisense strand to SEQ ID NO: 1537026
auaugcaucucaauaaccg

SEQ ID NO: 1537028 - RNA, 19 nt, Artificial Sequence
  Description of Artificial Sequence: Synthetic oligonucleotide
  Sense strand starting at position 2467 of SEQ ID NO: 1245109
guuauugagaugcauaugu

SEQ ID NO: 1537029 - RNA, 19 nt, Artificial Sequence
  Description of Artificial Sequence: Synthetic oligonucleotide
  Antisense strand to SEQ ID NO: 1537028
acauaugcaucucaauaac

SEQ ID NO: 1537030 - RNA, 19 nt, Artificial Sequence
  Description of Artificial Sequence: Synthetic oligonucleotide
  Sense strand starting at position 2469 of SEQ ID NO: 1245109
uauugagaugcauauguua

SEQ ID NO: 1537031 - RNA, 19 nt, Artificial Sequence
  Description of Artificial Sequence: Synthetic oligonucleotide
  Antisense strand to SEQ ID NO: 1537030
uaacauaugcaucucaaua

SEQ ID NO: 1537032 - RNA, 19 nt, Artificial Sequence
  Description of Artificial Sequence: Synthetic oligonucleotide
  Sense strand starting at position 2472 of SEQ ID NO: 1245109
ugagaugcauauguuauaa

SEQ ID NO: 1537033 - RNA, 19 nt, Artificial Sequence
  Description of Artificial Sequence: Synthetic oligonucleotide
  Antisense strand to SEQ ID NO: 1537032
uuauaacauaugcaucuca

SEQ ID NO: 1537034 - RNA, 19 nt, Artificial Sequence
  Description of Artificial Sequence: Synthetic oligonucleotide
  Sense strand starting at position 2522 of SEQ ID NO: 1245109
ggcuguuguaauuagauac

SEQ ID NO: 1537035 - RNA, 19 nt, Artificial Sequence
  Description of Artificial Sequence: Synthetic oligonucleotide
  Antisense strand to SEQ ID NO: 1537034
guaucuaauuacaacagcc

SEQ ID NO: 1537036 - RNA, 19 nt, Artificial Sequence
  Description of Artificial Sequence: Synthetic oligonucleotide
  Sense strand starting at position 2526 of SEQ ID NO: 1245109
guuguaauuagauacgcac

SEQ ID NO: 1537037 - RNA, 19 nt, Artificial Sequence
  Description of Artificial Sequence: Synthetic oligonucleotide
  Antisense strand to SEQ ID NO: 1537036
gugcguaucuaauuacaac

SEQ ID NO: 1537038 - RNA, 19 nt, Artificial Sequence
  Description of Artificial Sequence: Synthetic oligonucleotide
  Sense strand starting at position 2529 of SEQ ID NO: 1245109
guaauuagauacgcacuuu

SEQ ID NO: 1537039 - RNA, 19 nt, Artificial Sequence
  Description of Artificial Sequence: Synthetic oligonucleotide
  Antisense strand to SEQ ID NO: 1537038
aaagugcguaucuaauuac

SEQ ID NO: 1537040 - RNA, 19 nt, Artificial Sequence
  Description of Artificial Sequence: Synthetic oligonucleotide
  Sense strand starting at position 2599 of SEQ ID NO: 1245109
gggagaauucaacguagug

SEQ ID NO: 1537041 - RNA, 19 nt, Artificial Sequence
  Description of Artificial Sequence: Synthetic oligonucleotide
  Antisense strand to SEQ ID NO: 1537040
cacuacguugaauucuccc

SEQ ID NO: 1537042 - RNA, 19 nt, Artificial Sequence
  Description of Artificial Sequence: Synthetic oligonucleotide
  Sense strand starting at position 2611 of SEQ ID NO: 1245109
cguaguggauaauucagua

SEQ ID NO: 1537043 - RNA, 19 nt, Artificial Sequence
  Description of Artificial Sequence: Synthetic oligonucleotide
  Antisense strand to SEQ ID NO: 1537042
uacugaauuauccacuacg

SEQ ID NO: 1537044 - RNA, 19 nt, Artificial Sequence
  Description of Artificial Sequence: Synthetic oligonucleotide
  Sense strand starting at position 2750 of SEQ ID NO: 1245109
agaggaacugugugaugca

SEQ ID NO: 1537045 - RNA, 19 nt, Artificial Sequence
  Description of Artificial Sequence: Synthetic oligonucleotide
  Antisense strand to SEQ ID NO: 1537044
ugcaucacacaguuccucu

SEQ ID NO: 1537046 - RNA, 19 nt, Artificial Sequence
  Description of Artificial Sequence: Synthetic oligonucleotide
  Sense strand starting at position 2843 of SEQ ID NO: 1245109
ugugucuaggaaugccaaa

SEQ ID NO: 1537047 - RNA, 19 nt, Artificial Sequence
  Description of Artificial Sequence: Synthetic oligonucleotide
  Antisense strand to SEQ ID NO: 1537046
uuuggcauuccuagacaca

SEQ ID NO: 1537048 - RNA, 19 nt, Artificial Sequence
  Description of Artificial Sequence: Synthetic oligonucleotide
  Sense strand starting at position 2891 of SEQ ID NO: 1245109
aggagcucaguccaguauu

SEQ ID NO: 1537049 - RNA, 19 nt, Artificial Sequence
  Description of Artificial Sequence: Synthetic oligonucleotide
  Antisense strand to SEQ ID NO: 1537048
aauacuggacugagcuccu

SEQ ID NO: 1537050 - RNA, 19 nt, Artificial Sequence
  Description of Artificial Sequence: Synthetic oligonucleotide
  Sense strand starting at position 2913 of SEQ ID NO: 1245109
gacuacagucaaugaaagu

SEQ ID NO: 1537051 - RNA, 19 nt, Artificial Sequence
  Description of Artificial Sequence: Synthetic oligonucleotide
  Antisense strand to SEQ ID NO: 1537050
acuuucauugacuguaguc

SEQ ID NO: 1537052 - RNA, 19 nt, Artificial Sequence
  Description of Artificial Sequence: Synthetic oligonucleotide
  Sense strand starting at position 2940 of SEQ ID NO: 1245109
agggauaagucagcgcuua

SEQ ID NO: 1537053 - RNA, 19 nt, Artificial Sequence
  Description of Artificial Sequence: Synthetic oligonucleotide
  Antisense strand to SEQ ID NO: 1537052
uaagcgcugacuuaucccu

SEQ ID NO: 1537054 - RNA, 19 nt, Artificial Sequence
  Description of Artificial Sequence: Synthetic oligonucleotide
  Sense strand starting at position 2941 of SEQ ID NO: 1245109
gggauaagucagcgcuuaa

SEQ ID NO: 1537055 - RNA, 19 nt, Artificial Sequence
  Description of Artificial Sequence: Synthetic oligonucleotide
  Antisense strand to SEQ ID NO: 1537054
uuaagcgcugacuuauccc

SEQ ID NO: 1537056 - RNA, 19 nt, Artificial Sequence
  Description of Artificial Sequence: Synthetic oligonucleotide
  Sense strand starting at position 2945 of SEQ ID NO: 1245109
uaagucagcgcuuaacaca

SEQ ID NO: 1537057 - RNA, 19 nt, Artificial Sequence
  Description of Artificial Sequence: Synthetic oligonucleotide
  Antisense strand to SEQ ID NO: 1537056
uguguuaagcgcugacuua

SEQ ID NO: 1537058 - RNA, 19 nt, Artificial Sequence
  Description of Artificial Sequence: Synthetic oligonucleotide
  Sense strand starting at position 2960 of SEQ ID NO: 1245109
cacaaagugcugugaaauu

SEQ ID NO: 1537059 - RNA, 19 nt, Artificial Sequence
  Description of Artificial Sequence: Synthetic oligonucleotide
  Antisense strand to SEQ ID NO: 1537058
aauuucacagcacuuugug

SEQ ID NO: 1537060 - RNA, 19 nt, Artificial Sequence
  Description of Artificial Sequence: Synthetic oligonucleotide
  Sense strand starting at position 3059 of SEQ ID NO: 1245109
ggaagugauacuugagcaa

SEQ ID NO: 1537061 - RNA, 19 nt, Artificial Sequence
  Description of Artificial Sequence: Synthetic oligonucleotide
  Antisense strand to SEQ ID NO: 1537060
uugcucaaguaucacuucc

SEQ ID NO: 1537062 - RNA, 19 nt, Artificial Sequence
  Description of Artificial Sequence: Synthetic oligonucleotide
  Sense strand starting at position 3062 of SEQ ID NO: 1245109
agugauacuugagcaaaga

SEQ ID NO: 1537063 - RNA, 19 nt, Artificial Sequence
  Description of Artificial Sequence: Synthetic oligonucleotide
  Antisense strand to SEQ ID NO: 1537062
ucuuugcucaaguaucacu

SEQ ID NO: 1537064 - RNA, 19 nt, Artificial Sequence
  Description of Artificial Sequence: Synthetic oligonucleotide
  Sense strand starting at position 3505 of SEQ ID NO: 1245109
gcuaauucgaaagguccca

SEQ ID NO: 1537065 - RNA, 19 nt, Artificial Sequence
  Description of Artificial Sequence: Synthetic oligonucleotide
  Antisense strand to SEQ ID NO: 1537064
ugggaccuuucgaauuagc

SEQ ID NO: 1537066 - RNA, 19 nt, Artificial Sequence
  Description of Artificial Sequence: Synthetic oligonucleotide
  Sense strand starting at position 3735 of SEQ ID NO: 1245109
ucauuugauucuuguacca

SEQ ID NO: 1537067 - RNA, 19 nt, Artificial Sequence
  Description of Artificial Sequence: Synthetic oligonucleotide
  Antisense strand to SEQ ID NO: 1537066
ugguacaagaaucaaauga

SEQ ID NO: 1537068 - RNA, 19 nt, Artificial Sequence
  Description of Artificial Sequence: Synthetic oligonucleotide
  Sense strand starting at position 3800 of SEQ ID NO: 1245109
ggcccagagaguuaagcaa

SEQ ID NO: 1537069 - RNA, 19 nt, Artificial Sequence
  Description of Artificial Sequence: Synthetic oligonucleotide
  Antisense strand to SEQ ID NO: 1537068
uugcuuaacucucugggcc

SEQ ID NO: 1537070 - RNA, 19 nt, Artificial Sequence
  Description of Artificial Sequence: Synthetic oligonucleotide
  Sense strand starting at position 3828 of SEQ ID NO: 1245109
agccaugauucgguacaga

SEQ ID NO: 1537071 - RNA, 19 nt, Artificial Sequence
  Description of Artificial Sequence: Synthetic oligonucleotide
  Antisense strand to SEQ ID NO: 1537070
ucuguaccgaaucauggcu

SEQ ID NO: 1537072 - RNA, 19 nt, Artificial Sequence
  Description of Artificial Sequence: Synthetic oligonucleotide
  Sense strand starting at position 3958 of SEQ ID NO: 1245109
gccucauuggcucagcagu

SEQ ID NO: 1537073 - RNA, 19 nt, Artificial Sequence
  Description of Artificial Sequence: Synthetic oligonucleotide
  Antisense strand to SEQ ID NO: 1537072
acugcugagccaaugaggc

SEQ ID NO: 1537074 - RNA, 19 nt, Artificial Sequence
  Description of Artificial Sequence: Synthetic oligonucleotide
  Sense strand starting at position 3964 of SEQ ID NO: 1245109
uuggcucagcagugaguua

SEQ ID NO: 1537075 - RNA, 19 nt, Artificial Sequence
  Description of Artificial Sequence: Synthetic oligonucleotide
  Antisense strand to SEQ ID NO: 1537074
uaacucacugcugagccaa

SEQ ID NO: 1537076 - RNA, 19 nt, Artificial Sequence
  Description of Artificial Sequence: Synthetic oligonucleotide
  Sense strand starting at position 3965 of SEQ ID NO: 1245109
uggcucagcagugaguuau

SEQ ID NO: 1537077 - RNA, 19 nt, Artificial Sequence
  Description of Artificial Sequence: Synthetic oligonucleotide
  Antisense strand to SEQ ID NO: 1537076
auaacucacugcugagcca

SEQ ID NO: 1537078 - RNA, 19 nt, Artificial Sequence
  Description of Artificial Sequence: Synthetic oligonucleotide
  Sense strand starting at position 3969 of SEQ ID NO: 1245109
ucagcagugaguuauuugu

SEQ ID NO: 1537079 - RNA, 19 nt, Artificial Sequence
  Description of Artificial Sequence: Synthetic oligonucleotide
  Antisense strand to SEQ ID NO: 1537078
acaaauaacucacugcuga

SEQ ID NO: 1537080 - RNA, 19 nt, Artificial Sequence
  Description of Artificial Sequence: Synthetic oligonucleotide
  Sense strand starting at position 3971 of SEQ ID NO: 1245109
agcagugaguuauuuguau

SEQ ID NO: 1537081 - RNA, 19 nt, Artificial Sequence
  Description of Artificial Sequence: Synthetic oligonucleotide
  Antisense strand to SEQ ID NO: 1537080
auacaaauaacucacugcu

SEQ ID NO: 1537082 - RNA, 19 nt, Artificial Sequence
  Description of Artificial Sequence: Synthetic oligonucleotide
  Sense strand starting at position 3977 of SEQ ID NO: 1245109
gaguuauuuguaugcuuua

SEQ ID NO: 1537083 - RNA, 19 nt, Artificial Sequence
  Description of Artificial Sequence: Synthetic oligonucleotide
  Antisense strand to SEQ ID NO: 1537082
uaaagcauacaaauaacuc

SEQ ID NO: 1537084 - RNA, 19 nt, Artificial Sequence
  Description of Artificial Sequence: Synthetic oligonucleotide
  Sense strand starting at position 259 of SEQ ID NO: 1245110
ucuucucagugauccggau

SEQ ID NO: 1537085 - RNA, 19 nt, Artificial Sequence
  Description of Artificial Sequence: Synthetic oligonucleotide
  Antisense strand to SEQ ID NO: 1537084
auccggaucacugagaaga

SEQ ID NO: 1537086 - RNA, 19 nt, Artificial Sequence
  Description of Artificial Sequence: Synthetic oligonucleotide
  Sense strand starting at position 1028 of SEQ ID NO: 1245110
caugguuucccacggaacu

SEQ ID NO: 1537087 - RNA, 19 nt, Artificial Sequence
  Description of Artificial Sequence: Synthetic oligonucleotide
  Antisense strand to SEQ ID NO: 1537086
aguuccgugggaaaccaug

SEQ ID NO: 1537088 - RNA, 19 nt, Artificial Sequence
  Description of Artificial Sequence: Synthetic oligonucleotide
  Sense strand starting at position 1091 of SEQ ID NO: 1245110
cguggcucaccauagaacu

SEQ ID NO: 1537089 - RNA, 19 nt, Artificial Sequence
  Description of Artificial Sequence: Synthetic oligonucleotide
  Antisense strand to SEQ ID NO: 1537088
aguucuauggugagccacg

SEQ ID NO: 1537090 - RNA, 19 nt, Artificial Sequence
  Description of Artificial Sequence: Synthetic oligonucleotide
  Sense strand starting at position 1163 of SEQ ID NO: 1245110
ccgguuauggcucaccaca

SEQ ID NO: 1537091 - RNA, 19 nt, Artificial Sequence
  Description of Artificial Sequence: Synthetic oligonucleotide
  Antisense strand to SEQ ID NO: 1537090
uguggugagccauaaccgg

SEQ ID NO: 1537092 - RNA, 19 nt, Artificial Sequence
  Description of Artificial Sequence: Synthetic oligonucleotide
  Sense strand starting at position 1165 of SEQ ID NO: 1245110
gguuauggcucaccacaga

SEQ ID NO: 1537093 - RNA, 19 nt, Artificial Sequence
  Description of Artificial Sequence: Synthetic oligonucleotide
  Antisense strand to SEQ ID NO: 1537092
ucuguggugagccauaacc

SEQ ID NO: 1537094 - RNA, 19 nt, Artificial Sequence
  Description of Artificial Sequence: Synthetic oligonucleotide
  Sense strand starting at position 1496 of SEQ ID NO: 1245110
uugcuuaucguauccguau

SEQ ID NO: 1537095 - RNA, 19 nt, Artificial Sequence
  Description of Artificial Sequence: Synthetic oligonucleotide
  Antisense strand to SEQ ID NO: 1537094
auacggauacgauaagcaa

SEQ ID NO: 1537096 - RNA, 19 nt, Artificial Sequence
  Description of Artificial Sequence: Synthetic oligonucleotide
  Sense strand starting at position 1525 of SEQ ID NO: 1245110
uccauauguucgccgggaa

SEQ ID NO: 1537097 - RNA, 19 nt, Artificial Sequence
  Description of Artificial Sequence: Synthetic oligonucleotide
  Antisense strand to SEQ ID NO: 1537096
uucccggcgaacauaugga

SEQ ID NO: 1537098 - RNA, 19 nt, Artificial Sequence
  Description of Artificial Sequence: Synthetic oligonucleotide
  Sense strand starting at position 1526 of SEQ ID NO: 1245110
ccauauguucgccgggaac

SEQ ID NO: 1537099 - RNA, 19 nt, Artificial Sequence
  Description of Artificial Sequence: Synthetic oligonucleotide
  Antisense strand to SEQ ID NO: 1537098
guucccggcgaacauaugg

SEQ ID NO: 1537100 - RNA, 19 nt, Artificial Sequence
  Description of Artificial Sequence: Synthetic oligonucleotide
  Sense strand starting at position 1528 of SEQ ID NO: 1245110
auauguucgccgggaacau

SEQ ID NO: 1537101 - RNA, 19 nt, Artificial Sequence
  Description of Artificial Sequence: Synthetic oligonucleotide
  Antisense strand to SEQ ID NO: 1537100
auguucccggcgaacauau

SEQ ID NO: 1537102 - RNA, 19 nt, Artificial Sequence
  Description of Artificial Sequence: Synthetic oligonucleotide
  Sense strand starting at position 1581 of SEQ ID NO: 1245110
gccaccuugucaguagagu

SEQ ID NO: 1537103 - RNA, 19 nt, Artificial Sequence
  Description of Artificial Sequence: Synthetic oligonucleotide
  Antisense strand to SEQ ID NO: 1537102
acucuacugacaagguggc

SEQ ID NO: 1537104 - RNA, 19 nt, Artificial Sequence
  Description of Artificial Sequence: Synthetic oligonucleotide
  Sense strand starting at position 1656 of SEQ ID NO: 1245110
gcgugacuuccucauagau

SEQ ID NO: 1537105 - RNA, 19 nt, Artificial Sequence
  Description of Artificial Sequence: Synthetic oligonucleotide
  Antisense strand to SEQ ID NO: 1537104
aucuaugaggaagucacgc

SEQ ID NO: 1537106 - RNA, 19 nt, Artificial Sequence
  Description of Artificial Sequence: Synthetic oligonucleotide
  Sense strand starting at position 1696 of SEQ ID NO: 1245110
uccguacgugggucgaauu

SEQ ID NO: 1537107 - RNA, 19 nt, Artificial Sequence
  Description of Artificial Sequence: Synthetic oligonucleotide
  Antisense strand to SEQ ID NO: 1537106
aauucgacccacguacgga

SEQ ID NO: 1537108 - RNA, 19 nt, Artificial Sequence
  Description of Artificial Sequence: Synthetic oligonucleotide
  Sense strand starting at position 1721 of SEQ ID NO: 1245110
guuccuaggcgacauauga

SEQ ID NO: 1537109 - RNA, 19 nt, Artificial Sequence
  Description of Artificial Sequence: Synthetic oligonucleotide
  Antisense strand to SEQ ID NO: 1537108
ucauaugucgccuaggaac

SEQ ID NO: 1537110 - RNA, 19 nt, Artificial Sequence
  Description of Artificial Sequence: Synthetic oligonucleotide
  Sense strand starting at position 1731 of SEQ ID NO: 1245110
gacauaugacggcgaccua

SEQ ID NO: 1537111 - RNA, 19 nt, Artificial Sequence
  Description of Artificial Sequence: Synthetic oligonucleotide
  Antisense strand to SEQ ID NO: 1537110
uaggucgccgucauauguc

SEQ ID NO: 1537112 - RNA, 19 nt, Artificial Sequence
  Description of Artificial Sequence: Synthetic oligonucleotide
  Sense strand starting at position 1744 of SEQ ID NO: 1245110
gaccuaauugcggauucuu

SEQ ID NO: 1537113 - RNA, 19 nt, Artificial Sequence
  Description of Artificial Sequence: Synthetic oligonucleotide
  Antisense strand to SEQ ID NO: 1537112
aagaauccgcaauuagguc

SEQ ID NO: 1537114 - RNA, 19 nt, Artificial Sequence
  Description of Artificial Sequence: Synthetic oligonucleotide
  Sense strand starting at position 1782 of SEQ ID NO: 1245110
gugguugauuccguacauu

SEQ ID NO: 1537115 - RNA, 19 nt, Artificial Sequence
  Description of Artificial Sequence: Synthetic oligonucleotide
  Antisense strand to SEQ ID NO: 1537114
aauguacggaaucaaccac

SEQ ID NO: 1537116 - RNA, 19 nt, Artificial Sequence
  Description of Artificial Sequence: Synthetic oligonucleotide
  Sense strand starting at position 1794 of SEQ ID NO: 1245110
guacauugcccguuuguca

SEQ ID NO: 1537117 - RNA, 19 nt, Artificial Sequence
  Description of Artificial Sequence: Synthetic oligonucleotide
  Antisense strand to SEQ ID NO: 1537116
ugacaaacgggcaauguac

SEQ ID NO: 1537118 - RNA, 19 nt, Artificial Sequence
  Description of Artificial Sequence: Synthetic oligonucleotide
  Sense strand starting at position 1803 of SEQ ID NO: 1245110
ccguuugucaggcagagag

SEQ ID NO: 1537119 - RNA, 19 nt, Artificial Sequence
  Description of Artificial Sequence: Synthetic oligonucleotide
  Antisense strand to SEQ ID NO: 1537118
cucucugccugacaaacgg

SEQ ID NO: 1537120 - RNA, 19 nt, Artificial Sequence
  Description of Artificial Sequence: Synthetic oligonucleotide
  Sense strand starting at position 2237 of SEQ ID NO: 1245110
ucuguaugcucaucccuga

SEQ ID NO: 1537121 - RNA, 19 nt, Artificial Sequence
  Description of Artificial Sequence: Synthetic oligonucleotide
  Antisense strand to SEQ ID NO: 1537120
ucagggaugagcauacaga

SEQ ID NO: 1537122 - RNA, 19 nt, Artificial Sequence
  Description of Artificial Sequence: Synthetic oligonucleotide
  Sense strand starting at position 2240 of SEQ ID NO: 1245110
guaugcucaucccugauua

SEQ ID NO: 1537123 - RNA, 19 nt, Artificial Sequence
  Description of Artificial Sequence: Synthetic oligonucleotide
  Antisense strand to SEQ ID NO: 1537122
uaaucagggaugagcauac

SEQ ID NO: 1537124 - RNA, 19 nt, Artificial Sequence
  Description of Artificial Sequence: Synthetic oligonucleotide
  Sense strand starting at position 2254 of SEQ ID NO: 1245110
gauuauuucuugugaaaug

SEQ ID NO: 1537125 - RNA, 19 nt, Artificial Sequence
  Description of Artificial Sequence: Synthetic oligonucleotide
  Antisense strand to SEQ ID NO: 1537124
cauuucacaagaaauaauc

SEQ ID NO: 1537126 - RNA, 19 nt, Artificial Sequence
  Description of Artificial Sequence: Synthetic oligonucleotide
  Sense strand starting at position 2300 of SEQ ID NO: 1245110
ugugauauaccagguguaa

SEQ ID NO: 1537127 - RNA, 19 nt, Artificial Sequence
  Description of Artificial Sequence: Synthetic oligonucleotide
  Antisense strand to SEQ ID NO: 1537126
uuacaccugguauaucaca

SEQ ID NO: 1537128 - RNA, 19 nt, Artificial Sequence
  Description of Artificial Sequence: Synthetic oligonucleotide
  Sense strand starting at position 2313 of SEQ ID NO: 1245110
guguaacucugguuaacag

SEQ ID NO: 1537129 - RNA, 19 nt, Artificial Sequence
  Description of Artificial Sequence: Synthetic oligonucleotide
  Antisense strand to SEQ ID NO: 1537128
cuguuaaccagaguuacac

SEQ ID NO: 1537130 - RNA, 19 nt, Artificial Sequence
  Description of Artificial Sequence: Synthetic oligonucleotide
  Sense strand starting at position 2321 of SEQ ID NO: 1245110
cugguuaacagcuguaaga

SEQ ID NO: 1537131 - RNA, 19 nt, Artificial Sequence
  Description of Artificial Sequence: Synthetic oligonucleotide
  Antisense strand to SEQ ID NO: 1537130
ucuuacagcuguuaaccag

SEQ ID NO: 1537132 - RNA, 19 nt, Artificial Sequence
  Description of Artificial Sequence: Synthetic oligonucleotide
  Sense strand starting at position 2323 of SEQ ID NO: 1245110
gguuaacagcuguaagaug

SEQ ID NO: 1537133 - RNA, 19 nt, Artificial Sequence
  Description of Artificial Sequence: Synthetic oligonucleotide
  Antisense strand to SEQ ID NO: 1537132
caucuuacagcuguuaacc

SEQ ID NO: 1537134 - RNA, 19 nt, Artificial Sequence
  Description of Artificial Sequence: Synthetic oligonucleotide
  Sense strand starting at position 3028 of SEQ ID NO: 1245110
ccuuccuaucuuuggagua

SEQ ID NO: 1537135 - RNA, 19 nt, Artificial Sequence
  Description of Artificial Sequence: Synthetic oligonucleotide
  Antisense strand to SEQ ID NO: 1537134
uacuccaaagauaggaagg

SEQ ID NO: 1537136 - RNA, 19 nt, Artificial Sequence
  Description of Artificial Sequence: Synthetic oligonucleotide
  Sense strand starting at position 3033 of SEQ ID NO: 1245110
cuaucuuuggaguacaauu

SEQ ID NO: 1537137 - RNA, 19 nt, Artificial Sequence
  Description of Artificial Sequence: Synthetic oligonucleotide
  Antisense strand to SEQ ID NO: 1537136
aauuguacuccaaagauag

SEQ ID NO: 1537138 - RNA, 19 nt, Artificial Sequence
  Description of Artificial Sequence: Synthetic oligonucleotide
  Sense strand starting at position 3047 of SEQ ID NO: 1245110
caauuugacuucgagcuga

SEQ ID NO: 1537139 - RNA, 19 nt, Artificial Sequence
  Description of Artificial Sequence: Synthetic oligonucleotide
  Antisense strand to SEQ ID NO: 1537138
ucagcucgaagucaaauug

SEQ ID NO: 1537140 - RNA, 19 nt, Artificial Sequence
  Description of Artificial Sequence: Synthetic oligonucleotide
  Sense strand starting at position 3051 of SEQ ID NO: 1245110
uugacuucgagcugaaucu

SEQ ID NO: 1537141 - RNA, 19 nt, Artificial Sequence
  Description of Artificial Sequence: Synthetic oligonucleotide
  Antisense strand to SEQ ID NO: 1537140
agauucagcucgaagucaa

SEQ ID NO: 1537142 - RNA, 19 nt, Artificial Sequence
  Description of Artificial Sequence: Synthetic oligonucleotide
  Sense strand starting at position 3140 of SEQ ID NO: 1245110
uuaguugacucuccuuaga

SEQ ID NO: 1537143 - RNA, 19 nt, Artificial Sequence
  Description of Artificial Sequence: Synthetic oligonucleotide
  Antisense strand to SEQ ID NO: 1537142
ucuaaggagagucaacuaa

SEQ ID NO: 1537144 - RNA, 19 nt, Artificial Sequence
  Description of Artificial Sequence: Synthetic oligonucleotide
  Sense strand starting at position 3142 of SEQ ID NO: 1245110
aguugacucuccuuagaga

SEQ ID NO: 1537145 - RNA, 19 nt, Artificial Sequence
  Description of Artificial Sequence: Synthetic oligonucleotide
  Antisense strand to SEQ ID NO: 1537144
ucucuaaggagagucaacu

SEQ ID NO: 1537146 - RNA, 19 nt, Artificial Sequence
  Description of Artificial Sequence: Synthetic oligonucleotide
  Sense strand starting at position 3145 of SEQ ID NO: 1245110
ugacucuccuuagagauaa

SEQ ID NO: 1537147 - RNA, 19 nt, Artificial Sequence
  Description of Artificial Sequence: Synthetic oligonucleotide
  Antisense strand to SEQ ID NO: 1537146
uuaucucuaaggagaguca

SEQ ID NO: 1537148 - RNA, 19 nt, Artificial Sequence
  Description of Artificial Sequence: Synthetic oligonucleotide
  Sense strand starting at position 3217 of SEQ ID NO: 1245110
ucaaauuuauaggagguca

SEQ ID NO: 1537149 - RNA, 19 nt, Artificial Sequence
  Description of Artificial Sequence: Synthetic oligonucleotide
  Antisense strand to SEQ ID NO: 1537148
ugaccuccuauaaauuuga

SEQ ID NO: 1537150 - RNA, 19 nt, Artificial Sequence
  Description of Artificial Sequence: Synthetic oligonucleotide
  Sense strand starting at position 3222 of SEQ ID NO: 1245110
uuuauaggaggucauuagu

SEQ ID NO: 1537151 - RNA, 19 nt, Artificial Sequence
  Description of Artificial Sequence: Synthetic oligonucleotide
  Antisense strand to SEQ ID NO: 1537150
acuaaugaccuccuauaaa

SEQ ID NO: 1537152 - RNA, 19 nt, Artificial Sequence
  Description of Artificial Sequence: Synthetic oligonucleotide
  Sense strand starting at position 3513 of SEQ ID NO: 1245110
ucugcuauuucccaggaaa

SEQ ID NO: 1537153 - RNA, 19 nt, Artificial Sequence
  Description of Artificial Sequence: Synthetic oligonucleotide
  Antisense strand to SEQ ID NO: 1537152
uuuccugggaaauagcaga

SEQ ID NO: 1537154 - RNA, 19 nt, Artificial Sequence
  Description of Artificial Sequence: Synthetic oligonucleotide
  Sense strand starting at position 3663 of SEQ ID NO: 1245110
guaugaagguuccuauauc

SEQ ID NO: 1537155 - RNA, 19 nt, Artificial Sequence
  Description of Artificial Sequence: Synthetic oligonucleotide
  Antisense strand to SEQ ID NO: 1537154
gauauaggaaccuucauac

SEQ ID NO: 1537156 - RNA, 19 nt, Artificial Sequence
  Description of Artificial Sequence: Synthetic oligonucleotide
  Sense strand starting at position 3679 of SEQ ID NO: 1245110
aucagagccuuauuagguu

SEQ ID NO: 1537157 - RNA, 19 nt, Artificial Sequence
  Description of Artificial Sequence: Synthetic oligonucleotide
  Antisense strand to SEQ ID NO: 1537156
aaccuaauaaggcucugau

SEQ ID NO: 1537158 - RNA, 19 nt, Artificial Sequence
  Description of Artificial Sequence: Synthetic oligonucleotide
  Sense strand starting at position 3683 of SEQ ID NO: 1245110
gagccuuauuagguuauua

SEQ ID NO: 1537159 - RNA, 19 nt, Artificial Sequence
  Description of Artificial Sequence: Synthetic oligonucleotide
  Antisense strand to SEQ ID NO: 1537158
uaauaaccuaauaaggcuc

SEQ ID NO: 1537160 - RNA, 19 nt, Artificial Sequence
  Description of Artificial Sequence: Synthetic oligonucleotide
  Sense strand starting at position 3685 of SEQ ID NO: 1245110
gccuuauuagguuauuaga

SEQ ID NO: 1537161 - RNA, 19 nt, Artificial Sequence
  Description of Artificial Sequence: Synthetic oligonucleotide
  Antisense strand to SEQ ID NO: 1537160
ucuaauaaccuaauaaggc

SEQ ID NO: 1537162 - RNA, 19 nt, Artificial Sequence
  Description of Artificial Sequence: Synthetic oligonucleotide
  Sense strand starting at position 3698 of SEQ ID NO: 1245110
auuagauuagugcgaacuu

SEQ ID NO: 1537163 - RNA, 19 nt, Artificial Sequence
  Description of Artificial Sequence: Synthetic oligonucleotide
  Antisense strand to SEQ ID NO: 1537162
aaguucgcacuaaucuaau

SEQ ID NO: 1537164 - RNA, 19 nt, Artificial Sequence
  Description of Artificial Sequence: Synthetic oligonucleotide
  Sense strand starting at position 45 of SEQ ID NO: 1245111
uagaguuaaugagaauuga

SEQ ID NO: 1537165 - RNA, 19 nt, Artificial Sequence
  Description of Artificial Sequence: Synthetic oligonucleotide
  Antisense strand to SEQ ID NO: 1537164
ucaauucucauuaacucua

SEQ ID NO: 1537166 - RNA, 19 nt, Artificial Sequence
  Description of Artificial Sequence: Synthetic oligonucleotide
  Sense strand starting at position 49 of SEQ ID NO: 1245111
guuaaugagaauugauguu

SEQ ID NO: 1537167 - RNA, 19 nt, Artificial Sequence
  Description of Artificial Sequence: Synthetic oligonucleotide
  Antisense strand to SEQ ID NO: 1537166
aacaucaauucucauuaac

SEQ ID NO: 1537168 - RNA, 19 nt, Artificial Sequence
  Description of Artificial Sequence: Synthetic oligonucleotide
  Sense strand starting at position 55 of SEQ ID NO: 1245111
gagaauugauguuauauga

SEQ ID NO: 1537169 - RNA, 19 nt, Artificial Sequence
  Description of Artificial Sequence: Synthetic oligonucleotide
  Antisense strand to SEQ ID NO: 1537168
ucauauaacaucaauucuc

SEQ ID NO: 1537170 - RNA, 19 nt, Artificial Sequence
  Description of Artificial Sequence: Synthetic oligonucleotide
  Sense strand starting at position 62 of SEQ ID NO: 1245111
gauguuauaugacaagauc

SEQ ID NO: 1537171 - RNA, 19 nt, Artificial Sequence
  Description of Artificial Sequence: Synthetic oligonucleotide
  Antisense strand to SEQ ID NO: 1537170
gaucuugucauauaacauc

SEQ ID NO: 1537172 - RNA, 19 nt, Artificial Sequence
  Description of Artificial Sequence: Synthetic oligonucleotide
  Sense strand starting at position 173 of SEQ ID NO: 1245111
acugcuccagagugaaaua

SEQ ID NO: 1537173 - RNA, 19 nt, Artificial Sequence
  Description of Artificial Sequence: Synthetic oligonucleotide
  Antisense strand to SEQ ID NO: 1537172
uauuucacucuggagcagu

SEQ ID NO: 1537174 - RNA, 19 nt, Artificial Sequence
  Description of Artificial Sequence: Synthetic oligonucleotide
  Sense strand starting at position 590 of SEQ ID NO: 1245111
ugauauaaacugugaucca

SEQ ID NO: 1537175 - RNA, 19 nt, Artificial Sequence
  Description of Artificial Sequence: Synthetic oligonucleotide
  Antisense strand to SEQ ID NO: 1537174
uggaucacaguuuauauca

SEQ ID NO: 1537176 - RNA, 19 nt, Artificial Sequence
  Description of Artificial Sequence: Synthetic oligonucleotide
  Sense strand starting at position 591 of SEQ ID NO: 1245111
gauauaaacugugauccag

SEQ ID NO: 1537177 - RNA, 19 nt, Artificial Sequence
  Description of Artificial Sequence: Synthetic oligonucleotide
  Antisense strand to SEQ ID NO: 1537176
cuggaucacaguuuauauc

SEQ ID NO: 1537178 - RNA, 19 nt, Artificial Sequence
  Description of Artificial Sequence: Synthetic oligonucleotide
  Sense strand starting at position 693 of SEQ ID NO: 1245111
gggcgugagcaugcguuaa

SEQ ID NO: 1537179 - RNA, 19 nt, Artificial Sequence
  Description of Artificial Sequence: Synthetic oligonucleotide
  Antisense strand to SEQ ID NO: 1537178
uuaacgcaugcucacgccc

SEQ ID NO: 1537180 - RNA, 19 nt, Artificial Sequence
  Description of Artificial Sequence: Synthetic oligonucleotide
  Sense strand starting at position 695 of SEQ ID NO: 1245111
gcgugagcaugcguuaaga

SEQ ID NO: 1537181 - RNA, 19 nt, Artificial Sequence
  Description of Artificial Sequence: Synthetic oligonucleotide
  Antisense strand to SEQ ID NO: 1537180
ucuuaacgcaugcucacgc

SEQ ID NO: 1537182 - RNA, 19 nt, Artificial Sequence
  Description of Artificial Sequence: Synthetic oligonucleotide
  Sense strand starting at position 697 of SEQ ID NO: 1245111
gugagcaugcguuaagauu

SEQ ID NO: 1537183 - RNA, 19 nt, Artificial Sequence
  Description of Artificial Sequence: Synthetic oligonucleotide
  Antisense strand to SEQ ID NO: 1537182
aaucuuaacgcaugcucac

SEQ ID NO: 1537184 - RNA, 19 nt, Artificial Sequence
  Description of Artificial Sequence: Synthetic oligonucleotide
  Sense strand starting at position 706 of SEQ ID NO: 1245111
cguuaagauuuaugauuga

SEQ ID NO: 1537185 - RNA, 19 nt, Artificial Sequence
  Description of Artificial Sequence: Synthetic oligonucleotide
  Antisense strand to SEQ ID NO: 1537184
ucaaucauaaaucuuaacg

SEQ ID NO: 1537186 - RNA, 19 nt, Artificial Sequence
  Description of Artificial Sequence: Synthetic oligonucleotide
  Sense strand starting at position 888 of SEQ ID NO: 1245111
gggcgagucccacgcagaa

SEQ ID NO: 1537187 - RNA, 19 nt, Artificial Sequence
  Description of Artificial Sequence: Synthetic oligonucleotide
  Antisense strand to SEQ ID NO: 1537186
uucugcgugggacucgccc

SEQ ID NO: 1537188 - RNA, 19 nt, Artificial Sequence
  Description of Artificial Sequence: Synthetic oligonucleotide
  Sense strand starting at position 1021 of SEQ ID NO: 1245111
gagccucuuccaggugaac

SEQ ID NO: 1537189 - RNA, 19 nt, Artificial Sequence
  Description of Artificial Sequence: Synthetic oligonucleotide
  Antisense strand to SEQ ID NO: 1537188
guucaccuggaagaggcuc

SEQ ID NO: 1537190 - RNA, 19 nt, Artificial Sequence
  Description of Artificial Sequence: Synthetic oligonucleotide
  Sense strand starting at position 1808 of SEQ ID NO: 1245111
gaaucuccucuagggugua

SEQ ID NO: 1537191 - RNA, 19 nt, Artificial Sequence
  Description of Artificial Sequence: Synthetic oligonucleotide
  Antisense strand to SEQ ID NO: 1537190
uacacccuagaggagauuc

SEQ ID NO: 1537192 - RNA, 19 nt, Artificial Sequence
  Description of Artificial Sequence: Synthetic oligonucleotide
  Sense strand starting at position 2023 of SEQ ID NO: 1245111
ggccaucauccuugucacu

SEQ ID NO: 1537193 - RNA, 19 nt, Artificial Sequence
  Description of Artificial Sequence: Synthetic oligonucleotide
  Antisense strand to SEQ ID NO: 1537192
agugacaaggaugauggcc

SEQ ID NO: 1537194 - RNA, 19 nt, Artificial Sequence
  Description of Artificial Sequence: Synthetic oligonucleotide
  Sense strand starting at position 2095 of SEQ ID NO: 1245111
ccaguaugcggguguuaau

SEQ ID NO: 1537195 - RNA, 19 nt, Artificial Sequence
  Description of Artificial Sequence: Synthetic oligonucleotide
  Antisense strand to SEQ ID NO: 1537194
auuaacacccgcauacugg

SEQ ID NO: 1537196 - RNA, 19 nt, Artificial Sequence
  Description of Artificial Sequence: Synthetic oligonucleotide
  Sense strand starting at position 2106 of SEQ ID NO: 1245111
guguuaauuggcugccgga

SEQ ID NO: 1537197 - RNA, 19 nt, Artificial Sequence
  Description of Artificial Sequence: Synthetic oligonucleotide
  Antisense strand to SEQ ID NO: 1537196
uccggcagccaauuaacac

SEQ ID NO: 1537198 - RNA, 19 nt, Artificial Sequence
  Description of Artificial Sequence: Synthetic oligonucleotide
  Sense strand starting at position 2249 of SEQ ID NO: 1245111
gcggguuaagcgugcgaga

SEQ ID NO: 1537199 - RNA, 19 nt, Artificial Sequence
  Description of Artificial Sequence: Synthetic oligonucleotide
  Antisense strand to SEQ ID NO: 1537198
ucucgcacgcuuaacccgc

SEQ ID NO: 1537200 - RNA, 19 nt, Artificial Sequence
  Description of Artificial Sequence: Synthetic oligonucleotide
  Sense strand starting at position 2251 of SEQ ID NO: 1245111
ggguuaagcgugcgagaga

SEQ ID NO: 1537201 - RNA, 19 nt, Artificial Sequence
  Description of Artificial Sequence: Synthetic oligonucleotide
  Antisense strand to SEQ ID NO: 1537200
ucucucgcacgcuuaaccc

SEQ ID NO: 1537202 - RNA, 19 nt, Artificial Sequence
  Description of Artificial Sequence: Synthetic oligonucleotide
  Sense strand starting at position 2336 of SEQ ID NO: 1245111
cagcgaaucgcgggaguuu

SEQ ID NO: 1537203 - RNA, 19 nt, Artificial Sequence
  Description of Artificial Sequence: Synthetic oligonucleotide
  Antisense strand to SEQ ID NO: 1537202
aaacucccgcgauucgcug

SEQ ID NO: 1537204 - RNA, 19 nt, Artificial Sequence
  Description of Artificial Sequence: Synthetic oligonucleotide
  Sense strand starting at position 2368 of SEQ ID NO: 1245111
guccgagucccagacguua

SEQ ID NO: 1537205 - RNA, 19 nt, Artificial Sequence
  Description of Artificial Sequence: Synthetic oligonucleotide
  Antisense strand to SEQ ID NO: 1537204
uaacgucugggacucggac

SEQ ID NO: 1537206 - RNA, 19 nt, Artificial Sequence
  Description of Artificial Sequence: Synthetic oligonucleotide
  Sense strand starting at position 2370 of SEQ ID NO: 1245111
ccgagucccagacguuaau

SEQ ID NO: 1537207 - RNA, 19 nt, Artificial Sequence
  Description of Artificial Sequence: Synthetic oligonucleotide
  Antisense strand to SEQ ID NO: 1537206
auuaacgucugggacucgg

SEQ ID NO: 1537208 - RNA, 19 nt, Artificial Sequence
  Description of Artificial Sequence: Synthetic oligonucleotide
  Sense strand starting at position 2380 of SEQ ID NO: 1245111
gacguuaauuuguaacaaa

SEQ ID NO: 1537209 - RNA, 19 nt, Artificial Sequence
  Description of Artificial Sequence: Synthetic oligonucleotide
  Antisense strand to SEQ ID NO: 1537208
uuuguuacaaauuaacguc

SEQ ID NO: 1537210 - RNA, 19 nt, Artificial Sequence
  Description of Artificial Sequence: Synthetic oligonucleotide
  Sense strand starting at position 2431 of SEQ ID NO: 1245111
cucggaaagccguucgcau

SEQ ID NO: 1537211 - RNA, 19 nt, Artificial Sequence
  Description of Artificial Sequence: Synthetic oligonucleotide
  Antisense strand to SEQ ID NO: 1537210
augcgaacggcuuuccgag

SEQ ID NO: 1537212 - RNA, 19 nt, Artificial Sequence
  Description of Artificial Sequence: Synthetic oligonucleotide
  Sense strand starting at position 2672 of SEQ ID NO: 1245111
gcgguuggccagugacaug

SEQ ID NO: 1537213 - RNA, 19 nt, Artificial Sequence
  Description of Artificial Sequence: Synthetic oligonucleotide
  Antisense strand to SEQ ID NO: 1537212
caugucacuggccaaccgc

SEQ ID NO: 1537214 - RNA, 19 nt, Artificial Sequence
  Description of Artificial Sequence: Synthetic oligonucleotide
  Sense strand starting at position 2695 of SEQ ID NO: 1245111
ggccuuguuugugcauuua

SEQ ID NO: 1537215 - RNA, 19 nt, Artificial Sequence
  Description of Artificial Sequence: Synthetic oligonucleotide
  Antisense strand to SEQ ID NO: 1537214
uaaaugcacaaacaaggcc

SEQ ID NO: 1537216 - RNA, 19 nt, Artificial Sequence
  Description of Artificial Sequence: Synthetic oligonucleotide
  Sense strand starting at position 2703 of SEQ ID NO: 1245111
uugugcauuuaagguaaau

SEQ ID NO: 1537217 - RNA, 19 nt, Artificial Sequence
  Description of Artificial Sequence: Synthetic oligonucleotide
  Antisense strand to SEQ ID NO: 1537216
auuuaccuuaaaugcacaa

SEQ ID NO: 1537218 - RNA, 19 nt, Artificial Sequence
  Description of Artificial Sequence: Synthetic oligonucleotide
  Sense strand starting at position 2720 of SEQ ID NO: 1245111
aucagauucucuucuagga

SEQ ID NO: 1537219 - RNA, 19 nt, Artificial Sequence
  Description of Artificial Sequence: Synthetic oligonucleotide
  Antisense strand to SEQ ID NO: 1537218
uccuagaagagaaucugau

SEQ ID NO: 1537220 - RNA, 19 nt, Artificial Sequence
  Description of Artificial Sequence: Synthetic oligonucleotide
  Sense strand starting at position 2722 of SEQ ID NO: 1245111
cagauucucuucuaggagu

SEQ ID NO: 1537221 - RNA, 19 nt, Artificial Sequence
  Description of Artificial Sequence: Synthetic oligonucleotide
  Antisense strand to SEQ ID NO: 1537220
acuccuagaagagaaucug

SEQ ID NO: 1537222 - RNA, 19 nt, Artificial Sequence
  Description of Artificial Sequence: Synthetic oligonucleotide
  Sense strand starting at position 2724 of SEQ ID NO: 1245111
gauucucuucuaggagucu

SEQ ID NO: 1537223 - RNA, 19 nt, Artificial Sequence
  Description of Artificial Sequence: Synthetic oligonucleotide
  Antisense strand to SEQ ID NO: 1537222
agacuccuagaagagaauc

SEQ ID NO: 1537224 - RNA, 19 nt, Artificial Sequence
  Description of Artificial Sequence: Synthetic oligonucleotide
  Sense strand starting at position 2730 of SEQ ID NO: 1245111
cuucuaggagucuggaaga

SEQ ID NO: 1537225 - RNA, 19 nt, Artificial Sequence
  Description of Artificial Sequence: Synthetic oligonucleotide
  Antisense strand to SEQ ID NO: 1537224
ucuuccagacuccuagaag

SEQ ID NO: 1537226 - RNA, 19 nt, Artificial Sequence
  Description of Artificial Sequence: Synthetic oligonucleotide
  Sense strand starting at position 2810 of SEQ ID NO: 1245111
gcuacaaauguuugaagga

SEQ ID NO: 1537227 - RNA, 19 nt, Artificial Sequence
  Description of Artificial Sequence: Synthetic oligonucleotide
  Antisense strand to SEQ ID NO: 1537226
uccuucaaacauuuguagc

SEQ ID NO: 1537228 - RNA, 19 nt, Artificial Sequence
  Description of Artificial Sequence: Synthetic oligonucleotide
  Sense strand starting at position 2889 of SEQ ID NO: 1245111
cagcaaugguaguuaauuc

SEQ ID NO: 1537229 - RNA, 19 nt, Artificial Sequence
  Description of Artificial Sequence: Synthetic oligonucleotide
  Antisense strand to SEQ ID NO: 1537228
gaauuaacuaccauugcug

SEQ ID NO: 1537230 - RNA, 19 nt, Artificial Sequence
  Description of Artificial Sequence: Synthetic oligonucleotide
  Sense strand starting at position 2962 of SEQ ID NO: 1245111
ugcagaagguuccuacaca

SEQ ID NO: 1537231 - RNA, 19 nt, Artificial Sequence
  Description of Artificial Sequence: Synthetic oligonucleotide
  Antisense strand to SEQ ID NO: 1537230
uguguaggaaccuucugca

SEQ ID NO: 1537232 - RNA, 19 nt, Artificial Sequence
  Description of Artificial Sequence: Synthetic oligonucleotide
  Sense strand starting at position 2963 of SEQ ID NO: 1245111
gcagaagguuccuacacau

SEQ ID NO: 1537233 - RNA, 19 nt, Artificial Sequence
  Description of Artificial Sequence: Synthetic oligonucleotide
  Antisense strand to SEQ ID NO: 1537232
auguguaggaaccuucugc

SEQ ID NO: 1537234 - RNA, 19 nt, Artificial Sequence
  Description of Artificial Sequence: Synthetic oligonucleotide
  Sense strand starting at position 2979 of SEQ ID NO: 1245111
cauacuaggugucugauga

SEQ ID NO: 1537235 - RNA, 19 nt, Artificial Sequence
  Description of Artificial Sequence: Synthetic oligonucleotide
  Antisense strand to SEQ ID NO: 1537234
ucaucagacaccuaguaug

SEQ ID NO: 1537236 - RNA, 19 nt, Artificial Sequence
  Description of Artificial Sequence: Synthetic oligonucleotide
  Sense strand starting at position 2980 of SEQ ID NO: 1245111
auacuaggugucugaugaa

SEQ ID NO: 1537237 - RNA, 19 nt, Artificial Sequence
  Description of Artificial Sequence: Synthetic oligonucleotide
  Antisense strand to SEQ ID NO: 1537236
uucaucagacaccuaguau

SEQ ID NO: 1537238 - RNA, 19 nt, Artificial Sequence
  Description of Artificial Sequence: Synthetic oligonucleotide
  Sense strand starting at position 2983 of SEQ ID NO: 1245111
cuaggugucugaugaaugu

SEQ ID NO: 1537239 - RNA, 19 nt, Artificial Sequence
  Description of Artificial Sequence: Synthetic oligonucleotide
  Antisense strand to SEQ ID NO: 1537238
acauucaucagacaccuag

SEQ ID NO: 1537240 - RNA, 19 nt, Artificial Sequence
  Description of Artificial Sequence: Synthetic oligonucleotide
  Sense strand starting at position 3037 of SEQ ID NO: 1245111
augcaugccuauccagaaa

SEQ ID NO: 1537241 - RNA, 19 nt, Artificial Sequence
  Description of Artificial Sequence: Synthetic oligonucleotide
  Antisense strand to SEQ ID NO: 1537240
uuucuggauaggcaugcau

SEQ ID NO: 1537242 - RNA, 19 nt, Artificial Sequence
  Description of Artificial Sequence: Synthetic oligonucleotide
  Sense strand starting at position 3923 of SEQ ID NO: 1245111
gucugagguuccugacauc

SEQ ID NO: 1537243 - RNA, 19 nt, Artificial Sequence
  Description of Artificial Sequence: Synthetic oligonucleotide
  Antisense strand to SEQ ID NO: 1537242
gaugucaggaaccucagac

SEQ ID NO: 1537244 - RNA, 19 nt, Artificial Sequence
  Description of Artificial Sequence: Synthetic oligonucleotide
  Sense strand starting at position 181 of SEQ ID NO: 1245112
ccuguuaauuucccaggca

SEQ ID NO: 1537245 - RNA, 19 nt, Artificial Sequence
  Description of Artificial Sequence: Synthetic oligonucleotide
  Antisense strand to SEQ ID NO: 1537244
ugccugggaaauuaacagg

SEQ ID NO: 1537246 - RNA, 19 nt, Artificial Sequence
  Description of Artificial Sequence: Synthetic oligonucleotide
  Sense strand starting at position 184 of SEQ ID NO: 1245112
guuaauuucccaggcacga

SEQ ID NO: 1537247 - RNA, 19 nt, Artificial Sequence
  Description of Artificial Sequence: Synthetic oligonucleotide
  Antisense strand to SEQ ID NO: 1537246
ucgugccugggaaauuaac

SEQ ID NO: 1537248 - RNA, 19 nt, Artificial Sequence
  Description of Artificial Sequence: Synthetic oligonucleotide
  Sense strand starting at position 282 of SEQ ID NO: 1245112
gggcucucugaaugcucau

SEQ ID NO: 1537249 - RNA, 19 nt, Artificial Sequence
  Description of Artificial Sequence: Synthetic oligonucleotide
  Antisense strand to SEQ ID NO: 1537248
augagcauucagagagccc

SEQ ID NO: 1537250 - RNA, 19 nt, Artificial Sequence
  Description of Artificial Sequence: Synthetic oligonucleotide
  Sense strand starting at position 448 of SEQ ID NO: 1245112
uccguauucggagauuaca

SEQ ID NO: 1537251 - RNA, 19 nt, Artificial Sequence
  Description of Artificial Sequence: Synthetic oligonucleotide
  Antisense strand to SEQ ID NO: 1537250
uguaaucuccgaauacgga

SEQ ID NO: 1537252 - RNA, 19 nt, Artificial Sequence
  Description of Artificial Sequence: Synthetic oligonucleotide
  Sense strand starting at position 586 of SEQ ID NO: 1245112
gccgguucucuggaauauc

SEQ ID NO: 1537253 - RNA, 19 nt, Artificial Sequence
  Description of Artificial Sequence: Synthetic oligonucleotide
  Antisense strand to SEQ ID NO: 1537252
gauauuccagagaaccggc

SEQ ID NO: 1537254 - RNA, 19 nt, Artificial Sequence
  Description of Artificial Sequence: Synthetic oligonucleotide
  Sense strand starting at position 620 of SEQ ID NO: 1245112
ggagguguccuggagcuau

SEQ ID NO: 1537255 - RNA, 19 nt, Artificial Sequence
  Description of Artificial Sequence: Synthetic oligonucleotide
  Antisense strand to SEQ ID NO: 1537254
auagcuccaggacaccucc

SEQ ID NO: 1537256 - RNA, 19 nt, Artificial Sequence
  Description of Artificial Sequence: Synthetic oligonucleotide
  Sense strand starting at position 861 of SEQ ID NO: 1245112
ucuacauucugcgcagacu

SEQ ID NO: 1537257 - RNA, 19 nt, Artificial Sequence
  Description of Artificial Sequence: Synthetic oligonucleotide
  Antisense strand to SEQ ID NO: 1537256
agucugcgcagaauguaga

SEQ ID NO: 1537258 - RNA, 19 nt, Artificial Sequence
  Description of Artificial Sequence: Synthetic oligonucleotide
  Sense strand starting at position 862 of SEQ ID NO: 1245112
cuacauucugcgcagacuu

SEQ ID NO: 1537259 - RNA, 19 nt, Artificial Sequence
  Description of Artificial Sequence: Synthetic oligonucleotide
  Antisense strand to SEQ ID NO: 1537258
aagucugcgcagaauguag

SEQ ID NO: 1537260 - RNA, 19 nt, Artificial Sequence
  Description of Artificial Sequence: Synthetic oligonucleotide
  Sense strand starting at position 1149 of SEQ ID NO: 1245112
uuuaucaucggugcgcaaa

SEQ ID NO: 1537261 - RNA, 19 nt, Artificial Sequence
  Description of Artificial Sequence: Synthetic oligonucleotide
  Antisense strand to SEQ ID NO: 1537260
uuugcgcaccgaugauaaa

SEQ ID NO: 1537262 - RNA, 19 nt, Artificial Sequence
  Description of Artificial Sequence: Synthetic oligonucleotide
  Sense strand starting at position 1182 of SEQ ID NO: 1245112
gcgccaaaucucuugcuau

SEQ ID NO: 1537263 - RNA, 19 nt, Artificial Sequence
  Description of Artificial Sequence: Synthetic oligonucleotide
  Antisense strand to SEQ ID NO: 1537262
auagcaagagauuuggcgc

SEQ ID NO: 1537264 - RNA, 19 nt, Artificial Sequence
  Description of Artificial Sequence: Synthetic oligonucleotide
  Sense strand starting at position 1214 of SEQ ID NO: 1245112
ucuacuacucgccaaauga

SEQ ID NO: 1537265 - RNA, 19 nt, Artificial Sequence
  Description of Artificial Sequence: Synthetic oligonucleotide
  Antisense strand to SEQ ID NO: 1537264
ucauuuggcgaguaguaga

SEQ ID NO: 1537266 - RNA, 19 nt, Artificial Sequence
  Description of Artificial Sequence: Synthetic oligonucleotide
  Sense strand starting at position 1287 of SEQ ID NO: 1245112
ccacuuaccgguuacuuga

SEQ ID NO: 1537267 - RNA, 19 nt, Artificial Sequence
  Description of Artificial Sequence: Synthetic oligonucleotide
  Antisense strand to SEQ ID NO: 1537266
ucaaguaaccgguaagugg

SEQ ID NO: 1537268 - RNA, 19 nt, Artificial Sequence
  Description of Artificial Sequence: Synthetic oligonucleotide
  Sense strand starting at position 2295 of SEQ ID NO: 1245112
ggaaauuauugguauuuga

SEQ ID NO: 1537269 - RNA, 19 nt, Artificial Sequence
  Description of Artificial Sequence: Synthetic oligonucleotide
  Antisense strand to SEQ ID NO: 1537268
ucaaauaccaauaauuucc

SEQ ID NO: 1537270 - RNA, 19 nt, Artificial Sequence
  Description of Artificial Sequence: Synthetic oligonucleotide
  Sense strand starting at position 2494 of SEQ ID NO: 1245112
agaguuauuuccugacaua

SEQ ID NO: 1537271 - RNA, 19 nt, Artificial Sequence
  Description of Artificial Sequence: Synthetic oligonucleotide
  Antisense strand to SEQ ID NO: 1537270
uaugucaggaaauaacucu

SEQ ID NO: 1537272 - RNA, 19 nt, Artificial Sequence
  Description of Artificial Sequence: Synthetic oligonucleotide
  Sense strand starting at position 2541 of SEQ ID NO: 1245112
gucucaugucgucuguguu

SEQ ID NO: 1537273 - RNA, 19 nt, Artificial Sequence
  Description of Artificial Sequence: Synthetic oligonucleotide
  Antisense strand to SEQ ID NO: 1537272
aacacagacgacaugagac

SEQ ID NO: 1537274 - RNA, 19 nt, Artificial Sequence
  Description of Artificial Sequence: Synthetic oligonucleotide
  Sense strand starting at position 2645 of SEQ ID NO: 1245112
ugggacauccagugagacu

SEQ ID NO: 1537275 - RNA, 19 nt, Artificial Sequence
  Description of Artificial Sequence: Synthetic oligonucleotide
  Antisense strand to SEQ ID NO: 1537274
agucucacuggauguccca

SEQ ID NO: 1537276 - RNA, 19 nt, Artificial Sequence
  Description of Artificial Sequence: Synthetic oligonucleotide
  Sense strand starting at position 2687 of SEQ ID NO: 1245112
gugauccgucaggagagaa

SEQ ID NO: 1537277 - RNA, 19 nt, Artificial Sequence
  Description of Artificial Sequence: Synthetic oligonucleotide
  Antisense strand to SEQ ID NO: 1537276
uucucuccugacggaucac

SEQ ID NO: 1537278 - RNA, 19 nt, Artificial Sequence
  Description of Artificial Sequence: Synthetic oligonucleotide
  Sense strand starting at position 2729 of SEQ ID NO: 1245112
ucgugauaaauaugauggu

SEQ ID NO: 1537279 - RNA, 19 nt, Artificial Sequence
  Description of Artificial Sequence: Synthetic oligonucleotide
  Antisense strand to SEQ ID NO: 1537278
accaucauauuuaucacga

SEQ ID NO: 1537280 - RNA, 19 nt, Artificial Sequence
  Description of Artificial Sequence: Synthetic oligonucleotide
  Sense strand starting at position 2921 of SEQ ID NO: 1245112
cugaguuccuuugcauaac

SEQ ID NO: 1537281 - RNA, 19 nt, Artificial Sequence
  Description of Artificial Sequence: Synthetic oligonucleotide
  Antisense strand to SEQ ID NO: 1537280
guuaugcaaaggaacucag

SEQ ID NO: 1537282 - RNA, 19 nt, Artificial Sequence
  Description of Artificial Sequence: Synthetic oligonucleotide
  Sense strand starting at position 3032 of SEQ ID NO: 1245112
uggaauucugcacaugcca

SEQ ID NO: 1537283 - RNA, 19 nt, Artificial Sequence
  Description of Artificial Sequence: Synthetic oligonucleotide
  Antisense strand to SEQ ID NO: 1537282
uggcaugugcagaauucca

SEQ ID NO: 1537284 - RNA, 19 nt, Artificial Sequence
  Description of Artificial Sequence: Synthetic oligonucleotide
  Sense strand starting at position 3049 of SEQ ID NO: 1245112
caauacguuucugcagaau

SEQ ID NO: 1537285 - RNA, 19 nt, Artificial Sequence
  Description of Artificial Sequence: Synthetic oligonucleotide
  Antisense strand to SEQ ID NO: 1537284
auucugcagaaacguauug

SEQ ID NO: 1537286 - RNA, 19 nt, Artificial Sequence
  Description of Artificial Sequence: Synthetic oligonucleotide
  Sense strand starting at position 3052 of SEQ ID NO: 1245112
uacguuucugcagaauaag

SEQ ID NO: 1537287 - RNA, 19 nt, Artificial Sequence
  Description of Artificial Sequence: Synthetic oligonucleotide
  Antisense strand to SEQ ID NO: 1537286
cuuauucugcagaaacgua

SEQ ID NO: 1537288 - RNA, 19 nt, Artificial Sequence
  Description of Artificial Sequence: Synthetic oligonucleotide
  Sense strand starting at position 3055 of SEQ ID NO: 1245112
guuucugcagaauaaguga

SEQ ID NO: 1537289 - RNA, 19 nt, Artificial Sequence
  Description of Artificial Sequence: Synthetic oligonucleotide
  Antisense strand to SEQ ID NO: 1537288
ucacuuauucugcagaaac

SEQ ID NO: 1537290 - RNA, 19 nt, Artificial Sequence
  Description of Artificial Sequence: Synthetic oligonucleotide
  Sense strand starting at position 3312 of SEQ ID NO: 1245112
cagggaaacuccuaugaug

SEQ ID NO: 1537291 - RNA, 19 nt, Artificial Sequence
  Description of Artificial Sequence: Synthetic oligonucleotide
  Antisense strand to SEQ ID NO: 1537290
caucauaggaguuucccug

SEQ ID NO: 1537292 - RNA, 19 nt, Artificial Sequence
  Description of Artificial Sequence: Synthetic oligonucleotide
  Sense strand starting at position 3314 of SEQ ID NO: 1245112
gggaaacuccuaugaugcu

SEQ ID NO: 1537293 - RNA, 19 nt, Artificial Sequence
  Description of Artificial Sequence: Synthetic oligonucleotide
  Antisense strand to SEQ ID NO: 1537292
agcaucauaggaguuuccc

SEQ ID NO: 1537294 - RNA, 19 nt, Artificial Sequence
  Description of Artificial Sequence: Synthetic oligonucleotide
  Sense strand starting at position 3458 of SEQ ID NO: 1245112
ucuuuagaauuggaugaaa

SEQ ID NO: 1537295 - RNA, 19 nt, Artificial Sequence
  Description of Artificial Sequence: Synthetic oligonucleotide
  Antisense strand to SEQ ID NO: 1537294
uuucauccaauucuaaaga

SEQ ID NO: 1537296 - RNA, 19 nt, Artificial Sequence
  Description of Artificial Sequence: Synthetic oligonucleotide
  Sense strand starting at position 3469 of SEQ ID NO: 1245112
ggaugaaacucuuugguua

SEQ ID NO: 1537297 - RNA, 19 nt, Artificial Sequence
  Description of Artificial Sequence: Synthetic oligonucleotide
  Antisense strand to SEQ ID NO: 1537296
uaaccaaagaguuucaucc

SEQ ID NO: 1537298 - RNA, 19 nt, Artificial Sequence
  Description of Artificial Sequence: Synthetic oligonucleotide
  Sense strand starting at position 3470 of SEQ ID NO: 1245112
gaugaaacucuuugguuac

SEQ ID NO: 1537299 - RNA, 19 nt, Artificial Sequence
  Description of Artificial Sequence: Synthetic oligonucleotide
  Antisense strand to SEQ ID NO: 1537298
guaaccaaagaguuucauc

SEQ ID NO: 1537300 - RNA, 19 nt, Artificial Sequence
  Description of Artificial Sequence: Synthetic oligonucleotide
  Sense strand starting at position 3528 of SEQ ID NO: 1245112
aggugaagccucuaguggu

SEQ ID NO: 1537301 - RNA, 19 nt, Artificial Sequence
  Description of Artificial Sequence: Synthetic oligonucleotide
  Antisense strand to SEQ ID NO: 1537300
accacuagaggcuucaccu

SEQ ID NO: 1537302 - RNA, 19 nt, Artificial Sequence
  Description of Artificial Sequence: Synthetic oligonucleotide
  Sense strand starting at position 3588 of SEQ ID NO: 1245112
ugaaucuucccaggaaguc

SEQ ID NO: 1537303 - RNA, 19 nt, Artificial Sequence
  Description of Artificial Sequence: Synthetic oligonucleotide
  Antisense strand to SEQ ID NO: 1537302
gacuuccugggaagauuca

SEQ ID NO: 1537304 - RNA, 19 nt, Artificial Sequence
  Description of Artificial Sequence: Synthetic oligonucleotide
  Sense strand starting at position 3625 of SEQ ID NO: 1245112
gaaguuugugaauauccug

SEQ ID NO: 1537305 - RNA, 19 nt, Artificial Sequence
  Description of Artificial Sequence: Synthetic oligonucleotide
  Antisense strand to SEQ ID NO: 1537304
caggauauucacaaacuuc

SEQ ID NO: 1537306 - RNA, 19 nt, Artificial Sequence
  Description of Artificial Sequence: Synthetic oligonucleotide
  Sense strand starting at position 3628 of SEQ ID NO: 1245112
guuugugaauauccugaaa

SEQ ID NO: 1537307 - RNA, 19 nt, Artificial Sequence
  Description of Artificial Sequence: Synthetic oligonucleotide
  Antisense strand to SEQ ID NO: 1537306
uuucaggauauucacaaac

SEQ ID NO: 1537308 - RNA, 19 nt, Artificial Sequence
  Description of Artificial Sequence: Synthetic oligonucleotide
  Sense strand starting at position 3656 of SEQ ID NO: 1245112
aagugauuggcuuguguga

SEQ ID NO: 1537309 - RNA, 19 nt, Artificial Sequence
  Description of Artificial Sequence: Synthetic oligonucleotide
  Antisense strand to SEQ ID NO: 1537308
ucacacaagccaaucacuu

SEQ ID NO: 1537310 - RNA, 19 nt, Artificial Sequence
  Description of Artificial Sequence: Synthetic oligonucleotide
  Sense strand starting at position 3778 of SEQ ID NO: 1245112
gauaguagguaugagggaa

SEQ ID NO: 1537311 - RNA, 19 nt, Artificial Sequence
  Description of Artificial Sequence: Synthetic oligonucleotide
  Antisense strand to SEQ ID NO: 1537310
uucccucauaccuacuauc

SEQ ID NO: 1537312 - RNA, 19 nt, Artificial Sequence
  Description of Artificial Sequence: Synthetic oligonucleotide
  Sense strand starting at position 3799 of SEQ ID NO: 1245112
guugcaacuucuucucaag

SEQ ID NO: 1537313 - RNA, 19 nt, Artificial Sequence
  Description of Artificial Sequence: Synthetic oligonucleotide
  Antisense strand to SEQ ID NO: 1537312
cuugagaagaaguugcaac

SEQ ID NO: 1537314 - RNA, 19 nt, Artificial Sequence
  Description of Artificial Sequence: Synthetic oligonucleotide
  Sense strand starting at position 3839 of SEQ ID NO: 1245112
ccauaucaguaauaggaug

SEQ ID NO: 1537315 - RNA, 19 nt, Artificial Sequence
  Description of Artificial Sequence: Synthetic oligonucleotide
  Antisense strand to SEQ ID NO: 1537314
cauccuauuacugauaugg

SEQ ID NO: 1537316 - RNA, 19 nt, Artificial Sequence
  Description of Artificial Sequence: Synthetic oligonucleotide
  Sense strand starting at position 3896 of SEQ ID NO: 1245112
gguccauguugcucagauc

SEQ ID NO: 1537317 - RNA, 19 nt, Artificial Sequence
  Description of Artificial Sequence: Synthetic oligonucleotide
  Antisense strand to SEQ ID NO: 1537316
gaucugagcaacauggacc

SEQ ID NO: 1537318 - RNA, 19 nt, Artificial Sequence
  Description of Artificial Sequence: Synthetic oligonucleotide
  Sense strand starting at position 3897 of SEQ ID NO: 1245112
guccauguugcucagaucu

SEQ ID NO: 1537319 - RNA, 19 nt, Artificial Sequence
  Description of Artificial Sequence: Synthetic oligonucleotide
  Antisense strand to SEQ ID NO: 1537318
agaucugagcaacauggac

SEQ ID NO: 1537320 - RNA, 19 nt, Artificial Sequence
  Description of Artificial Sequence: Synthetic oligonucleotide
  Sense strand starting at position 3967 of SEQ ID NO: 1245112
agguuuguuacagagcuaa

SEQ ID NO: 1537321 - RNA, 19 nt, Artificial Sequence
  Description of Artificial Sequence: Synthetic oligonucleotide
  Antisense strand to SEQ ID NO: 1537320
uuagcucuguaacaaaccu

SEQ ID NO: 1537322 - RNA, 19 nt, Artificial Sequence
  Description of Artificial Sequence: Synthetic oligonucleotide
  Sense strand starting at position 3979 of SEQ ID NO: 1245112
gagcuaaaugugugccaug

SEQ ID NO: 1537323 - RNA, 19 nt, Artificial Sequence
  Description of Artificial Sequence: Synthetic oligonucleotide
  Antisense strand to SEQ ID NO: 1537322
cauggcacacauuuagcuc

SEQ ID NO: 1537324 - RNA, 19 nt, Artificial Sequence
  Description of Artificial Sequence: Synthetic oligonucleotide
  Sense strand starting at position 62 of SEQ ID NO: 1245113
guacaaauggcaggaaaua

SEQ ID NO: 1537325 - RNA, 19 nt, Artificial Sequence
  Description of Artificial Sequence: Synthetic oligonucleotide
  Antisense strand to SEQ ID NO: 1537324
uauuuccugccauuuguac

SEQ ID NO: 1537326 - RNA, 19 nt, Artificial Sequence
  Description of Artificial Sequence: Synthetic oligonucleotide
  Sense strand starting at position 163 of SEQ ID NO: 1245113
gguucugaauuaguaauau

SEQ ID NO: 1537327 - RNA, 19 nt, Artificial Sequence
  Description of Artificial Sequence: Synthetic oligonucleotide
  Antisense strand to SEQ ID NO: 1537326
auauuacuaauucagaacc

SEQ ID NO: 1537328 - RNA, 19 nt, Artificial Sequence
  Description of Artificial Sequence: Synthetic oligonucleotide
  Sense strand starting at position 338 of SEQ ID NO: 1245113
uugagccuccaauauaguu

SEQ ID NO: 1537329 - RNA, 19 nt, Artificial Sequence
  Description of Artificial Sequence: Synthetic oligonucleotide
  Antisense strand to SEQ ID NO: 1537328
aacuauauuggaggcucaa

SEQ ID NO: 1537330 - RNA, 19 nt, Artificial Sequence
  Description of Artificial Sequence: Synthetic oligonucleotide
  Sense strand starting at position 529 of SEQ ID NO: 1245113
aggugaaccaucgacgaua

SEQ ID NO: 1537331 - RNA, 19 nt, Artificial Sequence
  Description of Artificial Sequence: Synthetic oligonucleotide
  Antisense strand to SEQ ID NO: 1537330
uaucgucgaugguucaccu

SEQ ID NO: 1537332 - RNA, 19 nt, Artificial Sequence
  Description of Artificial Sequence: Synthetic oligonucleotide
  Sense strand starting at position 554 of SEQ ID NO: 1245113
guggaaguaaguuauaugu

SEQ ID NO: 1537333 - RNA, 19 nt, Artificial Sequence
  Description of Artificial Sequence: Synthetic oligonucleotide
  Antisense strand to SEQ ID NO: 1537332
acauauaacuuacuuccac

SEQ ID NO: 1537334 - RNA, 19 nt, Artificial Sequence
  Description of Artificial Sequence: Synthetic oligonucleotide
  Sense strand starting at position 742 of SEQ ID NO: 1245113
cucgucucccgugcauaaa

SEQ ID NO: 1537335 - RNA, 19 nt, Artificial Sequence
  Description of Artificial Sequence: Synthetic oligonucleotide
  Antisense strand to SEQ ID NO: 1537334
uuuaugcacgggagacgag

SEQ ID NO: 1537336 - RNA, 19 nt, Artificial Sequence
  Description of Artificial Sequence: Synthetic oligonucleotide
  Sense strand starting at position 869 of SEQ ID NO: 1245113
gaggucaccuacuuuguga

SEQ ID NO: 1537337 - RNA, 19 nt, Artificial Sequence
  Description of Artificial Sequence: Synthetic oligonucleotide
  Antisense strand to SEQ ID NO: 1537336
ucacaaaguaggugaccuc

SEQ ID NO: 1537338 - RNA, 19 nt, Artificial Sequence
  Description of Artificial Sequence: Synthetic oligonucleotide
  Sense strand starting at position 1014 of SEQ ID NO: 1245113
gcuugcuaagccuuugcua

SEQ ID NO: 1537339 - RNA, 19 nt, Artificial Sequence
  Description of Artificial Sequence: Synthetic oligonucleotide
  Antisense strand to SEQ ID NO: 1537338
uagcaaaggcuuagcaagc

SEQ ID NO: 1537340 - RNA, 19 nt, Artificial Sequence
  Description of Artificial Sequence: Synthetic oligonucleotide
  Sense strand starting at position 1188 of SEQ ID NO: 1245113
gagagcugaugguuucuaa

SEQ ID NO: 1537341 - RNA, 19 nt, Artificial Sequence
  Description of Artificial Sequence: Synthetic oligonucleotide
  Antisense strand to SEQ ID NO: 1537340
uuagaaaccaucagcucuc

SEQ ID NO: 1537342 - RNA, 19 nt, Artificial Sequence
  Description of Artificial Sequence: Synthetic oligonucleotide
  Sense strand starting at position 1208 of SEQ ID NO: 1245113
uccauaaacuuaguggaca

SEQ ID NO: 1537343 - RNA, 19 nt, Artificial Sequence
  Description of Artificial Sequence: Synthetic oligonucleotide
  Antisense strand to SEQ ID NO: 1537342
uguccacuaaguuuaugga

SEQ ID NO: 1537344 - RNA, 19 nt, Artificial Sequence
  Description of Artificial Sequence: Synthetic oligonucleotide
  Sense strand starting at position 1524 of SEQ ID NO: 1245113
acaaucagugcuuaaguaa

SEQ ID NO: 1537345 - RNA, 19 nt, Artificial Sequence
  Description of Artificial Sequence: Synthetic oligonucleotide
  Antisense strand to SEQ ID NO: 1537344
uuacuuaagcacugauugu

SEQ ID NO: 1537346 - RNA, 19 nt, Artificial Sequence
  Description of Artificial Sequence: Synthetic oligonucleotide
  Sense strand starting at position 1538 of SEQ ID NO: 1245113
aguaauuuagccugucuuu

SEQ ID NO: 1537347 - RNA, 19 nt, Artificial Sequence
  Description of Artificial Sequence: Synthetic oligonucleotide
  Antisense strand to SEQ ID NO: 1537346
aaagacaggcuaaauuacu

SEQ ID NO: 1537348 - RNA, 19 nt, Artificial Sequence
  Description of Artificial Sequence: Synthetic oligonucleotide
  Sense strand starting at position 1770 of SEQ ID NO: 1245113
uuaacuccaguauguuaaa

SEQ ID NO: 1537349 - RNA, 19 nt, Artificial Sequence
  Description of Artificial Sequence: Synthetic oligonucleotide
  Antisense strand to SEQ ID NO: 1537348
uuuaacauacuggaguuaa

SEQ ID NO: 1537350 - RNA, 19 nt, Artificial Sequence
  Description of Artificial Sequence: Synthetic oligonucleotide
  Sense strand starting at position 1870 of SEQ ID NO: 1245113
uuaccuuauuagcuggaau

SEQ ID NO: 1537351 - RNA, 19 nt, Artificial Sequence
  Description of Artificial Sequence: Synthetic oligonucleotide
  Antisense strand to SEQ ID NO: 1537350
auuccagcuaauaagguaa

SEQ ID NO: 1537352 - RNA, 19 nt, Artificial Sequence
  Description of Artificial Sequence: Synthetic oligonucleotide
  Sense strand starting at position 1893 of SEQ ID NO: 1245113
aacagaaugucuuuaugga

SEQ ID NO: 1537353 - RNA, 19 nt, Artificial Sequence
  Description of Artificial Sequence: Synthetic oligonucleotide
  Antisense strand to SEQ ID NO: 1537352
uccauaaagacauucuguu

SEQ ID NO: 1537354 - RNA, 19 nt, Artificial Sequence
  Description of Artificial Sequence: Synthetic oligonucleotide
  Sense strand starting at position 1935 of SEQ ID NO: 1245113
agcuuugauuugguauagu

SEQ ID NO: 1537355 - RNA, 19 nt, Artificial Sequence
  Description of Artificial Sequence: Synthetic oligonucleotide
  Antisense strand to SEQ ID NO: 1537354
acuauaccaaaucaaagcu

SEQ ID NO: 1537356 - RNA, 19 nt, Artificial Sequence
  Description of Artificial Sequence: Synthetic oligonucleotide
  Sense strand starting at position 1976 of SEQ ID NO: 1245113
ucucuaugauuugccgauu

SEQ ID NO: 1537357 - RNA, 19 nt, Artificial Sequence
  Description of Artificial Sequence: Synthetic oligonucleotide
  Antisense strand to SEQ ID NO: 1537356
aaucggcaaaucauagaga

SEQ ID NO: 1537358 - RNA, 19 nt, Artificial Sequence
  Description of Artificial Sequence: Synthetic oligonucleotide
  Sense strand starting at position 1992 of SEQ ID NO: 1245113
auucuaagugguugaguga

SEQ ID NO: 1537359 - RNA, 19 nt, Artificial Sequence
  Description of Artificial Sequence: Synthetic oligonucleotide
  Antisense strand to SEQ ID NO: 1537358
ucacucaaccacuuagaau

SEQ ID NO: 1537360 - RNA, 19 nt, Artificial Sequence
  Description of Artificial Sequence: Synthetic oligonucleotide
  Sense strand starting at position 2001 of SEQ ID NO: 1245113
gguugagugaggcaguaaa

SEQ ID NO: 1537361 - RNA, 19 nt, Artificial Sequence
  Description of Artificial Sequence: Synthetic oligonucleotide
  Antisense strand to SEQ ID NO: 1537360
uuuacugccucacucaacc

SEQ ID NO: 1537362 - RNA, 19 nt, Artificial Sequence
  Description of Artificial Sequence: Synthetic oligonucleotide
  Sense strand starting at position 2039 of SEQ ID NO: 1245113
gggagagugguuggucaug

SEQ ID NO: 1537363 - RNA, 19 nt, Artificial Sequence
  Description of Artificial Sequence: Synthetic oligonucleotide
  Antisense strand to SEQ ID NO: 1537362
caugaccaaccacucuccc

SEQ ID NO: 1537364 - RNA, 19 nt, Artificial Sequence
  Description of Artificial Sequence: Synthetic oligonucleotide
  Sense strand starting at position 2147 of SEQ ID NO: 1245113
agugaauacuuagugcaga

SEQ ID NO: 1537365 - RNA, 19 nt, Artificial Sequence
  Description of Artificial Sequence: Synthetic oligonucleotide
  Antisense strand to SEQ ID NO: 1537364
ucugcacuaaguauucacu

SEQ ID NO: 1537366 - RNA, 19 nt, Artificial Sequence
  Description of Artificial Sequence: Synthetic oligonucleotide
  Sense strand starting at position 2261 of SEQ ID NO: 1245113
caguaaauucugggcuauu

SEQ ID NO: 1537367 - RNA, 19 nt, Artificial Sequence
  Description of Artificial Sequence: Synthetic oligonucleotide
  Antisense strand to SEQ ID NO: 1537366
aauagcccagaauuuacug

SEQ ID NO: 1537368 - RNA, 19 nt, Artificial Sequence
  Description of Artificial Sequence: Synthetic oligonucleotide
  Sense strand starting at position 2262 of SEQ ID NO: 1245113
aguaaauucugggcuauug

SEQ ID NO: 1537369 - RNA, 19 nt, Artificial Sequence
  Description of Artificial Sequence: Synthetic oligonucleotide
  Antisense strand to SEQ ID NO: 1537368
caauagcccagaauuuacu

SEQ ID NO: 1537370 - RNA, 19 nt, Artificial Sequence
  Description of Artificial Sequence: Synthetic oligonucleotide
  Sense strand starting at position 2376 of SEQ ID NO: 1245113
cugauugucugacuaguga

SEQ ID NO: 1537371 - RNA, 19 nt, Artificial Sequence
  Description of Artificial Sequence: Synthetic oligonucleotide
  Antisense strand to SEQ ID NO: 1537370
ucacuagucagacaaucag

SEQ ID NO: 1537372 - RNA, 19 nt, Artificial Sequence
  Description of Artificial Sequence: Synthetic oligonucleotide
  Sense strand starting at position 2602 of SEQ ID NO: 1245113
agaaaccucuuggcaaaca

SEQ ID NO: 1537373 - RNA, 19 nt, Artificial Sequence
  Description of Artificial Sequence: Synthetic oligonucleotide
  Antisense strand to SEQ ID NO: 1537372
uguuugccaagagguuucu

SEQ ID NO: 1537374 - RNA, 19 nt, Artificial Sequence
  Description of Artificial Sequence: Synthetic oligonucleotide
  Sense strand starting at position 2983 of SEQ ID NO: 1245113
aggugcauuuaauaagaaa

SEQ ID NO: 1537375 - RNA, 19 nt, Artificial Sequence
  Description of Artificial Sequence: Synthetic oligonucleotide
  Antisense strand to SEQ ID NO: 1537374
uuucuuauuaaaugcaccu

SEQ ID NO: 1537376 - RNA, 19 nt, Artificial Sequence
  Description of Artificial Sequence: Synthetic oligonucleotide
  Sense strand starting at position 3049 of SEQ ID NO: 1245113
aguauagugucaccauaug

SEQ ID NO: 1537377 - RNA, 19 nt, Artificial Sequence
  Description of Artificial Sequence: Synthetic oligonucleotide
  Antisense strand to SEQ ID NO: 1537376
cauauggugacacuauacu

SEQ ID NO: 1537378 - RNA, 19 nt, Artificial Sequence
  Description of Artificial Sequence: Synthetic oligonucleotide
  Sense strand starting at position 3280 of SEQ ID NO: 1245113
cugcuauaacauggauaaa

SEQ ID NO: 1537379 - RNA, 19 nt, Artificial Sequence
  Description of Artificial Sequence: Synthetic oligonucleotide
  Antisense strand to SEQ ID NO: 1537378
uuuauccauguuauagcag

SEQ ID NO: 1537380 - RNA, 19 nt, Artificial Sequence
  Description of Artificial Sequence: Synthetic oligonucleotide
  Sense strand starting at position 3446 of SEQ ID NO: 1245113
ccaggaagugauugcuaac

SEQ ID NO: 1537381 - RNA, 19 nt, Artificial Sequence
  Description of Artificial Sequence: Synthetic oligonucleotide
  Antisense strand to SEQ ID NO: 1537380
guuagcaaucacuuccugg

SEQ ID NO: 1537382 - RNA, 19 nt, Artificial Sequence
  Description of Artificial Sequence: Synthetic oligonucleotide
  Sense strand starting at position 3470 of SEQ ID NO: 1245113
caggauuccuuauuggagu

SEQ ID NO: 1537383 - RNA, 19 nt, Artificial Sequence
  Description of Artificial Sequence: Synthetic oligonucleotide
  Antisense strand to SEQ ID NO: 1537382
acuccaauaaggaauccug

SEQ ID NO: 1537384 - RNA, 19 nt, Artificial Sequence
  Description of Artificial Sequence: Synthetic oligonucleotide
  Sense strand starting at position 3472 of SEQ ID NO: 1245113
ggauuccuuauuggaguga

SEQ ID NO: 1537385 - RNA, 19 nt, Artificial Sequence
  Description of Artificial Sequence: Synthetic oligonucleotide
  Antisense strand to SEQ ID NO: 1537384
ucacuccaauaaggaaucc

SEQ ID NO: 1537386 - RNA, 19 nt, Artificial Sequence
  Description of Artificial Sequence: Synthetic oligonucleotide
  Sense strand starting at position 3476 of SEQ ID NO: 1245113
uccuuauuggagugaagaa

SEQ ID NO: 1537387 - RNA, 19 nt, Artificial Sequence
  Description of Artificial Sequence: Synthetic oligonucleotide
  Antisense strand to SEQ ID NO: 1537386
uucuucacuccaauaagga

SEQ ID NO: 1537388 - RNA, 19 nt, Artificial Sequence
  Description of Artificial Sequence: Synthetic oligonucleotide
  Sense strand starting at position 3504 of SEQ ID NO: 1245113
aucuuagaucuuggugaug

SEQ ID NO: 1537389 - RNA, 19 nt, Artificial Sequence
  Description of Artificial Sequence: Synthetic oligonucleotide
  Antisense strand to SEQ ID NO: 1537388
caucaccaagaucuaagau

SEQ ID NO: 1537390 - RNA, 19 nt, Artificial Sequence
  Description of Artificial Sequence: Synthetic oligonucleotide
  Sense strand starting at position 3660 of SEQ ID NO: 1245113
acauuugcuugcucaugau

SEQ ID NO: 1537391 - RNA, 19 nt, Artificial Sequence
  Description of Artificial Sequence: Synthetic oligonucleotide
  Antisense strand to SEQ ID NO: 1537390
aucaugagcaagcaaaugu

SEQ ID NO: 1537392 - RNA, 19 nt, Artificial Sequence
  Description of Artificial Sequence: Synthetic oligonucleotide
  Sense strand starting at position 3664 of SEQ ID NO: 1245113
uugcuugcucaugauauau

SEQ ID NO: 1537393 - RNA, 19 nt, Artificial Sequence
  Description of Artificial Sequence: Synthetic oligonucleotide
  Antisense strand to SEQ ID NO: 1537392
auauaucaugagcaagcaa

SEQ ID NO: 1537394 - RNA, 19 nt, Artificial Sequence
  Description of Artificial Sequence: Synthetic oligonucleotide
  Sense strand starting at position 3744 of SEQ ID NO: 1245113
gaagcuaggucaguaaauu

SEQ ID NO: 1537395 - RNA, 19 nt, Artificial Sequence
  Description of Artificial Sequence: Synthetic oligonucleotide
  Antisense strand to SEQ ID NO: 1537394
aauuuacugaccuagcuuc

SEQ ID NO: 1537396 - RNA, 19 nt, Artificial Sequence
  Description of Artificial Sequence: Synthetic oligonucleotide
  Sense strand starting at position 3791 of SEQ ID NO: 1245113
uugguaucaggauagcauu

SEQ ID NO: 1537397 - RNA, 19 nt, Artificial Sequence
  Description of Artificial Sequence: Synthetic oligonucleotide
  Antisense strand to SEQ ID NO: 1537396
aaugcuauccugauaccaa

SEQ ID NO: 1537398 - RNA, 19 nt, Artificial Sequence
  Description of Artificial Sequence: Synthetic oligonucleotide
  Sense strand starting at position 3797 of SEQ ID NO: 1245113
ucaggauagcauuggccua

SEQ ID NO: 1537399 - RNA, 19 nt, Artificial Sequence
  Description of Artificial Sequence: Synthetic oligonucleotide
  Antisense strand to SEQ ID NO: 1537398
uaggccaaugcuauccuga

SEQ ID NO: 1537400 - RNA, 19 nt, Artificial Sequence
  Description of Artificial Sequence: Synthetic oligonucleotide
  Sense strand starting at position 3802 of SEQ ID NO: 1245113
auagcauuggccuaagaaa

SEQ ID NO: 1537401 - RNA, 19 nt, Artificial Sequence
  Description of Artificial Sequence: Synthetic oligonucleotide
  Antisense strand to SEQ ID NO: 1537400
uuucuuaggccaaugcuau

SEQ ID NO: 1537402 - RNA, 19 nt, Artificial Sequence
  Description of Artificial Sequence: Synthetic oligonucleotide
  Sense strand starting at position 3979 of SEQ ID NO: 1245113
ugggaugcucuugaagacu

SEQ ID NO: 1537403 - RNA, 19 nt, Artificial Sequence
  Description of Artificial Sequence: Synthetic oligonucleotide
  Antisense strand to SEQ ID NO: 1537402
agucuucaagagcauccca

SEQ ID NO: 1537404 - RNA, 19 nt, Artificial Sequence
  Description of Artificial Sequence: Synthetic oligonucleotide
  Sense strand starting at position 100 of SEQ ID NO: 1245114
auauucuucuggcaugaaa

SEQ ID NO: 1537405 - RNA, 19 nt, Artificial Sequence
  Description of Artificial Sequence: Synthetic oligonucleotide
  Antisense strand to SEQ ID NO: 1537404
uuucaugccagaagaauau

SEQ ID NO: 1537406 - RNA, 19 nt, Artificial Sequence
  Description of Artificial Sequence: Synthetic oligonucleotide
  Sense strand starting at position 102 of SEQ ID NO: 1245114
auucuucuggcaugaaaua

SEQ ID NO: 1537407 - RNA, 19 nt, Artificial Sequence
  Description of Artificial Sequence: Synthetic oligonucleotide
  Antisense strand to SEQ ID NO: 1537406
uauuucaugccagaagaau

SEQ ID NO: 1537408 - RNA, 19 nt, Artificial Sequence
  Description of Artificial Sequence: Synthetic oligonucleotide
  Sense strand starting at position 103 of SEQ ID NO: 1245114
uucuucuggcaugaaauaa

SEQ ID NO: 1537409 - RNA, 19 nt, Artificial Sequence
  Description of Artificial Sequence: Synthetic oligonucleotide
  Antisense strand to SEQ ID NO: 1537408
uuauuucaugccagaagaa

SEQ ID NO: 1537410 - RNA, 19 nt, Artificial Sequence
  Description of Artificial Sequence: Synthetic oligonucleotide
  Sense strand starting at position 224 of SEQ ID NO: 1245114
gaaagucguuuccugaacu

SEQ ID NO: 1537411 - RNA, 19 nt, Artificial Sequence
  Description of Artificial Sequence: Synthetic oligonucleotide
  Antisense strand to SEQ ID NO: 1537410
aguucaggaaacgacuuuc

SEQ ID NO: 1537412 - RNA, 19 nt, Artificial Sequence
  Description of Artificial Sequence: Synthetic oligonucleotide
  Sense strand starting at position 262 of SEQ ID NO: 1245114
cagucaaagggcuguucuu

SEQ ID NO: 1537413 - RNA, 19 nt, Artificial Sequence
  Description of Artificial Sequence: Synthetic oligonucleotide
  Antisense strand to SEQ ID NO: 1537412
aagaacagcccuuugacug

SEQ ID NO: 1537414 - RNA, 19 nt, Artificial Sequence
  Description of Artificial Sequence: Synthetic oligonucleotide
  Sense strand starting at position 316 of SEQ ID NO: 1245114
caggauguuugccuuagga

SEQ ID NO: 1537415 - RNA, 19 nt, Artificial Sequence
  Description of Artificial Sequence: Synthetic oligonucleotide
  Antisense strand to SEQ ID NO: 1537414
uccuaaggcaaacauccug

SEQ ID NO: 1537416 - RNA, 19 nt, Artificial Sequence
  Description of Artificial Sequence: Synthetic oligonucleotide
  Sense strand starting at position 476 of SEQ ID NO: 1245114
auaugucuuuccucguaau

SEQ ID NO: 1537417 - RNA, 19 nt, Artificial Sequence
  Description of Artificial Sequence: Synthetic oligonucleotide
  Antisense strand to SEQ ID NO: 1537416
auuacgaggaaagacauau

SEQ ID NO: 1537418 - RNA, 19 nt, Artificial Sequence
  Description of Artificial Sequence: Synthetic oligonucleotide
  Sense strand starting at position 550 of SEQ ID NO: 1245114
ggagucagucucuguguca

SEQ ID NO: 1537419 - RNA, 19 nt, Artificial Sequence
  Description of Artificial Sequence: Synthetic oligonucleotide
  Antisense strand to SEQ ID NO: 1537418
ugacacagagacugacucc

SEQ ID NO: 1537420 - RNA, 19 nt, Artificial Sequence
  Description of Artificial Sequence: Synthetic oligonucleotide
  Sense strand starting at position 580 of SEQ ID NO: 1245114
ugaagagucucgccuggau

SEQ ID NO: 1537421 - RNA, 19 nt, Artificial Sequence
  Description of Artificial Sequence: Synthetic oligonucleotide
  Antisense strand to SEQ ID NO: 1537420
auccaggcgagacucuuca

SEQ ID NO: 1537422 - RNA, 19 nt, Artificial Sequence
  Description of Artificial Sequence: Synthetic oligonucleotide
  Sense strand starting at position 880 of SEQ ID NO: 1245114
agccgaaguccugaaagca

SEQ ID NO: 1537423 - RNA, 19 nt, Artificial Sequence
  Description of Artificial Sequence: Synthetic oligonucleotide
  Antisense strand to SEQ ID NO: 1537422
ugcuuucaggacuucggcu

SEQ ID NO: 1537424 - RNA, 19 nt, Artificial Sequence
  Description of Artificial Sequence: Synthetic oligonucleotide
  Sense strand starting at position 957 of SEQ ID NO: 1245114
augaaagugcaauguguua

SEQ ID NO: 1537425 - RNA, 19 nt, Artificial Sequence
  Description of Artificial Sequence: Synthetic oligonucleotide
  Antisense strand to SEQ ID NO: 1537424
uaacacauugcacuuucau

SEQ ID NO: 1537426 - RNA, 19 nt, Artificial Sequence
  Description of Artificial Sequence: Synthetic oligonucleotide
  Sense strand starting at position 1067 of SEQ ID NO: 1245114
cgcgauucuccgggaauug

SEQ ID NO: 1537427 - RNA, 19 nt, Artificial Sequence
  Description of Artificial Sequence: Synthetic oligonucleotide
  Antisense strand to SEQ ID NO: 1537426
caauucccggagaaucgcg

SEQ ID NO: 1537428 - RNA, 19 nt, Artificial Sequence
  Description of Artificial Sequence: Synthetic oligonucleotide
  Sense strand starting at position 1262 of SEQ ID NO: 1245114
gcaacaacuugcuuugcaa

SEQ ID NO: 1537429 - RNA, 19 nt, Artificial Sequence
  Description of Artificial Sequence: Synthetic oligonucleotide
  Antisense strand to SEQ ID NO: 1537428
uugcaaagcaaguuguugc

SEQ ID NO: 1537430 - RNA, 19 nt, Artificial Sequence
  Description of Artificial Sequence: Synthetic oligonucleotide
  Sense strand starting at position 1363 of SEQ ID NO: 1245114
ugcgaauuugaccggugga

SEQ ID NO: 1537431 - RNA, 19 nt, Artificial Sequence
  Description of Artificial Sequence: Synthetic oligonucleotide
  Antisense strand to SEQ ID NO: 1537430
uccaccggucaaauucgca

SEQ ID NO: 1537432 - RNA, 19 nt, Artificial Sequence
  Description of Artificial Sequence: Synthetic oligonucleotide
  Sense strand starting at position 1364 of SEQ ID NO: 1245114
gcgaauuugaccgguggac

SEQ ID NO: 1537433 - RNA, 19 nt, Artificial Sequence
  Description of Artificial Sequence: Synthetic oligonucleotide
  Antisense strand to SEQ ID NO: 1537432
guccaccggucaaauucgc

SEQ ID NO: 1537434 - RNA, 19 nt, Artificial Sequence
  Description of Artificial Sequence: Synthetic oligonucleotide
  Sense strand starting at position 1942 of SEQ ID NO: 1245114
ggccguguccuggagauug

SEQ ID NO: 1537435 - RNA, 19 nt, Artificial Sequence
  Description of Artificial Sequence: Synthetic oligonucleotide
  Antisense strand to SEQ ID NO: 1537434
caaucuccaggacacggcc

SEQ ID NO: 1537436 - RNA, 19 nt, Artificial Sequence
  Description of Artificial Sequence: Synthetic oligonucleotide
  Sense strand starting at position 2402 of SEQ ID NO: 1245114
gcagcaucuguggagaauu

SEQ ID NO: 1537437 - RNA, 19 nt, Artificial Sequence
  Description of Artificial Sequence: Synthetic oligonucleotide
  Antisense strand to SEQ ID NO: 1537436
aauucuccacagaugcugc

SEQ ID NO: 1537438 - RNA, 19 nt, Artificial Sequence
  Description of Artificial Sequence: Synthetic oligonucleotide
  Sense strand starting at position 2497 of SEQ ID NO: 1245114
gacacuuuguaucacagga

SEQ ID NO: 1537439 - RNA, 19 nt, Artificial Sequence
  Description of Artificial Sequence: Synthetic oligonucleotide
  Antisense strand to SEQ ID NO: 1537438
uccugugauacaaaguguc

SEQ ID NO: 1537440 - RNA, 19 nt, Artificial Sequence
  Description of Artificial Sequence: Synthetic oligonucleotide
  Sense strand starting at position 2563 of SEQ ID NO: 1245114
cagggucccuaggagaauu

SEQ ID NO: 1537441 - RNA, 19 nt, Artificial Sequence
  Description of Artificial Sequence: Synthetic oligonucleotide
  Antisense strand to SEQ ID NO: 1537440
aauucuccuagggacccug

SEQ ID NO: 1537442 - RNA, 19 nt, Artificial Sequence
  Description of Artificial Sequence: Synthetic oligonucleotide
  Sense strand starting at position 2675 of SEQ ID NO: 1245114
accguuaucccucagagcu

SEQ ID NO: 1537443 - RNA, 19 nt, Artificial Sequence
  Description of Artificial Sequence: Synthetic oligonucleotide
  Antisense strand to SEQ ID NO: 1537442
agcucugagggauaacggu

SEQ ID NO: 1537444 - RNA, 19 nt, Artificial Sequence
  Description of Artificial Sequence: Synthetic oligonucleotide
  Sense strand starting at position 2721 of SEQ ID NO: 1245114
cggguucgaugacacuaua

SEQ ID NO: 1537445 - RNA, 19 nt, Artificial Sequence
  Description of Artificial Sequence: Synthetic oligonucleotide
  Antisense strand to SEQ ID NO: 1537444
uauagugucaucgaacccg

SEQ ID NO: 1537446 - RNA, 19 nt, Artificial Sequence
  Description of Artificial Sequence: Synthetic oligonucleotide
  Sense strand starting at position 2724 of SEQ ID NO: 1245114
guucgaugacacuauauau

SEQ ID NO: 1537447 - RNA, 19 nt, Artificial Sequence
  Description of Artificial Sequence: Synthetic oligonucleotide
  Antisense strand to SEQ ID NO: 1537446
auauauagugucaucgaac

SEQ ID NO: 1537448 - RNA, 19 nt, Artificial Sequence
  Description of Artificial Sequence: Synthetic oligonucleotide
  Sense strand starting at position 2948 of SEQ ID NO: 1245114
cggcgugagugggugaauu

SEQ ID NO: 1537449 - RNA, 19 nt, Artificial Sequence
  Description of Artificial Sequence: Synthetic oligonucleotide
  Antisense strand to SEQ ID NO: 1537448
aauucacccacucacgccg

SEQ ID NO: 1537450 - RNA, 19 nt, Artificial Sequence
  Description of Artificial Sequence: Synthetic oligonucleotide
  Sense strand starting at position 2959 of SEQ ID NO: 1245114
ggugaauugcgaugugggu

SEQ ID NO: 1537451 - RNA, 19 nt, Artificial Sequence
  Description of Artificial Sequence: Synthetic oligonucleotide
  Antisense strand to SEQ ID NO: 1537450
acccacaucgcaauucacc

SEQ ID NO: 1537452 - RNA, 19 nt, Artificial Sequence
  Description of Artificial Sequence: Synthetic oligonucleotide
  Sense strand starting at position 3021 of SEQ ID NO: 1245114
cugcgcugcccacuuaauu

SEQ ID NO: 1537453 - RNA, 19 nt, Artificial Sequence
  Description of Artificial Sequence: Synthetic oligonucleotide
  Antisense strand to SEQ ID NO: 1537452
aauuaagugggcagcgcag

SEQ ID NO: 1537454 - RNA, 19 nt, Artificial Sequence
  Description of Artificial Sequence: Synthetic oligonucleotide
  Sense strand starting at position 3059 of SEQ ID NO: 1245114
aaauaaucgugguuaauca

SEQ ID NO: 1537455 - RNA, 19 nt, Artificial Sequence
  Description of Artificial Sequence: Synthetic oligonucleotide
  Antisense strand to SEQ ID NO: 1537454
ugauuaaccacgauuauuu

SEQ ID NO: 1537456 - RNA, 19 nt, Artificial Sequence
  Description of Artificial Sequence: Synthetic oligonucleotide
  Sense strand starting at position 3067 of SEQ ID NO: 1245114
gugguuaaucacugccuua

SEQ ID NO: 1537457 - RNA, 19 nt, Artificial Sequence
  Description of Artificial Sequence: Synthetic oligonucleotide
  Antisense strand to SEQ ID NO: 1537456
uaaggcagugauuaaccac

SEQ ID NO: 1537458 - RNA, 19 nt, Artificial Sequence
  Description of Artificial Sequence: Synthetic oligonucleotide
  Sense strand starting at position 3123 of SEQ ID NO: 1245114
uggagaauguccuuuguuc

SEQ ID NO: 1537459 - RNA, 19 nt, Artificial Sequence
  Description of Artificial Sequence: Synthetic oligonucleotide
  Antisense strand to SEQ ID NO: 1537458
gaacaaaggacauucucca

SEQ ID NO: 1537460 - RNA, 19 nt, Artificial Sequence
  Description of Artificial Sequence: Synthetic oligonucleotide
  Sense strand starting at position 3125 of SEQ ID NO: 1245114
gagaauguccuuuguucua

SEQ ID NO: 1537461 - RNA, 19 nt, Artificial Sequence
  Description of Artificial Sequence: Synthetic oligonucleotide
  Antisense strand to SEQ ID NO: 1537460
uagaacaaaggacauucuc

SEQ ID NO: 1537462 - RNA, 19 nt, Artificial Sequence
  Description of Artificial Sequence: Synthetic oligonucleotide
  Sense strand starting at position 3143 of SEQ ID NO: 1245114
acagcuuccugagggaaua

SEQ ID NO: 1537463 - RNA, 19 nt, Artificial Sequence
  Description of Artificial Sequence: Synthetic oligonucleotide
  Antisense strand to SEQ ID NO: 1537462
uauucccucaggaagcugu

SEQ ID NO: 1537464 - RNA, 19 nt, Artificial Sequence
  Description of Artificial Sequence: Synthetic oligonucleotide
  Sense strand starting at position 3144 of SEQ ID NO: 1245114
cagcuuccugagggaauau

SEQ ID NO: 1537465 - RNA, 19 nt, Artificial Sequence
  Description of Artificial Sequence: Synthetic oligonucleotide
  Antisense strand to SEQ ID NO: 1537464
auauucccucaggaagcug

SEQ ID NO: 1537466 - RNA, 19 nt, Artificial Sequence
  Description of Artificial Sequence: Synthetic oligonucleotide
  Sense strand starting at position 3153 of SEQ ID NO: 1245114
gagggaauauuaugccaaa

SEQ ID NO: 1537467 - RNA, 19 nt, Artificial Sequence
  Description of Artificial Sequence: Synthetic oligonucleotide
  Antisense strand to SEQ ID NO: 1537466
uuuggcauaauauucccuc

SEQ ID NO: 1537468 - RNA, 19 nt, Artificial Sequence
  Description of Artificial Sequence: Synthetic oligonucleotide
  Sense strand starting at position 3232 of SEQ ID NO: 1245114
uugugugaugucuaauuau

SEQ ID NO: 1537469 - RNA, 19 nt, Artificial Sequence
  Description of Artificial Sequence: Synthetic oligonucleotide
  Antisense strand to SEQ ID NO: 1537468
auaauuagacaucacacaa

SEQ ID NO: 1537470 - RNA, 19 nt, Artificial Sequence
  Description of Artificial Sequence: Synthetic oligonucleotide
  Sense strand starting at position 3412 of SEQ ID NO: 1245114
ggagguaaauucucagcau

SEQ ID NO: 1537471 - RNA, 19 nt, Artificial Sequence
  Description of Artificial Sequence: Synthetic oligonucleotide
  Antisense strand to SEQ ID NO: 1537470
augcugagaauuuaccucc

SEQ ID NO: 1537472 - RNA, 19 nt, Artificial Sequence
  Description of Artificial Sequence: Synthetic oligonucleotide
  Sense strand starting at position 3413 of SEQ ID NO: 1245114
gagguaaauucucagcauu

SEQ ID NO: 1537473 - RNA, 19 nt, Artificial Sequence
  Description of Artificial Sequence: Synthetic oligonucleotide
  Antisense strand to SEQ ID NO: 1537472
aaugcugagaauuuaccuc

SEQ ID NO: 1537474 - RNA, 19 nt, Artificial Sequence
  Description of Artificial Sequence: Synthetic oligonucleotide
  Sense strand starting at position 3415 of SEQ ID NO: 1245114
gguaaauucucagcauugu

SEQ ID NO: 1537475 - RNA, 19 nt, Artificial Sequence
  Description of Artificial Sequence: Synthetic oligonucleotide
  Antisense strand to SEQ ID NO: 1537474
acaaugcugagaauuuacc

SEQ ID NO: 1537476 - RNA, 19 nt, Artificial Sequence
  Description of Artificial Sequence: Synthetic oligonucleotide
  Sense strand starting at position 3416 of SEQ ID NO: 1245114
guaaauucucagcauugua

SEQ ID NO: 1537477 - RNA, 19 nt, Artificial Sequence
  Description of Artificial Sequence: Synthetic oligonucleotide
  Antisense strand to SEQ ID NO: 1537476
uacaaugcugagaauuuac

SEQ ID NO: 1537478 - RNA, 19 nt, Artificial Sequence
  Description of Artificial Sequence: Synthetic oligonucleotide
  Sense strand starting at position 3432 of SEQ ID NO: 1245114
guaauaucaugagcaccga

SEQ ID NO: 1537479 - RNA, 19 nt, Artificial Sequence
  Description of Artificial Sequence: Synthetic oligonucleotide
  Antisense strand to SEQ ID NO: 1537478
ucggugcucaugauauuac

SEQ ID NO: 1537480 - RNA, 19 nt, Artificial Sequence
  Description of Artificial Sequence: Synthetic oligonucleotide
  Sense strand starting at position 3450 of SEQ ID NO: 1245114
acgcuuuagcaaugaucua

SEQ ID NO: 1537481 - RNA, 19 nt, Artificial Sequence
  Description of Artificial Sequence: Synthetic oligonucleotide
  Antisense strand to SEQ ID NO: 1537480
uagaucauugcuaaagcgu

SEQ ID NO: 1537482 - RNA, 19 nt, Artificial Sequence
  Description of Artificial Sequence: Synthetic oligonucleotide
  Sense strand starting at position 3677 of SEQ ID NO: 1245114
ucuggaggcugagacauaa

SEQ ID NO: 1537483 - RNA, 19 nt, Artificial Sequence
  Description of Artificial Sequence: Synthetic oligonucleotide
  Antisense strand to SEQ ID NO: 1537482
uuaugucucagccuccaga

SEQ ID NO: 1537484 - RNA, 19 nt, Artificial Sequence
  Description of Artificial Sequence: Synthetic oligonucleotide
  Sense strand starting at position 80 of SEQ ID NO: 1245115
ucuacuggccacugagaga

SEQ ID NO: 1537485 - RNA, 19 nt, Artificial Sequence
  Description of Artificial Sequence: Synthetic oligonucleotide
  Antisense strand to SEQ ID NO: 1537484
ucucucaguggccaguaga

SEQ ID NO: 1537486 - RNA, 19 nt, Artificial Sequence
  Description of Artificial Sequence: Synthetic oligonucleotide
  Sense strand starting at position 159 of SEQ ID NO: 1245115
auuggaauucugugagauc

SEQ ID NO: 1537487 - RNA, 19 nt, Artificial Sequence
  Description of Artificial Sequence: Synthetic oligonucleotide
  Antisense strand to SEQ ID NO: 1537486
gaucucacagaauuccaau

SEQ ID NO: 1537488 - RNA, 19 nt, Artificial Sequence
  Description of Artificial Sequence: Synthetic oligonucleotide
  Sense strand starting at position 344 of SEQ ID NO: 1245115
accacugagucuuucugga

SEQ ID NO: 1537489 - RNA, 19 nt, Artificial Sequence
  Description of Artificial Sequence: Synthetic oligonucleotide
  Antisense strand to SEQ ID NO: 1537488
uccagaaagacucaguggu

SEQ ID NO: 1537490 - RNA, 19 nt, Artificial Sequence
  Description of Artificial Sequence: Synthetic oligonucleotide
  Sense strand starting at position 473 of SEQ ID NO: 1245115
gcugaucacugauuccaca

SEQ ID NO: 1537491 - RNA, 19 nt, Artificial Sequence
  Description of Artificial Sequence: Synthetic oligonucleotide
  Antisense strand to SEQ ID NO: 1537490
uguggaaucagugaucagc

SEQ ID NO: 1537492 - RNA, 19 nt, Artificial Sequence
  Description of Artificial Sequence: Synthetic oligonucleotide
  Sense strand starting at position 678 of SEQ ID NO: 1245115
gaaugugguggaugggauu

SEQ ID NO: 1537493 - RNA, 19 nt, Artificial Sequence
  Description of Artificial Sequence: Synthetic oligonucleotide
  Antisense strand to SEQ ID NO: 1537492
aaucccauccaccacauuc

SEQ ID NO: 1537494 - RNA, 19 nt, Artificial Sequence
  Description of Artificial Sequence: Synthetic oligonucleotide
  Sense strand starting at position 733 of SEQ ID NO: 1245115
aagucauuagcagaacugu

SEQ ID NO: 1537495 - RNA, 19 nt, Artificial Sequence
  Description of Artificial Sequence: Synthetic oligonucleotide
  Antisense strand to SEQ ID NO: 1537494
acaguucugcuaaugacuu

SEQ ID NO: 1537496 - RNA, 19 nt, Artificial Sequence
  Description of Artificial Sequence: Synthetic oligonucleotide
  Sense strand starting at position 761 of SEQ ID NO: 1245115
ucauaaauugcauguaaag

SEQ ID NO: 1537497 - RNA, 19 nt, Artificial Sequence
  Description of Artificial Sequence: Synthetic oligonucleotide
  Antisense strand to SEQ ID NO: 1537496
cuuuacaugcaauuuauga

SEQ ID NO: 1537498 - RNA, 19 nt, Artificial Sequence
  Description of Artificial Sequence: Synthetic oligonucleotide
  Sense strand starting at position 1050 of SEQ ID NO: 1245115
ucagaauccugguccugga

SEQ ID NO: 1537499 - RNA, 19 nt, Artificial Sequence
  Description of Artificial Sequence: Synthetic oligonucleotide
  Antisense strand to SEQ ID NO: 1537498
uccaggaccaggauucuga

SEQ ID NO: 1537500 - RNA, 19 nt, Artificial Sequence
  Description of Artificial Sequence: Synthetic oligonucleotide
  Sense strand starting at position 1133 of SEQ ID NO: 1245115
aggagaucaugugucaauu

SEQ ID NO: 1537501 - RNA, 19 nt, Artificial Sequence
  Description of Artificial Sequence: Synthetic oligonucleotide
  Antisense strand to SEQ ID NO: 1537500
aauugacacaugaucuccu

SEQ ID NO: 1537502 - RNA, 19 nt, Artificial Sequence
  Description of Artificial Sequence: Synthetic oligonucleotide
  Sense strand starting at position 1177 of SEQ ID NO: 1245115
gacacagauuuguagauau

SEQ ID NO: 1537503 - RNA, 19 nt, Artificial Sequence
  Description of Artificial Sequence: Synthetic oligonucleotide
  Antisense strand to SEQ ID NO: 1537502
auaucuacaaaucuguguc

SEQ ID NO: 1537504 - RNA, 19 nt, Artificial Sequence
  Description of Artificial Sequence: Synthetic oligonucleotide
  Sense strand starting at position 1219 of SEQ ID NO: 1245115
acuaucugugcacacauua

SEQ ID NO: 1537505 - RNA, 19 nt, Artificial Sequence
  Description of Artificial Sequence: Synthetic oligonucleotide
  Antisense strand to SEQ ID NO: 1537504
uaaugugugcacagauagu

SEQ ID NO: 1537506 - RNA, 19 nt, Artificial Sequence
  Description of Artificial Sequence: Synthetic oligonucleotide
  Sense strand starting at position 1263 of SEQ ID NO: 1245115
agccauuauuuagaggaga

SEQ ID NO: 1537507 - RNA, 19 nt, Artificial Sequence
  Description of Artificial Sequence: Synthetic oligonucleotide
  Antisense strand to SEQ ID NO: 1537506
ucuccucuaaauaauggcu

SEQ ID NO: 1537508 - RNA, 19 nt, Artificial Sequence
  Description of Artificial Sequence: Synthetic oligonucleotide
  Sense strand starting at position 1489 of SEQ ID NO: 1245115
gagugcuuuccuucucggu

SEQ ID NO: 1537509 - RNA, 19 nt, Artificial Sequence
  Description of Artificial Sequence: Synthetic oligonucleotide
  Antisense strand to SEQ ID NO: 1537508
accgagaaggaaagcacuc

SEQ ID NO: 1537510 - RNA, 19 nt, Artificial Sequence
  Description of Artificial Sequence: Synthetic oligonucleotide
  Sense strand starting at position 1589 of SEQ ID NO: 1245115
guuucuacggcugaaugaa

SEQ ID NO: 1537511 - RNA, 19 nt, Artificial Sequence
  Description of Artificial Sequence: Synthetic oligonucleotide
  Antisense strand to SEQ ID NO: 1537510
uucauucagccguagaaac

SEQ ID NO: 1537512 - RNA, 19 nt, Artificial Sequence
  Description of Artificial Sequence: Synthetic oligonucleotide
  Sense strand starting at position 1642 of SEQ ID NO: 1245115
agguuaacaguuggaaauc

SEQ ID NO: 1537513 - RNA, 19 nt, Artificial Sequence
  Description of Artificial Sequence: Synthetic oligonucleotide
  Antisense strand to SEQ ID NO: 1537512
gauuuccaacuguuaaccu

SEQ ID NO: 1537514 - RNA, 19 nt, Artificial Sequence
  Description of Artificial Sequence: Synthetic oligonucleotide
  Sense strand starting at position 1675 of SEQ ID NO: 1245115
ucugaauggcuuuauaugu

SEQ ID NO: 1537515 - RNA, 19 nt, Artificial Sequence
  Description of Artificial Sequence: Synthetic oligonucleotide
  Antisense strand to SEQ ID NO: 1537514
acauauaaagccauucaga

SEQ ID NO: 1537516 - RNA, 19 nt, Artificial Sequence
  Description of Artificial Sequence: Synthetic oligonucleotide
  Sense strand starting at position 1688 of SEQ ID NO: 1245115
auaugucagucacucaaca

SEQ ID NO: 1537517 - RNA, 19 nt, Artificial Sequence
  Description of Artificial Sequence: Synthetic oligonucleotide
  Antisense strand to SEQ ID NO: 1537516
uguugagugacugacauau

SEQ ID NO: 1537518 - RNA, 19 nt, Artificial Sequence
  Description of Artificial Sequence: Synthetic oligonucleotide
  Sense strand starting at position 1838 of SEQ ID NO: 1245115
agcacuuacccugagaugu

SEQ ID NO: 1537519 - RNA, 19 nt, Artificial Sequence
  Description of Artificial Sequence: Synthetic oligonucleotide
  Antisense strand to SEQ ID NO: 1537518
acaucucaggguaagugcu

SEQ ID NO: 1537520 - RNA, 19 nt, Artificial Sequence
  Description of Artificial Sequence: Synthetic oligonucleotide
  Sense strand starting at position 1849 of SEQ ID NO: 1245115
ugagaugugccauaaaugc

SEQ ID NO: 1537521 - RNA, 19 nt, Artificial Sequence
  Description of Artificial Sequence: Synthetic oligonucleotide
  Antisense strand to SEQ ID NO: 1537520
gcauuuauggcacaucuca

SEQ ID NO: 1537522 - RNA, 19 nt, Artificial Sequence
  Description of Artificial Sequence: Synthetic oligonucleotide
  Sense strand starting at position 2155 of SEQ ID NO: 1245115
uuugauuccuaagucaaug

SEQ ID NO: 1537523 - RNA, 19 nt, Artificial Sequence
  Description of Artificial Sequence: Synthetic oligonucleotide
  Antisense strand to SEQ ID NO: 1537522
cauugacuuaggaaucaaa

SEQ ID NO: 1537524 - RNA, 19 nt, Artificial Sequence
  Description of Artificial Sequence: Synthetic oligonucleotide
  Sense strand starting at position 2221 of SEQ ID NO: 1245115
auggcaauggccuaaauua

SEQ ID NO: 1537525 - RNA, 19 nt, Artificial Sequence
  Description of Artificial Sequence: Synthetic oligonucleotide
  Antisense strand to SEQ ID NO: 1537524
uaauuuaggccauugccau

SEQ ID NO: 1537526 - RNA, 19 nt, Artificial Sequence
  Description of Artificial Sequence: Synthetic oligonucleotide
  Sense strand starting at position 2252 of SEQ ID NO: 1245115
gugauaauuccgcaaagag

SEQ ID NO: 1537527 - RNA, 19 nt, Artificial Sequence
  Description of Artificial Sequence: Synthetic oligonucleotide
  Antisense strand to SEQ ID NO: 1537526
cucuuugcggaauuaucac

SEQ ID NO: 1537528 - RNA, 19 nt, Artificial Sequence
  Description of Artificial Sequence: Synthetic oligonucleotide
  Sense strand starting at position 2281 of SEQ ID NO: 1245115
cuuugcuaguauuuagacu

SEQ ID NO: 1537529 - RNA, 19 nt, Artificial Sequence
  Description of Artificial Sequence: Synthetic oligonucleotide
  Antisense strand to SEQ ID NO: 1537528
agucuaaauacuagcaaag

SEQ ID NO: 1537530 - RNA, 19 nt, Artificial Sequence
  Description of Artificial Sequence: Synthetic oligonucleotide
  Sense strand starting at position 2294 of SEQ ID NO: 1245115
uagacuuuauuauugguga

SEQ ID NO: 1537531 - RNA, 19 nt, Artificial Sequence
  Description of Artificial Sequence: Synthetic oligonucleotide
  Antisense strand to SEQ ID NO: 1537530
ucaccaauaauaaagucua

SEQ ID NO: 1537532 - RNA, 19 nt, Artificial Sequence
  Description of Artificial Sequence: Synthetic oligonucleotide
  Sense strand starting at position 2327 of SEQ ID NO: 1245115
uuuguuagucuugaaucaa

SEQ ID NO: 1537533 - RNA, 19 nt, Artificial Sequence
  Description of Artificial Sequence: Synthetic oligonucleotide
  Antisense strand to SEQ ID NO: 1537532
uugauucaagacuaacaaa

SEQ ID NO: 1537534 - RNA, 19 nt, Artificial Sequence
  Description of Artificial Sequence: Synthetic oligonucleotide
  Sense strand starting at position 2350 of SEQ ID NO: 1245115
gggacauaaucaguuguuu

SEQ ID NO: 1537535 - RNA, 19 nt, Artificial Sequence
  Description of Artificial Sequence: Synthetic oligonucleotide
  Antisense strand to SEQ ID NO: 1537534
aaacaacugauuauguccc

SEQ ID NO: 1537536 - RNA, 19 nt, Artificial Sequence
  Description of Artificial Sequence: Synthetic oligonucleotide
  Sense strand starting at position 2732 of SEQ ID NO: 1245115
gagguagagauugggcaua

SEQ ID NO: 1537537 - RNA, 19 nt, Artificial Sequence
  Description of Artificial Sequence: Synthetic oligonucleotide
  Antisense strand to SEQ ID NO: 1537536
uaugcccaaucucuaccuc

SEQ ID NO: 1537538 - RNA, 19 nt, Artificial Sequence
  Description of Artificial Sequence: Synthetic oligonucleotide
  Sense strand starting at position 2744 of SEQ ID NO: 1245115
gggcauaguaaaugaauac

SEQ ID NO: 1537539 - RNA, 19 nt, Artificial Sequence
  Description of Artificial Sequence: Synthetic oligonucleotide
  Antisense strand to SEQ ID NO: 1537538
guauucauuuacuaugccc

SEQ ID NO: 1537540 - RNA, 19 nt, Artificial Sequence
  Description of Artificial Sequence: Synthetic oligonucleotide
  Sense strand starting at position 2873 of SEQ ID NO: 1245115
ugugaaauaucucuagaau

SEQ ID NO: 1537541 - RNA, 19 nt, Artificial Sequence
  Description of Artificial Sequence: Synthetic oligonucleotide
  Antisense strand to SEQ ID NO: 1537540
auucuagagauauuucaca

SEQ ID NO: 1537542 - RNA, 19 nt, Artificial Sequence
  Description of Artificial Sequence: Synthetic oligonucleotide
  Sense strand starting at position 2934 of SEQ ID NO: 1245115
gcaucucugaaaugagagu

SEQ ID NO: 1537543 - RNA, 19 nt, Artificial Sequence
  Description of Artificial Sequence: Synthetic oligonucleotide
  Antisense strand to SEQ ID NO: 1537542
acucucauuucagagaugc

SEQ ID NO: 1537544 - RNA, 19 nt, Artificial Sequence
  Description of Artificial Sequence: Synthetic oligonucleotide
  Sense strand starting at position 2945 of SEQ ID NO: 1245115
augagaguccugggacuuc

SEQ ID NO: 1537545 - RNA, 19 nt, Artificial Sequence
  Description of Artificial Sequence: Synthetic oligonucleotide
  Antisense strand to SEQ ID NO: 1537544
gaagucccaggacucucau

SEQ ID NO: 1537546 - RNA, 19 nt, Artificial Sequence
  Description of Artificial Sequence: Synthetic oligonucleotide
  Sense strand starting at position 3119 of SEQ ID NO: 1245115
acuaguuagcagcaaauaa

SEQ ID NO: 1537547 - RNA, 19 nt, Artificial Sequence
  Description of Artificial Sequence: Synthetic oligonucleotide
  Antisense strand to SEQ ID NO: 1537546
uuauuugcugcuaacuagu

SEQ ID NO: 1537548 - RNA, 19 nt, Artificial Sequence
  Description of Artificial Sequence: Synthetic oligonucleotide
  Sense strand starting at position 3314 of SEQ ID NO: 1245115
auuuacuucuaagaaugag

SEQ ID NO: 1537549 - RNA, 19 nt, Artificial Sequence
  Description of Artificial Sequence: Synthetic oligonucleotide
  Antisense strand to SEQ ID NO: 1537548
cucauucuuagaaguaaau

SEQ ID NO: 1537550 - RNA, 19 nt, Artificial Sequence
  Description of Artificial Sequence: Synthetic oligonucleotide
  Sense strand starting at position 3320 of SEQ ID NO: 1245115
uucuaagaaugagccuaua

SEQ ID NO: 1537551 - RNA, 19 nt, Artificial Sequence
  Description of Artificial Sequence: Synthetic oligonucleotide
  Antisense strand to SEQ ID NO: 1537550
uauaggcucauucuuagaa

SEQ ID NO: 1537552 - RNA, 19 nt, Artificial Sequence
  Description of Artificial Sequence: Synthetic oligonucleotide
  Sense strand starting at position 3341 of SEQ ID NO: 1245115
ugaaauuauucccuuggag

SEQ ID NO: 1537553 - RNA, 19 nt, Artificial Sequence
  Description of Artificial Sequence: Synthetic oligonucleotide
  Antisense strand to SEQ ID NO: 1537552
cuccaagggaauaauuuca

SEQ ID NO: 1537554 - RNA, 19 nt, Artificial Sequence
  Description of Artificial Sequence: Synthetic oligonucleotide
  Sense strand starting at position 3456 of SEQ ID NO: 1245115
cccaguucucaggagguau

SEQ ID NO: 1537555 - RNA, 19 nt, Artificial Sequence
  Description of Artificial Sequence: Synthetic oligonucleotide
  Antisense strand to SEQ ID NO: 1537554
auaccuccugagaacuggg

SEQ ID NO: 1537556 - RNA, 19 nt, Artificial Sequence
  Description of Artificial Sequence: Synthetic oligonucleotide
  Sense strand starting at position 3691 of SEQ ID NO: 1245115
aaggauuaacuuggaguuu

SEQ ID NO: 1537557 - RNA, 19 nt, Artificial Sequence
  Description of Artificial Sequence: Synthetic oligonucleotide
  Antisense strand to SEQ ID NO: 1537556
aaacuccaaguuaauccuu

SEQ ID NO: 1537558 - RNA, 19 nt, Artificial Sequence
  Description of Artificial Sequence: Synthetic oligonucleotide
  Sense strand starting at position 3697 of SEQ ID NO: 1245115
uaacuuggaguuuaguuua

SEQ ID NO: 1537559 - RNA, 19 nt, Artificial Sequence
  Description of Artificial Sequence: Synthetic oligonucleotide
  Antisense strand to SEQ ID NO: 1537558
uaaacuaaacuccaaguua

SEQ ID NO: 1537560 - RNA, 19 nt, Artificial Sequence
  Description of Artificial Sequence: Synthetic oligonucleotide
  Sense strand starting at position 3822 of SEQ ID NO: 1245115
gucaaagacagaugagcua

SEQ ID NO: 1537561 - RNA, 19 nt, Artificial Sequence
  Description of Artificial Sequence: Synthetic oligonucleotide
  Antisense strand to SEQ ID NO: 1537560
uagcucaucugucuuugac

SEQ ID NO: 1537562 - RNA, 19 nt, Artificial Sequence
  Description of Artificial Sequence: Synthetic oligonucleotide
  Sense strand starting at position 3925 of SEQ ID NO: 1245115
gggugauguauacaugggu

SEQ ID NO: 1537563 - RNA, 19 nt, Artificial Sequence
  Description of Artificial Sequence: Synthetic oligonucleotide
  Antisense strand to SEQ ID NO: 1537562
acccauguauacaucaccc

SEQ ID NO: 1537564 - RNA, 19 nt, Artificial Sequence
  Description of Artificial Sequence: Synthetic oligonucleotide
  Sense strand starting at position 139 of SEQ ID NO: 1245116
gguugaauauaaguaaauc

SEQ ID NO: 1537565 - RNA, 19 nt, Artificial Sequence
  Description of Artificial Sequence: Synthetic oligonucleotide
  Antisense strand to SEQ ID NO: 1537564
gauuuacuuauauucaacc

SEQ ID NO: 1537566 - RNA, 19 nt, Artificial Sequence
  Description of Artificial Sequence: Synthetic oligonucleotide
  Sense strand starting at position 356 of SEQ ID NO: 1245116
cuggcaauacugcauauau

SEQ ID NO: 1537567 - RNA, 19 nt, Artificial Sequence
  Description of Artificial Sequence: Synthetic oligonucleotide
  Antisense strand to SEQ ID NO: 1537566
auauaugcaguauugccag

SEQ ID NO: 1537568 - RNA, 19 nt, Artificial Sequence
  Description of Artificial Sequence: Synthetic oligonucleotide
  Sense strand starting at position 475 of SEQ ID NO: 1245116
uagagacugugggugaaua

SEQ ID NO: 1537569 - RNA, 19 nt, Artificial Sequence
  Description of Artificial Sequence: Synthetic oligonucleotide
  Antisense strand to SEQ ID NO: 1537568
uauucacccacagucucua

SEQ ID NO: 1537570 - RNA, 19 nt, Artificial Sequence
  Description of Artificial Sequence: Synthetic oligonucleotide
  Sense strand starting at position 477 of SEQ ID NO: 1245116
gagacugugggugaauagu

SEQ ID NO: 1537571 - RNA, 19 nt, Artificial Sequence
  Description of Artificial Sequence: Synthetic oligonucleotide
  Antisense strand to SEQ ID NO: 1537570
acuauucacccacagucuc

SEQ ID NO: 1537572 - RNA, 19 nt, Artificial Sequence
  Description of Artificial Sequence: Synthetic oligonucleotide
  Sense strand starting at position 486 of SEQ ID NO: 1245116
ggugaauaguucucuuaaa

SEQ ID NO: 1537573 - RNA, 19 nt, Artificial Sequence
  Description of Artificial Sequence: Synthetic oligonucleotide
  Antisense strand to SEQ ID NO: 1537572
uuuaagagaacuauucacc

SEQ ID NO: 1537574 - RNA, 19 nt, Artificial Sequence
  Description of Artificial Sequence: Synthetic oligonucleotide
  Sense strand starting at position 487 of SEQ ID NO: 1245116
gugaauaguucucuuaaag

SEQ ID NO: 1537575 - RNA, 19 nt, Artificial Sequence
  Description of Artificial Sequence: Synthetic oligonucleotide
  Antisense strand to SEQ ID NO: 1537574
cuuuaagagaacuauucac

SEQ ID NO: 1537576 - RNA, 19 nt, Artificial Sequence
  Description of Artificial Sequence: Synthetic oligonucleotide
  Sense strand starting at position 496 of SEQ ID NO: 1245116
ucucuuaaagaauggugaa

SEQ ID NO: 1537577 - RNA, 19 nt, Artificial Sequence
  Description of Artificial Sequence: Synthetic oligonucleotide
  Antisense strand to SEQ ID NO: 1537576
uucaccauucuuuaagaga

SEQ ID NO: 1537578 - RNA, 19 nt, Artificial Sequence
  Description of Artificial Sequence: Synthetic oligonucleotide
  Sense strand starting at position 509 of SEQ ID NO: 1245116
ggugaaugauuaccuugau

SEQ ID NO: 1537579 - RNA, 19 nt, Artificial Sequence
  Description of Artificial Sequence: Synthetic oligonucleotide
  Antisense strand to SEQ ID NO: 1537578
aucaagguaaucauucacc

SEQ ID NO: 1537580 - RNA, 19 nt, Artificial Sequence
  Description of Artificial Sequence: Synthetic oligonucleotide
  Sense strand starting at position 510 of SEQ ID NO: 1245116
gugaaugauuaccuugauu

SEQ ID NO: 1537581 - RNA, 19 nt, Artificial Sequence
  Description of Artificial Sequence: Synthetic oligonucleotide
  Antisense strand to SEQ ID NO: 1537580
aaucaagguaaucauucac

SEQ ID NO: 1537582 - RNA, 19 nt, Artificial Sequence
  Description of Artificial Sequence: Synthetic oligonucleotide
  Sense strand starting at position 594 of SEQ ID NO: 1245116
ucuacuggccacugagaga

SEQ ID NO: 1537583 - RNA, 19 nt, Artificial Sequence
  Description of Artificial Sequence: Synthetic oligonucleotide
  Antisense strand to SEQ ID NO: 1537582
ucucucaguggccaguaga

SEQ ID NO: 1537584 - RNA, 19 nt, Artificial Sequence
  Description of Artificial Sequence: Synthetic oligonucleotide
  Sense strand starting at position 673 of SEQ ID NO: 1245116
auuggaauucugugagauc

SEQ ID NO: 1537585 - RNA, 19 nt, Artificial Sequence
  Description of Artificial Sequence: Synthetic oligonucleotide
  Antisense strand to SEQ ID NO: 1537584
gaucucacagaauuccaau

SEQ ID NO: 1537586 - RNA, 19 nt, Artificial Sequence
  Description of Artificial Sequence: Synthetic oligonucleotide
  Sense strand starting at position 858 of SEQ ID NO: 1245116
accacugagucuuucugga

SEQ ID NO: 1537587 - RNA, 19 nt, Artificial Sequence
  Description of Artificial Sequence: Synthetic oligonucleotide
  Antisense strand to SEQ ID NO: 1537586
uccagaaagacucaguggu

SEQ ID NO: 1537588 - RNA, 19 nt, Artificial Sequence
  Description of Artificial Sequence: Synthetic oligonucleotide
  Sense strand starting at position 1192 of SEQ ID NO: 1245116
gaaugugguggaugggauu

SEQ ID NO: 1537589 - RNA, 19 nt, Artificial Sequence
  Description of Artificial Sequence: Synthetic oligonucleotide
  Antisense strand to SEQ ID NO: 1537588
aaucccauccaccacauuc

SEQ ID NO: 1537590 - RNA, 19 nt, Artificial Sequence
  Description of Artificial Sequence: Synthetic oligonucleotide
  Sense strand starting at position 1247 of SEQ ID NO: 1245116
aagucauuagcagaacugu

SEQ ID NO: 1537591 - RNA, 19 nt, Artificial Sequence
  Description of Artificial Sequence: Synthetic oligonucleotide
  Antisense strand to SEQ ID NO: 1537590
acaguucugcuaaugacuu

SEQ ID NO: 1537592 - RNA, 19 nt, Artificial Sequence
  Description of Artificial Sequence: Synthetic oligonucleotide
  Sense strand starting at position 1275 of SEQ ID NO: 1245116
ucauaaauugcauguaaag

SEQ ID NO: 1537593 - RNA, 19 nt, Artificial Sequence
  Description of Artificial Sequence: Synthetic oligonucleotide
  Antisense strand to SEQ ID NO: 1537592
cuuuacaugcaauuuauga

SEQ ID NO: 1537594 - RNA, 19 nt, Artificial Sequence
  Description of Artificial Sequence: Synthetic oligonucleotide
  Sense strand starting at position 1564 of SEQ ID NO: 1245116
ucagaauccugguccugga

SEQ ID NO: 1537595 - RNA, 19 nt, Artificial Sequence
  Description of Artificial Sequence: Synthetic oligonucleotide
  Antisense strand to SEQ ID NO: 1537594
uccaggaccaggauucuga

SEQ ID NO: 1537596 - RNA, 19 nt, Artificial Sequence
  Description of Artificial Sequence: Synthetic oligonucleotide
  Sense strand starting at position 1647 of SEQ ID NO: 1245116
aggagaucaugugucaauu

SEQ ID NO: 1537597 - RNA, 19 nt, Artificial Sequence
  Description of Artificial Sequence: Synthetic oligonucleotide
  Antisense strand to SEQ ID NO: 1537596
aauugacacaugaucuccu

SEQ ID NO: 1537598 - RNA, 19 nt, Artificial Sequence
  Description of Artificial Sequence: Synthetic oligonucleotide
  Sense strand starting at position 1691 of SEQ ID NO: 1245116
gacacagauuuguagauau

SEQ ID NO: 1537599 - RNA, 19 nt, Artificial Sequence
  Description of Artificial Sequence: Synthetic oligonucleotide
  Antisense strand to SEQ ID NO: 1537598
auaucuacaaaucuguguc

SEQ ID NO: 1537600 - RNA, 19 nt, Artificial Sequence
  Description of Artificial Sequence: Synthetic oligonucleotide
  Sense strand starting at position 1733 of SEQ ID NO: 1245116
acuaucugugcacacauua

SEQ ID NO: 1537601 - RNA, 19 nt, Artificial Sequence
  Description of Artificial Sequence: Synthetic oligonucleotide
  Antisense strand to SEQ ID NO: 1537600
uaaugugugcacagauagu

SEQ ID NO: 1537602 - RNA, 19 nt, Artificial Sequence
  Description of Artificial Sequence: Synthetic oligonucleotide
  Sense strand starting at position 1777 of SEQ ID NO: 1245116
agccauuauuuagaggaga

SEQ ID NO: 1537603 - RNA, 19 nt, Artificial Sequence
  Description of Artificial Sequence: Synthetic oligonucleotide
  Antisense strand to SEQ ID NO: 1537602
ucuccucuaaauaauggcu

SEQ ID NO: 1537604 - RNA, 19 nt, Artificial Sequence
  Description of Artificial Sequence: Synthetic oligonucleotide
  Sense strand starting at position 2003 of SEQ ID NO: 1245116
gagugcuuuccuucucggu

SEQ ID NO: 1537605 - RNA, 19 nt, Artificial Sequence
  Description of Artificial Sequence: Synthetic oligonucleotide
  Antisense strand to SEQ ID NO: 1537604
accgagaaggaaagcacuc

SEQ ID NO: 1537606 - RNA, 19 nt, Artificial Sequence
  Description of Artificial Sequence: Synthetic oligonucleotide
  Sense strand starting at position 2156 of SEQ ID NO: 1245116
agguuaacaguuggaaauc

SEQ ID NO: 1537607 - RNA, 19 nt, Artificial Sequence
  Description of Artificial Sequence: Synthetic oligonucleotide
  Antisense strand to SEQ ID NO: 1537606
gauuuccaacuguuaaccu

SEQ ID NO: 1537608 - RNA, 19 nt, Artificial Sequence
  Description of Artificial Sequence: Synthetic oligonucleotide
  Sense strand starting at position 2202 of SEQ ID NO: 1245116
auaugucagucacucaaca

SEQ ID NO: 1537609 - RNA, 19 nt, Artificial Sequence
  Description of Artificial Sequence: Synthetic oligonucleotide
  Antisense strand to SEQ ID NO: 1537608
uguugagugacugacauau

SEQ ID NO: 1537610 - RNA, 19 nt, Artificial Sequence
  Description of Artificial Sequence: Synthetic oligonucleotide
  Sense strand starting at position 2352 of SEQ ID NO: 1245116
agcacuuacccugagaugu

SEQ ID NO: 1537611 - RNA, 19 nt, Artificial Sequence
  Description of Artificial Sequence: Synthetic oligonucleotide
  Antisense strand to SEQ ID NO: 1537610
acaucucaggguaagugcu

SEQ ID NO: 1537612 - RNA, 19 nt, Artificial Sequence
  Description of Artificial Sequence: Synthetic oligonucleotide
  Sense strand starting at position 2669 of SEQ ID NO: 1245116
uuugauuccuaagucaaug

SEQ ID NO: 1537613 - RNA, 19 nt, Artificial Sequence
  Description of Artificial Sequence: Synthetic oligonucleotide
  Antisense strand to SEQ ID NO: 1537612
cauugacuuaggaaucaaa

SEQ ID NO: 1537614 - RNA, 19 nt, Artificial Sequence
  Description of Artificial Sequence: Synthetic oligonucleotide
  Sense strand starting at position 2735 of SEQ ID NO: 1245116
auggcaauggccuaaauua

SEQ ID NO: 1537615 - RNA, 19 nt, Artificial Sequence
  Description of Artificial Sequence: Synthetic oligonucleotide
  Antisense strand to SEQ ID NO: 1537614
uaauuuaggccauugccau

SEQ ID NO: 1537616 - RNA, 19 nt, Artificial Sequence
  Description of Artificial Sequence: Synthetic oligonucleotide
  Sense strand starting at position 2766 of SEQ ID NO: 1245116
gugauaauuccgcaaagag

SEQ ID NO: 1537617 - RNA, 19 nt, Artificial Sequence
  Description of Artificial Sequence: Synthetic oligonucleotide
  Antisense strand to SEQ ID NO: 1537616
cucuuugcggaauuaucac

SEQ ID NO: 1537618 - RNA, 19 nt, Artificial Sequence
  Description of Artificial Sequence: Synthetic oligonucleotide
  Sense strand starting at position 2795 of SEQ ID NO: 1245116
cuuugcuaguauuuagacu

SEQ ID NO: 1537619 - RNA, 19 nt, Artificial Sequence
  Description of Artificial Sequence: Synthetic oligonucleotide
  Antisense strand to SEQ ID NO: 1537618
agucuaaauacuagcaaag

SEQ ID NO: 1537620 - RNA, 19 nt, Artificial Sequence
  Description of Artificial Sequence: Synthetic oligonucleotide
  Sense strand starting at position 2808 of SEQ ID NO: 1245116
uagacuuuauuauugguga

SEQ ID NO: 1537621 - RNA, 19 nt, Artificial Sequence
  Description of Artificial Sequence: Synthetic oligonucleotide
  Antisense strand to SEQ ID NO: 1537620
ucaccaauaauaaagucua

SEQ ID NO: 1537622 - RNA, 19 nt, Artificial Sequence
  Description of Artificial Sequence: Synthetic oligonucleotide
  Sense strand starting at position 2841 of SEQ ID NO: 1245116
uuuguuagucuugaaucaa

SEQ ID NO: 1537623 - RNA, 19 nt, Artificial Sequence
  Description of Artificial Sequence: Synthetic oligonucleotide
  Antisense strand to SEQ ID NO: 1537622
uugauucaagacuaacaaa

SEQ ID NO: 1537624 - RNA, 19 nt, Artificial Sequence
  Description of Artificial Sequence: Synthetic oligonucleotide
  Sense strand starting at position 2864 of SEQ ID NO: 1245116
gggacauaaucaguuguuu

SEQ ID NO: 1537625 - RNA, 19 nt, Artificial Sequence
  Description of Artificial Sequence: Synthetic oligonucleotide
  Antisense strand to SEQ ID NO: 1537624
aaacaacugauuauguccc

SEQ ID NO: 1537626 - RNA, 19 nt, Artificial Sequence
  Description of Artificial Sequence: Synthetic oligonucleotide
  Sense strand starting at position 3246 of SEQ ID NO: 1245116
gagguagagauugggcaua

SEQ ID NO: 1537627 - RNA, 19 nt, Artificial Sequence
  Description of Artificial Sequence: Synthetic oligonucleotide
  Antisense strand to SEQ ID NO: 1537626
uaugcccaaucucuaccuc

SEQ ID NO: 1537628 - RNA, 19 nt, Artificial Sequence
  Description of Artificial Sequence: Synthetic oligonucleotide
  Sense strand starting at position 3258 of SEQ ID NO: 1245116
gggcauaguaaaugaauac

SEQ ID NO: 1537629 - RNA, 19 nt, Artificial Sequence
  Description of Artificial Sequence: Synthetic oligonucleotide
  Antisense strand to SEQ ID NO: 1537628
guauucauuuacuaugccc

SEQ ID NO: 1537630 - RNA, 19 nt, Artificial Sequence
  Description of Artificial Sequence: Synthetic oligonucleotide
  Sense strand starting at position 3387 of SEQ ID NO: 1245116
ugugaaauaucucuagaau

SEQ ID NO: 1537631 - RNA, 19 nt, Artificial Sequence
  Description of Artificial Sequence: Synthetic oligonucleotide
  Antisense strand to SEQ ID NO: 1537630
auucuagagauauuucaca

SEQ ID NO: 1537632 - RNA, 19 nt, Artificial Sequence
  Description of Artificial Sequence: Synthetic oligonucleotide
  Sense strand starting at position 3459 of SEQ ID NO: 1245116
augagaguccugggacuuc

SEQ ID NO: 1537633 - RNA, 19 nt, Artificial Sequence
  Description of Artificial Sequence: Synthetic oligonucleotide
  Antisense strand to SEQ ID NO: 1537632
gaagucccaggacucucau

SEQ ID NO: 1537634 - RNA, 19 nt, Artificial Sequence
  Description of Artificial Sequence: Synthetic oligonucleotide
  Sense strand starting at position 3633 of SEQ ID NO: 1245116
acuaguuagcagcaaauaa

SEQ ID NO: 1537635 - RNA, 19 nt, Artificial Sequence
  Description of Artificial Sequence: Synthetic oligonucleotide
  Antisense strand to SEQ ID NO: 1537634
uuauuugcugcuaacuagu

SEQ ID NO: 1537636 - RNA, 19 nt, Artificial Sequence
  Description of Artificial Sequence: Synthetic oligonucleotide
  Sense strand starting at position 3828 of SEQ ID NO: 1245116
auuuacuucuaagaaugag

SEQ ID NO: 1537637 - RNA, 19 nt, Artificial Sequence
  Description of Artificial Sequence: Synthetic oligonucleotide
  Antisense strand to SEQ ID NO: 1537636
cucauucuuagaaguaaau

SEQ ID NO: 1537638 - RNA, 19 nt, Artificial Sequence
  Description of Artificial Sequence: Synthetic oligonucleotide
  Sense strand starting at position 3834 of SEQ ID NO: 1245116
uucuaagaaugagccuaua

SEQ ID NO: 1537639 - RNA, 19 nt, Artificial Sequence
  Description of Artificial Sequence: Synthetic oligonucleotide
  Antisense strand to SEQ ID NO: 1537638
uauaggcucauucuuagaa

SEQ ID NO: 1537640 - RNA, 19 nt, Artificial Sequence
  Description of Artificial Sequence: Synthetic oligonucleotide
  Sense strand starting at position 3855 of SEQ ID NO: 1245116
ugaaauuauucccuuggag

SEQ ID NO: 1537641 - RNA, 19 nt, Artificial Sequence
  Description of Artificial Sequence: Synthetic oligonucleotide
  Antisense strand to SEQ ID NO: 1537640
cuccaagggaauaauuuca

SEQ ID NO: 1537642 - RNA, 19 nt, Artificial Sequence
  Description of Artificial Sequence: Synthetic oligonucleotide
  Sense strand starting at position 3970 of SEQ ID NO: 1245116
cccaguucucaggagguau

SEQ ID NO: 1537643 - RNA, 19 nt, Artificial Sequence
  Description of Artificial Sequence: Synthetic oligonucleotide
  Antisense strand to SEQ ID NO: 1537642
auaccuccugagaacuggg

SEQ ID NO: 1537644 - RNA, 19 nt, Artificial Sequence
  Description of Artificial Sequence: Synthetic oligonucleotide
  Sense strand starting at position 93 of SEQ ID NO: 1245117
uggugacagacuugagcau

SEQ ID NO: 1537645 - RNA, 19 nt, Artificial Sequence
  Description of Artificial Sequence: Synthetic oligonucleotide
  Antisense strand to SEQ ID NO: 1537644
augcucaagucugucacca

SEQ ID NO: 1537646 - RNA, 19 nt, Artificial Sequence
  Description of Artificial Sequence: Synthetic oligonucleotide
  Sense strand starting at position 94 of SEQ ID NO: 1245117
ggugacagacuugagcauu

SEQ ID NO: 1537647 - RNA, 19 nt, Artificial Sequence
  Description of Artificial Sequence: Synthetic oligonucleotide
  Antisense strand to SEQ ID NO: 1537646
aaugcucaagucugucacc

SEQ ID NO: 1537648 - RNA, 19 nt, Artificial Sequence
  Description of Artificial Sequence: Synthetic oligonucleotide
  Sense strand starting at position 173 of SEQ ID NO: 1245117
guccuuauaugccuggaaa

SEQ ID NO: 1537649 - RNA, 19 nt, Artificial Sequence
  Description of Artificial Sequence: Synthetic oligonucleotide
  Antisense strand to SEQ ID NO: 1537648
uuuccaggcauauaaggac

SEQ ID NO: 1537650 - RNA, 19 nt, Artificial Sequence
  Description of Artificial Sequence: Synthetic oligonucleotide
  Sense strand starting at position 563 of SEQ ID NO: 1245117
gggauucuaccuuaucuuu

SEQ ID NO: 1537651 - RNA, 19 nt, Artificial Sequence
  Description of Artificial Sequence: Synthetic oligonucleotide
  Antisense strand to SEQ ID NO: 1537650
aaagauaagguagaauccc

SEQ ID NO: 1537652 - RNA, 19 nt, Artificial Sequence
  Description of Artificial Sequence: Synthetic oligonucleotide
  Sense strand starting at position 761 of SEQ ID NO: 1245117
guuggagaacagugaggua

SEQ ID NO: 1537653 - RNA, 19 nt, Artificial Sequence
  Description of Artificial Sequence: Synthetic oligonucleotide
  Antisense strand to SEQ ID NO: 1537652
uaccucacuguucuccaac

SEQ ID NO: 1537654 - RNA, 19 nt, Artificial Sequence
  Description of Artificial Sequence: Synthetic oligonucleotide
  Sense strand starting at position 808 of SEQ ID NO: 1245117
cuuucuuucccagacgagu

SEQ ID NO: 1537655 - RNA, 19 nt, Artificial Sequence
  Description of Artificial Sequence: Synthetic oligonucleotide
  Antisense strand to SEQ ID NO: 1537654
acucgucugggaaagaaag

SEQ ID NO: 1537656 - RNA, 19 nt, Artificial Sequence
  Description of Artificial Sequence: Synthetic oligonucleotide
  Sense strand starting at position 1009 of SEQ ID NO: 1245117
cucgucuggucacuagaau

SEQ ID NO: 1537657 - RNA, 19 nt, Artificial Sequence
  Description of Artificial Sequence: Synthetic oligonucleotide
  Antisense strand to SEQ ID NO: 1537656
auucuagugaccagacgag

SEQ ID NO: 1537658 - RNA, 19 nt, Artificial Sequence
  Description of Artificial Sequence: Synthetic oligonucleotide
  Sense strand starting at position 1010 of SEQ ID NO: 1245117
ucgucuggucacuagaaua

SEQ ID NO: 1537659 - RNA, 19 nt, Artificial Sequence
  Description of Artificial Sequence: Synthetic oligonucleotide
  Antisense strand to SEQ ID NO: 1537658
uauucuagugaccagacga

SEQ ID NO: 1537660 - RNA, 19 nt, Artificial Sequence
  Description of Artificial Sequence: Synthetic oligonucleotide
  Sense strand starting at position 1294 of SEQ ID NO: 1245117
ucgaauugagcuugggaag

SEQ ID NO: 1537661 - RNA, 19 nt, Artificial Sequence
  Description of Artificial Sequence: Synthetic oligonucleotide
  Antisense strand to SEQ ID NO: 1537660
cuucccaagcucaauucga

SEQ ID NO: 1537662 - RNA, 19 nt, Artificial Sequence
  Description of Artificial Sequence: Synthetic oligonucleotide
  Sense strand starting at position 2585 of SEQ ID NO: 1245117
cccguuaggaaguguaaau

SEQ ID NO: 1537663 - RNA, 19 nt, Artificial Sequence
  Description of Artificial Sequence: Synthetic oligonucleotide
  Antisense strand to SEQ ID NO: 1537662
auuuacacuuccuaacggg

SEQ ID NO: 1537664 - RNA, 19 nt, Artificial Sequence
  Description of Artificial Sequence: Synthetic oligonucleotide
  Sense strand starting at position 2752 of SEQ ID NO: 1245117
gguugauuuaugcaugcgu

SEQ ID NO: 1537665 - RNA, 19 nt, Artificial Sequence
  Description of Artificial Sequence: Synthetic oligonucleotide
  Antisense strand to SEQ ID NO: 1537664
acgcaugcauaaaucaacc

SEQ ID NO: 1537666 - RNA, 19 nt, Artificial Sequence
  Description of Artificial Sequence: Synthetic oligonucleotide
  Sense strand starting at position 2754 of SEQ ID NO: 1245117
uugauuuaugcaugcguuu

SEQ ID NO: 1537667 - RNA, 19 nt, Artificial Sequence
  Description of Artificial Sequence: Synthetic oligonucleotide
  Antisense strand to SEQ ID NO: 1537666
aaacgcaugcauaaaucaa

SEQ ID NO: 1537668 - RNA, 19 nt, Artificial Sequence
  Description of Artificial Sequence: Synthetic oligonucleotide
  Sense strand starting at position 2771 of SEQ ID NO: 1245117
uuucguuaacuaggacuga

SEQ ID NO: 1537669 - RNA, 19 nt, Artificial Sequence
  Description of Artificial Sequence: Synthetic oligonucleotide
  Antisense strand to SEQ ID NO: 1537668
ucaguccuaguuaacgaaa

SEQ ID NO: 1537670 - RNA, 19 nt, Artificial Sequence
  Description of Artificial Sequence: Synthetic oligonucleotide
  Sense strand starting at position 2775 of SEQ ID NO: 1245117
guuaacuaggacugaaagu

SEQ ID NO: 1537671 - RNA, 19 nt, Artificial Sequence
  Description of Artificial Sequence: Synthetic oligonucleotide
  Antisense strand to SEQ ID NO: 1537670
acuuucaguccuaguuaac

SEQ ID NO: 1537672 - RNA, 19 nt, Artificial Sequence
  Description of Artificial Sequence: Synthetic oligonucleotide
  Sense strand starting at position 2817 of SEQ ID NO: 1245117
uggagaacgugguuguuau

SEQ ID NO: 1537673 - RNA, 19 nt, Artificial Sequence
  Description of Artificial Sequence: Synthetic oligonucleotide
  Antisense strand to SEQ ID NO: 1537672
auaacaaccacguucucca

SEQ ID NO: 1537674 - RNA, 19 nt, Artificial Sequence
  Description of Artificial Sequence: Synthetic oligonucleotide
  Sense strand starting at position 2827 of SEQ ID NO: 1245117
gguuguuaucaauggauac

SEQ ID NO: 1537675 - RNA, 19 nt, Artificial Sequence
  Description of Artificial Sequence: Synthetic oligonucleotide
  Antisense strand to SEQ ID NO: 1537674
guauccauugauaacaacc

SEQ ID NO: 1537676 - RNA, 19 nt, Artificial Sequence
  Description of Artificial Sequence: Synthetic oligonucleotide
  Sense strand starting at position 2854 of SEQ ID NO: 1245117
uccugaaaugcucaacuug

SEQ ID NO: 1537677 - RNA, 19 nt, Artificial Sequence
  Description of Artificial Sequence: Synthetic oligonucleotide
  Antisense strand to SEQ ID NO: 1537676
caaguugagcauuucagga

SEQ ID NO: 1537678 - RNA, 19 nt, Artificial Sequence
  Description of Artificial Sequence: Synthetic oligonucleotide
  Sense strand starting at position 2981 of SEQ ID NO: 1245117
uugugaaagauucgaggaa

SEQ ID NO: 1537679 - RNA, 19 nt, Artificial Sequence
  Description of Artificial Sequence: Synthetic oligonucleotide
  Antisense strand to SEQ ID NO: 1537678
uuccucgaaucuuucacaa

SEQ ID NO: 1537680 - RNA, 19 nt, Artificial Sequence
  Description of Artificial Sequence: Synthetic oligonucleotide
  Sense strand starting at position 3073 of SEQ ID NO: 1245117
uucuaaggauguuucuaau

SEQ ID NO: 1537681 - RNA, 19 nt, Artificial Sequence
  Description of Artificial Sequence: Synthetic oligonucleotide
  Antisense strand to SEQ ID NO: 1537680
auuagaaacauccuuagaa

SEQ ID NO: 1537682 - RNA, 19 nt, Artificial Sequence
  Description of Artificial Sequence: Synthetic oligonucleotide
  Sense strand starting at position 3079 of SEQ ID NO: 1245117
ggauguuucuaauuaguaa

SEQ ID NO: 1537683 - RNA, 19 nt, Artificial Sequence
  Description of Artificial Sequence: Synthetic oligonucleotide
  Antisense strand to SEQ ID NO: 1537682
uuacuaauuagaaacaucc

SEQ ID NO: 1537684 - RNA, 19 nt, Artificial Sequence
  Description of Artificial Sequence: Synthetic oligonucleotide
  Sense strand starting at position 3123 of SEQ ID NO: 1245117
aggugacuccugcaagagu

SEQ ID NO: 1537685 - RNA, 19 nt, Artificial Sequence
  Description of Artificial Sequence: Synthetic oligonucleotide
  Antisense strand to SEQ ID NO: 1537684
acucuugcaggagucaccu

SEQ ID NO: 1537686 - RNA, 19 nt, Artificial Sequence
  Description of Artificial Sequence: Synthetic oligonucleotide
  Sense strand starting at position 3126 of SEQ ID NO: 1245117
ugacuccugcaagaguuau

SEQ ID NO: 1537687 - RNA, 19 nt, Artificial Sequence
  Description of Artificial Sequence: Synthetic oligonucleotide
  Antisense strand to SEQ ID NO: 1537686
auaacucuugcaggaguca

SEQ ID NO: 1537688 - RNA, 19 nt, Artificial Sequence
  Description of Artificial Sequence: Synthetic oligonucleotide
  Sense strand starting at position 3132 of SEQ ID NO: 1245117
cugcaagaguuauauuuag

SEQ ID NO: 1537689 - RNA, 19 nt, Artificial Sequence
  Description of Artificial Sequence: Synthetic oligonucleotide
  Antisense strand to SEQ ID NO: 1537688
cuaaauauaacucuugcag

SEQ ID NO: 1537690 - RNA, 19 nt, Artificial Sequence
  Description of Artificial Sequence: Synthetic oligonucleotide
  Sense strand starting at position 3164 of SEQ ID NO: 1245117
gaugauguuuguuuauuac

SEQ ID NO: 1537691 - RNA, 19 nt, Artificial Sequence
  Description of Artificial Sequence: Synthetic oligonucleotide
  Antisense strand to SEQ ID NO: 1537690
guaauaaacaaacaucauc

SEQ ID NO: 1537692 - RNA, 19 nt, Artificial Sequence
  Description of Artificial Sequence: Synthetic oligonucleotide
  Sense strand starting at position 3257 of SEQ ID NO: 1245117
aacuuacuugaaugagguu

SEQ ID NO: 1537693 - RNA, 19 nt, Artificial Sequence
  Description of Artificial Sequence: Synthetic oligonucleotide
  Antisense strand to SEQ ID NO: 1537692
aaccucauucaaguaaguu

SEQ ID NO: 1537694 - RNA, 19 nt, Artificial Sequence
  Description of Artificial Sequence: Synthetic oligonucleotide
  Sense strand starting at position 3326 of SEQ ID NO: 1245117
ugagcauccaagggagauu

SEQ ID NO: 1537695 - RNA, 19 nt, Artificial Sequence
  Description of Artificial Sequence: Synthetic oligonucleotide
  Antisense strand to SEQ ID NO: 1537694
aaucucccuuggaugcuca

SEQ ID NO: 1537696 - RNA, 19 nt, Artificial Sequence
  Description of Artificial Sequence: Synthetic oligonucleotide
  Sense strand starting at position 3347 of SEQ ID NO: 1245117
ugucucauccuuugcagaa

SEQ ID NO: 1537697 - RNA, 19 nt, Artificial Sequence
  Description of Artificial Sequence: Synthetic oligonucleotide
  Antisense strand to SEQ ID NO: 1537696
uucugcaaaggaugagaca

SEQ ID NO: 1537698 - RNA, 19 nt, Artificial Sequence
  Description of Artificial Sequence: Synthetic oligonucleotide
  Sense strand starting at position 3348 of SEQ ID NO: 1245117
gucucauccuuugcagaaa

SEQ ID NO: 1537699 - RNA, 19 nt, Artificial Sequence
  Description of Artificial Sequence: Synthetic oligonucleotide
  Antisense strand to SEQ ID NO: 1537698
uuucugcaaaggaugagac

SEQ ID NO: 1537700 - RNA, 19 nt, Artificial Sequence
  Description of Artificial Sequence: Synthetic oligonucleotide
  Sense strand starting at position 3382 of SEQ ID NO: 1245117
cguguaaaccaauggaaau

SEQ ID NO: 1537701 - RNA, 19 nt, Artificial Sequence
  Description of Artificial Sequence: Synthetic oligonucleotide
  Antisense strand to SEQ ID NO: 1537700
auuuccauugguuuacacg

SEQ ID NO: 1537702 - RNA, 19 nt, Artificial Sequence
  Description of Artificial Sequence: Synthetic oligonucleotide
  Sense strand starting at position 3394 of SEQ ID NO: 1245117
uggaaauucuuacuugcuu

SEQ ID NO: 1537703 - RNA, 19 nt, Artificial Sequence
  Description of Artificial Sequence: Synthetic oligonucleotide
  Antisense strand to SEQ ID NO: 1537702
aagcaaguaagaauuucca

SEQ ID NO: 1537704 - RNA, 19 nt, Artificial Sequence
  Description of Artificial Sequence: Synthetic oligonucleotide
  Sense strand starting at position 3395 of SEQ ID NO: 1245117
ggaaauucuuacuugcuuu

SEQ ID NO: 1537705 - RNA, 19 nt, Artificial Sequence
  Description of Artificial Sequence: Synthetic oligonucleotide
  Antisense strand to SEQ ID NO: 1537704
aaagcaaguaagaauuucc

SEQ ID NO: 1537706 - RNA, 19 nt, Artificial Sequence
  Description of Artificial Sequence: Synthetic oligonucleotide
  Sense strand starting at position 3597 of SEQ ID NO: 1245117
ugcauaaacucccuggaau

SEQ ID NO: 1537707 - RNA, 19 nt, Artificial Sequence
  Description of Artificial Sequence: Synthetic oligonucleotide
  Antisense strand to SEQ ID NO: 1537706
auuccagggaguuuaugca

SEQ ID NO: 1537708 - RNA, 19 nt, Artificial Sequence
  Description of Artificial Sequence: Synthetic oligonucleotide
  Sense strand starting at position 3598 of SEQ ID NO: 1245117
gcauaaacucccuggaaug

SEQ ID NO: 1537709 - RNA, 19 nt, Artificial Sequence
  Description of Artificial Sequence: Synthetic oligonucleotide
  Antisense strand to SEQ ID NO: 1537708
cauuccagggaguuuaugc

SEQ ID NO: 1537710 - RNA, 19 nt, Artificial Sequence
  Description of Artificial Sequence: Synthetic oligonucleotide
  Sense strand starting at position 3761 of SEQ ID NO: 1245117
uguaaagacugcuuuaggu

SEQ ID NO: 1537711 - RNA, 19 nt, Artificial Sequence
  Description of Artificial Sequence: Synthetic oligonucleotide
  Antisense strand to SEQ ID NO: 1537710
accuaaagcagucuuuaca

SEQ ID NO: 1537712 - RNA, 19 nt, Artificial Sequence
  Description of Artificial Sequence: Synthetic oligonucleotide
  Sense strand starting at position 3763 of SEQ ID NO: 1245117
uaaagacugcuuuagguuu

SEQ ID NO: 1537713 - RNA, 19 nt, Artificial Sequence
  Description of Artificial Sequence: Synthetic oligonucleotide
  Antisense strand to SEQ ID NO: 1537712
aaaccuaaagcagucuuua

SEQ ID NO: 1537714 - RNA, 19 nt, Artificial Sequence
  Description of Artificial Sequence: Synthetic oligonucleotide
  Sense strand starting at position 3770 of SEQ ID NO: 1245117
ugcuuuagguuuguaaaug

SEQ ID NO: 1537715 - RNA, 19 nt, Artificial Sequence
  Description of Artificial Sequence: Synthetic oligonucleotide
  Antisense strand to SEQ ID NO: 1537714
cauuuacaaaccuaaagca

SEQ ID NO: 1537716 - RNA, 19 nt, Artificial Sequence
  Description of Artificial Sequence: Synthetic oligonucleotide
  Sense strand starting at position 3827 of SEQ ID NO: 1245117
acauauguuaaaugugguu

SEQ ID NO: 1537717 - RNA, 19 nt, Artificial Sequence
  Description of Artificial Sequence: Synthetic oligonucleotide
  Antisense strand to SEQ ID NO: 1537716
aaccacauuuaacauaugu

SEQ ID NO: 1537718 - RNA, 19 nt, Artificial Sequence
  Description of Artificial Sequence: Synthetic oligonucleotide
  Sense strand starting at position 3840 of SEQ ID NO: 1245117
gugguugccaguuacuaga

SEQ ID NO: 1537719 - RNA, 19 nt, Artificial Sequence
  Description of Artificial Sequence: Synthetic oligonucleotide
  Antisense strand to SEQ ID NO: 1537718
ucuaguaacuggcaaccac

SEQ ID NO: 1537720 - RNA, 19 nt, Artificial Sequence
  Description of Artificial Sequence: Synthetic oligonucleotide
  Sense strand starting at position 3924 of SEQ ID NO: 1245117
agugauuucuaugaccacu

SEQ ID NO: 1537721 - RNA, 19 nt, Artificial Sequence
  Description of Artificial Sequence: Synthetic oligonucleotide
  Antisense strand to SEQ ID NO: 1537720
aguggucauagaaaucacu

SEQ ID NO: 1537722 - RNA, 19 nt, Artificial Sequence
  Description of Artificial Sequence: Synthetic oligonucleotide
  Sense strand starting at position 3980 of SEQ ID NO: 1245117
agucaauuaucaguucuuu

SEQ ID NO: 1537723 - RNA, 19 nt, Artificial Sequence
  Description of Artificial Sequence: Synthetic oligonucleotide
  Antisense strand to SEQ ID NO: 1537722
aaagaacugauaauugacu

SEQ ID NO: 1537724 - RNA, 19 nt, Artificial Sequence
  Description of Artificial Sequence: Synthetic oligonucleotide
  Sense strand starting at position 48 of SEQ ID NO: 1245118
agucauauauugcuuacau

SEQ ID NO: 1537725 - RNA, 19 nt, Artificial Sequence
  Description of Artificial Sequence: Synthetic oligonucleotide
  Antisense strand to SEQ ID NO: 1537724
auguaagcaauauaugacu

SEQ ID NO: 1537726 - RNA, 19 nt, Artificial Sequence
  Description of Artificial Sequence: Synthetic oligonucleotide
  Sense strand starting at position 160 of SEQ ID NO: 1245118
ggguuauaccuacauggua

SEQ ID NO: 1537727 - RNA, 19 nt, Artificial Sequence
  Description of Artificial Sequence: Synthetic oligonucleotide
  Antisense strand to SEQ ID NO: 1537726
uaccauguagguauaaccc

SEQ ID NO: 1537728 - RNA, 19 nt, Artificial Sequence
  Description of Artificial Sequence: Synthetic oligonucleotide
  Sense strand starting at position 226 of SEQ ID NO: 1245118
agccuagguguauaguaua

SEQ ID NO: 1537729 - RNA, 19 nt, Artificial Sequence
  Description of Artificial Sequence: Synthetic oligonucleotide
  Antisense strand to SEQ ID NO: 1537728
uauacuauacaccuaggcu

SEQ ID NO: 1537730 - RNA, 19 nt, Artificial Sequence
  Description of Artificial Sequence: Synthetic oligonucleotide
  Sense strand starting at position 231 of SEQ ID NO: 1245118
agguguauaguauauagua

SEQ ID NO: 1537731 - RNA, 19 nt, Artificial Sequence
  Description of Artificial Sequence: Synthetic oligonucleotide
  Antisense strand to SEQ ID NO: 1537730
uacuauauacuauacaccu

SEQ ID NO: 1537732 - RNA, 19 nt, Artificial Sequence
  Description of Artificial Sequence: Synthetic oligonucleotide
  Sense strand starting at position 309 of SEQ ID NO: 1245118
uuguaaguauuuguguaac

SEQ ID NO: 1537733 - RNA, 19 nt, Artificial Sequence
  Description of Artificial Sequence: Synthetic oligonucleotide
  Antisense strand to SEQ ID NO: 1537732
guuacacaaauacuuacaa

SEQ ID NO: 1537734 - RNA, 19 nt, Artificial Sequence
  Description of Artificial Sequence: Synthetic oligonucleotide
  Sense strand starting at position 396 of SEQ ID NO: 1245118
acagacgagcuccauuaua

SEQ ID NO: 1537735 - RNA, 19 nt, Artificial Sequence
  Description of Artificial Sequence: Synthetic oligonucleotide
  Antisense strand to SEQ ID NO: 1537734
uauaauggagcucgucugu

SEQ ID NO: 1537736 - RNA, 19 nt, Artificial Sequence
  Description of Artificial Sequence: Synthetic oligonucleotide
  Sense strand starting at position 469 of SEQ ID NO: 1245118
agagcaugacuguauaugu

SEQ ID NO: 1537737 - RNA, 19 nt, Artificial Sequence
  Description of Artificial Sequence: Synthetic oligonucleotide
  Antisense strand to SEQ ID NO: 1537736
acauauacagucaugcucu

SEQ ID NO: 1537738 - RNA, 19 nt, Artificial Sequence
  Description of Artificial Sequence: Synthetic oligonucleotide
  Sense strand starting at position 807 of SEQ ID NO: 1245118
uggguagaauccuuugaaa

SEQ ID NO: 1537739 - RNA, 19 nt, Artificial Sequence
  Description of Artificial Sequence: Synthetic oligonucleotide
  Antisense strand to SEQ ID NO: 1537738
uuucaaaggauucuaccca

SEQ ID NO: 1537740 - RNA, 19 nt, Artificial Sequence
  Description of Artificial Sequence: Synthetic oligonucleotide
  Sense strand starting at position 809 of SEQ ID NO: 1245118
gguagaauccuuugaaaca

SEQ ID NO: 1537741 - RNA, 19 nt, Artificial Sequence
  Description of Artificial Sequence: Synthetic oligonucleotide
  Antisense strand to SEQ ID NO: 1537740
uguuucaaaggauucuacc

SEQ ID NO: 1537742 - RNA, 19 nt, Artificial Sequence
  Description of Artificial Sequence: Synthetic oligonucleotide
  Sense strand starting at position 860 of SEQ ID NO: 1245118
uuaagaugguaucugaguu

SEQ ID NO: 1537743 - RNA, 19 nt, Artificial Sequence
  Description of Artificial Sequence: Synthetic oligonucleotide
  Antisense strand to SEQ ID NO: 1537742
aacucagauaccaucuuaa

SEQ ID NO: 1537744 - RNA, 19 nt, Artificial Sequence
  Description of Artificial Sequence: Synthetic oligonucleotide
  Sense strand starting at position 922 of SEQ ID NO: 1245118
cccugcauuguauauuauu

SEQ ID NO: 1537745 - RNA, 19 nt, Artificial Sequence
  Description of Artificial Sequence: Synthetic oligonucleotide
  Antisense strand to SEQ ID NO: 1537744
aauaauauacaaugcaggg

SEQ ID NO: 1537746 - RNA, 19 nt, Artificial Sequence
  Description of Artificial Sequence: Synthetic oligonucleotide
  Sense strand starting at position 1047 of SEQ ID NO: 1245118
gauggacggaugugugaaa

SEQ ID NO: 1537747 - RNA, 19 nt, Artificial Sequence
  Description of Artificial Sequence: Synthetic oligonucleotide
  Antisense strand to SEQ ID NO: 1537746
uuucacacauccguccauc

SEQ ID NO: 1537748 - RNA, 19 nt, Artificial Sequence
  Description of Artificial Sequence: Synthetic oligonucleotide
  Sense strand starting at position 1293 of SEQ ID NO: 1245118
aguagaacucagcauguua

SEQ ID NO: 1537749 - RNA, 19 nt, Artificial Sequence
  Description of Artificial Sequence: Synthetic oligonucleotide
  Antisense strand to SEQ ID NO: 1537748
uaacaugcugaguucuacu

SEQ ID NO: 1537750 - RNA, 19 nt, Artificial Sequence
  Description of Artificial Sequence: Synthetic oligonucleotide
  Sense strand starting at position 1316 of SEQ ID NO: 1245118
acaugaguuuauguaauca

SEQ ID NO: 1537751 - RNA, 19 nt, Artificial Sequence
  Description of Artificial Sequence: Synthetic oligonucleotide
  Antisense strand to SEQ ID NO: 1537750
ugauuacauaaacucaugu

SEQ ID NO: 1537752 - RNA, 19 nt, Artificial Sequence
  Description of Artificial Sequence: Synthetic oligonucleotide
  Sense strand starting at position 1356 of SEQ ID NO: 1245118
agaaacuucugggccaaau

SEQ ID NO: 1537753 - RNA, 19 nt, Artificial Sequence
  Description of Artificial Sequence: Synthetic oligonucleotide
  Antisense strand to SEQ ID NO: 1537752
auuuggcccagaaguuucu

SEQ ID NO: 1537754 - RNA, 19 nt, Artificial Sequence
  Description of Artificial Sequence: Synthetic oligonucleotide
  Sense strand starting at position 1632 of SEQ ID NO: 1245118
guaguaacaugcuugaauu

SEQ ID NO: 1537755 - RNA, 19 nt, Artificial Sequence
  Description of Artificial Sequence: Synthetic oligonucleotide
  Antisense strand to SEQ ID NO: 1537754
aauucaagcauguuacuac

SEQ ID NO: 1537756 - RNA, 19 nt, Artificial Sequence
  Description of Artificial Sequence: Synthetic oligonucleotide
  Sense strand starting at position 1664 of SEQ ID NO: 1245118
guuguuacucaccaggaga

SEQ ID NO: 1537757 - RNA, 19 nt, Artificial Sequence
  Description of Artificial Sequence: Synthetic oligonucleotide
  Antisense strand to SEQ ID NO: 1537756
ucuccuggugaguaacaac

SEQ ID NO: 1537758 - RNA, 19 nt, Artificial Sequence
  Description of Artificial Sequence: Synthetic oligonucleotide
  Sense strand starting at position 1666 of SEQ ID NO: 1245118
uguuacucaccaggagaga

SEQ ID NO: 1537759 - RNA, 19 nt, Artificial Sequence
  Description of Artificial Sequence: Synthetic oligonucleotide
  Antisense strand to SEQ ID NO: 1537758
ucucuccuggugaguaaca

SEQ ID NO: 1537760 - RNA, 19 nt, Artificial Sequence
  Description of Artificial Sequence: Synthetic oligonucleotide
  Sense strand starting at position 1984 of SEQ ID NO: 1245118
gaggcuuuccuacaaguga

SEQ ID NO: 1537761 - RNA, 19 nt, Artificial Sequence
  Description of Artificial Sequence: Synthetic oligonucleotide
  Antisense strand to SEQ ID NO: 1537760
ucacuuguaggaaagccuc

SEQ ID NO: 1537762 - RNA, 19 nt, Artificial Sequence
  Description of Artificial Sequence: Synthetic oligonucleotide
  Sense strand starting at position 2291 of SEQ ID NO: 1245118
uggcaaaucagaggaccua

SEQ ID NO: 1537763 - RNA, 19 nt, Artificial Sequence
  Description of Artificial Sequence: Synthetic oligonucleotide
  Antisense strand to SEQ ID NO: 1537762
uagguccucugauuugcca

SEQ ID NO: 1537764 - RNA, 19 nt, Artificial Sequence
  Description of Artificial Sequence: Synthetic oligonucleotide
  Sense strand starting at position 2384 of SEQ ID NO: 1245118
guaguucugcuagagaacu

SEQ ID NO: 1537765 - RNA, 19 nt, Artificial Sequence
  Description of Artificial Sequence: Synthetic oligonucleotide
  Antisense strand to SEQ ID NO: 1537764
aguucucuagcagaacuac

SEQ ID NO: 1537766 - RNA, 19 nt, Artificial Sequence
  Description of Artificial Sequence: Synthetic oligonucleotide
  Sense strand starting at position 2390 of SEQ ID NO: 1245118
cugcuagagaacuggcauu

SEQ ID NO: 1537767 - RNA, 19 nt, Artificial Sequence
  Description of Artificial Sequence: Synthetic oligonucleotide
  Antisense strand to SEQ ID NO: 1537766
aaugccaguucucuagcag

SEQ ID NO: 1537768 - RNA, 19 nt, Artificial Sequence
  Description of Artificial Sequence: Synthetic oligonucleotide
  Sense strand starting at position 2403 of SEQ ID NO: 1245118
ggcauuccaguuuaaagca

SEQ ID NO: 1537769 - RNA, 19 nt, Artificial Sequence
  Description of Artificial Sequence: Synthetic oligonucleotide
  Antisense strand to SEQ ID NO: 1537768
ugcuuuaaacuggaaugcc

SEQ ID NO: 1537770 - RNA, 19 nt, Artificial Sequence
  Description of Artificial Sequence: Synthetic oligonucleotide
  Sense strand starting at position 2474 of SEQ ID NO: 1245118
guugguucucuagauguca

SEQ ID NO: 1537771 - RNA, 19 nt, Artificial Sequence
  Description of Artificial Sequence: Synthetic oligonucleotide
  Antisense strand to SEQ ID NO: 1537770
ugacaucuagagaaccaac

SEQ ID NO: 1537772 - RNA, 19 nt, Artificial Sequence
  Description of Artificial Sequence: Synthetic oligonucleotide
  Sense strand starting at position 2641 of SEQ ID NO: 1245118
gagagcaagucucucuaaa

SEQ ID NO: 1537773 - RNA, 19 nt, Artificial Sequence
  Description of Artificial Sequence: Synthetic oligonucleotide
  Antisense strand to SEQ ID NO: 1537772
uuuagagagacuugcucuc

SEQ ID NO: 1537774 - RNA, 19 nt, Artificial Sequence
  Description of Artificial Sequence: Synthetic oligonucleotide
  Sense strand starting at position 2698 of SEQ ID NO: 1245118
aggauauccuagcuuaaua

SEQ ID NO: 1537775 - RNA, 19 nt, Artificial Sequence
  Description of Artificial Sequence: Synthetic oligonucleotide
  Antisense strand to SEQ ID NO: 1537774
uauuaagcuaggauauccu

SEQ ID NO: 1537776 - RNA, 19 nt, Artificial Sequence
  Description of Artificial Sequence: Synthetic oligonucleotide
  Sense strand starting at position 2769 of SEQ ID NO: 1245118
acaagagcuuuagcaucau

SEQ ID NO: 1537777 - RNA, 19 nt, Artificial Sequence
  Description of Artificial Sequence: Synthetic oligonucleotide
  Antisense strand to SEQ ID NO: 1537776
augaugcuaaagcucuugu

SEQ ID NO: 1537778 - RNA, 19 nt, Artificial Sequence
  Description of Artificial Sequence: Synthetic oligonucleotide
  Sense strand starting at position 2829 of SEQ ID NO: 1245118
acucaauggcagugaugga

SEQ ID NO: 1537779 - RNA, 19 nt, Artificial Sequence
  Description of Artificial Sequence: Synthetic oligonucleotide
  Antisense strand to SEQ ID NO: 1537778
uccaucacugccauugagu

SEQ ID NO: 1537780 - RNA, 19 nt, Artificial Sequence
  Description of Artificial Sequence: Synthetic oligonucleotide
  Sense strand starting at position 2834 of SEQ ID NO: 1245118
auggcagugauggaaguua

SEQ ID NO: 1537781 - RNA, 19 nt, Artificial Sequence
  Description of Artificial Sequence: Synthetic oligonucleotide
  Antisense strand to SEQ ID NO: 1537780
uaacuuccaucacugccau

SEQ ID NO: 1537782 - RNA, 19 nt, Artificial Sequence
  Description of Artificial Sequence: Synthetic oligonucleotide
  Sense strand starting at position 2956 of SEQ ID NO: 1245118
acaauuucuccuuguaugu

SEQ ID NO: 1537783 - RNA, 19 nt, Artificial Sequence
  Description of Artificial Sequence: Synthetic oligonucleotide
  Antisense strand to SEQ ID NO: 1537782
acauacaaggagaaauugu

SEQ ID NO: 1537784 - RNA, 19 nt, Artificial Sequence
  Description of Artificial Sequence: Synthetic oligonucleotide
  Sense strand starting at position 3114 of SEQ ID NO: 1245118
uugugacugcauuggaauu

SEQ ID NO: 1537785 - RNA, 19 nt, Artificial Sequence
  Description of Artificial Sequence: Synthetic oligonucleotide
  Antisense strand to SEQ ID NO: 1537784
aauuccaaugcagucacaa

SEQ ID NO: 1537786 - RNA, 19 nt, Artificial Sequence
  Description of Artificial Sequence: Synthetic oligonucleotide
  Sense strand starting at position 3230 of SEQ ID NO: 1245118
uuagauguauauguguaca

SEQ ID NO: 1537787 - RNA, 19 nt, Artificial Sequence
  Description of Artificial Sequence: Synthetic oligonucleotide
  Antisense strand to SEQ ID NO: 1537786
uguacacauauacaucuaa

SEQ ID NO: 1537788 - RNA, 19 nt, Artificial Sequence
  Description of Artificial Sequence: Synthetic oligonucleotide
  Sense strand starting at position 3491 of SEQ ID NO: 1245118
uggcauauauugguuggau

SEQ ID NO: 1537789 - RNA, 19 nt, Artificial Sequence
  Description of Artificial Sequence: Synthetic oligonucleotide
  Antisense strand to SEQ ID NO: 1537788
auccaaccaauauaugcca

SEQ ID NO: 1537790 - RNA, 19 nt, Artificial Sequence
  Description of Artificial Sequence: Synthetic oligonucleotide
  Sense strand starting at position 3492 of SEQ ID NO: 1245118
ggcauauauugguuggaug

SEQ ID NO: 1537791 - RNA, 19 nt, Artificial Sequence
  Description of Artificial Sequence: Synthetic oligonucleotide
  Antisense strand to SEQ ID NO: 1537790
cauccaaccaauauaugcc

SEQ ID NO: 1537792 - RNA, 19 nt, Artificial Sequence
  Description of Artificial Sequence: Synthetic oligonucleotide
  Sense strand starting at position 3493 of SEQ ID NO: 1245118
gcauauauugguuggauga

SEQ ID NO: 1537793 - RNA, 19 nt, Artificial Sequence
  Description of Artificial Sequence: Synthetic oligonucleotide
  Antisense strand to SEQ ID NO: 1537792
ucauccaaccaauauaugc

SEQ ID NO: 1537794 - RNA, 19 nt, Artificial Sequence
  Description of Artificial Sequence: Synthetic oligonucleotide
  Sense strand starting at position 3494 of SEQ ID NO: 1245118
cauauauugguuggaugaa

SEQ ID NO: 1537795 - RNA, 19 nt, Artificial Sequence
  Description of Artificial Sequence: Synthetic oligonucleotide
  Antisense strand to SEQ ID NO: 1537794
uucauccaaccaauauaug

SEQ ID NO: 1537796 - RNA, 19 nt, Artificial Sequence
  Description of Artificial Sequence: Synthetic oligonucleotide
  Sense strand starting at position 3568 of SEQ ID NO: 1245118
ggaaguugauguucugauc

SEQ ID NO: 1537797 - RNA, 19 nt, Artificial Sequence
  Description of Artificial Sequence: Synthetic oligonucleotide
  Antisense strand to SEQ ID NO: 1537796
gaucagaacaucaacuucc

SEQ ID NO: 1537798 - RNA, 19 nt, Artificial Sequence
  Description of Artificial Sequence: Synthetic oligonucleotide
  Sense strand starting at position 3677 of SEQ ID NO: 1245118
ccaaauuauugguuugcaa

SEQ ID NO: 1537799 - RNA, 19 nt, Artificial Sequence
  Description of Artificial Sequence: Synthetic oligonucleotide
  Antisense strand to SEQ ID NO: 1537798
uugcaaaccaauaauuugg

SEQ ID NO: 1537800 - RNA, 19 nt, Artificial Sequence
  Description of Artificial Sequence: Synthetic oligonucleotide
  Sense strand starting at position 3803 of SEQ ID NO: 1245118
uugacucuuccuuaaacgu

SEQ ID NO: 1537801 - RNA, 19 nt, Artificial Sequence
  Description of Artificial Sequence: Synthetic oligonucleotide
  Antisense strand to SEQ ID NO: 1537800
acguuuaaggaagagucaa

SEQ ID NO: 1537802 - RNA, 19 nt, Artificial Sequence
  Description of Artificial Sequence: Synthetic oligonucleotide
  Sense strand starting at position 3810 of SEQ ID NO: 1245118
uuccuuaaacgugaaucua

SEQ ID NO: 1537803 - RNA, 19 nt, Artificial Sequence
  Description of Artificial Sequence: Synthetic oligonucleotide
  Antisense strand to SEQ ID NO: 1537802
uagauucacguuuaaggaa

SEQ ID NO: 1537804 - RNA, 19 nt, Artificial Sequence
  Description of Artificial Sequence: Synthetic oligonucleotide
  Sense strand starting at position 121 of SEQ ID NO: 1245119
uuauuaauaugcccugaga

SEQ ID NO: 1537805 - RNA, 19 nt, Artificial Sequence
  Description of Artificial Sequence: Synthetic oligonucleotide
  Antisense strand to SEQ ID NO: 1537804
ucucagggcauauuaauaa

SEQ ID NO: 1537806 - RNA, 19 nt, Artificial Sequence
  Description of Artificial Sequence: Synthetic oligonucleotide
  Sense strand starting at position 123 of SEQ ID NO: 1245119
auuaauaugcccugagaau

SEQ ID NO: 1537807 - RNA, 19 nt, Artificial Sequence
  Description of Artificial Sequence: Synthetic oligonucleotide
  Antisense strand to SEQ ID NO: 1537806
auucucagggcauauuaau

SEQ ID NO: 1537808 - RNA, 19 nt, Artificial Sequence
  Description of Artificial Sequence: Synthetic oligonucleotide
  Sense strand starting at position 124 of SEQ ID NO: 1245119
uuaauaugcccugagaauu

SEQ ID NO: 1537809 - RNA, 19 nt, Artificial Sequence
  Description of Artificial Sequence: Synthetic oligonucleotide
  Antisense strand to SEQ ID NO: 1537808
aauucucagggcauauuaa

SEQ ID NO: 1537810 - RNA, 19 nt, Artificial Sequence
  Description of Artificial Sequence: Synthetic oligonucleotide
  Sense strand starting at position 162 of SEQ ID NO: 1245119
cauugagcuccucgagaaa

SEQ ID NO: 1537811 - RNA, 19 nt, Artificial Sequence
  Description of Artificial Sequence: Synthetic oligonucleotide
  Antisense strand to SEQ ID NO: 1537810
uuucucgaggagcucaaug

SEQ ID NO: 1537812 - RNA, 19 nt, Artificial Sequence
  Description of Artificial Sequence: Synthetic oligonucleotide
  Sense strand starting at position 513 of SEQ ID NO: 1245119
acgagaucccaucggucaa

SEQ ID NO: 1537813 - RNA, 19 nt, Artificial Sequence
  Description of Artificial Sequence: Synthetic oligonucleotide
  Antisense strand to SEQ ID NO: 1537812
uugaccgaugggaucucgu

SEQ ID NO: 1537814 - RNA, 19 nt, Artificial Sequence
  Description of Artificial Sequence: Synthetic oligonucleotide
  Sense strand starting at position 523 of SEQ ID NO: 1245119
aucggucaagccugggaaa

SEQ ID NO: 1537815 - RNA, 19 nt, Artificial Sequence
  Description of Artificial Sequence: Synthetic oligonucleotide
  Antisense strand to SEQ ID NO: 1537814
uuucccaggcuugaccgau

SEQ ID NO: 1537816 - RNA, 19 nt, Artificial Sequence
  Description of Artificial Sequence: Synthetic oligonucleotide
  Sense strand starting at position 611 of SEQ ID NO: 1245119
uguagugcucuuuaaagaa

SEQ ID NO: 1537817 - RNA, 19 nt, Artificial Sequence
  Description of Artificial Sequence: Synthetic oligonucleotide
  Antisense strand to SEQ ID NO: 1537816
uucuuuaaagagcacuaca

SEQ ID NO: 1537818 - RNA, 19 nt, Artificial Sequence
  Description of Artificial Sequence: Synthetic oligonucleotide
  Sense strand starting at position 1790 of SEQ ID NO: 1245119
ccuccuuguugucuauuua

SEQ ID NO: 1537819 - RNA, 19 nt, Artificial Sequence
  Description of Artificial Sequence: Synthetic oligonucleotide
  Antisense strand to SEQ ID NO: 1537818
uaaauagacaacaaggagg

SEQ ID NO: 1537820 - RNA, 19 nt, Artificial Sequence
  Description of Artificial Sequence: Synthetic oligonucleotide
  Sense strand starting at position 2159 of SEQ ID NO: 1245119
aguugacuccagggagacu

SEQ ID NO: 1537821 - RNA, 19 nt, Artificial Sequence
  Description of Artificial Sequence: Synthetic oligonucleotide
  Antisense strand to SEQ ID NO: 1537820
agucucccuggagucaacu

SEQ ID NO: 1537822 - RNA, 19 nt, Artificial Sequence
  Description of Artificial Sequence: Synthetic oligonucleotide
  Sense strand starting at position 2277 of SEQ ID NO: 1245119
ggaauuuacuggcaugaca

SEQ ID NO: 1537823 - RNA, 19 nt, Artificial Sequence
  Description of Artificial Sequence: Synthetic oligonucleotide
  Antisense strand to SEQ ID NO: 1537822
ugucaugccaguaaauucc

SEQ ID NO: 1537824 - RNA, 19 nt, Artificial Sequence
  Description of Artificial Sequence: Synthetic oligonucleotide
  Sense strand starting at position 2285 of SEQ ID NO: 1245119
cuggcaugacaaugauaca

SEQ ID NO: 1537825 - RNA, 19 nt, Artificial Sequence
  Description of Artificial Sequence: Synthetic oligonucleotide
  Antisense strand to SEQ ID NO: 1537824
uguaucauugucaugccag

SEQ ID NO: 1537826 - RNA, 19 nt, Artificial Sequence
  Description of Artificial Sequence: Synthetic oligonucleotide
  Sense strand starting at position 2301 of SEQ ID NO: 1245119
acaagacaaucgccauaau

SEQ ID NO: 1537827 - RNA, 19 nt, Artificial Sequence
  Description of Artificial Sequence: Synthetic oligonucleotide
  Antisense strand to SEQ ID NO: 1537826
auuauggcgauugucuugu

SEQ ID NO: 1537828 - RNA, 19 nt, Artificial Sequence
  Description of Artificial Sequence: Synthetic oligonucleotide
  Sense strand starting at position 2311 of SEQ ID NO: 1245119
cgccauaauuuagagacaa

SEQ ID NO: 1537829 - RNA, 19 nt, Artificial Sequence
  Description of Artificial Sequence: Synthetic oligonucleotide
  Antisense strand to SEQ ID NO: 1537828
uugucucuaaauuauggcg

SEQ ID NO: 1537830 - RNA, 19 nt, Artificial Sequence
  Description of Artificial Sequence: Synthetic oligonucleotide
  Sense strand starting at position 2397 of SEQ ID NO: 1245119
gagggugaguuacuauaag

SEQ ID NO: 1537831 - RNA, 19 nt, Artificial Sequence
  Description of Artificial Sequence: Synthetic oligonucleotide
  Antisense strand to SEQ ID NO: 1537830
cuuauaguaacucacccuc

SEQ ID NO: 1537832 - RNA, 19 nt, Artificial Sequence
  Description of Artificial Sequence: Synthetic oligonucleotide
  Sense strand starting at position 2445 of SEQ ID NO: 1245119
gcuacaugugguuacugau

SEQ ID NO: 1537833 - RNA, 19 nt, Artificial Sequence
  Description of Artificial Sequence: Synthetic oligonucleotide
  Antisense strand to SEQ ID NO: 1537832
aucaguaaccacauguagc

SEQ ID NO: 1537834 - RNA, 19 nt, Artificial Sequence
  Description of Artificial Sequence: Synthetic oligonucleotide
  Sense strand starting at position 2525 of SEQ ID NO: 1245119
ugaacauccaguggagagu

SEQ ID NO: 1537835 - RNA, 19 nt, Artificial Sequence
  Description of Artificial Sequence: Synthetic oligonucleotide
  Antisense strand to SEQ ID NO: 1537834
acucuccacuggauguuca

SEQ ID NO: 1537836 - RNA, 19 nt, Artificial Sequence
  Description of Artificial Sequence: Synthetic oligonucleotide
  Sense strand starting at position 2534 of SEQ ID NO: 1245119
aguggagaguucucaccuu

SEQ ID NO: 1537837 - RNA, 19 nt, Artificial Sequence
  Description of Artificial Sequence: Synthetic oligonucleotide
  Antisense strand to SEQ ID NO: 1537836
aaggugagaacucuccacu

SEQ ID NO: 1537838 - RNA, 19 nt, Artificial Sequence
  Description of Artificial Sequence: Synthetic oligonucleotide
  Sense strand starting at position 2569 of SEQ ID NO: 1245119
accagaguucauggugaga

SEQ ID NO: 1537839 - RNA, 19 nt, Artificial Sequence
  Description of Artificial Sequence: Synthetic oligonucleotide
  Antisense strand to SEQ ID NO: 1537838
ucucaccaugaacucuggu

SEQ ID NO: 1537840 - RNA, 19 nt, Artificial Sequence
  Description of Artificial Sequence: Synthetic oligonucleotide
  Sense strand starting at position 2591 of SEQ ID NO: 1245119
gaauaagaaugggauaauu

SEQ ID NO: 1537841 - RNA, 19 nt, Artificial Sequence
  Description of Artificial Sequence: Synthetic oligonucleotide
  Antisense strand to SEQ ID NO: 1537840
aauuaucccauucuuauuc

SEQ ID NO: 1537842 - RNA, 19 nt, Artificial Sequence
  Description of Artificial Sequence: Synthetic oligonucleotide
  Sense strand starting at position 2663 of SEQ ID NO: 1245119
cuggaagauuaagauauaa

SEQ ID NO: 1537843 - RNA, 19 nt, Artificial Sequence
  Description of Artificial Sequence: Synthetic oligonucleotide
  Antisense strand to SEQ ID NO: 1537842
uuauaucuuaaucuuccag

SEQ ID NO: 1537844 - RNA, 19 nt, Artificial Sequence
  Description of Artificial Sequence: Synthetic oligonucleotide
  Sense strand starting at position 2816 of SEQ ID NO: 1245119
guuuaaguuuccucaggga

SEQ ID NO: 1537845 - RNA, 19 nt, Artificial Sequence
  Description of Artificial Sequence: Synthetic oligonucleotide
  Antisense strand to SEQ ID NO: 1537844
ucccugaggaaacuuaaac

SEQ ID NO: 1537846 - RNA, 19 nt, Artificial Sequence
  Description of Artificial Sequence: Synthetic oligonucleotide
  Sense strand starting at position 2839 of SEQ ID NO: 1245119
cugagaauccuaugugaaa

SEQ ID NO: 1537847 - RNA, 19 nt, Artificial Sequence
  Description of Artificial Sequence: Synthetic oligonucleotide
  Antisense strand to SEQ ID NO: 1537846
uuucacauaggauucucag

SEQ ID NO: 1537848 - RNA, 19 nt, Artificial Sequence
  Description of Artificial Sequence: Synthetic oligonucleotide
  Sense strand starting at position 3110 of SEQ ID NO: 1245119
cugagucaucagcaugaga

SEQ ID NO: 1537849 - RNA, 19 nt, Artificial Sequence
  Description of Artificial Sequence: Synthetic oligonucleotide
  Antisense strand to SEQ ID NO: 1537848
ucucaugcugaugacucag

SEQ ID NO: 1537850 - RNA, 19 nt, Artificial Sequence
  Description of Artificial Sequence: Synthetic oligonucleotide
  Sense strand starting at position 3112 of SEQ ID NO: 1245119
gagucaucagcaugagacu

SEQ ID NO: 1537851 - RNA, 19 nt, Artificial Sequence
  Description of Artificial Sequence: Synthetic oligonucleotide
  Antisense strand to SEQ ID NO: 1537850
agucucaugcugaugacuc

SEQ ID NO: 1537852 - RNA, 19 nt, Artificial Sequence
  Description of Artificial Sequence: Synthetic oligonucleotide
  Sense strand starting at position 3113 of SEQ ID NO: 1245119
agucaucagcaugagacua

SEQ ID NO: 1537853 - RNA, 19 nt, Artificial Sequence
  Description of Artificial Sequence: Synthetic oligonucleotide
  Antisense strand to SEQ ID NO: 1537852
uagucucaugcugaugacu

SEQ ID NO: 1537854 - RNA, 19 nt, Artificial Sequence
  Description of Artificial Sequence: Synthetic oligonucleotide
  Sense strand starting at position 3220 of SEQ ID NO: 1245119
acaucauggucucuagcau

SEQ ID NO: 1537855 - RNA, 19 nt, Artificial Sequence
  Description of Artificial Sequence: Synthetic oligonucleotide
  Antisense strand to SEQ ID NO: 1537854
augcuagagaccaugaugu

SEQ ID NO: 1537856 - RNA, 19 nt, Artificial Sequence
  Description of Artificial Sequence: Synthetic oligonucleotide
  Sense strand starting at position 3265 of SEQ ID NO: 1245119
gcuauaagcguuucagguu

SEQ ID NO: 1537857 - RNA, 19 nt, Artificial Sequence
  Description of Artificial Sequence: Synthetic oligonucleotide
  Antisense strand to SEQ ID NO: 1537856
aaccugaaacgcuuauagc

SEQ ID NO: 1537858 - RNA, 19 nt, Artificial Sequence
  Description of Artificial Sequence: Synthetic oligonucleotide
  Sense strand starting at position 3585 of SEQ ID NO: 1245119
uaggcuauauggucacuga

SEQ ID NO: 1537859 - RNA, 19 nt, Artificial Sequence
  Description of Artificial Sequence: Synthetic oligonucleotide
  Antisense strand to SEQ ID NO: 1537858
ucagugaccauauagccua

SEQ ID NO: 1537860 - RNA, 19 nt, Artificial Sequence
  Description of Artificial Sequence: Synthetic oligonucleotide
  Sense strand starting at position 3586 of SEQ ID NO: 1245119
aggcuauauggucacugaa

SEQ ID NO: 1537861 - RNA, 19 nt, Artificial Sequence
  Description of Artificial Sequence: Synthetic oligonucleotide
  Antisense strand to SEQ ID NO: 1537860
uucagugaccauauagccu

SEQ ID NO: 1537862 - RNA, 19 nt, Artificial Sequence
  Description of Artificial Sequence: Synthetic oligonucleotide
  Sense strand starting at position 3588 of SEQ ID NO: 1245119
gcuauauggucacugaaau

SEQ ID NO: 1537863 - RNA, 19 nt, Artificial Sequence
  Description of Artificial Sequence: Synthetic oligonucleotide
  Antisense strand to SEQ ID NO: 1537862
auuucagugaccauauagc

SEQ ID NO: 1537864 - RNA, 19 nt, Artificial Sequence
  Description of Artificial Sequence: Synthetic oligonucleotide
  Sense strand starting at position 3589 of SEQ ID NO: 1245119
cuauauggucacugaaaua

SEQ ID NO: 1537865 - RNA, 19 nt, Artificial Sequence
  Description of Artificial Sequence: Synthetic oligonucleotide
  Antisense strand to SEQ ID NO: 1537864
uauuucagugaccauauag

SEQ ID NO: 1537866 - RNA, 19 nt, Artificial Sequence
  Description of Artificial Sequence: Synthetic oligonucleotide
  Sense strand starting at position 3659 of SEQ ID NO: 1245119
auggaaugugaguagaugu

SEQ ID NO: 1537867 - RNA, 19 nt, Artificial Sequence
  Description of Artificial Sequence: Synthetic oligonucleotide
  Antisense strand to SEQ ID NO: 1537866
acaucuacucacauuccau

SEQ ID NO: 1537868 - RNA, 19 nt, Artificial Sequence
  Description of Artificial Sequence: Synthetic oligonucleotide
  Sense strand starting at position 3714 of SEQ ID NO: 1245119
augauucugcugcaugaac

SEQ ID NO: 1537869 - RNA, 19 nt, Artificial Sequence
  Description of Artificial Sequence: Synthetic oligonucleotide
  Antisense strand to SEQ ID NO: 1537868
guucaugcagcagaaucau

SEQ ID NO: 1537870 - RNA, 19 nt, Artificial Sequence
  Description of Artificial Sequence: Synthetic oligonucleotide
  Sense strand starting at position 3842 of SEQ ID NO: 1245119
auuuguccaucuguuaagu

SEQ ID NO: 1537871 - RNA, 19 nt, Artificial Sequence
  Description of Artificial Sequence: Synthetic oligonucleotide
  Antisense strand to SEQ ID NO: 1537870
acuuaacagauggacaaau

SEQ ID NO: 1537872 - RNA, 19 nt, Artificial Sequence
  Description of Artificial Sequence: Synthetic oligonucleotide
  Sense strand starting at position 3847 of SEQ ID NO: 1245119
uccaucuguuaaguaagau

SEQ ID NO: 1537873 - RNA, 19 nt, Artificial Sequence
  Description of Artificial Sequence: Synthetic oligonucleotide
  Antisense strand to SEQ ID NO: 1537872
aucuuacuuaacagaugga

SEQ ID NO: 1537874 - RNA, 19 nt, Artificial Sequence
  Description of Artificial Sequence: Synthetic oligonucleotide
  Sense strand starting at position 3890 of SEQ ID NO: 1245119
ggaggcuaucuaugguacu

SEQ ID NO: 1537875 - RNA, 19 nt, Artificial Sequence
  Description of Artificial Sequence: Synthetic oligonucleotide
  Antisense strand to SEQ ID NO: 1537874
aguaccauagauagccucc

SEQ ID NO: 1537876 - RNA, 19 nt, Artificial Sequence
  Description of Artificial Sequence: Synthetic oligonucleotide
  Sense strand starting at position 3935 of SEQ ID NO: 1245119
gacugcuuaugacagauuu

SEQ ID NO: 1537877 - RNA, 19 nt, Artificial Sequence
  Description of Artificial Sequence: Synthetic oligonucleotide
  Antisense strand to SEQ ID NO: 1537876
aaaucugucauaagcaguc

SEQ ID NO: 1537878 - RNA, 19 nt, Artificial Sequence
  Description of Artificial Sequence: Synthetic oligonucleotide
  Sense strand starting at position 3954 of SEQ ID NO: 1245119
uugagaagcuuggcuggaa

SEQ ID NO: 1537879 - RNA, 19 nt, Artificial Sequence
  Description of Artificial Sequence: Synthetic oligonucleotide
  Antisense strand to SEQ ID NO: 1537878
uuccagccaagcuucucaa

SEQ ID NO: 1537880 - RNA, 19 nt, Artificial Sequence
  Description of Artificial Sequence: Synthetic oligonucleotide
  Sense strand starting at position 3955 of SEQ ID NO: 1245119
ugagaagcuuggcuggaaa

SEQ ID NO: 1537881 - RNA, 19 nt, Artificial Sequence
  Description of Artificial Sequence: Synthetic oligonucleotide
  Antisense strand to SEQ ID NO: 1537880
uuuccagccaagcuucuca

SEQ ID NO: 1537882 - RNA, 19 nt, Artificial Sequence
  Description of Artificial Sequence: Synthetic oligonucleotide
  Sense strand starting at position 3966 of SEQ ID NO: 1245119
gcuggaaauggauguucau

SEQ ID NO: 1537883 - RNA, 19 nt, Artificial Sequence
  Description of Artificial Sequence: Synthetic oligonucleotide
  Antisense strand to SEQ ID NO: 1537882
augaacauccauuuccagc

SEQ ID NO: 1537884 - RNA, 19 nt, Artificial Sequence
  Description of Artificial Sequence: Synthetic oligonucleotide
  Sense strand starting at position 38 of SEQ ID NO: 1245120
ggucaagagaaguguuaau

SEQ ID NO: 1537885 - RNA, 19 nt, Artificial Sequence
  Description of Artificial Sequence: Synthetic oligonucleotide
  Antisense strand to SEQ ID NO: 1537884
auuaacacuucucuugacc

SEQ ID NO: 1537886 - RNA, 19 nt, Artificial Sequence
  Description of Artificial Sequence: Synthetic oligonucleotide
  Sense strand starting at position 164 of SEQ ID NO: 1245120
accuaaacucaacggaauu

SEQ ID NO: 1537887 - RNA, 19 nt, Artificial Sequence
  Description of Artificial Sequence: Synthetic oligonucleotide
  Antisense strand to SEQ ID NO: 1537886
aauuccguugaguuuaggu

SEQ ID NO: 1537888 - RNA, 19 nt, Artificial Sequence
  Description of Artificial Sequence: Synthetic oligonucleotide
  Sense strand starting at position 204 of SEQ ID NO: 1245120
aaacgaguaugugcuagau

SEQ ID NO: 1537889 - RNA, 19 nt, Artificial Sequence
  Description of Artificial Sequence: Synthetic oligonucleotide
  Antisense strand to SEQ ID NO: 1537888
aucuagcacauacucguuu

SEQ ID NO: 1537890 - RNA, 19 nt, Artificial Sequence
  Description of Artificial Sequence: Synthetic oligonucleotide
  Sense strand starting at position 208 of SEQ ID NO: 1245120
gaguaugugcuagaucaaa

SEQ ID NO: 1537891 - RNA, 19 nt, Artificial Sequence
  Description of Artificial Sequence: Synthetic oligonucleotide
  Antisense strand to SEQ ID NO: 1537890
uuugaucuagcacauacuc

SEQ ID NO: 1537892 - RNA, 19 nt, Artificial Sequence
  Description of Artificial Sequence: Synthetic oligonucleotide
  Sense strand starting at position 233 of SEQ ID NO: 1245120
gcuuccuccguuuagauuu

SEQ ID NO: 1537893 - RNA, 19 nt, Artificial Sequence
  Description of Artificial Sequence: Synthetic oligonucleotide
  Antisense strand to SEQ ID NO: 1537892
aaaucuaaacggaggaagc

SEQ ID NO: 1537894 - RNA, 19 nt, Artificial Sequence
  Description of Artificial Sequence: Synthetic oligonucleotide
  Sense strand starting at position 303 of SEQ ID NO: 1245120
gggaaagcuccuggucuuc

SEQ ID NO: 1537895 - RNA, 19 nt, Artificial Sequence
  Description of Artificial Sequence: Synthetic oligonucleotide
  Antisense strand to SEQ ID NO: 1537894
gaagaccaggagcuuuccc

SEQ ID NO: 1537896 - RNA, 19 nt, Artificial Sequence
  Description of Artificial Sequence: Synthetic oligonucleotide
  Sense strand starting at position 305 of SEQ ID NO: 1245120
gaaagcuccuggucuucca

SEQ ID NO: 1537897 - RNA, 19 nt, Artificial Sequence
  Description of Artificial Sequence: Synthetic oligonucleotide
  Antisense strand to SEQ ID NO: 1537896
uggaagaccaggagcuuuc

SEQ ID NO: 1537898 - RNA, 19 nt, Artificial Sequence
  Description of Artificial Sequence: Synthetic oligonucleotide
  Sense strand starting at position 341 of SEQ ID NO: 1245120
gagcgaaugcgagaaauuc

SEQ ID NO: 1537899 - RNA, 19 nt, Artificial Sequence
  Description of Artificial Sequence: Synthetic oligonucleotide
  Antisense strand to SEQ ID NO: 1537898
gaauuucucgcauucgcuc

SEQ ID NO: 1537900 - RNA, 19 nt, Artificial Sequence
  Description of Artificial Sequence: Synthetic oligonucleotide
  Sense strand starting at position 523 of SEQ ID NO: 1245120
cucagauacuuuguuggaa

SEQ ID NO: 1537901 - RNA, 19 nt, Artificial Sequence
  Description of Artificial Sequence: Synthetic oligonucleotide
  Antisense strand to SEQ ID NO: 1537900
uuccaacaaaguaucugag

SEQ ID NO: 1537902 - RNA, 19 nt, Artificial Sequence
  Description of Artificial Sequence: Synthetic oligonucleotide
  Sense strand starting at position 524 of SEQ ID NO: 1245120
ucagauacuuuguuggaac

SEQ ID NO: 1537903 - RNA, 19 nt, Artificial Sequence
  Description of Artificial Sequence: Synthetic oligonucleotide
  Antisense strand to SEQ ID NO: 1537902
guuccaacaaaguaucuga

SEQ ID NO: 1537904 - RNA, 19 nt, Artificial Sequence
  Description of Artificial Sequence: Synthetic oligonucleotide
  Sense strand starting at position 538 of SEQ ID NO: 1245120
ggaacaguucccgggcaaa

SEQ ID NO: 1537905 - RNA, 19 nt, Artificial Sequence
  Description of Artificial Sequence: Synthetic oligonucleotide
  Antisense strand to SEQ ID NO: 1537904
uuugcccgggaacuguucc

SEQ ID NO: 1537906 - RNA, 19 nt, Artificial Sequence
  Description of Artificial Sequence: Synthetic oligonucleotide
  Sense strand starting at position 555 of SEQ ID NO: 1245120
aauggaugcgcuuauuugu

SEQ ID NO: 1537907 - RNA, 19 nt, Artificial Sequence
  Description of Artificial Sequence: Synthetic oligonucleotide
  Antisense strand to SEQ ID NO: 1537906
acaaauaagcgcauccauu

SEQ ID NO: 1537908 - RNA, 19 nt, Artificial Sequence
  Description of Artificial Sequence: Synthetic oligonucleotide
  Sense strand starting at position 560 of SEQ ID NO: 1245120
augcgcuuauuuguccaau

SEQ ID NO: 1537909 - RNA, 19 nt, Artificial Sequence
  Description of Artificial Sequence: Synthetic oligonucleotide
  Antisense strand to SEQ ID NO: 1537908
auuggacaaauaagcgcau

SEQ ID NO: 1537910 - RNA, 19 nt, Artificial Sequence
  Description of Artificial Sequence: Synthetic oligonucleotide
  Sense strand starting at position 561 of SEQ ID NO: 1245120
ugcgcuuauuuguccaauu

SEQ ID NO: 1537911 - RNA, 19 nt, Artificial Sequence
  Description of Artificial Sequence: Synthetic oligonucleotide
  Antisense strand to SEQ ID NO: 1537910
aauuggacaaauaagcgca

SEQ ID NO: 1537912 - RNA, 19 nt, Artificial Sequence
  Description of Artificial Sequence: Synthetic oligonucleotide
  Sense strand starting at position 562 of SEQ ID NO: 1245120
gcgcuuauuuguccaauuc

SEQ ID NO: 1537913 - RNA, 19 nt, Artificial Sequence
  Description of Artificial Sequence: Synthetic oligonucleotide
  Antisense strand to SEQ ID NO: 1537912
gaauuggacaaauaagcgc

SEQ ID NO: 1537914 - RNA, 19 nt, Artificial Sequence
  Description of Artificial Sequence: Synthetic oligonucleotide
  Sense strand starting at position 598 of SEQ ID NO: 1245120
cguagaucauaacuaccaa

SEQ ID NO: 1537915 - RNA, 19 nt, Artificial Sequence
  Description of Artificial Sequence: Synthetic oligonucleotide
  Antisense strand to SEQ ID NO: 1537914
uugguaguuaugaucuacg

SEQ ID NO: 1537916 - RNA, 19 nt, Artificial Sequence
  Description of Artificial Sequence: Synthetic oligonucleotide
  Sense strand starting at position 700 of SEQ ID NO: 1245120
guaagaauccgcgagacca

SEQ ID NO: 1537917 - RNA, 19 nt, Artificial Sequence
  Description of Artificial Sequence: Synthetic oligonucleotide
  Antisense strand to SEQ ID NO: 1537916
uggucucgcggauucuuac

SEQ ID NO: 1537918 - RNA, 19 nt, Artificial Sequence
  Description of Artificial Sequence: Synthetic oligonucleotide
  Sense strand starting at position 924 of SEQ ID NO: 1245120
cuuccucuccuagaggauu

SEQ ID NO: 1537919 - RNA, 19 nt, Artificial Sequence
  Description of Artificial Sequence: Synthetic oligonucleotide
  Antisense strand to SEQ ID NO: 1537918
aauccucuaggagaggaag

SEQ ID NO: 1537920 - RNA, 19 nt, Artificial Sequence
  Description of Artificial Sequence: Synthetic oligonucleotide
  Sense strand starting at position 1548 of SEQ ID NO: 1245120
ucgaacaccuugucucaaa

SEQ ID NO: 1537921 - RNA, 19 nt, Artificial Sequence
  Description of Artificial Sequence: Synthetic oligonucleotide
  Antisense strand to SEQ ID NO: 1537920
uuugagacaagguguucga

SEQ ID NO: 1537922 - RNA, 19 nt, Artificial Sequence
  Description of Artificial Sequence: Synthetic oligonucleotide
  Sense strand starting at position 2035 of SEQ ID NO: 1245120
agaggccacuccuuguuau

SEQ ID NO: 1537923 - RNA, 19 nt, Artificial Sequence
  Description of Artificial Sequence: Synthetic oligonucleotide
  Antisense strand to SEQ ID NO: 1537922
auaacaaggaguggccucu

SEQ ID NO: 1537924 - RNA, 19 nt, Artificial Sequence
  Description of Artificial Sequence: Synthetic oligonucleotide
  Sense strand starting at position 2045 of SEQ ID NO: 1245120
ccuuguuauuucucaaguu

SEQ ID NO: 1537925 - RNA, 19 nt, Artificial Sequence
  Description of Artificial Sequence: Synthetic oligonucleotide
  Antisense strand to SEQ ID NO: 1537924
aacuugagaaauaacaagg

SEQ ID NO: 1537926 - RNA, 19 nt, Artificial Sequence
  Description of Artificial Sequence: Synthetic oligonucleotide
  Sense strand starting at position 2444 of SEQ ID NO: 1245120
cuguauucucuccggauuu

SEQ ID NO: 1537927 - RNA, 19 nt, Artificial Sequence
  Description of Artificial Sequence: Synthetic oligonucleotide
  Antisense strand to SEQ ID NO: 1537926
aaauccggagagaauacag

SEQ ID NO: 1537928 - RNA, 19 nt, Artificial Sequence
  Description of Artificial Sequence: Synthetic oligonucleotide
  Sense strand starting at position 2457 of SEQ ID NO: 1245120
ggauuugacuaacaugaca

SEQ ID NO: 1537929 - RNA, 19 nt, Artificial Sequence
  Description of Artificial Sequence: Synthetic oligonucleotide
  Antisense strand to SEQ ID NO: 1537928
ugucauguuagucaaaucc

SEQ ID NO: 1537930 - RNA, 19 nt, Artificial Sequence
  Description of Artificial Sequence: Synthetic oligonucleotide
  Sense strand starting at position 2654 of SEQ ID NO: 1245120
aaacgacuuuguucuuaga

SEQ ID NO: 1537931 - RNA, 19 nt, Artificial Sequence
  Description of Artificial Sequence: Synthetic oligonucleotide
  Antisense strand to SEQ ID NO: 1537930
ucuaagaacaaagucguuu

SEQ ID NO: 1537932 - RNA, 19 nt, Artificial Sequence
  Description of Artificial Sequence: Synthetic oligonucleotide
  Sense strand starting at position 2656 of SEQ ID NO: 1245120
acgacuuuguucuuagaug

SEQ ID NO: 1537933 - RNA, 19 nt, Artificial Sequence
  Description of Artificial Sequence: Synthetic oligonucleotide
  Antisense strand to SEQ ID NO: 1537932
caucuaagaacaaagucgu

SEQ ID NO: 1537934 - RNA, 19 nt, Artificial Sequence
  Description of Artificial Sequence: Synthetic oligonucleotide
  Sense strand starting at position 2670 of SEQ ID NO: 1245120
agaugugaauuauugguuu

SEQ ID NO: 1537935 - RNA, 19 nt, Artificial Sequence
  Description of Artificial Sequence: Synthetic oligonucleotide
  Antisense strand to SEQ ID NO: 1537934
aaaccaauaauucacaucu

SEQ ID NO: 1537936 - RNA, 19 nt, Artificial Sequence
  Description of Artificial Sequence: Synthetic oligonucleotide
  Sense strand starting at position 2673 of SEQ ID NO: 1245120
ugugaauuauugguuuacu

SEQ ID NO: 1537937 - RNA, 19 nt, Artificial Sequence
  Description of Artificial Sequence: Synthetic oligonucleotide
  Antisense strand to SEQ ID NO: 1537936
aguaaaccaauaauucaca

SEQ ID NO: 1537938 - RNA, 19 nt, Artificial Sequence
  Description of Artificial Sequence: Synthetic oligonucleotide
  Sense strand starting at position 2674 of SEQ ID NO: 1245120
gugaauuauugguuuacua

SEQ ID NO: 1537939 - RNA, 19 nt, Artificial Sequence
  Description of Artificial Sequence: Synthetic oligonucleotide
  Antisense strand to SEQ ID NO: 1537938
uaguaaaccaauaauucac

SEQ ID NO: 1537940 - RNA, 19 nt, Artificial Sequence
  Description of Artificial Sequence: Synthetic oligonucleotide
  Sense strand starting at position 2965 of SEQ ID NO: 1245120
gggacauccucuuauuucu

SEQ ID NO: 1537941 - RNA, 19 nt, Artificial Sequence
  Description of Artificial Sequence: Synthetic oligonucleotide
  Antisense strand to SEQ ID NO: 1537940
agaaauaagaggauguccc

SEQ ID NO: 1537942 - RNA, 19 nt, Artificial Sequence
  Description of Artificial Sequence: Synthetic oligonucleotide
  Sense strand starting at position 3153 of SEQ ID NO: 1245120
cuggcucaagucuaauaga

SEQ ID NO: 1537943 - RNA, 19 nt, Artificial Sequence
  Description of Artificial Sequence: Synthetic oligonucleotide
  Antisense strand to SEQ ID NO: 1537942
ucuauuagacuugagccag

SEQ ID NO: 1537944 - RNA, 19 nt, Artificial Sequence
  Description of Artificial Sequence: Synthetic oligonucleotide
  Sense strand starting at position 3188 of SEQ ID NO: 1245120
ccauguauucccugaaguc

SEQ ID NO: 1537945 - RNA, 19 nt, Artificial Sequence
  Description of Artificial Sequence: Synthetic oligonucleotide
  Antisense strand to SEQ ID NO: 1537944
gacuucagggaauacaugg

SEQ ID NO: 1537946 - RNA, 19 nt, Artificial Sequence
  Description of Artificial Sequence: Synthetic oligonucleotide
  Sense strand starting at position 3224 of SEQ ID NO: 1245120
ucaugaggcucagcuuuaa

SEQ ID NO: 1537947 - RNA, 19 nt, Artificial Sequence
  Description of Artificial Sequence: Synthetic oligonucleotide
  Antisense strand to SEQ ID NO: 1537946
uuaaagcugagccucauga

SEQ ID NO: 1537948 - RNA, 19 nt, Artificial Sequence
  Description of Artificial Sequence: Synthetic oligonucleotide
  Sense strand starting at position 3301 of SEQ ID NO: 1245120
gaggucucuguauguaaga

SEQ ID NO: 1537949 - RNA, 19 nt, Artificial Sequence
  Description of Artificial Sequence: Synthetic oligonucleotide
  Antisense strand to SEQ ID NO: 1537948
ucuuacauacagagaccuc

SEQ ID NO: 1537950 - RNA, 19 nt, Artificial Sequence
  Description of Artificial Sequence: Synthetic oligonucleotide
  Sense strand starting at position 3409 of SEQ ID NO: 1245120
agagaaagcuucucaaagu

SEQ ID NO: 1537951 - RNA, 19 nt, Artificial Sequence
  Description of Artificial Sequence: Synthetic oligonucleotide
  Antisense strand to SEQ ID NO: 1537950
acuuugagaagcuuucucu

SEQ ID NO: 1537952 - RNA, 19 nt, Artificial Sequence
  Description of Artificial Sequence: Synthetic oligonucleotide
  Sense strand starting at position 3623 of SEQ ID NO: 1245120
uugcgauaagcccagcaaa

SEQ ID NO: 1537953 - RNA, 19 nt, Artificial Sequence
  Description of Artificial Sequence: Synthetic oligonucleotide
  Antisense strand to SEQ ID NO: 1537952
uuugcugggcuuaucgcaa

SEQ ID NO: 1537954 - RNA, 19 nt, Artificial Sequence
  Description of Artificial Sequence: Synthetic oligonucleotide
  Sense strand starting at position 3703 of SEQ ID NO: 1245120
ucuggagagccuugugaga

SEQ ID NO: 1537955 - RNA, 19 nt, Artificial Sequence
  Description of Artificial Sequence: Synthetic oligonucleotide
  Antisense strand to SEQ ID NO: 1537954
ucucacaaggcucuccaga

SEQ ID NO: 1537956 - RNA, 19 nt, Artificial Sequence
  Description of Artificial Sequence: Synthetic oligonucleotide
  Sense strand starting at position 3753 of SEQ ID NO: 1245120
gguucagaaugguuacaug

SEQ ID NO: 1537957 - RNA, 19 nt, Artificial Sequence
  Description of Artificial Sequence: Synthetic oligonucleotide
  Antisense strand to SEQ ID NO: 1537956
cauguaaccauucugaacc

SEQ ID NO: 1537958 - RNA, 19 nt, Artificial Sequence
  Description of Artificial Sequence: Synthetic oligonucleotide
  Sense strand starting at position 3768 of SEQ ID NO: 1245120
caugcaauggcugggaauu

SEQ ID NO: 1537959 - RNA, 19 nt, Artificial Sequence
  Description of Artificial Sequence: Synthetic oligonucleotide
  Antisense strand to SEQ ID NO: 1537958
aauucccagccauugcaug

SEQ ID NO: 1537960 - RNA, 19 nt, Artificial Sequence
  Description of Artificial Sequence: Synthetic oligonucleotide
  Sense strand starting at position 3929 of SEQ ID NO: 1245120
gaacccauuugugcuguaa

SEQ ID NO: 1537961 - RNA, 19 nt, Artificial Sequence
  Description of Artificial Sequence: Synthetic oligonucleotide
  Antisense strand to SEQ ID NO: 1537960
uuacagcacaaauggguuc

SEQ ID NO: 1537962 - RNA, 19 nt, Artificial Sequence
  Description of Artificial Sequence: Synthetic oligonucleotide
  Sense strand starting at position 3954 of SEQ ID NO: 1245120
uuucuuuaauaccuaggga

SEQ ID NO: 1537963 - RNA, 19 nt, Artificial Sequence
  Description of Artificial Sequence: Synthetic oligonucleotide
  Antisense strand to SEQ ID NO: 1537962
ucccuagguauuaaagaaa

SEQ ID NO: 1537964 - RNA, 19 nt, Artificial Sequence
  Description of Artificial Sequence: Synthetic oligonucleotide
  Sense strand starting at position 2 of SEQ ID NO: 1245121
ugcugugaaauccagcuga

SEQ ID NO: 1537965 - RNA, 19 nt, Artificial Sequence
  Description of Artificial Sequence: Synthetic oligonucleotide
  Antisense strand to SEQ ID NO: 1537964
ucagcuggauuucacagca

SEQ ID NO: 1537966 - RNA, 19 nt, Artificial Sequence
  Description of Artificial Sequence: Synthetic oligonucleotide
  Sense strand starting at position 313 of SEQ ID NO: 1245121
gugauaagcucaccacaca

SEQ ID NO: 1537967 - RNA, 19 nt, Artificial Sequence
  Description of Artificial Sequence: Synthetic oligonucleotide
  Antisense strand to SEQ ID NO: 1537966
uguguggugagcuuaucac

SEQ ID NO: 1537968 - RNA, 19 nt, Artificial Sequence
  Description of Artificial Sequence: Synthetic oligonucleotide
  Sense strand starting at position 333 of SEQ ID NO: 1245121
guaugaugcauuuguguau

SEQ ID NO: 1537969 - RNA, 19 nt, Artificial Sequence
  Description of Artificial Sequence: Synthetic oligonucleotide
  Antisense strand to SEQ ID NO: 1537968
auacacaaaugcaucauac

SEQ ID NO: 1537970 - RNA, 19 nt, Artificial Sequence
  Description of Artificial Sequence: Synthetic oligonucleotide
  Sense strand starting at position 336 of SEQ ID NO: 1245121
ugaugcauuuguguauguu

SEQ ID NO: 1537971 - RNA, 19 nt, Artificial Sequence
  Description of Artificial Sequence: Synthetic oligonucleotide
  Antisense strand to SEQ ID NO: 1537970
aacauacacaaaugcauca

SEQ ID NO: 1537972 - RNA, 19 nt, Artificial Sequence
  Description of Artificial Sequence: Synthetic oligonucleotide
  Sense strand starting at position 337 of SEQ ID NO: 1245121
gaugcauuuguguauguuu

SEQ ID NO: 1537973 - RNA, 19 nt, Artificial Sequence
  Description of Artificial Sequence: Synthetic oligonucleotide
  Antisense strand to SEQ ID NO: 1537972
aaacauacacaaaugcauc

SEQ ID NO: 1537974 - RNA, 19 nt, Artificial Sequence
  Description of Artificial Sequence: Synthetic oligonucleotide
  Sense strand starting at position 377 of SEQ ID NO: 1245121
acugacauucuucgaguga

SEQ ID NO: 1537975 - RNA, 19 nt, Artificial Sequence
  Description of Artificial Sequence: Synthetic oligonucleotide
  Antisense strand to SEQ ID NO: 1537974
ucacucgaagaaugucagu

SEQ ID NO: 1537976 - RNA, 19 nt, Artificial Sequence
  Description of Artificial Sequence: Synthetic oligonucleotide
  Sense strand starting at position 382 of SEQ ID NO: 1245121
cauucuucgagugagugga

SEQ ID NO: 1537977 - RNA, 19 nt, Artificial Sequence
  Description of Artificial Sequence: Synthetic oligonucleotide
  Antisense strand to SEQ ID NO: 1537976
uccacucacucgaagaaug

SEQ ID NO: 1537978 - RNA, 19 nt, Artificial Sequence
  Description of Artificial Sequence: Synthetic oligonucleotide
  Sense strand starting at position 481 of SEQ ID NO: 1245121
cucaacaagugaucaaagu

SEQ ID NO: 1537979 - RNA, 19 nt, Artificial Sequence
  Description of Artificial Sequence: Synthetic oligonucleotide
  Antisense strand to SEQ ID NO: 1537978
acuuugaucacuuguugag

SEQ ID NO: 1537980 - RNA, 19 nt, Artificial Sequence
  Description of Artificial Sequence: Synthetic oligonucleotide
  Sense strand starting at position 669 of SEQ ID NO: 1245121
ucguccgaucaugaaguaa

SEQ ID NO: 1537981 - RNA, 19 nt, Artificial Sequence
  Description of Artificial Sequence: Synthetic oligonucleotide
  Antisense strand to SEQ ID NO: 1537980
uuacuucaugaucggacga

SEQ ID NO: 1537982 - RNA, 19 nt, Artificial Sequence
  Description of Artificial Sequence: Synthetic oligonucleotide
  Sense strand starting at position 804 of SEQ ID NO: 1245121
guaugcugagaaugaauau

SEQ ID NO: 1537983 - RNA, 19 nt, Artificial Sequence
  Description of Artificial Sequence: Synthetic oligonucleotide
  Antisense strand to SEQ ID NO: 1537982
auauucauucucagcauac

SEQ ID NO: 1537984 - RNA, 19 nt, Artificial Sequence
  Description of Artificial Sequence: Synthetic oligonucleotide
  Sense strand starting at position 1017 of SEQ ID NO: 1245121
cgacaauaucuauaguuua

SEQ ID NO: 1537985 - RNA, 19 nt, Artificial Sequence
  Description of Artificial Sequence: Synthetic oligonucleotide
  Antisense strand to SEQ ID NO: 1537984
uaaacuauagauauugucg

SEQ ID NO: 1537986 - RNA, 19 nt, Artificial Sequence
  Description of Artificial Sequence: Synthetic oligonucleotide
  Sense strand starting at position 1106 of SEQ ID NO: 1245121
cugcuauccuuguuauuuc

SEQ ID NO: 1537987 - RNA, 19 nt, Artificial Sequence
  Description of Artificial Sequence: Synthetic oligonucleotide
  Antisense strand to SEQ ID NO: 1537986
gaaauaacaaggauagcag

SEQ ID NO: 1537988 - RNA, 19 nt, Artificial Sequence
  Description of Artificial Sequence: Synthetic oligonucleotide
  Sense strand starting at position 1116 of SEQ ID NO: 1245121
uguuauuucuuguucccaa

SEQ ID NO: 1537989 - RNA, 19 nt, Artificial Sequence
  Description of Artificial Sequence: Synthetic oligonucleotide
  Antisense strand to SEQ ID NO: 1537988
uugggaacaagaaauaaca

SEQ ID NO: 1537990 - RNA, 19 nt, Artificial Sequence
  Description of Artificial Sequence: Synthetic oligonucleotide
  Sense strand starting at position 1117 of SEQ ID NO: 1245121
guuauuucuuguucccaag

SEQ ID NO: 1537991 - RNA, 19 nt, Artificial Sequence
  Description of Artificial Sequence: Synthetic oligonucleotide
  Antisense strand to SEQ ID NO: 1537990
cuugggaacaagaaauaac

SEQ ID NO: 1537992 - RNA, 19 nt, Artificial Sequence
  Description of Artificial Sequence: Synthetic oligonucleotide
  Sense strand starting at position 1222 of SEQ ID NO: 1245121
aucagaagguaucuuccua

SEQ ID NO: 1537993 - RNA, 19 nt, Artificial Sequence
  Description of Artificial Sequence: Synthetic oligonucleotide
  Antisense strand to SEQ ID NO: 1537992
uaggaagauaccuucugau

SEQ ID NO: 1537994 - RNA, 19 nt, Artificial Sequence
  Description of Artificial Sequence: Synthetic oligonucleotide
  Sense strand starting at position 1226 of SEQ ID NO: 1245121
gaagguaucuuccuaauga

SEQ ID NO: 1537995 - RNA, 19 nt, Artificial Sequence
  Description of Artificial Sequence: Synthetic oligonucleotide
  Antisense strand to SEQ ID NO: 1537994
ucauuaggaagauaccuuc

SEQ ID NO: 1537996 - RNA, 19 nt, Artificial Sequence
  Description of Artificial Sequence: Synthetic oligonucleotide
  Sense strand starting at position 1241 of SEQ ID NO: 1245121
augagaacuacucggacca

SEQ ID NO: 1537997 - RNA, 19 nt, Artificial Sequence
  Description of Artificial Sequence: Synthetic oligonucleotide
  Antisense strand to SEQ ID NO: 1537996
ugguccgaguaguucucau

SEQ ID NO: 1537998 - RNA, 19 nt, Artificial Sequence
  Description of Artificial Sequence: Synthetic oligonucleotide
  Sense strand starting at position 2271 of SEQ ID NO: 1245121
ggguuucuaagcggaggaa

SEQ ID NO: 1537999 - RNA, 19 nt, Artificial Sequence
  Description of Artificial Sequence: Synthetic oligonucleotide
  Antisense strand to SEQ ID NO: 1537998
uuccuccgcuuagaaaccc

SEQ ID NO: 1538000 - RNA, 19 nt, Artificial Sequence
  Description of Artificial Sequence: Synthetic oligonucleotide
  Sense strand starting at position 2460 of SEQ ID NO: 1245121
ggcugugggauugacucaa

SEQ ID NO: 1538001 - RNA, 19 nt, Artificial Sequence
  Description of Artificial Sequence: Synthetic oligonucleotide
  Antisense strand to SEQ ID NO: 1538000
uugagucaaucccacagcc

SEQ ID NO: 1538002 - RNA, 19 nt, Artificial Sequence
  Description of Artificial Sequence: Synthetic oligonucleotide
  Sense strand starting at position 2569 of SEQ ID NO: 1245121
ugagcacucccuuggaacu

SEQ ID NO: 1538003 - RNA, 19 nt, Artificial Sequence
  Description of Artificial Sequence: Synthetic oligonucleotide
  Antisense strand to SEQ ID NO: 1538002
aguuccaagggagugcuca

SEQ ID NO: 1538004 - RNA, 19 nt, Artificial Sequence
  Description of Artificial Sequence: Synthetic oligonucleotide
  Sense strand starting at position 2643 of SEQ ID NO: 1245121
agauuaauauaggaggaca

SEQ ID NO: 1538005 - RNA, 19 nt, Artificial Sequence
  Description of Artificial Sequence: Synthetic oligonucleotide
  Antisense strand to SEQ ID NO: 1538004
uguccuccuauauuaaucu

SEQ ID NO: 1538006 - RNA, 19 nt, Artificial Sequence
  Description of Artificial Sequence: Synthetic oligonucleotide
  Sense strand starting at position 2737 of SEQ ID NO: 1245121
uuucucaggcaguauaaau

SEQ ID NO: 1538007 - RNA, 19 nt, Artificial Sequence
  Description of Artificial Sequence: Synthetic oligonucleotide
  Antisense strand to SEQ ID NO: 1538006
auuuauacugccugagaaa

SEQ ID NO: 1538008 - RNA, 19 nt, Artificial Sequence
  Description of Artificial Sequence: Synthetic oligonucleotide
  Sense strand starting at position 2804 of SEQ ID NO: 1245121
gggaccugguauucgguaa

SEQ ID NO: 1538009 - RNA, 19 nt, Artificial Sequence
  Description of Artificial Sequence: Synthetic oligonucleotide
  Antisense strand to SEQ ID NO: 1538008
uuaccgaauaccagguccc

SEQ ID NO: 1538010 - RNA, 19 nt, Artificial Sequence
  Description of Artificial Sequence: Synthetic oligonucleotide
  Sense strand starting at position 2805 of SEQ ID NO: 1245121
ggaccugguauucgguaaa

SEQ ID NO: 1538011 - RNA, 19 nt, Artificial Sequence
  Description of Artificial Sequence: Synthetic oligonucleotide
  Antisense strand to SEQ ID NO: 1538010
uuuaccgaauaccaggucc

SEQ ID NO: 1538012 - RNA, 19 nt, Artificial Sequence
  Description of Artificial Sequence: Synthetic oligonucleotide
  Sense strand starting at position 2808 of SEQ ID NO: 1245121
ccugguauucgguaaagac

SEQ ID NO: 1538013 - RNA, 19 nt, Artificial Sequence
  Description of Artificial Sequence: Synthetic oligonucleotide
  Antisense strand to SEQ ID NO: 1538012
gucuuuaccgaauaccagg

SEQ ID NO: 1538014 - RNA, 19 nt, Artificial Sequence
  Description of Artificial Sequence: Synthetic oligonucleotide
  Sense strand starting at position 3163 of SEQ ID NO: 1245121
auaaaugucuugcuuagau

SEQ ID NO: 1538015 - RNA, 19 nt, Artificial Sequence
  Description of Artificial Sequence: Synthetic oligonucleotide
  Antisense strand to SEQ ID NO: 1538014
aucuaagcaagacauuuau

SEQ ID NO: 1538016 - RNA, 19 nt, Artificial Sequence
  Description of Artificial Sequence: Synthetic oligonucleotide
  Sense strand starting at position 3240 of SEQ ID NO: 1245121
uuaacuuugaggugaaaug

SEQ ID NO: 1538017 - RNA, 19 nt, Artificial Sequence
  Description of Artificial Sequence: Synthetic oligonucleotide
  Antisense strand to SEQ ID NO: 1538016
cauuucaccucaaaguuaa

SEQ ID NO: 1538018 - RNA, 19 nt, Artificial Sequence
  Description of Artificial Sequence: Synthetic oligonucleotide
  Sense strand starting at position 3432 of SEQ ID NO: 1245121
uguugaaauuaucugauca

SEQ ID NO: 1538019 - RNA, 19 nt, Artificial Sequence
  Description of Artificial Sequence: Synthetic oligonucleotide
  Antisense strand to SEQ ID NO: 1538018
ugaucagauaauuucaaca

SEQ ID NO: 1538020 - RNA, 19 nt, Artificial Sequence
  Description of Artificial Sequence: Synthetic oligonucleotide
  Sense strand starting at position 3443 of SEQ ID NO: 1245121
ucugaucauccaggucuca

SEQ ID NO: 1538021 - RNA, 19 nt, Artificial Sequence
  Description of Artificial Sequence: Synthetic oligonucleotide
  Antisense strand to SEQ ID NO: 1538020
ugagaccuggaugaucaga

SEQ ID NO: 1538022 - RNA, 19 nt, Artificial Sequence
  Description of Artificial Sequence: Synthetic oligonucleotide
  Sense strand starting at position 3554 of SEQ ID NO: 1245121
gccguuuagguuguuuauu

SEQ ID NO: 1538023 - RNA, 19 nt, Artificial Sequence
  Description of Artificial Sequence: Synthetic oligonucleotide
  Antisense strand to SEQ ID NO: 1538022
aauaaacaaccuaaacggc

SEQ ID NO: 1538024 - RNA, 19 nt, Artificial Sequence
  Description of Artificial Sequence: Synthetic oligonucleotide
  Sense strand starting at position 3555 of SEQ ID NO: 1245121
ccguuuagguuguuuauuu

SEQ ID NO: 1538025 - RNA, 19 nt, Artificial Sequence
  Description of Artificial Sequence: Synthetic oligonucleotide
  Antisense strand to SEQ ID NO: 1538024
aaauaaacaaccuaaacgg

SEQ ID NO: 1538026 - RNA, 19 nt, Artificial Sequence
  Description of Artificial Sequence: Synthetic oligonucleotide
  Sense strand starting at position 3593 of SEQ ID NO: 1245121
gguugacuccuguacccua

SEQ ID NO: 1538027 - RNA, 19 nt, Artificial Sequence
  Description of Artificial Sequence: Synthetic oligonucleotide
  Antisense strand to SEQ ID NO: 1538026
uaggguacaggagucaacc

SEQ ID NO: 1538028 - RNA, 19 nt, Artificial Sequence
  Description of Artificial Sequence: Synthetic oligonucleotide
  Sense strand starting at position 3624 of SEQ ID NO: 1245121
ucaagucaugaguagcacu

SEQ ID NO: 1538029 - RNA, 19 nt, Artificial Sequence
  Description of Artificial Sequence: Synthetic oligonucleotide
  Antisense strand to SEQ ID NO: 1538028
agugcuacucaugacuuga

SEQ ID NO: 1538030 - RNA, 19 nt, Artificial Sequence
  Description of Artificial Sequence: Synthetic oligonucleotide
  Sense strand starting at position 3680 of SEQ ID NO: 1245121
ugaguugaaccucgaacaa

SEQ ID NO: 1538031 - RNA, 19 nt, Artificial Sequence
  Description of Artificial Sequence: Synthetic oligonucleotide
  Antisense strand to SEQ ID NO: 1538030
uuguucgagguucaacuca

SEQ ID NO: 1538032 - RNA, 19 nt, Artificial Sequence
  Description of Artificial Sequence: Synthetic oligonucleotide
  Sense strand starting at position 3691 of SEQ ID NO: 1245121
ucgaacaauugggcugaua

SEQ ID NO: 1538033 - RNA, 19 nt, Artificial Sequence
  Description of Artificial Sequence: Synthetic oligonucleotide
  Antisense strand to SEQ ID NO: 1538032
uaucagcccaauuguucga

SEQ ID NO: 1538034 - RNA, 19 nt, Artificial Sequence
  Description of Artificial Sequence: Synthetic oligonucleotide
  Sense strand starting at position 3693 of SEQ ID NO: 1245121
gaacaauugggcugauaca

SEQ ID NO: 1538035 - RNA, 19 nt, Artificial Sequence
  Description of Artificial Sequence: Synthetic oligonucleotide
  Antisense strand to SEQ ID NO: 1538034
uguaucagcccaauuguuc

SEQ ID NO: 1538036 - RNA, 19 nt, Artificial Sequence
  Description of Artificial Sequence: Synthetic oligonucleotide
  Sense strand starting at position 3730 of SEQ ID NO: 1245121
ugagguuuauucccaaaca

SEQ ID NO: 1538037 - RNA, 19 nt, Artificial Sequence
  Description of Artificial Sequence: Synthetic oligonucleotide
  Antisense strand to SEQ ID NO: 1538036
uguuugggaauaaaccuca

SEQ ID NO: 1538038 - RNA, 19 nt, Artificial Sequence
  Description of Artificial Sequence: Synthetic oligonucleotide
  Sense strand starting at position 3837 of SEQ ID NO: 1245121
ccacauuuaugagagagua

SEQ ID NO: 1538039 - RNA, 19 nt, Artificial Sequence
  Description of Artificial Sequence: Synthetic oligonucleotide
  Antisense strand to SEQ ID NO: 1538038
uacucucucauaaaugugg

SEQ ID NO: 1538040 - RNA, 19 nt, Artificial Sequence
  Description of Artificial Sequence: Synthetic oligonucleotide
  Sense strand starting at position 3884 of SEQ ID NO: 1245121
agagauuccuaucuguuug

SEQ ID NO: 1538041 - RNA, 19 nt, Artificial Sequence
  Description of Artificial Sequence: Synthetic oligonucleotide
  Antisense strand to SEQ ID NO: 1538040
caaacagauaggaaucucu

SEQ ID NO: 1538042 - RNA, 19 nt, Artificial Sequence
  Description of Artificial Sequence: Synthetic oligonucleotide
  Sense strand starting at position 3981 of SEQ ID NO: 1245121
caggguuauuucuauggau

SEQ ID NO: 1538043 - RNA, 19 nt, Artificial Sequence
  Description of Artificial Sequence: Synthetic oligonucleotide
  Antisense strand to SEQ ID NO: 1538042
auccauagaaauaacccug

SEQ ID NO: 1538044 - RNA, 19 nt, Artificial Sequence
  Description of Artificial Sequence: Synthetic oligonucleotide
  Sense strand starting at position 90 of SEQ ID NO: 1245122
uuucauaaggcauguggga

SEQ ID NO: 1538045 - RNA, 19 nt, Artificial Sequence
  Description of Artificial Sequence: Synthetic oligonucleotide
  Antisense strand to SEQ ID NO: 1538044
ucccacaugccuuaugaaa

SEQ ID NO: 1538046 - RNA, 19 nt, Artificial Sequence
  Description of Artificial Sequence: Synthetic oligonucleotide
  Sense strand starting at position 272 of SEQ ID NO: 1245122
ggaaguggcuguuuaaaga

SEQ ID NO: 1538047 - RNA, 19 nt, Artificial Sequence
  Description of Artificial Sequence: Synthetic oligonucleotide
  Antisense strand to SEQ ID NO: 1538046
ucuuuaaacagccacuucc

SEQ ID NO: 1538048 - RNA, 19 nt, Artificial Sequence
  Description of Artificial Sequence: Synthetic oligonucleotide
  Sense strand starting at position 353 of SEQ ID NO: 1245122
uucuaugaaaguuagugua

SEQ ID NO: 1538049 - RNA, 19 nt, Artificial Sequence
  Description of Artificial Sequence: Synthetic oligonucleotide
  Antisense strand to SEQ ID NO: 1538048
uacacuaacuuucauagaa

SEQ ID NO: 1538050 - RNA, 19 nt, Artificial Sequence
  Description of Artificial Sequence: Synthetic oligonucleotide
  Sense strand starting at position 355 of SEQ ID NO: 1245122
cuaugaaaguuaguguaca

SEQ ID NO: 1538051 - RNA, 19 nt, Artificial Sequence
  Description of Artificial Sequence: Synthetic oligonucleotide
  Antisense strand to SEQ ID NO: 1538050
uguacacuaacuuucauag

SEQ ID NO: 1538052 - RNA, 19 nt, Artificial Sequence
  Description of Artificial Sequence: Synthetic oligonucleotide
  Sense strand starting at position 367 of SEQ ID NO: 1245122
guguacaccuaucugaaca

SEQ ID NO: 1538053 - RNA, 19 nt, Artificial Sequence
  Description of Artificial Sequence: Synthetic oligonucleotide
  Antisense strand to SEQ ID NO: 1538052
uguucagauagguguacac

SEQ ID NO: 1538054 - RNA, 19 nt, Artificial Sequence
  Description of Artificial Sequence: Synthetic oligonucleotide
  Sense strand starting at position 380 of SEQ ID NO: 1245122
ugaacaagcugaucaacua

SEQ ID NO: 1538055 - RNA, 19 nt, Artificial Sequence
  Description of Artificial Sequence: Synthetic oligonucleotide
  Antisense strand to SEQ ID NO: 1538054
uaguugaucagcuuguuca

SEQ ID NO: 1538056 - RNA, 19 nt, Artificial Sequence
  Description of Artificial Sequence: Synthetic oligonucleotide
  Sense strand starting at position 449 of SEQ ID NO: 1245122
agugcuugauuacugacaa

SEQ ID NO: 1538057 - RNA, 19 nt, Artificial Sequence
  Description of Artificial Sequence: Synthetic oligonucleotide
  Antisense strand to SEQ ID NO: 1538056
uugucaguaaucaagcacu

SEQ ID NO: 1538058 - RNA, 19 nt, Artificial Sequence
  Description of Artificial Sequence: Synthetic oligonucleotide
  Sense strand starting at position 496 of SEQ ID NO: 1245122
acuguauaaugaucaguga

SEQ ID NO: 1538059 - RNA, 19 nt, Artificial Sequence
  Description of Artificial Sequence: Synthetic oligonucleotide
  Antisense strand to SEQ ID NO: 1538058
ucacugaucauuauacagu

SEQ ID NO: 1538060 - RNA, 19 nt, Artificial Sequence
  Description of Artificial Sequence: Synthetic oligonucleotide
  Sense strand starting at position 497 of SEQ ID NO: 1245122
cuguauaaugaucagugau

SEQ ID NO: 1538061 - RNA, 19 nt, Artificial Sequence
  Description of Artificial Sequence: Synthetic oligonucleotide
  Antisense strand to SEQ ID NO: 1538060
aucacugaucauuauacag

SEQ ID NO: 1538062 - RNA, 19 nt, Artificial Sequence
  Description of Artificial Sequence: Synthetic oligonucleotide
  Sense strand starting at position 621 of SEQ ID NO: 1245122
gcuuacugaugcucauuua

SEQ ID NO: 1538063 - RNA, 19 nt, Artificial Sequence
  Description of Artificial Sequence: Synthetic oligonucleotide
  Antisense strand to SEQ ID NO: 1538062
uaaaugagcaucaguaagc

SEQ ID NO: 1538064 - RNA, 19 nt, Artificial Sequence
  Description of Artificial Sequence: Synthetic oligonucleotide
  Sense strand starting at position 933 of SEQ ID NO: 1245122
guauuaucucuacagcaag

SEQ ID NO: 1538065 - RNA, 19 nt, Artificial Sequence
  Description of Artificial Sequence: Synthetic oligonucleotide
  Antisense strand to SEQ ID NO: 1538064
cuugcuguagagauaauac

SEQ ID NO: 1538066 - RNA, 19 nt, Artificial Sequence
  Description of Artificial Sequence: Synthetic oligonucleotide
  Sense strand starting at position 991 of SEQ ID NO: 1245122
cauuacauucgucagacga

SEQ ID NO: 1538067 - RNA, 19 nt, Artificial Sequence
  Description of Artificial Sequence: Synthetic oligonucleotide
  Antisense strand to SEQ ID NO: 1538066
ucgucugacgaauguaaug

SEQ ID NO: 1538068 - RNA, 19 nt, Artificial Sequence
  Description of Artificial Sequence: Synthetic oligonucleotide
  Sense strand starting at position 1052 of SEQ ID NO: 1245122
aguaguaagaucgagugua

SEQ ID NO: 1538069 - RNA, 19 nt, Artificial Sequence
  Description of Artificial Sequence: Synthetic oligonucleotide
  Antisense strand to SEQ ID NO: 1538068
uacacucgaucuuacuacu

SEQ ID NO: 1538070 - RNA, 19 nt, Artificial Sequence
  Description of Artificial Sequence: Synthetic oligonucleotide
  Sense strand starting at position 1057 of SEQ ID NO: 1245122
uaagaucgaguguaauaau

SEQ ID NO: 1538071 - RNA, 19 nt, Artificial Sequence
  Description of Artificial Sequence: Synthetic oligonucleotide
  Antisense strand to SEQ ID NO: 1538070
auuauuacacucgaucuua

SEQ ID NO: 1538072 - RNA, 19 nt, Artificial Sequence
  Description of Artificial Sequence: Synthetic oligonucleotide
  Sense strand starting at position 1410 of SEQ ID NO: 1245122
agcccucuugcagaagaga

SEQ ID NO: 1538073 - RNA, 19 nt, Artificial Sequence
  Description of Artificial Sequence: Synthetic oligonucleotide
  Antisense strand to SEQ ID NO: 1538072
ucucuucugcaagagggcu

SEQ ID NO: 1538074 - RNA, 19 nt, Artificial Sequence
  Description of Artificial Sequence: Synthetic oligonucleotide
  Sense strand starting at position 1446 of SEQ ID NO: 1245122
cuacuaacuagcgauagga

SEQ ID NO: 1538075 - RNA, 19 nt, Artificial Sequence
  Description of Artificial Sequence: Synthetic oligonucleotide
  Antisense strand to SEQ ID NO: 1538074
uccuaucgcuaguuaguag

SEQ ID NO: 1538076 - RNA, 19 nt, Artificial Sequence
  Description of Artificial Sequence: Synthetic oligonucleotide
  Sense strand starting at position 1512 of SEQ ID NO: 1245122
gugucagagauguaauaca

SEQ ID NO: 1538077 - RNA, 19 nt, Artificial Sequence
  Description of Artificial Sequence: Synthetic oligonucleotide
  Antisense strand to SEQ ID NO: 1538076
uguauuacaucucugacac

SEQ ID NO: 1538078 - RNA, 19 nt, Artificial Sequence
  Description of Artificial Sequence: Synthetic oligonucleotide
  Sense strand starting at position 1520 of SEQ ID NO: 1245122
gauguaauacaaugaguug

SEQ ID NO: 1538079 - RNA, 19 nt, Artificial Sequence
  Description of Artificial Sequence: Synthetic oligonucleotide
  Antisense strand to SEQ ID NO: 1538078
caacucauuguauuacauc

SEQ ID NO: 1538080 - RNA, 19 nt, Artificial Sequence
  Description of Artificial Sequence: Synthetic oligonucleotide
  Sense strand starting at position 1523 of SEQ ID NO: 1245122
guaauacaaugaguugaca

SEQ ID NO: 1538081 - RNA, 19 nt, Artificial Sequence
  Description of Artificial Sequence: Synthetic oligonucleotide
  Antisense strand to SEQ ID NO: 1538080
ugucaacucauuguauuac

SEQ ID NO: 1538082 - RNA, 19 nt, Artificial Sequence
  Description of Artificial Sequence: Synthetic oligonucleotide
  Sense strand starting at position 1531 of SEQ ID NO: 1245122
augaguugacacugaggca

SEQ ID NO: 1538083 - RNA, 19 nt, Artificial Sequence
  Description of Artificial Sequence: Synthetic oligonucleotide
  Antisense strand to SEQ ID NO: 1538082
ugccucagugucaacucau

SEQ ID NO: 1538084 - RNA, 19 nt, Artificial Sequence
  Description of Artificial Sequence: Synthetic oligonucleotide
  Sense strand starting at position 1532 of SEQ ID NO: 1245122
ugaguugacacugaggcau

SEQ ID NO: 1538085 - RNA, 19 nt, Artificial Sequence
  Description of Artificial Sequence: Synthetic oligonucleotide
  Antisense strand to SEQ ID NO: 1538084
augccucagugucaacuca

SEQ ID NO: 1538086 - RNA, 19 nt, Artificial Sequence
  Description of Artificial Sequence: Synthetic oligonucleotide
  Sense strand starting at position 1547 of SEQ ID NO: 1245122
gcauuaacaugaucuugag

SEQ ID NO: 1538087 - RNA, 19 nt, Artificial Sequence
  Description of Artificial Sequence: Synthetic oligonucleotide
  Antisense strand to SEQ ID NO: 1538086
cucaagaucauguuaaugc

SEQ ID NO: 1538088 - RNA, 19 nt, Artificial Sequence
  Description of Artificial Sequence: Synthetic oligonucleotide
  Sense strand starting at position 2014 of SEQ ID NO: 1245122
gcuugacaagaucaucauu

SEQ ID NO: 1538089 - RNA, 19 nt, Artificial Sequence
  Description of Artificial Sequence: Synthetic oligonucleotide
  Antisense strand to SEQ ID NO: 1538088
aaugaugaucuugucaagc

SEQ ID NO: 1538090 - RNA, 19 nt, Artificial Sequence
  Description of Artificial Sequence: Synthetic oligonucleotide
  Sense strand starting at position 2150 of SEQ ID NO: 1245122
cagaaauaccgaggguuau

SEQ ID NO: 1538091 - RNA, 19 nt, Artificial Sequence
  Description of Artificial Sequence: Synthetic oligonucleotide
  Antisense strand to SEQ ID NO: 1538090
auaacccucgguauuucug

SEQ ID NO: 1538092 - RNA, 19 nt, Artificial Sequence
  Description of Artificial Sequence: Synthetic oligonucleotide
  Sense strand starting at position 2151 of SEQ ID NO: 1245122
agaaauaccgaggguuaua

SEQ ID NO: 1538093 - RNA, 19 nt, Artificial Sequence
  Description of Artificial Sequence: Synthetic oligonucleotide
  Antisense strand to SEQ ID NO: 1538092
uauaacccucgguauuucu

SEQ ID NO: 1538094 - RNA, 19 nt, Artificial Sequence
  Description of Artificial Sequence: Synthetic oligonucleotide
  Sense strand starting at position 2160 of SEQ ID NO: 1245122
gaggguuauacaggugaug

SEQ ID NO: 1538095 - RNA, 19 nt, Artificial Sequence
  Description of Artificial Sequence: Synthetic oligonucleotide
  Antisense strand to SEQ ID NO: 1538094
caucaccuguauaacccuc

SEQ ID NO: 1538096 - RNA, 19 nt, Artificial Sequence
  Description of Artificial Sequence: Synthetic oligonucleotide
  Sense strand starting at position 2453 of SEQ ID NO: 1245122
auuagauccucugcauaag

SEQ ID NO: 1538097 - RNA, 19 nt, Artificial Sequence
  Description of Artificial Sequence: Synthetic oligonucleotide
  Antisense strand to SEQ ID NO: 1538096
cuuaugcagaggaucuaau

SEQ ID NO: 1538098 - RNA, 19 nt, Artificial Sequence
  Description of Artificial Sequence: Synthetic oligonucleotide
  Sense strand starting at position 2456 of SEQ ID NO: 1245122
agauccucugcauaaguca

SEQ ID NO: 1538099 - RNA, 19 nt, Artificial Sequence
  Description of Artificial Sequence: Synthetic oligonucleotide
  Antisense strand to SEQ ID NO: 1538098
ugacuuaugcagaggaucu

SEQ ID NO: 1538100 - RNA, 19 nt, Artificial Sequence
  Description of Artificial Sequence: Synthetic oligonucleotide
  Sense strand starting at position 2680 of SEQ ID NO: 1245122
cggugccugaaauacuaau

SEQ ID NO: 1538101 - RNA, 19 nt, Artificial Sequence
  Description of Artificial Sequence: Synthetic oligonucleotide
  Antisense strand to SEQ ID NO: 1538100
auuaguauuucaggcaccg

SEQ ID NO: 1538102 - RNA, 19 nt, Artificial Sequence
  Description of Artificial Sequence: Synthetic oligonucleotide
  Sense strand starting at position 3032 of SEQ ID NO: 1245122
auaagauguugauuauggu

SEQ ID NO: 1538103 - RNA, 19 nt, Artificial Sequence
  Description of Artificial Sequence: Synthetic oligonucleotide
  Antisense strand to SEQ ID NO: 1538102
accauaaucaacaucuuau

SEQ ID NO: 1538104 - RNA, 19 nt, Artificial Sequence
  Description of Artificial Sequence: Synthetic oligonucleotide
  Sense strand starting at position 3130 of SEQ ID NO: 1245122
acagauuuguggcaaagaa

SEQ ID NO: 1538105 - RNA, 19 nt, Artificial Sequence
  Description of Artificial Sequence: Synthetic oligonucleotide
  Antisense strand to SEQ ID NO: 1538104
uucuuugccacaaaucugu

SEQ ID NO: 1538106 - RNA, 19 nt, Artificial Sequence
  Description of Artificial Sequence: Synthetic oligonucleotide
  Sense strand starting at position 3142 of SEQ ID NO: 1245122
caaagaagaugugugguuu

SEQ ID NO: 1538107 - RNA, 19 nt, Artificial Sequence
  Description of Artificial Sequence: Synthetic oligonucleotide
  Antisense strand to SEQ ID NO: 1538106
aaaccacacaucuucuuug

SEQ ID NO: 1538108 - RNA, 19 nt, Artificial Sequence
  Description of Artificial Sequence: Synthetic oligonucleotide
  Sense strand starting at position 3146 of SEQ ID NO: 1245122
gaagaugugugguuugaau

SEQ ID NO: 1538109 - RNA, 19 nt, Artificial Sequence
  Description of Artificial Sequence: Synthetic oligonucleotide
  Antisense strand to SEQ ID NO: 1538108
auucaaaccacacaucuuc

SEQ ID NO: 1538110 - RNA, 19 nt, Artificial Sequence
  Description of Artificial Sequence: Synthetic oligonucleotide
  Sense strand starting at position 3211 of SEQ ID NO: 1245122
ccauguuuauuugcaguga

SEQ ID NO: 1538111 - RNA, 19 nt, Artificial Sequence
  Description of Artificial Sequence: Synthetic oligonucleotide
  Antisense strand to SEQ ID NO: 1538110
ucacugcaaauaaacaugg

SEQ ID NO: 1538112 - RNA, 19 nt, Artificial Sequence
  Description of Artificial Sequence: Synthetic oligonucleotide
  Sense strand starting at position 3246 of SEQ ID NO: 1245122
uuguaaauagcagauguaa

SEQ ID NO: 1538113 - RNA, 19 nt, Artificial Sequence
  Description of Artificial Sequence: Synthetic oligonucleotide
  Antisense strand to SEQ ID NO: 1538112
uuacaucugcuauuuacaa

SEQ ID NO: 1538114 - RNA, 19 nt, Artificial Sequence
  Description of Artificial Sequence: Synthetic oligonucleotide
  Sense strand starting at position 3344 of SEQ ID NO: 1245122
gacuuagucugagcaauau

SEQ ID NO: 1538115 - RNA, 19 nt, Artificial Sequence
  Description of Artificial Sequence: Synthetic oligonucleotide
  Antisense strand to SEQ ID NO: 1538114
auauugcucagacuaaguc

SEQ ID NO: 1538116 - RNA, 19 nt, Artificial Sequence
  Description of Artificial Sequence: Synthetic oligonucleotide
  Sense strand starting at position 3371 of SEQ ID NO: 1245122
cauguugucugaccaugaa

SEQ ID NO: 1538117 - RNA, 19 nt, Artificial Sequence
  Description of Artificial Sequence: Synthetic oligonucleotide
  Antisense strand to SEQ ID NO: 1538116
uucauggucagacaacaug

SEQ ID NO: 1538118 - RNA, 19 nt, Artificial Sequence
  Description of Artificial Sequence: Synthetic oligonucleotide
  Sense strand starting at position 3374 of SEQ ID NO: 1245122
guugucugaccaugaauag

SEQ ID NO: 1538119 - RNA, 19 nt, Artificial Sequence
  Description of Artificial Sequence: Synthetic oligonucleotide
  Antisense strand to SEQ ID NO: 1538118
cuauucauggucagacaac

SEQ ID NO: 1538120 - RNA, 19 nt, Artificial Sequence
  Description of Artificial Sequence: Synthetic oligonucleotide
  Sense strand starting at position 3727 of SEQ ID NO: 1245122
gagggaauuuguuaaucac

SEQ ID NO: 1538121 - RNA, 19 nt, Artificial Sequence
  Description of Artificial Sequence: Synthetic oligonucleotide
  Antisense strand to SEQ ID NO: 1538120
gugauuaacaaauucccuc

SEQ ID NO: 1538122 - RNA, 19 nt, Artificial Sequence
  Description of Artificial Sequence: Synthetic oligonucleotide
  Sense strand starting at position 3912 of SEQ ID NO: 1245122
ugguuauuaugacuaagga

SEQ ID NO: 1538123 - RNA, 19 nt, Artificial Sequence
  Description of Artificial Sequence: Synthetic oligonucleotide
  Antisense strand to SEQ ID NO: 1538122
uccuuagucauaauaacca

SEQ ID NO: 1538124 - RNA, 19 nt, Artificial Sequence
  Description of Artificial Sequence: Synthetic oligonucleotide
  Sense strand starting at position 187 of SEQ ID NO: 1245123
ucgcuuucuaaaggagaug

SEQ ID NO: 1538125 - RNA, 19 nt, Artificial Sequence
  Description of Artificial Sequence: Synthetic oligonucleotide
  Antisense strand to SEQ ID NO: 1538124
caucuccuuuagaaagcga

SEQ ID NO: 1538126 - RNA, 19 nt, Artificial Sequence
  Description of Artificial Sequence: Synthetic oligonucleotide
  Sense strand starting at position 209 of SEQ ID NO: 1245123
auuacugcccaauaaggua

SEQ ID NO: 1538127 - RNA, 19 nt, Artificial Sequence
  Description of Artificial Sequence: Synthetic oligonucleotide
  Antisense strand to SEQ ID NO: 1538126
uaccuuauugggcaguaau

SEQ ID NO: 1538128 - RNA, 19 nt, Artificial Sequence
  Description of Artificial Sequence: Synthetic oligonucleotide
  Sense strand starting at position 276 of SEQ ID NO: 1245123
cuacucugugaguguacaa

SEQ ID NO: 1538129 - RNA, 19 nt, Artificial Sequence
  Description of Artificial Sequence: Synthetic oligonucleotide
  Antisense strand to SEQ ID NO: 1538128
uuguacacucacagaguag

SEQ ID NO: 1538130 - RNA, 19 nt, Artificial Sequence
  Description of Artificial Sequence: Synthetic oligonucleotide
  Sense strand starting at position 288 of SEQ ID NO: 1245123
uguacaaauuggccugauu

SEQ ID NO: 1538131 - RNA, 19 nt, Artificial Sequence
  Description of Artificial Sequence: Synthetic oligonucleotide
  Antisense strand to SEQ ID NO: 1538130
aaucaggccaauuuguaca

SEQ ID NO: 1538132 - RNA, 19 nt, Artificial Sequence
  Description of Artificial Sequence: Synthetic oligonucleotide
  Sense strand starting at position 299 of SEQ ID NO: 1245123
gccugauugcuacauuauu

SEQ ID NO: 1538133 - RNA, 19 nt, Artificial Sequence
  Description of Artificial Sequence: Synthetic oligonucleotide
  Antisense strand to SEQ ID NO: 1538132
aauaauguagcaaucaggc

SEQ ID NO: 1538134 - RNA, 19 nt, Artificial Sequence
  Description of Artificial Sequence: Synthetic oligonucleotide
  Sense strand starting at position 307 of SEQ ID NO: 1245123
gcuacauuauuugaagauu

SEQ ID NO: 1538135 - RNA, 19 nt, Artificial Sequence
  Description of Artificial Sequence: Synthetic oligonucleotide
  Antisense strand to SEQ ID NO: 1538134
aaucuucaaauaauguagc

SEQ ID NO: 1538136 - RNA, 19 nt, Artificial Sequence
  Description of Artificial Sequence: Synthetic oligonucleotide
  Sense strand starting at position 368 of SEQ ID NO: 1245123
caaaguaagcuagguguua

SEQ ID NO: 1538137 - RNA, 19 nt, Artificial Sequence
  Description of Artificial Sequence: Synthetic oligonucleotide
  Antisense strand to SEQ ID NO: 1538136
uaacaccuagcuuacuuug

SEQ ID NO: 1538138 - RNA, 19 nt, Artificial Sequence
  Description of Artificial Sequence: Synthetic oligonucleotide
  Sense strand starting at position 381 of SEQ ID NO: 1245123
guguuacauuagcuuggga

SEQ ID NO: 1538139 - RNA, 19 nt, Artificial Sequence
  Description of Artificial Sequence: Synthetic oligonucleotide
  Antisense strand to SEQ ID NO: 1538138
ucccaagcuaauguaacac

SEQ ID NO: 1538140 - RNA, 19 nt, Artificial Sequence
  Description of Artificial Sequence: Synthetic oligonucleotide
  Sense strand starting at position 383 of SEQ ID NO: 1245123
guuacauuagcuugggauu

SEQ ID NO: 1538141 - RNA, 19 nt, Artificial Sequence
  Description of Artificial Sequence: Synthetic oligonucleotide
  Antisense strand to SEQ ID NO: 1538140
aaucccaagcuaauguaac

SEQ ID NO: 1538142 - RNA, 19 nt, Artificial Sequence
  Description of Artificial Sequence: Synthetic oligonucleotide
  Sense strand starting at position 394 of SEQ ID NO: 1245123
uugggauucuccuuaaaca

SEQ ID NO: 1538143 - RNA, 19 nt, Artificial Sequence
  Description of Artificial Sequence: Synthetic oligonucleotide
  Antisense strand to SEQ ID NO: 1538142
uguuuaaggagaaucccaa

SEQ ID NO: 1538144 - RNA, 19 nt, Artificial Sequence
  Description of Artificial Sequence: Synthetic oligonucleotide
  Sense strand starting at position 611 of SEQ ID NO: 1245123
gcucuuccaccugagaguu

SEQ ID NO: 1538145 - RNA, 19 nt, Artificial Sequence
  Description of Artificial Sequence: Synthetic oligonucleotide
  Antisense strand to SEQ ID NO: 1538144
aacucucagguggaagagc

SEQ ID NO: 1538146 - RNA, 19 nt, Artificial Sequence
  Description of Artificial Sequence: Synthetic oligonucleotide
  Sense strand starting at position 739 of SEQ ID NO: 1245123
gauagaagggcucauguuu

SEQ ID NO: 1538147 - RNA, 19 nt, Artificial Sequence
  Description of Artificial Sequence: Synthetic oligonucleotide
  Antisense strand to SEQ ID NO: 1538146
aaacaugagcccuucuauc

SEQ ID NO: 1538148 - RNA, 19 nt, Artificial Sequence
  Description of Artificial Sequence: Synthetic oligonucleotide
  Sense strand starting at position 779 of SEQ ID NO: 1245123
uagugaauguauuugcauu

SEQ ID NO: 1538149 - RNA, 19 nt, Artificial Sequence
  Description of Artificial Sequence: Synthetic oligonucleotide
  Antisense strand to SEQ ID NO: 1538148
aaugcaaauacauucacua

SEQ ID NO: 1538150 - RNA, 19 nt, Artificial Sequence
  Description of Artificial Sequence: Synthetic oligonucleotide
  Sense strand starting at position 936 of SEQ ID NO: 1245123
cccuauaagcgagauacau

SEQ ID NO: 1538151 - RNA, 19 nt, Artificial Sequence
  Description of Artificial Sequence: Synthetic oligonucleotide
  Antisense strand to SEQ ID NO: 1538150
auguaucucgcuuauaggg

SEQ ID NO: 1538152 - RNA, 19 nt, Artificial Sequence
  Description of Artificial Sequence: Synthetic oligonucleotide
  Sense strand starting at position 1195 of SEQ ID NO: 1245123
aaacuauaugugggugauc

SEQ ID NO: 1538153 - RNA, 19 nt, Artificial Sequence
  Description of Artificial Sequence: Synthetic oligonucleotide
  Antisense strand to SEQ ID NO: 1538152
gaucacccacauauaguuu

SEQ ID NO: 1538154 - RNA, 19 nt, Artificial Sequence
  Description of Artificial Sequence: Synthetic oligonucleotide
  Sense strand starting at position 1197 of SEQ ID NO: 1245123
acuauaugugggugaucca

SEQ ID NO: 1538155 - RNA, 19 nt, Artificial Sequence
  Description of Artificial Sequence: Synthetic oligonucleotide
  Antisense strand to SEQ ID NO: 1538154
uggaucacccacauauagu

SEQ ID NO: 1538156 - RNA, 19 nt, Artificial Sequence
  Description of Artificial Sequence: Synthetic oligonucleotide
  Sense strand starting at position 1200 of SEQ ID NO: 1245123
auaugugggugauccacuu

SEQ ID NO: 1538157 - RNA, 19 nt, Artificial Sequence
  Description of Artificial Sequence: Synthetic oligonucleotide
  Antisense strand to SEQ ID NO: 1538156
aaguggaucacccacauau

SEQ ID NO: 1538158 - RNA, 19 nt, Artificial Sequence
  Description of Artificial Sequence: Synthetic oligonucleotide
  Sense strand starting at position 1272 of SEQ ID NO: 1245123
gcacucuaagaauacaagu

SEQ ID NO: 1538159 - RNA, 19 nt, Artificial Sequence
  Description of Artificial Sequence: Synthetic oligonucleotide
  Antisense strand to SEQ ID NO: 1538158
acuuguauucuuagagugc

SEQ ID NO: 1538160 - RNA, 19 nt, Artificial Sequence
  Description of Artificial Sequence: Synthetic oligonucleotide
  Sense strand starting at position 1285 of SEQ ID NO: 1245123
acaaguauguuccugguuu

SEQ ID NO: 1538161 - RNA, 19 nt, Artificial Sequence
  Description of Artificial Sequence: Synthetic oligonucleotide
  Antisense strand to SEQ ID NO: 1538160
aaaccaggaacauacuugu

SEQ ID NO: 1538162 - RNA, 19 nt, Artificial Sequence
  Description of Artificial Sequence: Synthetic oligonucleotide
  Sense strand starting at position 2395 of SEQ ID NO: 1245123
gcaggugucgcuagugaca

SEQ ID NO: 1538163 - RNA, 19 nt, Artificial Sequence
  Description of Artificial Sequence: Synthetic oligonucleotide
  Antisense strand to SEQ ID NO: 1538162
ugucacuagcgacaccugc

SEQ ID NO: 1538164 - RNA, 19 nt, Artificial Sequence
  Description of Artificial Sequence: Synthetic oligonucleotide
  Sense strand starting at position 2417 of SEQ ID NO: 1245123
ggacccguguccucaggaa

SEQ ID NO: 1538165 - RNA, 19 nt, Artificial Sequence
  Description of Artificial Sequence: Synthetic oligonucleotide
  Antisense strand to SEQ ID NO: 1538164
uuccugaggacacgggucc

SEQ ID NO: 1538166 - RNA, 19 nt, Artificial Sequence
  Description of Artificial Sequence: Synthetic oligonucleotide
  Sense strand starting at position 2421 of SEQ ID NO: 1245123
ccguguccucaggaaagcu

SEQ ID NO: 1538167 - RNA, 19 nt, Artificial Sequence
  Description of Artificial Sequence: Synthetic oligonucleotide
  Antisense strand to SEQ ID NO: 1538166
agcuuuccugaggacacgg

SEQ ID NO: 1538168 - RNA, 19 nt, Artificial Sequence
  Description of Artificial Sequence: Synthetic oligonucleotide
  Sense strand starting at position 2476 of SEQ ID NO: 1245123
gagguuguggagcagaauu

SEQ ID NO: 1538169 - RNA, 19 nt, Artificial Sequence
  Description of Artificial Sequence: Synthetic oligonucleotide
  Antisense strand to SEQ ID NO: 1538168
aauucugcuccacaaccuc

SEQ ID NO: 1538170 - RNA, 19 nt, Artificial Sequence
  Description of Artificial Sequence: Synthetic oligonucleotide
  Sense strand starting at position 2604 of SEQ ID NO: 1245123
gacaauucuugggcuagga

SEQ ID NO: 1538171 - RNA, 19 nt, Artificial Sequence
  Description of Artificial Sequence: Synthetic oligonucleotide
  Antisense strand to SEQ ID NO: 1538170
uccuagcccaagaauuguc

SEQ ID NO: 1538172 - RNA, 19 nt, Artificial Sequence
  Description of Artificial Sequence: Synthetic oligonucleotide
  Sense strand starting at position 2608 of SEQ ID NO: 1245123
auucuugggcuaggagaaa

SEQ ID NO: 1538173 - RNA, 19 nt, Artificial Sequence
  Description of Artificial Sequence: Synthetic oligonucleotide
  Antisense strand to SEQ ID NO: 1538172
uuucuccuagcccaagaau

SEQ ID NO: 1538174 - RNA, 19 nt, Artificial Sequence
  Description of Artificial Sequence: Synthetic oligonucleotide
  Sense strand starting at position 2631 of SEQ ID NO: 1245123
uaggguguuacgggaaaua

SEQ ID NO: 1538175 - RNA, 19 nt, Artificial Sequence
  Description of Artificial Sequence: Synthetic oligonucleotide
  Antisense strand to SEQ ID NO: 1538174
uauuucccguaacacccua

SEQ ID NO: 1538176 - RNA, 19 nt, Artificial Sequence
  Description of Artificial Sequence: Synthetic oligonucleotide
  Sense strand starting at position 2725 of SEQ ID NO: 1245123
agcugaguggccuggacua

SEQ ID NO: 1538177 - RNA, 19 nt, Artificial Sequence
  Description of Artificial Sequence: Synthetic oligonucleotide
  Antisense strand to SEQ ID NO: 1538176
uaguccaggccacucagcu

SEQ ID NO: 1538178 - RNA, 19 nt, Artificial Sequence
  Description of Artificial Sequence: Synthetic oligonucleotide
  Sense strand starting at position 2760 of SEQ ID NO: 1245123
guuuccagaucugucaaau

SEQ ID NO: 1538179 - RNA, 19 nt, Artificial Sequence
  Description of Artificial Sequence: Synthetic oligonucleotide
  Antisense strand to SEQ ID NO: 1538178
auuugacagaucuggaaac

SEQ ID NO: 1538180 - RNA, 19 nt, Artificial Sequence
  Description of Artificial Sequence: Synthetic oligonucleotide
  Sense strand starting at position 2766 of SEQ ID NO: 1245123
agaucugucaaauggaguu

SEQ ID NO: 1538181 - RNA, 19 nt, Artificial Sequence
  Description of Artificial Sequence: Synthetic oligonucleotide
  Antisense strand to SEQ ID NO: 1538180
aacuccauuugacagaucu

SEQ ID NO: 1538182 - RNA, 19 nt, Artificial Sequence
  Description of Artificial Sequence: Synthetic oligonucleotide
  Sense strand starting at position 2852 of SEQ ID NO: 1245123
gugucuagaacuuaagggu

SEQ ID NO: 1538183 - RNA, 19 nt, Artificial Sequence
  Description of Artificial Sequence: Synthetic oligonucleotide
  Antisense strand to SEQ ID NO: 1538182
acccuuaaguucuagacac

SEQ ID NO: 1538184 - RNA, 19 nt, Artificial Sequence
  Description of Artificial Sequence: Synthetic oligonucleotide
  Sense strand starting at position 2899 of SEQ ID NO: 1245123
acgugauugcgaggugaga

SEQ ID NO: 1538185 - RNA, 19 nt, Artificial Sequence
  Description of Artificial Sequence: Synthetic oligonucleotide
  Antisense strand to SEQ ID NO: 1538184
ucucaccucgcaaucacgu

SEQ ID NO: 1538186 - RNA, 19 nt, Artificial Sequence
  Description of Artificial Sequence: Synthetic oligonucleotide
  Sense strand starting at position 2901 of SEQ ID NO: 1245123
gugauugcgaggugagaug

SEQ ID NO: 1538187 - RNA, 19 nt, Artificial Sequence
  Description of Artificial Sequence: Synthetic oligonucleotide
  Antisense strand to SEQ ID NO: 1538186
caucucaccucgcaaucac

SEQ ID NO: 1538188 - RNA, 19 nt, Artificial Sequence
  Description of Artificial Sequence: Synthetic oligonucleotide
  Sense strand starting at position 2969 of SEQ ID NO: 1245123
uagaaucagcaccggauua

SEQ ID NO: 1538189 - RNA, 19 nt, Artificial Sequence
  Description of Artificial Sequence: Synthetic oligonucleotide
  Antisense strand to SEQ ID NO: 1538188
uaauccggugcugauucua

SEQ ID NO: 1538190 - RNA, 19 nt, Artificial Sequence
  Description of Artificial Sequence: Synthetic oligonucleotide
  Sense strand starting at position 3001 of SEQ ID NO: 1245123
aaauguaacgacugaaagu

SEQ ID NO: 1538191 - RNA, 19 nt, Artificial Sequence
  Description of Artificial Sequence: Synthetic oligonucleotide
  Antisense strand to SEQ ID NO: 1538190
acuuucagucguuacauuu

SEQ ID NO: 1538192 - RNA, 19 nt, Artificial Sequence
  Description of Artificial Sequence: Synthetic oligonucleotide
  Sense strand starting at position 3032 of SEQ ID NO: 1245123
uauuguucugugcgagaaa

SEQ ID NO: 1538193 - RNA, 19 nt, Artificial Sequence
  Description of Artificial Sequence: Synthetic oligonucleotide
  Antisense strand to SEQ ID NO: 1538192
uuucucgcacagaacaaua

SEQ ID NO: 1538194 - RNA, 19 nt, Artificial Sequence
  Description of Artificial Sequence: Synthetic oligonucleotide
  Sense strand starting at position 3120 of SEQ ID NO: 1245123
uggcaacgcggauauaaua

SEQ ID NO: 1538195 - RNA, 19 nt, Artificial Sequence
  Description of Artificial Sequence: Synthetic oligonucleotide
  Antisense strand to SEQ ID NO: 1538194
uauuauauccgcguugcca

SEQ ID NO: 1538196 - RNA, 19 nt, Artificial Sequence
  Description of Artificial Sequence: Synthetic oligonucleotide
  Sense strand starting at position 3299 of SEQ ID NO: 1245123
caugaaguuuccucauggu

SEQ ID NO: 1538197 - RNA, 19 nt, Artificial Sequence
  Description of Artificial Sequence: Synthetic oligonucleotide
  Antisense strand to SEQ ID NO: 1538196
accaugaggaaacuucaug

SEQ ID NO: 1538198 - RNA, 19 nt, Artificial Sequence
  Description of Artificial Sequence: Synthetic oligonucleotide
  Sense strand starting at position 3479 of SEQ ID NO: 1245123
ugaaacagcgcucgaugaa

SEQ ID NO: 1538199 - RNA, 19 nt, Artificial Sequence
  Description of Artificial Sequence: Synthetic oligonucleotide
  Antisense strand to SEQ ID NO: 1538198
uucaucgagcgcuguuuca

SEQ ID NO: 1538200 - RNA, 19 nt, Artificial Sequence
  Description of Artificial Sequence: Synthetic oligonucleotide
  Sense strand starting at position 3480 of SEQ ID NO: 1245123
gaaacagcgcucgaugaau

SEQ ID NO: 1538201 - RNA, 19 nt, Artificial Sequence
  Description of Artificial Sequence: Synthetic oligonucleotide
  Antisense strand to SEQ ID NO: 1538200
auucaucgagcgcuguuuc

SEQ ID NO: 1538202 - RNA, 19 nt, Artificial Sequence
  Description of Artificial Sequence: Synthetic oligonucleotide
  Sense strand starting at position 3860 of SEQ ID NO: 1245123
guacauagcugagcaaauu

SEQ ID NO: 1538203 - RNA, 19 nt, Artificial Sequence
  Description of Artificial Sequence: Synthetic oligonucleotide
  Antisense strand to SEQ ID NO: 1538202
aauuugcucagcuauguac

SEQ ID NO: 1538204 - RNA, 19 nt, Artificial Sequence
  Description of Artificial Sequence: Synthetic oligonucleotide
  Sense strand starting at position 162 of SEQ ID NO: 1245124
gcauguccacucuaagaca

SEQ ID NO: 1538205 - RNA, 19 nt, Artificial Sequence
  Description of Artificial Sequence: Synthetic oligonucleotide
  Antisense strand to SEQ ID NO: 1538204
ugucuuagaguggacaugc

SEQ ID NO: 1538206 - RNA, 19 nt, Artificial Sequence
  Description of Artificial Sequence: Synthetic oligonucleotide
  Sense strand starting at position 262 of SEQ ID NO: 1245124
aauugagaguguccuauau

SEQ ID NO: 1538207 - RNA, 19 nt, Artificial Sequence
  Description of Artificial Sequence: Synthetic oligonucleotide
  Antisense strand to SEQ ID NO: 1538206
auauaggacacucucaauu

SEQ ID NO: 1538208 - RNA, 19 nt, Artificial Sequence
  Description of Artificial Sequence: Synthetic oligonucleotide
  Sense strand starting at position 266 of SEQ ID NO: 1245124
gagaguguccuauauguca

SEQ ID NO: 1538209 - RNA, 19 nt, Artificial Sequence
  Description of Artificial Sequence: Synthetic oligonucleotide
  Antisense strand to SEQ ID NO: 1538208
ugacauauaggacacucuc

SEQ ID NO: 1538210 - RNA, 19 nt, Artificial Sequence
  Description of Artificial Sequence: Synthetic oligonucleotide
  Sense strand starting at position 342 of SEQ ID NO: 1245124
uggcaauacuaucccgaca

SEQ ID NO: 1538211 - RNA, 19 nt, Artificial Sequence
  Description of Artificial Sequence: Synthetic oligonucleotide
  Antisense strand to SEQ ID NO: 1538210
ugucgggauaguauugcca

SEQ ID NO: 1538212 - RNA, 19 nt, Artificial Sequence
  Description of Artificial Sequence: Synthetic oligonucleotide
  Sense strand starting at position 627 of SEQ ID NO: 1245124
gacggauccauugaggcua

SEQ ID NO: 1538213 - RNA, 19 nt, Artificial Sequence
  Description of Artificial Sequence: Synthetic oligonucleotide
  Antisense strand to SEQ ID NO: 1538212
uagccucaauggauccguc

SEQ ID NO: 1538214 - RNA, 19 nt, Artificial Sequence
  Description of Artificial Sequence: Synthetic oligonucleotide
  Sense strand starting at position 883 of SEQ ID NO: 1245124
cuaagaaaguccuuucuug

SEQ ID NO: 1538215 - RNA, 19 nt, Artificial Sequence
  Description of Artificial Sequence: Synthetic oligonucleotide
  Antisense strand to SEQ ID NO: 1538214
caagaaaggacuuucuuag

SEQ ID NO: 1538216 - RNA, 19 nt, Artificial Sequence
  Description of Artificial Sequence: Synthetic oligonucleotide
  Sense strand starting at position 887 of SEQ ID NO: 1245124
gaaaguccuuucuugagau

SEQ ID NO: 1538217 - RNA, 19 nt, Artificial Sequence
  Description of Artificial Sequence: Synthetic oligonucleotide
  Antisense strand to SEQ ID NO: 1538216
aucucaagaaaggacuuuc

SEQ ID NO: 1538218 - RNA, 19 nt, Artificial Sequence
  Description of Artificial Sequence: Synthetic oligonucleotide
  Sense strand starting at position 902 of SEQ ID NO: 1245124
agaucuaucucccugugac

SEQ ID NO: 1538219 - RNA, 19 nt, Artificial Sequence
  Description of Artificial Sequence: Synthetic oligonucleotide
  Antisense strand to SEQ ID NO: 1538218
gucacagggagauagaucu

SEQ ID NO: 1538220 - RNA, 19 nt, Artificial Sequence
  Description of Artificial Sequence: Synthetic oligonucleotide
  Sense strand starting at position 1066 of SEQ ID NO: 1245124
gauaucuccguguaacaga

SEQ ID NO: 1538221 - RNA, 19 nt, Artificial Sequence
  Description of Artificial Sequence: Synthetic oligonucleotide
  Antisense strand to SEQ ID NO: 1538220
ucuguuacacggagauauc

SEQ ID NO: 1538222 - RNA, 19 nt, Artificial Sequence
  Description of Artificial Sequence: Synthetic oligonucleotide
  Sense strand starting at position 1162 of SEQ ID NO: 1245124
uuuaaacagucuguaacau

SEQ ID NO: 1538223 - RNA, 19 nt, Artificial Sequence
  Description of Artificial Sequence: Synthetic oligonucleotide
  Antisense strand to SEQ ID NO: 1538222
auguuacagacuguuuaaa

SEQ ID NO: 1538224 - RNA, 19 nt, Artificial Sequence
  Description of Artificial Sequence: Synthetic oligonucleotide
  Sense strand starting at position 1163 of SEQ ID NO: 1245124
uuaaacagucuguaacauu

SEQ ID NO: 1538225 - RNA, 19 nt, Artificial Sequence
  Description of Artificial Sequence: Synthetic oligonucleotide
  Antisense strand to SEQ ID NO: 1538224
aauguuacagacuguuuaa

SEQ ID NO: 1538226 - RNA, 19 nt, Artificial Sequence
  Description of Artificial Sequence: Synthetic oligonucleotide
  Sense strand starting at position 1194 of SEQ ID NO: 1245124
uagauaauacuauguacga

SEQ ID NO: 1538227 - RNA, 19 nt, Artificial Sequence
  Description of Artificial Sequence: Synthetic oligonucleotide
  Antisense strand to SEQ ID NO: 1538226
ucguacauaguauuaucua

SEQ ID NO: 1538228 - RNA, 19 nt, Artificial Sequence
  Description of Artificial Sequence: Synthetic oligonucleotide
  Sense strand starting at position 1309 of SEQ ID NO: 1245124
ggcacauaauagcuaaaca

SEQ ID NO: 1538229 - RNA, 19 nt, Artificial Sequence
  Description of Artificial Sequence: Synthetic oligonucleotide
  Antisense strand to SEQ ID NO: 1538228
uguuuagcuauuaugugcc

SEQ ID NO: 1538230 - RNA, 19 nt, Artificial Sequence
  Description of Artificial Sequence: Synthetic oligonucleotide
  Sense strand starting at position 1434 of SEQ ID NO: 1245124
gcguguagaguucuuagcu

SEQ ID NO: 1538231 - RNA, 19 nt, Artificial Sequence
  Description of Artificial Sequence: Synthetic oligonucleotide
  Antisense strand to SEQ ID NO: 1538230
agcuaagaacucuacacgc

SEQ ID NO: 1538232 - RNA, 19 nt, Artificial Sequence
  Description of Artificial Sequence: Synthetic oligonucleotide
  Sense strand starting at position 1809 of SEQ ID NO: 1245124
ggaaguuugugauuauuag

SEQ ID NO: 1538233 - RNA, 19 nt, Artificial Sequence
  Description of Artificial Sequence: Synthetic oligonucleotide
  Antisense strand to SEQ ID NO: 1538232
cuaauaaucacaaacuucc

SEQ ID NO: 1538234 - RNA, 19 nt, Artificial Sequence
  Description of Artificial Sequence: Synthetic oligonucleotide
  Sense strand starting at position 1810 of SEQ ID NO: 1245124
gaaguuugugauuauuagg

SEQ ID NO: 1538235 - RNA, 19 nt, Artificial Sequence
  Description of Artificial Sequence: Synthetic oligonucleotide
  Antisense strand to SEQ ID NO: 1538234
ccuaauaaucacaaacuuc

SEQ ID NO: 1538236 - RNA, 19 nt, Artificial Sequence
  Description of Artificial Sequence: Synthetic oligonucleotide
  Sense strand starting at position 1835 of SEQ ID NO: 1245124
caggacuuaccacgaagau

SEQ ID NO: 1538237 - RNA, 19 nt, Artificial Sequence
  Description of Artificial Sequence: Synthetic oligonucleotide
  Antisense strand to SEQ ID NO: 1538236
aucuucgugguaaguccug

SEQ ID NO: 1538238 - RNA, 19 nt, Artificial Sequence
  Description of Artificial Sequence: Synthetic oligonucleotide
  Sense strand starting at position 2133 of SEQ ID NO: 1245124
ugaaauccuuuguuggaag

SEQ ID NO: 1538239 - RNA, 19 nt, Artificial Sequence
  Description of Artificial Sequence: Synthetic oligonucleotide
  Antisense strand to SEQ ID NO: 1538238
cuuccaacaaaggauuuca

SEQ ID NO: 1538240 - RNA, 19 nt, Artificial Sequence
  Description of Artificial Sequence: Synthetic oligonucleotide
  Sense strand starting at position 2215 of SEQ ID NO: 1245124
uuaaucaugauguggaagu

SEQ ID NO: 1538241 - RNA, 19 nt, Artificial Sequence
  Description of Artificial Sequence: Synthetic oligonucleotide
  Antisense strand to SEQ ID NO: 1538240
acuuccacaucaugauuaa

SEQ ID NO: 1538242 - RNA, 19 nt, Artificial Sequence
  Description of Artificial Sequence: Synthetic oligonucleotide
  Sense strand starting at position 2271 of SEQ ID NO: 1245124
ugucuuauggcugaaucua

SEQ ID NO: 1538243 - RNA, 19 nt, Artificial Sequence
  Description of Artificial Sequence: Synthetic oligonucleotide
  Antisense strand to SEQ ID NO: 1538242
uagauucagccauaagaca

SEQ ID NO: 1538244 - RNA, 19 nt, Artificial Sequence
  Description of Artificial Sequence: Synthetic oligonucleotide
  Sense strand starting at position 2279 of SEQ ID NO: 1245124
ggcugaaucuaguugacua

SEQ ID NO: 1538245 - RNA, 19 nt, Artificial Sequence
  Description of Artificial Sequence: Synthetic oligonucleotide
  Antisense strand to SEQ ID NO: 1538244
uagucaacuagauucagcc

SEQ ID NO: 1538246 - RNA, 19 nt, Artificial Sequence
  Description of Artificial Sequence: Synthetic oligonucleotide
  Sense strand starting at position 2289 of SEQ ID NO: 1245124
aguugacuaugguuacaau

SEQ ID NO: 1538247 - RNA, 19 nt, Artificial Sequence
  Description of Artificial Sequence: Synthetic oligonucleotide
  Antisense strand to SEQ ID NO: 1538246
auuguaaccauagucaacu

SEQ ID NO: 1538248 - RNA, 19 nt, Artificial Sequence
  Description of Artificial Sequence: Synthetic oligonucleotide
  Sense strand starting at position 2417 of SEQ ID NO: 1245124
uguagauguuaagcaauga

SEQ ID NO: 1538249 - RNA, 19 nt, Artificial Sequence
  Description of Artificial Sequence: Synthetic oligonucleotide
  Antisense strand to SEQ ID NO: 1538248
ucauugcuuaacaucuaca

SEQ ID NO: 1538250 - RNA, 19 nt, Artificial Sequence
  Description of Artificial Sequence: Synthetic oligonucleotide
  Sense strand starting at position 2418 of SEQ ID NO: 1245124
guagauguuaagcaaugau

SEQ ID NO: 1538251 - RNA, 19 nt, Artificial Sequence
  Description of Artificial Sequence: Synthetic oligonucleotide
  Antisense strand to SEQ ID NO: 1538250
aucauugcuuaacaucuac

SEQ ID NO: 1538252 - RNA, 19 nt, Artificial Sequence
  Description of Artificial Sequence: Synthetic oligonucleotide
  Sense strand starting at position 2421 of SEQ ID NO: 1245124
gauguuaagcaaugauaua

SEQ ID NO: 1538253 - RNA, 19 nt, Artificial Sequence
  Description of Artificial Sequence: Synthetic oligonucleotide
  Antisense strand to SEQ ID NO: 1538252
uauaucauugcuuaacauc

SEQ ID NO: 1538254 - RNA, 19 nt, Artificial Sequence
  Description of Artificial Sequence: Synthetic oligonucleotide
  Sense strand starting at position 2492 of SEQ ID NO: 1245124
cuaugaauguaggcuuuga

SEQ ID NO: 1538255 - RNA, 19 nt, Artificial Sequence
  Description of Artificial Sequence: Synthetic oligonucleotide
  Antisense strand to SEQ ID NO: 1538254
ucaaagccuacauucauag

SEQ ID NO: 1538256 - RNA, 19 nt, Artificial Sequence
  Description of Artificial Sequence: Synthetic oligonucleotide
  Sense strand starting at position 2496 of SEQ ID NO: 1245124
gaauguaggcuuugaauaa

SEQ ID NO: 1538257 - RNA, 19 nt, Artificial Sequence
  Description of Artificial Sequence: Synthetic oligonucleotide
  Antisense strand to SEQ ID NO: 1538256
uuauucaaagccuacauuc

SEQ ID NO: 1538258 - RNA, 19 nt, Artificial Sequence
  Description of Artificial Sequence: Synthetic oligonucleotide
  Sense strand starting at position 2658 of SEQ ID NO: 1245124
agccuagauugccuaauaa

SEQ ID NO: 1538259 - RNA, 19 nt, Artificial Sequence
  Description of Artificial Sequence: Synthetic oligonucleotide
  Antisense strand to SEQ ID NO: 1538258
uuauuaggcaaucuaggcu

SEQ ID NO: 1538260 - RNA, 19 nt, Artificial Sequence
  Description of Artificial Sequence: Synthetic oligonucleotide
  Sense strand starting at position 2752 of SEQ ID NO: 1245124
cucggaagugcuuaaauac

SEQ ID NO: 1538261 - RNA, 19 nt, Artificial Sequence
  Description of Artificial Sequence: Synthetic oligonucleotide
  Antisense strand to SEQ ID NO: 1538260
guauuuaagcacuuccgag

SEQ ID NO: 1538262 - RNA, 19 nt, Artificial Sequence
  Description of Artificial Sequence: Synthetic oligonucleotide
  Sense strand starting at position 2919 of SEQ ID NO: 1245124
aguauuacacauuagguuu

SEQ ID NO: 1538263 - RNA, 19 nt, Artificial Sequence
  Description of Artificial Sequence: Synthetic oligonucleotide
  Antisense strand to SEQ ID NO: 1538262
aaaccuaauguguaauacu

SEQ ID NO: 1538264 - RNA, 19 nt, Artificial Sequence
  Description of Artificial Sequence: Synthetic oligonucleotide
  Sense strand starting at position 3050 of SEQ ID NO: 1245124
agcaauucuccugaauuga

SEQ ID NO: 1538265 - RNA, 19 nt, Artificial Sequence
  Description of Artificial Sequence: Synthetic oligonucleotide
  Antisense strand to SEQ ID NO: 1538264
ucaauucaggagaauugcu

SEQ ID NO: 1538266 - RNA, 19 nt, Artificial Sequence
  Description of Artificial Sequence: Synthetic oligonucleotide
  Sense strand starting at position 3464 of SEQ ID NO: 1245124
aggacuguguagucuagga

SEQ ID NO: 1538267 - RNA, 19 nt, Artificial Sequence
  Description of Artificial Sequence: Synthetic oligonucleotide
  Antisense strand to SEQ ID NO: 1538266
uccuagacuacacaguccu

SEQ ID NO: 1538268 - RNA, 19 nt, Artificial Sequence
  Description of Artificial Sequence: Synthetic oligonucleotide
  Sense strand starting at position 3466 of SEQ ID NO: 1245124
gacuguguagucuaggagu

SEQ ID NO: 1538269 - RNA, 19 nt, Artificial Sequence
  Description of Artificial Sequence: Synthetic oligonucleotide
  Antisense strand to SEQ ID NO: 1538268
acuccuagacuacacaguc

SEQ ID NO: 1538270 - RNA, 19 nt, Artificial Sequence
  Description of Artificial Sequence: Synthetic oligonucleotide
  Sense strand starting at position 3752 of SEQ ID NO: 1245124
guuguaacaacagaguuga

SEQ ID NO: 1538271 - RNA, 19 nt, Artificial Sequence
  Description of Artificial Sequence: Synthetic oligonucleotide
  Antisense strand to SEQ ID NO: 1538270
ucaacucuguuguuacaac

SEQ ID NO: 1538272 - RNA, 19 nt, Artificial Sequence
  Description of Artificial Sequence: Synthetic oligonucleotide
  Sense strand starting at position 3779 of SEQ ID NO: 1245124
gagacuguauggccacaaa

SEQ ID NO: 1538273 - RNA, 19 nt, Artificial Sequence
  Description of Artificial Sequence: Synthetic oligonucleotide
  Antisense strand to SEQ ID NO: 1538272
uuuguggccauacagucuc

SEQ ID NO: 1538274 - RNA, 19 nt, Artificial Sequence
  Description of Artificial Sequence: Synthetic oligonucleotide
  Sense strand starting at position 3872 of SEQ ID NO: 1245124
auggauuugugacaaaucu

SEQ ID NO: 1538275 - RNA, 19 nt, Artificial Sequence
  Description of Artificial Sequence: Synthetic oligonucleotide
  Antisense strand to SEQ ID NO: 1538274
agauuugucacaaauccau

SEQ ID NO: 1538276 - RNA, 19 nt, Artificial Sequence
  Description of Artificial Sequence: Synthetic oligonucleotide
  Sense strand starting at position 3885 of SEQ ID NO: 1245124
aaaucugaugaguguugau

SEQ ID NO: 1538277 - RNA, 19 nt, Artificial Sequence
  Description of Artificial Sequence: Synthetic oligonucleotide
  Antisense strand to SEQ ID NO: 1538276
aucaacacucaucagauuu

SEQ ID NO: 1538278 - RNA, 19 nt, Artificial Sequence
  Description of Artificial Sequence: Synthetic oligonucleotide
  Sense strand starting at position 3936 of SEQ ID NO: 1245124
aucugcuuccacuaggaaa

SEQ ID NO: 1538279 - RNA, 19 nt, Artificial Sequence
  Description of Artificial Sequence: Synthetic oligonucleotide
  Antisense strand to SEQ ID NO: 1538278
uuuccuaguggaagcagau

SEQ ID NO: 1538280 - RNA, 19 nt, Artificial Sequence
  Description of Artificial Sequence: Synthetic oligonucleotide
  Sense strand starting at position 3938 of SEQ ID NO: 1245124
cugcuuccacuaggaaaga

SEQ ID NO: 1538281 - RNA, 19 nt, Artificial Sequence
  Description of Artificial Sequence: Synthetic oligonucleotide
  Antisense strand to SEQ ID NO: 1538280
ucuuuccuaguggaagcag

SEQ ID NO: 1538282 - RNA, 19 nt, Artificial Sequence
  Description of Artificial Sequence: Synthetic oligonucleotide
  Sense strand starting at position 3971 of SEQ ID NO: 1245124
caaauuugguguucucugu

SEQ ID NO: 1538283 - RNA, 19 nt, Artificial Sequence
  Description of Artificial Sequence: Synthetic oligonucleotide
  Antisense strand to SEQ ID NO: 1538282
acagagaacaccaaauuug

SEQ ID NO: 1538284 - RNA, 19 nt, Artificial Sequence
  Description of Artificial Sequence: Synthetic oligonucleotide
  Sense strand starting at position 42 of SEQ ID NO: 1245125
ugauaugguaagggaucuu

SEQ ID NO: 1538285 - RNA, 19 nt, Artificial Sequence
  Description of Artificial Sequence: Synthetic oligonucleotide
  Antisense strand to SEQ ID NO: 1538284
aagaucccuuaccauauca

SEQ ID NO: 1538286 - RNA, 19 nt, Artificial Sequence
  Description of Artificial Sequence: Synthetic oligonucleotide
  Sense strand starting at position 101 of SEQ ID NO: 1245125
ucacaauuaccgugaaaug

SEQ ID NO: 1538287 - RNA, 19 nt, Artificial Sequence
  Description of Artificial Sequence: Synthetic oligonucleotide
  Antisense strand to SEQ ID NO: 1538286
cauuucacgguaauuguga

SEQ ID NO: 1538288 - RNA, 19 nt, Artificial Sequence
  Description of Artificial Sequence: Synthetic oligonucleotide
  Sense strand starting at position 102 of SEQ ID NO: 1245125
cacaauuaccgugaaaugu

SEQ ID NO: 1538289 - RNA, 19 nt, Artificial Sequence
  Description of Artificial Sequence: Synthetic oligonucleotide
  Antisense strand to SEQ ID NO: 1538288
acauuucacgguaauugug

SEQ ID NO: 1538290 - RNA, 19 nt, Artificial Sequence
  Description of Artificial Sequence: Synthetic oligonucleotide
  Sense strand starting at position 394 of SEQ ID NO: 1245125
aaguuuaucugagucaaag

SEQ ID NO: 1538291 - RNA, 19 nt, Artificial Sequence
  Description of Artificial Sequence: Synthetic oligonucleotide
  Antisense strand to SEQ ID NO: 1538290
cuuugacucagauaaacuu

SEQ ID NO: 1538292 - RNA, 19 nt, Artificial Sequence
  Description of Artificial Sequence: Synthetic oligonucleotide
  Sense strand starting at position 403 of SEQ ID NO: 1245125
ugagucaaagcaugaauau

SEQ ID NO: 1538293 - RNA, 19 nt, Artificial Sequence
  Description of Artificial Sequence: Synthetic oligonucleotide
  Antisense strand to SEQ ID NO: 1538292
auauucaugcuuugacuca

SEQ ID NO: 1538294 - RNA, 19 nt, Artificial Sequence
  Description of Artificial Sequence: Synthetic oligonucleotide
  Sense strand starting at position 414 of SEQ ID NO: 1245125
augaauauacucgguagaa

SEQ ID NO: 1538295 - RNA, 19 nt, Artificial Sequence
  Description of Artificial Sequence: Synthetic oligonucleotide
  Antisense strand to SEQ ID NO: 1538294
uucuaccgaguauauucau

SEQ ID NO: 1538296 - RNA, 19 nt, Artificial Sequence
  Description of Artificial Sequence: Synthetic oligonucleotide
  Sense strand starting at position 415 of SEQ ID NO: 1245125
ugaauauacucgguagaag

SEQ ID NO: 1538297 - RNA, 19 nt, Artificial Sequence
  Description of Artificial Sequence: Synthetic oligonucleotide
  Antisense strand to SEQ ID NO: 1538296
cuucuaccgaguauauuca

SEQ ID NO: 1538298 - RNA, 19 nt, Artificial Sequence
  Description of Artificial Sequence: Synthetic oligonucleotide
  Sense strand starting at position 418 of SEQ ID NO: 1245125
auauacucgguagaagagu

SEQ ID NO: 1538299 - RNA, 19 nt, Artificial Sequence
  Description of Artificial Sequence: Synthetic oligonucleotide
  Antisense strand to SEQ ID NO: 1538298
acucuucuaccgaguauau

SEQ ID NO: 1538300 - RNA, 19 nt, Artificial Sequence
  Description of Artificial Sequence: Synthetic oligonucleotide
  Sense strand starting at position 441 of SEQ ID NO: 1245125
agagguauauccucauaac

SEQ ID NO: 1538301 - RNA, 19 nt, Artificial Sequence
  Description of Artificial Sequence: Synthetic oligonucleotide
  Antisense strand to SEQ ID NO: 1538300
guuaugaggauauaccucu

SEQ ID NO: 1538302 - RNA, 19 nt, Artificial Sequence
  Description of Artificial Sequence: Synthetic oligonucleotide
  Sense strand starting at position 684 of SEQ ID NO: 1245125
gguugugugcccuuuggca

SEQ ID NO: 1538303 - RNA, 19 nt, Artificial Sequence
  Description of Artificial Sequence: Synthetic oligonucleotide
  Antisense strand to SEQ ID NO: 1538302
ugccaaagggcacacaacc

SEQ ID NO: 1538304 - RNA, 19 nt, Artificial Sequence
  Description of Artificial Sequence: Synthetic oligonucleotide
  Sense strand starting at position 837 of SEQ ID NO: 1245125
uucagaggagucugguaua

SEQ ID NO: 1538305 - RNA, 19 nt, Artificial Sequence
  Description of Artificial Sequence: Synthetic oligonucleotide
  Antisense strand to SEQ ID NO: 1538304
uauaccagacuccucugaa

SEQ ID NO: 1538306 - RNA, 19 nt, Artificial Sequence
  Description of Artificial Sequence: Synthetic oligonucleotide
  Sense strand starting at position 881 of SEQ ID NO: 1245125
gggaaucacuuucuaagcu

SEQ ID NO: 1538307 - RNA, 19 nt, Artificial Sequence
  Description of Artificial Sequence: Synthetic oligonucleotide
  Antisense strand to SEQ ID NO: 1538306
agcuuagaaagugauuccc

SEQ ID NO: 1538308 - RNA, 19 nt, Artificial Sequence
  Description of Artificial Sequence: Synthetic oligonucleotide
  Sense strand starting at position 1067 of SEQ ID NO: 1245125
uucuuuggaguuggaauua

SEQ ID NO: 1538309 - RNA, 19 nt, Artificial Sequence
  Description of Artificial Sequence: Synthetic oligonucleotide
  Antisense strand to SEQ ID NO: 1538308
uaauuccaacuccaaagaa

SEQ ID NO: 1538310 - RNA, 19 nt, Artificial Sequence
  Description of Artificial Sequence: Synthetic oligonucleotide
  Sense strand starting at position 1079 of SEQ ID NO: 1245125
ggaauuaucucuuucuagg

SEQ ID NO: 1538311 - RNA, 19 nt, Artificial Sequence
  Description of Artificial Sequence: Synthetic oligonucleotide
  Antisense strand to SEQ ID NO: 1538310
ccuagaaagagauaauucc

SEQ ID NO: 1538312 - RNA, 19 nt, Artificial Sequence
  Description of Artificial Sequence: Synthetic oligonucleotide
  Sense strand starting at position 1089 of SEQ ID NO: 1245125
cuuucuaggguaggauauu

SEQ ID NO: 1538313 - RNA, 19 nt, Artificial Sequence
  Description of Artificial Sequence: Synthetic oligonucleotide
  Antisense strand to SEQ ID NO: 1538312
aauauccuacccuagaaag

SEQ ID NO: 1538314 - RNA, 19 nt, Artificial Sequence
  Description of Artificial Sequence: Synthetic oligonucleotide
  Sense strand starting at position 1098 of SEQ ID NO: 1245125
guaggauauuugcuaugca

SEQ ID NO: 1538315 - RNA, 19 nt, Artificial Sequence
  Description of Artificial Sequence: Synthetic oligonucleotide
  Antisense strand to SEQ ID NO: 1538314
ugcauagcaaauauccuac

SEQ ID NO: 1538316 - RNA, 19 nt, Artificial Sequence
  Description of Artificial Sequence: Synthetic oligonucleotide
  Sense strand starting at position 1102 of SEQ ID NO: 1245125
gauauuugcuaugcaugcu

SEQ ID NO: 1538317 - RNA, 19 nt, Artificial Sequence
  Description of Artificial Sequence: Synthetic oligonucleotide
  Antisense strand to SEQ ID NO: 1538316
agcaugcauagcaaauauc

SEQ ID NO: 1538318 - RNA, 19 nt, Artificial Sequence
  Description of Artificial Sequence: Synthetic oligonucleotide
  Sense strand starting at position 1191 of SEQ ID NO: 1245125
ccauguuuacuguaaagaa

SEQ ID NO: 1538319 - RNA, 19 nt, Artificial Sequence
  Description of Artificial Sequence: Synthetic oligonucleotide
  Antisense strand to SEQ ID NO: 1538318
uucuuuacaguaaacaugg

SEQ ID NO: 1538320 - RNA, 19 nt, Artificial Sequence
  Description of Artificial Sequence: Synthetic oligonucleotide
  Sense strand starting at position 1585 of SEQ ID NO: 1245125
ugucucugagggcauauaa

SEQ ID NO: 1538321 - RNA, 19 nt, Artificial Sequence
  Description of Artificial Sequence: Synthetic oligonucleotide
  Antisense strand to SEQ ID NO: 1538320
uuauaugcccucagagaca

SEQ ID NO: 1538322 - RNA, 19 nt, Artificial Sequence
  Description of Artificial Sequence: Synthetic oligonucleotide
  Sense strand starting at position 1659 of SEQ ID NO: 1245125
cggagagaguuguuugaaa

SEQ ID NO: 1538323 - RNA, 19 nt, Artificial Sequence
  Description of Artificial Sequence: Synthetic oligonucleotide
  Antisense strand to SEQ ID NO: 1538322
uuucaaacaacucucuccg

SEQ ID NO: 1538324 - RNA, 19 nt, Artificial Sequence
  Description of Artificial Sequence: Synthetic oligonucleotide
  Sense strand starting at position 1661 of SEQ ID NO: 1245125
gagagaguuguuugaaauu

SEQ ID NO: 1538325 - RNA, 19 nt, Artificial Sequence
  Description of Artificial Sequence: Synthetic oligonucleotide
  Antisense strand to SEQ ID NO: 1538324
aauuucaaacaacucucuc

SEQ ID NO: 1538326 - RNA, 19 nt, Artificial Sequence
  Description of Artificial Sequence: Synthetic oligonucleotide
  Sense strand starting at position 1687 of SEQ ID NO: 1245125
gcuggacuucuagaacucu

SEQ ID NO: 1538327 - RNA, 19 nt, Artificial Sequence
  Description of Artificial Sequence: Synthetic oligonucleotide
  Antisense strand to SEQ ID NO: 1538326
agaguucuagaaguccagc

SEQ ID NO: 1538328 - RNA, 19 nt, Artificial Sequence
  Description of Artificial Sequence: Synthetic oligonucleotide
  Sense strand starting at position 1998 of SEQ ID NO: 1245125
ggugaucucugggcagaga

SEQ ID NO: 1538329 - RNA, 19 nt, Artificial Sequence
  Description of Artificial Sequence: Synthetic oligonucleotide
  Antisense strand to SEQ ID NO: 1538328
ucucugcccagagaucacc

SEQ ID NO: 1538330 - RNA, 19 nt, Artificial Sequence
  Description of Artificial Sequence: Synthetic oligonucleotide
  Sense strand starting at position 2087 of SEQ ID NO: 1245125
uugggcucuggguaagaau

SEQ ID NO: 1538331 - RNA, 19 nt, Artificial Sequence
  Description of Artificial Sequence: Synthetic oligonucleotide
  Antisense strand to SEQ ID NO: 1538330
auucuuacccagagcccaa

SEQ ID NO: 1538332 - RNA, 19 nt, Artificial Sequence
  Description of Artificial Sequence: Synthetic oligonucleotide
  Sense strand starting at position 2131 of SEQ ID NO: 1245125
aaugaaacccuuuguugga

SEQ ID NO: 1538333 - RNA, 19 nt, Artificial Sequence
  Description of Artificial Sequence: Synthetic oligonucleotide
  Antisense strand to SEQ ID NO: 1538332
uccaacaaaggguuucauu

SEQ ID NO: 1538334 - RNA, 19 nt, Artificial Sequence
  Description of Artificial Sequence: Synthetic oligonucleotide
  Sense strand starting at position 2138 of SEQ ID NO: 1245125
cccuuuguuggacaccaaa

SEQ ID NO: 1538335 - RNA, 19 nt, Artificial Sequence
  Description of Artificial Sequence: Synthetic oligonucleotide
  Antisense strand to SEQ ID NO: 1538334
uuugguguccaacaaaggg

SEQ ID NO: 1538336 - RNA, 19 nt, Artificial Sequence
  Description of Artificial Sequence: Synthetic oligonucleotide
  Sense strand starting at position 2192 of SEQ ID NO: 1245125
gaagauagccagugaauaa

SEQ ID NO: 1538337 - RNA, 19 nt, Artificial Sequence
  Description of Artificial Sequence: Synthetic oligonucleotide
  Antisense strand to SEQ ID NO: 1538336
uuauucacuggcuaucuuc

SEQ ID NO: 1538338 - RNA, 19 nt, Artificial Sequence
  Description of Artificial Sequence: Synthetic oligonucleotide
  Sense strand starting at position 2394 of SEQ ID NO: 1245125
uguugaaagucaucaggac

SEQ ID NO: 1538339 - RNA, 19 nt, Artificial Sequence
  Description of Artificial Sequence: Synthetic oligonucleotide
  Antisense strand to SEQ ID NO: 1538338
guccugaugacuuucaaca

SEQ ID NO: 1538340 - RNA, 19 nt, Artificial Sequence
  Description of Artificial Sequence: Synthetic oligonucleotide
  Sense strand starting at position 2408 of SEQ ID NO: 1245125
aggacucaaguaugguaua

SEQ ID NO: 1538341 - RNA, 19 nt, Artificial Sequence
  Description of Artificial Sequence: Synthetic oligonucleotide
  Antisense strand to SEQ ID NO: 1538340
uauaccauacuugaguccu

SEQ ID NO: 1538342 - RNA, 19 nt, Artificial Sequence
  Description of Artificial Sequence: Synthetic oligonucleotide
  Sense strand starting at position 2717 of SEQ ID NO: 1245125
acauaaugugggugaggaa

SEQ ID NO: 1538343 - RNA, 19 nt, Artificial Sequence
  Description of Artificial Sequence: Synthetic oligonucleotide
  Antisense strand to SEQ ID NO: 1538342
uuccucacccacauuaugu

SEQ ID NO: 1538344 - RNA, 19 nt, Artificial Sequence
  Description of Artificial Sequence: Synthetic oligonucleotide
  Sense strand starting at position 2775 of SEQ ID NO: 1245125
ugaaguuggaaacgugaga

SEQ ID NO: 1538345 - RNA, 19 nt, Artificial Sequence
  Description of Artificial Sequence: Synthetic oligonucleotide
  Antisense strand to SEQ ID NO: 1538344
ucucacguuuccaacuuca

SEQ ID NO: 1538346 - RNA, 19 nt, Artificial Sequence
  Description of Artificial Sequence: Synthetic oligonucleotide
  Sense strand starting at position 2874 of SEQ ID NO: 1245125
uuaguauggguuugaaaca

SEQ ID NO: 1538347 - RNA, 19 nt, Artificial Sequence
  Description of Artificial Sequence: Synthetic oligonucleotide
  Antisense strand to SEQ ID NO: 1538346
uguuucaaacccauacuaa

SEQ ID NO: 1538348 - RNA, 19 nt, Artificial Sequence
  Description of Artificial Sequence: Synthetic oligonucleotide
  Sense strand starting at position 2881 of SEQ ID NO: 1245125
ggguuugaaacaggguaua

SEQ ID NO: 1538349 - RNA, 19 nt, Artificial Sequence
  Description of Artificial Sequence: Synthetic oligonucleotide
  Antisense strand to SEQ ID NO: 1538348
uauacccuguuucaaaccc

SEQ ID NO: 1538350 - RNA, 19 nt, Artificial Sequence
  Description of Artificial Sequence: Synthetic oligonucleotide
  Sense strand starting at position 2966 of SEQ ID NO: 1245125
acuguucucugauugauag

SEQ ID NO: 1538351 - RNA, 19 nt, Artificial Sequence
  Description of Artificial Sequence: Synthetic oligonucleotide
  Antisense strand to SEQ ID NO: 1538350
cuaucaaucagagaacagu

SEQ ID NO: 1538352 - RNA, 19 nt, Artificial Sequence
  Description of Artificial Sequence: Synthetic oligonucleotide
  Sense strand starting at position 2987 of SEQ ID NO: 1245125
aauacauguugguuggaga

SEQ ID NO: 1538353 - RNA, 19 nt, Artificial Sequence
  Description of Artificial Sequence: Synthetic oligonucleotide
  Antisense strand to SEQ ID NO: 1538352
ucuccaaccaacauguauu

SEQ ID NO: 1538354 - RNA, 19 nt, Artificial Sequence
  Description of Artificial Sequence: Synthetic oligonucleotide
  Sense strand starting at position 2988 of SEQ ID NO: 1245125
auacauguugguuggagaa

SEQ ID NO: 1538355 - RNA, 19 nt, Artificial Sequence
  Description of Artificial Sequence: Synthetic oligonucleotide
  Antisense strand to SEQ ID NO: 1538354
uucuccaaccaacauguau

SEQ ID NO: 1538356 - RNA, 19 nt, Artificial Sequence
  Description of Artificial Sequence: Synthetic oligonucleotide
  Sense strand starting at position 3062 of SEQ ID NO: 1245125
aagguugacccugguaaua

SEQ ID NO: 1538357 - RNA, 19 nt, Artificial Sequence
  Description of Artificial Sequence: Synthetic oligonucleotide
  Antisense strand to SEQ ID NO: 1538356
uauuaccagggucaaccuu

SEQ ID NO: 1538358 - RNA, 19 nt, Artificial Sequence
  Description of Artificial Sequence: Synthetic oligonucleotide
  Sense strand starting at position 3223 of SEQ ID NO: 1245125
acuccaggucuuuaaguga

SEQ ID NO: 1538359 - RNA, 19 nt, Artificial Sequence
  Description of Artificial Sequence: Synthetic oligonucleotide
  Antisense strand to SEQ ID NO: 1538358
ucacuuaaagaccuggagu

SEQ ID NO: 1538360 - RNA, 19 nt, Artificial Sequence
  Description of Artificial Sequence: Synthetic oligonucleotide
  Sense strand starting at position 3283 of SEQ ID NO: 1245125
uuguguuugaaggagauau

SEQ ID NO: 1538361 - RNA, 19 nt, Artificial Sequence
  Description of Artificial Sequence: Synthetic oligonucleotide
  Antisense strand to SEQ ID NO: 1538360
auaucuccuucaaacacaa

SEQ ID NO: 1538362 - RNA, 19 nt, Artificial Sequence
  Description of Artificial Sequence: Synthetic oligonucleotide
  Sense strand starting at position 3629 of SEQ ID NO: 1245125
ggagauuugugggaaugau

SEQ ID NO: 1538363 - RNA, 19 nt, Artificial Sequence
  Description of Artificial Sequence: Synthetic oligonucleotide
  Antisense strand to SEQ ID NO: 1538362
aucauucccacaaaucucc

SEQ ID NO: 1538364 - RNA, 19 nt, Artificial Sequence
  Description of Artificial Sequence: Synthetic oligonucleotide
  Sense strand starting at position 164 of SEQ ID NO: 1245126
cugguaauacaaugucaca

SEQ ID NO: 1538365 - RNA, 19 nt, Artificial Sequence
  Description of Artificial Sequence: Synthetic oligonucleotide
  Antisense strand to SEQ ID NO: 1538364
ugugacauuguauuaccag

SEQ ID NO: 1538366 - RNA, 19 nt, Artificial Sequence
  Description of Artificial Sequence: Synthetic oligonucleotide
  Sense strand starting at position 284 of SEQ ID NO: 1245126
aguauuacccaagguuaac

SEQ ID NO: 1538367 - RNA, 19 nt, Artificial Sequence
  Description of Artificial Sequence: Synthetic oligonucleotide
  Antisense strand to SEQ ID NO: 1538366
guuaaccuuggguaauacu

SEQ ID NO: 1538368 - RNA, 19 nt, Artificial Sequence
  Description of Artificial Sequence: Synthetic oligonucleotide
  Sense strand starting at position 326 of SEQ ID NO: 1245126
cugucacaaggucagauau

SEQ ID NO: 1538369 - RNA, 19 nt, Artificial Sequence
  Description of Artificial Sequence: Synthetic oligonucleotide
  Antisense strand to SEQ ID NO: 1538368
auaucugaccuugugacag

SEQ ID NO: 1538370 - RNA, 19 nt, Artificial Sequence
  Description of Artificial Sequence: Synthetic oligonucleotide
  Sense strand starting at position 336 of SEQ ID NO: 1245126
gucagauauuuacacugaa

SEQ ID NO: 1538371 - RNA, 19 nt, Artificial Sequence
  Description of Artificial Sequence: Synthetic oligonucleotide
  Antisense strand to SEQ ID NO: 1538370
uucaguguaaauaucugac

SEQ ID NO: 1538372 - RNA, 19 nt, Artificial Sequence
  Description of Artificial Sequence: Synthetic oligonucleotide
  Sense strand starting at position 408 of SEQ ID NO: 1245126
agauucuuucuugaguaua

SEQ ID NO: 1538373 - RNA, 19 nt, Artificial Sequence
  Description of Artificial Sequence: Synthetic oligonucleotide
  Antisense strand to SEQ ID NO: 1538372
uauacucaagaaagaaucu

SEQ ID NO: 1538374 - RNA, 19 nt, Artificial Sequence
  Description of Artificial Sequence: Synthetic oligonucleotide
  Sense strand starting at position 411 of SEQ ID NO: 1245126
uucuuucuugaguauaggu

SEQ ID NO: 1538375 - RNA, 19 nt, Artificial Sequence
  Description of Artificial Sequence: Synthetic oligonucleotide
  Antisense strand to SEQ ID NO: 1538374
accuauacucaagaaagaa

SEQ ID NO: 1538376 - RNA, 19 nt, Artificial Sequence
  Description of Artificial Sequence: Synthetic oligonucleotide
  Sense strand starting at position 425 of SEQ ID NO: 1245126
uaggucuugcuugacaaga

SEQ ID NO: 1538377 - RNA, 19 nt, Artificial Sequence
  Description of Artificial Sequence: Synthetic oligonucleotide
  Antisense strand to SEQ ID NO: 1538376
ucuugucaagcaagaccua

SEQ ID NO: 1538378 - RNA, 19 nt, Artificial Sequence
  Description of Artificial Sequence: Synthetic oligonucleotide
  Sense strand starting at position 579 of SEQ ID NO: 1245126
cucacuagauuacucagua

SEQ ID NO: 1538379 - RNA, 19 nt, Artificial Sequence
  Description of Artificial Sequence: Synthetic oligonucleotide
  Antisense strand to SEQ ID NO: 1538378
uacugaguaaucuagugag

SEQ ID NO: 1538380 - RNA, 19 nt, Artificial Sequence
  Description of Artificial Sequence: Synthetic oligonucleotide
  Sense strand starting at position 580 of SEQ ID NO: 1245126
ucacuagauuacucaguag

SEQ ID NO: 1538381 - RNA, 19 nt, Artificial Sequence
  Description of Artificial Sequence: Synthetic oligonucleotide
  Antisense strand to SEQ ID NO: 1538380
cuacugaguaaucuaguga

SEQ ID NO: 1538382 - RNA, 19 nt, Artificial Sequence
  Description of Artificial Sequence: Synthetic oligonucleotide
  Sense strand starting at position 584 of SEQ ID NO: 1245126
uagauuacucaguaguugu

SEQ ID NO: 1538383 - RNA, 19 nt, Artificial Sequence
  Description of Artificial Sequence: Synthetic oligonucleotide
  Antisense strand to SEQ ID NO: 1538382
acaacuacugaguaaucua

SEQ ID NO: 1538384 - RNA, 19 nt, Artificial Sequence
  Description of Artificial Sequence: Synthetic oligonucleotide
  Sense strand starting at position 754 of SEQ ID NO: 1245126
uggucuauuugacaagaca

SEQ ID NO: 1538385 - RNA, 19 nt, Artificial Sequence
  Description of Artificial Sequence: Synthetic oligonucleotide
  Antisense strand to SEQ ID NO: 1538384
ugucuugucaaauagacca

SEQ ID NO: 1538386 - RNA, 19 nt, Artificial Sequence
  Description of Artificial Sequence: Synthetic oligonucleotide
  Sense strand starting at position 880 of SEQ ID NO: 1245126
guacucugugacuauuaug

SEQ ID NO: 1538387 - RNA, 19 nt, Artificial Sequence
  Description of Artificial Sequence: Synthetic oligonucleotide
  Antisense strand to SEQ ID NO: 1538386
cauaauagucacagaguac

SEQ ID NO: 1538388 - RNA, 19 nt, Artificial Sequence
  Description of Artificial Sequence: Synthetic oligonucleotide
  Sense strand starting at position 1016 of SEQ ID NO: 1245126
agaacuaaaguuugucauu

SEQ ID NO: 1538389 - RNA, 19 nt, Artificial Sequence
  Description of Artificial Sequence: Synthetic oligonucleotide
  Antisense strand to SEQ ID NO: 1538388
aaugacaaacuuuaguucu

SEQ ID NO: 1538390 - RNA, 19 nt, Artificial Sequence
  Description of Artificial Sequence: Synthetic oligonucleotide
  Sense strand starting at position 1186 of SEQ ID NO: 1245126
gggaaccugcuuggaauua

SEQ ID NO: 1538391 - RNA, 19 nt, Artificial Sequence
  Description of Artificial Sequence: Synthetic oligonucleotide
  Antisense strand to SEQ ID NO: 1538390
uaauuccaagcagguuccc

SEQ ID NO: 1538392 - RNA, 19 nt, Artificial Sequence
  Description of Artificial Sequence: Synthetic oligonucleotide
  Sense strand starting at position 1379 of SEQ ID NO: 1245126
ggaagugacuuaguaacau

SEQ ID NO: 1538393 - RNA, 19 nt, Artificial Sequence
  Description of Artificial Sequence: Synthetic oligonucleotide
  Antisense strand to SEQ ID NO: 1538392
auguuacuaagucacuucc

SEQ ID NO: 1538394 - RNA, 19 nt, Artificial Sequence
  Description of Artificial Sequence: Synthetic oligonucleotide
  Sense strand starting at position 1493 of SEQ ID NO: 1245126
uugagauuguaacucagua

SEQ ID NO: 1538395 - RNA, 19 nt, Artificial Sequence
  Description of Artificial Sequence: Synthetic oligonucleotide
  Antisense strand to SEQ ID NO: 1538394
uacugaguuacaaucucaa

SEQ ID NO: 1538396 - RNA, 19 nt, Artificial Sequence
  Description of Artificial Sequence: Synthetic oligonucleotide
  Sense strand starting at position 1498 of SEQ ID NO: 1245126
auuguaacucaguaaacuc

SEQ ID NO: 1538397 - RNA, 19 nt, Artificial Sequence
  Description of Artificial Sequence: Synthetic oligonucleotide
  Antisense strand to SEQ ID NO: 1538396
gaguuuacugaguuacaau

SEQ ID NO: 1538398 - RNA, 19 nt, Artificial Sequence
  Description of Artificial Sequence: Synthetic oligonucleotide
  Sense strand starting at position 1512 of SEQ ID NO: 1245126
aacucauagugcuuaagag

SEQ ID NO: 1538399 - RNA, 19 nt, Artificial Sequence
  Description of Artificial Sequence: Synthetic oligonucleotide
  Antisense strand to SEQ ID NO: 1538398
cucuuaagcacuaugaguu

SEQ ID NO: 1538400 - RNA, 19 nt, Artificial Sequence
  Description of Artificial Sequence: Synthetic oligonucleotide
  Sense strand starting at position 1513 of SEQ ID NO: 1245126
acucauagugcuuaagaga

SEQ ID NO: 1538401 - RNA, 19 nt, Artificial Sequence
  Description of Artificial Sequence: Synthetic oligonucleotide
  Antisense strand to SEQ ID NO: 1538400
ucucuuaagcacuaugagu

SEQ ID NO: 1538402 - RNA, 19 nt, Artificial Sequence
  Description of Artificial Sequence: Synthetic oligonucleotide
  Sense strand starting at position 1577 of SEQ ID NO: 1245126
acagacuugcaauguaaau

SEQ ID NO: 1538403 - RNA, 19 nt, Artificial Sequence
  Description of Artificial Sequence: Synthetic oligonucleotide
  Antisense strand to SEQ ID NO: 1538402
auuuacauugcaagucugu

SEQ ID NO: 1538404 - RNA, 19 nt, Artificial Sequence
  Description of Artificial Sequence: Synthetic oligonucleotide
  Sense strand starting at position 2102 of SEQ ID NO: 1245126
ugagcuuccgcuguuacau

SEQ ID NO: 1538405 - RNA, 19 nt, Artificial Sequence
  Description of Artificial Sequence: Synthetic oligonucleotide
  Antisense strand to SEQ ID NO: 1538404
auguaacagcggaagcuca

SEQ ID NO: 1538406 - RNA, 19 nt, Artificial Sequence
  Description of Artificial Sequence: Synthetic oligonucleotide
  Sense strand starting at position 2103 of SEQ ID NO: 1245126
gagcuuccgcuguuacauc

SEQ ID NO: 1538407 - RNA, 19 nt, Artificial Sequence
  Description of Artificial Sequence: Synthetic oligonucleotide
  Antisense strand to SEQ ID NO: 1538406
gauguaacagcggaagcuc

SEQ ID NO: 1538408 - RNA, 19 nt, Artificial Sequence
  Description of Artificial Sequence: Synthetic oligonucleotide
  Sense strand starting at position 2127 of SEQ ID NO: 1245126
cugauuuacucagcugucu

SEQ ID NO: 1538409 - RNA, 19 nt, Artificial Sequence
  Description of Artificial Sequence: Synthetic oligonucleotide
  Antisense strand to SEQ ID NO: 1538408
agacagcugaguaaaucag

SEQ ID NO: 1538410 - RNA, 19 nt, Artificial Sequence
  Description of Artificial Sequence: Synthetic oligonucleotide
  Sense strand starting at position 2311 of SEQ ID NO: 1245126
aaagaauguucucugauug

SEQ ID NO: 1538411 - RNA, 19 nt, Artificial Sequence
  Description of Artificial Sequence: Synthetic oligonucleotide
  Antisense strand to SEQ ID NO: 1538410
caaucagagaacauucuuu

SEQ ID NO: 1538412 - RNA, 19 nt, Artificial Sequence
  Description of Artificial Sequence: Synthetic oligonucleotide
  Sense strand starting at position 2370 of SEQ ID NO: 1245126
acuguuacucagcaugaau

SEQ ID NO: 1538413 - RNA, 19 nt, Artificial Sequence
  Description of Artificial Sequence: Synthetic oligonucleotide
  Antisense strand to SEQ ID NO: 1538412
auucaugcugaguaacagu

SEQ ID NO: 1538414 - RNA, 19 nt, Artificial Sequence
  Description of Artificial Sequence: Synthetic oligonucleotide
  Sense strand starting at position 2373 of SEQ ID NO: 1245126
guuacucagcaugaauaac

SEQ ID NO: 1538415 - RNA, 19 nt, Artificial Sequence
  Description of Artificial Sequence: Synthetic oligonucleotide
  Antisense strand to SEQ ID NO: 1538414
guuauucaugcugaguaac

SEQ ID NO: 1538416 - RNA, 19 nt, Artificial Sequence
  Description of Artificial Sequence: Synthetic oligonucleotide
  Sense strand starting at position 2565 of SEQ ID NO: 1245126
gaaugagucuuaguaaaug

SEQ ID NO: 1538417 - RNA, 19 nt, Artificial Sequence
  Description of Artificial Sequence: Synthetic oligonucleotide
  Antisense strand to SEQ ID NO: 1538416
cauuuacuaagacucauuc

SEQ ID NO: 1538418 - RNA, 19 nt, Artificial Sequence
  Description of Artificial Sequence: Synthetic oligonucleotide
  Sense strand starting at position 2573 of SEQ ID NO: 1245126
cuuaguaaaugaguuggga

SEQ ID NO: 1538419 - RNA, 19 nt, Artificial Sequence
  Description of Artificial Sequence: Synthetic oligonucleotide
  Antisense strand to SEQ ID NO: 1538418
ucccaacucauuuacuaag

SEQ ID NO: 1538420 - RNA, 19 nt, Artificial Sequence
  Description of Artificial Sequence: Synthetic oligonucleotide
  Sense strand starting at position 2575 of SEQ ID NO: 1245126
uaguaaaugaguugggauc

SEQ ID NO: 1538421 - RNA, 19 nt, Artificial Sequence
  Description of Artificial Sequence: Synthetic oligonucleotide
  Antisense strand to SEQ ID NO: 1538420
gaucccaacucauuuacua

SEQ ID NO: 1538422 - RNA, 19 nt, Artificial Sequence
  Description of Artificial Sequence: Synthetic oligonucleotide
  Sense strand starting at position 2850 of SEQ ID NO: 1245126
guuauacaaguguauaucu

SEQ ID NO: 1538423 - RNA, 19 nt, Artificial Sequence
  Description of Artificial Sequence: Synthetic oligonucleotide
  Antisense strand to SEQ ID NO: 1538422
agauauacacuuguauaac

SEQ ID NO: 1538424 - RNA, 19 nt, Artificial Sequence
  Description of Artificial Sequence: Synthetic oligonucleotide
  Sense strand starting at position 3250 of SEQ ID NO: 1245126
uuggaacuuauguggacau

SEQ ID NO: 1538425 - RNA, 19 nt, Artificial Sequence
  Description of Artificial Sequence: Synthetic oligonucleotide
  Antisense strand to SEQ ID NO: 1538424
auguccacauaaguuccaa

SEQ ID NO: 1538426 - RNA, 19 nt, Artificial Sequence
  Description of Artificial Sequence: Synthetic oligonucleotide
  Sense strand starting at position 3364 of SEQ ID NO: 1245126
uuaucauaucuagggcaau

SEQ ID NO: 1538427 - RNA, 19 nt, Artificial Sequence
  Description of Artificial Sequence: Synthetic oligonucleotide
  Antisense strand to SEQ ID NO: 1538426
auugcccuagauaugauaa

SEQ ID NO: 1538428 - RNA, 19 nt, Artificial Sequence
  Description of Artificial Sequence: Synthetic oligonucleotide
  Sense strand starting at position 3502 of SEQ ID NO: 1245126
cuaacuuuguuacuagaug

SEQ ID NO: 1538429 - RNA, 19 nt, Artificial Sequence
  Description of Artificial Sequence: Synthetic oligonucleotide
  Antisense strand to SEQ ID NO: 1538428
caucuaguaacaaaguuag

SEQ ID NO: 1538430 - RNA, 19 nt, Artificial Sequence
  Description of Artificial Sequence: Synthetic oligonucleotide
  Sense strand starting at position 3616 of SEQ ID NO: 1245126
cuauguaaugcugauagac

SEQ ID NO: 1538431 - RNA, 19 nt, Artificial Sequence
  Description of Artificial Sequence: Synthetic oligonucleotide
  Antisense strand to SEQ ID NO: 1538430
gucuaucagcauuacauag

SEQ ID NO: 1538432 - RNA, 19 nt, Artificial Sequence
  Description of Artificial Sequence: Synthetic oligonucleotide
  Sense strand starting at position 3626 of SEQ ID NO: 1245126
cugauagacgggcauucua

SEQ ID NO: 1538433 - RNA, 19 nt, Artificial Sequence
  Description of Artificial Sequence: Synthetic oligonucleotide
  Antisense strand to SEQ ID NO: 1538432
uagaaugcccgucuaucag

SEQ ID NO: 1538434 - RNA, 19 nt, Artificial Sequence
  Description of Artificial Sequence: Synthetic oligonucleotide
  Sense strand starting at position 3675 of SEQ ID NO: 1245126
agcaauaguccagaaagua

SEQ ID NO: 1538435 - RNA, 19 nt, Artificial Sequence
  Description of Artificial Sequence: Synthetic oligonucleotide
  Antisense strand to SEQ ID NO: 1538434
uacuuucuggacuauugcu

SEQ ID NO: 1538436 - RNA, 19 nt, Artificial Sequence
  Description of Artificial Sequence: Synthetic oligonucleotide
  Sense strand starting at position 3695 of SEQ ID NO: 1245126
acauuucugucacuguguu

SEQ ID NO: 1538437 - RNA, 19 nt, Artificial Sequence
  Description of Artificial Sequence: Synthetic oligonucleotide
  Antisense strand to SEQ ID NO: 1538436
aacacagugacagaaaugu

SEQ ID NO: 1538438 - RNA, 19 nt, Artificial Sequence
  Description of Artificial Sequence: Synthetic oligonucleotide
  Sense strand starting at position 3696 of SEQ ID NO: 1245126
cauuucugucacuguguuu

SEQ ID NO: 1538439 - RNA, 19 nt, Artificial Sequence
  Description of Artificial Sequence: Synthetic oligonucleotide
  Antisense strand to SEQ ID NO: 1538438
aaacacagugacagaaaug

SEQ ID NO: 1538440 - RNA, 19 nt, Artificial Sequence
  Description of Artificial Sequence: Synthetic oligonucleotide
  Sense strand starting at position 3947 of SEQ ID NO: 1245126
gguuauuuguuggccuaca

SEQ ID NO: 1538441 - RNA, 19 nt, Artificial Sequence
  Description of Artificial Sequence: Synthetic oligonucleotide
  Antisense strand to SEQ ID NO: 1538440
uguaggccaacaaauaacc

SEQ ID NO: 1538442 - RNA, 19 nt, Artificial Sequence
  Description of Artificial Sequence: Synthetic oligonucleotide
  Sense strand starting at position 3948 of SEQ ID NO: 1245126
guuauuuguuggccuacau

SEQ ID NO: 1538443 - RNA, 19 nt, Artificial Sequence
  Description of Artificial Sequence: Synthetic oligonucleotide
  Antisense strand to SEQ ID NO: 1538442
auguaggccaacaaauaac

SEQ ID NO: 1538444 - RNA, 19 nt, Artificial Sequence
  Description of Artificial Sequence: Synthetic oligonucleotide
  Sense strand starting at position 167 of SEQ ID NO: 1245127
uagaauaguuuaccaggua

SEQ ID NO: 1538445 - RNA, 19 nt, Artificial Sequence
  Description of Artificial Sequence: Synthetic oligonucleotide
  Antisense strand to SEQ ID NO: 1538444
uaccugguaaacuauucua

SEQ ID NO: 1538446 - RNA, 19 nt, Artificial Sequence
  Description of Artificial Sequence: Synthetic oligonucleotide
  Sense strand starting at position 210 of SEQ ID NO: 1245127
cucccuauucucuaguagu

SEQ ID NO: 1538447 - RNA, 19 nt, Artificial Sequence
  Description of Artificial Sequence: Synthetic oligonucleotide
  Antisense strand to SEQ ID NO: 1538446
acuacuagagaauagggag

SEQ ID NO: 1538448 - RNA, 19 nt, Artificial Sequence
  Description of Artificial Sequence: Synthetic oligonucleotide
  Sense strand starting at position 260 of SEQ ID NO: 1245127
uuugaaagacauggucaua

SEQ ID NO: 1538449 - RNA, 19 nt, Artificial Sequence
  Description of Artificial Sequence: Synthetic oligonucleotide
  Antisense strand to SEQ ID NO: 1538448
uaugaccaugucuuucaaa

SEQ ID NO: 1538450 - RNA, 19 nt, Artificial Sequence
  Description of Artificial Sequence: Synthetic oligonucleotide
  Sense strand starting at position 272 of SEQ ID NO: 1245127
ggucauagcucauuuguac

SEQ ID NO: 1538451 - RNA, 19 nt, Artificial Sequence
  Description of Artificial Sequence: Synthetic oligonucleotide
  Antisense strand to SEQ ID NO: 1538450
guacaaaugagcuaugacc

SEQ ID NO: 1538452 - RNA, 19 nt, Artificial Sequence
  Description of Artificial Sequence: Synthetic oligonucleotide
  Sense strand starting at position 374 of SEQ ID NO: 1245127
ugauaucugucaucaugga

SEQ ID NO: 1538453 - RNA, 19 nt, Artificial Sequence
  Description of Artificial Sequence: Synthetic oligonucleotide
  Antisense strand to SEQ ID NO: 1538452
uccaugaugacagauauca

SEQ ID NO: 1538454 - RNA, 19 nt, Artificial Sequence
  Description of Artificial Sequence: Synthetic oligonucleotide
  Sense strand starting at position 378 of SEQ ID NO: 1245127
aucugucaucauggaaaca

SEQ ID NO: 1538455 - RNA, 19 nt, Artificial Sequence
  Description of Artificial Sequence: Synthetic oligonucleotide
  Antisense strand to SEQ ID NO: 1538454
uguuuccaugaugacagau

SEQ ID NO: 1538456 - RNA, 19 nt, Artificial Sequence
  Description of Artificial Sequence: Synthetic oligonucleotide
  Sense strand starting at position 389 of SEQ ID NO: 1245127
uggaaacaguucucuuuau

SEQ ID NO: 1538457 - RNA, 19 nt, Artificial Sequence
  Description of Artificial Sequence: Synthetic oligonucleotide
  Antisense strand to SEQ ID NO: 1538456
auaaagagaacuguuucca

SEQ ID NO: 1538458 - RNA, 19 nt, Artificial Sequence
  Description of Artificial Sequence: Synthetic oligonucleotide
  Sense strand starting at position 390 of SEQ ID NO: 1245127
ggaaacaguucucuuuauu

SEQ ID NO: 1538459 - RNA, 19 nt, Artificial Sequence
  Description of Artificial Sequence: Synthetic oligonucleotide
  Antisense strand to SEQ ID NO: 1538458
aauaaagagaacuguuucc

SEQ ID NO: 1538460 - RNA, 19 nt, Artificial Sequence
  Description of Artificial Sequence: Synthetic oligonucleotide
  Sense strand starting at position 568 of SEQ ID NO: 1245127
gaaagcaugcuguaugaac

SEQ ID NO: 1538461 - RNA, 19 nt, Artificial Sequence
  Description of Artificial Sequence: Synthetic oligonucleotide
  Antisense strand to SEQ ID NO: 1538460
guucauacagcaugcuuuc

SEQ ID NO: 1538462 - RNA, 19 nt, Artificial Sequence
  Description of Artificial Sequence: Synthetic oligonucleotide
  Sense strand starting at position 781 of SEQ ID NO: 1245127
aagacagcuuuguucuaag

SEQ ID NO: 1538463 - RNA, 19 nt, Artificial Sequence
  Description of Artificial Sequence: Synthetic oligonucleotide
  Antisense strand to SEQ ID NO: 1538462
cuuagaacaaagcugucuu

SEQ ID NO: 1538464 - RNA, 19 nt, Artificial Sequence
  Description of Artificial Sequence: Synthetic oligonucleotide
  Sense strand starting at position 991 of SEQ ID NO: 1245127
acaagcugccagggugaua

SEQ ID NO: 1538465 - RNA, 19 nt, Artificial Sequence
  Description of Artificial Sequence: Synthetic oligonucleotide
  Antisense strand to SEQ ID NO: 1538464
uaucacccuggcagcuugu

SEQ ID NO: 1538466 - RNA, 19 nt, Artificial Sequence
  Description of Artificial Sequence: Synthetic oligonucleotide
  Sense strand starting at position 1004 of SEQ ID NO: 1245127
gugauauguaaacaacgca

SEQ ID NO: 1538467 - RNA, 19 nt, Artificial Sequence
  Description of Artificial Sequence: Synthetic oligonucleotide
  Antisense strand to SEQ ID NO: 1538466
ugcguuguuuacauaucac

SEQ ID NO: 1538468 - RNA, 19 nt, Artificial Sequence
  Description of Artificial Sequence: Synthetic oligonucleotide
  Sense strand starting at position 1043 of SEQ ID NO: 1245127
gggaauugaugcuccacac

SEQ ID NO: 1538469 - RNA, 19 nt, Artificial Sequence
  Description of Artificial Sequence: Synthetic oligonucleotide
  Antisense strand to SEQ ID NO: 1538468
guguggagcaucaauuccc

SEQ ID NO: 1538470 - RNA, 19 nt, Artificial Sequence
  Description of Artificial Sequence: Synthetic oligonucleotide
  Sense strand starting at position 1242 of SEQ ID NO: 1245127
ccggacuauacauguuaga

SEQ ID NO: 1538471 - RNA, 19 nt, Artificial Sequence
  Description of Artificial Sequence: Synthetic oligonucleotide
  Antisense strand to SEQ ID NO: 1538470
ucuaacauguauaguccgg

SEQ ID NO: 1538472 - RNA, 19 nt, Artificial Sequence
  Description of Artificial Sequence: Synthetic oligonucleotide
  Sense strand starting at position 1316 of SEQ ID NO: 1245127
acuagauaacuuugcugga

SEQ ID NO: 1538473 - RNA, 19 nt, Artificial Sequence
  Description of Artificial Sequence: Synthetic oligonucleotide
  Antisense strand to SEQ ID NO: 1538472
uccagcaaaguuaucuagu

SEQ ID NO: 1538474 - RNA, 19 nt, Artificial Sequence
  Description of Artificial Sequence: Synthetic oligonucleotide
  Sense strand starting at position 1317 of SEQ ID NO: 1245127
cuagauaacuuugcuggaa

SEQ ID NO: 1538475 - RNA, 19 nt, Artificial Sequence
  Description of Artificial Sequence: Synthetic oligonucleotide
  Antisense strand to SEQ ID NO: 1538474
uuccagcaaaguuaucuag

SEQ ID NO: 1538476 - RNA, 19 nt, Artificial Sequence
  Description of Artificial Sequence: Synthetic oligonucleotide
  Sense strand starting at position 1349 of SEQ ID NO: 1245127
ugcuuaauuuaguagaaga

SEQ ID NO: 1538477 - RNA, 19 nt, Artificial Sequence
  Description of Artificial Sequence: Synthetic oligonucleotide
  Antisense strand to SEQ ID NO: 1538476
ucuucuacuaaauuaagca

SEQ ID NO: 1538478 - RNA, 19 nt, Artificial Sequence
  Description of Artificial Sequence: Synthetic oligonucleotide
  Sense strand starting at position 1393 of SEQ ID NO: 1245127
cuaauaagguguccucuaa

SEQ ID NO: 1538479 - RNA, 19 nt, Artificial Sequence
  Description of Artificial Sequence: Synthetic oligonucleotide
  Antisense strand to SEQ ID NO: 1538478
uuagaggacaccuuauuag

SEQ ID NO: 1538480 - RNA, 19 nt, Artificial Sequence
  Description of Artificial Sequence: Synthetic oligonucleotide
  Sense strand starting at position 1667 of SEQ ID NO: 1245127
aaauuuaucgggugcccau

SEQ ID NO: 1538481 - RNA, 19 nt, Artificial Sequence
  Description of Artificial Sequence: Synthetic oligonucleotide
  Antisense strand to SEQ ID NO: 1538480
augggcacccgauaaauuu

SEQ ID NO: 1538482 - RNA, 19 nt, Artificial Sequence
  Description of Artificial Sequence: Synthetic oligonucleotide
  Sense strand starting at position 2280 of SEQ ID NO: 1245127
gucaguuacuaacucaaua

SEQ ID NO: 1538483 - RNA, 19 nt, Artificial Sequence
  Description of Artificial Sequence: Synthetic oligonucleotide
  Antisense strand to SEQ ID NO: 1538482
uauugaguuaguaacugac

SEQ ID NO: 1538484 - RNA, 19 nt, Artificial Sequence
  Description of Artificial Sequence: Synthetic oligonucleotide
  Sense strand starting at position 2380 of SEQ ID NO: 1245127
acacuacaucaguguauga

SEQ ID NO: 1538485 - RNA, 19 nt, Artificial Sequence
  Description of Artificial Sequence: Synthetic oligonucleotide
  Antisense strand to SEQ ID NO: 1538484
ucauacacugauguagugu

SEQ ID NO: 1538486 - RNA, 19 nt, Artificial Sequence
  Description of Artificial Sequence: Synthetic oligonucleotide
  Sense strand starting at position 2446 of SEQ ID NO: 1245127
agcuuagaugugggaggua

SEQ ID NO: 1538487 - RNA, 19 nt, Artificial Sequence
  Description of Artificial Sequence: Synthetic oligonucleotide
  Antisense strand to SEQ ID NO: 1538486
uaccucccacaucuaagcu

SEQ ID NO: 1538488 - RNA, 19 nt, Artificial Sequence
  Description of Artificial Sequence: Synthetic oligonucleotide
  Sense strand starting at position 2572 of SEQ ID NO: 1245127
gcuggaaucgaucaggcua

SEQ ID NO: 1538489 - RNA, 19 nt, Artificial Sequence
  Description of Artificial Sequence: Synthetic oligonucleotide
  Antisense strand to SEQ ID NO: 1538488
uagccugaucgauuccagc

SEQ ID NO: 1538490 - RNA, 19 nt, Artificial Sequence
  Description of Artificial Sequence: Synthetic oligonucleotide
  Sense strand starting at position 2585 of SEQ ID NO: 1245127
aggcuauauuugcugaggu

SEQ ID NO: 1538491 - RNA, 19 nt, Artificial Sequence
  Description of Artificial Sequence: Synthetic oligonucleotide
  Antisense strand to SEQ ID NO: 1538490
accucagcaaauauagccu

SEQ ID NO: 1538492 - RNA, 19 nt, Artificial Sequence
  Description of Artificial Sequence: Synthetic oligonucleotide
  Sense strand starting at position 2630 of SEQ ID NO: 1245127
agucuuggauuugaaacga

SEQ ID NO: 1538493 - RNA, 19 nt, Artificial Sequence
  Description of Artificial Sequence: Synthetic oligonucleotide
  Antisense strand to SEQ ID NO: 1538492
ucguuucaaauccaagacu

SEQ ID NO: 1538494 - RNA, 19 nt, Artificial Sequence
  Description of Artificial Sequence: Synthetic oligonucleotide
  Sense strand starting at position 2646 of SEQ ID NO: 1245127
cgauacaaacucugagcaa

SEQ ID NO: 1538495 - RNA, 19 nt, Artificial Sequence
  Description of Artificial Sequence: Synthetic oligonucleotide
  Antisense strand to SEQ ID NO: 1538494
uugcucagaguuuguaucg

SEQ ID NO: 1538496 - RNA, 19 nt, Artificial Sequence
  Description of Artificial Sequence: Synthetic oligonucleotide
  Sense strand starting at position 2685 of SEQ ID NO: 1245127
auggcuauguaguuaggau

SEQ ID NO: 1538497 - RNA, 19 nt, Artificial Sequence
  Description of Artificial Sequence: Synthetic oligonucleotide
  Antisense strand to SEQ ID NO: 1538496
auccuaacuacauagccau

SEQ ID NO: 1538498 - RNA, 19 nt, Artificial Sequence
  Description of Artificial Sequence: Synthetic oligonucleotide
  Sense strand starting at position 2689 of SEQ ID NO: 1245127
cuauguaguuaggauuuaa

SEQ ID NO: 1538499 - RNA, 19 nt, Artificial Sequence
  Description of Artificial Sequence: Synthetic oligonucleotide
  Antisense strand to SEQ ID NO: 1538498
uuaaauccuaacuacauag

SEQ ID NO: 1538500 - RNA, 19 nt, Artificial Sequence
  Description of Artificial Sequence: Synthetic oligonucleotide
  Sense strand starting at position 2750 of SEQ ID NO: 1245127
gaaggagucccaggugacu

SEQ ID NO: 1538501 - RNA, 19 nt, Artificial Sequence
  Description of Artificial Sequence: Synthetic oligonucleotide
  Antisense strand to SEQ ID NO: 1538500
agucaccugggacuccuuc

SEQ ID NO: 1538502 - RNA, 19 nt, Artificial Sequence
  Description of Artificial Sequence: Synthetic oligonucleotide
  Sense strand starting at position 2996 of SEQ ID NO: 1245127
acaggaacauugucuuacu

SEQ ID NO: 1538503 - RNA, 19 nt, Artificial Sequence
  Description of Artificial Sequence: Synthetic oligonucleotide
  Antisense strand to SEQ ID NO: 1538502
aguaagacaauguuccugu

SEQ ID NO: 1538504 - RNA, 19 nt, Artificial Sequence
  Description of Artificial Sequence: Synthetic oligonucleotide
  Sense strand starting at position 3297 of SEQ ID NO: 1245127
uggauagguuacuuaaccu

SEQ ID NO: 1538505 - RNA, 19 nt, Artificial Sequence
  Description of Artificial Sequence: Synthetic oligonucleotide
  Antisense strand to SEQ ID NO: 1538504
agguuaaguaaccuaucca

SEQ ID NO: 1538506 - RNA, 19 nt, Artificial Sequence
  Description of Artificial Sequence: Synthetic oligonucleotide
  Sense strand starting at position 3428 of SEQ ID NO: 1245127
auaaauucuggcuaguauu

SEQ ID NO: 1538507 - RNA, 19 nt, Artificial Sequence
  Description of Artificial Sequence: Synthetic oligonucleotide
  Antisense strand to SEQ ID NO: 1538506
aauacuagccagaauuuau

SEQ ID NO: 1538508 - RNA, 19 nt, Artificial Sequence
  Description of Artificial Sequence: Synthetic oligonucleotide
  Sense strand starting at position 3535 of SEQ ID NO: 1245127
ucaacaagaugugcauuaa

SEQ ID NO: 1538509 - RNA, 19 nt, Artificial Sequence
  Description of Artificial Sequence: Synthetic oligonucleotide
  Antisense strand to SEQ ID NO: 1538508
uuaaugcacaucuuguuga

SEQ ID NO: 1538510 - RNA, 19 nt, Artificial Sequence
  Description of Artificial Sequence: Synthetic oligonucleotide
  Sense strand starting at position 3662 of SEQ ID NO: 1245127
agcaacugaucagucagaa

SEQ ID NO: 1538511 - RNA, 19 nt, Artificial Sequence
  Description of Artificial Sequence: Synthetic oligonucleotide
  Antisense strand to SEQ ID NO: 1538510
uucugacugaucaguugcu

SEQ ID NO: 1538512 - RNA, 19 nt, Artificial Sequence
  Description of Artificial Sequence: Synthetic oligonucleotide
  Sense strand starting at position 3672 of SEQ ID NO: 1245127
cagucagaagguuaagcau

SEQ ID NO: 1538513 - RNA, 19 nt, Artificial Sequence
  Description of Artificial Sequence: Synthetic oligonucleotide
  Antisense strand to SEQ ID NO: 1538512
augcuuaaccuucugacug

SEQ ID NO: 1538514 - RNA, 19 nt, Artificial Sequence
  Description of Artificial Sequence: Synthetic oligonucleotide
  Sense strand starting at position 3675 of SEQ ID NO: 1245127
ucagaagguuaagcauauu

SEQ ID NO: 1538515 - RNA, 19 nt, Artificial Sequence
  Description of Artificial Sequence: Synthetic oligonucleotide
  Antisense strand to SEQ ID NO: 1538514
aauaugcuuaaccuucuga

SEQ ID NO: 1538516 - RNA, 19 nt, Artificial Sequence
  Description of Artificial Sequence: Synthetic oligonucleotide
  Sense strand starting at position 3681 of SEQ ID NO: 1245127
gguuaagcauauuucuagu

SEQ ID NO: 1538517 - RNA, 19 nt, Artificial Sequence
  Description of Artificial Sequence: Synthetic oligonucleotide
  Antisense strand to SEQ ID NO: 1538516
acuagaaauaugcuuaacc

SEQ ID NO: 1538518 - RNA, 19 nt, Artificial Sequence
  Description of Artificial Sequence: Synthetic oligonucleotide
  Sense strand starting at position 3720 of SEQ ID NO: 1245127
aauguuaaacaugguaguu

SEQ ID NO: 1538519 - RNA, 19 nt, Artificial Sequence
  Description of Artificial Sequence: Synthetic oligonucleotide
  Antisense strand to SEQ ID NO: 1538518
aacuaccauguuuaacauu

SEQ ID NO: 1538520 - RNA, 19 nt, Artificial Sequence
  Description of Artificial Sequence: Synthetic oligonucleotide
  Sense strand starting at position 3930 of SEQ ID NO: 1245127
guaauuaaccaauauugug

SEQ ID NO: 1538521 - RNA, 19 nt, Artificial Sequence
  Description of Artificial Sequence: Synthetic oligonucleotide
  Antisense strand to SEQ ID NO: 1538520
cacaauauugguuaauuac

SEQ ID NO: 1538522 - RNA, 19 nt, Artificial Sequence
  Description of Artificial Sequence: Synthetic oligonucleotide
  Sense strand starting at position 3967 of SEQ ID NO: 1245127
aggucaccuugaucucuaa

SEQ ID NO: 1538523 - RNA, 19 nt, Artificial Sequence
  Description of Artificial Sequence: Synthetic oligonucleotide
  Antisense strand to SEQ ID NO: 1538522
uuagagaucaaggugaccu

SEQ ID NO: 1538524 - RNA, 19 nt, Artificial Sequence
  Description of Artificial Sequence: Synthetic oligonucleotide
  Sense strand starting at position 405 of SEQ ID NO: 1245128
uagaguccauaauugguaa

SEQ ID NO: 1538525 - RNA, 19 nt, Artificial Sequence
  Description of Artificial Sequence: Synthetic oligonucleotide
  Antisense strand to SEQ ID NO: 1538524
uuaccaauuauggacucua

SEQ ID NO: 1538526 - RNA, 19 nt, Artificial Sequence
  Description of Artificial Sequence: Synthetic oligonucleotide
  Sense strand starting at position 408 of SEQ ID NO: 1245128
aguccauaauugguaauau

SEQ ID NO: 1538527 - RNA, 19 nt, Artificial Sequence
  Description of Artificial Sequence: Synthetic oligonucleotide
  Antisense strand to SEQ ID NO: 1538526
auauuaccaauuauggacu

SEQ ID NO: 1538528 - RNA, 19 nt, Artificial Sequence
  Description of Artificial Sequence: Synthetic oligonucleotide
  Sense strand starting at position 467 of SEQ ID NO: 1245128
auaagagcauugcucaaga

SEQ ID NO: 1538529 - RNA, 19 nt, Artificial Sequence
  Description of Artificial Sequence: Synthetic oligonucleotide
  Antisense strand to SEQ ID NO: 1538528
ucuugagcaaugcucuuau

SEQ ID NO: 1538530 - RNA, 19 nt, Artificial Sequence
  Description of Artificial Sequence: Synthetic oligonucleotide
  Sense strand starting at position 612 of SEQ ID NO: 1245128
gauagugcccuggaauaua

SEQ ID NO: 1538531 - RNA, 19 nt, Artificial Sequence
  Description of Artificial Sequence: Synthetic oligonucleotide
  Antisense strand to SEQ ID NO: 1538530
uauauuccagggcacuauc

SEQ ID NO: 1538532 - RNA, 19 nt, Artificial Sequence
  Description of Artificial Sequence: Synthetic oligonucleotide
  Sense strand starting at position 626 of SEQ ID NO: 1245128
auauaauguuaggucuaca

SEQ ID NO: 1538533 - RNA, 19 nt, Artificial Sequence
  Description of Artificial Sequence: Synthetic oligonucleotide
  Antisense strand to SEQ ID NO: 1538532
uguagaccuaacauuauau

SEQ ID NO: 1538534 - RNA, 19 nt, Artificial Sequence
  Description of Artificial Sequence: Synthetic oligonucleotide
  Sense strand starting at position 847 of SEQ ID NO: 1245128
uguccucagcaugacauaa

SEQ ID NO: 1538535 - RNA, 19 nt, Artificial Sequence
  Description of Artificial Sequence: Synthetic oligonucleotide
  Antisense strand to SEQ ID NO: 1538534
uuaugucaugcugaggaca

SEQ ID NO: 1538536 - RNA, 19 nt, Artificial Sequence
  Description of Artificial Sequence: Synthetic oligonucleotide
  Sense strand starting at position 944 of SEQ ID NO: 1245128
gaaucugaccggugaugaa

SEQ ID NO: 1538537 - RNA, 19 nt, Artificial Sequence
  Description of Artificial Sequence: Synthetic oligonucleotide
  Antisense strand to SEQ ID NO: 1538536
uucaucaccggucagauuc

SEQ ID NO: 1538538 - RNA, 19 nt, Artificial Sequence
  Description of Artificial Sequence: Synthetic oligonucleotide
  Sense strand starting at position 979 of SEQ ID NO: 1245128
acugaauauugguucccaa

SEQ ID NO: 1538539 - RNA, 19 nt, Artificial Sequence
  Description of Artificial Sequence: Synthetic oligonucleotide
  Antisense strand to SEQ ID NO: 1538538
uugggaaccaauauucagu

SEQ ID NO: 1538540 - RNA, 19 nt, Artificial Sequence
  Description of Artificial Sequence: Synthetic oligonucleotide
  Sense strand starting at position 1027 of SEQ ID NO: 1245128
uaagauguauauucugaag

SEQ ID NO: 1538541 - RNA, 19 nt, Artificial Sequence
  Description of Artificial Sequence: Synthetic oligonucleotide
  Antisense strand to SEQ ID NO: 1538540
cuucagaauauacaucuua

SEQ ID NO: 1538542 - RNA, 19 nt, Artificial Sequence
  Description of Artificial Sequence: Synthetic oligonucleotide
  Sense strand starting at position 1033 of SEQ ID NO: 1245128
guauauucugaagacuucu

SEQ ID NO: 1538543 - RNA, 19 nt, Artificial Sequence
  Description of Artificial Sequence: Synthetic oligonucleotide
  Antisense strand to SEQ ID NO: 1538542
agaagucuucagaauauac

SEQ ID NO: 1538544 - RNA, 19 nt, Artificial Sequence
  Description of Artificial Sequence: Synthetic oligonucleotide
  Sense strand starting at position 1039 of SEQ ID NO: 1245128
ucugaagacuucuuuaagu

SEQ ID NO: 1538545 - RNA, 19 nt, Artificial Sequence
  Description of Artificial Sequence: Synthetic oligonucleotide
  Antisense strand to SEQ ID NO: 1538544
acuuaaagaagucuucaga

SEQ ID NO: 1538546 - RNA, 19 nt, Artificial Sequence
  Description of Artificial Sequence: Synthetic oligonucleotide
  Sense strand starting at position 1119 of SEQ ID NO: 1245128
uuucuugugacggaacuau

SEQ ID NO: 1538547 - RNA, 19 nt, Artificial Sequence
  Description of Artificial Sequence: Synthetic oligonucleotide
  Antisense strand to SEQ ID NO: 1538546
auaguuccgucacaagaaa

SEQ ID NO: 1538548 - RNA, 19 nt, Artificial Sequence
  Description of Artificial Sequence: Synthetic oligonucleotide
  Sense strand starting at position 1228 of SEQ ID NO: 1245128
gcaacauugcuggaacuga

SEQ ID NO: 1538549 - RNA, 19 nt, Artificial Sequence
  Description of Artificial Sequence: Synthetic oligonucleotide
  Antisense strand to SEQ ID NO: 1538548
ucaguuccagcaauguugc

SEQ ID NO: 1538550 - RNA, 19 nt, Artificial Sequence
  Description of Artificial Sequence: Synthetic oligonucleotide
  Sense strand starting at position 1238 of SEQ ID NO: 1245128
uggaacugaucuuugaguu

SEQ ID NO: 1538551 - RNA, 19 nt, Artificial Sequence
  Description of Artificial Sequence: Synthetic oligonucleotide
  Antisense strand to SEQ ID NO: 1538550
aacucaaagaucaguucca

SEQ ID NO: 1538552 - RNA, 19 nt, Artificial Sequence
  Description of Artificial Sequence: Synthetic oligonucleotide
  Sense strand starting at position 1239 of SEQ ID NO: 1245128
ggaacugaucuuugaguuu

SEQ ID NO: 1538553 - RNA, 19 nt, Artificial Sequence
  Description of Artificial Sequence: Synthetic oligonucleotide
  Antisense strand to SEQ ID NO: 1538552
aaacucaaagaucaguucc

SEQ ID NO: 1538554 - RNA, 19 nt, Artificial Sequence
  Description of Artificial Sequence: Synthetic oligonucleotide
  Sense strand starting at position 1242 of SEQ ID NO: 1245128
acugaucuuugaguuuaac

SEQ ID NO: 1538555 - RNA, 19 nt, Artificial Sequence
  Description of Artificial Sequence: Synthetic oligonucleotide
  Antisense strand to SEQ ID NO: 1538554
guuaaacucaaagaucagu

SEQ ID NO: 1538556 - RNA, 19 nt, Artificial Sequence
  Description of Artificial Sequence: Synthetic oligonucleotide
  Sense strand starting at position 1245 of SEQ ID NO: 1245128
gaucuuugaguuuaacgaa

SEQ ID NO: 1538557 - RNA, 19 nt, Artificial Sequence
  Description of Artificial Sequence: Synthetic oligonucleotide
  Antisense strand to SEQ ID NO: 1538556
uucguuaaacucaaagauc

SEQ ID NO: 1538558 - RNA, 19 nt, Artificial Sequence
  Description of Artificial Sequence: Synthetic oligonucleotide
  Sense strand starting at position 1338 of SEQ ID NO: 1245128
ccacaugcuccugagaaua

SEQ ID NO: 1538559 - RNA, 19 nt, Artificial Sequence
  Description of Artificial Sequence: Synthetic oligonucleotide
  Antisense strand to SEQ ID NO: 1538558
uauucucaggagcaugugg

SEQ ID NO: 1538560 - RNA, 19 nt, Artificial Sequence
  Description of Artificial Sequence: Synthetic oligonucleotide
  Sense strand starting at position 1480 of SEQ ID NO: 1245128
ggaacaguauuauuaaguc

SEQ ID NO: 1538561 - RNA, 19 nt, Artificial Sequence
  Description of Artificial Sequence: Synthetic oligonucleotide
  Antisense strand to SEQ ID NO: 1538560
gacuuaauaauacuguucc

SEQ ID NO: 1538562 - RNA, 19 nt, Artificial Sequence
  Description of Artificial Sequence: Synthetic oligonucleotide
  Sense strand starting at position 1631 of SEQ ID NO: 1245128
acuuacugugaauguaaga

SEQ ID NO: 1538563 - RNA, 19 nt, Artificial Sequence
  Description of Artificial Sequence: Synthetic oligonucleotide
  Antisense strand to SEQ ID NO: 1538562
ucuuacauucacaguaagu

SEQ ID NO: 1538564 - RNA, 19 nt, Artificial Sequence
  Description of Artificial Sequence: Synthetic oligonucleotide
  Sense strand starting at position 2644 of SEQ ID NO: 1245128
ugacuaauggcuuacuuaa

SEQ ID NO: 1538565 - RNA, 19 nt, Artificial Sequence
  Description of Artificial Sequence: Synthetic oligonucleotide
  Antisense strand to SEQ ID NO: 1538564
uuaaguaagccauuaguca

SEQ ID NO: 1538566 - RNA, 19 nt, Artificial Sequence
  Description of Artificial Sequence: Synthetic oligonucleotide
  Sense strand starting at position 2781 of SEQ ID NO: 1245128
ucaagagacgguuaacuuu

SEQ ID NO: 1538567 - RNA, 19 nt, Artificial Sequence
  Description of Artificial Sequence: Synthetic oligonucleotide
  Antisense strand to SEQ ID NO: 1538566
aaaguuaaccgucucuuga

SEQ ID NO: 1538568 - RNA, 19 nt, Artificial Sequence
  Description of Artificial Sequence: Synthetic oligonucleotide
  Sense strand starting at position 2793 of SEQ ID NO: 1245128
uaacuuucuuugguaggaa

SEQ ID NO: 1538569 - RNA, 19 nt, Artificial Sequence
  Description of Artificial Sequence: Synthetic oligonucleotide
  Antisense strand to SEQ ID NO: 1538568
uuccuaccaaagaaaguua

SEQ ID NO: 1538570 - RNA, 19 nt, Artificial Sequence
  Description of Artificial Sequence: Synthetic oligonucleotide
  Sense strand starting at position 2904 of SEQ ID NO: 1245128
ugcuaugagcuagauacua

SEQ ID NO: 1538571 - RNA, 19 nt, Artificial Sequence
  Description of Artificial Sequence: Synthetic oligonucleotide
  Antisense strand to SEQ ID NO: 1538570
uaguaucuagcucauagca

SEQ ID NO: 1538572 - RNA, 19 nt, Artificial Sequence
  Description of Artificial Sequence: Synthetic oligonucleotide
  Sense strand starting at position 3034 of SEQ ID NO: 1245128
agacauaacuagcucugga

SEQ ID NO: 1538573 - RNA, 19 nt, Artificial Sequence
  Description of Artificial Sequence: Synthetic oligonucleotide
  Antisense strand to SEQ ID NO: 1538572
uccagagcuaguuaugucu

SEQ ID NO: 1538574 - RNA, 19 nt, Artificial Sequence
  Description of Artificial Sequence: Synthetic oligonucleotide
  Sense strand starting at position 3140 of SEQ ID NO: 1245128
cugggauggugccuaagaa

SEQ ID NO: 1538575 - RNA, 19 nt, Artificial Sequence
  Description of Artificial Sequence: Synthetic oligonucleotide
  Antisense strand to SEQ ID NO: 1538574
uucuuaggcaccaucccag

SEQ ID NO: 1538576 - RNA, 19 nt, Artificial Sequence
  Description of Artificial Sequence: Synthetic oligonucleotide
  Sense strand starting at position 3225 of SEQ ID NO: 1245128
ugacuaguucuagaacugu

SEQ ID NO: 1538577 - RNA, 19 nt, Artificial Sequence
  Description of Artificial Sequence: Synthetic oligonucleotide
  Antisense strand to SEQ ID NO: 1538576
acaguucuagaacuaguca

SEQ ID NO: 1538578 - RNA, 19 nt, Artificial Sequence
  Description of Artificial Sequence: Synthetic oligonucleotide
  Sense strand starting at position 3267 of SEQ ID NO: 1245128
gcauaauaacauggaccuu

SEQ ID NO: 1538579 - RNA, 19 nt, Artificial Sequence
  Description of Artificial Sequence: Synthetic oligonucleotide
  Antisense strand to SEQ ID NO: 1538578
aagguccauguuauuaugc

SEQ ID NO: 1538580 - RNA, 19 nt, Artificial Sequence
  Description of Artificial Sequence: Synthetic oligonucleotide
  Sense strand starting at position 3282 of SEQ ID NO: 1245128
ccuugauugcucuucgcuu

SEQ ID NO: 1538581 - RNA, 19 nt, Artificial Sequence
  Description of Artificial Sequence: Synthetic oligonucleotide
  Antisense strand to SEQ ID NO: 1538580
aagcgaagagcaaucaagg

SEQ ID NO: 1538582 - RNA, 19 nt, Artificial Sequence
  Description of Artificial Sequence: Synthetic oligonucleotide
  Sense strand starting at position 3323 of SEQ ID NO: 1245128
aaacuaugauuguuaguga

SEQ ID NO: 1538583 - RNA, 19 nt, Artificial Sequence
  Description of Artificial Sequence: Synthetic oligonucleotide
  Antisense strand to SEQ ID NO: 1538582
ucacuaacaaucauaguuu

SEQ ID NO: 1538584 - RNA, 19 nt, Artificial Sequence
  Description of Artificial Sequence: Synthetic oligonucleotide
  Sense strand starting at position 3480 of SEQ ID NO: 1245128
agcugcaauguauauuaaa

SEQ ID NO: 1538585 - RNA, 19 nt, Artificial Sequence
  Description of Artificial Sequence: Synthetic oligonucleotide
  Antisense strand to SEQ ID NO: 1538584
uuuaauauacauugcagcu

SEQ ID NO: 1538586 - RNA, 19 nt, Artificial Sequence
  Description of Artificial Sequence: Synthetic oligonucleotide
  Sense strand starting at position 3505 of SEQ ID NO: 1245128
cacagaaguugaguaauau

SEQ ID NO: 1538587 - RNA, 19 nt, Artificial Sequence
  Description of Artificial Sequence: Synthetic oligonucleotide
  Antisense strand to SEQ ID NO: 1538586
auauuacucaacuucugug

SEQ ID NO: 1538588 - RNA, 19 nt, Artificial Sequence
  Description of Artificial Sequence: Synthetic oligonucleotide
  Sense strand starting at position 3535 of SEQ ID NO: 1245128
aguuaaaucucaguaagag

SEQ ID NO: 1538589 - RNA, 19 nt, Artificial Sequence
  Description of Artificial Sequence: Synthetic oligonucleotide
  Antisense strand to SEQ ID NO: 1538588
cucuuacugagauuuaacu

SEQ ID NO: 1538590 - RNA, 19 nt, Artificial Sequence
  Description of Artificial Sequence: Synthetic oligonucleotide
  Sense strand starting at position 3565 of SEQ ID NO: 1245128
auuauuuccucgucaaguc

SEQ ID NO: 1538591 - RNA, 19 nt, Artificial Sequence
  Description of Artificial Sequence: Synthetic oligonucleotide
  Antisense strand to SEQ ID NO: 1538590
gacuugacgaggaaauaau

SEQ ID NO: 1538592 - RNA, 19 nt, Artificial Sequence
  Description of Artificial Sequence: Synthetic oligonucleotide
  Sense strand starting at position 3574 of SEQ ID NO: 1245128
ucgucaagucuggagaaau

SEQ ID NO: 1538593 - RNA, 19 nt, Artificial Sequence
  Description of Artificial Sequence: Synthetic oligonucleotide
  Antisense strand to SEQ ID NO: 1538592
auuucuccagacuugacga

SEQ ID NO: 1538594 - RNA, 19 nt, Artificial Sequence
  Description of Artificial Sequence: Synthetic oligonucleotide
  Sense strand starting at position 3701 of SEQ ID NO: 1245128
uuuaaaucuggauaugcca

SEQ ID NO: 1538595 - RNA, 19 nt, Artificial Sequence
  Description of Artificial Sequence: Synthetic oligonucleotide
  Antisense strand to SEQ ID NO: 1538594
uggcauauccagauuuaaa

SEQ ID NO: 1538596 - RNA, 19 nt, Artificial Sequence
  Description of Artificial Sequence: Synthetic oligonucleotide
  Sense strand starting at position 3709 of SEQ ID NO: 1245128
uggauaugccaacaguagu

SEQ ID NO: 1538597 - RNA, 19 nt, Artificial Sequence
  Description of Artificial Sequence: Synthetic oligonucleotide
  Antisense strand to SEQ ID NO: 1538596
acuacuguuggcauaucca

SEQ ID NO: 1538598 - RNA, 19 nt, Artificial Sequence
  Description of Artificial Sequence: Synthetic oligonucleotide
  Sense strand starting at position 3842 of SEQ ID NO: 1245128
aaagauuaacagggugcua

SEQ ID NO: 1538599 - RNA, 19 nt, Artificial Sequence
  Description of Artificial Sequence: Synthetic oligonucleotide
  Antisense strand to SEQ ID NO: 1538598
uagcacccuguuaaucuuu

SEQ ID NO: 1538600 - RNA, 19 nt, Artificial Sequence
  Description of Artificial Sequence: Synthetic oligonucleotide
  Sense strand starting at position 3914 of SEQ ID NO: 1245128
aagaaauaaucaguaccgu

SEQ ID NO: 1538601 - RNA, 19 nt, Artificial Sequence
  Description of Artificial Sequence: Synthetic oligonucleotide
  Antisense strand to SEQ ID NO: 1538600
acgguacugauuauuucuu

SEQ ID NO: 1538602 - RNA, 19 nt, Artificial Sequence
  Description of Artificial Sequence: Synthetic oligonucleotide
  Sense strand starting at position 3941 of SEQ ID NO: 1245128
auaugagaaauucggaucu

SEQ ID NO: 1538603 - RNA, 19 nt, Artificial Sequence
  Description of Artificial Sequence: Synthetic oligonucleotide
  Antisense strand to SEQ ID NO: 1538602
agauccgaauuucucauau

SEQ ID NO: 1538604 - RNA, 19 nt, Artificial Sequence
  Description of Artificial Sequence: Synthetic oligonucleotide
  Sense strand starting at position 84 of SEQ ID NO: 1245129
uagaguccauaauugguaa

SEQ ID NO: 1538605 - RNA, 19 nt, Artificial Sequence
  Description of Artificial Sequence: Synthetic oligonucleotide
  Antisense strand to SEQ ID NO: 1538604
uuaccaauuauggacucua

SEQ ID NO: 1538606 - RNA, 19 nt, Artificial Sequence
  Description of Artificial Sequence: Synthetic oligonucleotide
  Sense strand starting at position 87 of SEQ ID NO: 1245129
aguccauaauugguaauau

SEQ ID NO: 1538607 - RNA, 19 nt, Artificial Sequence
  Description of Artificial Sequence: Synthetic oligonucleotide
  Antisense strand to SEQ ID NO: 1538606
auauuaccaauuauggacu

SEQ ID NO: 1538608 - RNA, 19 nt, Artificial Sequence
  Description of Artificial Sequence: Synthetic oligonucleotide
  Sense strand starting at position 146 of SEQ ID NO: 1245129
auaagagcauugcucaaga

SEQ ID NO: 1538609 - RNA, 19 nt, Artificial Sequence
  Description of Artificial Sequence: Synthetic oligonucleotide
  Antisense strand to SEQ ID NO: 1538608
ucuugagcaaugcucuuau

SEQ ID NO: 1538610 - RNA, 19 nt, Artificial Sequence
  Description of Artificial Sequence: Synthetic oligonucleotide
  Sense strand starting at position 291 of SEQ ID NO: 1245129
gauagugcccuggaauaua

SEQ ID NO: 1538611 - RNA, 19 nt, Artificial Sequence
  Description of Artificial Sequence: Synthetic oligonucleotide
  Antisense strand to SEQ ID NO: 1538610
uauauuccagggcacuauc

SEQ ID NO: 1538612 - RNA, 19 nt, Artificial Sequence
  Description of Artificial Sequence: Synthetic oligonucleotide
  Sense strand starting at position 305 of SEQ ID NO: 1245129
auauaauguuaggucuaca

SEQ ID NO: 1538613 - RNA, 19 nt, Artificial Sequence
  Description of Artificial Sequence: Synthetic oligonucleotide
  Antisense strand to SEQ ID NO: 1538612
uguagaccuaacauuauau

SEQ ID NO: 1538614 - RNA, 19 nt, Artificial Sequence
  Description of Artificial Sequence: Synthetic oligonucleotide
  Sense strand starting at position 526 of SEQ ID NO: 1245129
uguccucagcaugacauaa

SEQ ID NO: 1538615 - RNA, 19 nt, Artificial Sequence
  Description of Artificial Sequence: Synthetic oligonucleotide
  Antisense strand to SEQ ID NO: 1538614
uuaugucaugcugaggaca

SEQ ID NO: 1538616 - RNA, 19 nt, Artificial Sequence
  Description of Artificial Sequence: Synthetic oligonucleotide
  Sense strand starting at position 623 of SEQ ID NO: 1245129
gaaucugaccggugaugaa

SEQ ID NO: 1538617 - RNA, 19 nt, Artificial Sequence
  Description of Artificial Sequence: Synthetic oligonucleotide
  Antisense strand to SEQ ID NO: 1538616
uucaucaccggucagauuc

SEQ ID NO: 1538618 - RNA, 19 nt, Artificial Sequence
  Description of Artificial Sequence: Synthetic oligonucleotide
  Sense strand starting at position 658 of SEQ ID NO: 1245129
acugaauauugguucccaa

SEQ ID NO: 1538619 - RNA, 19 nt, Artificial Sequence
  Description of Artificial Sequence: Synthetic oligonucleotide
  Antisense strand to SEQ ID NO: 1538618
uugggaaccaauauucagu

SEQ ID NO: 1538620 - RNA, 19 nt, Artificial Sequence
  Description of Artificial Sequence: Synthetic oligonucleotide
  Sense strand starting at position 706 of SEQ ID NO: 1245129
uaagauguauauucugaag

SEQ ID NO: 1538621 - RNA, 19 nt, Artificial Sequence
  Description of Artificial Sequence: Synthetic oligonucleotide
  Antisense strand to SEQ ID NO: 1538620
cuucagaauauacaucuua

SEQ ID NO: 1538622 - RNA, 19 nt, Artificial Sequence
  Description of Artificial Sequence: Synthetic oligonucleotide
  Sense strand starting at position 712 of SEQ ID NO: 1245129
guauauucugaagacuucu

SEQ ID NO: 1538623 - RNA, 19 nt, Artificial Sequence
  Description of Artificial Sequence: Synthetic oligonucleotide
  Antisense strand to SEQ ID NO: 1538622
agaagucuucagaauauac

SEQ ID NO: 1538624 - RNA, 19 nt, Artificial Sequence
  Description of Artificial Sequence: Synthetic oligonucleotide
  Sense strand starting at position 798 of SEQ ID NO: 1245129
uuucuugugacggaacuau

SEQ ID NO: 1538625 - RNA, 19 nt, Artificial Sequence
  Description of Artificial Sequence: Synthetic oligonucleotide
  Antisense strand to SEQ ID NO: 1538624
auaguuccgucacaagaaa

SEQ ID NO: 1538626 - RNA, 19 nt, Artificial Sequence
  Description of Artificial Sequence: Synthetic oligonucleotide
  Sense strand starting at position 907 of SEQ ID NO: 1245129
gcaacauugcuggaacuga

SEQ ID NO: 1538627 - RNA, 19 nt, Artificial Sequence
  Description of Artificial Sequence: Synthetic oligonucleotide
  Antisense strand to SEQ ID NO: 1538626
ucaguuccagcaauguugc

SEQ ID NO: 1538628 - RNA, 19 nt, Artificial Sequence
  Description of Artificial Sequence: Synthetic oligonucleotide
  Sense strand starting at position 917 of SEQ ID NO: 1245129
uggaacugaucuuugaguu

SEQ ID NO: 1538629 - RNA, 19 nt, Artificial Sequence
  Description of Artificial Sequence: Synthetic oligonucleotide
  Antisense strand to SEQ ID NO: 1538628
aacucaaagaucaguucca

SEQ ID NO: 1538630 - RNA, 19 nt, Artificial Sequence
  Description of Artificial Sequence: Synthetic oligonucleotide
  Sense strand starting at position 918 of SEQ ID NO: 1245129
ggaacugaucuuugaguuu

SEQ ID NO: 1538631 - RNA, 19 nt, Artificial Sequence
  Description of Artificial Sequence: Synthetic oligonucleotide
  Antisense strand to SEQ ID NO: 1538630
aaacucaaagaucaguucc

SEQ ID NO: 1538632 - RNA, 19 nt, Artificial Sequence
  Description of Artificial Sequence: Synthetic oligonucleotide
  Sense strand starting at position 924 of SEQ ID NO: 1245129
gaucuuugaguuuaacgaa

SEQ ID NO: 1538633 - RNA, 19 nt, Artificial Sequence
  Description of Artificial Sequence: Synthetic oligonucleotide
  Antisense strand to SEQ ID NO: 1538632
uucguuaaacucaaagauc

SEQ ID NO: 1538634 - RNA, 19 nt, Artificial Sequence
  Description of Artificial Sequence: Synthetic oligonucleotide
  Sense strand starting at position 1017 of SEQ ID NO: 1245129
ccacaugcuccugagaaua

SEQ ID NO: 1538635 - RNA, 19 nt, Artificial Sequence
  Description of Artificial Sequence: Synthetic oligonucleotide
  Antisense strand to SEQ ID NO: 1538634
uauucucaggagcaugugg

SEQ ID NO: 1538636 - RNA, 19 nt, Artificial Sequence
  Description of Artificial Sequence: Synthetic oligonucleotide
  Sense strand starting at position 1159 of SEQ ID NO: 1245129
ggaacaguauuauuaaguc

SEQ ID NO: 1538637 - RNA, 19 nt, Artificial Sequence
  Description of Artificial Sequence: Synthetic oligonucleotide
  Antisense strand to SEQ ID NO: 1538636
gacuuaauaauacuguucc

SEQ ID NO: 1538638 - RNA, 19 nt, Artificial Sequence
  Description of Artificial Sequence: Synthetic oligonucleotide
  Sense strand starting at position 1310 of SEQ ID NO: 1245129
acuuacugugaauguaaga

SEQ ID NO: 1538639 - RNA, 19 nt, Artificial Sequence
  Description of Artificial Sequence: Synthetic oligonucleotide
  Antisense strand to SEQ ID NO: 1538638
ucuuacauucacaguaagu

SEQ ID NO: 1538640 - RNA, 19 nt, Artificial Sequence
  Description of Artificial Sequence: Synthetic oligonucleotide
  Sense strand starting at position 2323 of SEQ ID NO: 1245129
ugacuaauggcuuacuuaa

SEQ ID NO: 1538641 - RNA, 19 nt, Artificial Sequence
  Description of Artificial Sequence: Synthetic oligonucleotide
  Antisense strand to SEQ ID NO: 1538640
uuaaguaagccauuaguca

SEQ ID NO: 1538642 - RNA, 19 nt, Artificial Sequence
  Description of Artificial Sequence: Synthetic oligonucleotide
  Sense strand starting at position 2460 of SEQ ID NO: 1245129
ucaagagacgguuaacuuu

SEQ ID NO: 1538643 - RNA, 19 nt, Artificial Sequence
  Description of Artificial Sequence: Synthetic oligonucleotide
  Antisense strand to SEQ ID NO: 1538642
aaaguuaaccgucucuuga

SEQ ID NO: 1538644 - RNA, 19 nt, Artificial Sequence
  Description of Artificial Sequence: Synthetic oligonucleotide
  Sense strand starting at position 2472 of SEQ ID NO: 1245129
uaacuuucuuugguaggaa

SEQ ID NO: 1538645 - RNA, 19 nt, Artificial Sequence
  Description of Artificial Sequence: Synthetic oligonucleotide
  Antisense strand to SEQ ID NO: 1538644
uuccuaccaaagaaaguua

SEQ ID NO: 1538646 - RNA, 19 nt, Artificial Sequence
  Description of Artificial Sequence: Synthetic oligonucleotide
  Sense strand starting at position 2583 of SEQ ID NO: 1245129
ugcuaugagcuagauacua

SEQ ID NO: 1538647 - RNA, 19 nt, Artificial Sequence
  Description of Artificial Sequence: Synthetic oligonucleotide
  Antisense strand to SEQ ID NO: 1538646
uaguaucuagcucauagca

SEQ ID NO: 1538648 - RNA, 19 nt, Artificial Sequence
  Description of Artificial Sequence: Synthetic oligonucleotide
  Sense strand starting at position 2713 of SEQ ID NO: 1245129
agacauaacuagcucugga

SEQ ID NO: 1538649 - RNA, 19 nt, Artificial Sequence
  Description of Artificial Sequence: Synthetic oligonucleotide
  Antisense strand to SEQ ID NO: 1538648
uccagagcuaguuaugucu

SEQ ID NO: 1538650 - RNA, 19 nt, Artificial Sequence
  Description of Artificial Sequence: Synthetic oligonucleotide
  Sense strand starting at position 2904 of SEQ ID NO: 1245129
ugacuaguucuagaacugu

SEQ ID NO: 1538651 - RNA, 19 nt, Artificial Sequence
  Description of Artificial Sequence: Synthetic oligonucleotide
  Antisense strand to SEQ ID NO: 1538650
acaguucuagaacuaguca

SEQ ID NO: 1538652 - RNA, 19 nt, Artificial Sequence
  Description of Artificial Sequence: Synthetic oligonucleotide
  Sense strand starting at position 2946 of SEQ ID NO: 1245129
gcauaauaacauggaccuu

SEQ ID NO: 1538653 - RNA, 19 nt, Artificial Sequence
  Description of Artificial Sequence: Synthetic oligonucleotide
  Antisense strand to SEQ ID NO: 1538652
aagguccauguuauuaugc

SEQ ID NO: 1538654 - RNA, 19 nt, Artificial Sequence
  Description of Artificial Sequence: Synthetic oligonucleotide
  Sense strand starting at position 2961 of SEQ ID NO: 1245129
ccuugauugcucuucgcuu

SEQ ID NO: 1538655 - RNA, 19 nt, Artificial Sequence
  Description of Artificial Sequence: Synthetic oligonucleotide
  Antisense strand to SEQ ID NO: 1538654
aagcgaagagcaaucaagg

SEQ ID NO: 1538656 - RNA, 19 nt, Artificial Sequence
  Description of Artificial Sequence: Synthetic oligonucleotide
  Sense strand starting at position 3002 of SEQ ID NO: 1245129
aaacuaugauuguuaguga

SEQ ID NO: 1538657 - RNA, 19 nt, Artificial Sequence
  Description of Artificial Sequence: Synthetic oligonucleotide
  Antisense strand to SEQ ID NO: 1538656
ucacuaacaaucauaguuu

SEQ ID NO: 1538658 - RNA, 19 nt, Artificial Sequence
  Description of Artificial Sequence: Synthetic oligonucleotide
  Sense strand starting at position 3184 of SEQ ID NO: 1245129
cacagaaguugaguaauau

SEQ ID NO: 1538659 - RNA, 19 nt, Artificial Sequence
  Description of Artificial Sequence: Synthetic oligonucleotide
  Antisense strand to SEQ ID NO: 1538658
auauuacucaacuucugug

SEQ ID NO: 1538660 - RNA, 19 nt, Artificial Sequence
  Description of Artificial Sequence: Synthetic oligonucleotide
  Sense strand starting at position 3214 of SEQ ID NO: 1245129
aguuaaaucucaguaagag

SEQ ID NO: 1538661 - RNA, 19 nt, Artificial Sequence
  Description of Artificial Sequence: Synthetic oligonucleotide
  Antisense strand to SEQ ID NO: 1538660
cucuuacugagauuuaacu

SEQ ID NO: 1538662 - RNA, 19 nt, Artificial Sequence
  Description of Artificial Sequence: Synthetic oligonucleotide
  Sense strand starting at position 3244 of SEQ ID NO: 1245129
auuauuuccucgucaaguc

SEQ ID NO: 1538663 - RNA, 19 nt, Artificial Sequence
  Description of Artificial Sequence: Synthetic oligonucleotide
  Antisense strand to SEQ ID NO: 1538662
gacuugacgaggaaauaau

SEQ ID NO: 1538664 - RNA, 19 nt, Artificial Sequence
  Description of Artificial Sequence: Synthetic oligonucleotide
  Sense strand starting at position 3253 of SEQ ID NO: 1245129
ucgucaagucuggagaaau

SEQ ID NO: 1538665 - RNA, 19 nt, Artificial Sequence
  Description of Artificial Sequence: Synthetic oligonucleotide
  Antisense strand to SEQ ID NO: 1538664
auuucuccagacuugacga

SEQ ID NO: 1538666 - RNA, 19 nt, Artificial Sequence
  Description of Artificial Sequence: Synthetic oligonucleotide
  Sense strand starting at position 3380 of SEQ ID NO: 1245129
uuuaaaucuggauaugcca

SEQ ID NO: 1538667 - RNA, 19 nt, Artificial Sequence
  Description of Artificial Sequence: Synthetic oligonucleotide
  Antisense strand to SEQ ID NO: 1538666
uggcauauccagauuuaaa

SEQ ID NO: 1538668 - RNA, 19 nt, Artificial Sequence
  Description of Artificial Sequence: Synthetic oligonucleotide
  Sense strand starting at position 3388 of SEQ ID NO: 1245129
uggauaugccaacaguagu

SEQ ID NO: 1538669 - RNA, 19 nt, Artificial Sequence
  Description of Artificial Sequence: Synthetic oligonucleotide
  Antisense strand to SEQ ID NO: 1538668
acuacuguuggcauaucca

SEQ ID NO: 1538670 - RNA, 19 nt, Artificial Sequence
  Description of Artificial Sequence: Synthetic oligonucleotide
  Sense strand starting at position 3521 of SEQ ID NO: 1245129
aaagauuaacagggugcua

SEQ ID NO: 1538671 - RNA, 19 nt, Artificial Sequence
  Description of Artificial Sequence: Synthetic oligonucleotide
  Antisense strand to SEQ ID NO: 1538670
uagcacccuguuaaucuuu

SEQ ID NO: 1538672 - RNA, 19 nt, Artificial Sequence
  Description of Artificial Sequence: Synthetic oligonucleotide
  Sense strand starting at position 3593 of SEQ ID NO: 1245129
aagaaauaaucaguaccgu

SEQ ID NO: 1538673 - RNA, 19 nt, Artificial Sequence
  Description of Artificial Sequence: Synthetic oligonucleotide
  Antisense strand to SEQ ID NO: 1538672
acgguacugauuauuucuu

SEQ ID NO: 1538674 - RNA, 19 nt, Artificial Sequence
  Description of Artificial Sequence: Synthetic oligonucleotide
  Sense strand starting at position 3620 of SEQ ID NO: 1245129
auaugagaaauucggaucu

SEQ ID NO: 1538675 - RNA, 19 nt, Artificial Sequence
  Description of Artificial Sequence: Synthetic oligonucleotide
  Antisense strand to SEQ ID NO: 1538674
agauccgaauuucucauau

SEQ ID NO: 1538676 - RNA, 19 nt, Artificial Sequence
  Description of Artificial Sequence: Synthetic oligonucleotide
  Sense strand starting at position 3680 of SEQ ID NO: 1245129
gccuucuaucgugccaagu

SEQ ID NO: 1538677 - RNA, 19 nt, Artificial Sequence
  Description of Artificial Sequence: Synthetic oligonucleotide
  Antisense strand to SEQ ID NO: 1538676
acuuggcacgauagaaggc

SEQ ID NO: 1538678 - RNA, 19 nt, Artificial Sequence
  Description of Artificial Sequence: Synthetic oligonucleotide
  Sense strand starting at position 3711 of SEQ ID NO: 1245129
ccugacuuguaauugagaa

SEQ ID NO: 1538679 - RNA, 19 nt, Artificial Sequence
  Description of Artificial Sequence: Synthetic oligonucleotide
  Antisense strand to SEQ ID NO: 1538678
uucucaauuacaagucagg

SEQ ID NO: 1538680 - RNA, 19 nt, Artificial Sequence
  Description of Artificial Sequence: Synthetic oligonucleotide
  Sense strand starting at position 3712 of SEQ ID NO: 1245129
cugacuuguaauugagaag

SEQ ID NO: 1538681 - RNA, 19 nt, Artificial Sequence
  Description of Artificial Sequence: Synthetic oligonucleotide
  Antisense strand to SEQ ID NO: 1538680
cuucucaauuacaagucag

SEQ ID NO: 1538682 - RNA, 19 nt, Artificial Sequence
  Description of Artificial Sequence: Synthetic oligonucleotide
  Sense strand starting at position 3874 of SEQ ID NO: 1245129
gcuuacuaacuguagaacu

SEQ ID NO: 1538683 - RNA, 19 nt, Artificial Sequence
  Description of Artificial Sequence: Synthetic oligonucleotide
  Antisense strand to SEQ ID NO: 1538682
aguucuacaguuaguaagc

SEQ ID NO: 1538684 - RNA, 19 nt, Artificial Sequence
  Description of Artificial Sequence: Synthetic oligonucleotide
  Sense strand starting at position 110 of SEQ ID NO: 1245130
gaaagauguggucaguaua

SEQ ID NO: 1538685 - RNA, 19 nt, Artificial Sequence
  Description of Artificial Sequence: Synthetic oligonucleotide
  Antisense strand to SEQ ID NO: 1538684
uauacugaccacaucuuuc

SEQ ID NO: 1538686 - RNA, 19 nt, Artificial Sequence
  Description of Artificial Sequence: Synthetic oligonucleotide
  Sense strand starting at position 113 of SEQ ID NO: 1245130
agauguggucaguauagaa

SEQ ID NO: 1538687 - RNA, 19 nt, Artificial Sequence
  Description of Artificial Sequence: Synthetic oligonucleotide
  Antisense strand to SEQ ID NO: 1538686
uucuauacugaccacaucu

SEQ ID NO: 1538688 - RNA, 19 nt, Artificial Sequence
  Description of Artificial Sequence: Synthetic oligonucleotide
  Sense strand starting at position 137 of SEQ ID NO: 1245130
uagguauaaugaguugauu

SEQ ID NO: 1538689 - RNA, 19 nt, Artificial Sequence
  Description of Artificial Sequence: Synthetic oligonucleotide
  Antisense strand to SEQ ID NO: 1538688
aaucaacucauuauaccua

SEQ ID NO: 1538690 - RNA, 19 nt, Artificial Sequence
  Description of Artificial Sequence: Synthetic oligonucleotide
  Sense strand starting at position 199 of SEQ ID NO: 1245130
auguaugaccuuggguaag

SEQ ID NO: 1538691 - RNA, 19 nt, Artificial Sequence
  Description of Artificial Sequence: Synthetic oligonucleotide
  Antisense strand to SEQ ID NO: 1538690
cuuacccaaggucauacau

SEQ ID NO: 1538692 - RNA, 19 nt, Artificial Sequence
  Description of Artificial Sequence: Synthetic oligonucleotide
  Sense strand starting at position 280 of SEQ ID NO: 1245130
cucccuugguggucuaaga

SEQ ID NO: 1538693 - RNA, 19 nt, Artificial Sequence
  Description of Artificial Sequence: Synthetic oligonucleotide
  Antisense strand to SEQ ID NO: 1538692
ucuuagaccaccaagggag

SEQ ID NO: 1538694 - RNA, 19 nt, Artificial Sequence
  Description of Artificial Sequence: Synthetic oligonucleotide
  Sense strand starting at position 322 of SEQ ID NO: 1245130
gccauauagaaccguggaa

SEQ ID NO: 1538695 - RNA, 19 nt, Artificial Sequence
  Description of Artificial Sequence: Synthetic oligonucleotide
  Antisense strand to SEQ ID NO: 1538694
uuccacgguucuauauggc

SEQ ID NO: 1538696 - RNA, 19 nt, Artificial Sequence
  Description of Artificial Sequence: Synthetic oligonucleotide
  Sense strand starting at position 324 of SEQ ID NO: 1245130
cauauagaaccguggaaca

SEQ ID NO: 1538697 - RNA, 19 nt, Artificial Sequence
  Description of Artificial Sequence: Synthetic oligonucleotide
  Antisense strand to SEQ ID NO: 1538696
uguuccacgguucuauaug

SEQ ID NO: 1538698 - RNA, 19 nt, Artificial Sequence
  Description of Artificial Sequence: Synthetic oligonucleotide
  Sense strand starting at position 364 of SEQ ID NO: 1245130
aguuuccaccuuuggaaua

SEQ ID NO: 1538699 - RNA, 19 nt, Artificial Sequence
  Description of Artificial Sequence: Synthetic oligonucleotide
  Antisense strand to SEQ ID NO: 1538698
uauuccaaagguggaaacu

SEQ ID NO: 1538700 - RNA, 19 nt, Artificial Sequence
  Description of Artificial Sequence: Synthetic oligonucleotide
  Sense strand starting at position 486 of SEQ ID NO: 1245130
augccaagugaugacauau

SEQ ID NO: 1538701 - RNA, 19 nt, Artificial Sequence
  Description of Artificial Sequence: Synthetic oligonucleotide
  Antisense strand to SEQ ID NO: 1538700
auaugucaucacuuggcau

SEQ ID NO: 1538702 - RNA, 19 nt, Artificial Sequence
  Description of Artificial Sequence: Synthetic oligonucleotide
  Sense strand starting at position 638 of SEQ ID NO: 1245130
ggccaaguucuacaguuau

SEQ ID NO: 1538703 - RNA, 19 nt, Artificial Sequence
  Description of Artificial Sequence: Synthetic oligonucleotide
  Antisense strand to SEQ ID NO: 1538702
auaacuguagaacuuggcc

SEQ ID NO: 1538704 - RNA, 19 nt, Artificial Sequence
  Description of Artificial Sequence: Synthetic oligonucleotide
  Sense strand starting at position 1025 of SEQ ID NO: 1245130
cgcggaugucccagucagu

SEQ ID NO: 1538705 - RNA, 19 nt, Artificial Sequence
  Description of Artificial Sequence: Synthetic oligonucleotide
  Antisense strand to SEQ ID NO: 1538704
acugacugggacauccgcg

SEQ ID NO: 1538706 - RNA, 19 nt, Artificial Sequence
  Description of Artificial Sequence: Synthetic oligonucleotide
  Sense strand starting at position 2096 of SEQ ID NO: 1245130
uccuuccuggaccgaaaua

SEQ ID NO: 1538707 - RNA, 19 nt, Artificial Sequence
  Description of Artificial Sequence: Synthetic oligonucleotide
  Antisense strand to SEQ ID NO: 1538706
uauuucgguccaggaagga

SEQ ID NO: 1538708 - RNA, 19 nt, Artificial Sequence
  Description of Artificial Sequence: Synthetic oligonucleotide
  Sense strand starting at position 2193 of SEQ ID NO: 1245130
gcuugauuuaugugcuuug

SEQ ID NO: 1538709 - RNA, 19 nt, Artificial Sequence
  Description of Artificial Sequence: Synthetic oligonucleotide
  Antisense strand to SEQ ID NO: 1538708
caaagcacauaaaucaagc

SEQ ID NO: 1538710 - RNA, 19 nt, Artificial Sequence
  Description of Artificial Sequence: Synthetic oligonucleotide
  Sense strand starting at position 2204 of SEQ ID NO: 1245130
gugcuuuguuuauuuccua

SEQ ID NO: 1538711 - RNA, 19 nt, Artificial Sequence
  Description of Artificial Sequence: Synthetic oligonucleotide
  Antisense strand to SEQ ID NO: 1538710
uaggaaauaaacaaagcac

SEQ ID NO: 1538712 - RNA, 19 nt, Artificial Sequence
  Description of Artificial Sequence: Synthetic oligonucleotide
  Sense strand starting at position 2208 of SEQ ID NO: 1245130
uuuguuuauuuccuacagu

SEQ ID NO: 1538713 - RNA, 19 nt, Artificial Sequence
  Description of Artificial Sequence: Synthetic oligonucleotide
  Antisense strand to SEQ ID NO: 1538712
acuguaggaaauaaacaaa

SEQ ID NO: 1538714 - RNA, 19 nt, Artificial Sequence
  Description of Artificial Sequence: Synthetic oligonucleotide
  Sense strand starting at position 2289 of SEQ ID NO: 1245130
cucuuauguugacccagau

SEQ ID NO: 1538715 - RNA, 19 nt, Artificial Sequence
  Description of Artificial Sequence: Synthetic oligonucleotide
  Antisense strand to SEQ ID NO: 1538714
aucugggucaacauaagag

SEQ ID NO: 1538716 - RNA, 19 nt, Artificial Sequence
  Description of Artificial Sequence: Synthetic oligonucleotide
  Sense strand starting at position 2364 of SEQ ID NO: 1245130
auauacaaggcuugaauau

SEQ ID NO: 1538717 - RNA, 19 nt, Artificial Sequence
  Description of Artificial Sequence: Synthetic oligonucleotide
  Antisense strand to SEQ ID NO: 1538716
auauucaagccuuguauau

SEQ ID NO: 1538718 - RNA, 19 nt, Artificial Sequence
  Description of Artificial Sequence: Synthetic oligonucleotide
  Sense strand starting at position 2447 of SEQ ID NO: 1245130
cucauuuauuugcagagca

SEQ ID NO: 1538719 - RNA, 19 nt, Artificial Sequence
  Description of Artificial Sequence: Synthetic oligonucleotide
  Antisense strand to SEQ ID NO: 1538718
ugcucugcaaauaaaugag

SEQ ID NO: 1538720 - RNA, 19 nt, Artificial Sequence
  Description of Artificial Sequence: Synthetic oligonucleotide
  Sense strand starting at position 2562 of SEQ ID NO: 1245130
auaagucaguaucucacua

SEQ ID NO: 1538721 - RNA, 19 nt, Artificial Sequence
  Description of Artificial Sequence: Synthetic oligonucleotide
  Antisense strand to SEQ ID NO: 1538720
uagugagauacugacuuau

SEQ ID NO: 1538722 - RNA, 19 nt, Artificial Sequence
  Description of Artificial Sequence: Synthetic oligonucleotide
  Sense strand starting at position 2566 of SEQ ID NO: 1245130
gucaguaucucacuauaaa

SEQ ID NO: 1538723 - RNA, 19 nt, Artificial Sequence
  Description of Artificial Sequence: Synthetic oligonucleotide
  Antisense strand to SEQ ID NO: 1538722
uuuauagugagauacugac

SEQ ID NO: 1538724 - RNA, 19 nt, Artificial Sequence
  Description of Artificial Sequence: Synthetic oligonucleotide
  Sense strand starting at position 2633 of SEQ ID NO: 1245130
cccagauacuuaguuuacu

SEQ ID NO: 1538725 - RNA, 19 nt, Artificial Sequence
  Description of Artificial Sequence: Synthetic oligonucleotide
  Antisense strand to SEQ ID NO: 1538724
aguaaacuaaguaucuggg

SEQ ID NO: 1538726 - RNA, 19 nt, Artificial Sequence
  Description of Artificial Sequence: Synthetic oligonucleotide
  Sense strand starting at position 2795 of SEQ ID NO: 1245130
aggaauguggcauguauau

SEQ ID NO: 1538727 - RNA, 19 nt, Artificial Sequence
  Description of Artificial Sequence: Synthetic oligonucleotide
  Antisense strand to SEQ ID NO: 1538726
auauacaugccacauuccu

SEQ ID NO: 1538728 - RNA, 19 nt, Artificial Sequence
  Description of Artificial Sequence: Synthetic oligonucleotide
  Sense strand starting at position 2994 of SEQ ID NO: 1245130
aguaucugucuuuaguuua

SEQ ID NO: 1538729 - RNA, 19 nt, Artificial Sequence
  Description of Artificial Sequence: Synthetic oligonucleotide
  Antisense strand to SEQ ID NO: 1538728
uaaacuaaagacagauacu

SEQ ID NO: 1538730 - RNA, 19 nt, Artificial Sequence
  Description of Artificial Sequence: Synthetic oligonucleotide
  Sense strand starting at position 3073 of SEQ ID NO: 1245130
uuugguggugugaguuauc

SEQ ID NO: 1538731 - RNA, 19 nt, Artificial Sequence
  Description of Artificial Sequence: Synthetic oligonucleotide
  Antisense strand to SEQ ID NO: 1538730
gauaacucacaccaccaaa

SEQ ID NO: 1538732 - RNA, 19 nt, Artificial Sequence
  Description of Artificial Sequence: Synthetic oligonucleotide
  Sense strand starting at position 3076 of SEQ ID NO: 1245130
gguggugugaguuaucaca

SEQ ID NO: 1538733 - RNA, 19 nt, Artificial Sequence
  Description of Artificial Sequence: Synthetic oligonucleotide
  Antisense strand to SEQ ID NO: 1538732
ugugauaacucacaccacc

SEQ ID NO: 1538734 - RNA, 19 nt, Artificial Sequence
  Description of Artificial Sequence: Synthetic oligonucleotide
  Sense strand starting at position 3078 of SEQ ID NO: 1245130
uggugugaguuaucacaaa

SEQ ID NO: 1538735 - RNA, 19 nt, Artificial Sequence
  Description of Artificial Sequence: Synthetic oligonucleotide
  Antisense strand to SEQ ID NO: 1538734
uuugugauaacucacacca

SEQ ID NO: 1538736 - RNA, 19 nt, Artificial Sequence
  Description of Artificial Sequence: Synthetic oligonucleotide
  Sense strand starting at position 3128 of SEQ ID NO: 1245130
cuuaauuucuguuccaugu

SEQ ID NO: 1538737 - RNA, 19 nt, Artificial Sequence
  Description of Artificial Sequence: Synthetic oligonucleotide
  Antisense strand to SEQ ID NO: 1538736
acauggaacagaaauuaag

SEQ ID NO: 1538738 - RNA, 19 nt, Artificial Sequence
  Description of Artificial Sequence: Synthetic oligonucleotide
  Sense strand starting at position 3163 of SEQ ID NO: 1245130
gccuaugugcccuauauuu

SEQ ID NO: 1538739 - RNA, 19 nt, Artificial Sequence
  Description of Artificial Sequence: Synthetic oligonucleotide
  Antisense strand to SEQ ID NO: 1538738
aaauauagggcacauaggc

SEQ ID NO: 1538740 - RNA, 19 nt, Artificial Sequence
  Description of Artificial Sequence: Synthetic oligonucleotide
  Sense strand starting at position 3208 of SEQ ID NO: 1245130
cuaaauggccaagguaauu

SEQ ID NO: 1538741 - RNA, 19 nt, Artificial Sequence
  Description of Artificial Sequence: Synthetic oligonucleotide
  Antisense strand to SEQ ID NO: 1538740
aauuaccuuggccauuuag

SEQ ID NO: 1538742 - RNA, 19 nt, Artificial Sequence
  Description of Artificial Sequence: Synthetic oligonucleotide
  Sense strand starting at position 3219 of SEQ ID NO: 1245130
agguaauuaugucuaaccu

SEQ ID NO: 1538743 - RNA, 19 nt, Artificial Sequence
  Description of Artificial Sequence: Synthetic oligonucleotide
  Antisense strand to SEQ ID NO: 1538742
agguuagacauaauuaccu

SEQ ID NO: 1538744 - RNA, 19 nt, Artificial Sequence
  Description of Artificial Sequence: Synthetic oligonucleotide
  Sense strand starting at position 3220 of SEQ ID NO: 1245130
gguaauuaugucuaaccuu

SEQ ID NO: 1538745 - RNA, 19 nt, Artificial Sequence
  Description of Artificial Sequence: Synthetic oligonucleotide
  Antisense strand to SEQ ID NO: 1538744
aagguuagacauaauuacc

SEQ ID NO: 1538746 - RNA, 19 nt, Artificial Sequence
  Description of Artificial Sequence: Synthetic oligonucleotide
  Sense strand starting at position 3526 of SEQ ID NO: 1245130
ggaucaacuuucgugugaa

SEQ ID NO: 1538747 - RNA, 19 nt, Artificial Sequence
  Description of Artificial Sequence: Synthetic oligonucleotide
  Antisense strand to SEQ ID NO: 1538746
uucacacgaaaguugaucc

SEQ ID NO: 1538748 - RNA, 19 nt, Artificial Sequence
  Description of Artificial Sequence: Synthetic oligonucleotide
  Sense strand starting at position 3737 of SEQ ID NO: 1245130
gaccuauuaguauagugua

SEQ ID NO: 1538749 - RNA, 19 nt, Artificial Sequence
  Description of Artificial Sequence: Synthetic oligonucleotide
  Antisense strand to SEQ ID NO: 1538748
uacacuauacuaauagguc

SEQ ID NO: 1538750 - RNA, 19 nt, Artificial Sequence
  Description of Artificial Sequence: Synthetic oligonucleotide
  Sense strand starting at position 3776 of SEQ ID NO: 1245130
aucaaauagccaugguaua

SEQ ID NO: 1538751 - RNA, 19 nt, Artificial Sequence
  Description of Artificial Sequence: Synthetic oligonucleotide
  Antisense strand to SEQ ID NO: 1538750
uauaccauggcuauuugau

SEQ ID NO: 1538752 - RNA, 19 nt, Artificial Sequence
  Description of Artificial Sequence: Synthetic oligonucleotide
  Sense strand starting at position 3777 of SEQ ID NO: 1245130
ucaaauagccaugguauau

SEQ ID NO: 1538753 - RNA, 19 nt, Artificial Sequence
  Description of Artificial Sequence: Synthetic oligonucleotide
  Antisense strand to SEQ ID NO: 1538752
auauaccauggcuauuuga

SEQ ID NO: 1538754 - RNA, 19 nt, Artificial Sequence
  Description of Artificial Sequence: Synthetic oligonucleotide
  Sense strand starting at position 3781 of SEQ ID NO: 1245130
auagccaugguauauaaau

SEQ ID NO: 1538755 - RNA, 19 nt, Artificial Sequence
  Description of Artificial Sequence: Synthetic oligonucleotide
  Antisense strand to SEQ ID NO: 1538754
auuuauauaccauggcuau

SEQ ID NO: 1538756 - RNA, 19 nt, Artificial Sequence
  Description of Artificial Sequence: Synthetic oligonucleotide
  Sense strand starting at position 3805 of SEQ ID NO: 1245130
agaagaaauuaacacugaa

SEQ ID NO: 1538757 - RNA, 19 nt, Artificial Sequence
  Description of Artificial Sequence: Synthetic oligonucleotide
  Antisense strand to SEQ ID NO: 1538756
uucaguguuaauuucuucu

SEQ ID NO: 1538758 - RNA, 19 nt, Artificial Sequence
  Description of Artificial Sequence: Synthetic oligonucleotide
  Sense strand starting at position 3844 of SEQ ID NO: 1245130
aagcaaaggcacugguaua

SEQ ID NO: 1538759 - RNA, 19 nt, Artificial Sequence
  Description of Artificial Sequence: Synthetic oligonucleotide
  Antisense strand to SEQ ID NO: 1538758
uauaccagugccuuugcuu

SEQ ID NO: 1538760 - RNA, 19 nt, Artificial Sequence
  Description of Artificial Sequence: Synthetic oligonucleotide
  Sense strand starting at position 3845 of SEQ ID NO: 1245130
agcaaaggcacugguauaa

SEQ ID NO: 1538761 - RNA, 19 nt, Artificial Sequence
  Description of Artificial Sequence: Synthetic oligonucleotide
  Antisense strand to SEQ ID NO: 1538760
uuauaccagugccuuugcu

SEQ ID NO: 1538762 - RNA, 19 nt, Artificial Sequence
  Description of Artificial Sequence: Synthetic oligonucleotide
  Sense strand starting at position 3879 of SEQ ID NO: 1245130
agagauaaguuugcaauau

SEQ ID NO: 1538763 - RNA, 19 nt, Artificial Sequence
  Description of Artificial Sequence: Synthetic oligonucleotide
  Antisense strand to SEQ ID NO: 1538762
auauugcaaacuuaucucu

SEQ ID NO: 1538764 - RNA, 19 nt, Artificial Sequence
  Description of Artificial Sequence: Synthetic oligonucleotide
  Sense strand starting at position 165 of SEQ ID NO: 1245131
gcaagacaucacugugaug

SEQ ID NO: 1538765 - RNA, 19 nt, Artificial Sequence
  Description of Artificial Sequence: Synthetic oligonucleotide
  Antisense strand to SEQ ID NO: 1538764
caucacagugaugucuugc

SEQ ID NO: 1538766 - RNA, 19 nt, Artificial Sequence
  Description of Artificial Sequence: Synthetic oligonucleotide
  Sense strand starting at position 167 of SEQ ID NO: 1245131
aagacaucacugugauguu

SEQ ID NO: 1538767 - RNA, 19 nt, Artificial Sequence
  Description of Artificial Sequence: Synthetic oligonucleotide
  Antisense strand to SEQ ID NO: 1538766
aacaucacagugaugucuu

SEQ ID NO: 1538768 - RNA, 19 nt, Artificial Sequence
  Description of Artificial Sequence: Synthetic oligonucleotide
  Sense strand starting at position 269 of SEQ ID NO: 1245131
gucuuauuucuaugucucu

SEQ ID NO: 1538769 - RNA, 19 nt, Artificial Sequence
  Description of Artificial Sequence: Synthetic oligonucleotide
  Antisense strand to SEQ ID NO: 1538768
agagacauagaaauaagac

SEQ ID NO: 1538770 - RNA, 19 nt, Artificial Sequence
  Description of Artificial Sequence: Synthetic oligonucleotide
  Sense strand starting at position 348 of SEQ ID NO: 1245131
uauguauuugucugagcca

SEQ ID NO: 1538771 - RNA, 19 nt, Artificial Sequence
  Description of Artificial Sequence: Synthetic oligonucleotide
  Antisense strand to SEQ ID NO: 1538770
uggcucagacaaauacaua

SEQ ID NO: 1538772 - RNA, 19 nt, Artificial Sequence
  Description of Artificial Sequence: Synthetic oligonucleotide
  Sense strand starting at position 565 of SEQ ID NO: 1245131
agaagacauugucccauga

SEQ ID NO: 1538773 - RNA, 19 nt, Artificial Sequence
  Description of Artificial Sequence: Synthetic oligonucleotide
  Antisense strand to SEQ ID NO: 1538772
ucaugggacaaugucuucu

SEQ ID NO: 1538774 - RNA, 19 nt, Artificial Sequence
  Description of Artificial Sequence: Synthetic oligonucleotide
  Sense strand starting at position 664 of SEQ ID NO: 1245131
uuuguuuagauggacaagu

SEQ ID NO: 1538775 - RNA, 19 nt, Artificial Sequence
  Description of Artificial Sequence: Synthetic oligonucleotide
  Antisense strand to SEQ ID NO: 1538774
acuuguccaucuaaacaaa

SEQ ID NO: 1538776 - RNA, 19 nt, Artificial Sequence
  Description of Artificial Sequence: Synthetic oligonucleotide
  Sense strand starting at position 727 of SEQ ID NO: 1245131
gucacaauuccaggugaag

SEQ ID NO: 1538777 - RNA, 19 nt, Artificial Sequence
  Description of Artificial Sequence: Synthetic oligonucleotide
  Antisense strand to SEQ ID NO: 1538776
cuucaccuggaauugugac

SEQ ID NO: 1538778 - RNA, 19 nt, Artificial Sequence
  Description of Artificial Sequence: Synthetic oligonucleotide
  Sense strand starting at position 786 of SEQ ID NO: 1245131
ggcugaaacucucccaaac

SEQ ID NO: 1538779 - RNA, 19 nt, Artificial Sequence
  Description of Artificial Sequence: Synthetic oligonucleotide
  Antisense strand to SEQ ID NO: 1538778
guuugggagaguuucagcc

SEQ ID NO: 1538780 - RNA, 19 nt, Artificial Sequence
  Description of Artificial Sequence: Synthetic oligonucleotide
  Sense strand starting at position 906 of SEQ ID NO: 1245131
uugguaccaccagauuauu

SEQ ID NO: 1538781 - RNA, 19 nt, Artificial Sequence
  Description of Artificial Sequence: Synthetic oligonucleotide
  Antisense strand to SEQ ID NO: 1538780
aauaaucuggugguaccaa

SEQ ID NO: 1538782 - RNA, 19 nt, Artificial Sequence
  Description of Artificial Sequence: Synthetic oligonucleotide
  Sense strand starting at position 946 of SEQ ID NO: 1245131
ugaaucuuauuaucuggga

SEQ ID NO: 1538783 - RNA, 19 nt, Artificial Sequence
  Description of Artificial Sequence: Synthetic oligonucleotide
  Antisense strand to SEQ ID NO: 1538782
ucccagauaauaagauuca

SEQ ID NO: 1538784 - RNA, 19 nt, Artificial Sequence
  Description of Artificial Sequence: Synthetic oligonucleotide
  Sense strand starting at position 950 of SEQ ID NO: 1245131
ucuuauuaucugggacuuu

SEQ ID NO: 1538785 - RNA, 19 nt, Artificial Sequence
  Description of Artificial Sequence: Synthetic oligonucleotide
  Antisense strand to SEQ ID NO: 1538784
aaagucccagauaauaaga

SEQ ID NO: 1538786 - RNA, 19 nt, Artificial Sequence
  Description of Artificial Sequence: Synthetic oligonucleotide
  Sense strand starting at position 1280 of SEQ ID NO: 1245131
gccuuuauugaauagauuc

SEQ ID NO: 1538787 - RNA, 19 nt, Artificial Sequence
  Description of Artificial Sequence: Synthetic oligonucleotide
  Antisense strand to SEQ ID NO: 1538786
gaaucuauucaauaaaggc

SEQ ID NO: 1538788 - RNA, 19 nt, Artificial Sequence
  Description of Artificial Sequence: Synthetic oligonucleotide
  Sense strand starting at position 1422 of SEQ ID NO: 1245131
cuacaugaggucugaauga

SEQ ID NO: 1538789 - RNA, 19 nt, Artificial Sequence
  Description of Artificial Sequence: Synthetic oligonucleotide
  Antisense strand to SEQ ID NO: 1538788
ucauucagaccucauguag

SEQ ID NO: 1538790 - RNA, 19 nt, Artificial Sequence
  Description of Artificial Sequence: Synthetic oligonucleotide
  Sense strand starting at position 1447 of SEQ ID NO: 1245131
uauaguuugguccaguaau

SEQ ID NO: 1538791 - RNA, 19 nt, Artificial Sequence
  Description of Artificial Sequence: Synthetic oligonucleotide
  Antisense strand to SEQ ID NO: 1538790
auuacuggaccaaacuaua

SEQ ID NO: 1538792 - RNA, 19 nt, Artificial Sequence
  Description of Artificial Sequence: Synthetic oligonucleotide
  Sense strand starting at position 1498 of SEQ ID NO: 1245131
ugauaucacuuugcaggga

SEQ ID NO: 1538793 - RNA, 19 nt, Artificial Sequence
  Description of Artificial Sequence: Synthetic oligonucleotide
  Antisense strand to SEQ ID NO: 1538792
ucccugcaaagugauauca

SEQ ID NO: 1538794 - RNA, 19 nt, Artificial Sequence
  Description of Artificial Sequence: Synthetic oligonucleotide
  Sense strand starting at position 1501 of SEQ ID NO: 1245131
uaucacuuugcagggaaga

SEQ ID NO: 1538795 - RNA, 19 nt, Artificial Sequence
  Description of Artificial Sequence: Synthetic oligonucleotide
  Antisense strand to SEQ ID NO: 1538794
ucuucccugcaaagugaua

SEQ ID NO: 1538796 - RNA, 19 nt, Artificial Sequence
  Description of Artificial Sequence: Synthetic oligonucleotide
  Sense strand starting at position 1502 of SEQ ID NO: 1245131
aucacuuugcagggaagaa

SEQ ID NO: 1538797 - RNA, 19 nt, Artificial Sequence
  Description of Artificial Sequence: Synthetic oligonucleotide
  Antisense strand to SEQ ID NO: 1538796
uucuucccugcaaagugau

SEQ ID NO: 1538798 - RNA, 19 nt, Artificial Sequence
  Description of Artificial Sequence: Synthetic oligonucleotide
  Sense strand starting at position 1605 of SEQ ID NO: 1245131
uaaaguuuaguggacugua

SEQ ID NO: 1538799 - RNA, 19 nt, Artificial Sequence
  Description of Artificial Sequence: Synthetic oligonucleotide
  Antisense strand to SEQ ID NO: 1538798
uacaguccacuaaacuuua

SEQ ID NO: 1538800 - RNA, 19 nt, Artificial Sequence
  Description of Artificial Sequence: Synthetic oligonucleotide
  Sense strand starting at position 1610 of SEQ ID NO: 1245131
uuuaguggacuguauuaau

SEQ ID NO: 1538801 - RNA, 19 nt, Artificial Sequence
  Description of Artificial Sequence: Synthetic oligonucleotide
  Antisense strand to SEQ ID NO: 1538800
auuaauacaguccacuaaa

SEQ ID NO: 1538802 - RNA, 19 nt, Artificial Sequence
  Description of Artificial Sequence: Synthetic oligonucleotide
  Sense strand starting at position 1636 of SEQ ID NO: 1245131
cuaaauaguguuuaucaac

SEQ ID NO: 1538803 - RNA, 19 nt, Artificial Sequence
  Description of Artificial Sequence: Synthetic oligonucleotide
  Antisense strand to SEQ ID NO: 1538802
guugauaaacacuauuuag

SEQ ID NO: 1538804 - RNA, 19 nt, Artificial Sequence
  Description of Artificial Sequence: Synthetic oligonucleotide
  Sense strand starting at position 1900 of SEQ ID NO: 1245131
acuauaggguguuccuuaa

SEQ ID NO: 1538805 - RNA, 19 nt, Artificial Sequence
  Description of Artificial Sequence: Synthetic oligonucleotide
  Antisense strand to SEQ ID NO: 1538804
uuaaggaacacccuauagu

SEQ ID NO: 1538806 - RNA, 19 nt, Artificial Sequence
  Description of Artificial Sequence: Synthetic oligonucleotide
  Sense strand starting at position 2038 of SEQ ID NO: 1245131
acgcuauugaggcaagaag

SEQ ID NO: 1538807 - RNA, 19 nt, Artificial Sequence
  Description of Artificial Sequence: Synthetic oligonucleotide
  Antisense strand to SEQ ID NO: 1538806
cuucuugccucaauagcgu

SEQ ID NO: 1538808 - RNA, 19 nt, Artificial Sequence
  Description of Artificial Sequence: Synthetic oligonucleotide
  Sense strand starting at position 2055 of SEQ ID NO: 1245131
agccauuucucuguaaacg

SEQ ID NO: 1538809 - RNA, 19 nt, Artificial Sequence
  Description of Artificial Sequence: Synthetic oligonucleotide
  Antisense strand to SEQ ID NO: 1538808
cguuuacagagaaauggcu

SEQ ID NO: 1538810 - RNA, 19 nt, Artificial Sequence
  Description of Artificial Sequence: Synthetic oligonucleotide
  Sense strand starting at position 2402 of SEQ ID NO: 1245131
gucugauggacuuggugaa

SEQ ID NO: 1538811 - RNA, 19 nt, Artificial Sequence
  Description of Artificial Sequence: Synthetic oligonucleotide
  Antisense strand to SEQ ID NO: 1538810
uucaccaaguccaucagac

SEQ ID NO: 1538812 - RNA, 19 nt, Artificial Sequence
  Description of Artificial Sequence: Synthetic oligonucleotide
  Sense strand starting at position 2403 of SEQ ID NO: 1245131
ucugauggacuuggugaau

SEQ ID NO: 1538813 - RNA, 19 nt, Artificial Sequence
  Description of Artificial Sequence: Synthetic oligonucleotide
  Antisense strand to SEQ ID NO: 1538812
auucaccaaguccaucaga

SEQ ID NO: 1538814 - RNA, 19 nt, Artificial Sequence
  Description of Artificial Sequence: Synthetic oligonucleotide
  Sense strand starting at position 2478 of SEQ ID NO: 1245131
ccaguugucccuuauacac

SEQ ID NO: 1538815 - RNA, 19 nt, Artificial Sequence
  Description of Artificial Sequence: Synthetic oligonucleotide
  Antisense strand to SEQ ID NO: 1538814
guguauaagggacaacugg

SEQ ID NO: 1538816 - RNA, 19 nt, Artificial Sequence
  Description of Artificial Sequence: Synthetic oligonucleotide
  Sense strand starting at position 2536 of SEQ ID NO: 1245131
ucauuucuaaguugagugu

SEQ ID NO: 1538817 - RNA, 19 nt, Artificial Sequence
  Description of Artificial Sequence: Synthetic oligonucleotide
  Antisense strand to SEQ ID NO: 1538816
acacucaacuuagaaauga

SEQ ID NO: 1538818 - RNA, 19 nt, Artificial Sequence
  Description of Artificial Sequence: Synthetic oligonucleotide
  Sense strand starting at position 2567 of SEQ ID NO: 1245131
acaguuccuguauauaaca

SEQ ID NO: 1538819 - RNA, 19 nt, Artificial Sequence
  Description of Artificial Sequence: Synthetic oligonucleotide
  Antisense strand to SEQ ID NO: 1538818
uguuauauacaggaacugu

SEQ ID NO: 1538820 - RNA, 19 nt, Artificial Sequence
  Description of Artificial Sequence: Synthetic oligonucleotide
  Sense strand starting at position 2757 of SEQ ID NO: 1245131
ggauauguuuaaucaugua

SEQ ID NO: 1538821 - RNA, 19 nt, Artificial Sequence
  Description of Artificial Sequence: Synthetic oligonucleotide
  Antisense strand to SEQ ID NO: 1538820
uacaugauuaaacauaucc

SEQ ID NO: 1538822 - RNA, 19 nt, Artificial Sequence
  Description of Artificial Sequence: Synthetic oligonucleotide
  Sense strand starting at position 2777 of SEQ ID NO: 1245131
agggcuuugggcuaaauau

SEQ ID NO: 1538823 - RNA, 19 nt, Artificial Sequence
  Description of Artificial Sequence: Synthetic oligonucleotide
  Antisense strand to SEQ ID NO: 1538822
auauuuagcccaaagcccu

SEQ ID NO: 1538824 - RNA, 19 nt, Artificial Sequence
  Description of Artificial Sequence: Synthetic oligonucleotide
  Sense strand starting at position 2880 of SEQ ID NO: 1245131
uauauagaugcacacguau

SEQ ID NO: 1538825 - RNA, 19 nt, Artificial Sequence
  Description of Artificial Sequence: Synthetic oligonucleotide
  Antisense strand to SEQ ID NO: 1538824
auacgugugcaucuauaua

SEQ ID NO: 1538826 - RNA, 19 nt, Artificial Sequence
  Description of Artificial Sequence: Synthetic oligonucleotide
  Sense strand starting at position 2923 of SEQ ID NO: 1245131
gauucucaggcauaguuaa

SEQ ID NO: 1538827 - RNA, 19 nt, Artificial Sequence
  Description of Artificial Sequence: Synthetic oligonucleotide
  Antisense strand to SEQ ID NO: 1538826
uuaacuaugccugagaauc

SEQ ID NO: 1538828 - RNA, 19 nt, Artificial Sequence
  Description of Artificial Sequence: Synthetic oligonucleotide
  Sense strand starting at position 3273 of SEQ ID NO: 1245131
caauguauacacggaucaa

SEQ ID NO: 1538829 - RNA, 19 nt, Artificial Sequence
  Description of Artificial Sequence: Synthetic oligonucleotide
  Antisense strand to SEQ ID NO: 1538828
uugauccguguauacauug

SEQ ID NO: 1538830 - RNA, 19 nt, Artificial Sequence
  Description of Artificial Sequence: Synthetic oligonucleotide
  Sense strand starting at position 3437 of SEQ ID NO: 1245131
ggaucacacuguccuauga

SEQ ID NO: 1538831 - RNA, 19 nt, Artificial Sequence
  Description of Artificial Sequence: Synthetic oligonucleotide
  Antisense strand to SEQ ID NO: 1538830
ucauaggacagugugaucc

SEQ ID NO: 1538832 - RNA, 19 nt, Artificial Sequence
  Description of Artificial Sequence: Synthetic oligonucleotide
  Sense strand starting at position 3552 of SEQ ID NO: 1245131
ggcagagauaccgaagcau

SEQ ID NO: 1538833 - RNA, 19 nt, Artificial Sequence
  Description of Artificial Sequence: Synthetic oligonucleotide
  Antisense strand to SEQ ID NO: 1538832
augcuucgguaucucugcc

SEQ ID NO: 1538834 - RNA, 19 nt, Artificial Sequence
  Description of Artificial Sequence: Synthetic oligonucleotide
  Sense strand starting at position 3592 of SEQ ID NO: 1245131
agguaauuauagccauaga

SEQ ID NO: 1538835 - RNA, 19 nt, Artificial Sequence
  Description of Artificial Sequence: Synthetic oligonucleotide
  Antisense strand to SEQ ID NO: 1538834
ucuauggcuauaauuaccu

SEQ ID NO: 1538836 - RNA, 19 nt, Artificial Sequence
  Description of Artificial Sequence: Synthetic oligonucleotide
  Sense strand starting at position 3767 of SEQ ID NO: 1245131
uuaucaaauugguccagua

SEQ ID NO: 1538837 - RNA, 19 nt, Artificial Sequence
  Description of Artificial Sequence: Synthetic oligonucleotide
  Antisense strand to SEQ ID NO: 1538836
uacuggaccaauuugauaa

SEQ ID NO: 1538838 - RNA, 19 nt, Artificial Sequence
  Description of Artificial Sequence: Synthetic oligonucleotide
  Sense strand starting at position 3877 of SEQ ID NO: 1245131
agggaagagugugcacaua

SEQ ID NO: 1538839 - RNA, 19 nt, Artificial Sequence
  Description of Artificial Sequence: Synthetic oligonucleotide
  Antisense strand to SEQ ID NO: 1538838
uaugugcacacucuucccu

SEQ ID NO: 1538840 - RNA, 19 nt, Artificial Sequence
  Description of Artificial Sequence: Synthetic oligonucleotide
  Sense strand starting at position 3894 of SEQ ID NO: 1245131
uauuaacaauggguuagau

SEQ ID NO: 1538841 - RNA, 19 nt, Artificial Sequence
  Description of Artificial Sequence: Synthetic oligonucleotide
  Antisense strand to SEQ ID NO: 1538840
aucuaacccauuguuaaua

SEQ ID NO: 1538842 - RNA, 19 nt, Artificial Sequence
  Description of Artificial Sequence: Synthetic oligonucleotide
  Sense strand starting at position 3949 of SEQ ID NO: 1245131
ggaguagaguuacuaauga

SEQ ID NO: 1538843 - RNA, 19 nt, Artificial Sequence
  Description of Artificial Sequence: Synthetic oligonucleotide
  Antisense strand to SEQ ID NO: 1538842
ucauuaguaacucuacucc

SEQ ID NO: 1538844 - RNA, 19 nt, Artificial Sequence
  Description of Artificial Sequence: Synthetic oligonucleotide
  Sense strand starting at position 4 of SEQ ID NO: 1245132
agcaucagaccugauucua

SEQ ID NO: 1538845 - RNA, 19 nt, Artificial Sequence
  Description of Artificial Sequence: Synthetic oligonucleotide
  Antisense strand to SEQ ID NO: 1538844
uagaaucaggucugaugcu

SEQ ID NO: 1538846 - RNA, 19 nt, Artificial Sequence
  Description of Artificial Sequence: Synthetic oligonucleotide
  Sense strand starting at position 460 of SEQ ID NO: 1245132
uagaguccauaauugguaa

SEQ ID NO: 1538847 - RNA, 19 nt, Artificial Sequence
  Description of Artificial Sequence: Synthetic oligonucleotide
  Antisense strand to SEQ ID NO: 1538846
uuaccaauuauggacucua

SEQ ID NO: 1538848 - RNA, 19 nt, Artificial Sequence
  Description of Artificial Sequence: Synthetic oligonucleotide
  Sense strand starting at position 463 of SEQ ID NO: 1245132
aguccauaauugguaauau

SEQ ID NO: 1538849 - RNA, 19 nt, Artificial Sequence
  Description of Artificial Sequence: Synthetic oligonucleotide
  Antisense strand to SEQ ID NO: 1538848
auauuaccaauuauggacu

SEQ ID NO: 1538850 - RNA, 19 nt, Artificial Sequence
  Description of Artificial Sequence: Synthetic oligonucleotide
  Sense strand starting at position 522 of SEQ ID NO: 1245132
auaagagcauugcucaaga

SEQ ID NO: 1538851 - RNA, 19 nt, Artificial Sequence
  Description of Artificial Sequence: Synthetic oligonucleotide
  Antisense strand to SEQ ID NO: 1538850
ucuugagcaaugcucuuau

SEQ ID NO: 1538852 - RNA, 19 nt, Artificial Sequence
  Description of Artificial Sequence: Synthetic oligonucleotide
  Sense strand starting at position 667 of SEQ ID NO: 1245132
gauagugcccuggaauaua

SEQ ID NO: 1538853 - RNA, 19 nt, Artificial Sequence
  Description of Artificial Sequence: Synthetic oligonucleotide
  Antisense strand to SEQ ID NO: 1538852
uauauuccagggcacuauc

SEQ ID NO: 1538854 - RNA, 19 nt, Artificial Sequence
  Description of Artificial Sequence: Synthetic oligonucleotide
  Sense strand starting at position 681 of SEQ ID NO: 1245132
auauaauguuaggucuaca

SEQ ID NO: 1538855 - RNA, 19 nt, Artificial Sequence
  Description of Artificial Sequence: Synthetic oligonucleotide
  Antisense strand to SEQ ID NO: 1538854
uguagaccuaacauuauau

SEQ ID NO: 1538856 - RNA, 19 nt, Artificial Sequence
  Description of Artificial Sequence: Synthetic oligonucleotide
  Sense strand starting at position 902 of SEQ ID NO: 1245132
uguccucagcaugacauaa

SEQ ID NO: 1538857 - RNA, 19 nt, Artificial Sequence
  Description of Artificial Sequence: Synthetic oligonucleotide
  Antisense strand to SEQ ID NO: 1538856
uuaugucaugcugaggaca

SEQ ID NO: 1538858 - RNA, 19 nt, Artificial Sequence
  Description of Artificial Sequence: Synthetic oligonucleotide
  Sense strand starting at position 999 of SEQ ID NO: 1245132
gaaucugaccggugaugaa

SEQ ID NO: 1538859 - RNA, 19 nt, Artificial Sequence
  Description of Artificial Sequence: Synthetic oligonucleotide
  Antisense strand to SEQ ID NO: 1538858
uucaucaccggucagauuc

SEQ ID NO: 1538860 - RNA, 19 nt, Artificial Sequence
  Description of Artificial Sequence: Synthetic oligonucleotide
  Sense strand starting at position 1034 of SEQ ID NO: 1245132
acugaauauugguucccaa

SEQ ID NO: 1538861 - RNA, 19 nt, Artificial Sequence
  Description of Artificial Sequence: Synthetic oligonucleotide
  Antisense strand to SEQ ID NO: 1538860
uugggaaccaauauucagu

SEQ ID NO: 1538862 - RNA, 19 nt, Artificial Sequence
  Description of Artificial Sequence: Synthetic oligonucleotide
  Sense strand starting at position 1082 of SEQ ID NO: 1245132
uaagauguauauucugaag

SEQ ID NO: 1538863 - RNA, 19 nt, Artificial Sequence
  Description of Artificial Sequence: Synthetic oligonucleotide
  Antisense strand to SEQ ID NO: 1538862
cuucagaauauacaucuua

SEQ ID NO: 1538864 - RNA, 19 nt, Artificial Sequence
  Description of Artificial Sequence: Synthetic oligonucleotide
  Sense strand starting at position 1088 of SEQ ID NO: 1245132
guauauucugaagacuucu

SEQ ID NO: 1538865 - RNA, 19 nt, Artificial Sequence
  Description of Artificial Sequence: Synthetic oligonucleotide
  Antisense strand to SEQ ID NO: 1538864
agaagucuucagaauauac

SEQ ID NO: 1538866 - RNA, 19 nt, Artificial Sequence
  Description of Artificial Sequence: Synthetic oligonucleotide
  Sense strand starting at position 1094 of SEQ ID NO: 1245132
ucugaagacuucuuuaagu

SEQ ID NO: 1538867 - RNA, 19 nt, Artificial Sequence
  Description of Artificial Sequence: Synthetic oligonucleotide
  Antisense strand to SEQ ID NO: 1538866
acuuaaagaagucuucaga

SEQ ID NO: 1538868 - RNA, 19 nt, Artificial Sequence
  Description of Artificial Sequence: Synthetic oligonucleotide
  Sense strand starting at position 1174 of SEQ ID NO: 1245132
uuucuugugacggaacuau

SEQ ID NO: 1538869 - RNA, 19 nt, Artificial Sequence
  Description of Artificial Sequence: Synthetic oligonucleotide
  Antisense strand to SEQ ID NO: 1538868
auaguuccgucacaagaaa

SEQ ID NO: 1538870 - RNA, 19 nt, Artificial Sequence
  Description of Artificial Sequence: Synthetic oligonucleotide
  Sense strand starting at position 1283 of SEQ ID NO: 1245132
gcaacauugcuggaacuga

SEQ ID NO: 1538871 - RNA, 19 nt, Artificial Sequence
  Description of Artificial Sequence: Synthetic oligonucleotide
  Antisense strand to SEQ ID NO: 1538870
ucaguuccagcaauguugc

SEQ ID NO: 1538872 - RNA, 19 nt, Artificial Sequence
  Description of Artificial Sequence: Synthetic oligonucleotide
  Sense strand starting at position 1293 of SEQ ID NO: 1245132
uggaacugaucuuugaguu

SEQ ID NO: 1538873 - RNA, 19 nt, Artificial Sequence
  Description of Artificial Sequence: Synthetic oligonucleotide
  Antisense strand to SEQ ID NO: 1538872
aacucaaagaucaguucca

SEQ ID NO: 1538874 - RNA, 19 nt, Artificial Sequence
  Description of Artificial Sequence: Synthetic oligonucleotide
  Sense strand starting at position 1294 of SEQ ID NO: 1245132
ggaacugaucuuugaguuu

SEQ ID NO: 1538875 - RNA, 19 nt, Artificial Sequence
  Description of Artificial Sequence: Synthetic oligonucleotide
  Antisense strand to SEQ ID NO: 1538874
aaacucaaagaucaguucc

SEQ ID NO: 1538876 - RNA, 19 nt, Artificial Sequence
  Description of Artificial Sequence: Synthetic oligonucleotide
  Sense strand starting at position 1297 of SEQ ID NO: 1245132
acugaucuuugaguuuaac

SEQ ID NO: 1538877 - RNA, 19 nt, Artificial Sequence
  Description of Artificial Sequence: Synthetic oligonucleotide
  Antisense strand to SEQ ID NO: 1538876
guuaaacucaaagaucagu

SEQ ID NO: 1538878 - RNA, 19 nt, Artificial Sequence
  Description of Artificial Sequence: Synthetic oligonucleotide
  Sense strand starting at position 1300 of SEQ ID NO: 1245132
gaucuuugaguuuaacgaa

SEQ ID NO: 1538879 - RNA, 19 nt, Artificial Sequence
  Description of Artificial Sequence: Synthetic oligonucleotide
  Antisense strand to SEQ ID NO: 1538878
uucguuaaacucaaagauc

SEQ ID NO: 1538880 - RNA, 19 nt, Artificial Sequence
  Description of Artificial Sequence: Synthetic oligonucleotide
  Sense strand starting at position 1393 of SEQ ID NO: 1245132
ccacaugcuccugagaaua

SEQ ID NO: 1538881 - RNA, 19 nt, Artificial Sequence
  Description of Artificial Sequence: Synthetic oligonucleotide
  Antisense strand to SEQ ID NO: 1538880
uauucucaggagcaugugg

SEQ ID NO: 1538882 - RNA, 19 nt, Artificial Sequence
  Description of Artificial Sequence: Synthetic oligonucleotide
  Sense strand starting at position 1535 of SEQ ID NO: 1245132
ggaacaguauuauuaaguc

SEQ ID NO: 1538883 - RNA, 19 nt, Artificial Sequence
  Description of Artificial Sequence: Synthetic oligonucleotide
  Antisense strand to SEQ ID NO: 1538882
gacuuaauaauacuguucc

SEQ ID NO: 1538884 - RNA, 19 nt, Artificial Sequence
  Description of Artificial Sequence: Synthetic oligonucleotide
  Sense strand starting at position 1686 of SEQ ID NO: 1245132
acuuacugugaauguaaga

SEQ ID NO: 1538885 - RNA, 19 nt, Artificial Sequence
  Description of Artificial Sequence: Synthetic oligonucleotide
  Antisense strand to SEQ ID NO: 1538884
ucuuacauucacaguaagu

SEQ ID NO: 1538886 - RNA, 19 nt, Artificial Sequence
  Description of Artificial Sequence: Synthetic oligonucleotide
  Sense strand starting at position 2699 of SEQ ID NO: 1245132
ugacuaauggcuuacuuaa

SEQ ID NO: 1538887 - RNA, 19 nt, Artificial Sequence
  Description of Artificial Sequence: Synthetic oligonucleotide
  Antisense strand to SEQ ID NO: 1538886
uuaaguaagccauuaguca

SEQ ID NO: 1538888 - RNA, 19 nt, Artificial Sequence
  Description of Artificial Sequence: Synthetic oligonucleotide
  Sense strand starting at position 2836 of SEQ ID NO: 1245132
ucaagagacgguuaacuuu

SEQ ID NO: 1538889 - RNA, 19 nt, Artificial Sequence
  Description of Artificial Sequence: Synthetic oligonucleotide
  Antisense strand to SEQ ID NO: 1538888
aaaguuaaccgucucuuga

SEQ ID NO: 1538890 - RNA, 19 nt, Artificial Sequence
  Description of Artificial Sequence: Synthetic oligonucleotide
  Sense strand starting at position 2848 of SEQ ID NO: 1245132
uaacuuucuuugguaggaa

SEQ ID NO: 1538891 - RNA, 19 nt, Artificial Sequence
  Description of Artificial Sequence: Synthetic oligonucleotide
  Antisense strand to SEQ ID NO: 1538890
uuccuaccaaagaaaguua

SEQ ID NO: 1538892 - RNA, 19 nt, Artificial Sequence
  Description of Artificial Sequence: Synthetic oligonucleotide
  Sense strand starting at position 2959 of SEQ ID NO: 1245132
ugcuaugagcuagauacua

SEQ ID NO: 1538893 - RNA, 19 nt, Artificial Sequence
  Description of Artificial Sequence: Synthetic oligonucleotide
  Antisense strand to SEQ ID NO: 1538892
uaguaucuagcucauagca

SEQ ID NO: 1538894 - RNA, 19 nt, Artificial Sequence
  Description of Artificial Sequence: Synthetic oligonucleotide
  Sense strand starting at position 3089 of SEQ ID NO: 1245132
agacauaacuagcucugga

SEQ ID NO: 1538895 - RNA, 19 nt, Artificial Sequence
  Description of Artificial Sequence: Synthetic oligonucleotide
  Antisense strand to SEQ ID NO: 1538894
uccagagcuaguuaugucu

SEQ ID NO: 1538896 - RNA, 19 nt, Artificial Sequence
  Description of Artificial Sequence: Synthetic oligonucleotide
  Sense strand starting at position 3195 of SEQ ID NO: 1245132
cugggauggugccuaagaa

SEQ ID NO: 1538897 - RNA, 19 nt, Artificial Sequence
  Description of Artificial Sequence: Synthetic oligonucleotide
  Antisense strand to SEQ ID NO: 1538896
uucuuaggcaccaucccag

SEQ ID NO: 1538898 - RNA, 19 nt, Artificial Sequence
  Description of Artificial Sequence: Synthetic oligonucleotide
  Sense strand starting at position 3280 of SEQ ID NO: 1245132
ugacuaguucuagaacugu

SEQ ID NO: 1538899 - RNA, 19 nt, Artificial Sequence
  Description of Artificial Sequence: Synthetic oligonucleotide
  Antisense strand to SEQ ID NO: 1538898
acaguucuagaacuaguca

SEQ ID NO: 1538900 - RNA, 19 nt, Artificial Sequence
  Description of Artificial Sequence: Synthetic oligonucleotide
  Sense strand starting at position 3322 of SEQ ID NO: 1245132
gcauaauaacauggaccuu

SEQ ID NO: 1538901 - RNA, 19 nt, Artificial Sequence
  Description of Artificial Sequence: Synthetic oligonucleotide
  Antisense strand to SEQ ID NO: 1538900
aagguccauguuauuaugc

SEQ ID NO: 1538902 - RNA, 19 nt, Artificial Sequence
  Description of Artificial Sequence: Synthetic oligonucleotide
  Sense strand starting at position 3337 of SEQ ID NO: 1245132
ccuugauugcucuucgcuu

SEQ ID NO: 1538903 - RNA, 19 nt, Artificial Sequence
  Description of Artificial Sequence: Synthetic oligonucleotide
  Antisense strand to SEQ ID NO: 1538902
aagcgaagagcaaucaagg

SEQ ID NO: 1538904 - RNA, 19 nt, Artificial Sequence
  Description of Artificial Sequence: Synthetic oligonucleotide
  Sense strand starting at position 3378 of SEQ ID NO: 1245132
aaacuaugauuguuaguga

SEQ ID NO: 1538905 - RNA, 19 nt, Artificial Sequence
  Description of Artificial Sequence: Synthetic oligonucleotide
  Antisense strand to SEQ ID NO: 1538904
ucacuaacaaucauaguuu

SEQ ID NO: 1538906 - RNA, 19 nt, Artificial Sequence
  Description of Artificial Sequence: Synthetic oligonucleotide
  Sense strand starting at position 3535 of SEQ ID NO: 1245132
agcugcaauguauauuaaa

SEQ ID NO: 1538907 - RNA, 19 nt, Artificial Sequence
  Description of Artificial Sequence: Synthetic oligonucleotide
  Antisense strand to SEQ ID NO: 1538906
uuuaauauacauugcagcu

SEQ ID NO: 1538908 - RNA, 19 nt, Artificial Sequence
  Description of Artificial Sequence: Synthetic oligonucleotide
  Sense strand starting at position 3560 of SEQ ID NO: 1245132
cacagaaguugaguaauau

SEQ ID NO: 1538909 - RNA, 19 nt, Artificial Sequence
  Description of Artificial Sequence: Synthetic oligonucleotide
  Antisense strand to SEQ ID NO: 1538908
auauuacucaacuucugug

SEQ ID NO: 1538910 - RNA, 19 nt, Artificial Sequence
  Description of Artificial Sequence: Synthetic oligonucleotide
  Sense strand starting at position 3590 of SEQ ID NO: 1245132
aguuaaaucucaguaagag

SEQ ID NO: 1538911 - RNA, 19 nt, Artificial Sequence
  Description of Artificial Sequence: Synthetic oligonucleotide
  Antisense strand to SEQ ID NO: 1538910
cucuuacugagauuuaacu

SEQ ID NO: 1538912 - RNA, 19 nt, Artificial Sequence
  Description of Artificial Sequence: Synthetic oligonucleotide
  Sense strand starting at position 3620 of SEQ ID NO: 1245132
auuauuuccucgucaaguc

SEQ ID NO: 1538913 - RNA, 19 nt, Artificial Sequence
  Description of Artificial Sequence: Synthetic oligonucleotide
  Antisense strand to SEQ ID NO: 1538912
gacuugacgaggaaauaau

SEQ ID NO: 1538914 - RNA, 19 nt, Artificial Sequence
  Description of Artificial Sequence: Synthetic oligonucleotide
  Sense strand starting at position 3629 of SEQ ID NO: 1245132
ucgucaagucuggagaaau

SEQ ID NO: 1538915 - RNA, 19 nt, Artificial Sequence
  Description of Artificial Sequence: Synthetic oligonucleotide
  Antisense strand to SEQ ID NO: 1538914
auuucuccagacuugacga

SEQ ID NO: 1538916 - RNA, 19 nt, Artificial Sequence
  Description of Artificial Sequence: Synthetic oligonucleotide
  Sense strand starting at position 3756 of SEQ ID NO: 1245132
uuuaaaucuggauaugcca

SEQ ID NO: 1538917 - RNA, 19 nt, Artificial Sequence
  Description of Artificial Sequence: Synthetic oligonucleotide
  Antisense strand to SEQ ID NO: 1538916
uggcauauccagauuuaaa

SEQ ID NO: 1538918 - RNA, 19 nt, Artificial Sequence
  Description of Artificial Sequence: Synthetic oligonucleotide
  Sense strand starting at position 3764 of SEQ ID NO: 1245132
uggauaugccaacaguagu

SEQ ID NO: 1538919 - RNA, 19 nt, Artificial Sequence
  Description of Artificial Sequence: Synthetic oligonucleotide
  Antisense strand to SEQ ID NO: 1538918
acuacuguuggcauaucca

SEQ ID NO: 1538920 - RNA, 19 nt, Artificial Sequence
  Description of Artificial Sequence: Synthetic oligonucleotide
  Sense strand starting at position 3897 of SEQ ID NO: 1245132
aaagauuaacagggugcua

SEQ ID NO: 1538921 - RNA, 19 nt, Artificial Sequence
  Description of Artificial Sequence: Synthetic oligonucleotide
  Antisense strand to SEQ ID NO: 1538920
uagcacccuguuaaucuuu

SEQ ID NO: 1538922 - RNA, 19 nt, Artificial Sequence
  Description of Artificial Sequence: Synthetic oligonucleotide
  Sense strand starting at position 3969 of SEQ ID NO: 1245132
aagaaauaaucaguaccgu

SEQ ID NO: 1538923 - RNA, 19 nt, Artificial Sequence
  Description of Artificial Sequence: Synthetic oligonucleotide
  Antisense strand to SEQ ID NO: 1538922
acgguacugauuauuucuu

SEQ ID NO: 1538924 - RNA, 19 nt, Artificial Sequence
  Description of Artificial Sequence: Synthetic oligonucleotide
  Sense strand starting at position 192 of SEQ ID NO: 1245133
gaugaaauugaaugucuau

SEQ ID NO: 1538925 - RNA, 19 nt, Artificial Sequence
  Description of Artificial Sequence: Synthetic oligonucleotide
  Antisense strand to SEQ ID NO: 1538924
auagacauucaauuucauc

SEQ ID NO: 1538926 - RNA, 19 nt, Artificial Sequence
  Description of Artificial Sequence: Synthetic oligonucleotide
  Sense strand starting at position 195 of SEQ ID NO: 1245133
gaaauugaaugucuaugau

SEQ ID NO: 1538927 - RNA, 19 nt, Artificial Sequence
  Description of Artificial Sequence: Synthetic oligonucleotide
  Antisense strand to SEQ ID NO: 1538926
aucauagacauucaauuuc

SEQ ID NO: 1538928 - RNA, 19 nt, Artificial Sequence
  Description of Artificial Sequence: Synthetic oligonucleotide
  Sense strand starting at position 204 of SEQ ID NO: 1245133
ugucuaugauuugcuuuaa

SEQ ID NO: 1538929 - RNA, 19 nt, Artificial Sequence
  Description of Artificial Sequence: Synthetic oligonucleotide
  Antisense strand to SEQ ID NO: 1538928
uuaaagcaaaucauagaca

SEQ ID NO: 1538930 - RNA, 19 nt, Artificial Sequence
  Description of Artificial Sequence: Synthetic oligonucleotide
  Sense strand starting at position 267 of SEQ ID NO: 1245133
auuaaauuggcaugaguua

SEQ ID NO: 1538931 - RNA, 19 nt, Artificial Sequence
  Description of Artificial Sequence: Synthetic oligonucleotide
  Antisense strand to SEQ ID NO: 1538930
uaacucaugccaauuuaau

SEQ ID NO: 1538932 - RNA, 19 nt, Artificial Sequence
  Description of Artificial Sequence: Synthetic oligonucleotide
  Sense strand starting at position 268 of SEQ ID NO: 1245133
uuaaauuggcaugaguuaa

SEQ ID NO: 1538933 - RNA, 19 nt, Artificial Sequence
  Description of Artificial Sequence: Synthetic oligonucleotide
  Antisense strand to SEQ ID NO: 1538932
uuaacucaugccaauuuaa

SEQ ID NO: 1538934 - RNA, 19 nt, Artificial Sequence
  Description of Artificial Sequence: Synthetic oligonucleotide
  Sense strand starting at position 313 of SEQ ID NO: 1245133
gggaguacccuuuauuauu

SEQ ID NO: 1538935 - RNA, 19 nt, Artificial Sequence
  Description of Artificial Sequence: Synthetic oligonucleotide
  Antisense strand to SEQ ID NO: 1538934
aauaauaaaggguacuccc

SEQ ID NO: 1538936 - RNA, 19 nt, Artificial Sequence
  Description of Artificial Sequence: Synthetic oligonucleotide
  Sense strand starting at position 473 of SEQ ID NO: 1245133
ccacuugcgacugauaguu

SEQ ID NO: 1538937 - RNA, 19 nt, Artificial Sequence
  Description of Artificial Sequence: Synthetic oligonucleotide
  Antisense strand to SEQ ID NO: 1538936
aacuaucagucgcaagugg

SEQ ID NO: 1538938 - RNA, 19 nt, Artificial Sequence
  Description of Artificial Sequence: Synthetic oligonucleotide
  Sense strand starting at position 529 of SEQ ID NO: 1245133
aguuuaugagcuuaaggca

SEQ ID NO: 1538939 - RNA, 19 nt, Artificial Sequence
  Description of Artificial Sequence: Synthetic oligonucleotide
  Antisense strand to SEQ ID NO: 1538938
ugccuuaagcucauaaacu

SEQ ID NO: 1538940 - RNA, 19 nt, Artificial Sequence
  Description of Artificial Sequence: Synthetic oligonucleotide
  Sense strand starting at position 657 of SEQ ID NO: 1245133
gcaggauaaucacuccaga

SEQ ID NO: 1538941 - RNA, 19 nt, Artificial Sequence
  Description of Artificial Sequence: Synthetic oligonucleotide
  Antisense strand to SEQ ID NO: 1538940
ucuggagugauuauccugc

SEQ ID NO: 1538942 - RNA, 19 nt, Artificial Sequence
  Description of Artificial Sequence: Synthetic oligonucleotide
  Sense strand starting at position 1236 of SEQ ID NO: 1245133
uggaguuaaggguggugau

SEQ ID NO: 1538943 - RNA, 19 nt, Artificial Sequence
  Description of Artificial Sequence: Synthetic oligonucleotide
  Antisense strand to SEQ ID NO: 1538942
aucaccacccuuaacucca

SEQ ID NO: 1538944 - RNA, 19 nt, Artificial Sequence
  Description of Artificial Sequence: Synthetic oligonucleotide
  Sense strand starting at position 1258 of SEQ ID NO: 1245133
ugcucaacccugugaauau

SEQ ID NO: 1538945 - RNA, 19 nt, Artificial Sequence
  Description of Artificial Sequence: Synthetic oligonucleotide
  Antisense strand to SEQ ID NO: 1538944
auauucacaggguugagca

SEQ ID NO: 1538946 - RNA, 19 nt, Artificial Sequence
  Description of Artificial Sequence: Synthetic oligonucleotide
  Sense strand starting at position 1316 of SEQ ID NO: 1245133
ucugauauguuaguuauac

SEQ ID NO: 1538947 - RNA, 19 nt, Artificial Sequence
  Description of Artificial Sequence: Synthetic oligonucleotide
  Antisense strand to SEQ ID NO: 1538946
guauaacuaacauaucaga

SEQ ID NO: 1538948 - RNA, 19 nt, Artificial Sequence
  Description of Artificial Sequence: Synthetic oligonucleotide
  Sense strand starting at position 1317 of SEQ ID NO: 1245133
cugauauguuaguuauacc

SEQ ID NO: 1538949 - RNA, 19 nt, Artificial Sequence
  Description of Artificial Sequence: Synthetic oligonucleotide
  Antisense strand to SEQ ID NO: 1538948
gguauaacuaacauaucag

SEQ ID NO: 1538950 - RNA, 19 nt, Artificial Sequence
  Description of Artificial Sequence: Synthetic oligonucleotide
  Sense strand starting at position 1325 of SEQ ID NO: 1245133
uuaguuauaccucgauaaa

SEQ ID NO: 1538951 - RNA, 19 nt, Artificial Sequence
  Description of Artificial Sequence: Synthetic oligonucleotide
  Antisense strand to SEQ ID NO: 1538950
uuuaucgagguauaacuaa

SEQ ID NO: 1538952 - RNA, 19 nt, Artificial Sequence
  Description of Artificial Sequence: Synthetic oligonucleotide
  Sense strand starting at position 1328 of SEQ ID NO: 1245133
guuauaccucgauaaacua

SEQ ID NO: 1538953 - RNA, 19 nt, Artificial Sequence
  Description of Artificial Sequence: Synthetic oligonucleotide
  Antisense strand to SEQ ID NO: 1538952
uaguuuaucgagguauaac

SEQ ID NO: 1538954 - RNA, 19 nt, Artificial Sequence
  Description of Artificial Sequence: Synthetic oligonucleotide
  Sense strand starting at position 1335 of SEQ ID NO: 1245133
cucgauaaacuaugaaugu

SEQ ID NO: 1538955 - RNA, 19 nt, Artificial Sequence
  Description of Artificial Sequence: Synthetic oligonucleotide
  Antisense strand to SEQ ID NO: 1538954
acauucauaguuuaucgag

SEQ ID NO: 1538956 - RNA, 19 nt, Artificial Sequence
  Description of Artificial Sequence: Synthetic oligonucleotide
  Sense strand starting at position 2251 of SEQ ID NO: 1245133
aaaguagcuguuugagaca

SEQ ID NO: 1538957 - RNA, 19 nt, Artificial Sequence
  Description of Artificial Sequence: Synthetic oligonucleotide
  Antisense strand to SEQ ID NO: 1538956
ugucucaaacagcuacuuu

SEQ ID NO: 1538958 - RNA, 19 nt, Artificial Sequence
  Description of Artificial Sequence: Synthetic oligonucleotide
  Sense strand starting at position 2258 of SEQ ID NO: 1245133
cuguuugagacaggauaau

SEQ ID NO: 1538959 - RNA, 19 nt, Artificial Sequence
  Description of Artificial Sequence: Synthetic oligonucleotide
  Antisense strand to SEQ ID NO: 1538958
auuauccugucucaaacag

SEQ ID NO: 1538960 - RNA, 19 nt, Artificial Sequence
  Description of Artificial Sequence: Synthetic oligonucleotide
  Sense strand starting at position 2538 of SEQ ID NO: 1245133
gcggcuuaaccuuauuaag

SEQ ID NO: 1538961 - RNA, 19 nt, Artificial Sequence
  Description of Artificial Sequence: Synthetic oligonucleotide
  Antisense strand to SEQ ID NO: 1538960
cuuaauaagguuaagccgc

SEQ ID NO: 1538962 - RNA, 19 nt, Artificial Sequence
  Description of Artificial Sequence: Synthetic oligonucleotide
  Sense strand starting at position 2595 of SEQ ID NO: 1245133
aagcaauauugugugggau

SEQ ID NO: 1538963 - RNA, 19 nt, Artificial Sequence
  Description of Artificial Sequence: Synthetic oligonucleotide
  Antisense strand to SEQ ID NO: 1538962
aucccacacaauauugcuu

SEQ ID NO: 1538964 - RNA, 19 nt, Artificial Sequence
  Description of Artificial Sequence: Synthetic oligonucleotide
  Sense strand starting at position 2596 of SEQ ID NO: 1245133
agcaauauugugugggauu

SEQ ID NO: 1538965 - RNA, 19 nt, Artificial Sequence
  Description of Artificial Sequence: Synthetic oligonucleotide
  Antisense strand to SEQ ID NO: 1538964
aaucccacacaauauugcu

SEQ ID NO: 1538966 - RNA, 19 nt, Artificial Sequence
  Description of Artificial Sequence: Synthetic oligonucleotide
  Sense strand starting at position 2598 of SEQ ID NO: 1245133
caauauugugugggauucu

SEQ ID NO: 1538967 - RNA, 19 nt, Artificial Sequence
  Description of Artificial Sequence: Synthetic oligonucleotide
  Antisense strand to SEQ ID NO: 1538966
agaaucccacacaauauug

SEQ ID NO: 1538968 - RNA, 19 nt, Artificial Sequence
  Description of Artificial Sequence: Synthetic oligonucleotide
  Sense strand starting at position 2607 of SEQ ID NO: 1245133
gugggauucuggagaauug

SEQ ID NO: 1538969 - RNA, 19 nt, Artificial Sequence
  Description of Artificial Sequence: Synthetic oligonucleotide
  Antisense strand to SEQ ID NO: 1538968
caauucuccagaaucccac

SEQ ID NO: 1538970 - RNA, 19 nt, Artificial Sequence
  Description of Artificial Sequence: Synthetic oligonucleotide
  Sense strand starting at position 2713 of SEQ ID NO: 1245133
agaguagcaauaugagaua

SEQ ID NO: 1538971 - RNA, 19 nt, Artificial Sequence
  Description of Artificial Sequence: Synthetic oligonucleotide
  Antisense strand to SEQ ID NO: 1538970
uaucucauauugcuacucu

SEQ ID NO: 1538972 - RNA, 19 nt, Artificial Sequence
  Description of Artificial Sequence: Synthetic oligonucleotide
  Sense strand starting at position 2754 of SEQ ID NO: 1245133
agucaaaugagcugagguu

SEQ ID NO: 1538973 - RNA, 19 nt, Artificial Sequence
  Description of Artificial Sequence: Synthetic oligonucleotide
  Antisense strand to SEQ ID NO: 1538972
aaccucagcucauuugacu

SEQ ID NO: 1538974 - RNA, 19 nt, Artificial Sequence
  Description of Artificial Sequence: Synthetic oligonucleotide
  Sense strand starting at position 2755 of SEQ ID NO: 1245133
gucaaaugagcugagguuu

SEQ ID NO: 1538975 - RNA, 19 nt, Artificial Sequence
  Description of Artificial Sequence: Synthetic oligonucleotide
  Antisense strand to SEQ ID NO: 1538974
aaaccucagcucauuugac

SEQ ID NO: 1538976 - RNA, 19 nt, Artificial Sequence
  Description of Artificial Sequence: Synthetic oligonucleotide
  Sense strand starting at position 2781 of SEQ ID NO: 1245133
gacgucuuugagcaauuac

SEQ ID NO: 1538977 - RNA, 19 nt, Artificial Sequence
  Description of Artificial Sequence: Synthetic oligonucleotide
  Antisense strand to SEQ ID NO: 1538976
guaauugcucaaagacguc

SEQ ID NO: 1538978 - RNA, 19 nt, Artificial Sequence
  Description of Artificial Sequence: Synthetic oligonucleotide
  Sense strand starting at position 2847 of SEQ ID NO: 1245133
ugauucugccauuacagga

SEQ ID NO: 1538979 - RNA, 19 nt, Artificial Sequence
  Description of Artificial Sequence: Synthetic oligonucleotide
  Antisense strand to SEQ ID NO: 1538978
uccuguaauggcagaauca

SEQ ID NO: 1538980 - RNA, 19 nt, Artificial Sequence
  Description of Artificial Sequence: Synthetic oligonucleotide
  Sense strand starting at position 2852 of SEQ ID NO: 1245133
cugccauuacaggaaaugu

SEQ ID NO: 1538981 - RNA, 19 nt, Artificial Sequence
  Description of Artificial Sequence: Synthetic oligonucleotide
  Antisense strand to SEQ ID NO: 1538980
acauuuccuguaauggcag

SEQ ID NO: 1538982 - RNA, 19 nt, Artificial Sequence
  Description of Artificial Sequence: Synthetic oligonucleotide
  Sense strand starting at position 2868 of SEQ ID NO: 1245133
uguugacaugacuguagua

SEQ ID NO: 1538983 - RNA, 19 nt, Artificial Sequence
  Description of Artificial Sequence: Synthetic oligonucleotide
  Antisense strand to SEQ ID NO: 1538982
uacuacagucaugucaaca

SEQ ID NO: 1538984 - RNA, 19 nt, Artificial Sequence
  Description of Artificial Sequence: Synthetic oligonucleotide
  Sense strand starting at position 2870 of SEQ ID NO: 1245133
uugacaugacuguaguaau

SEQ ID NO: 1538985 - RNA, 19 nt, Artificial Sequence
  Description of Artificial Sequence: Synthetic oligonucleotide
  Antisense strand to SEQ ID NO: 1538984
auuacuacagucaugucaa

SEQ ID NO: 1538986 - RNA, 19 nt, Artificial Sequence
  Description of Artificial Sequence: Synthetic oligonucleotide
  Sense strand starting at position 2955 of SEQ ID NO: 1245133
aacagauagcaccguuauu

SEQ ID NO: 1538987 - RNA, 19 nt, Artificial Sequence
  Description of Artificial Sequence: Synthetic oligonucleotide
  Antisense strand to SEQ ID NO: 1538986
aauaacggugcuaucuguu

SEQ ID NO: 1538988 - RNA, 19 nt, Artificial Sequence
  Description of Artificial Sequence: Synthetic oligonucleotide
  Sense strand starting at position 2967 of SEQ ID NO: 1245133
cguuauucccauuauauag

SEQ ID NO: 1538989 - RNA, 19 nt, Artificial Sequence
  Description of Artificial Sequence: Synthetic oligonucleotide
  Antisense strand to SEQ ID NO: 1538988
cuauauaaugggaauaacg

SEQ ID NO: 1538990 - RNA, 19 nt, Artificial Sequence
  Description of Artificial Sequence: Synthetic oligonucleotide
  Sense strand starting at position 2997 of SEQ ID NO: 1245133
caguguacucuguaaagua

SEQ ID NO: 1538991 - RNA, 19 nt, Artificial Sequence
  Description of Artificial Sequence: Synthetic oligonucleotide
  Antisense strand to SEQ ID NO: 1538990
uacuuuacagaguacacug

SEQ ID NO: 1538992 - RNA, 19 nt, Artificial Sequence
  Description of Artificial Sequence: Synthetic oligonucleotide
  Sense strand starting at position 3447 of SEQ ID NO: 1245133
cuaugcagucauuguaaag

SEQ ID NO: 1538993 - RNA, 19 nt, Artificial Sequence
  Description of Artificial Sequence: Synthetic oligonucleotide
  Antisense strand to SEQ ID NO: 1538992
cuuuacaaugacugcauag

SEQ ID NO: 1538994 - RNA, 19 nt, Artificial Sequence
  Description of Artificial Sequence: Synthetic oligonucleotide
  Sense strand starting at position 3465 of SEQ ID NO: 1245133
gaaugcuauggaugcauau

SEQ ID NO: 1538995 - RNA, 19 nt, Artificial Sequence
  Description of Artificial Sequence: Synthetic oligonucleotide
  Antisense strand to SEQ ID NO: 1538994
auaugcauccauagcauuc

SEQ ID NO: 1538996 - RNA, 19 nt, Artificial Sequence
  Description of Artificial Sequence: Synthetic oligonucleotide
  Sense strand starting at position 3720 of SEQ ID NO: 1245133
uugcaacuuuggguaauga

SEQ ID NO: 1538997 - RNA, 19 nt, Artificial Sequence
  Description of Artificial Sequence: Synthetic oligonucleotide
  Antisense strand to SEQ ID NO: 1538996
ucauuacccaaaguugcaa

SEQ ID NO: 1538998 - RNA, 19 nt, Artificial Sequence
  Description of Artificial Sequence: Synthetic oligonucleotide
  Sense strand starting at position 3735 of SEQ ID NO: 1245133
augagauccugugugguua

SEQ ID NO: 1538999 - RNA, 19 nt, Artificial Sequence
  Description of Artificial Sequence: Synthetic oligonucleotide
  Antisense strand to SEQ ID NO: 1538998
uaaccacacaggaucucau

SEQ ID NO: 1539000 - RNA, 19 nt, Artificial Sequence
  Description of Artificial Sequence: Synthetic oligonucleotide
  Sense strand starting at position 3736 of SEQ ID NO: 1245133
ugagauccugugugguuaa

SEQ ID NO: 1539001 - RNA, 19 nt, Artificial Sequence
  Description of Artificial Sequence: Synthetic oligonucleotide
  Antisense strand to SEQ ID NO: 1539000
uuaaccacacaggaucuca

SEQ ID NO: 1539002 - RNA, 19 nt, Artificial Sequence
  Description of Artificial Sequence: Synthetic oligonucleotide
  Sense strand starting at position 3786 of SEQ ID NO: 1245133
cugcaaggaauaugaagua

SEQ ID NO: 1539003 - RNA, 19 nt, Artificial Sequence
  Description of Artificial Sequence: Synthetic oligonucleotide
  Antisense strand to SEQ ID NO: 1539002
uacuucauauuccuugcag

SEQ ID NO: 1539004 - RNA, 19 nt, Artificial Sequence
  Description of Artificial Sequence: Synthetic oligonucleotide
  Sense strand starting at position 326 of SEQ ID NO: 1245134
gugggucuacacuaaggau

SEQ ID NO: 1539005 - RNA, 19 nt, Artificial Sequence
  Description of Artificial Sequence: Synthetic oligonucleotide
  Antisense strand to SEQ ID NO: 1539004
auccuuaguguagacccac

SEQ ID NO: 1539006 - RNA, 19 nt, Artificial Sequence
  Description of Artificial Sequence: Synthetic oligonucleotide
  Sense strand starting at position 451 of SEQ ID NO: 1245134
guugaagagcuguaaauaa

SEQ ID NO: 1539007 - RNA, 19 nt, Artificial Sequence
  Description of Artificial Sequence: Synthetic oligonucleotide
  Antisense strand to SEQ ID NO: 1539006
uuauuuacagcucuucaac

SEQ ID NO: 1539008 - RNA, 19 nt, Artificial Sequence
  Description of Artificial Sequence: Synthetic oligonucleotide
  Sense strand starting at position 471 of SEQ ID NO: 1245134
guuaaccagcauuagcaua

SEQ ID NO: 1539009 - RNA, 19 nt, Artificial Sequence
  Description of Artificial Sequence: Synthetic oligonucleotide
  Antisense strand to SEQ ID NO: 1539008
uaugcuaaugcugguuaac

SEQ ID NO: 1539010 - RNA, 19 nt, Artificial Sequence
  Description of Artificial Sequence: Synthetic oligonucleotide
  Sense strand starting at position 585 of SEQ ID NO: 1245134
ggauuaacuugagauuucu

SEQ ID NO: 1539011 - RNA, 19 nt, Artificial Sequence
  Description of Artificial Sequence: Synthetic oligonucleotide
  Antisense strand to SEQ ID NO: 1539010
agaaaucucaaguuaaucc

SEQ ID NO: 1539012 - RNA, 19 nt, Artificial Sequence
  Description of Artificial Sequence: Synthetic oligonucleotide
  Sense strand starting at position 687 of SEQ ID NO: 1245134
ugaauuugguuugaagaga

SEQ ID NO: 1539013 - RNA, 19 nt, Artificial Sequence
  Description of Artificial Sequence: Synthetic oligonucleotide
  Antisense strand to SEQ ID NO: 1539012
ucucuucaaaccaaauuca

SEQ ID NO: 1539014 - RNA, 19 nt, Artificial Sequence
  Description of Artificial Sequence: Synthetic oligonucleotide
  Sense strand starting at position 756 of SEQ ID NO: 1245134
gucagcuauccagauauau

SEQ ID NO: 1539015 - RNA, 19 nt, Artificial Sequence
  Description of Artificial Sequence: Synthetic oligonucleotide
  Antisense strand to SEQ ID NO: 1539014
auauaucuggauagcugac

SEQ ID NO: 1539016 - RNA, 19 nt, Artificial Sequence
  Description of Artificial Sequence: Synthetic oligonucleotide
  Sense strand starting at position 881 of SEQ ID NO: 1245134
uuuccaucugaguaucuga

SEQ ID NO: 1539017 - RNA, 19 nt, Artificial Sequence
  Description of Artificial Sequence: Synthetic oligonucleotide
  Antisense strand to SEQ ID NO: 1539016
ucagauacucagauggaaa

SEQ ID NO: 1539018 - RNA, 19 nt, Artificial Sequence
  Description of Artificial Sequence: Synthetic oligonucleotide
  Sense strand starting at position 884 of SEQ ID NO: 1245134
ccaucugaguaucugaaca

SEQ ID NO: 1539019 - RNA, 19 nt, Artificial Sequence
  Description of Artificial Sequence: Synthetic oligonucleotide
  Antisense strand to SEQ ID NO: 1539018
uguucagauacucagaugg

SEQ ID NO: 1539020 - RNA, 19 nt, Artificial Sequence
  Description of Artificial Sequence: Synthetic oligonucleotide
  Sense strand starting at position 1059 of SEQ ID NO: 1245134
gguuuaucucaugaguuac

SEQ ID NO: 1539021 - RNA, 19 nt, Artificial Sequence
  Description of Artificial Sequence: Synthetic oligonucleotide
  Antisense strand to SEQ ID NO: 1539020
guaacucaugagauaaacc

SEQ ID NO: 1539022 - RNA, 19 nt, Artificial Sequence
  Description of Artificial Sequence: Synthetic oligonucleotide
  Sense strand starting at position 1069 of SEQ ID NO: 1245134
augaguuacacaggcugau

SEQ ID NO: 1539023 - RNA, 19 nt, Artificial Sequence
  Description of Artificial Sequence: Synthetic oligonucleotide
  Antisense strand to SEQ ID NO: 1539022
aucagccuguguaacucau

SEQ ID NO: 1539024 - RNA, 19 nt, Artificial Sequence
  Description of Artificial Sequence: Synthetic oligonucleotide
  Sense strand starting at position 1142 of SEQ ID NO: 1245134
uucugcuggcagugaauuu

SEQ ID NO: 1539025 - RNA, 19 nt, Artificial Sequence
  Description of Artificial Sequence: Synthetic oligonucleotide
  Antisense strand to SEQ ID NO: 1539024
aaauucacugccagcagaa

SEQ ID NO: 1539026 - RNA, 19 nt, Artificial Sequence
  Description of Artificial Sequence: Synthetic oligonucleotide
  Sense strand starting at position 1437 of SEQ ID NO: 1245134
ugaguucugacaggucuaa

SEQ ID NO: 1539027 - RNA, 19 nt, Artificial Sequence
  Description of Artificial Sequence: Synthetic oligonucleotide
  Antisense strand to SEQ ID NO: 1539026
uuagaccugucagaacuca

SEQ ID NO: 1539028 - RNA, 19 nt, Artificial Sequence
  Description of Artificial Sequence: Synthetic oligonucleotide
  Sense strand starting at position 1500 of SEQ ID NO: 1245134
cacugacaucauuggaguu

SEQ ID NO: 1539029 - RNA, 19 nt, Artificial Sequence
  Description of Artificial Sequence: Synthetic oligonucleotide
  Antisense strand to SEQ ID NO: 1539028
aacuccaaugaugucagug

SEQ ID NO: 1539030 - RNA, 19 nt, Artificial Sequence
  Description of Artificial Sequence: Synthetic oligonucleotide
  Sense strand starting at position 1510 of SEQ ID NO: 1245134
auuggaguuuauguuuaca

SEQ ID NO: 1539031 - RNA, 19 nt, Artificial Sequence
  Description of Artificial Sequence: Synthetic oligonucleotide
  Antisense strand to SEQ ID NO: 1539030
uguaaacauaaacuccaau

SEQ ID NO: 1539032 - RNA, 19 nt, Artificial Sequence
  Description of Artificial Sequence: Synthetic oligonucleotide
  Sense strand starting at position 1513 of SEQ ID NO: 1245134
ggaguuuauguuuacauga

SEQ ID NO: 1539033 - RNA, 19 nt, Artificial Sequence
  Description of Artificial Sequence: Synthetic oligonucleotide
  Antisense strand to SEQ ID NO: 1539032
ucauguaaacauaaacucc

SEQ ID NO: 1539034 - RNA, 19 nt, Artificial Sequence
  Description of Artificial Sequence: Synthetic oligonucleotide
  Sense strand starting at position 1521 of SEQ ID NO: 1245134
uguuuacaugaaggugaau

SEQ ID NO: 1539035 - RNA, 19 nt, Artificial Sequence
  Description of Artificial Sequence: Synthetic oligonucleotide
  Antisense strand to SEQ ID NO: 1539034
auucaccuucauguaaaca

SEQ ID NO: 1539036 - RNA, 19 nt, Artificial Sequence
  Description of Artificial Sequence: Synthetic oligonucleotide
  Sense strand starting at position 1715 of SEQ ID NO: 1245134
aauuaugauguuggcuaga

SEQ ID NO: 1539037 - RNA, 19 nt, Artificial Sequence
  Description of Artificial Sequence: Synthetic oligonucleotide
  Antisense strand to SEQ ID NO: 1539036
ucuagccaacaucauaauu

SEQ ID NO: 1539038 - RNA, 19 nt, Artificial Sequence
  Description of Artificial Sequence: Synthetic oligonucleotide
  Sense strand starting at position 1717 of SEQ ID NO: 1245134
uuaugauguuggcuagaua

SEQ ID NO: 1539039 - RNA, 19 nt, Artificial Sequence
  Description of Artificial Sequence: Synthetic oligonucleotide
  Antisense strand to SEQ ID NO: 1539038
uaucuagccaacaucauaa

SEQ ID NO: 1539040 - RNA, 19 nt, Artificial Sequence
  Description of Artificial Sequence: Synthetic oligonucleotide
  Sense strand starting at position 1718 of SEQ ID NO: 1245134
uaugauguuggcuagauag

SEQ ID NO: 1539041 - RNA, 19 nt, Artificial Sequence
  Description of Artificial Sequence: Synthetic oligonucleotide
  Antisense strand to SEQ ID NO: 1539040
cuaucuagccaacaucaua

SEQ ID NO: 1539042 - RNA, 19 nt, Artificial Sequence
  Description of Artificial Sequence: Synthetic oligonucleotide
  Sense strand starting at position 1720 of SEQ ID NO: 1245134
ugauguuggcuagauagua

SEQ ID NO: 1539043 - RNA, 19 nt, Artificial Sequence
  Description of Artificial Sequence: Synthetic oligonucleotide
  Antisense strand to SEQ ID NO: 1539042
uacuaucuagccaacauca

SEQ ID NO: 1539044 - RNA, 19 nt, Artificial Sequence
  Description of Artificial Sequence: Synthetic oligonucleotide
  Sense strand starting at position 1777 of SEQ ID NO: 1245134
acuguaauauaggcaaacu

SEQ ID NO: 1539045 - RNA, 19 nt, Artificial Sequence
  Description of Artificial Sequence: Synthetic oligonucleotide
  Antisense strand to SEQ ID NO: 1539044
aguuugccuauauuacagu

SEQ ID NO: 1539046 - RNA, 19 nt, Artificial Sequence
  Description of Artificial Sequence: Synthetic oligonucleotide
  Sense strand starting at position 2063 of SEQ ID NO: 1245134
augaaauguuaacugcaga

SEQ ID NO: 1539047 - RNA, 19 nt, Artificial Sequence
  Description of Artificial Sequence: Synthetic oligonucleotide
  Antisense strand to SEQ ID NO: 1539046
ucugcaguuaacauuucau

SEQ ID NO: 1539048 - RNA, 19 nt, Artificial Sequence
  Description of Artificial Sequence: Synthetic oligonucleotide
  Sense strand starting at position 2119 of SEQ ID NO: 1245134
ugugacuacucccucugaa

SEQ ID NO: 1539049 - RNA, 19 nt, Artificial Sequence
  Description of Artificial Sequence: Synthetic oligonucleotide
  Antisense strand to SEQ ID NO: 1539048
uucagagggaguagucaca

SEQ ID NO: 1539050 - RNA, 19 nt, Artificial Sequence
  Description of Artificial Sequence: Synthetic oligonucleotide
  Sense strand starting at position 2222 of SEQ ID NO: 1245134
cguucugagauagaaaugu

SEQ ID NO: 1539051 - RNA, 19 nt, Artificial Sequence
  Description of Artificial Sequence: Synthetic oligonucleotide
  Antisense strand to SEQ ID NO: 1539050
acauuucuaucucagaacg

SEQ ID NO: 1539052 - RNA, 19 nt, Artificial Sequence
  Description of Artificial Sequence: Synthetic oligonucleotide
  Sense strand starting at position 2233 of SEQ ID NO: 1245134
agaaauguaucauugcuug

SEQ ID NO: 1539053 - RNA, 19 nt, Artificial Sequence
  Description of Artificial Sequence: Synthetic oligonucleotide
  Antisense strand to SEQ ID NO: 1539052
caagcaaugauacauuucu

SEQ ID NO: 1539054 - RNA, 19 nt, Artificial Sequence
  Description of Artificial Sequence: Synthetic oligonucleotide
  Sense strand starting at position 2430 of SEQ ID NO: 1245134
augucaaaggagugaugga

SEQ ID NO: 1539055 - RNA, 19 nt, Artificial Sequence
  Description of Artificial Sequence: Synthetic oligonucleotide
  Antisense strand to SEQ ID NO: 1539054
uccaucacuccuuugacau

SEQ ID NO: 1539056 - RNA, 19 nt, Artificial Sequence
  Description of Artificial Sequence: Synthetic oligonucleotide
  Sense strand starting at position 2730 of SEQ ID NO: 1245134
acccucaagcuguagaaua

SEQ ID NO: 1539057 - RNA, 19 nt, Artificial Sequence
  Description of Artificial Sequence: Synthetic oligonucleotide
  Antisense strand to SEQ ID NO: 1539056
uauucuacagcuugagggu

SEQ ID NO: 1539058 - RNA, 19 nt, Artificial Sequence
  Description of Artificial Sequence: Synthetic oligonucleotide
  Sense strand starting at position 2732 of SEQ ID NO: 1245134
ccucaagcuguagaauaua

SEQ ID NO: 1539059 - RNA, 19 nt, Artificial Sequence
  Description of Artificial Sequence: Synthetic oligonucleotide
  Antisense strand to SEQ ID NO: 1539058
uauauucuacagcuugagg

SEQ ID NO: 1539060 - RNA, 19 nt, Artificial Sequence
  Description of Artificial Sequence: Synthetic oligonucleotide
  Sense strand starting at position 2760 of SEQ ID NO: 1245134
gaaagcugucaaggaauug

SEQ ID NO: 1539061 - RNA, 19 nt, Artificial Sequence
  Description of Artificial Sequence: Synthetic oligonucleotide
  Antisense strand to SEQ ID NO: 1539060
caauuccuugacagcuuuc

SEQ ID NO: 1539062 - RNA, 19 nt, Artificial Sequence
  Description of Artificial Sequence: Synthetic oligonucleotide
  Sense strand starting at position 2797 of SEQ ID NO: 1245134
uuguucuaaagaggaguuu

SEQ ID NO: 1539063 - RNA, 19 nt, Artificial Sequence
  Description of Artificial Sequence: Synthetic oligonucleotide
  Antisense strand to SEQ ID NO: 1539062
aaacuccucuuuagaacaa

SEQ ID NO: 1539064 - RNA, 19 nt, Artificial Sequence
  Description of Artificial Sequence: Synthetic oligonucleotide
  Sense strand starting at position 2851 of SEQ ID NO: 1245134
ugaggacauugugcuaauu

SEQ ID NO: 1539065 - RNA, 19 nt, Artificial Sequence
  Description of Artificial Sequence: Synthetic oligonucleotide
  Antisense strand to SEQ ID NO: 1539064
aauuagcacaauguccuca

SEQ ID NO: 1539066 - RNA, 19 nt, Artificial Sequence
  Description of Artificial Sequence: Synthetic oligonucleotide
  Sense strand starting at position 3129 of SEQ ID NO: 1245134
gauaaugaacuuuguguua

SEQ ID NO: 1539067 - RNA, 19 nt, Artificial Sequence
  Description of Artificial Sequence: Synthetic oligonucleotide
  Antisense strand to SEQ ID NO: 1539066
uaacacaaaguucauuauc

SEQ ID NO: 1539068 - RNA, 19 nt, Artificial Sequence
  Description of Artificial Sequence: Synthetic oligonucleotide
  Sense strand starting at position 3496 of SEQ ID NO: 1245134
aguggaagauuauucuugu

SEQ ID NO: 1539069 - RNA, 19 nt, Artificial Sequence
  Description of Artificial Sequence: Synthetic oligonucleotide
  Antisense strand to SEQ ID NO: 1539068
acaagaauaaucuuccacu

SEQ ID NO: 1539070 - RNA, 19 nt, Artificial Sequence
  Description of Artificial Sequence: Synthetic oligonucleotide
  Sense strand starting at position 3499 of SEQ ID NO: 1245134
ggaagauuauucuugucac

SEQ ID NO: 1539071 - RNA, 19 nt, Artificial Sequence
  Description of Artificial Sequence: Synthetic oligonucleotide
  Antisense strand to SEQ ID NO: 1539070
gugacaagaauaaucuucc

SEQ ID NO: 1539072 - RNA, 19 nt, Artificial Sequence
  Description of Artificial Sequence: Synthetic oligonucleotide
  Sense strand starting at position 3772 of SEQ ID NO: 1245134
gauuguuagcaugacagac

SEQ ID NO: 1539073 - RNA, 19 nt, Artificial Sequence
  Description of Artificial Sequence: Synthetic oligonucleotide
  Antisense strand to SEQ ID NO: 1539072
gucugucaugcuaacaauc

SEQ ID NO: 1539074 - RNA, 19 nt, Artificial Sequence
  Description of Artificial Sequence: Synthetic oligonucleotide
  Sense strand starting at position 3817 of SEQ ID NO: 1245134
cagagucgccaauaaagga

SEQ ID NO: 1539075 - RNA, 19 nt, Artificial Sequence
  Description of Artificial Sequence: Synthetic oligonucleotide
  Antisense strand to SEQ ID NO: 1539074
uccuuuauuggcgacucug

SEQ ID NO: 1539076 - RNA, 19 nt, Artificial Sequence
  Description of Artificial Sequence: Synthetic oligonucleotide
  Sense strand starting at position 3837 of SEQ ID NO: 1245134
cuuuguucugagcaggauu

SEQ ID NO: 1539077 - RNA, 19 nt, Artificial Sequence
  Description of Artificial Sequence: Synthetic oligonucleotide
  Antisense strand to SEQ ID NO: 1539076
aauccugcucagaacaaag

SEQ ID NO: 1539078 - RNA, 19 nt, Artificial Sequence
  Description of Artificial Sequence: Synthetic oligonucleotide
  Sense strand starting at position 3889 of SEQ ID NO: 1245134
cugacauguguuugagaga

SEQ ID NO: 1539079 - RNA, 19 nt, Artificial Sequence
  Description of Artificial Sequence: Synthetic oligonucleotide
  Antisense strand to SEQ ID NO: 1539078
ucucucaaacacaugucag

SEQ ID NO: 1539080 - RNA, 19 nt, Artificial Sequence
  Description of Artificial Sequence: Synthetic oligonucleotide
  Sense strand starting at position 3894 of SEQ ID NO: 1245134
auguguuugagagaacucu

SEQ ID NO: 1539081 - RNA, 19 nt, Artificial Sequence
  Description of Artificial Sequence: Synthetic oligonucleotide
  Antisense strand to SEQ ID NO: 1539080
agaguucucucaaacacau

SEQ ID NO: 1539082 - RNA, 19 nt, Artificial Sequence
  Description of Artificial Sequence: Synthetic oligonucleotide
  Sense strand starting at position 3900 of SEQ ID NO: 1245134
uugagagaacucugauagc

SEQ ID NO: 1539083 - RNA, 19 nt, Artificial Sequence
  Description of Artificial Sequence: Synthetic oligonucleotide
  Antisense strand to SEQ ID NO: 1539082
gcuaucagaguucucucaa

SEQ ID NO: 1539084 - RNA, 19 nt, Artificial Sequence
  Description of Artificial Sequence: Synthetic oligonucleotide
  Sense strand starting at position 111 of SEQ ID NO: 1245135
uauggaucagguugaccua

SEQ ID NO: 1539085 - RNA, 19 nt, Artificial Sequence
  Description of Artificial Sequence: Synthetic oligonucleotide
  Antisense strand to SEQ ID NO: 1539084
uaggucaaccugauccaua

SEQ ID NO: 1539086 - RNA, 19 nt, Artificial Sequence
  Description of Artificial Sequence: Synthetic oligonucleotide
  Sense strand starting at position 405 of SEQ ID NO: 1245135
uagugaucauugccaggau

SEQ ID NO: 1539087 - RNA, 19 nt, Artificial Sequence
  Description of Artificial Sequence: Synthetic oligonucleotide
  Antisense strand to SEQ ID NO: 1539086
auccuggcaaugaucacua

SEQ ID NO: 1539088 - RNA, 19 nt, Artificial Sequence
  Description of Artificial Sequence: Synthetic oligonucleotide
  Sense strand starting at position 409 of SEQ ID NO: 1245135
gaucauugccaggauccau

SEQ ID NO: 1539089 - RNA, 19 nt, Artificial Sequence
  Description of Artificial Sequence: Synthetic oligonucleotide
  Antisense strand to SEQ ID NO: 1539088
auggauccuggcaaugauc

SEQ ID NO: 1539090 - RNA, 19 nt, Artificial Sequence
  Description of Artificial Sequence: Synthetic oligonucleotide
  Sense strand starting at position 550 of SEQ ID NO: 1245135
gcaagaugcuaucuaacuc

SEQ ID NO: 1539091 - RNA, 19 nt, Artificial Sequence
  Description of Artificial Sequence: Synthetic oligonucleotide
  Antisense strand to SEQ ID NO: 1539090
gaguuagauagcaucuugc

SEQ ID NO: 1539092 - RNA, 19 nt, Artificial Sequence
  Description of Artificial Sequence: Synthetic oligonucleotide
  Sense strand starting at position 716 of SEQ ID NO: 1245135
aaacgugaaccguacaaau

SEQ ID NO: 1539093 - RNA, 19 nt, Artificial Sequence
  Description of Artificial Sequence: Synthetic oligonucleotide
  Antisense strand to SEQ ID NO: 1539092
auuuguacgguucacguuu

SEQ ID NO: 1539094 - RNA, 19 nt, Artificial Sequence
  Description of Artificial Sequence: Synthetic oligonucleotide
  Sense strand starting at position 718 of SEQ ID NO: 1245135
acgugaaccguacaaauga

SEQ ID NO: 1539095 - RNA, 19 nt, Artificial Sequence
  Description of Artificial Sequence: Synthetic oligonucleotide
  Antisense strand to SEQ ID NO: 1539094
ucauuuguacgguucacgu

SEQ ID NO: 1539096 - RNA, 19 nt, Artificial Sequence
  Description of Artificial Sequence: Synthetic oligonucleotide
  Sense strand starting at position 813 of SEQ ID NO: 1245135
aaauauaacguguguagau

SEQ ID NO: 1539097 - RNA, 19 nt, Artificial Sequence
  Description of Artificial Sequence: Synthetic oligonucleotide
  Antisense strand to SEQ ID NO: 1539096
aucuacacacguuauauuu

SEQ ID NO: 1539098 - RNA, 19 nt, Artificial Sequence
  Description of Artificial Sequence: Synthetic oligonucleotide
  Sense strand starting at position 814 of SEQ ID NO: 1245135
aauauaacguguguagauu

SEQ ID NO: 1539099 - RNA, 19 nt, Artificial Sequence
  Description of Artificial Sequence: Synthetic oligonucleotide
  Antisense strand to SEQ ID NO: 1539098
aaucuacacacguuauauu

SEQ ID NO: 1539100 - RNA, 19 nt, Artificial Sequence
  Description of Artificial Sequence: Synthetic oligonucleotide
  Sense strand starting at position 823 of SEQ ID NO: 1245135
uguguagauuguuuggaua

SEQ ID NO: 1539101 - RNA, 19 nt, Artificial Sequence
  Description of Artificial Sequence: Synthetic oligonucleotide
  Antisense strand to SEQ ID NO: 1539100
uauccaaacaaucuacaca

SEQ ID NO: 1539102 - RNA, 19 nt, Artificial Sequence
  Description of Artificial Sequence: Synthetic oligonucleotide
  Sense strand starting at position 837 of SEQ ID NO: 1245135
ggauacugauuuggacaaa

SEQ ID NO: 1539103 - RNA, 19 nt, Artificial Sequence
  Description of Artificial Sequence: Synthetic oligonucleotide
  Antisense strand to SEQ ID NO: 1539102
uuuguccaaaucaguaucc

SEQ ID NO: 1539104 - RNA, 19 nt, Artificial Sequence
  Description of Artificial Sequence: Synthetic oligonucleotide
  Sense strand starting at position 887 of SEQ ID NO: 1245135
uguaaaugcugacuggaua

SEQ ID NO: 1539105 - RNA, 19 nt, Artificial Sequence
  Description of Artificial Sequence: Synthetic oligonucleotide
  Antisense strand to SEQ ID NO: 1539104
uauccagucagcauuuaca

SEQ ID NO: 1539106 - RNA, 19 nt, Artificial Sequence
  Description of Artificial Sequence: Synthetic oligonucleotide
  Sense strand starting at position 899 of SEQ ID NO: 1245135
cuggauaguagaggguaaa

SEQ ID NO: 1539107 - RNA, 19 nt, Artificial Sequence
  Description of Artificial Sequence: Synthetic oligonucleotide
  Antisense strand to SEQ ID NO: 1539106
uuuacccucuacuauccag

SEQ ID NO: 1539108 - RNA, 19 nt, Artificial Sequence
  Description of Artificial Sequence: Synthetic oligonucleotide
  Sense strand starting at position 924 of SEQ ID NO: 1245135
ugcuaaguacacugauaau

SEQ ID NO: 1539109 - RNA, 19 nt, Artificial Sequence
  Description of Artificial Sequence: Synthetic oligonucleotide
  Antisense strand to SEQ ID NO: 1539108
auuaucaguguacuuagca

SEQ ID NO: 1539110 - RNA, 19 nt, Artificial Sequence
  Description of Artificial Sequence: Synthetic oligonucleotide
  Sense strand starting at position 936 of SEQ ID NO: 1245135
ugauaauggcuuuauguuu

SEQ ID NO: 1539111 - RNA, 19 nt, Artificial Sequence
  Description of Artificial Sequence: Synthetic oligonucleotide
  Antisense strand to SEQ ID NO: 1539110
aaacauaaagccauuauca

SEQ ID NO: 1539112 - RNA, 19 nt, Artificial Sequence
  Description of Artificial Sequence: Synthetic oligonucleotide
  Sense strand starting at position 1114 of SEQ ID NO: 1245135
acuugaagguuuccauaau

SEQ ID NO: 1539113 - RNA, 19 nt, Artificial Sequence
  Description of Artificial Sequence: Synthetic oligonucleotide
  Antisense strand to SEQ ID NO: 1539112
auuauggaaaccuucaagu

SEQ ID NO: 1539114 - RNA, 19 nt, Artificial Sequence
  Description of Artificial Sequence: Synthetic oligonucleotide
  Sense strand starting at position 1161 of SEQ ID NO: 1245135
uccaaauaggucgggaagu

SEQ ID NO: 1539115 - RNA, 19 nt, Artificial Sequence
  Description of Artificial Sequence: Synthetic oligonucleotide
  Antisense strand to SEQ ID NO: 1539114
acuucccgaccuauuugga

SEQ ID NO: 1539116 - RNA, 19 nt, Artificial Sequence
  Description of Artificial Sequence: Synthetic oligonucleotide
  Sense strand starting at position 1238 of SEQ ID NO: 1245135
aggaauuaaaugcgagcaa

SEQ ID NO: 1539117 - RNA, 19 nt, Artificial Sequence
  Description of Artificial Sequence: Synthetic oligonucleotide
  Antisense strand to SEQ ID NO: 1539116
uugcucgcauuuaauuccu

SEQ ID NO: 1539118 - RNA, 19 nt, Artificial Sequence
  Description of Artificial Sequence: Synthetic oligonucleotide
  Sense strand starting at position 1351 of SEQ ID NO: 1245135
uauuccagucgugaucaca

SEQ ID NO: 1539119 - RNA, 19 nt, Artificial Sequence
  Description of Artificial Sequence: Synthetic oligonucleotide
  Antisense strand to SEQ ID NO: 1539118
ugugaucacgacuggaaua

SEQ ID NO: 1539120 - RNA, 19 nt, Artificial Sequence
  Description of Artificial Sequence: Synthetic oligonucleotide
  Sense strand starting at position 1354 of SEQ ID NO: 1245135
uccagucgugaucacagua

SEQ ID NO: 1539121 - RNA, 19 nt, Artificial Sequence
  Description of Artificial Sequence: Synthetic oligonucleotide
  Antisense strand to SEQ ID NO: 1539120
uacugugaucacgacugga

SEQ ID NO: 1539122 - RNA, 19 nt, Artificial Sequence
  Description of Artificial Sequence: Synthetic oligonucleotide
  Sense strand starting at position 2111 of SEQ ID NO: 1245135
gagggcagugauugaguuu

SEQ ID NO: 1539123 - RNA, 19 nt, Artificial Sequence
  Description of Artificial Sequence: Synthetic oligonucleotide
  Antisense strand to SEQ ID NO: 1539122
aaacucaaucacugcccuc

SEQ ID NO: 1539124 - RNA, 19 nt, Artificial Sequence
  Description of Artificial Sequence: Synthetic oligonucleotide
  Sense strand starting at position 2241 of SEQ ID NO: 1245135
uccacauaagaguguucuu

SEQ ID NO: 1539125 - RNA, 19 nt, Artificial Sequence
  Description of Artificial Sequence: Synthetic oligonucleotide
  Antisense strand to SEQ ID NO: 1539124
aagaacacucuuaugugga

SEQ ID NO: 1539126 - RNA, 19 nt, Artificial Sequence
  Description of Artificial Sequence: Synthetic oligonucleotide
  Sense strand starting at position 2244 of SEQ ID NO: 1245135
acauaagaguguucuuccu

SEQ ID NO: 1539127 - RNA, 19 nt, Artificial Sequence
  Description of Artificial Sequence: Synthetic oligonucleotide
  Antisense strand to SEQ ID NO: 1539126
aggaagaacacucuuaugu

SEQ ID NO: 1539128 - RNA, 19 nt, Artificial Sequence
  Description of Artificial Sequence: Synthetic oligonucleotide
  Sense strand starting at position 2246 of SEQ ID NO: 1245135
auaagaguguucuuccuga

SEQ ID NO: 1539129 - RNA, 19 nt, Artificial Sequence
  Description of Artificial Sequence: Synthetic oligonucleotide
  Antisense strand to SEQ ID NO: 1539128
ucaggaagaacacucuuau

SEQ ID NO: 1539130 - RNA, 19 nt, Artificial Sequence
  Description of Artificial Sequence: Synthetic oligonucleotide
  Sense strand starting at position 2293 of SEQ ID NO: 1245135
uggucuuugguugggauga

SEQ ID NO: 1539131 - RNA, 19 nt, Artificial Sequence
  Description of Artificial Sequence: Synthetic oligonucleotide
  Antisense strand to SEQ ID NO: 1539130
ucaucccaaccaaagacca

SEQ ID NO: 1539132 - RNA, 19 nt, Artificial Sequence
  Description of Artificial Sequence: Synthetic oligonucleotide
  Sense strand starting at position 2298 of SEQ ID NO: 1245135
uuugguugggaugaaucuu

SEQ ID NO: 1539133 - RNA, 19 nt, Artificial Sequence
  Description of Artificial Sequence: Synthetic oligonucleotide
  Antisense strand to SEQ ID NO: 1539132
aagauucaucccaaccaaa

SEQ ID NO: 1539134 - RNA, 19 nt, Artificial Sequence
  Description of Artificial Sequence: Synthetic oligonucleotide
  Sense strand starting at position 2304 of SEQ ID NO: 1245135
ugggaugaaucuuuacugu

SEQ ID NO: 1539135 - RNA, 19 nt, Artificial Sequence
  Description of Artificial Sequence: Synthetic oligonucleotide
  Antisense strand to SEQ ID NO: 1539134
acaguaaagauucauccca

SEQ ID NO: 1539136 - RNA, 19 nt, Artificial Sequence
  Description of Artificial Sequence: Synthetic oligonucleotide
  Sense strand starting at position 2336 of SEQ ID NO: 1245135
agauccuuugccugaccau

SEQ ID NO: 1539137 - RNA, 19 nt, Artificial Sequence
  Description of Artificial Sequence: Synthetic oligonucleotide
  Antisense strand to SEQ ID NO: 1539136
auggucaggcaaaggaucu

SEQ ID NO: 1539138 - RNA, 19 nt, Artificial Sequence
  Description of Artificial Sequence: Synthetic oligonucleotide
  Sense strand starting at position 2389 of SEQ ID NO: 1245135
ccuacucuagguuggaaua

SEQ ID NO: 1539139 - RNA, 19 nt, Artificial Sequence
  Description of Artificial Sequence: Synthetic oligonucleotide
  Antisense strand to SEQ ID NO: 1539138
uauuccaaccuagaguagg

SEQ ID NO: 1539140 - RNA, 19 nt, Artificial Sequence
  Description of Artificial Sequence: Synthetic oligonucleotide
  Sense strand starting at position 2390 of SEQ ID NO: 1245135
cuacucuagguuggaauau

SEQ ID NO: 1539141 - RNA, 19 nt, Artificial Sequence
  Description of Artificial Sequence: Synthetic oligonucleotide
  Antisense strand to SEQ ID NO: 1539140
auauuccaaccuagaguag

SEQ ID NO: 1539142 - RNA, 19 nt, Artificial Sequence
  Description of Artificial Sequence: Synthetic oligonucleotide
  Sense strand starting at position 2613 of SEQ ID NO: 1245135
ugauuucgugcucagcgua

SEQ ID NO: 1539143 - RNA, 19 nt, Artificial Sequence
  Description of Artificial Sequence: Synthetic oligonucleotide
  Antisense strand to SEQ ID NO: 1539142
uacgcugagcacgaaauca

SEQ ID NO: 1539144 - RNA, 19 nt, Artificial Sequence
  Description of Artificial Sequence: Synthetic oligonucleotide
  Sense strand starting at position 3115 of SEQ ID NO: 1245135
gagcucugacuuuguggau

SEQ ID NO: 1539145 - RNA, 19 nt, Artificial Sequence
  Description of Artificial Sequence: Synthetic oligonucleotide
  Antisense strand to SEQ ID NO: 1539144
auccacaaagucagagcuc

SEQ ID NO: 1539146 - RNA, 19 nt, Artificial Sequence
  Description of Artificial Sequence: Synthetic oligonucleotide
  Sense strand starting at position 3116 of SEQ ID NO: 1245135
agcucugacuuuguggaua

SEQ ID NO: 1539147 - RNA, 19 nt, Artificial Sequence
  Description of Artificial Sequence: Synthetic oligonucleotide
  Antisense strand to SEQ ID NO: 1539146
uauccacaaagucagagcu

SEQ ID NO: 1539148 - RNA, 19 nt, Artificial Sequence
  Description of Artificial Sequence: Synthetic oligonucleotide
  Sense strand starting at position 3119 of SEQ ID NO: 1245135
ucugacuuuguggauagua

SEQ ID NO: 1539149 - RNA, 19 nt, Artificial Sequence
  Description of Artificial Sequence: Synthetic oligonucleotide
  Antisense strand to SEQ ID NO: 1539148
uacuauccacaaagucaga

SEQ ID NO: 1539150 - RNA, 19 nt, Artificial Sequence
  Description of Artificial Sequence: Synthetic oligonucleotide
  Sense strand starting at position 3121 of SEQ ID NO: 1245135
ugacuuuguggauaguauu

SEQ ID NO: 1539151 - RNA, 19 nt, Artificial Sequence
  Description of Artificial Sequence: Synthetic oligonucleotide
  Antisense strand to SEQ ID NO: 1539150
aauacuauccacaaaguca

SEQ ID NO: 1539152 - RNA, 19 nt, Artificial Sequence
  Description of Artificial Sequence: Synthetic oligonucleotide
  Sense strand starting at position 3450 of SEQ ID NO: 1245135
ugugaaacuccugagguca

SEQ ID NO: 1539153 - RNA, 19 nt, Artificial Sequence
  Description of Artificial Sequence: Synthetic oligonucleotide
  Antisense strand to SEQ ID NO: 1539152
ugaccucaggaguuucaca

SEQ ID NO: 1539154 - RNA, 19 nt, Artificial Sequence
  Description of Artificial Sequence: Synthetic oligonucleotide
  Sense strand starting at position 3608 of SEQ ID NO: 1245135
cuagcuaagagaugaguga

SEQ ID NO: 1539155 - RNA, 19 nt, Artificial Sequence
  Description of Artificial Sequence: Synthetic oligonucleotide
  Antisense strand to SEQ ID NO: 1539154
ucacucaucucuuagcuag

SEQ ID NO: 1539156 - RNA, 19 nt, Artificial Sequence
  Description of Artificial Sequence: Synthetic oligonucleotide
  Sense strand starting at position 3646 of SEQ ID NO: 1245135
cugaaucuuguaggaugau

SEQ ID NO: 1539157 - RNA, 19 nt, Artificial Sequence
  Description of Artificial Sequence: Synthetic oligonucleotide
  Antisense strand to SEQ ID NO: 1539156
aucauccuacaagauucag

SEQ ID NO: 1539158 - RNA, 19 nt, Artificial Sequence
  Description of Artificial Sequence: Synthetic oligonucleotide
  Sense strand starting at position 3753 of SEQ ID NO: 1245135
ggacuuaucucuccugaca

SEQ ID NO: 1539159 - RNA, 19 nt, Artificial Sequence
  Description of Artificial Sequence: Synthetic oligonucleotide
  Antisense strand to SEQ ID NO: 1539158
ugucaggagagauaagucc

SEQ ID NO: 1539160 - RNA, 19 nt, Artificial Sequence
  Description of Artificial Sequence: Synthetic oligonucleotide
  Sense strand starting at position 3766 of SEQ ID NO: 1245135
cugacacuugccuagcuaa

SEQ ID NO: 1539161 - RNA, 19 nt, Artificial Sequence
  Description of Artificial Sequence: Synthetic oligonucleotide
  Antisense strand to SEQ ID NO: 1539160
uuagcuaggcaagugucag

SEQ ID NO: 1539162 - RNA, 19 nt, Artificial Sequence
  Description of Artificial Sequence: Synthetic oligonucleotide
  Sense strand starting at position 3815 of SEQ ID NO: 1245135
cagcuuggucuugaucaca

SEQ ID NO: 1539163 - RNA, 19 nt, Artificial Sequence
  Description of Artificial Sequence: Synthetic oligonucleotide
  Antisense strand to SEQ ID NO: 1539162
ugugaucaagaccaagcug

SEQ ID NO: 1539164 - RNA, 19 nt, Artificial Sequence
  Description of Artificial Sequence: Synthetic oligonucleotide
  Sense strand starting at position 131 of SEQ ID NO: 1245136
guguguuaaguacaucaaa

SEQ ID NO: 1539165 - RNA, 19 nt, Artificial Sequence
  Description of Artificial Sequence: Synthetic oligonucleotide
  Antisense strand to SEQ ID NO: 1539164
uuugauguacuuaacacac

SEQ ID NO: 1539166 - RNA, 19 nt, Artificial Sequence
  Description of Artificial Sequence: Synthetic oligonucleotide
  Sense strand starting at position 144 of SEQ ID NO: 1245136
aucaaagcaugaguauaau

SEQ ID NO: 1539167 - RNA, 19 nt, Artificial Sequence
  Description of Artificial Sequence: Synthetic oligonucleotide
  Antisense strand to SEQ ID NO: 1539166
auuauacucaugcuuugau

SEQ ID NO: 1539168 - RNA, 19 nt, Artificial Sequence
  Description of Artificial Sequence: Synthetic oligonucleotide
  Sense strand starting at position 150 of SEQ ID NO: 1245136
gcaugaguauaaucaucuu

SEQ ID NO: 1539169 - RNA, 19 nt, Artificial Sequence
  Description of Artificial Sequence: Synthetic oligonucleotide
  Antisense strand to SEQ ID NO: 1539168
aagaugauuauacucaugc

SEQ ID NO: 1539170 - RNA, 19 nt, Artificial Sequence
  Description of Artificial Sequence: Synthetic oligonucleotide
  Sense strand starting at position 176 of SEQ ID NO: 1245136
gaucuuguccugugauaua

SEQ ID NO: 1539171 - RNA, 19 nt, Artificial Sequence
  Description of Artificial Sequence: Synthetic oligonucleotide
  Antisense strand to SEQ ID NO: 1539170
uauaucacaggacaagauc

SEQ ID NO: 1539172 - RNA, 19 nt, Artificial Sequence
  Description of Artificial Sequence: Synthetic oligonucleotide
  Sense strand starting at position 214 of SEQ ID NO: 1245136
agacuuuaccaagaugcuu

SEQ ID NO: 1539173 - RNA, 19 nt, Artificial Sequence
  Description of Artificial Sequence: Synthetic oligonucleotide
  Antisense strand to SEQ ID NO: 1539172
aagcaucuugguaaagucu

SEQ ID NO: 1539174 - RNA, 19 nt, Artificial Sequence
  Description of Artificial Sequence: Synthetic oligonucleotide
  Sense strand starting at position 275 of SEQ ID NO: 1245136
gagugugccuugcuaauuu

SEQ ID NO: 1539175 - RNA, 19 nt, Artificial Sequence
  Description of Artificial Sequence: Synthetic oligonucleotide
  Antisense strand to SEQ ID NO: 1539174
aaauuagcaaggcacacuc

SEQ ID NO: 1539176 - RNA, 19 nt, Artificial Sequence
  Description of Artificial Sequence: Synthetic oligonucleotide
  Sense strand starting at position 632 of SEQ ID NO: 1245136
ggguaaugugguuacaaau

SEQ ID NO: 1539177 - RNA, 19 nt, Artificial Sequence
  Description of Artificial Sequence: Synthetic oligonucleotide
  Antisense strand to SEQ ID NO: 1539176
auuuguaaccacauuaccc

SEQ ID NO: 1539178 - RNA, 19 nt, Artificial Sequence
  Description of Artificial Sequence: Synthetic oligonucleotide
  Sense strand starting at position 672 of SEQ ID NO: 1245136
cuccaaagggugugagaau

SEQ ID NO: 1539179 - RNA, 19 nt, Artificial Sequence
  Description of Artificial Sequence: Synthetic oligonucleotide
  Antisense strand to SEQ ID NO: 1539178
auucucacacccuuuggag

SEQ ID NO: 1539180 - RNA, 19 nt, Artificial Sequence
  Description of Artificial Sequence: Synthetic oligonucleotide
  Sense strand starting at position 894 of SEQ ID NO: 1245136
ugccuaaacuggucuccaa

SEQ ID NO: 1539181 - RNA, 19 nt, Artificial Sequence
  Description of Artificial Sequence: Synthetic oligonucleotide
  Antisense strand to SEQ ID NO: 1539180
uuggagaccaguuuaggca

SEQ ID NO: 1539182 - RNA, 19 nt, Artificial Sequence
  Description of Artificial Sequence: Synthetic oligonucleotide
  Sense strand starting at position 1011 of SEQ ID NO: 1245136
uuaauaaagccguaugaac

SEQ ID NO: 1539183 - RNA, 19 nt, Artificial Sequence
  Description of Artificial Sequence: Synthetic oligonucleotide
  Antisense strand to SEQ ID NO: 1539182
guucauacggcuuuauuaa

SEQ ID NO: 1539184 - RNA, 19 nt, Artificial Sequence
  Description of Artificial Sequence: Synthetic oligonucleotide
  Sense strand starting at position 1019 of SEQ ID NO: 1245136
gccguaugaacagaaauac

SEQ ID NO: 1539185 - RNA, 19 nt, Artificial Sequence
  Description of Artificial Sequence: Synthetic oligonucleotide
  Antisense strand to SEQ ID NO: 1539184
guauuucuguucauacggc

SEQ ID NO: 1539186 - RNA, 19 nt, Artificial Sequence
  Description of Artificial Sequence: Synthetic oligonucleotide
  Sense strand starting at position 1044 of SEQ ID NO: 1245136
ccaucuccugcguuguauu

SEQ ID NO: 1539187 - RNA, 19 nt, Artificial Sequence
  Description of Artificial Sequence: Synthetic oligonucleotide
  Antisense strand to SEQ ID NO: 1539186
aauacaacgcaggagaugg

SEQ ID NO: 1539188 - RNA, 19 nt, Artificial Sequence
  Description of Artificial Sequence: Synthetic oligonucleotide
  Sense strand starting at position 1107 of SEQ ID NO: 1245136
augcaagacuaacuguaua

SEQ ID NO: 1539189 - RNA, 19 nt, Artificial Sequence
  Description of Artificial Sequence: Synthetic oligonucleotide
  Antisense strand to SEQ ID NO: 1539188
uauacaguuagucuugcau

SEQ ID NO: 1539190 - RNA, 19 nt, Artificial Sequence
  Description of Artificial Sequence: Synthetic oligonucleotide
  Sense strand starting at position 1136 of SEQ ID NO: 1245136
gccauugggaauggaguua

SEQ ID NO: 1539191 - RNA, 19 nt, Artificial Sequence
  Description of Artificial Sequence: Synthetic oligonucleotide
  Antisense strand to SEQ ID NO: 1539190
uaacuccauucccaauggc

SEQ ID NO: 1539192 - RNA, 19 nt, Artificial Sequence
  Description of Artificial Sequence: Synthetic oligonucleotide
  Sense strand starting at position 1236 of SEQ ID NO: 1245136
gggugaagucgagggaagu

SEQ ID NO: 1539193 - RNA, 19 nt, Artificial Sequence
  Description of Artificial Sequence: Synthetic oligonucleotide
  Antisense strand to SEQ ID NO: 1539192
acuucccucgacuucaccc

SEQ ID NO: 1539194 - RNA, 19 nt, Artificial Sequence
  Description of Artificial Sequence: Synthetic oligonucleotide
  Sense strand starting at position 1250 of SEQ ID NO: 1245136
gaagucccgccuuauaauc

SEQ ID NO: 1539195 - RNA, 19 nt, Artificial Sequence
  Description of Artificial Sequence: Synthetic oligonucleotide
  Antisense strand to SEQ ID NO: 1539194
gauuauaaggcgggacuuc

SEQ ID NO: 1539196 - RNA, 19 nt, Artificial Sequence
  Description of Artificial Sequence: Synthetic oligonucleotide
  Sense strand starting at position 1262 of SEQ ID NO: 1245136
uauaaucagugcuuaggau

SEQ ID NO: 1539197 - RNA, 19 nt, Artificial Sequence
  Description of Artificial Sequence: Synthetic oligonucleotide
  Antisense strand to SEQ ID NO: 1539196
auccuaagcacugauuaua

SEQ ID NO: 1539198 - RNA, 19 nt, Artificial Sequence
  Description of Artificial Sequence: Synthetic oligonucleotide
  Sense strand starting at position 1418 of SEQ ID NO: 1245136
ugagauugcaccuguggga

SEQ ID NO: 1539199 - RNA, 19 nt, Artificial Sequence
  Description of Artificial Sequence: Synthetic oligonucleotide
  Antisense strand to SEQ ID NO: 1539198
ucccacaggugcaaucuca

SEQ ID NO: 1539200 - RNA, 19 nt, Artificial Sequence
  Description of Artificial Sequence: Synthetic oligonucleotide
  Sense strand starting at position 1483 of SEQ ID NO: 1245136
auugauuaacgguacuaca

SEQ ID NO: 1539201 - RNA, 19 nt, Artificial Sequence
  Description of Artificial Sequence: Synthetic oligonucleotide
  Antisense strand to SEQ ID NO: 1539200
uguaguaccguuaaucaau

SEQ ID NO: 1539202 - RNA, 19 nt, Artificial Sequence
  Description of Artificial Sequence: Synthetic oligonucleotide
  Sense strand starting at position 1519 of SEQ ID NO: 1245136
cagguaagaugcuuaucau

SEQ ID NO: 1539203 - RNA, 19 nt, Artificial Sequence
  Description of Artificial Sequence: Synthetic oligonucleotide
  Antisense strand to SEQ ID NO: 1539202
augauaagcaucuuaccug

SEQ ID NO: 1539204 - RNA, 19 nt, Artificial Sequence
  Description of Artificial Sequence: Synthetic oligonucleotide
  Sense strand starting at position 1520 of SEQ ID NO: 1245136
agguaagaugcuuaucauu

SEQ ID NO: 1539205 - RNA, 19 nt, Artificial Sequence
  Description of Artificial Sequence: Synthetic oligonucleotide
  Antisense strand to SEQ ID NO: 1539204
aaugauaagcaucuuaccu

SEQ ID NO: 1539206 - RNA, 19 nt, Artificial Sequence
  Description of Artificial Sequence: Synthetic oligonucleotide
  Sense strand starting at position 2753 of SEQ ID NO: 1245136
cgcggagacgugagucuuu

SEQ ID NO: 1539207 - RNA, 19 nt, Artificial Sequence
  Description of Artificial Sequence: Synthetic oligonucleotide
  Antisense strand to SEQ ID NO: 1539206
aaagacucacgucuccgcg

SEQ ID NO: 1539208 - RNA, 19 nt, Artificial Sequence
  Description of Artificial Sequence: Synthetic oligonucleotide
  Sense strand starting at position 3027 of SEQ ID NO: 1245136
aagggacugacguguuuag

SEQ ID NO: 1539209 - RNA, 19 nt, Artificial Sequence
  Description of Artificial Sequence: Synthetic oligonucleotide
  Antisense strand to SEQ ID NO: 1539208
cuaaacacgucagucccuu

SEQ ID NO: 1539210 - RNA, 19 nt, Artificial Sequence
  Description of Artificial Sequence: Synthetic oligonucleotide
  Sense strand starting at position 3031 of SEQ ID NO: 1245136
gacugacguguuuagaaau

SEQ ID NO: 1539211 - RNA, 19 nt, Artificial Sequence
  Description of Artificial Sequence: Synthetic oligonucleotide
  Antisense strand to SEQ ID NO: 1539210
auuucuaaacacgucaguc

SEQ ID NO: 1539212 - RNA, 19 nt, Artificial Sequence
  Description of Artificial Sequence: Synthetic oligonucleotide
  Sense strand starting at position 3201 of SEQ ID NO: 1245136
agcauccucccuggagaaa

SEQ ID NO: 1539213 - RNA, 19 nt, Artificial Sequence
  Description of Artificial Sequence: Synthetic oligonucleotide
  Antisense strand to SEQ ID NO: 1539212
uuucuccagggaggaugcu

SEQ ID NO: 1539214 - RNA, 19 nt, Artificial Sequence
  Description of Artificial Sequence: Synthetic oligonucleotide
  Sense strand starting at position 3266 of SEQ ID NO: 1245136
gccucucuccugggaauga

SEQ ID NO: 1539215 - RNA, 19 nt, Artificial Sequence
  Description of Artificial Sequence: Synthetic oligonucleotide
  Antisense strand to SEQ ID NO: 1539214
ucauucccaggagagaggc

SEQ ID NO: 1539216 - RNA, 19 nt, Artificial Sequence
  Description of Artificial Sequence: Synthetic oligonucleotide
  Sense strand starting at position 3277 of SEQ ID NO: 1245136
gggaaugauuucuaaaugu

SEQ ID NO: 1539217 - RNA, 19 nt, Artificial Sequence
  Description of Artificial Sequence: Synthetic oligonucleotide
  Antisense strand to SEQ ID NO: 1539216
acauuuagaaaucauuccc

SEQ ID NO: 1539218 - RNA, 19 nt, Artificial Sequence
  Description of Artificial Sequence: Synthetic oligonucleotide
  Sense strand starting at position 3410 of SEQ ID NO: 1245136
gcacuugugcaacacauga

SEQ ID NO: 1539219 - RNA, 19 nt, Artificial Sequence
  Description of Artificial Sequence: Synthetic oligonucleotide
  Antisense strand to SEQ ID NO: 1539218
ucauguguugcacaagugc

SEQ ID NO: 1539220 - RNA, 19 nt, Artificial Sequence
  Description of Artificial Sequence: Synthetic oligonucleotide
  Sense strand starting at position 3415 of SEQ ID NO: 1245136
ugugcaacacaugaguuua

SEQ ID NO: 1539221 - RNA, 19 nt, Artificial Sequence
  Description of Artificial Sequence: Synthetic oligonucleotide
  Antisense strand to SEQ ID NO: 1539220
uaaacucauguguugcaca

SEQ ID NO: 1539222 - RNA, 19 nt, Artificial Sequence
  Description of Artificial Sequence: Synthetic oligonucleotide
  Sense strand starting at position 3427 of SEQ ID NO: 1245136
gaguuuaacgaguacuugu

SEQ ID NO: 1539223 - RNA, 19 nt, Artificial Sequence
  Description of Artificial Sequence: Synthetic oligonucleotide
  Antisense strand to SEQ ID NO: 1539222
acaaguacucguuaaacuc

SEQ ID NO: 1539224 - RNA, 19 nt, Artificial Sequence
  Description of Artificial Sequence: Synthetic oligonucleotide
  Sense strand starting at position 3622 of SEQ ID NO: 1245136
augugaguuugaccaccau

SEQ ID NO: 1539225 - RNA, 19 nt, Artificial Sequence
  Description of Artificial Sequence: Synthetic oligonucleotide
  Antisense strand to SEQ ID NO: 1539224
augguggucaaacucacau

SEQ ID NO: 1539226 - RNA, 19 nt, Artificial Sequence
  Description of Artificial Sequence: Synthetic oligonucleotide
  Sense strand starting at position 3776 of SEQ ID NO: 1245136
cacuacuguggaugauuaa

SEQ ID NO: 1539227 - RNA, 19 nt, Artificial Sequence
  Description of Artificial Sequence: Synthetic oligonucleotide
  Antisense strand to SEQ ID NO: 1539226
uuaaucauccacaguagug

SEQ ID NO: 1539228 - RNA, 19 nt, Artificial Sequence
  Description of Artificial Sequence: Synthetic oligonucleotide
  Sense strand starting at position 3788 of SEQ ID NO: 1245136
ugauuaacagccugugauu

SEQ ID NO: 1539229 - RNA, 19 nt, Artificial Sequence
  Description of Artificial Sequence: Synthetic oligonucleotide
  Antisense strand to SEQ ID NO: 1539228
aaucacaggcuguuaauca

SEQ ID NO: 1539230 - RNA, 19 nt, Artificial Sequence
  Description of Artificial Sequence: Synthetic oligonucleotide
  Sense strand starting at position 3790 of SEQ ID NO: 1245136
auuaacagccugugauuaa

SEQ ID NO: 1539231 - RNA, 19 nt, Artificial Sequence
  Description of Artificial Sequence: Synthetic oligonucleotide
  Antisense strand to SEQ ID NO: 1539230
uuaaucacaggcuguuaau

SEQ ID NO: 1539232 - RNA, 19 nt, Artificial Sequence
  Description of Artificial Sequence: Synthetic oligonucleotide
  Sense strand starting at position 3794 of SEQ ID NO: 1245136
acagccugugauuaaaugu

SEQ ID NO: 1539233 - RNA, 19 nt, Artificial Sequence
  Description of Artificial Sequence: Synthetic oligonucleotide
  Antisense strand to SEQ ID NO: 1539232
acauuuaaucacaggcugu

SEQ ID NO: 1539234 - RNA, 19 nt, Artificial Sequence
  Description of Artificial Sequence: Synthetic oligonucleotide
  Sense strand starting at position 3873 of SEQ ID NO: 1245136
uuaagaauucuauguaugg

SEQ ID NO: 1539235 - RNA, 19 nt, Artificial Sequence
  Description of Artificial Sequence: Synthetic oligonucleotide
  Antisense strand to SEQ ID NO: 1539234
ccauacauagaauucuuaa

SEQ ID NO: 1539236 - RNA, 19 nt, Artificial Sequence
  Description of Artificial Sequence: Synthetic oligonucleotide
  Sense strand starting at position 3874 of SEQ ID NO: 1245136
uaagaauucuauguaugga

SEQ ID NO: 1539237 - RNA, 19 nt, Artificial Sequence
  Description of Artificial Sequence: Synthetic oligonucleotide
  Antisense strand to SEQ ID NO: 1539236
uccauacauagaauucuua

SEQ ID NO: 1539238 - RNA, 19 nt, Artificial Sequence
  Description of Artificial Sequence: Synthetic oligonucleotide
  Sense strand starting at position 3877 of SEQ ID NO: 1245136
gaauucuauguauggacau

SEQ ID NO: 1539239 - RNA, 19 nt, Artificial Sequence
  Description of Artificial Sequence: Synthetic oligonucleotide
  Antisense strand to SEQ ID NO: 1539238
auguccauacauagaauuc

SEQ ID NO: 1539240 - RNA, 19 nt, Artificial Sequence
  Description of Artificial Sequence: Synthetic oligonucleotide
  Sense strand starting at position 3889 of SEQ ID NO: 1245136
uggacauaaugugucugau

SEQ ID NO: 1539241 - RNA, 19 nt, Artificial Sequence
  Description of Artificial Sequence: Synthetic oligonucleotide
  Antisense strand to SEQ ID NO: 1539240
aucagacacauuaugucca

SEQ ID NO: 1539242 - RNA, 19 nt, Artificial Sequence
  Description of Artificial Sequence: Synthetic oligonucleotide
  Sense strand starting at position 3891 of SEQ ID NO: 1245136
gacauaaugugucugauuc

SEQ ID NO: 1539243 - RNA, 19 nt, Artificial Sequence
  Description of Artificial Sequence: Synthetic oligonucleotide
  Antisense strand to SEQ ID NO: 1539242
gaaucagacacauuauguc

SEQ ID NO: 1539244 - RNA, 19 nt, Artificial Sequence
  Description of Artificial Sequence: Synthetic oligonucleotide
  Sense strand starting at position 116 of SEQ ID NO: 1245137
aucuacuguucucuggaau

SEQ ID NO: 1539245 - RNA, 19 nt, Artificial Sequence
  Description of Artificial Sequence: Synthetic oligonucleotide
  Antisense strand to SEQ ID NO: 1539244
auuccagagaacaguagau

SEQ ID NO: 1539246 - RNA, 19 nt, Artificial Sequence
  Description of Artificial Sequence: Synthetic oligonucleotide
  Sense strand starting at position 117 of SEQ ID NO: 1245137
ucuacuguucucuggaaua

SEQ ID NO: 1539247 - RNA, 19 nt, Artificial Sequence
  Description of Artificial Sequence: Synthetic oligonucleotide
  Antisense strand to SEQ ID NO: 1539246
uauuccagagaacaguaga

SEQ ID NO: 1539248 - RNA, 19 nt, Artificial Sequence
  Description of Artificial Sequence: Synthetic oligonucleotide
  Sense strand starting at position 122 of SEQ ID NO: 1245137
uguucucuggaauaagguu

SEQ ID NO: 1539249 - RNA, 19 nt, Artificial Sequence
  Description of Artificial Sequence: Synthetic oligonucleotide
  Antisense strand to SEQ ID NO: 1539248
aaccuuauuccagagaaca

SEQ ID NO: 1539250 - RNA, 19 nt, Artificial Sequence
  Description of Artificial Sequence: Synthetic oligonucleotide
  Sense strand starting at position 131 of SEQ ID NO: 1245137
gaauaagguuuccuggagu

SEQ ID NO: 1539251 - RNA, 19 nt, Artificial Sequence
  Description of Artificial Sequence: Synthetic oligonucleotide
  Antisense strand to SEQ ID NO: 1539250
acuccaggaaaccuuauuc

SEQ ID NO: 1539252 - RNA, 19 nt, Artificial Sequence
  Description of Artificial Sequence: Synthetic oligonucleotide
  Sense strand starting at position 134 of SEQ ID NO: 1245137
uaagguuuccuggaguaca

SEQ ID NO: 1539253 - RNA, 19 nt, Artificial Sequence
  Description of Artificial Sequence: Synthetic oligonucleotide
  Antisense strand to SEQ ID NO: 1539252
uguacuccaggaaaccuua

SEQ ID NO: 1539254 - RNA, 19 nt, Artificial Sequence
  Description of Artificial Sequence: Synthetic oligonucleotide
  Sense strand starting at position 137 of SEQ ID NO: 1245137
gguuuccuggaguacaagu

SEQ ID NO: 1539255 - RNA, 19 nt, Artificial Sequence
  Description of Artificial Sequence: Synthetic oligonucleotide
  Antisense strand to SEQ ID NO: 1539254
acuuguacuccaggaaacc

SEQ ID NO: 1539256 - RNA, 19 nt, Artificial Sequence
  Description of Artificial Sequence: Synthetic oligonucleotide
  Sense strand starting at position 217 of SEQ ID NO: 1245137
ugacaacugugcucuaaga

SEQ ID NO: 1539257 - RNA, 19 nt, Artificial Sequence
  Description of Artificial Sequence: Synthetic oligonucleotide
  Antisense strand to SEQ ID NO: 1539256
ucuuagagcacaguuguca

SEQ ID NO: 1539258 - RNA, 19 nt, Artificial Sequence
  Description of Artificial Sequence: Synthetic oligonucleotide
  Sense strand starting at position 219 of SEQ ID NO: 1245137
acaacugugcucuaagaca

SEQ ID NO: 1539259 - RNA, 19 nt, Artificial Sequence
  Description of Artificial Sequence: Synthetic oligonucleotide
  Antisense strand to SEQ ID NO: 1539258
ugucuuagagcacaguugu

SEQ ID NO: 1539260 - RNA, 19 nt, Artificial Sequence
  Description of Artificial Sequence: Synthetic oligonucleotide
  Sense strand starting at position 314 of SEQ ID NO: 1245137
cccaucuuccgguaucaga

SEQ ID NO: 1539261 - RNA, 19 nt, Artificial Sequence
  Description of Artificial Sequence: Synthetic oligonucleotide
  Antisense strand to SEQ ID NO: 1539260
ucugauaccggaagauggg

SEQ ID NO: 1539262 - RNA, 19 nt, Artificial Sequence
  Description of Artificial Sequence: Synthetic oligonucleotide
  Sense strand starting at position 322 of SEQ ID NO: 1245137
ccgguaucagacugauaca

SEQ ID NO: 1539263 - RNA, 19 nt, Artificial Sequence
  Description of Artificial Sequence: Synthetic oligonucleotide
  Antisense strand to SEQ ID NO: 1539262
uguaucagucugauaccgg

SEQ ID NO: 1539264 - RNA, 19 nt, Artificial Sequence
  Description of Artificial Sequence: Synthetic oligonucleotide
  Sense strand starting at position 362 of SEQ ID NO: 1245137
augacaauugaaugagugu

SEQ ID NO: 1539265 - RNA, 19 nt, Artificial Sequence
  Description of Artificial Sequence: Synthetic oligonucleotide
  Antisense strand to SEQ ID NO: 1539264
acacucauucaauugucau

SEQ ID NO: 1539266 - RNA, 19 nt, Artificial Sequence
  Description of Artificial Sequence: Synthetic oligonucleotide
  Sense strand starting at position 365 of SEQ ID NO: 1245137
acaauugaaugagugucau

SEQ ID NO: 1539267 - RNA, 19 nt, Artificial Sequence
  Description of Artificial Sequence: Synthetic oligonucleotide
  Antisense strand to SEQ ID NO: 1539266
augacacucauucaauugu

SEQ ID NO: 1539268 - RNA, 19 nt, Artificial Sequence
  Description of Artificial Sequence: Synthetic oligonucleotide
  Sense strand starting at position 394 of SEQ ID NO: 1245137
gcauuuguacuuuauugca

SEQ ID NO: 1539269 - RNA, 19 nt, Artificial Sequence
  Description of Artificial Sequence: Synthetic oligonucleotide
  Antisense strand to SEQ ID NO: 1539268
ugcaauaaaguacaaaugc

SEQ ID NO: 1539270 - RNA, 19 nt, Artificial Sequence
  Description of Artificial Sequence: Synthetic oligonucleotide
  Sense strand starting at position 574 of SEQ ID NO: 1245137
caaaguguuccugagguuu

SEQ ID NO: 1539271 - RNA, 19 nt, Artificial Sequence
  Description of Artificial Sequence: Synthetic oligonucleotide
  Antisense strand to SEQ ID NO: 1539270
aaaccucaggaacacuuug

SEQ ID NO: 1539272 - RNA, 19 nt, Artificial Sequence
  Description of Artificial Sequence: Synthetic oligonucleotide
  Sense strand starting at position 686 of SEQ ID NO: 1245137
cagcgaauccuauacggaa

SEQ ID NO: 1539273 - RNA, 19 nt, Artificial Sequence
  Description of Artificial Sequence: Synthetic oligonucleotide
  Antisense strand to SEQ ID NO: 1539272
uuccguauaggauucgcug

SEQ ID NO: 1539274 - RNA, 19 nt, Artificial Sequence
  Description of Artificial Sequence: Synthetic oligonucleotide
  Sense strand starting at position 1457 of SEQ ID NO: 1245137
cauggaauuccugggaguc

SEQ ID NO: 1539275 - RNA, 19 nt, Artificial Sequence
  Description of Artificial Sequence: Synthetic oligonucleotide
  Antisense strand to SEQ ID NO: 1539274
gacucccaggaauuccaug

SEQ ID NO: 1539276 - RNA, 19 nt, Artificial Sequence
  Description of Artificial Sequence: Synthetic oligonucleotide
  Sense strand starting at position 2192 of SEQ ID NO: 1245137
ggcgaaaggguuugggaua

SEQ ID NO: 1539277 - RNA, 19 nt, Artificial Sequence
  Description of Artificial Sequence: Synthetic oligonucleotide
  Antisense strand to SEQ ID NO: 1539276
uaucccaaacccuuucgcc

SEQ ID NO: 1539278 - RNA, 19 nt, Artificial Sequence
  Description of Artificial Sequence: Synthetic oligonucleotide
  Sense strand starting at position 2205 of SEQ ID NO: 1245137
gggauaagggucuacguua

SEQ ID NO: 1539279 - RNA, 19 nt, Artificial Sequence
  Description of Artificial Sequence: Synthetic oligonucleotide
  Antisense strand to SEQ ID NO: 1539278
uaacguagacccuuauccc

SEQ ID NO: 1539280 - RNA, 19 nt, Artificial Sequence
  Description of Artificial Sequence: Synthetic oligonucleotide
  Sense strand starting at position 2380 of SEQ ID NO: 1245137
gcgaaugagggacauguuu

SEQ ID NO: 1539281 - RNA, 19 nt, Artificial Sequence
  Description of Artificial Sequence: Synthetic oligonucleotide
  Antisense strand to SEQ ID NO: 1539280
aaacaugucccucauucgc

SEQ ID NO: 1539282 - RNA, 19 nt, Artificial Sequence
  Description of Artificial Sequence: Synthetic oligonucleotide
  Sense strand starting at position 2386 of SEQ ID NO: 1245137
gagggacauguuuaucagu

SEQ ID NO: 1539283 - RNA, 19 nt, Artificial Sequence
  Description of Artificial Sequence: Synthetic oligonucleotide
  Antisense strand to SEQ ID NO: 1539282
acugauaaacaugucccuc

SEQ ID NO: 1539284 - RNA, 19 nt, Artificial Sequence
  Description of Artificial Sequence: Synthetic oligonucleotide
  Sense strand starting at position 2663 of SEQ ID NO: 1245137
ccuccaauucuugaaaggu

SEQ ID NO: 1539285 - RNA, 19 nt, Artificial Sequence
  Description of Artificial Sequence: Synthetic oligonucleotide
  Antisense strand to SEQ ID NO: 1539284
accuuucaagaauuggagg

SEQ ID NO: 1539286 - RNA, 19 nt, Artificial Sequence
  Description of Artificial Sequence: Synthetic oligonucleotide
  Sense strand starting at position 2672 of SEQ ID NO: 1245137
cuugaaaggugaucucaca

SEQ ID NO: 1539287 - RNA, 19 nt, Artificial Sequence
  Description of Artificial Sequence: Synthetic oligonucleotide
  Antisense strand to SEQ ID NO: 1539286
ugugagaucaccuuucaag

SEQ ID NO: 1539288 - RNA, 19 nt, Artificial Sequence
  Description of Artificial Sequence: Synthetic oligonucleotide
  Sense strand starting at position 2864 of SEQ ID NO: 1245137
gaaguaccagaauguuaag

SEQ ID NO: 1539289 - RNA, 19 nt, Artificial Sequence
  Description of Artificial Sequence: Synthetic oligonucleotide
  Antisense strand to SEQ ID NO: 1539288
cuuaacauucugguacuuc

SEQ ID NO: 1539290 - RNA, 19 nt, Artificial Sequence
  Description of Artificial Sequence: Synthetic oligonucleotide
  Sense strand starting at position 2952 of SEQ ID NO: 1245137
gcaucuaaucaauguacag

SEQ ID NO: 1539291 - RNA, 19 nt, Artificial Sequence
  Description of Artificial Sequence: Synthetic oligonucleotide
  Antisense strand to SEQ ID NO: 1539290
cuguacauugauuagaugc

SEQ ID NO: 1539292 - RNA, 19 nt, Artificial Sequence
  Description of Artificial Sequence: Synthetic oligonucleotide
  Sense strand starting at position 3046 of SEQ ID NO: 1245137
augacucguuaagugaaua

SEQ ID NO: 1539293 - RNA, 19 nt, Artificial Sequence
  Description of Artificial Sequence: Synthetic oligonucleotide
  Antisense strand to SEQ ID NO: 1539292
uauucacuuaacgagucau

SEQ ID NO: 1539294 - RNA, 19 nt, Artificial Sequence
  Description of Artificial Sequence: Synthetic oligonucleotide
  Sense strand starting at position 3047 of SEQ ID NO: 1245137
ugacucguuaagugaauaa

SEQ ID NO: 1539295 - RNA, 19 nt, Artificial Sequence
  Description of Artificial Sequence: Synthetic oligonucleotide
  Antisense strand to SEQ ID NO: 1539294
uuauucacuuaacgaguca

SEQ ID NO: 1539296 - RNA, 19 nt, Artificial Sequence
  Description of Artificial Sequence: Synthetic oligonucleotide
  Sense strand starting at position 3051 of SEQ ID NO: 1245137
ucguuaagugaauaaagcu

SEQ ID NO: 1539297 - RNA, 19 nt, Artificial Sequence
  Description of Artificial Sequence: Synthetic oligonucleotide
  Antisense strand to SEQ ID NO: 1539296
agcuuuauucacuuaacga

SEQ ID NO: 1539298 - RNA, 19 nt, Artificial Sequence
  Description of Artificial Sequence: Synthetic oligonucleotide
  Sense strand starting at position 3415 of SEQ ID NO: 1245137
aaaugaagccauuggucua

SEQ ID NO: 1539299 - RNA, 19 nt, Artificial Sequence
  Description of Artificial Sequence: Synthetic oligonucleotide
  Antisense strand to SEQ ID NO: 1539298
uagaccaauggcuucauuu

SEQ ID NO: 1539300 - RNA, 19 nt, Artificial Sequence
  Description of Artificial Sequence: Synthetic oligonucleotide
  Sense strand starting at position 3441 of SEQ ID NO: 1245137
ucuaauauucuuugauggu

SEQ ID NO: 1539301 - RNA, 19 nt, Artificial Sequence
  Description of Artificial Sequence: Synthetic oligonucleotide
  Antisense strand to SEQ ID NO: 1539300
accaucaaagaauauuaga

SEQ ID NO: 1539302 - RNA, 19 nt, Artificial Sequence
  Description of Artificial Sequence: Synthetic oligonucleotide
  Sense strand starting at position 3564 of SEQ ID NO: 1245137
uggacucuuaagcggaaga

SEQ ID NO: 1539303 - RNA, 19 nt, Artificial Sequence
  Description of Artificial Sequence: Synthetic oligonucleotide
  Antisense strand to SEQ ID NO: 1539302
ucuuccgcuuaagagucca

SEQ ID NO: 1539304 - RNA, 19 nt, Artificial Sequence
  Description of Artificial Sequence: Synthetic oligonucleotide
  Sense strand starting at position 3565 of SEQ ID NO: 1245137
ggacucuuaagcggaagau

SEQ ID NO: 1539305 - RNA, 19 nt, Artificial Sequence
  Description of Artificial Sequence: Synthetic oligonucleotide
  Antisense strand to SEQ ID NO: 1539304
aucuuccgcuuaagagucc

SEQ ID NO: 1539306 - RNA, 19 nt, Artificial Sequence
  Description of Artificial Sequence: Synthetic oligonucleotide
  Sense strand starting at position 3566 of SEQ ID NO: 1245137
gacucuuaagcggaagauc

SEQ ID NO: 1539307 - RNA, 19 nt, Artificial Sequence
  Description of Artificial Sequence: Synthetic oligonucleotide
  Antisense strand to SEQ ID NO: 1539306
gaucuuccgcuuaagaguc

SEQ ID NO: 1539308 - RNA, 19 nt, Artificial Sequence
  Description of Artificial Sequence: Synthetic oligonucleotide
  Sense strand starting at position 3694 of SEQ ID NO: 1245137
gugugacuucccuauccug

SEQ ID NO: 1539309 - RNA, 19 nt, Artificial Sequence
  Description of Artificial Sequence: Synthetic oligonucleotide
  Antisense strand to SEQ ID NO: 1539308
caggauagggaagucacac

SEQ ID NO: 1539310 - RNA, 19 nt, Artificial Sequence
  Description of Artificial Sequence: Synthetic oligonucleotide
  Sense strand starting at position 3725 of SEQ ID NO: 1245137
ccaucuuggccguaaagac

SEQ ID NO: 1539311 - RNA, 19 nt, Artificial Sequence
  Description of Artificial Sequence: Synthetic oligonucleotide
  Antisense strand to SEQ ID NO: 1539310
gucuuuacggccaagaugg

SEQ ID NO: 1539312 - RNA, 19 nt, Artificial Sequence
  Description of Artificial Sequence: Synthetic oligonucleotide
  Sense strand starting at position 3733 of SEQ ID NO: 1245137
gccguaaagacucauagag

SEQ ID NO: 1539313 - RNA, 19 nt, Artificial Sequence
  Description of Artificial Sequence: Synthetic oligonucleotide
  Antisense strand to SEQ ID NO: 1539312
cucuaugagucuuuacggc

SEQ ID NO: 1539314 - RNA, 19 nt, Artificial Sequence
  Description of Artificial Sequence: Synthetic oligonucleotide
  Sense strand starting at position 3884 of SEQ ID NO: 1245137
gugcauugaacugaucaag

SEQ ID NO: 1539315 - RNA, 19 nt, Artificial Sequence
  Description of Artificial Sequence: Synthetic oligonucleotide
  Antisense strand to SEQ ID NO: 1539314
cuugaucaguucaaugcac

SEQ ID NO: 1539316 - RNA, 19 nt, Artificial Sequence
  Description of Artificial Sequence: Synthetic oligonucleotide
  Sense strand starting at position 3936 of SEQ ID NO: 1245137
auaggaaguugucuaagag

SEQ ID NO: 1539317 - RNA, 19 nt, Artificial Sequence
  Description of Artificial Sequence: Synthetic oligonucleotide
  Antisense strand to SEQ ID NO: 1539316
cucuuagacaacuuccuau

SEQ ID NO: 1539318 - RNA, 19 nt, Artificial Sequence
  Description of Artificial Sequence: Synthetic oligonucleotide
  Sense strand starting at position 3937 of SEQ ID NO: 1245137
uaggaaguugucuaagagu

SEQ ID NO: 1539319 - RNA, 19 nt, Artificial Sequence
  Description of Artificial Sequence: Synthetic oligonucleotide
  Antisense strand to SEQ ID NO: 1539318
acucuuagacaacuuccua

SEQ ID NO: 1539320 - RNA, 19 nt, Artificial Sequence
  Description of Artificial Sequence: Synthetic oligonucleotide
  Sense strand starting at position 3962 of SEQ ID NO: 1245137
gccaacuugucauugagau

SEQ ID NO: 1539321 - RNA, 19 nt, Artificial Sequence
  Description of Artificial Sequence: Synthetic oligonucleotide
  Antisense strand to SEQ ID NO: 1539320
aucucaaugacaaguuggc

SEQ ID NO: 1539322 - RNA, 19 nt, Artificial Sequence
  Description of Artificial Sequence: Synthetic oligonucleotide
  Sense strand starting at position 3963 of SEQ ID NO: 1245137
ccaacuugucauugagaug

SEQ ID NO: 1539323 - RNA, 19 nt, Artificial Sequence
  Description of Artificial Sequence: Synthetic oligonucleotide
  Antisense strand to SEQ ID NO: 1539322
caucucaaugacaaguugg

SEQ ID NO: 1539324 - RNA, 19 nt, Artificial Sequence
  Description of Artificial Sequence: Synthetic oligonucleotide
  Sense strand starting at position 57 of SEQ ID NO: 1245138
guaucucauuuacauguau

SEQ ID NO: 1539325 - RNA, 19 nt, Artificial Sequence
  Description of Artificial Sequence: Synthetic oligonucleotide
  Antisense strand to SEQ ID NO: 1539324
auacauguaaaugagauac

SEQ ID NO: 1539326 - RNA, 19 nt, Artificial Sequence
  Description of Artificial Sequence: Synthetic oligonucleotide
  Sense strand starting at position 107 of SEQ ID NO: 1245138
ugagaaaccuaggcuuaga

SEQ ID NO: 1539327 - RNA, 19 nt, Artificial Sequence
  Description of Artificial Sequence: Synthetic oligonucleotide
  Antisense strand to SEQ ID NO: 1539326
ucuaagccuagguuucuca

SEQ ID NO: 1539328 - RNA, 19 nt, Artificial Sequence
  Description of Artificial Sequence: Synthetic oligonucleotide
  Sense strand starting at position 122 of SEQ ID NO: 1245138
uagaaagauugugugacuu

SEQ ID NO: 1539329 - RNA, 19 nt, Artificial Sequence
  Description of Artificial Sequence: Synthetic oligonucleotide
  Antisense strand to SEQ ID NO: 1539328
aagucacacaaucuuucua

SEQ ID NO: 1539330 - RNA, 19 nt, Artificial Sequence
  Description of Artificial Sequence: Synthetic oligonucleotide
  Sense strand starting at position 171 of SEQ ID NO: 1245138
aaggcaguugcaugagauc

SEQ ID NO: 1539331 - RNA, 19 nt, Artificial Sequence
  Description of Artificial Sequence: Synthetic oligonucleotide
  Antisense strand to SEQ ID NO: 1539330
gaucucaugcaacugccuu

SEQ ID NO: 1539332 - RNA, 19 nt, Artificial Sequence
  Description of Artificial Sequence: Synthetic oligonucleotide
  Sense strand starting at position 177 of SEQ ID NO: 1245138
guugcaugagaucgagugu

SEQ ID NO: 1539333 - RNA, 19 nt, Artificial Sequence
  Description of Artificial Sequence: Synthetic oligonucleotide
  Antisense strand to SEQ ID NO: 1539332
acacucgaucucaugcaac

SEQ ID NO: 1539334 - RNA, 19 nt, Artificial Sequence
  Description of Artificial Sequence: Synthetic oligonucleotide
  Sense strand starting at position 178 of SEQ ID NO: 1245138
uugcaugagaucgaguguu

SEQ ID NO: 1539335 - RNA, 19 nt, Artificial Sequence
  Description of Artificial Sequence: Synthetic oligonucleotide
  Antisense strand to SEQ ID NO: 1539334
aacacucgaucucaugcaa

SEQ ID NO: 1539336 - RNA, 19 nt, Artificial Sequence
  Description of Artificial Sequence: Synthetic oligonucleotide
  Sense strand starting at position 184 of SEQ ID NO: 1245138
gagaucgaguguuuggauu

SEQ ID NO: 1539337 - RNA, 19 nt, Artificial Sequence
  Description of Artificial Sequence: Synthetic oligonucleotide
  Antisense strand to SEQ ID NO: 1539336
aauccaaacacucgaucuc

SEQ ID NO: 1539338 - RNA, 19 nt, Artificial Sequence
  Description of Artificial Sequence: Synthetic oligonucleotide
  Sense strand starting at position 197 of SEQ ID NO: 1245138
uggauucuauaagccagua

SEQ ID NO: 1539339 - RNA, 19 nt, Artificial Sequence
  Description of Artificial Sequence: Synthetic oligonucleotide
  Antisense strand to SEQ ID NO: 1539338
uacuggcuuauagaaucca

SEQ ID NO: 1539340 - RNA, 19 nt, Artificial Sequence
  Description of Artificial Sequence: Synthetic oligonucleotide
  Sense strand starting at position 253 of SEQ ID NO: 1245138
gccugcuggguguuuaagu

SEQ ID NO: 1539341 - RNA, 19 nt, Artificial Sequence
  Description of Artificial Sequence: Synthetic oligonucleotide
  Antisense strand to SEQ ID NO: 1539340
acuuaaacacccagcaggc

SEQ ID NO: 1539342 - RNA, 19 nt, Artificial Sequence
  Description of Artificial Sequence: Synthetic oligonucleotide
  Sense strand starting at position 258 of SEQ ID NO: 1245138
cuggguguuuaaguuauuu

SEQ ID NO: 1539343 - RNA, 19 nt, Artificial Sequence
  Description of Artificial Sequence: Synthetic oligonucleotide
  Antisense strand to SEQ ID NO: 1539342
aaauaacuuaaacacccag

SEQ ID NO: 1539344 - RNA, 19 nt, Artificial Sequence
  Description of Artificial Sequence: Synthetic oligonucleotide
  Sense strand starting at position 262 of SEQ ID NO: 1245138
guguuuaaguuauuuacca

SEQ ID NO: 1539345 - RNA, 19 nt, Artificial Sequence
  Description of Artificial Sequence: Synthetic oligonucleotide
  Antisense strand to SEQ ID NO: 1539344
ugguaaauaacuuaaacac

SEQ ID NO: 1539346 - RNA, 19 nt, Artificial Sequence
  Description of Artificial Sequence: Synthetic oligonucleotide
  Sense strand starting at position 355 of SEQ ID NO: 1245138
gaaaguagcugggcaucau

SEQ ID NO: 1539347 - RNA, 19 nt, Artificial Sequence
  Description of Artificial Sequence: Synthetic oligonucleotide
  Antisense strand to SEQ ID NO: 1539346
augaugcccagcuacuuuc

SEQ ID NO: 1539348 - RNA, 19 nt, Artificial Sequence
  Description of Artificial Sequence: Synthetic oligonucleotide
  Sense strand starting at position 446 of SEQ ID NO: 1245138
ugcugugagccaugauagu

SEQ ID NO: 1539349 - RNA, 19 nt, Artificial Sequence
  Description of Artificial Sequence: Synthetic oligonucleotide
  Antisense strand to SEQ ID NO: 1539348
acuaucauggcucacagca

SEQ ID NO: 1539350 - RNA, 19 nt, Artificial Sequence
  Description of Artificial Sequence: Synthetic oligonucleotide
  Sense strand starting at position 872 of SEQ ID NO: 1245138
ggccaaucucaucagugga

SEQ ID NO: 1539351 - RNA, 19 nt, Artificial Sequence
  Description of Artificial Sequence: Synthetic oligonucleotide
  Antisense strand to SEQ ID NO: 1539350
uccacugaugagauuggcc

SEQ ID NO: 1539352 - RNA, 19 nt, Artificial Sequence
  Description of Artificial Sequence: Synthetic oligonucleotide
  Sense strand starting at position 1044 of SEQ ID NO: 1245138
uuagguaggagucagaguu

SEQ ID NO: 1539353 - RNA, 19 nt, Artificial Sequence
  Description of Artificial Sequence: Synthetic oligonucleotide
  Antisense strand to SEQ ID NO: 1539352
aacucugacuccuaccuaa

SEQ ID NO: 1539354 - RNA, 19 nt, Artificial Sequence
  Description of Artificial Sequence: Synthetic oligonucleotide
  Sense strand starting at position 1124 of SEQ ID NO: 1245138
cguguuugcggguaauuuc

SEQ ID NO: 1539355 - RNA, 19 nt, Artificial Sequence
  Description of Artificial Sequence: Synthetic oligonucleotide
  Antisense strand to SEQ ID NO: 1539354
gaaauuacccgcaaacacg

SEQ ID NO: 1539356 - RNA, 19 nt, Artificial Sequence
  Description of Artificial Sequence: Synthetic oligonucleotide
  Sense strand starting at position 1234 of SEQ ID NO: 1245138
cccagagaggucuggaacu

SEQ ID NO: 1539357 - RNA, 19 nt, Artificial Sequence
  Description of Artificial Sequence: Synthetic oligonucleotide
  Antisense strand to SEQ ID NO: 1539356
aguuccagaccucucuggg

SEQ ID NO: 1539358 - RNA, 19 nt, Artificial Sequence
  Description of Artificial Sequence: Synthetic oligonucleotide
  Sense strand starting at position 1245 of SEQ ID NO: 1245138
cuggaacuucuccaaguca

SEQ ID NO: 1539359 - RNA, 19 nt, Artificial Sequence
  Description of Artificial Sequence: Synthetic oligonucleotide
  Antisense strand to SEQ ID NO: 1539358
ugacuuggagaaguuccag

SEQ ID NO: 1539360 - RNA, 19 nt, Artificial Sequence
  Description of Artificial Sequence: Synthetic oligonucleotide
  Sense strand starting at position 1422 of SEQ ID NO: 1245138
gcugcuauugccuauuaug

SEQ ID NO: 1539361 - RNA, 19 nt, Artificial Sequence
  Description of Artificial Sequence: Synthetic oligonucleotide
  Antisense strand to SEQ ID NO: 1539360
cauaauaggcaauagcagc

SEQ ID NO: 1539362 - RNA, 19 nt, Artificial Sequence
  Description of Artificial Sequence: Synthetic oligonucleotide
  Sense strand starting at position 1523 of SEQ ID NO: 1245138
aguggaaaguuucuggaua

SEQ ID NO: 1539363 - RNA, 19 nt, Artificial Sequence
  Description of Artificial Sequence: Synthetic oligonucleotide
  Antisense strand to SEQ ID NO: 1539362
uauccagaaacuuuccacu

SEQ ID NO: 1539364 - RNA, 19 nt, Artificial Sequence
  Description of Artificial Sequence: Synthetic oligonucleotide
  Sense strand starting at position 1531 of SEQ ID NO: 1245138
guuucuggauacuuauaca

SEQ ID NO: 1539365 - RNA, 19 nt, Artificial Sequence
  Description of Artificial Sequence: Synthetic oligonucleotide
  Antisense strand to SEQ ID NO: 1539364
uguauaaguauccagaaac

SEQ ID NO: 1539366 - RNA, 19 nt, Artificial Sequence
  Description of Artificial Sequence: Synthetic oligonucleotide
  Sense strand starting at position 1545 of SEQ ID NO: 1245138
auacaauugcuccaaggca

SEQ ID NO: 1539367 - RNA, 19 nt, Artificial Sequence
  Description of Artificial Sequence: Synthetic oligonucleotide
  Antisense strand to SEQ ID NO: 1539366
ugccuuggagcaauuguau

SEQ ID NO: 1539368 - RNA, 19 nt, Artificial Sequence
  Description of Artificial Sequence: Synthetic oligonucleotide
  Sense strand starting at position 2489 of SEQ ID NO: 1245138
agaggcaggucaucauuga

SEQ ID NO: 1539369 - RNA, 19 nt, Artificial Sequence
  Description of Artificial Sequence: Synthetic oligonucleotide
  Antisense strand to SEQ ID NO: 1539368
ucaaugaugaccugccucu

SEQ ID NO: 1539370 - RNA, 19 nt, Artificial Sequence
  Description of Artificial Sequence: Synthetic oligonucleotide
  Sense strand starting at position 2490 of SEQ ID NO: 1245138
gaggcaggucaucauugau

SEQ ID NO: 1539371 - RNA, 19 nt, Artificial Sequence
  Description of Artificial Sequence: Synthetic oligonucleotide
  Antisense strand to SEQ ID NO: 1539370
aucaaugaugaccugccuc

SEQ ID NO: 1539372 - RNA, 19 nt, Artificial Sequence
  Description of Artificial Sequence: Synthetic oligonucleotide
  Sense strand starting at position 2493 of SEQ ID NO: 1245138
gcaggucaucauugauuac

SEQ ID NO: 1539373 - RNA, 19 nt, Artificial Sequence
  Description of Artificial Sequence: Synthetic oligonucleotide
  Antisense strand to SEQ ID NO: 1539372
guaaucaaugaugaccugc

SEQ ID NO: 1539374 - RNA, 19 nt, Artificial Sequence
  Description of Artificial Sequence: Synthetic oligonucleotide
  Sense strand starting at position 2505 of SEQ ID NO: 1245138
ugauuacacccguacugau

SEQ ID NO: 1539375 - RNA, 19 nt, Artificial Sequence
  Description of Artificial Sequence: Synthetic oligonucleotide
  Antisense strand to SEQ ID NO: 1539374
aucaguacggguguaauca

SEQ ID NO: 1539376 - RNA, 19 nt, Artificial Sequence
  Description of Artificial Sequence: Synthetic oligonucleotide
  Sense strand starting at position 2599 of SEQ ID NO: 1245138
aggucaggcguuugaaauc

SEQ ID NO: 1539377 - RNA, 19 nt, Artificial Sequence
  Description of Artificial Sequence: Synthetic oligonucleotide
  Antisense strand to SEQ ID NO: 1539376
gauuucaaacgccugaccu

SEQ ID NO: 1539378 - RNA, 19 nt, Artificial Sequence
  Description of Artificial Sequence: Synthetic oligonucleotide
  Sense strand starting at position 2631 of SEQ ID NO: 1245138
cggcgaaaucccgccucua

SEQ ID NO: 1539379 - RNA, 19 nt, Artificial Sequence
  Description of Artificial Sequence: Synthetic oligonucleotide
  Antisense strand to SEQ ID NO: 1539378
uagaggcgggauuucgccg

SEQ ID NO: 1539380 - RNA, 19 nt, Artificial Sequence
  Description of Artificial Sequence: Synthetic oligonucleotide
  Sense strand starting at position 3181 of SEQ ID NO: 1245138
agcagaaaccugugaaauu

SEQ ID NO: 1539381 - RNA, 19 nt, Artificial Sequence
  Description of Artificial Sequence: Synthetic oligonucleotide
  Antisense strand to SEQ ID NO: 1539380
aauuucacagguuucugcu

SEQ ID NO: 1539382 - RNA, 19 nt, Artificial Sequence
  Description of Artificial Sequence: Synthetic oligonucleotide
  Sense strand starting at position 3341 of SEQ ID NO: 1245138
uacagauccgacggacauu

SEQ ID NO: 1539383 - RNA, 19 nt, Artificial Sequence
  Description of Artificial Sequence: Synthetic oligonucleotide
  Antisense strand to SEQ ID NO: 1539382
aauguccgucggaucugua

SEQ ID NO: 1539384 - RNA, 19 nt, Artificial Sequence
  Description of Artificial Sequence: Synthetic oligonucleotide
  Sense strand starting at position 3648 of SEQ ID NO: 1245138
cuuuauggugaaugauuga

SEQ ID NO: 1539385 - RNA, 19 nt, Artificial Sequence
  Description of Artificial Sequence: Synthetic oligonucleotide
  Antisense strand to SEQ ID NO: 1539384
ucaaucauucaccauaaag

SEQ ID NO: 1539386 - RNA, 19 nt, Artificial Sequence
  Description of Artificial Sequence: Synthetic oligonucleotide
  Sense strand starting at position 3653 of SEQ ID NO: 1245138
uggugaaugauugaugcuu

SEQ ID NO: 1539387 - RNA, 19 nt, Artificial Sequence
  Description of Artificial Sequence: Synthetic oligonucleotide
  Antisense strand to SEQ ID NO: 1539386
aagcaucaaucauucacca

SEQ ID NO: 1539388 - RNA, 19 nt, Artificial Sequence
  Description of Artificial Sequence: Synthetic oligonucleotide
  Sense strand starting at position 3674 of SEQ ID NO: 1245138
uccuuaagauuuggaacaa

SEQ ID NO: 1539389 - RNA, 19 nt, Artificial Sequence
  Description of Artificial Sequence: Synthetic oligonucleotide
  Antisense strand to SEQ ID NO: 1539388
uuguuccaaaucuuaagga

SEQ ID NO: 1539390 - RNA, 19 nt, Artificial Sequence
  Description of Artificial Sequence: Synthetic oligonucleotide
  Sense strand starting at position 3675 of SEQ ID NO: 1245138
ccuuaagauuuggaacaag

SEQ ID NO: 1539391 - RNA, 19 nt, Artificial Sequence
  Description of Artificial Sequence: Synthetic oligonucleotide
  Antisense strand to SEQ ID NO: 1539390
cuuguuccaaaucuuaagg

SEQ ID NO: 1539392 - RNA, 19 nt, Artificial Sequence
  Description of Artificial Sequence: Synthetic oligonucleotide
  Sense strand starting at position 3727 of SEQ ID NO: 1245138
cauaguacugcagguucua

SEQ ID NO: 1539393 - RNA, 19 nt, Artificial Sequence
  Description of Artificial Sequence: Synthetic oligonucleotide
  Antisense strand to SEQ ID NO: 1539392
uagaaccugcaguacuaug

SEQ ID NO: 1539394 - RNA, 19 nt, Artificial Sequence
  Description of Artificial Sequence: Synthetic oligonucleotide
  Sense strand starting at position 3736 of SEQ ID NO: 1245138
gcagguucuaguuagggua

SEQ ID NO: 1539395 - RNA, 19 nt, Artificial Sequence
  Description of Artificial Sequence: Synthetic oligonucleotide
  Antisense strand to SEQ ID NO: 1539394
uacccuaacuagaaccugc

SEQ ID NO: 1539396 - RNA, 19 nt, Artificial Sequence
  Description of Artificial Sequence: Synthetic oligonucleotide
  Sense strand starting at position 3801 of SEQ ID NO: 1245138
cuguuuauucuuggaugac

SEQ ID NO: 1539397 - RNA, 19 nt, Artificial Sequence
  Description of Artificial Sequence: Synthetic oligonucleotide
  Antisense strand to SEQ ID NO: 1539396
gucauccaagaauaaacag

SEQ ID NO: 1539398 - RNA, 19 nt, Artificial Sequence
  Description of Artificial Sequence: Synthetic oligonucleotide
  Sense strand starting at position 3804 of SEQ ID NO: 1245138
uuuauucuuggaugacaug

SEQ ID NO: 1539399 - RNA, 19 nt, Artificial Sequence
  Description of Artificial Sequence: Synthetic oligonucleotide
  Antisense strand to SEQ ID NO: 1539398
caugucauccaagaauaaa

SEQ ID NO: 1539400 - RNA, 19 nt, Artificial Sequence
  Description of Artificial Sequence: Synthetic oligonucleotide
  Sense strand starting at position 3807 of SEQ ID NO: 1245138
auucuuggaugacaugauu

SEQ ID NO: 1539401 - RNA, 19 nt, Artificial Sequence
  Description of Artificial Sequence: Synthetic oligonucleotide
  Antisense strand to SEQ ID NO: 1539400
aaucaugucauccaagaau

SEQ ID NO: 1539402 - RNA, 19 nt, Artificial Sequence
  Description of Artificial Sequence: Synthetic oligonucleotide
  Sense strand starting at position 3930 of SEQ ID NO: 1245138
uauaguugaugugcuagua

SEQ ID NO: 1539403 - RNA, 19 nt, Artificial Sequence
  Description of Artificial Sequence: Synthetic oligonucleotide
  Antisense strand to SEQ ID NO: 1539402
uacuagcacaucaacuaua

SEQ ID NO: 1539404 - RNA, 19 nt, Artificial Sequence
  Description of Artificial Sequence: Synthetic oligonucleotide
  Sense strand starting at position 202 of SEQ ID NO: 1245139
guaucucauuuacauguau

SEQ ID NO: 1539405 - RNA, 19 nt, Artificial Sequence
  Description of Artificial Sequence: Synthetic oligonucleotide
  Antisense strand to SEQ ID NO: 1539404
auacauguaaaugagauac

SEQ ID NO: 1539406 - RNA, 19 nt, Artificial Sequence
  Description of Artificial Sequence: Synthetic oligonucleotide
  Sense strand starting at position 252 of SEQ ID NO: 1245139
ugagaaaccuaggcuuaga

SEQ ID NO: 1539407 - RNA, 19 nt, Artificial Sequence
  Description of Artificial Sequence: Synthetic oligonucleotide
  Antisense strand to SEQ ID NO: 1539406
ucuaagccuagguuucuca

SEQ ID NO: 1539408 - RNA, 19 nt, Artificial Sequence
  Description of Artificial Sequence: Synthetic oligonucleotide
  Sense strand starting at position 267 of SEQ ID NO: 1245139
uagaaagauugugugacuu

SEQ ID NO: 1539409 - RNA, 19 nt, Artificial Sequence
  Description of Artificial Sequence: Synthetic oligonucleotide
  Antisense strand to SEQ ID NO: 1539408
aagucacacaaucuuucua

SEQ ID NO: 1539410 - RNA, 19 nt, Artificial Sequence
  Description of Artificial Sequence: Synthetic oligonucleotide
  Sense strand starting at position 316 of SEQ ID NO: 1245139
aaggcaguugcaugagauc

SEQ ID NO: 1539411 - RNA, 19 nt, Artificial Sequence
  Description of Artificial Sequence: Synthetic oligonucleotide
  Antisense strand to SEQ ID NO: 1539410
gaucucaugcaacugccuu

SEQ ID NO: 1539412 - RNA, 19 nt, Artificial Sequence
  Description of Artificial Sequence: Synthetic oligonucleotide
  Sense strand starting at position 322 of SEQ ID NO: 1245139
guugcaugagaucgagugu

SEQ ID NO: 1539413 - RNA, 19 nt, Artificial Sequence
  Description of Artificial Sequence: Synthetic oligonucleotide
  Antisense strand to SEQ ID NO: 1539412
acacucgaucucaugcaac

SEQ ID NO: 1539414 - RNA, 19 nt, Artificial Sequence
  Description of Artificial Sequence: Synthetic oligonucleotide
  Sense strand starting at position 323 of SEQ ID NO: 1245139
uugcaugagaucgaguguu

SEQ ID NO: 1539415 - RNA, 19 nt, Artificial Sequence
  Description of Artificial Sequence: Synthetic oligonucleotide
  Antisense strand to SEQ ID NO: 1539414
aacacucgaucucaugcaa

SEQ ID NO: 1539416 - RNA, 19 nt, Artificial Sequence
  Description of Artificial Sequence: Synthetic oligonucleotide
  Sense strand starting at position 329 of SEQ ID NO: 1245139
gagaucgaguguuuggauu

SEQ ID NO: 1539417 - RNA, 19 nt, Artificial Sequence
  Description of Artificial Sequence: Synthetic oligonucleotide
  Antisense strand to SEQ ID NO: 1539416
aauccaaacacucgaucuc

SEQ ID NO: 1539418 - RNA, 19 nt, Artificial Sequence
  Description of Artificial Sequence: Synthetic oligonucleotide
  Sense strand starting at position 342 of SEQ ID NO: 1245139
uggauucuauaagccagua

SEQ ID NO: 1539419 - RNA, 19 nt, Artificial Sequence
  Description of Artificial Sequence: Synthetic oligonucleotide
  Antisense strand to SEQ ID NO: 1539418
uacuggcuuauagaaucca

SEQ ID NO: 1539420 - RNA, 19 nt, Artificial Sequence
  Description of Artificial Sequence: Synthetic oligonucleotide
  Sense strand starting at position 398 of SEQ ID NO: 1245139
gccugcuggguguuuaagu

SEQ ID NO: 1539421 - RNA, 19 nt, Artificial Sequence
  Description of Artificial Sequence: Synthetic oligonucleotide
  Antisense strand to SEQ ID NO: 1539420
acuuaaacacccagcaggc

SEQ ID NO: 1539422 - RNA, 19 nt, Artificial Sequence
  Description of Artificial Sequence: Synthetic oligonucleotide
  Sense strand starting at position 403 of SEQ ID NO: 1245139
cuggguguuuaaguuauuu

SEQ ID NO: 1539423 - RNA, 19 nt, Artificial Sequence
  Description of Artificial Sequence: Synthetic oligonucleotide
  Antisense strand to SEQ ID NO: 1539422
aaauaacuuaaacacccag

SEQ ID NO: 1539424 - RNA, 19 nt, Artificial Sequence
  Description of Artificial Sequence: Synthetic oligonucleotide
  Sense strand starting at position 407 of SEQ ID NO: 1245139
guguuuaaguuauuuacca

SEQ ID NO: 1539425 - RNA, 19 nt, Artificial Sequence
  Description of Artificial Sequence: Synthetic oligonucleotide
  Antisense strand to SEQ ID NO: 1539424
ugguaaauaacuuaaacac

SEQ ID NO: 1539426 - RNA, 19 nt, Artificial Sequence
  Description of Artificial Sequence: Synthetic oligonucleotide
  Sense strand starting at position 500 of SEQ ID NO: 1245139
gaaaguagcugggcaucau

SEQ ID NO: 1539427 - RNA, 19 nt, Artificial Sequence
  Description of Artificial Sequence: Synthetic oligonucleotide
  Antisense strand to SEQ ID NO: 1539426
augaugcccagcuacuuuc

SEQ ID NO: 1539428 - RNA, 19 nt, Artificial Sequence
  Description of Artificial Sequence: Synthetic oligonucleotide
  Sense strand starting at position 591 of SEQ ID NO: 1245139
ugcugugagccaugauagu

SEQ ID NO: 1539429 - RNA, 19 nt, Artificial Sequence
  Description of Artificial Sequence: Synthetic oligonucleotide
  Antisense strand to SEQ ID NO: 1539428
acuaucauggcucacagca

SEQ ID NO: 1539430 - RNA, 19 nt, Artificial Sequence
  Description of Artificial Sequence: Synthetic oligonucleotide
  Sense strand starting at position 1017 of SEQ ID NO: 1245139
ggccaaucucaucagugga

SEQ ID NO: 1539431 - RNA, 19 nt, Artificial Sequence
  Description of Artificial Sequence: Synthetic oligonucleotide
  Antisense strand to SEQ ID NO: 1539430
uccacugaugagauuggcc

SEQ ID NO: 1539432 - RNA, 19 nt, Artificial Sequence
  Description of Artificial Sequence: Synthetic oligonucleotide
  Sense strand starting at position 1189 of SEQ ID NO: 1245139
uuagguaggagucagaguu

SEQ ID NO: 1539433 - RNA, 19 nt, Artificial Sequence
  Description of Artificial Sequence: Synthetic oligonucleotide
  Antisense strand to SEQ ID NO: 1539432
aacucugacuccuaccuaa

SEQ ID NO: 1539434 - RNA, 19 nt, Artificial Sequence
  Description of Artificial Sequence: Synthetic oligonucleotide
  Sense strand starting at position 1269 of SEQ ID NO: 1245139
cguguuugcggguaauuuc

SEQ ID NO: 1539435 - RNA, 19 nt, Artificial Sequence
  Description of Artificial Sequence: Synthetic oligonucleotide
  Antisense strand to SEQ ID NO: 1539434
gaaauuacccgcaaacacg

SEQ ID NO: 1539436 - RNA, 19 nt, Artificial Sequence
  Description of Artificial Sequence: Synthetic oligonucleotide
  Sense strand starting at position 1379 of SEQ ID NO: 1245139
cccagagaggucuggaacu

SEQ ID NO: 1539437 - RNA, 19 nt, Artificial Sequence
  Description of Artificial Sequence: Synthetic oligonucleotide
  Antisense strand to SEQ ID NO: 1539436
aguuccagaccucucuggg

SEQ ID NO: 1539438 - RNA, 19 nt, Artificial Sequence
  Description of Artificial Sequence: Synthetic oligonucleotide
  Sense strand starting at position 1390 of SEQ ID NO: 1245139
cuggaacuucuccaaguca

SEQ ID NO: 1539439 - RNA, 19 nt, Artificial Sequence
  Description of Artificial Sequence: Synthetic oligonucleotide
  Antisense strand to SEQ ID NO: 1539438
ugacuuggagaaguuccag

SEQ ID NO: 1539440 - RNA, 19 nt, Artificial Sequence
  Description of Artificial Sequence: Synthetic oligonucleotide
  Sense strand starting at position 1567 of SEQ ID NO: 1245139
gcugcuauugccuauuaug

SEQ ID NO: 1539441 - RNA, 19 nt, Artificial Sequence
  Description of Artificial Sequence: Synthetic oligonucleotide
  Antisense strand to SEQ ID NO: 1539440
cauaauaggcaauagcagc

SEQ ID NO: 1539442 - RNA, 19 nt, Artificial Sequence
  Description of Artificial Sequence: Synthetic oligonucleotide
  Sense strand starting at position 1668 of SEQ ID NO: 1245139
aguggaaaguuucuggaua

SEQ ID NO: 1539443 - RNA, 19 nt, Artificial Sequence
  Description of Artificial Sequence: Synthetic oligonucleotide
  Antisense strand to SEQ ID NO: 1539442
uauccagaaacuuuccacu

SEQ ID NO: 1539444 - RNA, 19 nt, Artificial Sequence
  Description of Artificial Sequence: Synthetic oligonucleotide
  Sense strand starting at position 1676 of SEQ ID NO: 1245139
guuucuggauacuuauaca

SEQ ID NO: 1539445 - RNA, 19 nt, Artificial Sequence
  Description of Artificial Sequence: Synthetic oligonucleotide
  Antisense strand to SEQ ID NO: 1539444
uguauaaguauccagaaac

SEQ ID NO: 1539446 - RNA, 19 nt, Artificial Sequence
  Description of Artificial Sequence: Synthetic oligonucleotide
  Sense strand starting at position 1690 of SEQ ID NO: 1245139
auacaauugcuccaaggca

SEQ ID NO: 1539447 - RNA, 19 nt, Artificial Sequence
  Description of Artificial Sequence: Synthetic oligonucleotide
  Antisense strand to SEQ ID NO: 1539446
ugccuuggagcaauuguau

SEQ ID NO: 1539448 - RNA, 19 nt, Artificial Sequence
  Description of Artificial Sequence: Synthetic oligonucleotide
  Sense strand starting at position 2634 of SEQ ID NO: 1245139
agaggcaggucaucauuga

SEQ ID NO: 1539449 - RNA, 19 nt, Artificial Sequence
  Description of Artificial Sequence: Synthetic oligonucleotide
  Antisense strand to SEQ ID NO: 1539448
ucaaugaugaccugccucu

SEQ ID NO: 1539450 - RNA, 19 nt, Artificial Sequence
  Description of Artificial Sequence: Synthetic oligonucleotide
  Sense strand starting at position 2635 of SEQ ID NO: 1245139
gaggcaggucaucauugau

SEQ ID NO: 1539451 - RNA, 19 nt, Artificial Sequence
  Description of Artificial Sequence: Synthetic oligonucleotide
  Antisense strand to SEQ ID NO: 1539450
aucaaugaugaccugccuc

SEQ ID NO: 1539452 - RNA, 19 nt, Artificial Sequence
  Description of Artificial Sequence: Synthetic oligonucleotide
  Sense strand starting at position 2638 of SEQ ID NO: 1245139
gcaggucaucauugauuac

SEQ ID NO: 1539453 - RNA, 19 nt, Artificial Sequence
  Description of Artificial Sequence: Synthetic oligonucleotide
  Antisense strand to SEQ ID NO: 1539452
guaaucaaugaugaccugc

SEQ ID NO: 1539454 - RNA, 19 nt, Artificial Sequence
  Description of Artificial Sequence: Synthetic oligonucleotide
  Sense strand starting at position 2650 of SEQ ID NO: 1245139
ugauuacacccguacugau

SEQ ID NO: 1539455 - RNA, 19 nt, Artificial Sequence
  Description of Artificial Sequence: Synthetic oligonucleotide
  Antisense strand to SEQ ID NO: 1539454
aucaguacggguguaauca

SEQ ID NO: 1539456 - RNA, 19 nt, Artificial Sequence
  Description of Artificial Sequence: Synthetic oligonucleotide
  Sense strand starting at position 2744 of SEQ ID NO: 1245139
aggucaggcguuugaaauc

SEQ ID NO: 1539457 - RNA, 19 nt, Artificial Sequence
  Description of Artificial Sequence: Synthetic oligonucleotide
  Antisense strand to SEQ ID NO: 1539456
gauuucaaacgccugaccu

SEQ ID NO: 1539458 - RNA, 19 nt, Artificial Sequence
  Description of Artificial Sequence: Synthetic oligonucleotide
  Sense strand starting at position 2776 of SEQ ID NO: 1245139
cggcgaaaucccgccucua

SEQ ID NO: 1539459 - RNA, 19 nt, Artificial Sequence
  Description of Artificial Sequence: Synthetic oligonucleotide
  Antisense strand to SEQ ID NO: 1539458
uagaggcgggauuucgccg

SEQ ID NO: 1539460 - RNA, 19 nt, Artificial Sequence
  Description of Artificial Sequence: Synthetic oligonucleotide
  Sense strand starting at position 3326 of SEQ ID NO: 1245139
agcagaaaccugugaaauu

SEQ ID NO: 1539461 - RNA, 19 nt, Artificial Sequence
  Description of Artificial Sequence: Synthetic oligonucleotide
  Antisense strand to SEQ ID NO: 1539460
aauuucacagguuucugcu

SEQ ID NO: 1539462 - RNA, 19 nt, Artificial Sequence
  Description of Artificial Sequence: Synthetic oligonucleotide
  Sense strand starting at position 3327 of SEQ ID NO: 1245139
gcagaaaccugugaaauug

SEQ ID NO: 1539463 - RNA, 19 nt, Artificial Sequence
  Description of Artificial Sequence: Synthetic oligonucleotide
  Antisense strand to SEQ ID NO: 1539462
caauuucacagguuucugc

SEQ ID NO: 1539464 - RNA, 19 nt, Artificial Sequence
  Description of Artificial Sequence: Synthetic oligonucleotide
  Sense strand starting at position 3486 of SEQ ID NO: 1245139
uacagauccgacggacauu

SEQ ID NO: 1539465 - RNA, 19 nt, Artificial Sequence
  Description of Artificial Sequence: Synthetic oligonucleotide
  Antisense strand to SEQ ID NO: 1539464
aauguccgucggaucugua

SEQ ID NO: 1539466 - RNA, 19 nt, Artificial Sequence
  Description of Artificial Sequence: Synthetic oligonucleotide
  Sense strand starting at position 3793 of SEQ ID NO: 1245139
cuuuauggugaaugauuga

SEQ ID NO: 1539467 - RNA, 19 nt, Artificial Sequence
  Description of Artificial Sequence: Synthetic oligonucleotide
  Antisense strand to SEQ ID NO: 1539466
ucaaucauucaccauaaag

SEQ ID NO: 1539468 - RNA, 19 nt, Artificial Sequence
  Description of Artificial Sequence: Synthetic oligonucleotide
  Sense strand starting at position 3798 of SEQ ID NO: 1245139
uggugaaugauugaugcuu

SEQ ID NO: 1539469 - RNA, 19 nt, Artificial Sequence
  Description of Artificial Sequence: Synthetic oligonucleotide
  Antisense strand to SEQ ID NO: 1539468
aagcaucaaucauucacca

SEQ ID NO: 1539470 - RNA, 19 nt, Artificial Sequence
  Description of Artificial Sequence: Synthetic oligonucleotide
  Sense strand starting at position 3819 of SEQ ID NO: 1245139
uccuuaagauuuggaacaa

SEQ ID NO: 1539471 - RNA, 19 nt, Artificial Sequence
  Description of Artificial Sequence: Synthetic oligonucleotide
  Antisense strand to SEQ ID NO: 1539470
uuguuccaaaucuuaagga

SEQ ID NO: 1539472 - RNA, 19 nt, Artificial Sequence
  Description of Artificial Sequence: Synthetic oligonucleotide
  Sense strand starting at position 3820 of SEQ ID NO: 1245139
ccuuaagauuuggaacaag

SEQ ID NO: 1539473 - RNA, 19 nt, Artificial Sequence
  Description of Artificial Sequence: Synthetic oligonucleotide
  Antisense strand to SEQ ID NO: 1539472
cuuguuccaaaucuuaagg

SEQ ID NO: 1539474 - RNA, 19 nt, Artificial Sequence
  Description of Artificial Sequence: Synthetic oligonucleotide
  Sense strand starting at position 3872 of SEQ ID NO: 1245139
cauaguacugcagguucua

SEQ ID NO: 1539475 - RNA, 19 nt, Artificial Sequence
  Description of Artificial Sequence: Synthetic oligonucleotide
  Antisense strand to SEQ ID NO: 1539474
uagaaccugcaguacuaug

SEQ ID NO: 1539476 - RNA, 19 nt, Artificial Sequence
  Description of Artificial Sequence: Synthetic oligonucleotide
  Sense strand starting at position 3881 of SEQ ID NO: 1245139
gcagguucuaguuagggua

SEQ ID NO: 1539477 - RNA, 19 nt, Artificial Sequence
  Description of Artificial Sequence: Synthetic oligonucleotide
  Antisense strand to SEQ ID NO: 1539476
uacccuaacuagaaccugc

SEQ ID NO: 1539478 - RNA, 19 nt, Artificial Sequence
  Description of Artificial Sequence: Synthetic oligonucleotide
  Sense strand starting at position 3946 of SEQ ID NO: 1245139
cuguuuauucuuggaugac

SEQ ID NO: 1539479 - RNA, 19 nt, Artificial Sequence
  Description of Artificial Sequence: Synthetic oligonucleotide
  Antisense strand to SEQ ID NO: 1539478
gucauccaagaauaaacag

SEQ ID NO: 1539480 - RNA, 19 nt, Artificial Sequence
  Description of Artificial Sequence: Synthetic oligonucleotide
  Sense strand starting at position 3949 of SEQ ID NO: 1245139
uuuauucuuggaugacaug

SEQ ID NO: 1539481 - RNA, 19 nt, Artificial Sequence
  Description of Artificial Sequence: Synthetic oligonucleotide
  Antisense strand to SEQ ID NO: 1539480
caugucauccaagaauaaa

SEQ ID NO: 1539482 - RNA, 19 nt, Artificial Sequence
  Description of Artificial Sequence: Synthetic oligonucleotide
  Sense strand starting at position 3952 of SEQ ID NO: 1245139
auucuuggaugacaugauu

SEQ ID NO: 1539483 - RNA, 19 nt, Artificial Sequence
  Description of Artificial Sequence: Synthetic oligonucleotide
  Antisense strand to SEQ ID NO: 1539482
aaucaugucauccaagaau

SEQ ID NO: 1539484 - RNA, 19 nt, Artificial Sequence
  Description of Artificial Sequence: Synthetic oligonucleotide
  Sense strand starting at position 59 of SEQ ID NO: 1245140
aguugaaugcuaggagauc

SEQ ID NO: 1539485 - RNA, 19 nt, Artificial Sequence
  Description of Artificial Sequence: Synthetic oligonucleotide
  Antisense strand to SEQ ID NO: 1539484
gaucuccuagcauucaacu

SEQ ID NO: 1539486 - RNA, 19 nt, Artificial Sequence
  Description of Artificial Sequence: Synthetic oligonucleotide
  Sense strand starting at position 161 of SEQ ID NO: 1245140
acugauguccuccaugaca

SEQ ID NO: 1539487 - RNA, 19 nt, Artificial Sequence
  Description of Artificial Sequence: Synthetic oligonucleotide
  Antisense strand to SEQ ID NO: 1539486
ugucauggaggacaucagu

SEQ ID NO: 1539488 - RNA, 19 nt, Artificial Sequence
  Description of Artificial Sequence: Synthetic oligonucleotide
  Sense strand starting at position 262 of SEQ ID NO: 1245140
gcagaauucucuucccuga

SEQ ID NO: 1539489 - RNA, 19 nt, Artificial Sequence
  Description of Artificial Sequence: Synthetic oligonucleotide
  Antisense strand to SEQ ID NO: 1539488
ucagggaagagaauucugc

SEQ ID NO: 1539490 - RNA, 19 nt, Artificial Sequence
  Description of Artificial Sequence: Synthetic oligonucleotide
  Sense strand starting at position 324 of SEQ ID NO: 1245140
agguaacaaccuuguuaug

SEQ ID NO: 1539491 - RNA, 19 nt, Artificial Sequence
  Description of Artificial Sequence: Synthetic oligonucleotide
  Antisense strand to SEQ ID NO: 1539490
cauaacaagguuguuaccu

SEQ ID NO: 1539492 - RNA, 19 nt, Artificial Sequence
  Description of Artificial Sequence: Synthetic oligonucleotide
  Sense strand starting at position 326 of SEQ ID NO: 1245140
guaacaaccuuguuaugaa

SEQ ID NO: 1539493 - RNA, 19 nt, Artificial Sequence
  Description of Artificial Sequence: Synthetic oligonucleotide
  Antisense strand to SEQ ID NO: 1539492
uucauaacaagguuguuac

SEQ ID NO: 1539494 - RNA, 19 nt, Artificial Sequence
  Description of Artificial Sequence: Synthetic oligonucleotide
  Sense strand starting at position 374 of SEQ ID NO: 1245140
cauacaugagucugguaau

SEQ ID NO: 1539495 - RNA, 19 nt, Artificial Sequence
  Description of Artificial Sequence: Synthetic oligonucleotide
  Antisense strand to SEQ ID NO: 1539494
auuaccagacucauguaug

SEQ ID NO: 1539496 - RNA, 19 nt, Artificial Sequence
  Description of Artificial Sequence: Synthetic oligonucleotide
  Sense strand starting at position 506 of SEQ ID NO: 1245140
uuucguaaguauuuacuga

SEQ ID NO: 1539497 - RNA, 19 nt, Artificial Sequence
  Description of Artificial Sequence: Synthetic oligonucleotide
  Antisense strand to SEQ ID NO: 1539496
ucaguaaauacuuacgaaa

SEQ ID NO: 1539498 - RNA, 19 nt, Artificial Sequence
  Description of Artificial Sequence: Synthetic oligonucleotide
  Sense strand starting at position 519 of SEQ ID NO: 1245140
uacugaaugcuuuaagugu

SEQ ID NO: 1539499 - RNA, 19 nt, Artificial Sequence
  Description of Artificial Sequence: Synthetic oligonucleotide
  Antisense strand to SEQ ID NO: 1539498
acacuuaaagcauucagua

SEQ ID NO: 1539500 - RNA, 19 nt, Artificial Sequence
  Description of Artificial Sequence: Synthetic oligonucleotide
  Sense strand starting at position 542 of SEQ ID NO: 1245140
accuuuacuugguuuggga

SEQ ID NO: 1539501 - RNA, 19 nt, Artificial Sequence
  Description of Artificial Sequence: Synthetic oligonucleotide
  Antisense strand to SEQ ID NO: 1539500
ucccaaaccaaguaaaggu

SEQ ID NO: 1539502 - RNA, 19 nt, Artificial Sequence
  Description of Artificial Sequence: Synthetic oligonucleotide
  Sense strand starting at position 544 of SEQ ID NO: 1245140
cuuuacuugguuugggaaa

SEQ ID NO: 1539503 - RNA, 19 nt, Artificial Sequence
  Description of Artificial Sequence: Synthetic oligonucleotide
  Antisense strand to SEQ ID NO: 1539502
uuucccaaaccaaguaaag

SEQ ID NO: 1539504 - RNA, 19 nt, Artificial Sequence
  Description of Artificial Sequence: Synthetic oligonucleotide
  Sense strand starting at position 990 of SEQ ID NO: 1245140
uugaaacugugcucuggaa

SEQ ID NO: 1539505 - RNA, 19 nt, Artificial Sequence
  Description of Artificial Sequence: Synthetic oligonucleotide
  Antisense strand to SEQ ID NO: 1539504
uuccagagcacaguuucaa

SEQ ID NO: 1539506 - RNA, 19 nt, Artificial Sequence
  Description of Artificial Sequence: Synthetic oligonucleotide
  Sense strand starting at position 992 of SEQ ID NO: 1245140
gaaacugugcucuggaauu

SEQ ID NO: 1539507 - RNA, 19 nt, Artificial Sequence
  Description of Artificial Sequence: Synthetic oligonucleotide
  Antisense strand to SEQ ID NO: 1539506
aauuccagagcacaguuuc

SEQ ID NO: 1539508 - RNA, 19 nt, Artificial Sequence
  Description of Artificial Sequence: Synthetic oligonucleotide
  Sense strand starting at position 1003 of SEQ ID NO: 1245140
cuggaauugcuacauaguu

SEQ ID NO: 1539509 - RNA, 19 nt, Artificial Sequence
  Description of Artificial Sequence: Synthetic oligonucleotide
  Antisense strand to SEQ ID NO: 1539508
aacuauguagcaauuccag

SEQ ID NO: 1539510 - RNA, 19 nt, Artificial Sequence
  Description of Artificial Sequence: Synthetic oligonucleotide
  Sense strand starting at position 1008 of SEQ ID NO: 1245140
auugcuacauaguuaagaa

SEQ ID NO: 1539511 - RNA, 19 nt, Artificial Sequence
  Description of Artificial Sequence: Synthetic oligonucleotide
  Antisense strand to SEQ ID NO: 1539510
uucuuaacuauguagcaau

SEQ ID NO: 1539512 - RNA, 19 nt, Artificial Sequence
  Description of Artificial Sequence: Synthetic oligonucleotide
  Sense strand starting at position 1224 of SEQ ID NO: 1245140
ggugaaauaugucucugau

SEQ ID NO: 1539513 - RNA, 19 nt, Artificial Sequence
  Description of Artificial Sequence: Synthetic oligonucleotide
  Antisense strand to SEQ ID NO: 1539512
aucagagacauauuucacc

SEQ ID NO: 1539514 - RNA, 19 nt, Artificial Sequence
  Description of Artificial Sequence: Synthetic oligonucleotide
  Sense strand starting at position 1226 of SEQ ID NO: 1245140
ugaaauaugucucugauca

SEQ ID NO: 1539515 - RNA, 19 nt, Artificial Sequence
  Description of Artificial Sequence: Synthetic oligonucleotide
  Antisense strand to SEQ ID NO: 1539514
ugaucagagacauauuuca

SEQ ID NO: 1539516 - RNA, 19 nt, Artificial Sequence
  Description of Artificial Sequence: Synthetic oligonucleotide
  Sense strand starting at position 1239 of SEQ ID NO: 1245140
ugaucaucucugcacuaga

SEQ ID NO: 1539517 - RNA, 19 nt, Artificial Sequence
  Description of Artificial Sequence: Synthetic oligonucleotide
  Antisense strand to SEQ ID NO: 1539516
ucuagugcagagaugauca

SEQ ID NO: 1539518 - RNA, 19 nt, Artificial Sequence
  Description of Artificial Sequence: Synthetic oligonucleotide
  Sense strand starting at position 1551 of SEQ ID NO: 1245140
agaaauauguugccucaau

SEQ ID NO: 1539519 - RNA, 19 nt, Artificial Sequence
  Description of Artificial Sequence: Synthetic oligonucleotide
  Antisense strand to SEQ ID NO: 1539518
auugaggcaacauauuucu

SEQ ID NO: 1539520 - RNA, 19 nt, Artificial Sequence
  Description of Artificial Sequence: Synthetic oligonucleotide
  Sense strand starting at position 1710 of SEQ ID NO: 1245140
uuccuuacucuuggagaca

SEQ ID NO: 1539521 - RNA, 19 nt, Artificial Sequence
  Description of Artificial Sequence: Synthetic oligonucleotide
  Antisense strand to SEQ ID NO: 1539520
ugucuccaagaguaaggaa

SEQ ID NO: 1539522 - RNA, 19 nt, Artificial Sequence
  Description of Artificial Sequence: Synthetic oligonucleotide
  Sense strand starting at position 1807 of SEQ ID NO: 1245140
aaaggagucucauugauug

SEQ ID NO: 1539523 - RNA, 19 nt, Artificial Sequence
  Description of Artificial Sequence: Synthetic oligonucleotide
  Antisense strand to SEQ ID NO: 1539522
caaucaaugagacuccuuu

SEQ ID NO: 1539524 - RNA, 19 nt, Artificial Sequence
  Description of Artificial Sequence: Synthetic oligonucleotide
  Sense strand starting at position 1811 of SEQ ID NO: 1245140
gagucucauugauugauca

SEQ ID NO: 1539525 - RNA, 19 nt, Artificial Sequence
  Description of Artificial Sequence: Synthetic oligonucleotide
  Antisense strand to SEQ ID NO: 1539524
ugaucaaucaaugagacuc

SEQ ID NO: 1539526 - RNA, 19 nt, Artificial Sequence
  Description of Artificial Sequence: Synthetic oligonucleotide
  Sense strand starting at position 1815 of SEQ ID NO: 1245140
cucauugauugaucaggca

SEQ ID NO: 1539527 - RNA, 19 nt, Artificial Sequence
  Description of Artificial Sequence: Synthetic oligonucleotide
  Antisense strand to SEQ ID NO: 1539526
ugccugaucaaucaaugag

SEQ ID NO: 1539528 - RNA, 19 nt, Artificial Sequence
  Description of Artificial Sequence: Synthetic oligonucleotide
  Sense strand starting at position 1893 of SEQ ID NO: 1245140
uccuuugagccauagugau

SEQ ID NO: 1539529 - RNA, 19 nt, Artificial Sequence
  Description of Artificial Sequence: Synthetic oligonucleotide
  Antisense strand to SEQ ID NO: 1539528
aucacuauggcucaaagga

SEQ ID NO: 1539530 - RNA, 19 nt, Artificial Sequence
  Description of Artificial Sequence: Synthetic oligonucleotide
  Sense strand starting at position 1953 of SEQ ID NO: 1245140
cuugcuucugagcacagaa

SEQ ID NO: 1539531 - RNA, 19 nt, Artificial Sequence
  Description of Artificial Sequence: Synthetic oligonucleotide
  Antisense strand to SEQ ID NO: 1539530
uucugugcucagaagcaag

SEQ ID NO: 1539532 - RNA, 19 nt, Artificial Sequence
  Description of Artificial Sequence: Synthetic oligonucleotide
  Sense strand starting at position 1955 of SEQ ID NO: 1245140
ugcuucugagcacagaauu

SEQ ID NO: 1539533 - RNA, 19 nt, Artificial Sequence
  Description of Artificial Sequence: Synthetic oligonucleotide
  Antisense strand to SEQ ID NO: 1539532
aauucugugcucagaagca

SEQ ID NO: 1539534 - RNA, 19 nt, Artificial Sequence
  Description of Artificial Sequence: Synthetic oligonucleotide
  Sense strand starting at position 2016 of SEQ ID NO: 1245140
ggcugagugccugaugaau

SEQ ID NO: 1539535 - RNA, 19 nt, Artificial Sequence
  Description of Artificial Sequence: Synthetic oligonucleotide
  Antisense strand to SEQ ID NO: 1539534
auucaucaggcacucagcc

SEQ ID NO: 1539536 - RNA, 19 nt, Artificial Sequence
  Description of Artificial Sequence: Synthetic oligonucleotide
  Sense strand starting at position 2051 of SEQ ID NO: 1245140
gcuagcuagccguuugaaa

SEQ ID NO: 1539537 - RNA, 19 nt, Artificial Sequence
  Description of Artificial Sequence: Synthetic oligonucleotide
  Antisense strand to SEQ ID NO: 1539536
uuucaaacggcuagcuagc

SEQ ID NO: 1539538 - RNA, 19 nt, Artificial Sequence
  Description of Artificial Sequence: Synthetic oligonucleotide
  Sense strand starting at position 2058 of SEQ ID NO: 1245140
agccguuugaaagaaauag

SEQ ID NO: 1539539 - RNA, 19 nt, Artificial Sequence
  Description of Artificial Sequence: Synthetic oligonucleotide
  Antisense strand to SEQ ID NO: 1539538
cuauuucuuucaaacggcu

SEQ ID NO: 1539540 - RNA, 19 nt, Artificial Sequence
  Description of Artificial Sequence: Synthetic oligonucleotide
  Sense strand starting at position 2098 of SEQ ID NO: 1245140
ggaucucucuaacugaagu

SEQ ID NO: 1539541 - RNA, 19 nt, Artificial Sequence
  Description of Artificial Sequence: Synthetic oligonucleotide
  Antisense strand to SEQ ID NO: 1539540
acuucaguuagagagaucc

SEQ ID NO: 1539542 - RNA, 19 nt, Artificial Sequence
  Description of Artificial Sequence: Synthetic oligonucleotide
  Sense strand starting at position 2114 of SEQ ID NO: 1245140
aguggugcuaaagauaaau

SEQ ID NO: 1539543 - RNA, 19 nt, Artificial Sequence
  Description of Artificial Sequence: Synthetic oligonucleotide
  Antisense strand to SEQ ID NO: 1539542
auuuaucuuuagcaccacu

SEQ ID NO: 1539544 - RNA, 19 nt, Artificial Sequence
  Description of Artificial Sequence: Synthetic oligonucleotide
  Sense strand starting at position 2143 of SEQ ID NO: 1245140
gguuucaauggugagucua

SEQ ID NO: 1539545 - RNA, 19 nt, Artificial Sequence
  Description of Artificial Sequence: Synthetic oligonucleotide
  Antisense strand to SEQ ID NO: 1539544
uagacucaccauugaaacc

SEQ ID NO: 1539546 - RNA, 19 nt, Artificial Sequence
  Description of Artificial Sequence: Synthetic oligonucleotide
  Sense strand starting at position 2811 of SEQ ID NO: 1245140
ggacaugaauucuaauuug

SEQ ID NO: 1539547 - RNA, 19 nt, Artificial Sequence
  Description of Artificial Sequence: Synthetic oligonucleotide
  Antisense strand to SEQ ID NO: 1539546
caaauuagaauucaugucc

SEQ ID NO: 1539548 - RNA, 19 nt, Artificial Sequence
  Description of Artificial Sequence: Synthetic oligonucleotide
  Sense strand starting at position 2974 of SEQ ID NO: 1245140
cucucaguacauggauagu

SEQ ID NO: 1539549 - RNA, 19 nt, Artificial Sequence
  Description of Artificial Sequence: Synthetic oligonucleotide
  Antisense strand to SEQ ID NO: 1539548
acuauccauguacugagag

SEQ ID NO: 1539550 - RNA, 19 nt, Artificial Sequence
  Description of Artificial Sequence: Synthetic oligonucleotide
  Sense strand starting at position 3065 of SEQ ID NO: 1245140
auugcauccgaucaaguua

SEQ ID NO: 1539551 - RNA, 19 nt, Artificial Sequence
  Description of Artificial Sequence: Synthetic oligonucleotide
  Antisense strand to SEQ ID NO: 1539550
uaacuugaucggaugcaau

SEQ ID NO: 1539552 - RNA, 19 nt, Artificial Sequence
  Description of Artificial Sequence: Synthetic oligonucleotide
  Sense strand starting at position 3109 of SEQ ID NO: 1245140
acacaaaguuguccaaagu

SEQ ID NO: 1539553 - RNA, 19 nt, Artificial Sequence
  Description of Artificial Sequence: Synthetic oligonucleotide
  Antisense strand to SEQ ID NO: 1539552
acuuuggacaacuuugugu

SEQ ID NO: 1539554 - RNA, 19 nt, Artificial Sequence
  Description of Artificial Sequence: Synthetic oligonucleotide
  Sense strand starting at position 3222 of SEQ ID NO: 1245140
uugagacacugacauuuga

SEQ ID NO: 1539555 - RNA, 19 nt, Artificial Sequence
  Description of Artificial Sequence: Synthetic oligonucleotide
  Antisense strand to SEQ ID NO: 1539554
ucaaaugucagugucucaa

SEQ ID NO: 1539556 - RNA, 19 nt, Artificial Sequence
  Description of Artificial Sequence: Synthetic oligonucleotide
  Sense strand starting at position 3291 of SEQ ID NO: 1245140
cuacucuucuuguuaugga

SEQ ID NO: 1539557 - RNA, 19 nt, Artificial Sequence
  Description of Artificial Sequence: Synthetic oligonucleotide
  Antisense strand to SEQ ID NO: 1539556
uccauaacaagaagaguag

SEQ ID NO: 1539558 - RNA, 19 nt, Artificial Sequence
  Description of Artificial Sequence: Synthetic oligonucleotide
  Sense strand starting at position 3298 of SEQ ID NO: 1245140
ucuuguuauggaugaauua

SEQ ID NO: 1539559 - RNA, 19 nt, Artificial Sequence
  Description of Artificial Sequence: Synthetic oligonucleotide
  Antisense strand to SEQ ID NO: 1539558
uaauucauccauaacaaga

SEQ ID NO: 1539560 - RNA, 19 nt, Artificial Sequence
  Description of Artificial Sequence: Synthetic oligonucleotide
  Sense strand starting at position 3816 of SEQ ID NO: 1245140
uggugugacgcuuccugua

SEQ ID NO: 1539561 - RNA, 19 nt, Artificial Sequence
  Description of Artificial Sequence: Synthetic oligonucleotide
  Antisense strand to SEQ ID NO: 1539560
uacaggaagcgucacacca

SEQ ID NO: 1539562 - RNA, 19 nt, Artificial Sequence
  Description of Artificial Sequence: Synthetic oligonucleotide
  Sense strand starting at position 3826 of SEQ ID NO: 1245140
cuuccuguacuauagaagu

SEQ ID NO: 1539563 - RNA, 19 nt, Artificial Sequence
  Description of Artificial Sequence: Synthetic oligonucleotide
  Antisense strand to SEQ ID NO: 1539562
acuucuauaguacaggaag

SEQ ID NO: 1539564 - RNA, 19 nt, Artificial Sequence
  Description of Artificial Sequence: Synthetic oligonucleotide
  Sense strand starting at position 62 of SEQ ID NO: 1245141
uggugugacgcuuccugua

SEQ ID NO: 1539565 - RNA, 19 nt, Artificial Sequence
  Description of Artificial Sequence: Synthetic oligonucleotide
  Antisense strand to SEQ ID NO: 1539564
uacaggaagcgucacacca

SEQ ID NO: 1539566 - RNA, 19 nt, Artificial Sequence
  Description of Artificial Sequence: Synthetic oligonucleotide
  Sense strand starting at position 67 of SEQ ID NO: 1245141
ugacgcuuccuguacuaua

SEQ ID NO: 1539567 - RNA, 19 nt, Artificial Sequence
  Description of Artificial Sequence: Synthetic oligonucleotide
  Antisense strand to SEQ ID NO: 1539566
uauaguacaggaagcguca

SEQ ID NO: 1539568 - RNA, 19 nt, Artificial Sequence
  Description of Artificial Sequence: Synthetic oligonucleotide
  Sense strand starting at position 72 of SEQ ID NO: 1245141
cuuccuguacuauagaagu

SEQ ID NO: 1539569 - RNA, 19 nt, Artificial Sequence
  Description of Artificial Sequence: Synthetic oligonucleotide
  Antisense strand to SEQ ID NO: 1539568
acuucuauaguacaggaag

SEQ ID NO: 1539570 - RNA, 19 nt, Artificial Sequence
  Description of Artificial Sequence: Synthetic oligonucleotide
  Sense strand starting at position 205 of SEQ ID NO: 1245141
aagcaauuccgcgagacua

SEQ ID NO: 1539571 - RNA, 19 nt, Artificial Sequence
  Description of Artificial Sequence: Synthetic oligonucleotide
  Antisense strand to SEQ ID NO: 1539570
uagucucgcggaauugcuu

SEQ ID NO: 1539572 - RNA, 19 nt, Artificial Sequence
  Description of Artificial Sequence: Synthetic oligonucleotide
  Sense strand starting at position 207 of SEQ ID NO: 1245141
gcaauuccgcgagacuaau

SEQ ID NO: 1539573 - RNA, 19 nt, Artificial Sequence
  Description of Artificial Sequence: Synthetic oligonucleotide
  Antisense strand to SEQ ID NO: 1539572
auuagucucgcggaauugc

SEQ ID NO: 1539574 - RNA, 19 nt, Artificial Sequence
  Description of Artificial Sequence: Synthetic oligonucleotide
  Sense strand starting at position 458 of SEQ ID NO: 1245141
agaauacucucauugcaag

SEQ ID NO: 1539575 - RNA, 19 nt, Artificial Sequence
  Description of Artificial Sequence: Synthetic oligonucleotide
  Antisense strand to SEQ ID NO: 1539574
cuugcaaugagaguauucu

SEQ ID NO: 1539576 - RNA, 19 nt, Artificial Sequence
  Description of Artificial Sequence: Synthetic oligonucleotide
  Sense strand starting at position 485 of SEQ ID NO: 1245141
guuacaauuuacuagguaa

SEQ ID NO: 1539577 - RNA, 19 nt, Artificial Sequence
  Description of Artificial Sequence: Synthetic oligonucleotide
  Antisense strand to SEQ ID NO: 1539576
uuaccuaguaaauuguaac

SEQ ID NO: 1539578 - RNA, 19 nt, Artificial Sequence
  Description of Artificial Sequence: Synthetic oligonucleotide
  Sense strand starting at position 558 of SEQ ID NO: 1245141
gaagaaguccggcgagauu

SEQ ID NO: 1539579 - RNA, 19 nt, Artificial Sequence
  Description of Artificial Sequence: Synthetic oligonucleotide
  Antisense strand to SEQ ID NO: 1539578
aaucucgccggacuucuuc

SEQ ID NO: 1539580 - RNA, 19 nt, Artificial Sequence
  Description of Artificial Sequence: Synthetic oligonucleotide
  Sense strand starting at position 711 of SEQ ID NO: 1245141
gacaccucccgaggagaau

SEQ ID NO: 1539581 - RNA, 19 nt, Artificial Sequence
  Description of Artificial Sequence: Synthetic oligonucleotide
  Antisense strand to SEQ ID NO: 1539580
auucuccucgggagguguc

SEQ ID NO: 1539582 - RNA, 19 nt, Artificial Sequence
  Description of Artificial Sequence: Synthetic oligonucleotide
  Sense strand starting at position 2068 of SEQ ID NO: 1245141
gugaguuauuuauuggcua

SEQ ID NO: 1539583 - RNA, 19 nt, Artificial Sequence
  Description of Artificial Sequence: Synthetic oligonucleotide
  Antisense strand to SEQ ID NO: 1539582
uagccaauaaauaacucac

SEQ ID NO: 1539584 - RNA, 19 nt, Artificial Sequence
  Description of Artificial Sequence: Synthetic oligonucleotide
  Sense strand starting at position 2172 of SEQ ID NO: 1245141
ugaauuaaugcuugauaag

SEQ ID NO: 1539585 - RNA, 19 nt, Artificial Sequence
  Description of Artificial Sequence: Synthetic oligonucleotide
  Antisense strand to SEQ ID NO: 1539584
cuuaucaagcauuaauuca

SEQ ID NO: 1539586 - RNA, 19 nt, Artificial Sequence
  Description of Artificial Sequence: Synthetic oligonucleotide
  Sense strand starting at position 2225 of SEQ ID NO: 1245141
cguccucuccaguaucuau

SEQ ID NO: 1539587 - RNA, 19 nt, Artificial Sequence
  Description of Artificial Sequence: Synthetic oligonucleotide
  Antisense strand to SEQ ID NO: 1539586
auagauacuggagaggacg

SEQ ID NO: 1539588 - RNA, 19 nt, Artificial Sequence
  Description of Artificial Sequence: Synthetic oligonucleotide
  Sense strand starting at position 2286 of SEQ ID NO: 1245141
guggcucacugacuuguaa

SEQ ID NO: 1539589 - RNA, 19 nt, Artificial Sequence
  Description of Artificial Sequence: Synthetic oligonucleotide
  Antisense strand to SEQ ID NO: 1539588
uuacaagucagugagccac

SEQ ID NO: 1539590 - RNA, 19 nt, Artificial Sequence
  Description of Artificial Sequence: Synthetic oligonucleotide
  Sense strand starting at position 2294 of SEQ ID NO: 1245141
cugacuuguaagugaaaga

SEQ ID NO: 1539591 - RNA, 19 nt, Artificial Sequence
  Description of Artificial Sequence: Synthetic oligonucleotide
  Antisense strand to SEQ ID NO: 1539590
ucuuucacuuacaagucag

SEQ ID NO: 1539592 - RNA, 19 nt, Artificial Sequence
  Description of Artificial Sequence: Synthetic oligonucleotide
  Sense strand starting at position 2714 of SEQ ID NO: 1245141
gguuauuauaguggaacac

SEQ ID NO: 1539593 - RNA, 19 nt, Artificial Sequence
  Description of Artificial Sequence: Synthetic oligonucleotide
  Antisense strand to SEQ ID NO: 1539592
guguuccacuauaauaacc

SEQ ID NO: 1539594 - RNA, 19 nt, Artificial Sequence
  Description of Artificial Sequence: Synthetic oligonucleotide
  Sense strand starting at position 2790 of SEQ ID NO: 1245141
uggcaagaguagcuauaau

SEQ ID NO: 1539595 - RNA, 19 nt, Artificial Sequence
  Description of Artificial Sequence: Synthetic oligonucleotide
  Antisense strand to SEQ ID NO: 1539594
auuauagcuacucuugcca

SEQ ID NO: 1539596 - RNA, 19 nt, Artificial Sequence
  Description of Artificial Sequence: Synthetic oligonucleotide
  Sense strand starting at position 2852 of SEQ ID NO: 1245141
cuaguccucguguuguaca

SEQ ID NO: 1539597 - RNA, 19 nt, Artificial Sequence
  Description of Artificial Sequence: Synthetic oligonucleotide
  Antisense strand to SEQ ID NO: 1539596
uguacaacacgaggacuag

SEQ ID NO: 1539598 - RNA, 19 nt, Artificial Sequence
  Description of Artificial Sequence: Synthetic oligonucleotide
  Sense strand starting at position 2857 of SEQ ID NO: 1245141
ccucguguuguacaucaga

SEQ ID NO: 1539599 - RNA, 19 nt, Artificial Sequence
  Description of Artificial Sequence: Synthetic oligonucleotide
  Antisense strand to SEQ ID NO: 1539598
ucugauguacaacacgagg

SEQ ID NO: 1539600 - RNA, 19 nt, Artificial Sequence
  Description of Artificial Sequence: Synthetic oligonucleotide
  Sense strand starting at position 2883 of SEQ ID NO: 1245141
cauguuguacguuauuaau

SEQ ID NO: 1539601 - RNA, 19 nt, Artificial Sequence
  Description of Artificial Sequence: Synthetic oligonucleotide
  Antisense strand to SEQ ID NO: 1539600
auuaauaacguacaacaug

SEQ ID NO: 1539602 - RNA, 19 nt, Artificial Sequence
  Description of Artificial Sequence: Synthetic oligonucleotide
  Sense strand starting at position 3048 of SEQ ID NO: 1245141
gaaagauuagugggccuga

SEQ ID NO: 1539603 - RNA, 19 nt, Artificial Sequence
  Description of Artificial Sequence: Synthetic oligonucleotide
  Antisense strand to SEQ ID NO: 1539602
ucaggcccacuaaucuuuc

SEQ ID NO: 1539604 - RNA, 19 nt, Artificial Sequence
  Description of Artificial Sequence: Synthetic oligonucleotide
  Sense strand starting at position 3049 of SEQ ID NO: 1245141
aaagauuagugggccugau

SEQ ID NO: 1539605 - RNA, 19 nt, Artificial Sequence
  Description of Artificial Sequence: Synthetic oligonucleotide
  Antisense strand to SEQ ID NO: 1539604
aucaggcccacuaaucuuu

SEQ ID NO: 1539606 - RNA, 19 nt, Artificial Sequence
  Description of Artificial Sequence: Synthetic oligonucleotide
  Sense strand starting at position 3121 of SEQ ID NO: 1245141
ggaagacuuugguaggaaa

SEQ ID NO: 1539607 - RNA, 19 nt, Artificial Sequence
  Description of Artificial Sequence: Synthetic oligonucleotide
  Antisense strand to SEQ ID NO: 1539606
uuuccuaccaaagucuucc

SEQ ID NO: 1539608 - RNA, 19 nt, Artificial Sequence
  Description of Artificial Sequence: Synthetic oligonucleotide
  Sense strand starting at position 3124 of SEQ ID NO: 1245141
agacuuugguaggaaagga

SEQ ID NO: 1539609 - RNA, 19 nt, Artificial Sequence
  Description of Artificial Sequence: Synthetic oligonucleotide
  Antisense strand to SEQ ID NO: 1539608
uccuuuccuaccaaagucu

SEQ ID NO: 1539610 - RNA, 19 nt, Artificial Sequence
  Description of Artificial Sequence: Synthetic oligonucleotide
  Sense strand starting at position 3218 of SEQ ID NO: 1245141
guuacuauguugcuaugga

SEQ ID NO: 1539611 - RNA, 19 nt, Artificial Sequence
  Description of Artificial Sequence: Synthetic oligonucleotide
  Antisense strand to SEQ ID NO: 1539610
uccauagcaacauaguaac

SEQ ID NO: 1539612 - RNA, 19 nt, Artificial Sequence
  Description of Artificial Sequence: Synthetic oligonucleotide
  Sense strand starting at position 3253 of SEQ ID NO: 1245141
ucuauagauguguagcuuu

SEQ ID NO: 1539613 - RNA, 19 nt, Artificial Sequence
  Description of Artificial Sequence: Synthetic oligonucleotide
  Antisense strand to SEQ ID NO: 1539612
aaagcuacacaucuauaga

SEQ ID NO: 1539614 - RNA, 19 nt, Artificial Sequence
  Description of Artificial Sequence: Synthetic oligonucleotide
  Sense strand starting at position 3286 of SEQ ID NO: 1245141
aagaaagugugacuuaagu

SEQ ID NO: 1539615 - RNA, 19 nt, Artificial Sequence
  Description of Artificial Sequence: Synthetic oligonucleotide
  Antisense strand to SEQ ID NO: 1539614
acuuaagucacacuuucuu

SEQ ID NO: 1539616 - RNA, 19 nt, Artificial Sequence
  Description of Artificial Sequence: Synthetic oligonucleotide
  Sense strand starting at position 3323 of SEQ ID NO: 1245141
aucuuauggcucugcaaag

SEQ ID NO: 1539617 - RNA, 19 nt, Artificial Sequence
  Description of Artificial Sequence: Synthetic oligonucleotide
  Antisense strand to SEQ ID NO: 1539616
cuuugcagagccauaagau

SEQ ID NO: 1539618 - RNA, 19 nt, Artificial Sequence
  Description of Artificial Sequence: Synthetic oligonucleotide
  Sense strand starting at position 3324 of SEQ ID NO: 1245141
ucuuauggcucugcaaaga

SEQ ID NO: 1539619 - RNA, 19 nt, Artificial Sequence
  Description of Artificial Sequence: Synthetic oligonucleotide
  Antisense strand to SEQ ID NO: 1539618
ucuuugcagagccauaaga

SEQ ID NO: 1539620 - RNA, 19 nt, Artificial Sequence
  Description of Artificial Sequence: Synthetic oligonucleotide
  Sense strand starting at position 3368 of SEQ ID NO: 1245141
uugguguucggaggagacu

SEQ ID NO: 1539621 - RNA, 19 nt, Artificial Sequence
  Description of Artificial Sequence: Synthetic oligonucleotide
  Antisense strand to SEQ ID NO: 1539620
agucuccuccgaacaccaa

SEQ ID NO: 1539622 - RNA, 19 nt, Artificial Sequence
  Description of Artificial Sequence: Synthetic oligonucleotide
  Sense strand starting at position 3369 of SEQ ID NO: 1245141
ugguguucggaggagacua

SEQ ID NO: 1539623 - RNA, 19 nt, Artificial Sequence
  Description of Artificial Sequence: Synthetic oligonucleotide
  Antisense strand to SEQ ID NO: 1539622
uagucuccuccgaacacca

SEQ ID NO: 1539624 - RNA, 19 nt, Artificial Sequence
  Description of Artificial Sequence: Synthetic oligonucleotide
  Sense strand starting at position 3398 of SEQ ID NO: 1245141
acaguuaccagagguaaug

SEQ ID NO: 1539625 - RNA, 19 nt, Artificial Sequence
  Description of Artificial Sequence: Synthetic oligonucleotide
  Antisense strand to SEQ ID NO: 1539624
cauuaccucugguaacugu

SEQ ID NO: 1539626 - RNA, 19 nt, Artificial Sequence
  Description of Artificial Sequence: Synthetic oligonucleotide
  Sense strand starting at position 3412 of SEQ ID NO: 1245141
uaaugagggccugaauugu

SEQ ID NO: 1539627 - RNA, 19 nt, Artificial Sequence
  Description of Artificial Sequence: Synthetic oligonucleotide
  Antisense strand to SEQ ID NO: 1539626
acaauucaggcccucauua

SEQ ID NO: 1539628 - RNA, 19 nt, Artificial Sequence
  Description of Artificial Sequence: Synthetic oligonucleotide
  Sense strand starting at position 3457 of SEQ ID NO: 1245141
guuccaauaguggauguuu

SEQ ID NO: 1539629 - RNA, 19 nt, Artificial Sequence
  Description of Artificial Sequence: Synthetic oligonucleotide
  Antisense strand to SEQ ID NO: 1539628
aaacauccacuauuggaac

SEQ ID NO: 1539630 - RNA, 19 nt, Artificial Sequence
  Description of Artificial Sequence: Synthetic oligonucleotide
  Sense strand starting at position 3486 of SEQ ID NO: 1245141
ugcauuuccugucagaaag

SEQ ID NO: 1539631 - RNA, 19 nt, Artificial Sequence
  Description of Artificial Sequence: Synthetic oligonucleotide
  Antisense strand to SEQ ID NO: 1539630
cuuucugacaggaaaugca

SEQ ID NO: 1539632 - RNA, 19 nt, Artificial Sequence
  Description of Artificial Sequence: Synthetic oligonucleotide
  Sense strand starting at position 3610 of SEQ ID NO: 1245141
gcacauaaggucugugaau

SEQ ID NO: 1539633 - RNA, 19 nt, Artificial Sequence
  Description of Artificial Sequence: Synthetic oligonucleotide
  Antisense strand to SEQ ID NO: 1539632
auucacagaccuuaugugc

SEQ ID NO: 1539634 - RNA, 19 nt, Artificial Sequence
  Description of Artificial Sequence: Synthetic oligonucleotide
  Sense strand starting at position 3611 of SEQ ID NO: 1245141
cacauaaggucugugaaug

SEQ ID NO: 1539635 - RNA, 19 nt, Artificial Sequence
  Description of Artificial Sequence: Synthetic oligonucleotide
  Antisense strand to SEQ ID NO: 1539634
cauucacagaccuuaugug

SEQ ID NO: 1539636 - RNA, 19 nt, Artificial Sequence
  Description of Artificial Sequence: Synthetic oligonucleotide
  Sense strand starting at position 3612 of SEQ ID NO: 1245141
acauaaggucugugaauga

SEQ ID NO: 1539637 - RNA, 19 nt, Artificial Sequence
  Description of Artificial Sequence: Synthetic oligonucleotide
  Antisense strand to SEQ ID NO: 1539636
ucauucacagaccuuaugu

SEQ ID NO: 1539638 - RNA, 19 nt, Artificial Sequence
  Description of Artificial Sequence: Synthetic oligonucleotide
  Sense strand starting at position 3830 of SEQ ID NO: 1245141
gaaucuuaaucuuuguggu

SEQ ID NO: 1539639 - RNA, 19 nt, Artificial Sequence
  Description of Artificial Sequence: Synthetic oligonucleotide
  Antisense strand to SEQ ID NO: 1539638
accacaaagauuaagauuc

SEQ ID NO: 1539640 - RNA, 19 nt, Artificial Sequence
  Description of Artificial Sequence: Synthetic oligonucleotide
  Sense strand starting at position 3832 of SEQ ID NO: 1245141
aucuuaaucuuugugguga

SEQ ID NO: 1539641 - RNA, 19 nt, Artificial Sequence
  Description of Artificial Sequence: Synthetic oligonucleotide
  Antisense strand to SEQ ID NO: 1539640
ucaccacaaagauuaagau

SEQ ID NO: 1539642 - RNA, 19 nt, Artificial Sequence
  Description of Artificial Sequence: Synthetic oligonucleotide
  Sense strand starting at position 3858 of SEQ ID NO: 1245141
cagcaauagugucugaaug

SEQ ID NO: 1539643 - RNA, 19 nt, Artificial Sequence
  Description of Artificial Sequence: Synthetic oligonucleotide
  Antisense strand to SEQ ID NO: 1539642
cauucagacacuauugcug

SEQ ID NO: 1539644 - RNA, 19 nt, Artificial Sequence
  Description of Artificial Sequence: Synthetic oligonucleotide
  Sense strand starting at position 12 of SEQ ID NO: 1245142
gguguuauagcucagaagg

SEQ ID NO: 1539645 - RNA, 19 nt, Artificial Sequence
  Description of Artificial Sequence: Synthetic oligonucleotide
  Antisense strand to SEQ ID NO: 1539644
ccuucugagcuauaacacc

SEQ ID NO: 1539646 - RNA, 19 nt, Artificial Sequence
  Description of Artificial Sequence: Synthetic oligonucleotide
  Sense strand starting at position 137 of SEQ ID NO: 1245142
ggacccauccucugugaag

SEQ ID NO: 1539647 - RNA, 19 nt, Artificial Sequence
  Description of Artificial Sequence: Synthetic oligonucleotide
  Antisense strand to SEQ ID NO: 1539646
cuucacagaggaugggucc

SEQ ID NO: 1539648 - RNA, 19 nt, Artificial Sequence
  Description of Artificial Sequence: Synthetic oligonucleotide
  Sense strand starting at position 138 of SEQ ID NO: 1245142
gacccauccucugugaagu

SEQ ID NO: 1539649 - RNA, 19 nt, Artificial Sequence
  Description of Artificial Sequence: Synthetic oligonucleotide
  Antisense strand to SEQ ID NO: 1539648
acuucacagaggauggguc

SEQ ID NO: 1539650 - RNA, 19 nt, Artificial Sequence
  Description of Artificial Sequence: Synthetic oligonucleotide
  Sense strand starting at position 139 of SEQ ID NO: 1245142
acccauccucugugaaguu

SEQ ID NO: 1539651 - RNA, 19 nt, Artificial Sequence
  Description of Artificial Sequence: Synthetic oligonucleotide
  Antisense strand to SEQ ID NO: 1539650
aacuucacagaggaugggu

SEQ ID NO: 1539652 - RNA, 19 nt, Artificial Sequence
  Description of Artificial Sequence: Synthetic oligonucleotide
  Sense strand starting at position 182 of SEQ ID NO: 1245142
cgaggucacuuugcugaga

SEQ ID NO: 1539653 - RNA, 19 nt, Artificial Sequence
  Description of Artificial Sequence: Synthetic oligonucleotide
  Antisense strand to SEQ ID NO: 1539652
ucucagcaaagugaccucg

SEQ ID NO: 1539654 - RNA, 19 nt, Artificial Sequence
  Description of Artificial Sequence: Synthetic oligonucleotide
  Sense strand starting at position 183 of SEQ ID NO: 1245142
gaggucacuuugcugagau

SEQ ID NO: 1539655 - RNA, 19 nt, Artificial Sequence
  Description of Artificial Sequence: Synthetic oligonucleotide
  Antisense strand to SEQ ID NO: 1539654
aucucagcaaagugaccuc

SEQ ID NO: 1539656 - RNA, 19 nt, Artificial Sequence
  Description of Artificial Sequence: Synthetic oligonucleotide
  Sense strand starting at position 284 of SEQ ID NO: 1245142
gcuucauaugggcagaugu

SEQ ID NO: 1539657 - RNA, 19 nt, Artificial Sequence
  Description of Artificial Sequence: Synthetic oligonucleotide
  Antisense strand to SEQ ID NO: 1539656
acaucugcccauaugaagc

SEQ ID NO: 1539658 - RNA, 19 nt, Artificial Sequence
  Description of Artificial Sequence: Synthetic oligonucleotide
  Sense strand starting at position 286 of SEQ ID NO: 1245142
uucauaugggcagauguga

SEQ ID NO: 1539659 - RNA, 19 nt, Artificial Sequence
  Description of Artificial Sequence: Synthetic oligonucleotide
  Antisense strand to SEQ ID NO: 1539658
ucacaucugcccauaugaa

SEQ ID NO: 1539660 - RNA, 19 nt, Artificial Sequence
  Description of Artificial Sequence: Synthetic oligonucleotide
  Sense strand starting at position 297 of SEQ ID NO: 1245142
agaugugaaccauggcaug

SEQ ID NO: 1539661 - RNA, 19 nt, Artificial Sequence
  Description of Artificial Sequence: Synthetic oligonucleotide
  Antisense strand to SEQ ID NO: 1539660
caugccaugguucacaucu

SEQ ID NO: 1539662 - RNA, 19 nt, Artificial Sequence
  Description of Artificial Sequence: Synthetic oligonucleotide
  Sense strand starting at position 390 of SEQ ID NO: 1245142
aucccaguuucucuaggua

SEQ ID NO: 1539663 - RNA, 19 nt, Artificial Sequence
  Description of Artificial Sequence: Synthetic oligonucleotide
  Antisense strand to SEQ ID NO: 1539662
uaccuagagaaacugggau

SEQ ID NO: 1539664 - RNA, 19 nt, Artificial Sequence
  Description of Artificial Sequence: Synthetic oligonucleotide
  Sense strand starting at position 393 of SEQ ID NO: 1245142
ccaguuucucuagguauuc

SEQ ID NO: 1539665 - RNA, 19 nt, Artificial Sequence
  Description of Artificial Sequence: Synthetic oligonucleotide
  Antisense strand to SEQ ID NO: 1539664
gaauaccuagagaaacugg

SEQ ID NO: 1539666 - RNA, 19 nt, Artificial Sequence
  Description of Artificial Sequence: Synthetic oligonucleotide
  Sense strand starting at position 410 of SEQ ID NO: 1245142
ucaaccagagacuguuaua

SEQ ID NO: 1539667 - RNA, 19 nt, Artificial Sequence
  Description of Artificial Sequence: Synthetic oligonucleotide
  Antisense strand to SEQ ID NO: 1539666
uauaacagucucugguuga

SEQ ID NO: 1539668 - RNA, 19 nt, Artificial Sequence
  Description of Artificial Sequence: Synthetic oligonucleotide
  Sense strand starting at position 432 of SEQ ID NO: 1245142
ggacuuuaaccaugcaacu

SEQ ID NO: 1539669 - RNA, 19 nt, Artificial Sequence
  Description of Artificial Sequence: Synthetic oligonucleotide
  Antisense strand to SEQ ID NO: 1539668
aguugcaugguuaaagucc

SEQ ID NO: 1539670 - RNA, 19 nt, Artificial Sequence
  Description of Artificial Sequence: Synthetic oligonucleotide
  Sense strand starting at position 488 of SEQ ID NO: 1245142
gugccuucuuauuugaagu

SEQ ID NO: 1539671 - RNA, 19 nt, Artificial Sequence
  Description of Artificial Sequence: Synthetic oligonucleotide
  Antisense strand to SEQ ID NO: 1539670
acuucaaauaagaaggcac

SEQ ID NO: 1539672 - RNA, 19 nt, Artificial Sequence
  Description of Artificial Sequence: Synthetic oligonucleotide
  Sense strand starting at position 554 of SEQ ID NO: 1245142
gugugcaugguuuaauucu

SEQ ID NO: 1539673 - RNA, 19 nt, Artificial Sequence
  Description of Artificial Sequence: Synthetic oligonucleotide
  Antisense strand to SEQ ID NO: 1539672
agaauuaaaccaugcacac

SEQ ID NO: 1539674 - RNA, 19 nt, Artificial Sequence
  Description of Artificial Sequence: Synthetic oligonucleotide
  Sense strand starting at position 796 of SEQ ID NO: 1245142
uugggauugagaggucaua

SEQ ID NO: 1539675 - RNA, 19 nt, Artificial Sequence
  Description of Artificial Sequence: Synthetic oligonucleotide
  Antisense strand to SEQ ID NO: 1539674
uaugaccucucaaucccaa

SEQ ID NO: 1539676 - RNA, 19 nt, Artificial Sequence
  Description of Artificial Sequence: Synthetic oligonucleotide
  Sense strand starting at position 942 of SEQ ID NO: 1245142
uggugucacuaagucugaa

SEQ ID NO: 1539677 - RNA, 19 nt, Artificial Sequence
  Description of Artificial Sequence: Synthetic oligonucleotide
  Antisense strand to SEQ ID NO: 1539676
uucagacuuagugacacca

SEQ ID NO: 1539678 - RNA, 19 nt, Artificial Sequence
  Description of Artificial Sequence: Synthetic oligonucleotide
  Sense strand starting at position 1014 of SEQ ID NO: 1245142
ggagacucccaaggucauu

SEQ ID NO: 1539679 - RNA, 19 nt, Artificial Sequence
  Description of Artificial Sequence: Synthetic oligonucleotide
  Antisense strand to SEQ ID NO: 1539678
aaugaccuugggagucucc

SEQ ID NO: 1539680 - RNA, 19 nt, Artificial Sequence
  Description of Artificial Sequence: Synthetic oligonucleotide
  Sense strand starting at position 1051 of SEQ ID NO: 1245142
ugacucuuuccuuguucua

SEQ ID NO: 1539681 - RNA, 19 nt, Artificial Sequence
  Description of Artificial Sequence: Synthetic oligonucleotide
  Antisense strand to SEQ ID NO: 1539680
uagaacaaggaaagaguca

SEQ ID NO: 1539682 - RNA, 19 nt, Artificial Sequence
  Description of Artificial Sequence: Synthetic oligonucleotide
  Sense strand starting at position 1053 of SEQ ID NO: 1245142
acucuuuccuuguucuaga

SEQ ID NO: 1539683 - RNA, 19 nt, Artificial Sequence
  Description of Artificial Sequence: Synthetic oligonucleotide
  Antisense strand to SEQ ID NO: 1539682
ucuagaacaaggaaagagu

SEQ ID NO: 1539684 - RNA, 19 nt, Artificial Sequence
  Description of Artificial Sequence: Synthetic oligonucleotide
  Sense strand starting at position 1054 of SEQ ID NO: 1245142
cucuuuccuuguucuagau

SEQ ID NO: 1539685 - RNA, 19 nt, Artificial Sequence
  Description of Artificial Sequence: Synthetic oligonucleotide
  Antisense strand to SEQ ID NO: 1539684
aucuagaacaaggaaagag

SEQ ID NO: 1539686 - RNA, 19 nt, Artificial Sequence
  Description of Artificial Sequence: Synthetic oligonucleotide
  Sense strand starting at position 1058 of SEQ ID NO: 1245142
uuccuuguucuagauuaug

SEQ ID NO: 1539687 - RNA, 19 nt, Artificial Sequence
  Description of Artificial Sequence: Synthetic oligonucleotide
  Antisense strand to SEQ ID NO: 1539686
cauaaucuagaacaaggaa

SEQ ID NO: 1539688 - RNA, 19 nt, Artificial Sequence
  Description of Artificial Sequence: Synthetic oligonucleotide
  Sense strand starting at position 1064 of SEQ ID NO: 1245142
guucuagauuauguguaac

SEQ ID NO: 1539689 - RNA, 19 nt, Artificial Sequence
  Description of Artificial Sequence: Synthetic oligonucleotide
  Antisense strand to SEQ ID NO: 1539688
guuacacauaaucuagaac

SEQ ID NO: 1539690 - RNA, 19 nt, Artificial Sequence
  Description of Artificial Sequence: Synthetic oligonucleotide
  Sense strand starting at position 1066 of SEQ ID NO: 1245142
ucuagauuauguguaacga

SEQ ID NO: 1539691 - RNA, 19 nt, Artificial Sequence
  Description of Artificial Sequence: Synthetic oligonucleotide
  Antisense strand to SEQ ID NO: 1539690
ucguuacacauaaucuaga

SEQ ID NO: 1539692 - RNA, 19 nt, Artificial Sequence
  Description of Artificial Sequence: Synthetic oligonucleotide
  Sense strand starting at position 1067 of SEQ ID NO: 1245142
cuagauuauguguaacgau

SEQ ID NO: 1539693 - RNA, 19 nt, Artificial Sequence
  Description of Artificial Sequence: Synthetic oligonucleotide
  Antisense strand to SEQ ID NO: 1539692
aucguuacacauaaucuag

SEQ ID NO: 1539694 - RNA, 19 nt, Artificial Sequence
  Description of Artificial Sequence: Synthetic oligonucleotide
  Sense strand starting at position 1182 of SEQ ID NO: 1245142
uuauuugaaugcgauauag

SEQ ID NO: 1539695 - RNA, 19 nt, Artificial Sequence
  Description of Artificial Sequence: Synthetic oligonucleotide
  Antisense strand to SEQ ID NO: 1539694
cuauaucgcauucaaauaa

SEQ ID NO: 1539696 - RNA, 19 nt, Artificial Sequence
  Description of Artificial Sequence: Synthetic oligonucleotide
  Sense strand starting at position 1220 of SEQ ID NO: 1245142
gcucuaccggguuagaauc

SEQ ID NO: 1539697 - RNA, 19 nt, Artificial Sequence
  Description of Artificial Sequence: Synthetic oligonucleotide
  Antisense strand to SEQ ID NO: 1539696
gauucuaacccgguagagc

SEQ ID NO: 1539698 - RNA, 19 nt, Artificial Sequence
  Description of Artificial Sequence: Synthetic oligonucleotide
  Sense strand starting at position 1227 of SEQ ID NO: 1245142
cggguuagaaucuguuucu

SEQ ID NO: 1539699 - RNA, 19 nt, Artificial Sequence
  Description of Artificial Sequence: Synthetic oligonucleotide
  Antisense strand to SEQ ID NO: 1539698
agaaacagauucuaacccg

SEQ ID NO: 1539700 - RNA, 19 nt, Artificial Sequence
  Description of Artificial Sequence: Synthetic oligonucleotide
  Sense strand starting at position 1228 of SEQ ID NO: 1245142
ggguuagaaucuguuucua

SEQ ID NO: 1539701 - RNA, 19 nt, Artificial Sequence
  Description of Artificial Sequence: Synthetic oligonucleotide
  Antisense strand to SEQ ID NO: 1539700
uagaaacagauucuaaccc

SEQ ID NO: 1539702 - RNA, 19 nt, Artificial Sequence
  Description of Artificial Sequence: Synthetic oligonucleotide
  Sense strand starting at position 1230 of SEQ ID NO: 1245142
guuagaaucuguuucuaau

SEQ ID NO: 1539703 - RNA, 19 nt, Artificial Sequence
  Description of Artificial Sequence: Synthetic oligonucleotide
  Antisense strand to SEQ ID NO: 1539702
auuagaaacagauucuaac

SEQ ID NO: 1539704 - RNA, 19 nt, Artificial Sequence
  Description of Artificial Sequence: Synthetic oligonucleotide
  Sense strand starting at position 1272 of SEQ ID NO: 1245142
acaguuagauuugggauuu

SEQ ID NO: 1539705 - RNA, 19 nt, Artificial Sequence
  Description of Artificial Sequence: Synthetic oligonucleotide
  Antisense strand to SEQ ID NO: 1539704
aaaucccaaaucuaacugu

SEQ ID NO: 1539706 - RNA, 19 nt, Artificial Sequence
  Description of Artificial Sequence: Synthetic oligonucleotide
  Sense strand starting at position 1273 of SEQ ID NO: 1245142
caguuagauuugggauuua

SEQ ID NO: 1539707 - RNA, 19 nt, Artificial Sequence
  Description of Artificial Sequence: Synthetic oligonucleotide
  Antisense strand to SEQ ID NO: 1539706
uaaaucccaaaucuaacug

SEQ ID NO: 1539708 - RNA, 19 nt, Artificial Sequence
  Description of Artificial Sequence: Synthetic oligonucleotide
  Sense strand starting at position 1366 of SEQ ID NO: 1245142
agggaauuacgagggaguu

SEQ ID NO: 1539709 - RNA, 19 nt, Artificial Sequence
  Description of Artificial Sequence: Synthetic oligonucleotide
  Antisense strand to SEQ ID NO: 1539708
aacucccucguaauucccu

SEQ ID NO: 1539710 - RNA, 19 nt, Artificial Sequence
  Description of Artificial Sequence: Synthetic oligonucleotide
  Sense strand starting at position 1590 of SEQ ID NO: 1245142
cuucgcucccgggaggauu

SEQ ID NO: 1539711 - RNA, 19 nt, Artificial Sequence
  Description of Artificial Sequence: Synthetic oligonucleotide
  Antisense strand to SEQ ID NO: 1539710
aauccucccgggagcgaag

SEQ ID NO: 1539712 - RNA, 19 nt, Artificial Sequence
  Description of Artificial Sequence: Synthetic oligonucleotide
  Sense strand starting at position 1741 of SEQ ID NO: 1245142
gugguugcugcucccgaau

SEQ ID NO: 1539713 - RNA, 19 nt, Artificial Sequence
  Description of Artificial Sequence: Synthetic oligonucleotide
  Antisense strand to SEQ ID NO: 1539712
auucgggagcagcaaccac

SEQ ID NO: 1539714 - RNA, 19 nt, Artificial Sequence
  Description of Artificial Sequence: Synthetic oligonucleotide
  Sense strand starting at position 2203 of SEQ ID NO: 1245142
gcacccuuuggccagauga

SEQ ID NO: 1539715 - RNA, 19 nt, Artificial Sequence
  Description of Artificial Sequence: Synthetic oligonucleotide
  Antisense strand to SEQ ID NO: 1539714
ucaucuggccaaagggugc

SEQ ID NO: 1539716 - RNA, 19 nt, Artificial Sequence
  Description of Artificial Sequence: Synthetic oligonucleotide
  Sense strand starting at position 2205 of SEQ ID NO: 1245142
acccuuuggccagaugauu

SEQ ID NO: 1539717 - RNA, 19 nt, Artificial Sequence
  Description of Artificial Sequence: Synthetic oligonucleotide
  Antisense strand to SEQ ID NO: 1539716
aaucaucuggccaaagggu

SEQ ID NO: 1539718 - RNA, 19 nt, Artificial Sequence
  Description of Artificial Sequence: Synthetic oligonucleotide
  Sense strand starting at position 3108 of SEQ ID NO: 1245142
ggucgaucccggucagcuu

SEQ ID NO: 1539719 - RNA, 19 nt, Artificial Sequence
  Description of Artificial Sequence: Synthetic oligonucleotide
  Antisense strand to SEQ ID NO: 1539718
aagcugaccgggaucgacc

SEQ ID NO: 1539720 - RNA, 19 nt, Artificial Sequence
  Description of Artificial Sequence: Synthetic oligonucleotide
  Sense strand starting at position 3443 of SEQ ID NO: 1245142
gcacaaccuuccuuggaga

SEQ ID NO: 1539721 - RNA, 19 nt, Artificial Sequence
  Description of Artificial Sequence: Synthetic oligonucleotide
  Antisense strand to SEQ ID NO: 1539720
ucuccaaggaagguugugc

SEQ ID NO: 1539722 - RNA, 19 nt, Artificial Sequence
  Description of Artificial Sequence: Synthetic oligonucleotide
  Sense strand starting at position 3946 of SEQ ID NO: 1245142
ugauaaaugucccuucgug

SEQ ID NO: 1539723 - RNA, 19 nt, Artificial Sequence
  Description of Artificial Sequence: Synthetic oligonucleotide
  Antisense strand to SEQ ID NO: 1539722
cacgaagggacauuuauca

SEQ ID NO: 1539724 - RNA, 19 nt, Artificial Sequence
  Description of Artificial Sequence: Synthetic oligonucleotide
  Sense strand starting at position 59 of SEQ ID NO: 1245143
gugugcauuugcccaugua

SEQ ID NO: 1539725 - RNA, 19 nt, Artificial Sequence
  Description of Artificial Sequence: Synthetic oligonucleotide
  Antisense strand to SEQ ID NO: 1539724
uacaugggcaaaugcacac

SEQ ID NO: 1539726 - RNA, 19 nt, Artificial Sequence
  Description of Artificial Sequence: Synthetic oligonucleotide
  Sense strand starting at position 62 of SEQ ID NO: 1245143
ugcauuugcccauguagua

SEQ ID NO: 1539727 - RNA, 19 nt, Artificial Sequence
  Description of Artificial Sequence: Synthetic oligonucleotide
  Antisense strand to SEQ ID NO: 1539726
uacuacaugggcaaaugca

SEQ ID NO: 1539728 - RNA, 19 nt, Artificial Sequence
  Description of Artificial Sequence: Synthetic oligonucleotide
  Sense strand starting at position 75 of SEQ ID NO: 1245143
guaguaaaccuccacuugu

SEQ ID NO: 1539729 - RNA, 19 nt, Artificial Sequence
  Description of Artificial Sequence: Synthetic oligonucleotide
  Antisense strand to SEQ ID NO: 1539728
acaaguggagguuuacuac

SEQ ID NO: 1539730 - RNA, 19 nt, Artificial Sequence
  Description of Artificial Sequence: Synthetic oligonucleotide
  Sense strand starting at position 159 of SEQ ID NO: 1245143
auaagucaucuacagucua

SEQ ID NO: 1539731 - RNA, 19 nt, Artificial Sequence
  Description of Artificial Sequence: Synthetic oligonucleotide
  Antisense strand to SEQ ID NO: 1539730
uagacuguagaugacuuau

SEQ ID NO: 1539732 - RNA, 19 nt, Artificial Sequence
  Description of Artificial Sequence: Synthetic oligonucleotide
  Sense strand starting at position 179 of SEQ ID NO: 1245143
uaaguaugguaccuaugaa

SEQ ID NO: 1539733 - RNA, 19 nt, Artificial Sequence
  Description of Artificial Sequence: Synthetic oligonucleotide
  Antisense strand to SEQ ID NO: 1539732
uucauagguaccauacuua

SEQ ID NO: 1539734 - RNA, 19 nt, Artificial Sequence
  Description of Artificial Sequence: Synthetic oligonucleotide
  Sense strand starting at position 235 of SEQ ID NO: 1245143
aucggauuacaguaucaug

SEQ ID NO: 1539735 - RNA, 19 nt, Artificial Sequence
  Description of Artificial Sequence: Synthetic oligonucleotide
  Antisense strand to SEQ ID NO: 1539734
caugauacuguaauccgau

SEQ ID NO: 1539736 - RNA, 19 nt, Artificial Sequence
  Description of Artificial Sequence: Synthetic oligonucleotide
  Sense strand starting at position 367 of SEQ ID NO: 1245143
aauuaugaggucuggccau

SEQ ID NO: 1539737 - RNA, 19 nt, Artificial Sequence
  Description of Artificial Sequence: Synthetic oligonucleotide
  Antisense strand to SEQ ID NO: 1539736
auggccagaccucauaauu

SEQ ID NO: 1539738 - RNA, 19 nt, Artificial Sequence
  Description of Artificial Sequence: Synthetic oligonucleotide
  Sense strand starting at position 1206 of SEQ ID NO: 1245143
ccacauguagucuaauaca

SEQ ID NO: 1539739 - RNA, 19 nt, Artificial Sequence
  Description of Artificial Sequence: Synthetic oligonucleotide
  Antisense strand to SEQ ID NO: 1539738
uguauuagacuacaugugg

SEQ ID NO: 1539740 - RNA, 19 nt, Artificial Sequence
  Description of Artificial Sequence: Synthetic oligonucleotide
  Sense strand starting at position 1272 of SEQ ID NO: 1245143
uggguuaauuucuagccau

SEQ ID NO: 1539741 - RNA, 19 nt, Artificial Sequence
  Description of Artificial Sequence: Synthetic oligonucleotide
  Antisense strand to SEQ ID NO: 1539740
auggcuagaaauuaaccca

SEQ ID NO: 1539742 - RNA, 19 nt, Artificial Sequence
  Description of Artificial Sequence: Synthetic oligonucleotide
  Sense strand starting at position 1380 of SEQ ID NO: 1245143
acagcacuagucuacuuau

SEQ ID NO: 1539743 - RNA, 19 nt, Artificial Sequence
  Description of Artificial Sequence: Synthetic oligonucleotide
  Antisense strand to SEQ ID NO: 1539742
auaaguagacuagugcugu

SEQ ID NO: 1539744 - RNA, 19 nt, Artificial Sequence
  Description of Artificial Sequence: Synthetic oligonucleotide
  Sense strand starting at position 1395 of SEQ ID NO: 1245143
uuauaaaguucugccaaag

SEQ ID NO: 1539745 - RNA, 19 nt, Artificial Sequence
  Description of Artificial Sequence: Synthetic oligonucleotide
  Antisense strand to SEQ ID NO: 1539744
cuuuggcagaacuuuauaa

SEQ ID NO: 1539746 - RNA, 19 nt, Artificial Sequence
  Description of Artificial Sequence: Synthetic oligonucleotide
  Sense strand starting at position 1825 of SEQ ID NO: 1245143
gggagauccucaccuuugu

SEQ ID NO: 1539747 - RNA, 19 nt, Artificial Sequence
  Description of Artificial Sequence: Synthetic oligonucleotide
  Antisense strand to SEQ ID NO: 1539746
acaaaggugaggaucuccc

SEQ ID NO: 1539748 - RNA, 19 nt, Artificial Sequence
  Description of Artificial Sequence: Synthetic oligonucleotide
  Sense strand starting at position 1978 of SEQ ID NO: 1245143
cggacugucacaugaucga

SEQ ID NO: 1539749 - RNA, 19 nt, Artificial Sequence
  Description of Artificial Sequence: Synthetic oligonucleotide
  Antisense strand to SEQ ID NO: 1539748
ucgaucaugugacaguccg

SEQ ID NO: 1539750 - RNA, 19 nt, Artificial Sequence
  Description of Artificial Sequence: Synthetic oligonucleotide
  Sense strand starting at position 2341 of SEQ ID NO: 1245143
ccagucgguuagccuaaau

SEQ ID NO: 1539751 - RNA, 19 nt, Artificial Sequence
  Description of Artificial Sequence: Synthetic oligonucleotide
  Antisense strand to SEQ ID NO: 1539750
auuuaggcuaaccgacugg

SEQ ID NO: 1539752 - RNA, 19 nt, Artificial Sequence
  Description of Artificial Sequence: Synthetic oligonucleotide
  Sense strand starting at position 2451 of SEQ ID NO: 1245143
uucggaugucaugagaauu

SEQ ID NO: 1539753 - RNA, 19 nt, Artificial Sequence
  Description of Artificial Sequence: Synthetic oligonucleotide
  Antisense strand to SEQ ID NO: 1539752
aauucucaugacauccgaa

SEQ ID NO: 1539754 - RNA, 19 nt, Artificial Sequence
  Description of Artificial Sequence: Synthetic oligonucleotide
  Sense strand starting at position 2473 of SEQ ID NO: 1245143
ugggcucucccagaaaggu

SEQ ID NO: 1539755 - RNA, 19 nt, Artificial Sequence
  Description of Artificial Sequence: Synthetic oligonucleotide
  Antisense strand to SEQ ID NO: 1539754
accuuucugggagagccca

SEQ ID NO: 1539756 - RNA, 19 nt, Artificial Sequence
  Description of Artificial Sequence: Synthetic oligonucleotide
  Sense strand starting at position 2514 of SEQ ID NO: 1245143
gguacaugguaguuauuaa

SEQ ID NO: 1539757 - RNA, 19 nt, Artificial Sequence
  Description of Artificial Sequence: Synthetic oligonucleotide
  Antisense strand to SEQ ID NO: 1539756
uuaauaacuaccauguacc

SEQ ID NO: 1539758 - RNA, 19 nt, Artificial Sequence
  Description of Artificial Sequence: Synthetic oligonucleotide
  Sense strand starting at position 2515 of SEQ ID NO: 1245143
guacaugguaguuauuaau

SEQ ID NO: 1539759 - RNA, 19 nt, Artificial Sequence
  Description of Artificial Sequence: Synthetic oligonucleotide
  Antisense strand to SEQ ID NO: 1539758
auuaauaacuaccauguac

SEQ ID NO: 1539760 - RNA, 19 nt, Artificial Sequence
  Description of Artificial Sequence: Synthetic oligonucleotide
  Sense strand starting at position 2717 of SEQ ID NO: 1245143
uucugugauuugcuuguau

SEQ ID NO: 1539761 - RNA, 19 nt, Artificial Sequence
  Description of Artificial Sequence: Synthetic oligonucleotide
  Antisense strand to SEQ ID NO: 1539760
auacaagcaaaucacagaa

SEQ ID NO: 1539762 - RNA, 19 nt, Artificial Sequence
  Description of Artificial Sequence: Synthetic oligonucleotide
  Sense strand starting at position 2724 of SEQ ID NO: 1245143
auuugcuuguauccuuauu

SEQ ID NO: 1539763 - RNA, 19 nt, Artificial Sequence
  Description of Artificial Sequence: Synthetic oligonucleotide
  Antisense strand to SEQ ID NO: 1539762
aauaaggauacaagcaaau

SEQ ID NO: 1539764 - RNA, 19 nt, Artificial Sequence
  Description of Artificial Sequence: Synthetic oligonucleotide
  Sense strand starting at position 2729 of SEQ ID NO: 1245143
cuuguauccuuauuguuag

SEQ ID NO: 1539765 - RNA, 19 nt, Artificial Sequence
  Description of Artificial Sequence: Synthetic oligonucleotide
  Antisense strand to SEQ ID NO: 1539764
cuaacaauaaggauacaag

SEQ ID NO: 1539766 - RNA, 19 nt, Artificial Sequence
  Description of Artificial Sequence: Synthetic oligonucleotide
  Sense strand starting at position 2739 of SEQ ID NO: 1245143
uauuguuagugucugucaa

SEQ ID NO: 1539767 - RNA, 19 nt, Artificial Sequence
  Description of Artificial Sequence: Synthetic oligonucleotide
  Antisense strand to SEQ ID NO: 1539766
uugacagacacuaacaaua

SEQ ID NO: 1539768 - RNA, 19 nt, Artificial Sequence
  Description of Artificial Sequence: Synthetic oligonucleotide
  Sense strand starting at position 2749 of SEQ ID NO: 1245143
gucugucaauccucccaga

SEQ ID NO: 1539769 - RNA, 19 nt, Artificial Sequence
  Description of Artificial Sequence: Synthetic oligonucleotide
  Antisense strand to SEQ ID NO: 1539768
ucugggaggauugacagac

SEQ ID NO: 1539770 - RNA, 19 nt, Artificial Sequence
  Description of Artificial Sequence: Synthetic oligonucleotide
  Sense strand starting at position 2805 of SEQ ID NO: 1245143
gccugauguauccaagggu

SEQ ID NO: 1539771 - RNA, 19 nt, Artificial Sequence
  Description of Artificial Sequence: Synthetic oligonucleotide
  Antisense strand to SEQ ID NO: 1539770
acccuuggauacaucaggc

SEQ ID NO: 1539772 - RNA, 19 nt, Artificial Sequence
  Description of Artificial Sequence: Synthetic oligonucleotide
  Sense strand starting at position 2808 of SEQ ID NO: 1245143
ugauguauccaagggucuu

SEQ ID NO: 1539773 - RNA, 19 nt, Artificial Sequence
  Description of Artificial Sequence: Synthetic oligonucleotide
  Antisense strand to SEQ ID NO: 1539772
aagacccuuggauacauca

SEQ ID NO: 1539774 - RNA, 19 nt, Artificial Sequence
  Description of Artificial Sequence: Synthetic oligonucleotide
  Sense strand starting at position 2814 of SEQ ID NO: 1245143
auccaagggucuuuagaac

SEQ ID NO: 1539775 - RNA, 19 nt, Artificial Sequence
  Description of Artificial Sequence: Synthetic oligonucleotide
  Antisense strand to SEQ ID NO: 1539774
guucuaaagacccuuggau

SEQ ID NO: 1539776 - RNA, 19 nt, Artificial Sequence
  Description of Artificial Sequence: Synthetic oligonucleotide
  Sense strand starting at position 2839 of SEQ ID NO: 1245143
cguaguagcacauaguaga

SEQ ID NO: 1539777 - RNA, 19 nt, Artificial Sequence
  Description of Artificial Sequence: Synthetic oligonucleotide
  Antisense strand to SEQ ID NO: 1539776
ucuacuaugugcuacuacg

SEQ ID NO: 1539778 - RNA, 19 nt, Artificial Sequence
  Description of Artificial Sequence: Synthetic oligonucleotide
  Sense strand starting at position 2883 of SEQ ID NO: 1245143
cacaaaugaguaugaguuu

SEQ ID NO: 1539779 - RNA, 19 nt, Artificial Sequence
  Description of Artificial Sequence: Synthetic oligonucleotide
  Antisense strand to SEQ ID NO: 1539778
aaacucauacucauuugug

SEQ ID NO: 1539780 - RNA, 19 nt, Artificial Sequence
  Description of Artificial Sequence: Synthetic oligonucleotide
  Sense strand starting at position 2914 of SEQ ID NO: 1245143
ggguaagaucguugaaaug

SEQ ID NO: 1539781 - RNA, 19 nt, Artificial Sequence
  Description of Artificial Sequence: Synthetic oligonucleotide
  Antisense strand to SEQ ID NO: 1539780
cauuucaacgaucuuaccc

SEQ ID NO: 1539782 - RNA, 19 nt, Artificial Sequence
  Description of Artificial Sequence: Synthetic oligonucleotide
  Sense strand starting at position 3296 of SEQ ID NO: 1245143
uguagcauacccuagaaua

SEQ ID NO: 1539783 - RNA, 19 nt, Artificial Sequence
  Description of Artificial Sequence: Synthetic oligonucleotide
  Antisense strand to SEQ ID NO: 1539782
uauucuaggguaugcuaca

SEQ ID NO: 1539784 - RNA, 19 nt, Artificial Sequence
  Description of Artificial Sequence: Synthetic oligonucleotide
  Sense strand starting at position 3521 of SEQ ID NO: 1245143
ugugcauguauauaaaguu

SEQ ID NO: 1539785 - RNA, 19 nt, Artificial Sequence
  Description of Artificial Sequence: Synthetic oligonucleotide
  Antisense strand to SEQ ID NO: 1539784
aacuuuauauacaugcaca

SEQ ID NO: 1539786 - RNA, 19 nt, Artificial Sequence
  Description of Artificial Sequence: Synthetic oligonucleotide
  Sense strand starting at position 3536 of SEQ ID NO: 1245143
aguuaucaccugcaaagag

SEQ ID NO: 1539787 - RNA, 19 nt, Artificial Sequence
  Description of Artificial Sequence: Synthetic oligonucleotide
  Antisense strand to SEQ ID NO: 1539786
cucuuugcaggugauaacu

SEQ ID NO: 1539788 - RNA, 19 nt, Artificial Sequence
  Description of Artificial Sequence: Synthetic oligonucleotide
  Sense strand starting at position 3545 of SEQ ID NO: 1245143
cugcaaagaguuggccaau

SEQ ID NO: 1539789 - RNA, 19 nt, Artificial Sequence
  Description of Artificial Sequence: Synthetic oligonucleotide
  Antisense strand to SEQ ID NO: 1539788
auuggccaacucuuugcag

SEQ ID NO: 1539790 - RNA, 19 nt, Artificial Sequence
  Description of Artificial Sequence: Synthetic oligonucleotide
  Sense strand starting at position 3546 of SEQ ID NO: 1245143
ugcaaagaguuggccaaua

SEQ ID NO: 1539791 - RNA, 19 nt, Artificial Sequence
  Description of Artificial Sequence: Synthetic oligonucleotide
  Antisense strand to SEQ ID NO: 1539790
uauuggccaacucuuugca

SEQ ID NO: 1539792 - RNA, 19 nt, Artificial Sequence
  Description of Artificial Sequence: Synthetic oligonucleotide
  Sense strand starting at position 3605 of SEQ ID NO: 1245143
ugcugauauuucucccagu

SEQ ID NO: 1539793 - RNA, 19 nt, Artificial Sequence
  Description of Artificial Sequence: Synthetic oligonucleotide
  Antisense strand to SEQ ID NO: 1539792
acugggagaaauaucagca

SEQ ID NO: 1539794 - RNA, 19 nt, Artificial Sequence
  Description of Artificial Sequence: Synthetic oligonucleotide
  Sense strand starting at position 3606 of SEQ ID NO: 1245143
gcugauauuucucccaguc

SEQ ID NO: 1539795 - RNA, 19 nt, Artificial Sequence
  Description of Artificial Sequence: Synthetic oligonucleotide
  Antisense strand to SEQ ID NO: 1539794
gacugggagaaauaucagc

SEQ ID NO: 1539796 - RNA, 19 nt, Artificial Sequence
  Description of Artificial Sequence: Synthetic oligonucleotide
  Sense strand starting at position 3608 of SEQ ID NO: 1245143
ugauauuucucccagucug

SEQ ID NO: 1539797 - RNA, 19 nt, Artificial Sequence
  Description of Artificial Sequence: Synthetic oligonucleotide
  Antisense strand to SEQ ID NO: 1539796
cagacugggagaaauauca

SEQ ID NO: 1539798 - RNA, 19 nt, Artificial Sequence
  Description of Artificial Sequence: Synthetic oligonucleotide
  Sense strand starting at position 3695 of SEQ ID NO: 1245143
cccacuacuuggucagcaa

SEQ ID NO: 1539799 - RNA, 19 nt, Artificial Sequence
  Description of Artificial Sequence: Synthetic oligonucleotide
  Antisense strand to SEQ ID NO: 1539798
uugcugaccaaguaguggg

SEQ ID NO: 1539800 - RNA, 19 nt, Artificial Sequence
  Description of Artificial Sequence: Synthetic oligonucleotide
  Sense strand starting at position 3696 of SEQ ID NO: 1245143
ccacuacuuggucagcaaa

SEQ ID NO: 1539801 - RNA, 19 nt, Artificial Sequence
  Description of Artificial Sequence: Synthetic oligonucleotide
  Antisense strand to SEQ ID NO: 1539800
uuugcugaccaaguagugg

SEQ ID NO: 1539802 - RNA, 19 nt, Artificial Sequence
  Description of Artificial Sequence: Synthetic oligonucleotide
  Sense strand starting at position 3787 of SEQ ID NO: 1245143
uugugauacguguaucauc

SEQ ID NO: 1539803 - RNA, 19 nt, Artificial Sequence
  Description of Artificial Sequence: Synthetic oligonucleotide
  Antisense strand to SEQ ID NO: 1539802
gaugauacacguaucacaa

SEQ ID NO: 1539804 - RNA, 19 nt, Artificial Sequence
  Description of Artificial Sequence: Synthetic oligonucleotide
  Sense strand starting at position 21 of SEQ ID NO: 1245144
ugagaaaggugagacaaua

SEQ ID NO: 1539805 - RNA, 19 nt, Artificial Sequence
  Description of Artificial Sequence: Synthetic oligonucleotide
  Antisense strand to SEQ ID NO: 1539804
uauugucucaccuuucuca

SEQ ID NO: 1539806 - RNA, 19 nt, Artificial Sequence
  Description of Artificial Sequence: Synthetic oligonucleotide
  Sense strand starting at position 29 of SEQ ID NO: 1245144
gugagacaauagcauauuu

SEQ ID NO: 1539807 - RNA, 19 nt, Artificial Sequence
  Description of Artificial Sequence: Synthetic oligonucleotide
  Antisense strand to SEQ ID NO: 1539806
aaauaugcuauugucucac

SEQ ID NO: 1539808 - RNA, 19 nt, Artificial Sequence
  Description of Artificial Sequence: Synthetic oligonucleotide
  Sense strand starting at position 50 of SEQ ID NO: 1245144
cucaguuagcaaugauaaa

SEQ ID NO: 1539809 - RNA, 19 nt, Artificial Sequence
  Description of Artificial Sequence: Synthetic oligonucleotide
  Antisense strand to SEQ ID NO: 1539808
uuuaucauugcuaacugag

SEQ ID NO: 1539810 - RNA, 19 nt, Artificial Sequence
  Description of Artificial Sequence: Synthetic oligonucleotide
  Sense strand starting at position 79 of SEQ ID NO: 1245144
cucguaagccaggacaaau

SEQ ID NO: 1539811 - RNA, 19 nt, Artificial Sequence
  Description of Artificial Sequence: Synthetic oligonucleotide
  Antisense strand to SEQ ID NO: 1539810
auuuguccuggcuuacgag

SEQ ID NO: 1539812 - RNA, 19 nt, Artificial Sequence
  Description of Artificial Sequence: Synthetic oligonucleotide
  Sense strand starting at position 99 of SEQ ID NO: 1245144
uuggaauugugcuuccaaa

SEQ ID NO: 1539813 - RNA, 19 nt, Artificial Sequence
  Description of Artificial Sequence: Synthetic oligonucleotide
  Antisense strand to SEQ ID NO: 1539812
uuuggaagcacaauuccaa

SEQ ID NO: 1539814 - RNA, 19 nt, Artificial Sequence
  Description of Artificial Sequence: Synthetic oligonucleotide
  Sense strand starting at position 184 of SEQ ID NO: 1245144
aguccuaguuuccucauuu

SEQ ID NO: 1539815 - RNA, 19 nt, Artificial Sequence
  Description of Artificial Sequence: Synthetic oligonucleotide
  Antisense strand to SEQ ID NO: 1539814
aaaugaggaaacuaggacu

SEQ ID NO: 1539816 - RNA, 19 nt, Artificial Sequence
  Description of Artificial Sequence: Synthetic oligonucleotide
  Sense strand starting at position 185 of SEQ ID NO: 1245144
guccuaguuuccucauuuc

SEQ ID NO: 1539817 - RNA, 19 nt, Artificial Sequence
  Description of Artificial Sequence: Synthetic oligonucleotide
  Antisense strand to SEQ ID NO: 1539816
gaaaugaggaaacuaggac

SEQ ID NO: 1539818 - RNA, 19 nt, Artificial Sequence
  Description of Artificial Sequence: Synthetic oligonucleotide
  Sense strand starting at position 209 of SEQ ID NO: 1245144
augcucuaggccugaauuu

SEQ ID NO: 1539819 - RNA, 19 nt, Artificial Sequence
  Description of Artificial Sequence: Synthetic oligonucleotide
  Antisense strand to SEQ ID NO: 1539818
aaauucaggccuagagcau

SEQ ID NO: 1539820 - RNA, 19 nt, Artificial Sequence
  Description of Artificial Sequence: Synthetic oligonucleotide
  Sense strand starting at position 632 of SEQ ID NO: 1245144
acuuuauucguguuggugu

SEQ ID NO: 1539821 - RNA, 19 nt, Artificial Sequence
  Description of Artificial Sequence: Synthetic oligonucleotide
  Antisense strand to SEQ ID NO: 1539820
acaccaacacgaauaaagu

SEQ ID NO: 1539822 - RNA, 19 nt, Artificial Sequence
  Description of Artificial Sequence: Synthetic oligonucleotide
  Sense strand starting at position 640 of SEQ ID NO: 1245144
cguguugguguccugugua

SEQ ID NO: 1539823 - RNA, 19 nt, Artificial Sequence
  Description of Artificial Sequence: Synthetic oligonucleotide
  Antisense strand to SEQ ID NO: 1539822
uacacaggacaccaacacg

SEQ ID NO: 1539824 - RNA, 19 nt, Artificial Sequence
  Description of Artificial Sequence: Synthetic oligonucleotide
  Sense strand starting at position 652 of SEQ ID NO: 1245144
cuguguaaagcagaaacua

SEQ ID NO: 1539825 - RNA, 19 nt, Artificial Sequence
  Description of Artificial Sequence: Synthetic oligonucleotide
  Antisense strand to SEQ ID NO: 1539824
uaguuucugcuuuacacag

SEQ ID NO: 1539826 - RNA, 19 nt, Artificial Sequence
  Description of Artificial Sequence: Synthetic oligonucleotide
  Sense strand starting at position 668 of SEQ ID NO: 1245144
cuaaguacuugaccagaag

SEQ ID NO: 1539827 - RNA, 19 nt, Artificial Sequence
  Description of Artificial Sequence: Synthetic oligonucleotide
  Antisense strand to SEQ ID NO: 1539826
cuucuggucaaguacuuag

SEQ ID NO: 1539828 - RNA, 19 nt, Artificial Sequence
  Description of Artificial Sequence: Synthetic oligonucleotide
  Sense strand starting at position 819 of SEQ ID NO: 1245144
guuuccugcgaagcuuauu

SEQ ID NO: 1539829 - RNA, 19 nt, Artificial Sequence
  Description of Artificial Sequence: Synthetic oligonucleotide
  Antisense strand to SEQ ID NO: 1539828
aauaagcuucgcaggaaac

SEQ ID NO: 1539830 - RNA, 19 nt, Artificial Sequence
  Description of Artificial Sequence: Synthetic oligonucleotide
  Sense strand starting at position 822 of SEQ ID NO: 1245144
uccugcgaagcuuauuuau

SEQ ID NO: 1539831 - RNA, 19 nt, Artificial Sequence
  Description of Artificial Sequence: Synthetic oligonucleotide
  Antisense strand to SEQ ID NO: 1539830
auaaauaagcuucgcagga

SEQ ID NO: 1539832 - RNA, 19 nt, Artificial Sequence
  Description of Artificial Sequence: Synthetic oligonucleotide
  Sense strand starting at position 824 of SEQ ID NO: 1245144
cugcgaagcuuauuuauug

SEQ ID NO: 1539833 - RNA, 19 nt, Artificial Sequence
  Description of Artificial Sequence: Synthetic oligonucleotide
  Antisense strand to SEQ ID NO: 1539832
caauaaauaagcuucgcag

SEQ ID NO: 1539834 - RNA, 19 nt, Artificial Sequence
  Description of Artificial Sequence: Synthetic oligonucleotide
  Sense strand starting at position 825 of SEQ ID NO: 1245144
ugcgaagcuuauuuauuga

SEQ ID NO: 1539835 - RNA, 19 nt, Artificial Sequence
  Description of Artificial Sequence: Synthetic oligonucleotide
  Antisense strand to SEQ ID NO: 1539834
ucaauaaauaagcuucgca

SEQ ID NO: 1539836 - RNA, 19 nt, Artificial Sequence
  Description of Artificial Sequence: Synthetic oligonucleotide
  Sense strand starting at position 881 of SEQ ID NO: 1245144
gcgauuccuguuuaaagga

SEQ ID NO: 1539837 - RNA, 19 nt, Artificial Sequence
  Description of Artificial Sequence: Synthetic oligonucleotide
  Antisense strand to SEQ ID NO: 1539836
uccuuuaaacaggaaucgc

SEQ ID NO: 1539838 - RNA, 19 nt, Artificial Sequence
  Description of Artificial Sequence: Synthetic oligonucleotide
  Sense strand starting at position 1076 of SEQ ID NO: 1245144
ggagguagucuucgaauug

SEQ ID NO: 1539839 - RNA, 19 nt, Artificial Sequence
  Description of Artificial Sequence: Synthetic oligonucleotide
  Antisense strand to SEQ ID NO: 1539838
caauucgaagacuaccucc

SEQ ID NO: 1539840 - RNA, 19 nt, Artificial Sequence
  Description of Artificial Sequence: Synthetic oligonucleotide
  Sense strand starting at position 1277 of SEQ ID NO: 1245144
ccauuugcagcaugaguua

SEQ ID NO: 1539841 - RNA, 19 nt, Artificial Sequence
  Description of Artificial Sequence: Synthetic oligonucleotide
  Antisense strand to SEQ ID NO: 1539840
uaacucaugcugcaaaugg

SEQ ID NO: 1539842 - RNA, 19 nt, Artificial Sequence
  Description of Artificial Sequence: Synthetic oligonucleotide
  Sense strand starting at position 1289 of SEQ ID NO: 1245144
ugaguuacucuaugaccuu

SEQ ID NO: 1539843 - RNA, 19 nt, Artificial Sequence
  Description of Artificial Sequence: Synthetic oligonucleotide
  Antisense strand to SEQ ID NO: 1539842
aaggucauagaguaacuca

SEQ ID NO: 1539844 - RNA, 19 nt, Artificial Sequence
  Description of Artificial Sequence: Synthetic oligonucleotide
  Sense strand starting at position 2368 of SEQ ID NO: 1245144
ugugguuuaccuuggaaau

SEQ ID NO: 1539845 - RNA, 19 nt, Artificial Sequence
  Description of Artificial Sequence: Synthetic oligonucleotide
  Antisense strand to SEQ ID NO: 1539844
auuuccaagguaaaccaca

SEQ ID NO: 1539846 - RNA, 19 nt, Artificial Sequence
  Description of Artificial Sequence: Synthetic oligonucleotide
  Sense strand starting at position 2369 of SEQ ID NO: 1245144
gugguuuaccuuggaaauu

SEQ ID NO: 1539847 - RNA, 19 nt, Artificial Sequence
  Description of Artificial Sequence: Synthetic oligonucleotide
  Antisense strand to SEQ ID NO: 1539846
aauuuccaagguaaaccac

SEQ ID NO: 1539848 - RNA, 19 nt, Artificial Sequence
  Description of Artificial Sequence: Synthetic oligonucleotide
  Sense strand starting at position 2370 of SEQ ID NO: 1245144
ugguuuaccuuggaaauuu

SEQ ID NO: 1539849 - RNA, 19 nt, Artificial Sequence
  Description of Artificial Sequence: Synthetic oligonucleotide
  Antisense strand to SEQ ID NO: 1539848
aaauuuccaagguaaacca

SEQ ID NO: 1539850 - RNA, 19 nt, Artificial Sequence
  Description of Artificial Sequence: Synthetic oligonucleotide
  Sense strand starting at position 2378 of SEQ ID NO: 1245144
cuuggaaauuugucgcaac

SEQ ID NO: 1539851 - RNA, 19 nt, Artificial Sequence
  Description of Artificial Sequence: Synthetic oligonucleotide
  Antisense strand to SEQ ID NO: 1539850
guugcgacaaauuuccaag

SEQ ID NO: 1539852 - RNA, 19 nt, Artificial Sequence
  Description of Artificial Sequence: Synthetic oligonucleotide
  Sense strand starting at position 2426 of SEQ ID NO: 1245144
gucugcgauguauaaucca

SEQ ID NO: 1539853 - RNA, 19 nt, Artificial Sequence
  Description of Artificial Sequence: Synthetic oligonucleotide
  Antisense strand to SEQ ID NO: 1539852
uggauuauacaucgcagac

SEQ ID NO: 1539854 - RNA, 19 nt, Artificial Sequence
  Description of Artificial Sequence: Synthetic oligonucleotide
  Sense strand starting at position 2864 of SEQ ID NO: 1245144
uuucuuccuguguaucaga

SEQ ID NO: 1539855 - RNA, 19 nt, Artificial Sequence
  Description of Artificial Sequence: Synthetic oligonucleotide
  Antisense strand to SEQ ID NO: 1539854
ucugauacacaggaagaaa

SEQ ID NO: 1539856 - RNA, 19 nt, Artificial Sequence
  Description of Artificial Sequence: Synthetic oligonucleotide
  Sense strand starting at position 2874 of SEQ ID NO: 1245144
uguaucagagugcaagaau

SEQ ID NO: 1539857 - RNA, 19 nt, Artificial Sequence
  Description of Artificial Sequence: Synthetic oligonucleotide
  Antisense strand to SEQ ID NO: 1539856
auucuugcacucugauaca

SEQ ID NO: 1539858 - RNA, 19 nt, Artificial Sequence
  Description of Artificial Sequence: Synthetic oligonucleotide
  Sense strand starting at position 2883 of SEQ ID NO: 1245144
gugcaagaaucaucagaaa

SEQ ID NO: 1539859 - RNA, 19 nt, Artificial Sequence
  Description of Artificial Sequence: Synthetic oligonucleotide
  Antisense strand to SEQ ID NO: 1539858
uuucugaugauucuugcac

SEQ ID NO: 1539860 - RNA, 19 nt, Artificial Sequence
  Description of Artificial Sequence: Synthetic oligonucleotide
  Sense strand starting at position 2922 of SEQ ID NO: 1245144
cuuagucagacugaguguu

SEQ ID NO: 1539861 - RNA, 19 nt, Artificial Sequence
  Description of Artificial Sequence: Synthetic oligonucleotide
  Antisense strand to SEQ ID NO: 1539860
aacacucagucugacuaag

SEQ ID NO: 1539862 - RNA, 19 nt, Artificial Sequence
  Description of Artificial Sequence: Synthetic oligonucleotide
  Sense strand starting at position 2962 of SEQ ID NO: 1245144
cuuggacgccucuagagau

SEQ ID NO: 1539863 - RNA, 19 nt, Artificial Sequence
  Description of Artificial Sequence: Synthetic oligonucleotide
  Antisense strand to SEQ ID NO: 1539862
aucucuagaggcguccaag

SEQ ID NO: 1539864 - RNA, 19 nt, Artificial Sequence
  Description of Artificial Sequence: Synthetic oligonucleotide
  Sense strand starting at position 2968 of SEQ ID NO: 1245144
cgccucuagagauagaauc

SEQ ID NO: 1539865 - RNA, 19 nt, Artificial Sequence
  Description of Artificial Sequence: Synthetic oligonucleotide
  Antisense strand to SEQ ID NO: 1539864
gauucuaucucuagaggcg

SEQ ID NO: 1539866 - RNA, 19 nt, Artificial Sequence
  Description of Artificial Sequence: Synthetic oligonucleotide
  Sense strand starting at position 3139 of SEQ ID NO: 1245144
cccugagaacugcauguau

SEQ ID NO: 1539867 - RNA, 19 nt, Artificial Sequence
  Description of Artificial Sequence: Synthetic oligonucleotide
  Antisense strand to SEQ ID NO: 1539866
auacaugcaguucucaggg

SEQ ID NO: 1539868 - RNA, 19 nt, Artificial Sequence
  Description of Artificial Sequence: Synthetic oligonucleotide
  Sense strand starting at position 3141 of SEQ ID NO: 1245144
cugagaacugcauguauga

SEQ ID NO: 1539869 - RNA, 19 nt, Artificial Sequence
  Description of Artificial Sequence: Synthetic oligonucleotide
  Antisense strand to SEQ ID NO: 1539868
ucauacaugcaguucucag

SEQ ID NO: 1539870 - RNA, 19 nt, Artificial Sequence
  Description of Artificial Sequence: Synthetic oligonucleotide
  Sense strand starting at position 3670 of SEQ ID NO: 1245144
ugcuuauuugcggaacugu

SEQ ID NO: 1539871 - RNA, 19 nt, Artificial Sequence
  Description of Artificial Sequence: Synthetic oligonucleotide
  Antisense strand to SEQ ID NO: 1539870
acaguuccgcaaauaagca

SEQ ID NO: 1539872 - RNA, 19 nt, Artificial Sequence
  Description of Artificial Sequence: Synthetic oligonucleotide
  Sense strand starting at position 3728 of SEQ ID NO: 1245144
ggugaucauaaauggguuu

SEQ ID NO: 1539873 - RNA, 19 nt, Artificial Sequence
  Description of Artificial Sequence: Synthetic oligonucleotide
  Antisense strand to SEQ ID NO: 1539872
aaacccauuuaugaucacc

SEQ ID NO: 1539874 - RNA, 19 nt, Artificial Sequence
  Description of Artificial Sequence: Synthetic oligonucleotide
  Sense strand starting at position 3801 of SEQ ID NO: 1245144
uuugucaaaccugauguuu

SEQ ID NO: 1539875 - RNA, 19 nt, Artificial Sequence
  Description of Artificial Sequence: Synthetic oligonucleotide
  Antisense strand to SEQ ID NO: 1539874
aaacaucagguuugacaaa

SEQ ID NO: 1539876 - RNA, 19 nt, Artificial Sequence
  Description of Artificial Sequence: Synthetic oligonucleotide
  Sense strand starting at position 3846 of SEQ ID NO: 1245144
gugagcugccugucaguuu

SEQ ID NO: 1539877 - RNA, 19 nt, Artificial Sequence
  Description of Artificial Sequence: Synthetic oligonucleotide
  Antisense strand to SEQ ID NO: 1539876
aaacugacaggcagcucac

SEQ ID NO: 1539878 - RNA, 19 nt, Artificial Sequence
  Description of Artificial Sequence: Synthetic oligonucleotide
  Sense strand starting at position 3857 of SEQ ID NO: 1245144
gucaguuugcgcagggaga

SEQ ID NO: 1539879 - RNA, 19 nt, Artificial Sequence
  Description of Artificial Sequence: Synthetic oligonucleotide
  Antisense strand to SEQ ID NO: 1539878
ucucccugcgcaaacugac

SEQ ID NO: 1539880 - RNA, 19 nt, Artificial Sequence
  Description of Artificial Sequence: Synthetic oligonucleotide
  Sense strand starting at position 3935 of SEQ ID NO: 1245144
cuguuugggagguauugau

SEQ ID NO: 1539881 - RNA, 19 nt, Artificial Sequence
  Description of Artificial Sequence: Synthetic oligonucleotide
  Antisense strand to SEQ ID NO: 1539880
aucaauaccucccaaacag

SEQ ID NO: 1539882 - RNA, 19 nt, Artificial Sequence
  Description of Artificial Sequence: Synthetic oligonucleotide
  Sense strand starting at position 3983 of SEQ ID NO: 1245144
uuguguuacuuggcaaaga

SEQ ID NO: 1539883 - RNA, 19 nt, Artificial Sequence
  Description of Artificial Sequence: Synthetic oligonucleotide
  Antisense strand to SEQ ID NO: 1539882
ucuuugccaaguaacacaa

SEQ ID NO: 1539884 - RNA, 19 nt, Artificial Sequence
  Description of Artificial Sequence: Synthetic oligonucleotide
  Sense strand starting at position 119 of SEQ ID NO: 1245145
ucccaucaucguggaguuu

SEQ ID NO: 1539885 - RNA, 19 nt, Artificial Sequence
  Description of Artificial Sequence: Synthetic oligonucleotide
  Antisense strand to SEQ ID NO: 1539884
aaacuccacgaugauggga

SEQ ID NO: 1539886 - RNA, 19 nt, Artificial Sequence
  Description of Artificial Sequence: Synthetic oligonucleotide
  Sense strand starting at position 581 of SEQ ID NO: 1245145
aauguaauugccugguucu

SEQ ID NO: 1539887 - RNA, 19 nt, Artificial Sequence
  Description of Artificial Sequence: Synthetic oligonucleotide
  Antisense strand to SEQ ID NO: 1539886
agaaccaggcaauuacauu

SEQ ID NO: 1539888 - RNA, 19 nt, Artificial Sequence
  Description of Artificial Sequence: Synthetic oligonucleotide
  Sense strand starting at position 582 of SEQ ID NO: 1245145
auguaauugccugguucua

SEQ ID NO: 1539889 - RNA, 19 nt, Artificial Sequence
  Description of Artificial Sequence: Synthetic oligonucleotide
  Antisense strand to SEQ ID NO: 1539888
uagaaccaggcaauuacau

SEQ ID NO: 1539890 - RNA, 19 nt, Artificial Sequence
  Description of Artificial Sequence: Synthetic oligonucleotide
  Sense strand starting at position 584 of SEQ ID NO: 1245145
guaauugccugguucuaau

SEQ ID NO: 1539891 - RNA, 19 nt, Artificial Sequence
  Description of Artificial Sequence: Synthetic oligonucleotide
  Antisense strand to SEQ ID NO: 1539890
auuagaaccaggcaauuac

SEQ ID NO: 1539892 - RNA, 19 nt, Artificial Sequence
  Description of Artificial Sequence: Synthetic oligonucleotide
  Sense strand starting at position 593 of SEQ ID NO: 1245145
ugguucuaaugcuuguaua

SEQ ID NO: 1539893 - RNA, 19 nt, Artificial Sequence
  Description of Artificial Sequence: Synthetic oligonucleotide
  Antisense strand to SEQ ID NO: 1539892
uauacaagcauuagaacca

SEQ ID NO: 1539894 - RNA, 19 nt, Artificial Sequence
  Description of Artificial Sequence: Synthetic oligonucleotide
  Sense strand starting at position 594 of SEQ ID NO: 1245145
gguucuaaugcuuguauau

SEQ ID NO: 1539895 - RNA, 19 nt, Artificial Sequence
  Description of Artificial Sequence: Synthetic oligonucleotide
  Antisense strand to SEQ ID NO: 1539894
auauacaagcauuagaacc

SEQ ID NO: 1539896 - RNA, 19 nt, Artificial Sequence
  Description of Artificial Sequence: Synthetic oligonucleotide
  Sense strand starting at position 604 of SEQ ID NO: 1245145
cuuguauaugccuauaaug

SEQ ID NO: 1539897 - RNA, 19 nt, Artificial Sequence
  Description of Artificial Sequence: Synthetic oligonucleotide
  Antisense strand to SEQ ID NO: 1539896
cauuauaggcauauacaag

SEQ ID NO: 1539898 - RNA, 19 nt, Artificial Sequence
  Description of Artificial Sequence: Synthetic oligonucleotide
  Sense strand starting at position 606 of SEQ ID NO: 1245145
uguauaugccuauaaugca

SEQ ID NO: 1539899 - RNA, 19 nt, Artificial Sequence
  Description of Artificial Sequence: Synthetic oligonucleotide
  Antisense strand to SEQ ID NO: 1539898
ugcauuauaggcauauaca

SEQ ID NO: 1539900 - RNA, 19 nt, Artificial Sequence
  Description of Artificial Sequence: Synthetic oligonucleotide
  Sense strand starting at position 620 of SEQ ID NO: 1245145
augcauucgaucuguaaga

SEQ ID NO: 1539901 - RNA, 19 nt, Artificial Sequence
  Description of Artificial Sequence: Synthetic oligonucleotide
  Antisense strand to SEQ ID NO: 1539900
ucuuacagaucgaaugcau

SEQ ID NO: 1539902 - RNA, 19 nt, Artificial Sequence
  Description of Artificial Sequence: Synthetic oligonucleotide
  Sense strand starting at position 621 of SEQ ID NO: 1245145
ugcauucgaucuguaagac

SEQ ID NO: 1539903 - RNA, 19 nt, Artificial Sequence
  Description of Artificial Sequence: Synthetic oligonucleotide
  Antisense strand to SEQ ID NO: 1539902
gucuuacagaucgaaugca

SEQ ID NO: 1539904 - RNA, 19 nt, Artificial Sequence
  Description of Artificial Sequence: Synthetic oligonucleotide
  Sense strand starting at position 726 of SEQ ID NO: 1245145
ucagaaauugaugggucau

SEQ ID NO: 1539905 - RNA, 19 nt, Artificial Sequence
  Description of Artificial Sequence: Synthetic oligonucleotide
  Antisense strand to SEQ ID NO: 1539904
augacccaucaauuucuga

SEQ ID NO: 1539906 - RNA, 19 nt, Artificial Sequence
  Description of Artificial Sequence: Synthetic oligonucleotide
  Sense strand starting at position 732 of SEQ ID NO: 1245145
auugaugggucauccuuau

SEQ ID NO: 1539907 - RNA, 19 nt, Artificial Sequence
  Description of Artificial Sequence: Synthetic oligonucleotide
  Antisense strand to SEQ ID NO: 1539906
auaaggaugacccaucaau

SEQ ID NO: 1539908 - RNA, 19 nt, Artificial Sequence
  Description of Artificial Sequence: Synthetic oligonucleotide
  Sense strand starting at position 798 of SEQ ID NO: 1245145
ugggcuaaugcccacaauu

SEQ ID NO: 1539909 - RNA, 19 nt, Artificial Sequence
  Description of Artificial Sequence: Synthetic oligonucleotide
  Antisense strand to SEQ ID NO: 1539908
aauugugggcauuagccca

SEQ ID NO: 1539910 - RNA, 19 nt, Artificial Sequence
  Description of Artificial Sequence: Synthetic oligonucleotide
  Sense strand starting at position 807 of SEQ ID NO: 1245145
gcccacaauuuagaaguga

SEQ ID NO: 1539911 - RNA, 19 nt, Artificial Sequence
  Description of Artificial Sequence: Synthetic oligonucleotide
  Antisense strand to SEQ ID NO: 1539910
ucacuucuaaauugugggc

SEQ ID NO: 1539912 - RNA, 19 nt, Artificial Sequence
  Description of Artificial Sequence: Synthetic oligonucleotide
  Sense strand starting at position 984 of SEQ ID NO: 1245145
uuguaaaucugaucaguuu

SEQ ID NO: 1539913 - RNA, 19 nt, Artificial Sequence
  Description of Artificial Sequence: Synthetic oligonucleotide
  Antisense strand to SEQ ID NO: 1539912
aaacugaucagauuuacaa

SEQ ID NO: 1539914 - RNA, 19 nt, Artificial Sequence
  Description of Artificial Sequence: Synthetic oligonucleotide
  Sense strand starting at position 1093 of SEQ ID NO: 1245145
gguugaaaguccucaacua

SEQ ID NO: 1539915 - RNA, 19 nt, Artificial Sequence
  Description of Artificial Sequence: Synthetic oligonucleotide
  Antisense strand to SEQ ID NO: 1539914
uaguugaggacuuucaacc

SEQ ID NO: 1539916 - RNA, 19 nt, Artificial Sequence
  Description of Artificial Sequence: Synthetic oligonucleotide
  Sense strand starting at position 1094 of SEQ ID NO: 1245145
guugaaaguccucaacuau

SEQ ID NO: 1539917 - RNA, 19 nt, Artificial Sequence
  Description of Artificial Sequence: Synthetic oligonucleotide
  Antisense strand to SEQ ID NO: 1539916
auaguugaggacuuucaac

SEQ ID NO: 1539918 - RNA, 19 nt, Artificial Sequence
  Description of Artificial Sequence: Synthetic oligonucleotide
  Sense strand starting at position 1232 of SEQ ID NO: 1245145
acuaaugcauccuuaggua

SEQ ID NO: 1539919 - RNA, 19 nt, Artificial Sequence
  Description of Artificial Sequence: Synthetic oligonucleotide
  Antisense strand to SEQ ID NO: 1539918
uaccuaaggaugcauuagu

SEQ ID NO: 1539920 - RNA, 19 nt, Artificial Sequence
  Description of Artificial Sequence: Synthetic oligonucleotide
  Sense strand starting at position 1244 of SEQ ID NO: 1245145
uuagguauuugucaagaag

SEQ ID NO: 1539921 - RNA, 19 nt, Artificial Sequence
  Description of Artificial Sequence: Synthetic oligonucleotide
  Antisense strand to SEQ ID NO: 1539920
cuucuugacaaauaccuaa

SEQ ID NO: 1539922 - RNA, 19 nt, Artificial Sequence
  Description of Artificial Sequence: Synthetic oligonucleotide
  Sense strand starting at position 1310 of SEQ ID NO: 1245145
ucuuguggcuucccaaaca

SEQ ID NO: 1539923 - RNA, 19 nt, Artificial Sequence
  Description of Artificial Sequence: Synthetic oligonucleotide
  Antisense strand to SEQ ID NO: 1539922
uguuugggaagccacaaga

SEQ ID NO: 1539924 - RNA, 19 nt, Artificial Sequence
  Description of Artificial Sequence: Synthetic oligonucleotide
  Sense strand starting at position 1344 of SEQ ID NO: 1245145
gucugccagucccuaauaa

SEQ ID NO: 1539925 - RNA, 19 nt, Artificial Sequence
  Description of Artificial Sequence: Synthetic oligonucleotide
  Antisense strand to SEQ ID NO: 1539924
uuauuagggacuggcagac

SEQ ID NO: 1539926 - RNA, 19 nt, Artificial Sequence
  Description of Artificial Sequence: Synthetic oligonucleotide
  Sense strand starting at position 1808 of SEQ ID NO: 1245145
ggcggugucacucagcaga

SEQ ID NO: 1539927 - RNA, 19 nt, Artificial Sequence
  Description of Artificial Sequence: Synthetic oligonucleotide
  Antisense strand to SEQ ID NO: 1539926
ucugcugagugacaccgcc

SEQ ID NO: 1539928 - RNA, 19 nt, Artificial Sequence
  Description of Artificial Sequence: Synthetic oligonucleotide
  Sense strand starting at position 2471 of SEQ ID NO: 1245145
ugaaccagagguugaguaa

SEQ ID NO: 1539929 - RNA, 19 nt, Artificial Sequence
  Description of Artificial Sequence: Synthetic oligonucleotide
  Antisense strand to SEQ ID NO: 1539928
uuacucaaccucugguuca

SEQ ID NO: 1539930 - RNA, 19 nt, Artificial Sequence
  Description of Artificial Sequence: Synthetic oligonucleotide
  Sense strand starting at position 2512 of SEQ ID NO: 1245145
gggugaacuuggcuggaga

SEQ ID NO: 1539931 - RNA, 19 nt, Artificial Sequence
  Description of Artificial Sequence: Synthetic oligonucleotide
  Antisense strand to SEQ ID NO: 1539930
ucuccagccaaguucaccc

SEQ ID NO: 1539932 - RNA, 19 nt, Artificial Sequence
  Description of Artificial Sequence: Synthetic oligonucleotide
  Sense strand starting at position 2513 of SEQ ID NO: 1245145
ggugaacuuggcuggagaa

SEQ ID NO: 1539933 - RNA, 19 nt, Artificial Sequence
  Description of Artificial Sequence: Synthetic oligonucleotide
  Antisense strand to SEQ ID NO: 1539932
uucuccagccaaguucacc

SEQ ID NO: 1539934 - RNA, 19 nt, Artificial Sequence
  Description of Artificial Sequence: Synthetic oligonucleotide
  Sense strand starting at position 2680 of SEQ ID NO: 1245145
agacauagcuugcuucgga

SEQ ID NO: 1539935 - RNA, 19 nt, Artificial Sequence
  Description of Artificial Sequence: Synthetic oligonucleotide
  Antisense strand to SEQ ID NO: 1539934
uccgaagcaagcuaugucu

SEQ ID NO: 1539936 - RNA, 19 nt, Artificial Sequence
  Description of Artificial Sequence: Synthetic oligonucleotide
  Sense strand starting at position 2724 of SEQ ID NO: 1245145
auguucgugugguuauuua

SEQ ID NO: 1539937 - RNA, 19 nt, Artificial Sequence
  Description of Artificial Sequence: Synthetic oligonucleotide
  Antisense strand to SEQ ID NO: 1539936
uaaauaaccacacgaacau

SEQ ID NO: 1539938 - RNA, 19 nt, Artificial Sequence
  Description of Artificial Sequence: Synthetic oligonucleotide
  Sense strand starting at position 2736 of SEQ ID NO: 1245145
uuauuuaucgcguguccau

SEQ ID NO: 1539939 - RNA, 19 nt, Artificial Sequence
  Description of Artificial Sequence: Synthetic oligonucleotide
  Antisense strand to SEQ ID NO: 1539938
auggacacgcgauaaauaa

SEQ ID NO: 1539940 - RNA, 19 nt, Artificial Sequence
  Description of Artificial Sequence: Synthetic oligonucleotide
  Sense strand starting at position 2775 of SEQ ID NO: 1245145
uuucgaagguuucuugaag

SEQ ID NO: 1539941 - RNA, 19 nt, Artificial Sequence
  Description of Artificial Sequence: Synthetic oligonucleotide
  Antisense strand to SEQ ID NO: 1539940
cuucaagaaaccuucgaaa

SEQ ID NO: 1539942 - RNA, 19 nt, Artificial Sequence
  Description of Artificial Sequence: Synthetic oligonucleotide
  Sense strand starting at position 2776 of SEQ ID NO: 1245145
uucgaagguuucuugaaga

SEQ ID NO: 1539943 - RNA, 19 nt, Artificial Sequence
  Description of Artificial Sequence: Synthetic oligonucleotide
  Antisense strand to SEQ ID NO: 1539942
ucuucaagaaaccuucgaa

SEQ ID NO: 1539944 - RNA, 19 nt, Artificial Sequence
  Description of Artificial Sequence: Synthetic oligonucleotide
  Sense strand starting at position 2832 of SEQ ID NO: 1245145
auuauuccacuuugaguuu

SEQ ID NO: 1539945 - RNA, 19 nt, Artificial Sequence
  Description of Artificial Sequence: Synthetic oligonucleotide
  Antisense strand to SEQ ID NO: 1539944
aaacucaaaguggaauaau

SEQ ID NO: 1539946 - RNA, 19 nt, Artificial Sequence
  Description of Artificial Sequence: Synthetic oligonucleotide
  Sense strand starting at position 2943 of SEQ ID NO: 1245145
auguguaacgacuaaauca

SEQ ID NO: 1539947 - RNA, 19 nt, Artificial Sequence
  Description of Artificial Sequence: Synthetic oligonucleotide
  Antisense strand to SEQ ID NO: 1539946
ugauuuagucguuacacau

SEQ ID NO: 1539948 - RNA, 19 nt, Artificial Sequence
  Description of Artificial Sequence: Synthetic oligonucleotide
  Sense strand starting at position 2951 of SEQ ID NO: 1245145
cgacuaaaucagggcaauu

SEQ ID NO: 1539949 - RNA, 19 nt, Artificial Sequence
  Description of Artificial Sequence: Synthetic oligonucleotide
  Antisense strand to SEQ ID NO: 1539948
aauugcccugauuuagucg

SEQ ID NO: 1539950 - RNA, 19 nt, Artificial Sequence
  Description of Artificial Sequence: Synthetic oligonucleotide
  Sense strand starting at position 2960 of SEQ ID NO: 1245145
cagggcaauugggauauuu

SEQ ID NO: 1539951 - RNA, 19 nt, Artificial Sequence
  Description of Artificial Sequence: Synthetic oligonucleotide
  Antisense strand to SEQ ID NO: 1539950
aaauaucccaauugcccug

SEQ ID NO: 1539952 - RNA, 19 nt, Artificial Sequence
  Description of Artificial Sequence: Synthetic oligonucleotide
  Sense strand starting at position 2969 of SEQ ID NO: 1245145
ugggauauuugucaucuca

SEQ ID NO: 1539953 - RNA, 19 nt, Artificial Sequence
  Description of Artificial Sequence: Synthetic oligonucleotide
  Antisense strand to SEQ ID NO: 1539952
ugagaugacaaauauccca

SEQ ID NO: 1539954 - RNA, 19 nt, Artificial Sequence
  Description of Artificial Sequence: Synthetic oligonucleotide
  Sense strand starting at position 2994 of SEQ ID NO: 1245145
uaucuuuauguugggaaca

SEQ ID NO: 1539955 - RNA, 19 nt, Artificial Sequence
  Description of Artificial Sequence: Synthetic oligonucleotide
  Antisense strand to SEQ ID NO: 1539954
uguucccaacauaaagaua

SEQ ID NO: 1539956 - RNA, 19 nt, Artificial Sequence
  Description of Artificial Sequence: Synthetic oligonucleotide
  Sense strand starting at position 3364 of SEQ ID NO: 1245145
guauauaugcuacauuauc

SEQ ID NO: 1539957 - RNA, 19 nt, Artificial Sequence
  Description of Artificial Sequence: Synthetic oligonucleotide
  Antisense strand to SEQ ID NO: 1539956
gauaauguagcauauauac

SEQ ID NO: 1539958 - RNA, 19 nt, Artificial Sequence
  Description of Artificial Sequence: Synthetic oligonucleotide
  Sense strand starting at position 3451 of SEQ ID NO: 1245145
gcagauauuucuuagauau

SEQ ID NO: 1539959 - RNA, 19 nt, Artificial Sequence
  Description of Artificial Sequence: Synthetic oligonucleotide
  Antisense strand to SEQ ID NO: 1539958
auaucuaagaaauaucugc

SEQ ID NO: 1539960 - RNA, 19 nt, Artificial Sequence
  Description of Artificial Sequence: Synthetic oligonucleotide
  Sense strand starting at position 3486 of SEQ ID NO: 1245145
uuggaucuguacccagauu

SEQ ID NO: 1539961 - RNA, 19 nt, Artificial Sequence
  Description of Artificial Sequence: Synthetic oligonucleotide
  Antisense strand to SEQ ID NO: 1539960
aaucuggguacagauccaa

SEQ ID NO: 1539962 - RNA, 19 nt, Artificial Sequence
  Description of Artificial Sequence: Synthetic oligonucleotide
  Sense strand starting at position 3644 of SEQ ID NO: 1245145
uuacguucucccuaacagu

SEQ ID NO: 1539963 - RNA, 19 nt, Artificial Sequence
  Description of Artificial Sequence: Synthetic oligonucleotide
  Antisense strand to SEQ ID NO: 1539962
acuguuagggagaacguaa

SEQ ID NO: 1539964 - RNA, 19 nt, Artificial Sequence
  Description of Artificial Sequence: Synthetic oligonucleotide
  Sense strand starting at position 92 of SEQ ID NO: 1245146
ccaucaauguuuguuuacu

SEQ ID NO: 1539965 - RNA, 19 nt, Artificial Sequence
  Description of Artificial Sequence: Synthetic oligonucleotide
  Antisense strand to SEQ ID NO: 1539964
aguaaacaaacauugaugg

SEQ ID NO: 1539966 - RNA, 19 nt, Artificial Sequence
  Description of Artificial Sequence: Synthetic oligonucleotide
  Sense strand starting at position 425 of SEQ ID NO: 1245146
acuuuagccugggagacaa

SEQ ID NO: 1539967 - RNA, 19 nt, Artificial Sequence
  Description of Artificial Sequence: Synthetic oligonucleotide
  Antisense strand to SEQ ID NO: 1539966
uugucucccaggcuaaagu

SEQ ID NO: 1539968 - RNA, 19 nt, Artificial Sequence
  Description of Artificial Sequence: Synthetic oligonucleotide
  Sense strand starting at position 546 of SEQ ID NO: 1245146
aauagaaucuaugagugac

SEQ ID NO: 1539969 - RNA, 19 nt, Artificial Sequence
  Description of Artificial Sequence: Synthetic oligonucleotide
  Antisense strand to SEQ ID NO: 1539968
gucacucauagauucuauu

SEQ ID NO: 1539970 - RNA, 19 nt, Artificial Sequence
  Description of Artificial Sequence: Synthetic oligonucleotide
  Sense strand starting at position 549 of SEQ ID NO: 1245146
agaaucuaugagugacuca

SEQ ID NO: 1539971 - RNA, 19 nt, Artificial Sequence
  Description of Artificial Sequence: Synthetic oligonucleotide
  Antisense strand to SEQ ID NO: 1539970
ugagucacucauagauucu

SEQ ID NO: 1539972 - RNA, 19 nt, Artificial Sequence
  Description of Artificial Sequence: Synthetic oligonucleotide
  Sense strand starting at position 556 of SEQ ID NO: 1245146
augagugacucaccuaugu

SEQ ID NO: 1539973 - RNA, 19 nt, Artificial Sequence
  Description of Artificial Sequence: Synthetic oligonucleotide
  Antisense strand to SEQ ID NO: 1539972
acauaggugagucacucau

SEQ ID NO: 1539974 - RNA, 19 nt, Artificial Sequence
  Description of Artificial Sequence: Synthetic oligonucleotide
  Sense strand starting at position 605 of SEQ ID NO: 1245146
agaaucaauuaggagcaua

SEQ ID NO: 1539975 - RNA, 19 nt, Artificial Sequence
  Description of Artificial Sequence: Synthetic oligonucleotide
  Antisense strand to SEQ ID NO: 1539974
uaugcuccuaauugauucu

SEQ ID NO: 1539976 - RNA, 19 nt, Artificial Sequence
  Description of Artificial Sequence: Synthetic oligonucleotide
  Sense strand starting at position 618 of SEQ ID NO: 1245146
agcauaacuugucuuagcu

SEQ ID NO: 1539977 - RNA, 19 nt, Artificial Sequence
  Description of Artificial Sequence: Synthetic oligonucleotide
  Antisense strand to SEQ ID NO: 1539976
agcuaagacaaguuaugcu

SEQ ID NO: 1539978 - RNA, 19 nt, Artificial Sequence
  Description of Artificial Sequence: Synthetic oligonucleotide
  Sense strand starting at position 634 of SEQ ID NO: 1245146
gcuaguauaccuggcucau

SEQ ID NO: 1539979 - RNA, 19 nt, Artificial Sequence
  Description of Artificial Sequence: Synthetic oligonucleotide
  Antisense strand to SEQ ID NO: 1539978
augagccagguauacuagc

SEQ ID NO: 1539980 - RNA, 19 nt, Artificial Sequence
  Description of Artificial Sequence: Synthetic oligonucleotide
  Sense strand starting at position 778 of SEQ ID NO: 1245146
ucccauguguuucuugaag

SEQ ID NO: 1539981 - RNA, 19 nt, Artificial Sequence
  Description of Artificial Sequence: Synthetic oligonucleotide
  Antisense strand to SEQ ID NO: 1539980
cuucaagaaacacauggga

SEQ ID NO: 1539982 - RNA, 19 nt, Artificial Sequence
  Description of Artificial Sequence: Synthetic oligonucleotide
  Sense strand starting at position 830 of SEQ ID NO: 1245146
augcuuagauggucacuau

SEQ ID NO: 1539983 - RNA, 19 nt, Artificial Sequence
  Description of Artificial Sequence: Synthetic oligonucleotide
  Antisense strand to SEQ ID NO: 1539982
auagugaccaucuaagcau

SEQ ID NO: 1539984 - RNA, 19 nt, Artificial Sequence
  Description of Artificial Sequence: Synthetic oligonucleotide
  Sense strand starting at position 831 of SEQ ID NO: 1245146
ugcuuagauggucacuauu

SEQ ID NO: 1539985 - RNA, 19 nt, Artificial Sequence
  Description of Artificial Sequence: Synthetic oligonucleotide
  Antisense strand to SEQ ID NO: 1539984
aauagugaccaucuaagca

SEQ ID NO: 1539986 - RNA, 19 nt, Artificial Sequence
  Description of Artificial Sequence: Synthetic oligonucleotide
  Sense strand starting at position 853 of SEQ ID NO: 1245146
ggaaaugaauaaucgcuua

SEQ ID NO: 1539987 - RNA, 19 nt, Artificial Sequence
  Description of Artificial Sequence: Synthetic oligonucleotide
  Antisense strand to SEQ ID NO: 1539986
uaagcgauuauucauuucc

SEQ ID NO: 1539988 - RNA, 19 nt, Artificial Sequence
  Description of Artificial Sequence: Synthetic oligonucleotide
  Sense strand starting at position 866 of SEQ ID NO: 1245146
cgcuuaagaagucauguaa

SEQ ID NO: 1539989 - RNA, 19 nt, Artificial Sequence
  Description of Artificial Sequence: Synthetic oligonucleotide
  Antisense strand to SEQ ID NO: 1539988
uuacaugacuucuuaagcg

SEQ ID NO: 1539990 - RNA, 19 nt, Artificial Sequence
  Description of Artificial Sequence: Synthetic oligonucleotide
  Sense strand starting at position 943 of SEQ ID NO: 1245146
gucuccuuugcgccugaaa

SEQ ID NO: 1539991 - RNA, 19 nt, Artificial Sequence
  Description of Artificial Sequence: Synthetic oligonucleotide
  Antisense strand to SEQ ID NO: 1539990
uuucaggcgcaaaggagac

SEQ ID NO: 1539992 - RNA, 19 nt, Artificial Sequence
  Description of Artificial Sequence: Synthetic oligonucleotide
  Sense strand starting at position 945 of SEQ ID NO: 1245146
cuccuuugcgccugaaaga

SEQ ID NO: 1539993 - RNA, 19 nt, Artificial Sequence
  Description of Artificial Sequence: Synthetic oligonucleotide
  Antisense strand to SEQ ID NO: 1539992
ucuuucaggcgcaaaggag

SEQ ID NO: 1539994 - RNA, 19 nt, Artificial Sequence
  Description of Artificial Sequence: Synthetic oligonucleotide
  Sense strand starting at position 946 of SEQ ID NO: 1245146
uccuuugcgccugaaagaa

SEQ ID NO: 1539995 - RNA, 19 nt, Artificial Sequence
  Description of Artificial Sequence: Synthetic oligonucleotide
  Antisense strand to SEQ ID NO: 1539994
uucuuucaggcgcaaagga

SEQ ID NO: 1539996 - RNA, 19 nt, Artificial Sequence
  Description of Artificial Sequence: Synthetic oligonucleotide
  Sense strand starting at position 1047 of SEQ ID NO: 1245146
ugcgaaauguuucuuucuc

SEQ ID NO: 1539997 - RNA, 19 nt, Artificial Sequence
  Description of Artificial Sequence: Synthetic oligonucleotide
  Antisense strand to SEQ ID NO: 1539996
gagaaagaaacauuucgca

SEQ ID NO: 1539998 - RNA, 19 nt, Artificial Sequence
  Description of Artificial Sequence: Synthetic oligonucleotide
  Sense strand starting at position 1048 of SEQ ID NO: 1245146
gcgaaauguuucuuucucu

SEQ ID NO: 1539999 - RNA, 19 nt, Artificial Sequence
  Description of Artificial Sequence: Synthetic oligonucleotide
  Antisense strand to SEQ ID NO: 1539998
agagaaagaaacauuucgc

SEQ ID NO: 1540000 - RNA, 19 nt, Artificial Sequence
  Description of Artificial Sequence: Synthetic oligonucleotide
  Sense strand starting at position 1291 of SEQ ID NO: 1245146
cgcaugggcucggugagau

SEQ ID NO: 1540001 - RNA, 19 nt, Artificial Sequence
  Description of Artificial Sequence: Synthetic oligonucleotide
  Antisense strand to SEQ ID NO: 1540000
aucucaccgagcccaugcg

SEQ ID NO: 1540002 - RNA, 19 nt, Artificial Sequence
  Description of Artificial Sequence: Synthetic oligonucleotide
  Sense strand starting at position 1475 of SEQ ID NO: 1245146
ggaucagacccgcaaacuu

SEQ ID NO: 1540003 - RNA, 19 nt, Artificial Sequence
  Description of Artificial Sequence: Synthetic oligonucleotide
  Antisense strand to SEQ ID NO: 1540002
aaguuugcgggucugaucc

SEQ ID NO: 1540004 - RNA, 19 nt, Artificial Sequence
  Description of Artificial Sequence: Synthetic oligonucleotide
  Sense strand starting at position 2285 of SEQ ID NO: 1245146
aaacgaaauccggguagau

SEQ ID NO: 1540005 - RNA, 19 nt, Artificial Sequence
  Description of Artificial Sequence: Synthetic oligonucleotide
  Antisense strand to SEQ ID NO: 1540004
aucuacccggauuucguuu

SEQ ID NO: 1540006 - RNA, 19 nt, Artificial Sequence
  Description of Artificial Sequence: Synthetic oligonucleotide
  Sense strand starting at position 2287 of SEQ ID NO: 1245146
acgaaauccggguagauuc

SEQ ID NO: 1540007 - RNA, 19 nt, Artificial Sequence
  Description of Artificial Sequence: Synthetic oligonucleotide
  Antisense strand to SEQ ID NO: 1540006
gaaucuacccggauuucgu

SEQ ID NO: 1540008 - RNA, 19 nt, Artificial Sequence
  Description of Artificial Sequence: Synthetic oligonucleotide
  Sense strand starting at position 2464 of SEQ ID NO: 1245146
cguuuaccucuccacuaga

SEQ ID NO: 1540009 - RNA, 19 nt, Artificial Sequence
  Description of Artificial Sequence: Synthetic oligonucleotide
  Antisense strand to SEQ ID NO: 1540008
ucuaguggagagguaaacg

SEQ ID NO: 1540010 - RNA, 19 nt, Artificial Sequence
  Description of Artificial Sequence: Synthetic oligonucleotide
  Sense strand starting at position 2536 of SEQ ID NO: 1245146
gagugagauccggagcaug

SEQ ID NO: 1540011 - RNA, 19 nt, Artificial Sequence
  Description of Artificial Sequence: Synthetic oligonucleotide
  Antisense strand to SEQ ID NO: 1540010
caugcuccggaucucacuc

SEQ ID NO: 1540012 - RNA, 19 nt, Artificial Sequence
  Description of Artificial Sequence: Synthetic oligonucleotide
  Sense strand starting at position 2677 of SEQ ID NO: 1245146
uucucagggcugcaaagau

SEQ ID NO: 1540013 - RNA, 19 nt, Artificial Sequence
  Description of Artificial Sequence: Synthetic oligonucleotide
  Antisense strand to SEQ ID NO: 1540012
aucuuugcagcccugagaa

SEQ ID NO: 1540014 - RNA, 19 nt, Artificial Sequence
  Description of Artificial Sequence: Synthetic oligonucleotide
  Sense strand starting at position 2692 of SEQ ID NO: 1245146
agaucugcucucuggaaac

SEQ ID NO: 1540015 - RNA, 19 nt, Artificial Sequence
  Description of Artificial Sequence: Synthetic oligonucleotide
  Antisense strand to SEQ ID NO: 1540014
guuuccagagagcagaucu

SEQ ID NO: 1540016 - RNA, 19 nt, Artificial Sequence
  Description of Artificial Sequence: Synthetic oligonucleotide
  Sense strand starting at position 2694 of SEQ ID NO: 1245146
aucugcucucuggaaacau

SEQ ID NO: 1540017 - RNA, 19 nt, Artificial Sequence
  Description of Artificial Sequence: Synthetic oligonucleotide
  Antisense strand to SEQ ID NO: 1540016
auguuuccagagagcagau

SEQ ID NO: 1540018 - RNA, 19 nt, Artificial Sequence
  Description of Artificial Sequence: Synthetic oligonucleotide
  Sense strand starting at position 2746 of SEQ ID NO: 1245146
acgugugucuaagucuaua

SEQ ID NO: 1540019 - RNA, 19 nt, Artificial Sequence
  Description of Artificial Sequence: Synthetic oligonucleotide
  Antisense strand to SEQ ID NO: 1540018
uauagacuuagacacacgu

SEQ ID NO: 1540020 - RNA, 19 nt, Artificial Sequence
  Description of Artificial Sequence: Synthetic oligonucleotide
  Sense strand starting at position 2768 of SEQ ID NO: 1245146
auagauucgcaguaucauc

SEQ ID NO: 1540021 - RNA, 19 nt, Artificial Sequence
  Description of Artificial Sequence: Synthetic oligonucleotide
  Antisense strand to SEQ ID NO: 1540020
gaugauacugcgaaucuau

SEQ ID NO: 1540022 - RNA, 19 nt, Artificial Sequence
  Description of Artificial Sequence: Synthetic oligonucleotide
  Sense strand starting at position 2775 of SEQ ID NO: 1245146
cgcaguaucaucugggaga

SEQ ID NO: 1540023 - RNA, 19 nt, Artificial Sequence
  Description of Artificial Sequence: Synthetic oligonucleotide
  Antisense strand to SEQ ID NO: 1540022
ucucccagaugauacugcg

SEQ ID NO: 1540024 - RNA, 19 nt, Artificial Sequence
  Description of Artificial Sequence: Synthetic oligonucleotide
  Sense strand starting at position 2778 of SEQ ID NO: 1245146
aguaucaucugggagagca

SEQ ID NO: 1540025 - RNA, 19 nt, Artificial Sequence
  Description of Artificial Sequence: Synthetic oligonucleotide
  Antisense strand to SEQ ID NO: 1540024
ugcucucccagaugauacu

SEQ ID NO: 1540026 - RNA, 19 nt, Artificial Sequence
  Description of Artificial Sequence: Synthetic oligonucleotide
  Sense strand starting at position 2815 of SEQ ID NO: 1245146
ccaauuguucuguaaagca

SEQ ID NO: 1540027 - RNA, 19 nt, Artificial Sequence
  Description of Artificial Sequence: Synthetic oligonucleotide
  Antisense strand to SEQ ID NO: 1540026
ugcuuuacagaacaauugg

SEQ ID NO: 1540028 - RNA, 19 nt, Artificial Sequence
  Description of Artificial Sequence: Synthetic oligonucleotide
  Sense strand starting at position 3095 of SEQ ID NO: 1245146
ugacccguucccgaguuua

SEQ ID NO: 1540029 - RNA, 19 nt, Artificial Sequence
  Description of Artificial Sequence: Synthetic oligonucleotide
  Antisense strand to SEQ ID NO: 1540028
uaaacucgggaacggguca

SEQ ID NO: 1540030 - RNA, 19 nt, Artificial Sequence
  Description of Artificial Sequence: Synthetic oligonucleotide
  Sense strand starting at position 3177 of SEQ ID NO: 1245146
gcccuugucucuucugcaa

SEQ ID NO: 1540031 - RNA, 19 nt, Artificial Sequence
  Description of Artificial Sequence: Synthetic oligonucleotide
  Antisense strand to SEQ ID NO: 1540030
uugcagaagagacaagggc

SEQ ID NO: 1540032 - RNA, 19 nt, Artificial Sequence
  Description of Artificial Sequence: Synthetic oligonucleotide
  Sense strand starting at position 3190 of SEQ ID NO: 1245146
cugcaacucgcugcuuuaa

SEQ ID NO: 1540033 - RNA, 19 nt, Artificial Sequence
  Description of Artificial Sequence: Synthetic oligonucleotide
  Antisense strand to SEQ ID NO: 1540032
uuaaagcagcgaguugcag

SEQ ID NO: 1540034 - RNA, 19 nt, Artificial Sequence
  Description of Artificial Sequence: Synthetic oligonucleotide
  Sense strand starting at position 3192 of SEQ ID NO: 1245146
gcaacucgcugcuuuaacu

SEQ ID NO: 1540035 - RNA, 19 nt, Artificial Sequence
  Description of Artificial Sequence: Synthetic oligonucleotide
  Antisense strand to SEQ ID NO: 1540034
aguuaaagcagcgaguugc

SEQ ID NO: 1540036 - RNA, 19 nt, Artificial Sequence
  Description of Artificial Sequence: Synthetic oligonucleotide
  Sense strand starting at position 3492 of SEQ ID NO: 1245146
uauggaaacuguguuguuu

SEQ ID NO: 1540037 - RNA, 19 nt, Artificial Sequence
  Description of Artificial Sequence: Synthetic oligonucleotide
  Antisense strand to SEQ ID NO: 1540036
aaacaacacaguuuccaua

SEQ ID NO: 1540038 - RNA, 19 nt, Artificial Sequence
  Description of Artificial Sequence: Synthetic oligonucleotide
  Sense strand starting at position 3520 of SEQ ID NO: 1245146
auagguguggagcauagaa

SEQ ID NO: 1540039 - RNA, 19 nt, Artificial Sequence
  Description of Artificial Sequence: Synthetic oligonucleotide
  Antisense strand to SEQ ID NO: 1540038
uucuaugcuccacaccuau

SEQ ID NO: 1540040 - RNA, 19 nt, Artificial Sequence
  Description of Artificial Sequence: Synthetic oligonucleotide
  Sense strand starting at position 3852 of SEQ ID NO: 1245146
aucucaaccugaugugaag

SEQ ID NO: 1540041 - RNA, 19 nt, Artificial Sequence
  Description of Artificial Sequence: Synthetic oligonucleotide
  Antisense strand to SEQ ID NO: 1540040
cuucacaucagguugagau

SEQ ID NO: 1540042 - RNA, 19 nt, Artificial Sequence
  Description of Artificial Sequence: Synthetic oligonucleotide
  Sense strand starting at position 3938 of SEQ ID NO: 1245146
gaagcagugugacuacuua

SEQ ID NO: 1540043 - RNA, 19 nt, Artificial Sequence
  Description of Artificial Sequence: Synthetic oligonucleotide
  Antisense strand to SEQ ID NO: 1540042
uaaguagucacacugcuuc

SEQ ID NO: 1540044 - RNA, 19 nt, Artificial Sequence
  Description of Artificial Sequence: Synthetic oligonucleotide
  Sense strand starting at position 101 of SEQ ID NO: 1245147
ucuauacgucuacaagguu

SEQ ID NO: 1540045 - RNA, 19 nt, Artificial Sequence
  Description of Artificial Sequence: Synthetic oligonucleotide
  Antisense strand to SEQ ID NO: 1540044
aaccuuguagacguauaga

SEQ ID NO: 1540046 - RNA, 19 nt, Artificial Sequence
  Description of Artificial Sequence: Synthetic oligonucleotide
  Sense strand starting at position 113 of SEQ ID NO: 1245147
caagguuaaguguagacau

SEQ ID NO: 1540047 - RNA, 19 nt, Artificial Sequence
  Description of Artificial Sequence: Synthetic oligonucleotide
  Antisense strand to SEQ ID NO: 1540046
augucuacacuuaaccuug

SEQ ID NO: 1540048 - RNA, 19 nt, Artificial Sequence
  Description of Artificial Sequence: Synthetic oligonucleotide
  Sense strand starting at position 136 of SEQ ID NO: 1245147
ugauacauuuagcaagaua

SEQ ID NO: 1540049 - RNA, 19 nt, Artificial Sequence
  Description of Artificial Sequence: Synthetic oligonucleotide
  Antisense strand to SEQ ID NO: 1540048
uaucuugcuaaauguauca

SEQ ID NO: 1540050 - RNA, 19 nt, Artificial Sequence
  Description of Artificial Sequence: Synthetic oligonucleotide
  Sense strand starting at position 323 of SEQ ID NO: 1245147
cuucuuacaguuugugaua

SEQ ID NO: 1540051 - RNA, 19 nt, Artificial Sequence
  Description of Artificial Sequence: Synthetic oligonucleotide
  Antisense strand to SEQ ID NO: 1540050
uaucacaaacuguaagaag

SEQ ID NO: 1540052 - RNA, 19 nt, Artificial Sequence
  Description of Artificial Sequence: Synthetic oligonucleotide
  Sense strand starting at position 324 of SEQ ID NO: 1245147
uucuuacaguuugugauau

SEQ ID NO: 1540053 - RNA, 19 nt, Artificial Sequence
  Description of Artificial Sequence: Synthetic oligonucleotide
  Antisense strand to SEQ ID NO: 1540052
auaucacaaacuguaagaa

SEQ ID NO: 1540054 - RNA, 19 nt, Artificial Sequence
  Description of Artificial Sequence: Synthetic oligonucleotide
  Sense strand starting at position 430 of SEQ ID NO: 1245147
cugcuuugaccauagucaa

SEQ ID NO: 1540055 - RNA, 19 nt, Artificial Sequence
  Description of Artificial Sequence: Synthetic oligonucleotide
  Antisense strand to SEQ ID NO: 1540054
uugacuauggucaaagcag

SEQ ID NO: 1540056 - RNA, 19 nt, Artificial Sequence
  Description of Artificial Sequence: Synthetic oligonucleotide
  Sense strand starting at position 501 of SEQ ID NO: 1245147
uccaaaucagcuugaaaug

SEQ ID NO: 1540057 - RNA, 19 nt, Artificial Sequence
  Description of Artificial Sequence: Synthetic oligonucleotide
  Antisense strand to SEQ ID NO: 1540056
cauuucaagcugauuugga

SEQ ID NO: 1540058 - RNA, 19 nt, Artificial Sequence
  Description of Artificial Sequence: Synthetic oligonucleotide
  Sense strand starting at position 632 of SEQ ID NO: 1245147
cuaauagagcacuauguaa

SEQ ID NO: 1540059 - RNA, 19 nt, Artificial Sequence
  Description of Artificial Sequence: Synthetic oligonucleotide
  Antisense strand to SEQ ID NO: 1540058
uuacauagugcucuauuag

SEQ ID NO: 1540060 - RNA, 19 nt, Artificial Sequence
  Description of Artificial Sequence: Synthetic oligonucleotide
  Sense strand starting at position 634 of SEQ ID NO: 1245147
aauagagcacuauguaaag

SEQ ID NO: 1540061 - RNA, 19 nt, Artificial Sequence
  Description of Artificial Sequence: Synthetic oligonucleotide
  Antisense strand to SEQ ID NO: 1540060
cuuuacauagugcucuauu

SEQ ID NO: 1540062 - RNA, 19 nt, Artificial Sequence
  Description of Artificial Sequence: Synthetic oligonucleotide
  Sense strand starting at position 742 of SEQ ID NO: 1245147
aggcauugucaccauucua

SEQ ID NO: 1540063 - RNA, 19 nt, Artificial Sequence
  Description of Artificial Sequence: Synthetic oligonucleotide
  Antisense strand to SEQ ID NO: 1540062
uagaauggugacaaugccu

SEQ ID NO: 1540064 - RNA, 19 nt, Artificial Sequence
  Description of Artificial Sequence: Synthetic oligonucleotide
  Sense strand starting at position 772 of SEQ ID NO: 1245147
gcuugugguaugucuagca

SEQ ID NO: 1540065 - RNA, 19 nt, Artificial Sequence
  Description of Artificial Sequence: Synthetic oligonucleotide
  Antisense strand to SEQ ID NO: 1540064
ugcuagacauaccacaagc

SEQ ID NO: 1540066 - RNA, 19 nt, Artificial Sequence
  Description of Artificial Sequence: Synthetic oligonucleotide
  Sense strand starting at position 971 of SEQ ID NO: 1245147
auagaccauugguuuauua

SEQ ID NO: 1540067 - RNA, 19 nt, Artificial Sequence
  Description of Artificial Sequence: Synthetic oligonucleotide
  Antisense strand to SEQ ID NO: 1540066
uaauaaaccaauggucuau

SEQ ID NO: 1540068 - RNA, 19 nt, Artificial Sequence
  Description of Artificial Sequence: Synthetic oligonucleotide
  Sense strand starting at position 975 of SEQ ID NO: 1245147
accauugguuuauuagaag

SEQ ID NO: 1540069 - RNA, 19 nt, Artificial Sequence
  Description of Artificial Sequence: Synthetic oligonucleotide
  Antisense strand to SEQ ID NO: 1540068
cuucuaauaaaccaauggu

SEQ ID NO: 1540070 - RNA, 19 nt, Artificial Sequence
  Description of Artificial Sequence: Synthetic oligonucleotide
  Sense strand starting at position 1018 of SEQ ID NO: 1245147
uuuauaaaucaaggagucu

SEQ ID NO: 1540071 - RNA, 19 nt, Artificial Sequence
  Description of Artificial Sequence: Synthetic oligonucleotide
  Antisense strand to SEQ ID NO: 1540070
agacuccuugauuuauaaa

SEQ ID NO: 1540072 - RNA, 19 nt, Artificial Sequence
  Description of Artificial Sequence: Synthetic oligonucleotide
  Sense strand starting at position 1079 of SEQ ID NO: 1245147
gcauuaucccuccaucugu

SEQ ID NO: 1540073 - RNA, 19 nt, Artificial Sequence
  Description of Artificial Sequence: Synthetic oligonucleotide
  Antisense strand to SEQ ID NO: 1540072
acagauggagggauaaugc

SEQ ID NO: 1540074 - RNA, 19 nt, Artificial Sequence
  Description of Artificial Sequence: Synthetic oligonucleotide
  Sense strand starting at position 1139 of SEQ ID NO: 1245147
acgauauaaugagagggau

SEQ ID NO: 1540075 - RNA, 19 nt, Artificial Sequence
  Description of Artificial Sequence: Synthetic oligonucleotide
  Antisense strand to SEQ ID NO: 1540074
aucccucucauuauaucgu

SEQ ID NO: 1540076 - RNA, 19 nt, Artificial Sequence
  Description of Artificial Sequence: Synthetic oligonucleotide
  Sense strand starting at position 1359 of SEQ ID NO: 1245147
gagggugucaacugauaag

SEQ ID NO: 1540077 - RNA, 19 nt, Artificial Sequence
  Description of Artificial Sequence: Synthetic oligonucleotide
  Antisense strand to SEQ ID NO: 1540076
cuuaucaguugacacccuc

SEQ ID NO: 1540078 - RNA, 19 nt, Artificial Sequence
  Description of Artificial Sequence: Synthetic oligonucleotide
  Sense strand starting at position 1395 of SEQ ID NO: 1245147
cuacuucccuaaguuguaa

SEQ ID NO: 1540079 - RNA, 19 nt, Artificial Sequence
  Description of Artificial Sequence: Synthetic oligonucleotide
  Antisense strand to SEQ ID NO: 1540078
uuacaacuuagggaaguag

SEQ ID NO: 1540080 - RNA, 19 nt, Artificial Sequence
  Description of Artificial Sequence: Synthetic oligonucleotide
  Sense strand starting at position 1432 of SEQ ID NO: 1245147
gggagauucuugguuacag

SEQ ID NO: 1540081 - RNA, 19 nt, Artificial Sequence
  Description of Artificial Sequence: Synthetic oligonucleotide
  Antisense strand to SEQ ID NO: 1540080
cuguaaccaagaaucuccc

SEQ ID NO: 1540082 - RNA, 19 nt, Artificial Sequence
  Description of Artificial Sequence: Synthetic oligonucleotide
  Sense strand starting at position 1433 of SEQ ID NO: 1245147
ggagauucuugguuacaga

SEQ ID NO: 1540083 - RNA, 19 nt, Artificial Sequence
  Description of Artificial Sequence: Synthetic oligonucleotide
  Antisense strand to SEQ ID NO: 1540082
ucuguaaccaagaaucucc

SEQ ID NO: 1540084 - RNA, 19 nt, Artificial Sequence
  Description of Artificial Sequence: Synthetic oligonucleotide
  Sense strand starting at position 1609 of SEQ ID NO: 1245147
ugugucauaacuuagggua

SEQ ID NO: 1540085 - RNA, 19 nt, Artificial Sequence
  Description of Artificial Sequence: Synthetic oligonucleotide
  Antisense strand to SEQ ID NO: 1540084
uacccuaaguuaugacaca

SEQ ID NO: 1540086 - RNA, 19 nt, Artificial Sequence
  Description of Artificial Sequence: Synthetic oligonucleotide
  Sense strand starting at position 1881 of SEQ ID NO: 1245147
gccagugcugcugcaagau

SEQ ID NO: 1540087 - RNA, 19 nt, Artificial Sequence
  Description of Artificial Sequence: Synthetic oligonucleotide
  Antisense strand to SEQ ID NO: 1540086
aucuugcagcagcacuggc

SEQ ID NO: 1540088 - RNA, 19 nt, Artificial Sequence
  Description of Artificial Sequence: Synthetic oligonucleotide
  Sense strand starting at position 2554 of SEQ ID NO: 1245147
ccuugaauugugggagaug

SEQ ID NO: 1540089 - RNA, 19 nt, Artificial Sequence
  Description of Artificial Sequence: Synthetic oligonucleotide
  Antisense strand to SEQ ID NO: 1540088
caucucccacaauucaagg

SEQ ID NO: 1540090 - RNA, 19 nt, Artificial Sequence
  Description of Artificial Sequence: Synthetic oligonucleotide
  Sense strand starting at position 2604 of SEQ ID NO: 1245147
ccaguuaagagcgagguuu

SEQ ID NO: 1540091 - RNA, 19 nt, Artificial Sequence
  Description of Artificial Sequence: Synthetic oligonucleotide
  Antisense strand to SEQ ID NO: 1540090
aaaccucgcucuuaacugg

SEQ ID NO: 1540092 - RNA, 19 nt, Artificial Sequence
  Description of Artificial Sequence: Synthetic oligonucleotide
  Sense strand starting at position 2628 of SEQ ID NO: 1245147
cuacuauucccaggaagac

SEQ ID NO: 1540093 - RNA, 19 nt, Artificial Sequence
  Description of Artificial Sequence: Synthetic oligonucleotide
  Antisense strand to SEQ ID NO: 1540092
gucuuccugggaauaguag

SEQ ID NO: 1540094 - RNA, 19 nt, Artificial Sequence
  Description of Artificial Sequence: Synthetic oligonucleotide
  Sense strand starting at position 3420 of SEQ ID NO: 1245147
ggaacucagaugugaaagu

SEQ ID NO: 1540095 - RNA, 19 nt, Artificial Sequence
  Description of Artificial Sequence: Synthetic oligonucleotide
  Antisense strand to SEQ ID NO: 1540094
acuuucacaucugaguucc

SEQ ID NO: 1540096 - RNA, 19 nt, Artificial Sequence
  Description of Artificial Sequence: Synthetic oligonucleotide
  Sense strand starting at position 3427 of SEQ ID NO: 1245147
agaugugaaaguugaucuu

SEQ ID NO: 1540097 - RNA, 19 nt, Artificial Sequence
  Description of Artificial Sequence: Synthetic oligonucleotide
  Antisense strand to SEQ ID NO: 1540096
aagaucaacuuucacaucu

SEQ ID NO: 1540098 - RNA, 19 nt, Artificial Sequence
  Description of Artificial Sequence: Synthetic oligonucleotide
  Sense strand starting at position 3430 of SEQ ID NO: 1245147
ugugaaaguugaucuugaa

SEQ ID NO: 1540099 - RNA, 19 nt, Artificial Sequence
  Description of Artificial Sequence: Synthetic oligonucleotide
  Antisense strand to SEQ ID NO: 1540098
uucaagaucaacuuucaca

SEQ ID NO: 1540100 - RNA, 19 nt, Artificial Sequence
  Description of Artificial Sequence: Synthetic oligonucleotide
  Sense strand starting at position 3433 of SEQ ID NO: 1245147
gaaaguugaucuugaauuu

SEQ ID NO: 1540101 - RNA, 19 nt, Artificial Sequence
  Description of Artificial Sequence: Synthetic oligonucleotide
  Antisense strand to SEQ ID NO: 1540100
aaauucaagaucaacuuuc

SEQ ID NO: 1540102 - RNA, 19 nt, Artificial Sequence
  Description of Artificial Sequence: Synthetic oligonucleotide
  Sense strand starting at position 3590 of SEQ ID NO: 1245147
acauguuaccugcaguaau

SEQ ID NO: 1540103 - RNA, 19 nt, Artificial Sequence
  Description of Artificial Sequence: Synthetic oligonucleotide
  Antisense strand to SEQ ID NO: 1540102
auuacugcagguaacaugu

SEQ ID NO: 1540104 - RNA, 19 nt, Artificial Sequence
  Description of Artificial Sequence: Synthetic oligonucleotide
  Sense strand starting at position 3593 of SEQ ID NO: 1245147
uguuaccugcaguaauaga

SEQ ID NO: 1540105 - RNA, 19 nt, Artificial Sequence
  Description of Artificial Sequence: Synthetic oligonucleotide
  Antisense strand to SEQ ID NO: 1540104
ucuauuacugcagguaaca

SEQ ID NO: 1540106 - RNA, 19 nt, Artificial Sequence
  Description of Artificial Sequence: Synthetic oligonucleotide
  Sense strand starting at position 3630 of SEQ ID NO: 1245147
gauggaauguaaguuguca

SEQ ID NO: 1540107 - RNA, 19 nt, Artificial Sequence
  Description of Artificial Sequence: Synthetic oligonucleotide
  Antisense strand to SEQ ID NO: 1540106
ugacaacuuacauuccauc

SEQ ID NO: 1540108 - RNA, 19 nt, Artificial Sequence
  Description of Artificial Sequence: Synthetic oligonucleotide
  Sense strand starting at position 3638 of SEQ ID NO: 1245147
guaaguugucagggaaagu

SEQ ID NO: 1540109 - RNA, 19 nt, Artificial Sequence
  Description of Artificial Sequence: Synthetic oligonucleotide
  Antisense strand to SEQ ID NO: 1540108
acuuucccugacaacuuac

SEQ ID NO: 1540110 - RNA, 19 nt, Artificial Sequence
  Description of Artificial Sequence: Synthetic oligonucleotide
  Sense strand starting at position 3639 of SEQ ID NO: 1245147
uaaguugucagggaaaguc

SEQ ID NO: 1540111 - RNA, 19 nt, Artificial Sequence
  Description of Artificial Sequence: Synthetic oligonucleotide
  Antisense strand to SEQ ID NO: 1540110
gacuuucccugacaacuua

SEQ ID NO: 1540112 - RNA, 19 nt, Artificial Sequence
  Description of Artificial Sequence: Synthetic oligonucleotide
  Sense strand starting at position 3706 of SEQ ID NO: 1245147
ucgcaugugauuuguagga

SEQ ID NO: 1540113 - RNA, 19 nt, Artificial Sequence
  Description of Artificial Sequence: Synthetic oligonucleotide
  Antisense strand to SEQ ID NO: 1540112
uccuacaaaucacaugcga

SEQ ID NO: 1540114 - RNA, 19 nt, Artificial Sequence
  Description of Artificial Sequence: Synthetic oligonucleotide
  Sense strand starting at position 3743 of SEQ ID NO: 1245147
uuuagaccgccaugauuau

SEQ ID NO: 1540115 - RNA, 19 nt, Artificial Sequence
  Description of Artificial Sequence: Synthetic oligonucleotide
  Antisense strand to SEQ ID NO: 1540114
auaaucauggcggucuaaa

SEQ ID NO: 1540116 - RNA, 19 nt, Artificial Sequence
  Description of Artificial Sequence: Synthetic oligonucleotide
  Sense strand starting at position 3744 of SEQ ID NO: 1245147
uuagaccgccaugauuaua

SEQ ID NO: 1540117 - RNA, 19 nt, Artificial Sequence
  Description of Artificial Sequence: Synthetic oligonucleotide
  Antisense strand to SEQ ID NO: 1540116
uauaaucauggcggucuaa

SEQ ID NO: 1540118 - RNA, 19 nt, Artificial Sequence
  Description of Artificial Sequence: Synthetic oligonucleotide
  Sense strand starting at position 3899 of SEQ ID NO: 1245147
acuaguucagcacgaagga

SEQ ID NO: 1540119 - RNA, 19 nt, Artificial Sequence
  Description of Artificial Sequence: Synthetic oligonucleotide
  Antisense strand to SEQ ID NO: 1540118
uccuucgugcugaacuagu

SEQ ID NO: 1540120 - RNA, 19 nt, Artificial Sequence
  Description of Artificial Sequence: Synthetic oligonucleotide
  Sense strand starting at position 3922 of SEQ ID NO: 1245147
ccuguaugcagaggugaaa

SEQ ID NO: 1540121 - RNA, 19 nt, Artificial Sequence
  Description of Artificial Sequence: Synthetic oligonucleotide
  Antisense strand to SEQ ID NO: 1540120
uuucaccucugcauacagg

SEQ ID NO: 1540122 - RNA, 19 nt, Artificial Sequence
  Description of Artificial Sequence: Synthetic oligonucleotide
  Sense strand starting at position 3972 of SEQ ID NO: 1245147
ggucaucuggcucaggcaa

SEQ ID NO: 1540123 - RNA, 19 nt, Artificial Sequence
  Description of Artificial Sequence: Synthetic oligonucleotide
  Antisense strand to SEQ ID NO: 1540122
uugccugagccagaugacc

SEQ ID NO: 1540124 - RNA, 19 nt, Artificial Sequence
  Description of Artificial Sequence: Synthetic oligonucleotide
  Sense strand starting at position 202 of SEQ ID NO: 1245148
ucuauacgucuacaagguu

SEQ ID NO: 1540125 - RNA, 19 nt, Artificial Sequence
  Description of Artificial Sequence: Synthetic oligonucleotide
  Antisense strand to SEQ ID NO: 1540124
aaccuuguagacguauaga

SEQ ID NO: 1540126 - RNA, 19 nt, Artificial Sequence
  Description of Artificial Sequence: Synthetic oligonucleotide
  Sense strand starting at position 214 of SEQ ID NO: 1245148
caagguuaaguguagacau

SEQ ID NO: 1540127 - RNA, 19 nt, Artificial Sequence
  Description of Artificial Sequence: Synthetic oligonucleotide
  Antisense strand to SEQ ID NO: 1540126
augucuacacuuaaccuug

SEQ ID NO: 1540128 - RNA, 19 nt, Artificial Sequence
  Description of Artificial Sequence: Synthetic oligonucleotide
  Sense strand starting at position 237 of SEQ ID NO: 1245148
ugauacauuuagcaagaua

SEQ ID NO: 1540129 - RNA, 19 nt, Artificial Sequence
  Description of Artificial Sequence: Synthetic oligonucleotide
  Antisense strand to SEQ ID NO: 1540128
uaucuugcuaaauguauca

SEQ ID NO: 1540130 - RNA, 19 nt, Artificial Sequence
  Description of Artificial Sequence: Synthetic oligonucleotide
  Sense strand starting at position 416 of SEQ ID NO: 1245148
cugcuacacuucuuacagu

SEQ ID NO: 1540131 - RNA, 19 nt, Artificial Sequence
  Description of Artificial Sequence: Synthetic oligonucleotide
  Antisense strand to SEQ ID NO: 1540130
acuguaagaaguguagcag

SEQ ID NO: 1540132 - RNA, 19 nt, Artificial Sequence
  Description of Artificial Sequence: Synthetic oligonucleotide
  Sense strand starting at position 424 of SEQ ID NO: 1245148
cuucuuacaguuugugaua

SEQ ID NO: 1540133 - RNA, 19 nt, Artificial Sequence
  Description of Artificial Sequence: Synthetic oligonucleotide
  Antisense strand to SEQ ID NO: 1540132
uaucacaaacuguaagaag

SEQ ID NO: 1540134 - RNA, 19 nt, Artificial Sequence
  Description of Artificial Sequence: Synthetic oligonucleotide
  Sense strand starting at position 425 of SEQ ID NO: 1245148
uucuuacaguuugugauau

SEQ ID NO: 1540135 - RNA, 19 nt, Artificial Sequence
  Description of Artificial Sequence: Synthetic oligonucleotide
  Antisense strand to SEQ ID NO: 1540134
auaucacaaacuguaagaa

SEQ ID NO: 1540136 - RNA, 19 nt, Artificial Sequence
  Description of Artificial Sequence: Synthetic oligonucleotide
  Sense strand starting at position 531 of SEQ ID NO: 1245148
cugcuuugaccauagucaa

SEQ ID NO: 1540137 - RNA, 19 nt, Artificial Sequence
  Description of Artificial Sequence: Synthetic oligonucleotide
  Antisense strand to SEQ ID NO: 1540136
uugacuauggucaaagcag

SEQ ID NO: 1540138 - RNA, 19 nt, Artificial Sequence
  Description of Artificial Sequence: Synthetic oligonucleotide
  Sense strand starting at position 602 of SEQ ID NO: 1245148
uccaaaucagcuugaaaug

SEQ ID NO: 1540139 - RNA, 19 nt, Artificial Sequence
  Description of Artificial Sequence: Synthetic oligonucleotide
  Antisense strand to SEQ ID NO: 1540138
cauuucaagcugauuugga

SEQ ID NO: 1540140 - RNA, 19 nt, Artificial Sequence
  Description of Artificial Sequence: Synthetic oligonucleotide
  Sense strand starting at position 733 of SEQ ID NO: 1245148
cuaauagagcacuauguaa

SEQ ID NO: 1540141 - RNA, 19 nt, Artificial Sequence
  Description of Artificial Sequence: Synthetic oligonucleotide
  Antisense strand to SEQ ID NO: 1540140
uuacauagugcucuauuag

SEQ ID NO: 1540142 - RNA, 19 nt, Artificial Sequence
  Description of Artificial Sequence: Synthetic oligonucleotide
  Sense strand starting at position 735 of SEQ ID NO: 1245148
aauagagcacuauguaaag

SEQ ID NO: 1540143 - RNA, 19 nt, Artificial Sequence
  Description of Artificial Sequence: Synthetic oligonucleotide
  Antisense strand to SEQ ID NO: 1540142
cuuuacauagugcucuauu

SEQ ID NO: 1540144 - RNA, 19 nt, Artificial Sequence
  Description of Artificial Sequence: Synthetic oligonucleotide
  Sense strand starting at position 843 of SEQ ID NO: 1245148
aggcauugucaccauucua

SEQ ID NO: 1540145 - RNA, 19 nt, Artificial Sequence
  Description of Artificial Sequence: Synthetic oligonucleotide
  Antisense strand to SEQ ID NO: 1540144
uagaauggugacaaugccu

SEQ ID NO: 1540146 - RNA, 19 nt, Artificial Sequence
  Description of Artificial Sequence: Synthetic oligonucleotide
  Sense strand starting at position 873 of SEQ ID NO: 1245148
gcuugugguaugucuagca

SEQ ID NO: 1540147 - RNA, 19 nt, Artificial Sequence
  Description of Artificial Sequence: Synthetic oligonucleotide
  Antisense strand to SEQ ID NO: 1540146
ugcuagacauaccacaagc

SEQ ID NO: 1540148 - RNA, 19 nt, Artificial Sequence
  Description of Artificial Sequence: Synthetic oligonucleotide
  Sense strand starting at position 1072 of SEQ ID NO: 1245148
auagaccauugguuuauua

SEQ ID NO: 1540149 - RNA, 19 nt, Artificial Sequence
  Description of Artificial Sequence: Synthetic oligonucleotide
  Antisense strand to SEQ ID NO: 1540148
uaauaaaccaauggucuau

SEQ ID NO: 1540150 - RNA, 19 nt, Artificial Sequence
  Description of Artificial Sequence: Synthetic oligonucleotide
  Sense strand starting at position 1076 of SEQ ID NO: 1245148
accauugguuuauuagaag

SEQ ID NO: 1540151 - RNA, 19 nt, Artificial Sequence
  Description of Artificial Sequence: Synthetic oligonucleotide
  Antisense strand to SEQ ID NO: 1540150
cuucuaauaaaccaauggu

SEQ ID NO: 1540152 - RNA, 19 nt, Artificial Sequence
  Description of Artificial Sequence: Synthetic oligonucleotide
  Sense strand starting at position 1119 of SEQ ID NO: 1245148
uuuauaaaucaaggagucu

SEQ ID NO: 1540153 - RNA, 19 nt, Artificial Sequence
  Description of Artificial Sequence: Synthetic oligonucleotide
  Antisense strand to SEQ ID NO: 1540152
agacuccuugauuuauaaa

SEQ ID NO: 1540154 - RNA, 19 nt, Artificial Sequence
  Description of Artificial Sequence: Synthetic oligonucleotide
  Sense strand starting at position 1180 of SEQ ID NO: 1245148
gcauuaucccuccaucugu

SEQ ID NO: 1540155 - RNA, 19 nt, Artificial Sequence
  Description of Artificial Sequence: Synthetic oligonucleotide
  Antisense strand to SEQ ID NO: 1540154
acagauggagggauaaugc

SEQ ID NO: 1540156 - RNA, 19 nt, Artificial Sequence
  Description of Artificial Sequence: Synthetic oligonucleotide
  Sense strand starting at position 1240 of SEQ ID NO: 1245148
acgauauaaugagagggau

SEQ ID NO: 1540157 - RNA, 19 nt, Artificial Sequence
  Description of Artificial Sequence: Synthetic oligonucleotide
  Antisense strand to SEQ ID NO: 1540156
aucccucucauuauaucgu

SEQ ID NO: 1540158 - RNA, 19 nt, Artificial Sequence
  Description of Artificial Sequence: Synthetic oligonucleotide
  Sense strand starting at position 1460 of SEQ ID NO: 1245148
gagggugucaacugauaag

SEQ ID NO: 1540159 - RNA, 19 nt, Artificial Sequence
  Description of Artificial Sequence: Synthetic oligonucleotide
  Antisense strand to SEQ ID NO: 1540158
cuuaucaguugacacccuc

SEQ ID NO: 1540160 - RNA, 19 nt, Artificial Sequence
  Description of Artificial Sequence: Synthetic oligonucleotide
  Sense strand starting at position 1496 of SEQ ID NO: 1245148
cuacuucccuaaguuguaa

SEQ ID NO: 1540161 - RNA, 19 nt, Artificial Sequence
  Description of Artificial Sequence: Synthetic oligonucleotide
  Antisense strand to SEQ ID NO: 1540160
uuacaacuuagggaaguag

SEQ ID NO: 1540162 - RNA, 19 nt, Artificial Sequence
  Description of Artificial Sequence: Synthetic oligonucleotide
  Sense strand starting at position 1533 of SEQ ID NO: 1245148
gggagauucuugguuacag

SEQ ID NO: 1540163 - RNA, 19 nt, Artificial Sequence
  Description of Artificial Sequence: Synthetic oligonucleotide
  Antisense strand to SEQ ID NO: 1540162
cuguaaccaagaaucuccc

SEQ ID NO: 1540164 - RNA, 19 nt, Artificial Sequence
  Description of Artificial Sequence: Synthetic oligonucleotide
  Sense strand starting at position 1534 of SEQ ID NO: 1245148
ggagauucuugguuacaga

SEQ ID NO: 1540165 - RNA, 19 nt, Artificial Sequence
  Description of Artificial Sequence: Synthetic oligonucleotide
  Antisense strand to SEQ ID NO: 1540164
ucuguaaccaagaaucucc

SEQ ID NO: 1540166 - RNA, 19 nt, Artificial Sequence
  Description of Artificial Sequence: Synthetic oligonucleotide
  Sense strand starting at position 1710 of SEQ ID NO: 1245148
ugugucauaacuuagggua

SEQ ID NO: 1540167 - RNA, 19 nt, Artificial Sequence
  Description of Artificial Sequence: Synthetic oligonucleotide
  Antisense strand to SEQ ID NO: 1540166
uacccuaaguuaugacaca

SEQ ID NO: 1540168 - RNA, 19 nt, Artificial Sequence
  Description of Artificial Sequence: Synthetic oligonucleotide
  Sense strand starting at position 1982 of SEQ ID NO: 1245148
gccagugcugcugcaagau

SEQ ID NO: 1540169 - RNA, 19 nt, Artificial Sequence
  Description of Artificial Sequence: Synthetic oligonucleotide
  Antisense strand to SEQ ID NO: 1540168
aucuugcagcagcacuggc

SEQ ID NO: 1540170 - RNA, 19 nt, Artificial Sequence
  Description of Artificial Sequence: Synthetic oligonucleotide
  Sense strand starting at position 2655 of SEQ ID NO: 1245148
ccuugaauugugggagaug

SEQ ID NO: 1540171 - RNA, 19 nt, Artificial Sequence
  Description of Artificial Sequence: Synthetic oligonucleotide
  Antisense strand to SEQ ID NO: 1540170
caucucccacaauucaagg

SEQ ID NO: 1540172 - RNA, 19 nt, Artificial Sequence
  Description of Artificial Sequence: Synthetic oligonucleotide
  Sense strand starting at position 2705 of SEQ ID NO: 1245148
ccaguuaagagcgagguuu

SEQ ID NO: 1540173 - RNA, 19 nt, Artificial Sequence
  Description of Artificial Sequence: Synthetic oligonucleotide
  Antisense strand to SEQ ID NO: 1540172
aaaccucgcucuuaacugg

SEQ ID NO: 1540174 - RNA, 19 nt, Artificial Sequence
  Description of Artificial Sequence: Synthetic oligonucleotide
  Sense strand starting at position 2729 of SEQ ID NO: 1245148
cuacuauucccaggaagac

SEQ ID NO: 1540175 - RNA, 19 nt, Artificial Sequence
  Description of Artificial Sequence: Synthetic oligonucleotide
  Antisense strand to SEQ ID NO: 1540174
gucuuccugggaauaguag

SEQ ID NO: 1540176 - RNA, 19 nt, Artificial Sequence
  Description of Artificial Sequence: Synthetic oligonucleotide
  Sense strand starting at position 3521 of SEQ ID NO: 1245148
ggaacucagaugugaaagu

SEQ ID NO: 1540177 - RNA, 19 nt, Artificial Sequence
  Description of Artificial Sequence: Synthetic oligonucleotide
  Antisense strand to SEQ ID NO: 1540176
acuuucacaucugaguucc

SEQ ID NO: 1540178 - RNA, 19 nt, Artificial Sequence
  Description of Artificial Sequence: Synthetic oligonucleotide
  Sense strand starting at position 3528 of SEQ ID NO: 1245148
agaugugaaaguugaucuu

SEQ ID NO: 1540179 - RNA, 19 nt, Artificial Sequence
  Description of Artificial Sequence: Synthetic oligonucleotide
  Antisense strand to SEQ ID NO: 1540178
aagaucaacuuucacaucu

SEQ ID NO: 1540180 - RNA, 19 nt, Artificial Sequence
  Description of Artificial Sequence: Synthetic oligonucleotide
  Sense strand starting at position 3531 of SEQ ID NO: 1245148
ugugaaaguugaucuugaa

SEQ ID NO: 1540181 - RNA, 19 nt, Artificial Sequence
  Description of Artificial Sequence: Synthetic oligonucleotide
  Antisense strand to SEQ ID NO: 1540180
uucaagaucaacuuucaca

SEQ ID NO: 1540182 - RNA, 19 nt, Artificial Sequence
  Description of Artificial Sequence: Synthetic oligonucleotide
  Sense strand starting at position 3534 of SEQ ID NO: 1245148
gaaaguugaucuugaauuu

SEQ ID NO: 1540183 - RNA, 19 nt, Artificial Sequence
  Description of Artificial Sequence: Synthetic oligonucleotide
  Antisense strand to SEQ ID NO: 1540182
aaauucaagaucaacuuuc

SEQ ID NO: 1540184 - RNA, 19 nt, Artificial Sequence
  Description of Artificial Sequence: Synthetic oligonucleotide
  Sense strand starting at position 3595 of SEQ ID NO: 1245148
uuauauuggcucuguuaca

SEQ ID NO: 1540185 - RNA, 19 nt, Artificial Sequence
  Description of Artificial Sequence: Synthetic oligonucleotide
  Antisense strand to SEQ ID NO: 1540184
uguaacagagccaauauaa

SEQ ID NO: 1540186 - RNA, 19 nt, Artificial Sequence
  Description of Artificial Sequence: Synthetic oligonucleotide
  Sense strand starting at position 3691 of SEQ ID NO: 1245148
acauguuaccugcaguaau

SEQ ID NO: 1540187 - RNA, 19 nt, Artificial Sequence
  Description of Artificial Sequence: Synthetic oligonucleotide
  Antisense strand to SEQ ID NO: 1540186
auuacugcagguaacaugu

SEQ ID NO: 1540188 - RNA, 19 nt, Artificial Sequence
  Description of Artificial Sequence: Synthetic oligonucleotide
  Sense strand starting at position 3694 of SEQ ID NO: 1245148
uguuaccugcaguaauaga

SEQ ID NO: 1540189 - RNA, 19 nt, Artificial Sequence
  Description of Artificial Sequence: Synthetic oligonucleotide
  Antisense strand to SEQ ID NO: 1540188
ucuauuacugcagguaaca

SEQ ID NO: 1540190 - RNA, 19 nt, Artificial Sequence
  Description of Artificial Sequence: Synthetic oligonucleotide
  Sense strand starting at position 3731 of SEQ ID NO: 1245148
gauggaauguaaguuguca

SEQ ID NO: 1540191 - RNA, 19 nt, Artificial Sequence
  Description of Artificial Sequence: Synthetic oligonucleotide
  Antisense strand to SEQ ID NO: 1540190
ugacaacuuacauuccauc

SEQ ID NO: 1540192 - RNA, 19 nt, Artificial Sequence
  Description of Artificial Sequence: Synthetic oligonucleotide
  Sense strand starting at position 3739 of SEQ ID NO: 1245148
guaaguugucagggaaagu

SEQ ID NO: 1540193 - RNA, 19 nt, Artificial Sequence
  Description of Artificial Sequence: Synthetic oligonucleotide
  Antisense strand to SEQ ID NO: 1540192
acuuucccugacaacuuac

SEQ ID NO: 1540194 - RNA, 19 nt, Artificial Sequence
  Description of Artificial Sequence: Synthetic oligonucleotide
  Sense strand starting at position 3740 of SEQ ID NO: 1245148
uaaguugucagggaaaguc

SEQ ID NO: 1540195 - RNA, 19 nt, Artificial Sequence
  Description of Artificial Sequence: Synthetic oligonucleotide
  Antisense strand to SEQ ID NO: 1540194
gacuuucccugacaacuua

SEQ ID NO: 1540196 - RNA, 19 nt, Artificial Sequence
  Description of Artificial Sequence: Synthetic oligonucleotide
  Sense strand starting at position 3807 of SEQ ID NO: 1245148
ucgcaugugauuuguagga

SEQ ID NO: 1540197 - RNA, 19 nt, Artificial Sequence
  Description of Artificial Sequence: Synthetic oligonucleotide
  Antisense strand to SEQ ID NO: 1540196
uccuacaaaucacaugcga

SEQ ID NO: 1540198 - RNA, 19 nt, Artificial Sequence
  Description of Artificial Sequence: Synthetic oligonucleotide
  Sense strand starting at position 3809 of SEQ ID NO: 1245148
gcaugugauuuguaggaaa

SEQ ID NO: 1540199 - RNA, 19 nt, Artificial Sequence
  Description of Artificial Sequence: Synthetic oligonucleotide
  Antisense strand to SEQ ID NO: 1540198
uuuccuacaaaucacaugc

SEQ ID NO: 1540200 - RNA, 19 nt, Artificial Sequence
  Description of Artificial Sequence: Synthetic oligonucleotide
  Sense strand starting at position 3844 of SEQ ID NO: 1245148
uuuagaccgccaugauuau

SEQ ID NO: 1540201 - RNA, 19 nt, Artificial Sequence
  Description of Artificial Sequence: Synthetic oligonucleotide
  Antisense strand to SEQ ID NO: 1540200
auaaucauggcggucuaaa

SEQ ID NO: 1540202 - RNA, 19 nt, Artificial Sequence
  Description of Artificial Sequence: Synthetic oligonucleotide
  Sense strand starting at position 3845 of SEQ ID NO: 1245148
uuagaccgccaugauuaua

SEQ ID NO: 1540203 - RNA, 19 nt, Artificial Sequence
  Description of Artificial Sequence: Synthetic oligonucleotide
  Antisense strand to SEQ ID NO: 1540202
uauaaucauggcggucuaa

SEQ ID NO: 1540204 - RNA, 19 nt, Artificial Sequence
  Description of Artificial Sequence: Synthetic oligonucleotide
  Sense strand starting at position 92 of SEQ ID NO: 1245149
gacaauauaugcucaguga

SEQ ID NO: 1540205 - RNA, 19 nt, Artificial Sequence
  Description of Artificial Sequence: Synthetic oligonucleotide
  Antisense strand to SEQ ID NO: 1540204
ucacugagcauauauuguc

SEQ ID NO: 1540206 - RNA, 19 nt, Artificial Sequence
  Description of Artificial Sequence: Synthetic oligonucleotide
  Sense strand starting at position 93 of SEQ ID NO: 1245149
acaauauaugcucagugaa

SEQ ID NO: 1540207 - RNA, 19 nt, Artificial Sequence
  Description of Artificial Sequence: Synthetic oligonucleotide
  Antisense strand to SEQ ID NO: 1540206
uucacugagcauauauugu

SEQ ID NO: 1540208 - RNA, 19 nt, Artificial Sequence
  Description of Artificial Sequence: Synthetic oligonucleotide
  Sense strand starting at position 137 of SEQ ID NO: 1245149
acuagaucaugccuguaau

SEQ ID NO: 1540209 - RNA, 19 nt, Artificial Sequence
  Description of Artificial Sequence: Synthetic oligonucleotide
  Antisense strand to SEQ ID NO: 1540208
auuacaggcaugaucuagu

SEQ ID NO: 1540210 - RNA, 19 nt, Artificial Sequence
  Description of Artificial Sequence: Synthetic oligonucleotide
  Sense strand starting at position 382 of SEQ ID NO: 1245149
cccggaagcuucuuauuaa

SEQ ID NO: 1540211 - RNA, 19 nt, Artificial Sequence
  Description of Artificial Sequence: Synthetic oligonucleotide
  Antisense strand to SEQ ID NO: 1540210
uuaauaagaagcuuccggg

SEQ ID NO: 1540212 - RNA, 19 nt, Artificial Sequence
  Description of Artificial Sequence: Synthetic oligonucleotide
  Sense strand starting at position 385 of SEQ ID NO: 1245149
ggaagcuucuuauuaauuc

SEQ ID NO: 1540213 - RNA, 19 nt, Artificial Sequence
  Description of Artificial Sequence: Synthetic oligonucleotide
  Antisense strand to SEQ ID NO: 1540212
gaauuaauaagaagcuucc

SEQ ID NO: 1540214 - RNA, 19 nt, Artificial Sequence
  Description of Artificial Sequence: Synthetic oligonucleotide
  Sense strand starting at position 470 of SEQ ID NO: 1245149
cggaaauaauccucagugu

SEQ ID NO: 1540215 - RNA, 19 nt, Artificial Sequence
  Description of Artificial Sequence: Synthetic oligonucleotide
  Antisense strand to SEQ ID NO: 1540214
acacugaggauuauuuccg

SEQ ID NO: 1540216 - RNA, 19 nt, Artificial Sequence
  Description of Artificial Sequence: Synthetic oligonucleotide
  Sense strand starting at position 471 of SEQ ID NO: 1245149
ggaaauaauccucaguguu

SEQ ID NO: 1540217 - RNA, 19 nt, Artificial Sequence
  Description of Artificial Sequence: Synthetic oligonucleotide
  Antisense strand to SEQ ID NO: 1540216
aacacugaggauuauuucc

SEQ ID NO: 1540218 - RNA, 19 nt, Artificial Sequence
  Description of Artificial Sequence: Synthetic oligonucleotide
  Sense strand starting at position 593 of SEQ ID NO: 1245149
uucugcuagcguuucugaa

SEQ ID NO: 1540219 - RNA, 19 nt, Artificial Sequence
  Description of Artificial Sequence: Synthetic oligonucleotide
  Antisense strand to SEQ ID NO: 1540218
uucagaaacgcuagcagaa

SEQ ID NO: 1540220 - RNA, 19 nt, Artificial Sequence
  Description of Artificial Sequence: Synthetic oligonucleotide
  Sense strand starting at position 594 of SEQ ID NO: 1245149
ucugcuagcguuucugaau

SEQ ID NO: 1540221 - RNA, 19 nt, Artificial Sequence
  Description of Artificial Sequence: Synthetic oligonucleotide
  Antisense strand to SEQ ID NO: 1540220
auucagaaacgcuagcaga

SEQ ID NO: 1540222 - RNA, 19 nt, Artificial Sequence
  Description of Artificial Sequence: Synthetic oligonucleotide
  Sense strand starting at position 691 of SEQ ID NO: 1245149
gacuuuauuugccacagga

SEQ ID NO: 1540223 - RNA, 19 nt, Artificial Sequence
  Description of Artificial Sequence: Synthetic oligonucleotide
  Antisense strand to SEQ ID NO: 1540222
uccuguggcaaauaaaguc

SEQ ID NO: 1540224 - RNA, 19 nt, Artificial Sequence
  Description of Artificial Sequence: Synthetic oligonucleotide
  Sense strand starting at position 907 of SEQ ID NO: 1245149
acuccaaguaggugucaga

SEQ ID NO: 1540225 - RNA, 19 nt, Artificial Sequence
  Description of Artificial Sequence: Synthetic oligonucleotide
  Antisense strand to SEQ ID NO: 1540224
ucugacaccuacuuggagu

SEQ ID NO: 1540226 - RNA, 19 nt, Artificial Sequence
  Description of Artificial Sequence: Synthetic oligonucleotide
  Sense strand starting at position 973 of SEQ ID NO: 1245149
uucggaugcauugaauaag

SEQ ID NO: 1540227 - RNA, 19 nt, Artificial Sequence
  Description of Artificial Sequence: Synthetic oligonucleotide
  Antisense strand to SEQ ID NO: 1540226
cuuauucaaugcauccgaa

SEQ ID NO: 1540228 - RNA, 19 nt, Artificial Sequence
  Description of Artificial Sequence: Synthetic oligonucleotide
  Sense strand starting at position 976 of SEQ ID NO: 1245149
ggaugcauugaauaagcau

SEQ ID NO: 1540229 - RNA, 19 nt, Artificial Sequence
  Description of Artificial Sequence: Synthetic oligonucleotide
  Antisense strand to SEQ ID NO: 1540228
augcuuauucaaugcaucc

SEQ ID NO: 1540230 - RNA, 19 nt, Artificial Sequence
  Description of Artificial Sequence: Synthetic oligonucleotide
  Sense strand starting at position 1127 of SEQ ID NO: 1245149
caaagcucuggcgagguua

SEQ ID NO: 1540231 - RNA, 19 nt, Artificial Sequence
  Description of Artificial Sequence: Synthetic oligonucleotide
  Antisense strand to SEQ ID NO: 1540230
uaaccucgccagagcuuug

SEQ ID NO: 1540232 - RNA, 19 nt, Artificial Sequence
  Description of Artificial Sequence: Synthetic oligonucleotide
  Sense strand starting at position 1159 of SEQ ID NO: 1245149
aggugucacaguuggaaau

SEQ ID NO: 1540233 - RNA, 19 nt, Artificial Sequence
  Description of Artificial Sequence: Synthetic oligonucleotide
  Antisense strand to SEQ ID NO: 1540232
auuuccaacugugacaccu

SEQ ID NO: 1540234 - RNA, 19 nt, Artificial Sequence
  Description of Artificial Sequence: Synthetic oligonucleotide
  Sense strand starting at position 1242 of SEQ ID NO: 1245149
cacgguuugcaucagaaac

SEQ ID NO: 1540235 - RNA, 19 nt, Artificial Sequence
  Description of Artificial Sequence: Synthetic oligonucleotide
  Antisense strand to SEQ ID NO: 1540234
guuucugaugcaaaccgug

SEQ ID NO: 1540236 - RNA, 19 nt, Artificial Sequence
  Description of Artificial Sequence: Synthetic oligonucleotide
  Sense strand starting at position 1382 of SEQ ID NO: 1245149
gggcuuuccucagcaggga

SEQ ID NO: 1540237 - RNA, 19 nt, Artificial Sequence
  Description of Artificial Sequence: Synthetic oligonucleotide
  Antisense strand to SEQ ID NO: 1540236
ucccugcugaggaaagccc

SEQ ID NO: 1540238 - RNA, 19 nt, Artificial Sequence
  Description of Artificial Sequence: Synthetic oligonucleotide
  Sense strand starting at position 1511 of SEQ ID NO: 1245149
gguuauugcaggugacaau

SEQ ID NO: 1540239 - RNA, 19 nt, Artificial Sequence
  Description of Artificial Sequence: Synthetic oligonucleotide
  Antisense strand to SEQ ID NO: 1540238
auugucaccugcaauaacc

SEQ ID NO: 1540240 - RNA, 19 nt, Artificial Sequence
  Description of Artificial Sequence: Synthetic oligonucleotide
  Sense strand starting at position 1529 of SEQ ID NO: 1245149
uaaccaaggcucugggaaa

SEQ ID NO: 1540241 - RNA, 19 nt, Artificial Sequence
  Description of Artificial Sequence: Synthetic oligonucleotide
  Antisense strand to SEQ ID NO: 1540240
uuucccagagccuugguua

SEQ ID NO: 1540242 - RNA, 19 nt, Artificial Sequence
  Description of Artificial Sequence: Synthetic oligonucleotide
  Sense strand starting at position 1861 of SEQ ID NO: 1245149
auguuugcgccgagugaac

SEQ ID NO: 1540243 - RNA, 19 nt, Artificial Sequence
  Description of Artificial Sequence: Synthetic oligonucleotide
  Antisense strand to SEQ ID NO: 1540242
guucacucggcgcaaacau

SEQ ID NO: 1540244 - RNA, 19 nt, Artificial Sequence
  Description of Artificial Sequence: Synthetic oligonucleotide
  Sense strand starting at position 2239 of SEQ ID NO: 1245149
agccaugacucagcaaaua

SEQ ID NO: 1540245 - RNA, 19 nt, Artificial Sequence
  Description of Artificial Sequence: Synthetic oligonucleotide
  Antisense strand to SEQ ID NO: 1540244
uauuugcugagucauggcu

SEQ ID NO: 1540246 - RNA, 19 nt, Artificial Sequence
  Description of Artificial Sequence: Synthetic oligonucleotide
  Sense strand starting at position 2266 of SEQ ID NO: 1245149
cgacguuuccauuacuauu

SEQ ID NO: 1540247 - RNA, 19 nt, Artificial Sequence
  Description of Artificial Sequence: Synthetic oligonucleotide
  Antisense strand to SEQ ID NO: 1540246
aauaguaauggaaacgucg

SEQ ID NO: 1540248 - RNA, 19 nt, Artificial Sequence
  Description of Artificial Sequence: Synthetic oligonucleotide
  Sense strand starting at position 2268 of SEQ ID NO: 1245149
acguuuccauuacuauuau

SEQ ID NO: 1540249 - RNA, 19 nt, Artificial Sequence
  Description of Artificial Sequence: Synthetic oligonucleotide
  Antisense strand to SEQ ID NO: 1540248
auaauaguaauggaaacgu

SEQ ID NO: 1540250 - RNA, 19 nt, Artificial Sequence
  Description of Artificial Sequence: Synthetic oligonucleotide
  Sense strand starting at position 2426 of SEQ ID NO: 1245149
agcagaauuugacagguga

SEQ ID NO: 1540251 - RNA, 19 nt, Artificial Sequence
  Description of Artificial Sequence: Synthetic oligonucleotide
  Antisense strand to SEQ ID NO: 1540250
ucaccugucaaauucugcu

SEQ ID NO: 1540252 - RNA, 19 nt, Artificial Sequence
  Description of Artificial Sequence: Synthetic oligonucleotide
  Sense strand starting at position 2504 of SEQ ID NO: 1245149
ggacgguaugaugagguuu

SEQ ID NO: 1540253 - RNA, 19 nt, Artificial Sequence
  Description of Artificial Sequence: Synthetic oligonucleotide
  Antisense strand to SEQ ID NO: 1540252
aaaccucaucauaccgucc

SEQ ID NO: 1540254 - RNA, 19 nt, Artificial Sequence
  Description of Artificial Sequence: Synthetic oligonucleotide
  Sense strand starting at position 2516 of SEQ ID NO: 1245149
gagguuugucuguaucaua

SEQ ID NO: 1540255 - RNA, 19 nt, Artificial Sequence
  Description of Artificial Sequence: Synthetic oligonucleotide
  Antisense strand to SEQ ID NO: 1540254
uaugauacagacaaaccuc

SEQ ID NO: 1540256 - RNA, 19 nt, Artificial Sequence
  Description of Artificial Sequence: Synthetic oligonucleotide
  Sense strand starting at position 2661 of SEQ ID NO: 1245149
ugcauuguggaguaggaaa

SEQ ID NO: 1540257 - RNA, 19 nt, Artificial Sequence
  Description of Artificial Sequence: Synthetic oligonucleotide
  Antisense strand to SEQ ID NO: 1540256
uuuccuacuccacaaugca

SEQ ID NO: 1540258 - RNA, 19 nt, Artificial Sequence
  Description of Artificial Sequence: Synthetic oligonucleotide
  Sense strand starting at position 3085 of SEQ ID NO: 1245149
auaugugcuacugauggaa

SEQ ID NO: 1540259 - RNA, 19 nt, Artificial Sequence
  Description of Artificial Sequence: Synthetic oligonucleotide
  Antisense strand to SEQ ID NO: 1540258
uuccaucaguagcacauau

SEQ ID NO: 1540260 - RNA, 19 nt, Artificial Sequence
  Description of Artificial Sequence: Synthetic oligonucleotide
  Sense strand starting at position 3088 of SEQ ID NO: 1245149
ugugcuacugauggaauua

SEQ ID NO: 1540261 - RNA, 19 nt, Artificial Sequence
  Description of Artificial Sequence: Synthetic oligonucleotide
  Antisense strand to SEQ ID NO: 1540260
uaauuccaucaguagcaca

SEQ ID NO: 1540262 - RNA, 19 nt, Artificial Sequence
  Description of Artificial Sequence: Synthetic oligonucleotide
  Sense strand starting at position 3120 of SEQ ID NO: 1245149
uaaaguugguccuccugau

SEQ ID NO: 1540263 - RNA, 19 nt, Artificial Sequence
  Description of Artificial Sequence: Synthetic oligonucleotide
  Antisense strand to SEQ ID NO: 1540262
aucaggaggaccaacuuua

SEQ ID NO: 1540264 - RNA, 19 nt, Artificial Sequence
  Description of Artificial Sequence: Synthetic oligonucleotide
  Sense strand starting at position 3127 of SEQ ID NO: 1245149
gguccuccugaugguuaua

SEQ ID NO: 1540265 - RNA, 19 nt, Artificial Sequence
  Description of Artificial Sequence: Synthetic oligonucleotide
  Antisense strand to SEQ ID NO: 1540264
uauaaccaucaggaggacc

SEQ ID NO: 1540266 - RNA, 19 nt, Artificial Sequence
  Description of Artificial Sequence: Synthetic oligonucleotide
  Sense strand starting at position 3138 of SEQ ID NO: 1245149
ugguuauaagcccaaugca

SEQ ID NO: 1540267 - RNA, 19 nt, Artificial Sequence
  Description of Artificial Sequence: Synthetic oligonucleotide
  Antisense strand to SEQ ID NO: 1540266
ugcauugggcuuauaacca

SEQ ID NO: 1540268 - RNA, 19 nt, Artificial Sequence
  Description of Artificial Sequence: Synthetic oligonucleotide
  Sense strand starting at position 3317 of SEQ ID NO: 1245149
uaaguugcccuguaaagag

SEQ ID NO: 1540269 - RNA, 19 nt, Artificial Sequence
  Description of Artificial Sequence: Synthetic oligonucleotide
  Antisense strand to SEQ ID NO: 1540268
cucuuuacagggcaacuua

SEQ ID NO: 1540270 - RNA, 19 nt, Artificial Sequence
  Description of Artificial Sequence: Synthetic oligonucleotide
  Sense strand starting at position 3325 of SEQ ID NO: 1245149
ccuguaaagaggugaucuu

SEQ ID NO: 1540271 - RNA, 19 nt, Artificial Sequence
  Description of Artificial Sequence: Synthetic oligonucleotide
  Antisense strand to SEQ ID NO: 1540270
aagaucaccucuuuacagg

SEQ ID NO: 1540272 - RNA, 19 nt, Artificial Sequence
  Description of Artificial Sequence: Synthetic oligonucleotide
  Sense strand starting at position 3649 of SEQ ID NO: 1245149
agacgucugagcuaugaag

SEQ ID NO: 1540273 - RNA, 19 nt, Artificial Sequence
  Description of Artificial Sequence: Synthetic oligonucleotide
  Antisense strand to SEQ ID NO: 1540272
cuucauagcucagacgucu

SEQ ID NO: 1540274 - RNA, 19 nt, Artificial Sequence
  Description of Artificial Sequence: Synthetic oligonucleotide
  Sense strand starting at position 3731 of SEQ ID NO: 1245149
ccuccugcuggguagagau

SEQ ID NO: 1540275 - RNA, 19 nt, Artificial Sequence
  Description of Artificial Sequence: Synthetic oligonucleotide
  Antisense strand to SEQ ID NO: 1540274
aucucuacccagcaggagg

SEQ ID NO: 1540276 - RNA, 19 nt, Artificial Sequence
  Description of Artificial Sequence: Synthetic oligonucleotide
  Sense strand starting at position 3733 of SEQ ID NO: 1245149
uccugcuggguagagauaa

SEQ ID NO: 1540277 - RNA, 19 nt, Artificial Sequence
  Description of Artificial Sequence: Synthetic oligonucleotide
  Antisense strand to SEQ ID NO: 1540276
uuaucucuacccagcagga

SEQ ID NO: 1540278 - RNA, 19 nt, Artificial Sequence
  Description of Artificial Sequence: Synthetic oligonucleotide
  Sense strand starting at position 3771 of SEQ ID NO: 1245149
caggcaaacgcugaugauu

SEQ ID NO: 1540279 - RNA, 19 nt, Artificial Sequence
  Description of Artificial Sequence: Synthetic oligonucleotide
  Antisense strand to SEQ ID NO: 1540278
aaucaucagcguuugccug

SEQ ID NO: 1540280 - RNA, 19 nt, Artificial Sequence
  Description of Artificial Sequence: Synthetic oligonucleotide
  Sense strand starting at position 3779 of SEQ ID NO: 1245149
cgcugaugauuagugacaa

SEQ ID NO: 1540281 - RNA, 19 nt, Artificial Sequence
  Description of Artificial Sequence: Synthetic oligonucleotide
  Antisense strand to SEQ ID NO: 1540280
uugucacuaaucaucagcg

SEQ ID NO: 1540282 - RNA, 19 nt, Artificial Sequence
  Description of Artificial Sequence: Synthetic oligonucleotide
  Sense strand starting at position 3837 of SEQ ID NO: 1245149
gcuggcguggguuaaauuu

SEQ ID NO: 1540283 - RNA, 19 nt, Artificial Sequence
  Description of Artificial Sequence: Synthetic oligonucleotide
  Antisense strand to SEQ ID NO: 1540282
aaauuuaacccacgccagc

SEQ ID NO: 1540284 - RNA, 19 nt, Artificial Sequence
  Description of Artificial Sequence: Synthetic oligonucleotide
  Sense strand starting at position 78 of SEQ ID NO: 1245150
ggcuguuccauggaaacau

SEQ ID NO: 1540285 - RNA, 19 nt, Artificial Sequence
  Description of Artificial Sequence: Synthetic oligonucleotide
  Antisense strand to SEQ ID NO: 1540284
auguuuccauggaacagcc

SEQ ID NO: 1540286 - RNA, 19 nt, Artificial Sequence
  Description of Artificial Sequence: Synthetic oligonucleotide
  Sense strand starting at position 133 of SEQ ID NO: 1245150
ccauguauauaagguuuga

SEQ ID NO: 1540287 - RNA, 19 nt, Artificial Sequence
  Description of Artificial Sequence: Synthetic oligonucleotide
  Antisense strand to SEQ ID NO: 1540286
ucaaaccuuauauacaugg

SEQ ID NO: 1540288 - RNA, 19 nt, Artificial Sequence
  Description of Artificial Sequence: Synthetic oligonucleotide
  Sense strand starting at position 221 of SEQ ID NO: 1245150
acuguaaucagagaccgua

SEQ ID NO: 1540289 - RNA, 19 nt, Artificial Sequence
  Description of Artificial Sequence: Synthetic oligonucleotide
  Antisense strand to SEQ ID NO: 1540288
uacggucucugauuacagu

SEQ ID NO: 1540290 - RNA, 19 nt, Artificial Sequence
  Description of Artificial Sequence: Synthetic oligonucleotide
  Sense strand starting at position 234 of SEQ ID NO: 1245150
accguaguggccugaauaa

SEQ ID NO: 1540291 - RNA, 19 nt, Artificial Sequence
  Description of Artificial Sequence: Synthetic oligonucleotide
  Antisense strand to SEQ ID NO: 1540290
uuauucaggccacuacggu

SEQ ID NO: 1540292 - RNA, 19 nt, Artificial Sequence
  Description of Artificial Sequence: Synthetic oligonucleotide
  Sense strand starting at position 241 of SEQ ID NO: 1245150
uggccugaauaaucaugau

SEQ ID NO: 1540293 - RNA, 19 nt, Artificial Sequence
  Description of Artificial Sequence: Synthetic oligonucleotide
  Antisense strand to SEQ ID NO: 1540292
aucaugauuauucaggcca

SEQ ID NO: 1540294 - RNA, 19 nt, Artificial Sequence
  Description of Artificial Sequence: Synthetic oligonucleotide
  Sense strand starting at position 244 of SEQ ID NO: 1245150
ccugaauaaucaugaugua

SEQ ID NO: 1540295 - RNA, 19 nt, Artificial Sequence
  Description of Artificial Sequence: Synthetic oligonucleotide
  Antisense strand to SEQ ID NO: 1540294
uacaucaugauuauucagg

SEQ ID NO: 1540296 - RNA, 19 nt, Artificial Sequence
  Description of Artificial Sequence: Synthetic oligonucleotide
  Sense strand starting at position 293 of SEQ ID NO: 1245150
ucaacuaauugagaagaac

SEQ ID NO: 1540297 - RNA, 19 nt, Artificial Sequence
  Description of Artificial Sequence: Synthetic oligonucleotide
  Antisense strand to SEQ ID NO: 1540296
guucuucucaauuaguuga

SEQ ID NO: 1540298 - RNA, 19 nt, Artificial Sequence
  Description of Artificial Sequence: Synthetic oligonucleotide
  Sense strand starting at position 326 of SEQ ID NO: 1245150
aagugauucugaucagcug

SEQ ID NO: 1540299 - RNA, 19 nt, Artificial Sequence
  Description of Artificial Sequence: Synthetic oligonucleotide
  Antisense strand to SEQ ID NO: 1540298
cagcugaucagaaucacuu

SEQ ID NO: 1540300 - RNA, 19 nt, Artificial Sequence
  Description of Artificial Sequence: Synthetic oligonucleotide
  Sense strand starting at position 327 of SEQ ID NO: 1245150
agugauucugaucagcuga

SEQ ID NO: 1540301 - RNA, 19 nt, Artificial Sequence
  Description of Artificial Sequence: Synthetic oligonucleotide
  Antisense strand to SEQ ID NO: 1540300
ucagcugaucagaaucacu

SEQ ID NO: 1540302 - RNA, 19 nt, Artificial Sequence
  Description of Artificial Sequence: Synthetic oligonucleotide
  Sense strand starting at position 329 of SEQ ID NO: 1245150
ugauucugaucagcugaau

SEQ ID NO: 1540303 - RNA, 19 nt, Artificial Sequence
  Description of Artificial Sequence: Synthetic oligonucleotide
  Antisense strand to SEQ ID NO: 1540302
auucagcugaucagaauca

SEQ ID NO: 1540304 - RNA, 19 nt, Artificial Sequence
  Description of Artificial Sequence: Synthetic oligonucleotide
  Sense strand starting at position 353 of SEQ ID NO: 1245150
auacaucacucuggaugau

SEQ ID NO: 1540305 - RNA, 19 nt, Artificial Sequence
  Description of Artificial Sequence: Synthetic oligonucleotide
  Antisense strand to SEQ ID NO: 1540304
aucauccagagugauguau

SEQ ID NO: 1540306 - RNA, 19 nt, Artificial Sequence
  Description of Artificial Sequence: Synthetic oligonucleotide
  Sense strand starting at position 411 of SEQ ID NO: 1245150
cagagagguuuccacgacu

SEQ ID NO: 1540307 - RNA, 19 nt, Artificial Sequence
  Description of Artificial Sequence: Synthetic oligonucleotide
  Antisense strand to SEQ ID NO: 1540306
agucguggaaaccucucug

SEQ ID NO: 1540308 - RNA, 19 nt, Artificial Sequence
  Description of Artificial Sequence: Synthetic oligonucleotide
  Sense strand starting at position 414 of SEQ ID NO: 1245150
agagguuuccacgacugua

SEQ ID NO: 1540309 - RNA, 19 nt, Artificial Sequence
  Description of Artificial Sequence: Synthetic oligonucleotide
  Antisense strand to SEQ ID NO: 1540308
uacagucguggaaaccucu

SEQ ID NO: 1540310 - RNA, 19 nt, Artificial Sequence
  Description of Artificial Sequence: Synthetic oligonucleotide
  Sense strand starting at position 541 of SEQ ID NO: 1245150
ggaaacuaccacugcuaaa

SEQ ID NO: 1540311 - RNA, 19 nt, Artificial Sequence
  Description of Artificial Sequence: Synthetic oligonucleotide
  Antisense strand to SEQ ID NO: 1540310
uuuagcagugguaguuucc

SEQ ID NO: 1540312 - RNA, 19 nt, Artificial Sequence
  Description of Artificial Sequence: Synthetic oligonucleotide
  Sense strand starting at position 608 of SEQ ID NO: 1245150
aggucaacaucauacagaa

SEQ ID NO: 1540313 - RNA, 19 nt, Artificial Sequence
  Description of Artificial Sequence: Synthetic oligonucleotide
  Antisense strand to SEQ ID NO: 1540312
uucuguaugauguugaccu

SEQ ID NO: 1540314 - RNA, 19 nt, Artificial Sequence
  Description of Artificial Sequence: Synthetic oligonucleotide
  Sense strand starting at position 680 of SEQ ID NO: 1245150
ucuuccaaauauguguuaa

SEQ ID NO: 1540315 - RNA, 19 nt, Artificial Sequence
  Description of Artificial Sequence: Synthetic oligonucleotide
  Antisense strand to SEQ ID NO: 1540314
uuaacacauauuuggaaga

SEQ ID NO: 1540316 - RNA, 19 nt, Artificial Sequence
  Description of Artificial Sequence: Synthetic oligonucleotide
  Sense strand starting at position 684 of SEQ ID NO: 1245150
ccaaauauguguuaauguc

SEQ ID NO: 1540317 - RNA, 19 nt, Artificial Sequence
  Description of Artificial Sequence: Synthetic oligonucleotide
  Antisense strand to SEQ ID NO: 1540316
gacauuaacacauauuugg

SEQ ID NO: 1540318 - RNA, 19 nt, Artificial Sequence
  Description of Artificial Sequence: Synthetic oligonucleotide
  Sense strand starting at position 723 of SEQ ID NO: 1245150
ucuccaagcuuugauauga

SEQ ID NO: 1540319 - RNA, 19 nt, Artificial Sequence
  Description of Artificial Sequence: Synthetic oligonucleotide
  Antisense strand to SEQ ID NO: 1540318
ucauaucaaagcuuggaga

SEQ ID NO: 1540320 - RNA, 19 nt, Artificial Sequence
  Description of Artificial Sequence: Synthetic oligonucleotide
  Sense strand starting at position 736 of SEQ ID NO: 1245150
auaugaauccuaggcagaa

SEQ ID NO: 1540321 - RNA, 19 nt, Artificial Sequence
  Description of Artificial Sequence: Synthetic oligonucleotide
  Antisense strand to SEQ ID NO: 1540320
uucugccuaggauucauau

SEQ ID NO: 1540322 - RNA, 19 nt, Artificial Sequence
  Description of Artificial Sequence: Synthetic oligonucleotide
  Sense strand starting at position 789 of SEQ ID NO: 1245150
caaucugucuaagugagag

SEQ ID NO: 1540323 - RNA, 19 nt, Artificial Sequence
  Description of Artificial Sequence: Synthetic oligonucleotide
  Antisense strand to SEQ ID NO: 1540322
cucucacuuagacagauug

SEQ ID NO: 1540324 - RNA, 19 nt, Artificial Sequence
  Description of Artificial Sequence: Synthetic oligonucleotide
  Sense strand starting at position 791 of SEQ ID NO: 1245150
aucugucuaagugagagua

SEQ ID NO: 1540325 - RNA, 19 nt, Artificial Sequence
  Description of Artificial Sequence: Synthetic oligonucleotide
  Antisense strand to SEQ ID NO: 1540324
uacucucacuuagacagau

SEQ ID NO: 1540326 - RNA, 19 nt, Artificial Sequence
  Description of Artificial Sequence: Synthetic oligonucleotide
  Sense strand starting at position 1080 of SEQ ID NO: 1245150
ccaccugcuucucagaaga

SEQ ID NO: 1540327 - RNA, 19 nt, Artificial Sequence
  Description of Artificial Sequence: Synthetic oligonucleotide
  Antisense strand to SEQ ID NO: 1540326
ucuucugagaagcaggugg

SEQ ID NO: 1540328 - RNA, 19 nt, Artificial Sequence
  Description of Artificial Sequence: Synthetic oligonucleotide
  Sense strand starting at position 1082 of SEQ ID NO: 1245150
accugcuucucagaagaaa

SEQ ID NO: 1540329 - RNA, 19 nt, Artificial Sequence
  Description of Artificial Sequence: Synthetic oligonucleotide
  Antisense strand to SEQ ID NO: 1540328
uuucuucugagaagcaggu

SEQ ID NO: 1540330 - RNA, 19 nt, Artificial Sequence
  Description of Artificial Sequence: Synthetic oligonucleotide
  Sense strand starting at position 1104 of SEQ ID NO: 1245150
gggauacccugagcgcuau

SEQ ID NO: 1540331 - RNA, 19 nt, Artificial Sequence
  Description of Artificial Sequence: Synthetic oligonucleotide
  Antisense strand to SEQ ID NO: 1540330
auagcgcucaggguauccc

SEQ ID NO: 1540332 - RNA, 19 nt, Artificial Sequence
  Description of Artificial Sequence: Synthetic oligonucleotide
  Sense strand starting at position 1556 of SEQ ID NO: 1245150
gggauuugcccucgagcga

SEQ ID NO: 1540333 - RNA, 19 nt, Artificial Sequence
  Description of Artificial Sequence: Synthetic oligonucleotide
  Antisense strand to SEQ ID NO: 1540332
ucgcucgagggcaaauccc

SEQ ID NO: 1540334 - RNA, 19 nt, Artificial Sequence
  Description of Artificial Sequence: Synthetic oligonucleotide
  Sense strand starting at position 1557 of SEQ ID NO: 1245150
ggauuugcccucgagcgau

SEQ ID NO: 1540335 - RNA, 19 nt, Artificial Sequence
  Description of Artificial Sequence: Synthetic oligonucleotide
  Antisense strand to SEQ ID NO: 1540334
aucgcucgagggcaaaucc

SEQ ID NO: 1540336 - RNA, 19 nt, Artificial Sequence
  Description of Artificial Sequence: Synthetic oligonucleotide
  Sense strand starting at position 2362 of SEQ ID NO: 1245150
gcuuaagccuuuccagaug

SEQ ID NO: 1540337 - RNA, 19 nt, Artificial Sequence
  Description of Artificial Sequence: Synthetic oligonucleotide
  Antisense strand to SEQ ID NO: 1540336
caucuggaaaggcuuaagc

SEQ ID NO: 1540338 - RNA, 19 nt, Artificial Sequence
  Description of Artificial Sequence: Synthetic oligonucleotide
  Sense strand starting at position 2396 of SEQ ID NO: 1245150
ggcuucugcugcccagauu

SEQ ID NO: 1540339 - RNA, 19 nt, Artificial Sequence
  Description of Artificial Sequence: Synthetic oligonucleotide
  Antisense strand to SEQ ID NO: 1540338
aaucugggcagcagaagcc

SEQ ID NO: 1540340 - RNA, 19 nt, Artificial Sequence
  Description of Artificial Sequence: Synthetic oligonucleotide
  Sense strand starting at position 2397 of SEQ ID NO: 1245150
gcuucugcugcccagauuu

SEQ ID NO: 1540341 - RNA, 19 nt, Artificial Sequence
  Description of Artificial Sequence: Synthetic oligonucleotide
  Antisense strand to SEQ ID NO: 1540340
aaaucugggcagcagaagc

SEQ ID NO: 1540342 - RNA, 19 nt, Artificial Sequence
  Description of Artificial Sequence: Synthetic oligonucleotide
  Sense strand starting at position 2512 of SEQ ID NO: 1245150
agguuucccuuagggacaa

SEQ ID NO: 1540343 - RNA, 19 nt, Artificial Sequence
  Description of Artificial Sequence: Synthetic oligonucleotide
  Antisense strand to SEQ ID NO: 1540342
uugucccuaagggaaaccu

SEQ ID NO: 1540344 - RNA, 19 nt, Artificial Sequence
  Description of Artificial Sequence: Synthetic oligonucleotide
  Sense strand starting at position 2513 of SEQ ID NO: 1245150
gguuucccuuagggacaaa

SEQ ID NO: 1540345 - RNA, 19 nt, Artificial Sequence
  Description of Artificial Sequence: Synthetic oligonucleotide
  Antisense strand to SEQ ID NO: 1540344
uuugucccuaagggaaacc

SEQ ID NO: 1540346 - RNA, 19 nt, Artificial Sequence
  Description of Artificial Sequence: Synthetic oligonucleotide
  Sense strand starting at position 2673 of SEQ ID NO: 1245150
ugguuaaaccucugcauca

SEQ ID NO: 1540347 - RNA, 19 nt, Artificial Sequence
  Description of Artificial Sequence: Synthetic oligonucleotide
  Antisense strand to SEQ ID NO: 1540346
ugaugcagagguuuaacca

SEQ ID NO: 1540348 - RNA, 19 nt, Artificial Sequence
  Description of Artificial Sequence: Synthetic oligonucleotide
  Sense strand starting at position 2674 of SEQ ID NO: 1245150
gguuaaaccucugcaucac

SEQ ID NO: 1540349 - RNA, 19 nt, Artificial Sequence
  Description of Artificial Sequence: Synthetic oligonucleotide
  Antisense strand to SEQ ID NO: 1540348
gugaugcagagguuuaacc

SEQ ID NO: 1540350 - RNA, 19 nt, Artificial Sequence
  Description of Artificial Sequence: Synthetic oligonucleotide
  Sense strand starting at position 2775 of SEQ ID NO: 1245150
cuggcaagguucccgaauu

SEQ ID NO: 1540351 - RNA, 19 nt, Artificial Sequence
  Description of Artificial Sequence: Synthetic oligonucleotide
  Antisense strand to SEQ ID NO: 1540350
aauucgggaaccuugccag

SEQ ID NO: 1540352 - RNA, 19 nt, Artificial Sequence
  Description of Artificial Sequence: Synthetic oligonucleotide
  Sense strand starting at position 2999 of SEQ ID NO: 1245150
uuauauagaucgcccucau

SEQ ID NO: 1540353 - RNA, 19 nt, Artificial Sequence
  Description of Artificial Sequence: Synthetic oligonucleotide
  Antisense strand to SEQ ID NO: 1540352
augagggcgaucuauauaa

SEQ ID NO: 1540354 - RNA, 19 nt, Artificial Sequence
  Description of Artificial Sequence: Synthetic oligonucleotide
  Sense strand starting at position 3003 of SEQ ID NO: 1245150
auagaucgcccucauaaca

SEQ ID NO: 1540355 - RNA, 19 nt, Artificial Sequence
  Description of Artificial Sequence: Synthetic oligonucleotide
  Antisense strand to SEQ ID NO: 1540354
uguuaugagggcgaucuau

SEQ ID NO: 1540356 - RNA, 19 nt, Artificial Sequence
  Description of Artificial Sequence: Synthetic oligonucleotide
  Sense strand starting at position 3249 of SEQ ID NO: 1245150
agcucuacuuucuuuguua

SEQ ID NO: 1540357 - RNA, 19 nt, Artificial Sequence
  Description of Artificial Sequence: Synthetic oligonucleotide
  Antisense strand to SEQ ID NO: 1540356
uaacaaagaaaguagagcu

SEQ ID NO: 1540358 - RNA, 19 nt, Artificial Sequence
  Description of Artificial Sequence: Synthetic oligonucleotide
  Sense strand starting at position 3250 of SEQ ID NO: 1245150
gcucuacuuucuuuguuau

SEQ ID NO: 1540359 - RNA, 19 nt, Artificial Sequence
  Description of Artificial Sequence: Synthetic oligonucleotide
  Antisense strand to SEQ ID NO: 1540358
auaacaaagaaaguagagc

SEQ ID NO: 1540360 - RNA, 19 nt, Artificial Sequence
  Description of Artificial Sequence: Synthetic oligonucleotide
  Sense strand starting at position 3398 of SEQ ID NO: 1245150
ggcagaugguuucagaaug

SEQ ID NO: 1540361 - RNA, 19 nt, Artificial Sequence
  Description of Artificial Sequence: Synthetic oligonucleotide
  Antisense strand to SEQ ID NO: 1540360
cauucugaaaccaucugcc

SEQ ID NO: 1540362 - RNA, 19 nt, Artificial Sequence
  Description of Artificial Sequence: Synthetic oligonucleotide
  Sense strand starting at position 3771 of SEQ ID NO: 1245150
cucccuccucacugagaga

SEQ ID NO: 1540363 - RNA, 19 nt, Artificial Sequence
  Description of Artificial Sequence: Synthetic oligonucleotide
  Antisense strand to SEQ ID NO: 1540362
ucucucagugaggagggag

SEQ ID NO: 1540364 - RNA, 19 nt, Artificial Sequence
  Description of Artificial Sequence: Synthetic oligonucleotide
  Sense strand starting at position 67 of SEQ ID NO: 1245151
gcuggaacauacuuccuua

SEQ ID NO: 1540365 - RNA, 19 nt, Artificial Sequence
  Description of Artificial Sequence: Synthetic oligonucleotide
  Antisense strand to SEQ ID NO: 1540364
uaaggaaguauguuccagc

SEQ ID NO: 1540366 - RNA, 19 nt, Artificial Sequence
  Description of Artificial Sequence: Synthetic oligonucleotide
  Sense strand starting at position 70 of SEQ ID NO: 1245151
ggaacauacuuccuuauug

SEQ ID NO: 1540367 - RNA, 19 nt, Artificial Sequence
  Description of Artificial Sequence: Synthetic oligonucleotide
  Antisense strand to SEQ ID NO: 1540366
caauaaggaaguauguucc

SEQ ID NO: 1540368 - RNA, 19 nt, Artificial Sequence
  Description of Artificial Sequence: Synthetic oligonucleotide
  Sense strand starting at position 160 of SEQ ID NO: 1245151
cgcugauauuuacuauugu

SEQ ID NO: 1540369 - RNA, 19 nt, Artificial Sequence
  Description of Artificial Sequence: Synthetic oligonucleotide
  Antisense strand to SEQ ID NO: 1540368
acaauaguaaauaucagcg

SEQ ID NO: 1540370 - RNA, 19 nt, Artificial Sequence
  Description of Artificial Sequence: Synthetic oligonucleotide
  Sense strand starting at position 317 of SEQ ID NO: 1245151
ugcuauagagccuauucuu

SEQ ID NO: 1540371 - RNA, 19 nt, Artificial Sequence
  Description of Artificial Sequence: Synthetic oligonucleotide
  Antisense strand to SEQ ID NO: 1540370
aagaauaggcucuauagca

SEQ ID NO: 1540372 - RNA, 19 nt, Artificial Sequence
  Description of Artificial Sequence: Synthetic oligonucleotide
  Sense strand starting at position 450 of SEQ ID NO: 1245151
ucaaguuucugacugauga

SEQ ID NO: 1540373 - RNA, 19 nt, Artificial Sequence
  Description of Artificial Sequence: Synthetic oligonucleotide
  Antisense strand to SEQ ID NO: 1540372
ucaucagucagaaacuuga

SEQ ID NO: 1540374 - RNA, 19 nt, Artificial Sequence
  Description of Artificial Sequence: Synthetic oligonucleotide
  Sense strand starting at position 451 of SEQ ID NO: 1245151
caaguuucugacugaugaa

SEQ ID NO: 1540375 - RNA, 19 nt, Artificial Sequence
  Description of Artificial Sequence: Synthetic oligonucleotide
  Antisense strand to SEQ ID NO: 1540374
uucaucagucagaaacuug

SEQ ID NO: 1540376 - RNA, 19 nt, Artificial Sequence
  Description of Artificial Sequence: Synthetic oligonucleotide
  Sense strand starting at position 567 of SEQ ID NO: 1245151
acagcagagcuauaaagua

SEQ ID NO: 1540377 - RNA, 19 nt, Artificial Sequence
  Description of Artificial Sequence: Synthetic oligonucleotide
  Antisense strand to SEQ ID NO: 1540376
uacuuuauagcucugcugu

SEQ ID NO: 1540378 - RNA, 19 nt, Artificial Sequence
  Description of Artificial Sequence: Synthetic oligonucleotide
  Sense strand starting at position 661 of SEQ ID NO: 1245151
uaggaauuagccuaggcau

SEQ ID NO: 1540379 - RNA, 19 nt, Artificial Sequence
  Description of Artificial Sequence: Synthetic oligonucleotide
  Antisense strand to SEQ ID NO: 1540378
augccuaggcuaauuccua

SEQ ID NO: 1540380 - RNA, 19 nt, Artificial Sequence
  Description of Artificial Sequence: Synthetic oligonucleotide
  Sense strand starting at position 663 of SEQ ID NO: 1245151
ggaauuagccuaggcauua

SEQ ID NO: 1540381 - RNA, 19 nt, Artificial Sequence
  Description of Artificial Sequence: Synthetic oligonucleotide
  Antisense strand to SEQ ID NO: 1540380
uaaugccuaggcuaauucc

SEQ ID NO: 1540382 - RNA, 19 nt, Artificial Sequence
  Description of Artificial Sequence: Synthetic oligonucleotide
  Sense strand starting at position 882 of SEQ ID NO: 1245151
guggcuauaugcuuaaaga

SEQ ID NO: 1540383 - RNA, 19 nt, Artificial Sequence
  Description of Artificial Sequence: Synthetic oligonucleotide
  Antisense strand to SEQ ID NO: 1540382
ucuuuaagcauauagccac

SEQ ID NO: 1540384 - RNA, 19 nt, Artificial Sequence
  Description of Artificial Sequence: Synthetic oligonucleotide
  Sense strand starting at position 883 of SEQ ID NO: 1245151
uggcuauaugcuuaaagaa

SEQ ID NO: 1540385 - RNA, 19 nt, Artificial Sequence
  Description of Artificial Sequence: Synthetic oligonucleotide
  Antisense strand to SEQ ID NO: 1540384
uucuuuaagcauauagcca

SEQ ID NO: 1540386 - RNA, 19 nt, Artificial Sequence
  Description of Artificial Sequence: Synthetic oligonucleotide
  Sense strand starting at position 1087 of SEQ ID NO: 1245151
ggcaacauuuguuuguuga

SEQ ID NO: 1540387 - RNA, 19 nt, Artificial Sequence
  Description of Artificial Sequence: Synthetic oligonucleotide
  Antisense strand to SEQ ID NO: 1540386
ucaacaaacaaauguugcc

SEQ ID NO: 1540388 - RNA, 19 nt, Artificial Sequence
  Description of Artificial Sequence: Synthetic oligonucleotide
  Sense strand starting at position 1441 of SEQ ID NO: 1245151
uuggcauuagacuaaucuu

SEQ ID NO: 1540389 - RNA, 19 nt, Artificial Sequence
  Description of Artificial Sequence: Synthetic oligonucleotide
  Antisense strand to SEQ ID NO: 1540388
aagauuagucuaaugccaa

SEQ ID NO: 1540390 - RNA, 19 nt, Artificial Sequence
  Description of Artificial Sequence: Synthetic oligonucleotide
  Sense strand starting at position 1444 of SEQ ID NO: 1245151
gcauuagacuaaucuucug

SEQ ID NO: 1540391 - RNA, 19 nt, Artificial Sequence
  Description of Artificial Sequence: Synthetic oligonucleotide
  Antisense strand to SEQ ID NO: 1540390
cagaagauuagucuaaugc

SEQ ID NO: 1540392 - RNA, 19 nt, Artificial Sequence
  Description of Artificial Sequence: Synthetic oligonucleotide
  Sense strand starting at position 2141 of SEQ ID NO: 1245151
cuaugaagacuauguuuga

SEQ ID NO: 1540393 - RNA, 19 nt, Artificial Sequence
  Description of Artificial Sequence: Synthetic oligonucleotide
  Antisense strand to SEQ ID NO: 1540392
ucaaacauagucuucauag

SEQ ID NO: 1540394 - RNA, 19 nt, Artificial Sequence
  Description of Artificial Sequence: Synthetic oligonucleotide
  Sense strand starting at position 2142 of SEQ ID NO: 1245151
uaugaagacuauguuugaa

SEQ ID NO: 1540395 - RNA, 19 nt, Artificial Sequence
  Description of Artificial Sequence: Synthetic oligonucleotide
  Antisense strand to SEQ ID NO: 1540394
uucaaacauagucuucaua

SEQ ID NO: 1540396 - RNA, 19 nt, Artificial Sequence
  Description of Artificial Sequence: Synthetic oligonucleotide
  Sense strand starting at position 2428 of SEQ ID NO: 1245151
uguauuauacguuaaggua

SEQ ID NO: 1540397 - RNA, 19 nt, Artificial Sequence
  Description of Artificial Sequence: Synthetic oligonucleotide
  Antisense strand to SEQ ID NO: 1540396
uaccuuaacguauaauaca

SEQ ID NO: 1540398 - RNA, 19 nt, Artificial Sequence
  Description of Artificial Sequence: Synthetic oligonucleotide
  Sense strand starting at position 2473 of SEQ ID NO: 1245151
ggguuaggcaacuagugau

SEQ ID NO: 1540399 - RNA, 19 nt, Artificial Sequence
  Description of Artificial Sequence: Synthetic oligonucleotide
  Antisense strand to SEQ ID NO: 1540398
aucacuaguugccuaaccc

SEQ ID NO: 1540400 - RNA, 19 nt, Artificial Sequence
  Description of Artificial Sequence: Synthetic oligonucleotide
  Sense strand starting at position 2486 of SEQ ID NO: 1245151
agugauucccagugcauuu

SEQ ID NO: 1540401 - RNA, 19 nt, Artificial Sequence
  Description of Artificial Sequence: Synthetic oligonucleotide
  Antisense strand to SEQ ID NO: 1540400
aaaugcacugggaaucacu

SEQ ID NO: 1540402 - RNA, 19 nt, Artificial Sequence
  Description of Artificial Sequence: Synthetic oligonucleotide
  Sense strand starting at position 2538 of SEQ ID NO: 1245151
uuaauagaguucuccuugu

SEQ ID NO: 1540403 - RNA, 19 nt, Artificial Sequence
  Description of Artificial Sequence: Synthetic oligonucleotide
  Antisense strand to SEQ ID NO: 1540402
acaaggagaacucuauuaa

SEQ ID NO: 1540404 - RNA, 19 nt, Artificial Sequence
  Description of Artificial Sequence: Synthetic oligonucleotide
  Sense strand starting at position 2690 of SEQ ID NO: 1245151
gucauaagaucugacauuu

SEQ ID NO: 1540405 - RNA, 19 nt, Artificial Sequence
  Description of Artificial Sequence: Synthetic oligonucleotide
  Antisense strand to SEQ ID NO: 1540404
aaaugucagaucuuaugac

SEQ ID NO: 1540406 - RNA, 19 nt, Artificial Sequence
  Description of Artificial Sequence: Synthetic oligonucleotide
  Sense strand starting at position 2704 of SEQ ID NO: 1245151
cauuuagucuuggcucuga

SEQ ID NO: 1540407 - RNA, 19 nt, Artificial Sequence
  Description of Artificial Sequence: Synthetic oligonucleotide
  Antisense strand to SEQ ID NO: 1540406
ucagagccaagacuaaaug

SEQ ID NO: 1540408 - RNA, 19 nt, Artificial Sequence
  Description of Artificial Sequence: Synthetic oligonucleotide
  Sense strand starting at position 2708 of SEQ ID NO: 1245151
uagucuuggcucugacaau

SEQ ID NO: 1540409 - RNA, 19 nt, Artificial Sequence
  Description of Artificial Sequence: Synthetic oligonucleotide
  Antisense strand to SEQ ID NO: 1540408
auugucagagccaagacua

SEQ ID NO: 1540410 - RNA, 19 nt, Artificial Sequence
  Description of Artificial Sequence: Synthetic oligonucleotide
  Sense strand starting at position 2786 of SEQ ID NO: 1245151
uauguuauaccaugaugag

SEQ ID NO: 1540411 - RNA, 19 nt, Artificial Sequence
  Description of Artificial Sequence: Synthetic oligonucleotide
  Antisense strand to SEQ ID NO: 1540410
cucaucaugguauaacaua

SEQ ID NO: 1540412 - RNA, 19 nt, Artificial Sequence
  Description of Artificial Sequence: Synthetic oligonucleotide
  Sense strand starting at position 2837 of SEQ ID NO: 1245151
aaagucauuugggauaguu

SEQ ID NO: 1540413 - RNA, 19 nt, Artificial Sequence
  Description of Artificial Sequence: Synthetic oligonucleotide
  Antisense strand to SEQ ID NO: 1540412
aacuaucccaaaugacuuu

SEQ ID NO: 1540414 - RNA, 19 nt, Artificial Sequence
  Description of Artificial Sequence: Synthetic oligonucleotide
  Sense strand starting at position 2865 of SEQ ID NO: 1245151
gugucuuaagcguaaggaa

SEQ ID NO: 1540415 - RNA, 19 nt, Artificial Sequence
  Description of Artificial Sequence: Synthetic oligonucleotide
  Antisense strand to SEQ ID NO: 1540414
uuccuuacgcuuaagacac

SEQ ID NO: 1540416 - RNA, 19 nt, Artificial Sequence
  Description of Artificial Sequence: Synthetic oligonucleotide
  Sense strand starting at position 2886 of SEQ ID NO: 1245151
caucuuggagcaugaugaa

SEQ ID NO: 1540417 - RNA, 19 nt, Artificial Sequence
  Description of Artificial Sequence: Synthetic oligonucleotide
  Antisense strand to SEQ ID NO: 1540416
uucaucaugcuccaagaug

SEQ ID NO: 1540418 - RNA, 19 nt, Artificial Sequence
  Description of Artificial Sequence: Synthetic oligonucleotide
  Sense strand starting at position 2967 of SEQ ID NO: 1245151
aagccugugucacugaaga

SEQ ID NO: 1540419 - RNA, 19 nt, Artificial Sequence
  Description of Artificial Sequence: Synthetic oligonucleotide
  Antisense strand to SEQ ID NO: 1540418
ucuucagugacacaggcuu

SEQ ID NO: 1540420 - RNA, 19 nt, Artificial Sequence
  Description of Artificial Sequence: Synthetic oligonucleotide
  Sense strand starting at position 3002 of SEQ ID NO: 1245151
ccaagugcauuccuaugaa

SEQ ID NO: 1540421 - RNA, 19 nt, Artificial Sequence
  Description of Artificial Sequence: Synthetic oligonucleotide
  Antisense strand to SEQ ID NO: 1540420
uucauaggaaugcacuugg

SEQ ID NO: 1540422 - RNA, 19 nt, Artificial Sequence
  Description of Artificial Sequence: Synthetic oligonucleotide
  Sense strand starting at position 3005 of SEQ ID NO: 1245151
agugcauuccuaugaagug

SEQ ID NO: 1540423 - RNA, 19 nt, Artificial Sequence
  Description of Artificial Sequence: Synthetic oligonucleotide
  Antisense strand to SEQ ID NO: 1540422
cacuucauaggaaugcacu

SEQ ID NO: 1540424 - RNA, 19 nt, Artificial Sequence
  Description of Artificial Sequence: Synthetic oligonucleotide
  Sense strand starting at position 3044 of SEQ ID NO: 1245151
cacugugucuaugcugaaa

SEQ ID NO: 1540425 - RNA, 19 nt, Artificial Sequence
  Description of Artificial Sequence: Synthetic oligonucleotide
  Antisense strand to SEQ ID NO: 1540424
uuucagcauagacacagug

SEQ ID NO: 1540426 - RNA, 19 nt, Artificial Sequence
  Description of Artificial Sequence: Synthetic oligonucleotide
  Sense strand starting at position 3089 of SEQ ID NO: 1245151
accagaaugugggcaagau

SEQ ID NO: 1540427 - RNA, 19 nt, Artificial Sequence
  Description of Artificial Sequence: Synthetic oligonucleotide
  Antisense strand to SEQ ID NO: 1540426
aucuugcccacauucuggu

SEQ ID NO: 1540428 - RNA, 19 nt, Artificial Sequence
  Description of Artificial Sequence: Synthetic oligonucleotide
  Sense strand starting at position 3123 of SEQ ID NO: 1245151
gggcaacuuuaugcaacaa

SEQ ID NO: 1540429 - RNA, 19 nt, Artificial Sequence
  Description of Artificial Sequence: Synthetic oligonucleotide
  Antisense strand to SEQ ID NO: 1540428
uuguugcauaaaguugccc

SEQ ID NO: 1540430 - RNA, 19 nt, Artificial Sequence
  Description of Artificial Sequence: Synthetic oligonucleotide
  Sense strand starting at position 3192 of SEQ ID NO: 1245151
ccuguaguuuauccaugaa

SEQ ID NO: 1540431 - RNA, 19 nt, Artificial Sequence
  Description of Artificial Sequence: Synthetic oligonucleotide
  Antisense strand to SEQ ID NO: 1540430
uucauggauaaacuacagg

SEQ ID NO: 1540432 - RNA, 19 nt, Artificial Sequence
  Description of Artificial Sequence: Synthetic oligonucleotide
  Sense strand starting at position 3450 of SEQ ID NO: 1245151
accuguagugagcaacuua

SEQ ID NO: 1540433 - RNA, 19 nt, Artificial Sequence
  Description of Artificial Sequence: Synthetic oligonucleotide
  Antisense strand to SEQ ID NO: 1540432
uaaguugcucacuacaggu

SEQ ID NO: 1540434 - RNA, 19 nt, Artificial Sequence
  Description of Artificial Sequence: Synthetic oligonucleotide
  Sense strand starting at position 3457 of SEQ ID NO: 1245151
gugagcaacuuacugauaa

SEQ ID NO: 1540435 - RNA, 19 nt, Artificial Sequence
  Description of Artificial Sequence: Synthetic oligonucleotide
  Antisense strand to SEQ ID NO: 1540434
uuaucaguaaguugcucac

SEQ ID NO: 1540436 - RNA, 19 nt, Artificial Sequence
  Description of Artificial Sequence: Synthetic oligonucleotide
  Sense strand starting at position 3505 of SEQ ID NO: 1245151
aaagcauuagagugcacaa

SEQ ID NO: 1540437 - RNA, 19 nt, Artificial Sequence
  Description of Artificial Sequence: Synthetic oligonucleotide
  Antisense strand to SEQ ID NO: 1540436
uugugcacucuaaugcuuu

SEQ ID NO: 1540438 - RNA, 19 nt, Artificial Sequence
  Description of Artificial Sequence: Synthetic oligonucleotide
  Sense strand starting at position 3518 of SEQ ID NO: 1245151
gcacaaugucauggaacaa

SEQ ID NO: 1540439 - RNA, 19 nt, Artificial Sequence
  Description of Artificial Sequence: Synthetic oligonucleotide
  Antisense strand to SEQ ID NO: 1540438
uuguuccaugacauugugc

SEQ ID NO: 1540440 - RNA, 19 nt, Artificial Sequence
  Description of Artificial Sequence: Synthetic oligonucleotide
  Sense strand starting at position 3698 of SEQ ID NO: 1245151
ccugcagaauaguuaaaug

SEQ ID NO: 1540441 - RNA, 19 nt, Artificial Sequence
  Description of Artificial Sequence: Synthetic oligonucleotide
  Antisense strand to SEQ ID NO: 1540440
cauuuaacuauucugcagg

SEQ ID NO: 1540442 - RNA, 19 nt, Artificial Sequence
  Description of Artificial Sequence: Synthetic oligonucleotide
  Sense strand starting at position 3800 of SEQ ID NO: 1245151
agagggaguguuugggaga

SEQ ID NO: 1540443 - RNA, 19 nt, Artificial Sequence
  Description of Artificial Sequence: Synthetic oligonucleotide
  Antisense strand to SEQ ID NO: 1540442
ucucccaaacacucccucu

SEQ ID NO: 1540444 - RNA, 19 nt, Artificial Sequence
  Description of Artificial Sequence: Synthetic oligonucleotide
  Sense strand starting at position 113 of SEQ ID NO: 1245152
cggucaagacucuguaaag

SEQ ID NO: 1540445 - RNA, 19 nt, Artificial Sequence
  Description of Artificial Sequence: Synthetic oligonucleotide
  Antisense strand to SEQ ID NO: 1540444
cuuuacagagucuugaccg

SEQ ID NO: 1540446 - RNA, 19 nt, Artificial Sequence
  Description of Artificial Sequence: Synthetic oligonucleotide
  Sense strand starting at position 114 of SEQ ID NO: 1245152
ggucaagacucuguaaaga

SEQ ID NO: 1540447 - RNA, 19 nt, Artificial Sequence
  Description of Artificial Sequence: Synthetic oligonucleotide
  Antisense strand to SEQ ID NO: 1540446
ucuuuacagagucuugacc

SEQ ID NO: 1540448 - RNA, 19 nt, Artificial Sequence
  Description of Artificial Sequence: Synthetic oligonucleotide
  Sense strand starting at position 428 of SEQ ID NO: 1245152
agcugaucugguugaagag

SEQ ID NO: 1540449 - RNA, 19 nt, Artificial Sequence
  Description of Artificial Sequence: Synthetic oligonucleotide
  Antisense strand to SEQ ID NO: 1540448
cucuucaaccagaucagcu

SEQ ID NO: 1540450 - RNA, 19 nt, Artificial Sequence
  Description of Artificial Sequence: Synthetic oligonucleotide
  Sense strand starting at position 429 of SEQ ID NO: 1245152
gcugaucugguugaagagu

SEQ ID NO: 1540451 - RNA, 19 nt, Artificial Sequence
  Description of Artificial Sequence: Synthetic oligonucleotide
  Antisense strand to SEQ ID NO: 1540450
acucuucaaccagaucagc

SEQ ID NO: 1540452 - RNA, 19 nt, Artificial Sequence
  Description of Artificial Sequence: Synthetic oligonucleotide
  Sense strand starting at position 562 of SEQ ID NO: 1245152
aggagaaacugguucuacu

SEQ ID NO: 1540453 - RNA, 19 nt, Artificial Sequence
  Description of Artificial Sequence: Synthetic oligonucleotide
  Antisense strand to SEQ ID NO: 1540452
aguagaaccaguuucuccu

SEQ ID NO: 1540454 - RNA, 19 nt, Artificial Sequence
  Description of Artificial Sequence: Synthetic oligonucleotide
  Sense strand starting at position 589 of SEQ ID NO: 1245152
cgaagugaacugcaaacuu

SEQ ID NO: 1540455 - RNA, 19 nt, Artificial Sequence
  Description of Artificial Sequence: Synthetic oligonucleotide
  Antisense strand to SEQ ID NO: 1540454
aaguuugcaguucacuucg

SEQ ID NO: 1540456 - RNA, 19 nt, Artificial Sequence
  Description of Artificial Sequence: Synthetic oligonucleotide
  Sense strand starting at position 2515 of SEQ ID NO: 1245152
gccucucucccaggaauaa

SEQ ID NO: 1540457 - RNA, 19 nt, Artificial Sequence
  Description of Artificial Sequence: Synthetic oligonucleotide
  Antisense strand to SEQ ID NO: 1540456
uuauuccugggagagaggc

SEQ ID NO: 1540458 - RNA, 19 nt, Artificial Sequence
  Description of Artificial Sequence: Synthetic oligonucleotide
  Sense strand starting at position 2645 of SEQ ID NO: 1245152
ccgcgugagcuucucuaua

SEQ ID NO: 1540459 - RNA, 19 nt, Artificial Sequence
  Description of Artificial Sequence: Synthetic oligonucleotide
  Antisense strand to SEQ ID NO: 1540458
uauagagaagcucacgcgg

SEQ ID NO: 1540460 - RNA, 19 nt, Artificial Sequence
  Description of Artificial Sequence: Synthetic oligonucleotide
  Sense strand starting at position 2650 of SEQ ID NO: 1245152
ugagcuucucuauagacgu

SEQ ID NO: 1540461 - RNA, 19 nt, Artificial Sequence
  Description of Artificial Sequence: Synthetic oligonucleotide
  Antisense strand to SEQ ID NO: 1540460
acgucuauagagaagcuca

SEQ ID NO: 1540462 - RNA, 19 nt, Artificial Sequence
  Description of Artificial Sequence: Synthetic oligonucleotide
  Sense strand starting at position 2725 of SEQ ID NO: 1245152
uuguauuacucaucugagg

SEQ ID NO: 1540463 - RNA, 19 nt, Artificial Sequence
  Description of Artificial Sequence: Synthetic oligonucleotide
  Antisense strand to SEQ ID NO: 1540462
ccucagaugaguaauacaa

SEQ ID NO: 1540464 - RNA, 19 nt, Artificial Sequence
  Description of Artificial Sequence: Synthetic oligonucleotide
  Sense strand starting at position 2727 of SEQ ID NO: 1245152
guauuacucaucugaggga

SEQ ID NO: 1540465 - RNA, 19 nt, Artificial Sequence
  Description of Artificial Sequence: Synthetic oligonucleotide
  Antisense strand to SEQ ID NO: 1540464
ucccucagaugaguaauac

SEQ ID NO: 1540466 - RNA, 19 nt, Artificial Sequence
  Description of Artificial Sequence: Synthetic oligonucleotide
  Sense strand starting at position 2756 of SEQ ID NO: 1245152
agcagugacaaacgaaaua

SEQ ID NO: 1540467 - RNA, 19 nt, Artificial Sequence
  Description of Artificial Sequence: Synthetic oligonucleotide
  Antisense strand to SEQ ID NO: 1540466
uauuucguuugucacugcu

SEQ ID NO: 1540468 - RNA, 19 nt, Artificial Sequence
  Description of Artificial Sequence: Synthetic oligonucleotide
  Sense strand starting at position 2785 of SEQ ID NO: 1245152
gaaagaaaguguuuaguau

SEQ ID NO: 1540469 - RNA, 19 nt, Artificial Sequence
  Description of Artificial Sequence: Synthetic oligonucleotide
  Antisense strand to SEQ ID NO: 1540468
auacuaaacacuuucuuuc

SEQ ID NO: 1540470 - RNA, 19 nt, Artificial Sequence
  Description of Artificial Sequence: Synthetic oligonucleotide
  Sense strand starting at position 2786 of SEQ ID NO: 1245152
aaagaaaguguuuaguauc

SEQ ID NO: 1540471 - RNA, 19 nt, Artificial Sequence
  Description of Artificial Sequence: Synthetic oligonucleotide
  Antisense strand to SEQ ID NO: 1540470
gauacuaaacacuuucuuu

SEQ ID NO: 1540472 - RNA, 19 nt, Artificial Sequence
  Description of Artificial Sequence: Synthetic oligonucleotide
  Sense strand starting at position 2831 of SEQ ID NO: 1245152
gaaagaaauuaagccguuu

SEQ ID NO: 1540473 - RNA, 19 nt, Artificial Sequence
  Description of Artificial Sequence: Synthetic oligonucleotide
  Antisense strand to SEQ ID NO: 1540472
aaacggcuuaauuucuuuc

SEQ ID NO: 1540474 - RNA, 19 nt, Artificial Sequence
  Description of Artificial Sequence: Synthetic oligonucleotide
  Sense strand starting at position 2860 of SEQ ID NO: 1245152
gggccagucacguuagcuu

SEQ ID NO: 1540475 - RNA, 19 nt, Artificial Sequence
  Description of Artificial Sequence: Synthetic oligonucleotide
  Antisense strand to SEQ ID NO: 1540474
aagcuaacgugacuggccc

SEQ ID NO: 1540476 - RNA, 19 nt, Artificial Sequence
  Description of Artificial Sequence: Synthetic oligonucleotide
  Sense strand starting at position 2928 of SEQ ID NO: 1245152
ugcggugauuugucuguuu

SEQ ID NO: 1540477 - RNA, 19 nt, Artificial Sequence
  Description of Artificial Sequence: Synthetic oligonucleotide
  Antisense strand to SEQ ID NO: 1540476
aaacagacaaaucaccgca

SEQ ID NO: 1540478 - RNA, 19 nt, Artificial Sequence
  Description of Artificial Sequence: Synthetic oligonucleotide
  Sense strand starting at position 2986 of SEQ ID NO: 1245152
ucuggugacuguccauuau

SEQ ID NO: 1540479 - RNA, 19 nt, Artificial Sequence
  Description of Artificial Sequence: Synthetic oligonucleotide
  Antisense strand to SEQ ID NO: 1540478
auaauggacagucaccaga

SEQ ID NO: 1540480 - RNA, 19 nt, Artificial Sequence
  Description of Artificial Sequence: Synthetic oligonucleotide
  Sense strand starting at position 3058 of SEQ ID NO: 1245152
ggcucuuugccuugaggag

SEQ ID NO: 1540481 - RNA, 19 nt, Artificial Sequence
  Description of Artificial Sequence: Synthetic oligonucleotide
  Antisense strand to SEQ ID NO: 1540480
cuccucaaggcaaagagcc

SEQ ID NO: 1540482 - RNA, 19 nt, Artificial Sequence
  Description of Artificial Sequence: Synthetic oligonucleotide
  Sense strand starting at position 3059 of SEQ ID NO: 1245152
gcucuuugccuugaggagu

SEQ ID NO: 1540483 - RNA, 19 nt, Artificial Sequence
  Description of Artificial Sequence: Synthetic oligonucleotide
  Antisense strand to SEQ ID NO: 1540482
acuccucaaggcaaagagc

SEQ ID NO: 1540484 - RNA, 19 nt, Artificial Sequence
  Description of Artificial Sequence: Synthetic oligonucleotide
  Sense strand starting at position 3062 of SEQ ID NO: 1245152
cuuugccuugaggaguuaa

SEQ ID NO: 1540485 - RNA, 19 nt, Artificial Sequence
  Description of Artificial Sequence: Synthetic oligonucleotide
  Antisense strand to SEQ ID NO: 1540484
uuaacuccucaaggcaaag

SEQ ID NO: 1540486 - RNA, 19 nt, Artificial Sequence
  Description of Artificial Sequence: Synthetic oligonucleotide
  Sense strand starting at position 3194 of SEQ ID NO: 1245152
aguuccuugcaagggaauu

SEQ ID NO: 1540487 - RNA, 19 nt, Artificial Sequence
  Description of Artificial Sequence: Synthetic oligonucleotide
  Antisense strand to SEQ ID NO: 1540486
aauucccuugcaaggaacu

SEQ ID NO: 1540488 - RNA, 19 nt, Artificial Sequence
  Description of Artificial Sequence: Synthetic oligonucleotide
  Sense strand starting at position 3200 of SEQ ID NO: 1245152
uugcaagggaauuguucua

SEQ ID NO: 1540489 - RNA, 19 nt, Artificial Sequence
  Description of Artificial Sequence: Synthetic oligonucleotide
  Antisense strand to SEQ ID NO: 1540488
uagaacaauucccuugcaa

SEQ ID NO: 1540490 - RNA, 19 nt, Artificial Sequence
  Description of Artificial Sequence: Synthetic oligonucleotide
  Sense strand starting at position 3313 of SEQ ID NO: 1245152
cugagagaaugccuugaaa

SEQ ID NO: 1540491 - RNA, 19 nt, Artificial Sequence
  Description of Artificial Sequence: Synthetic oligonucleotide
  Antisense strand to SEQ ID NO: 1540490
uuucaaggcauucucucag

SEQ ID NO: 1540492 - RNA, 19 nt, Artificial Sequence
  Description of Artificial Sequence: Synthetic oligonucleotide
  Sense strand starting at position 3324 of SEQ ID NO: 1245152
ccuugaaacuuccucaggu

SEQ ID NO: 1540493 - RNA, 19 nt, Artificial Sequence
  Description of Artificial Sequence: Synthetic oligonucleotide
  Antisense strand to SEQ ID NO: 1540492
accugaggaaguuucaagg

SEQ ID NO: 1540494 - RNA, 19 nt, Artificial Sequence
  Description of Artificial Sequence: Synthetic oligonucleotide
  Sense strand starting at position 3415 of SEQ ID NO: 1245152
auuugacagcucuguugca

SEQ ID NO: 1540495 - RNA, 19 nt, Artificial Sequence
  Description of Artificial Sequence: Synthetic oligonucleotide
  Antisense strand to SEQ ID NO: 1540494
ugcaacagagcugucaaau

SEQ ID NO: 1540496 - RNA, 19 nt, Artificial Sequence
  Description of Artificial Sequence: Synthetic oligonucleotide
  Sense strand starting at position 3430 of SEQ ID NO: 1245152
ugcauugaaaguuaguagu

SEQ ID NO: 1540497 - RNA, 19 nt, Artificial Sequence
  Description of Artificial Sequence: Synthetic oligonucleotide
  Antisense strand to SEQ ID NO: 1540496
acuacuaacuuucaaugca

SEQ ID NO: 1540498 - RNA, 19 nt, Artificial Sequence
  Description of Artificial Sequence: Synthetic oligonucleotide
  Sense strand starting at position 3432 of SEQ ID NO: 1245152
cauugaaaguuaguaguaa

SEQ ID NO: 1540499 - RNA, 19 nt, Artificial Sequence
  Description of Artificial Sequence: Synthetic oligonucleotide
  Antisense strand to SEQ ID NO: 1540498
uuacuacuaacuuucaaug

SEQ ID NO: 1540500 - RNA, 19 nt, Artificial Sequence
  Description of Artificial Sequence: Synthetic oligonucleotide
  Sense strand starting at position 3448 of SEQ ID NO: 1245152
uaauaugauuugggagagu

SEQ ID NO: 1540501 - RNA, 19 nt, Artificial Sequence
  Description of Artificial Sequence: Synthetic oligonucleotide
  Antisense strand to SEQ ID NO: 1540500
acucucccaaaucauauua

SEQ ID NO: 1540502 - RNA, 19 nt, Artificial Sequence
  Description of Artificial Sequence: Synthetic oligonucleotide
  Sense strand starting at position 3649 of SEQ ID NO: 1245152
gucuauuagucauuucuuu

SEQ ID NO: 1540503 - RNA, 19 nt, Artificial Sequence
  Description of Artificial Sequence: Synthetic oligonucleotide
  Antisense strand to SEQ ID NO: 1540502
aaagaaaugacuaauagac

SEQ ID NO: 1540504 - RNA, 19 nt, Artificial Sequence
  Description of Artificial Sequence: Synthetic oligonucleotide
  Sense strand starting at position 3676 of SEQ ID NO: 1245152
uuggcauacgcauaugauc

SEQ ID NO: 1540505 - RNA, 19 nt, Artificial Sequence
  Description of Artificial Sequence: Synthetic oligonucleotide
  Antisense strand to SEQ ID NO: 1540504
gaucauaugcguaugccaa

SEQ ID NO: 1540506 - RNA, 19 nt, Artificial Sequence
  Description of Artificial Sequence: Synthetic oligonucleotide
  Sense strand starting at position 3681 of SEQ ID NO: 1245152
auacgcauaugaucuuaau

SEQ ID NO: 1540507 - RNA, 19 nt, Artificial Sequence
  Description of Artificial Sequence: Synthetic oligonucleotide
  Antisense strand to SEQ ID NO: 1540506
auuaagaucauaugcguau

SEQ ID NO: 1540508 - RNA, 19 nt, Artificial Sequence
  Description of Artificial Sequence: Synthetic oligonucleotide
  Sense strand starting at position 3743 of SEQ ID NO: 1245152
aacauuaugugguugguau

SEQ ID NO: 1540509 - RNA, 19 nt, Artificial Sequence
  Description of Artificial Sequence: Synthetic oligonucleotide
  Antisense strand to SEQ ID NO: 1540508
auaccaaccacauaauguu

SEQ ID NO: 1540510 - RNA, 19 nt, Artificial Sequence
  Description of Artificial Sequence: Synthetic oligonucleotide
  Sense strand starting at position 3744 of SEQ ID NO: 1245152
acauuaugugguugguauu

SEQ ID NO: 1540511 - RNA, 19 nt, Artificial Sequence
  Description of Artificial Sequence: Synthetic oligonucleotide
  Antisense strand to SEQ ID NO: 1540510
aauaccaaccacauaaugu

SEQ ID NO: 1540512 - RNA, 19 nt, Artificial Sequence
  Description of Artificial Sequence: Synthetic oligonucleotide
  Sense strand starting at position 3745 of SEQ ID NO: 1245152
cauuaugugguugguauua

SEQ ID NO: 1540513 - RNA, 19 nt, Artificial Sequence
  Description of Artificial Sequence: Synthetic oligonucleotide
  Antisense strand to SEQ ID NO: 1540512
uaauaccaaccacauaaug

SEQ ID NO: 1540514 - RNA, 19 nt, Artificial Sequence
  Description of Artificial Sequence: Synthetic oligonucleotide
  Sense strand starting at position 3757 of SEQ ID NO: 1245152
gguauuaugguacauguuu

SEQ ID NO: 1540515 - RNA, 19 nt, Artificial Sequence
  Description of Artificial Sequence: Synthetic oligonucleotide
  Antisense strand to SEQ ID NO: 1540514
aaacauguaccauaauacc

SEQ ID NO: 1540516 - RNA, 19 nt, Artificial Sequence
  Description of Artificial Sequence: Synthetic oligonucleotide
  Sense strand starting at position 3800 of SEQ ID NO: 1245152
auuugucuguuauugcuau

SEQ ID NO: 1540517 - RNA, 19 nt, Artificial Sequence
  Description of Artificial Sequence: Synthetic oligonucleotide
  Antisense strand to SEQ ID NO: 1540516
auagcaauaacagacaaau

SEQ ID NO: 1540518 - RNA, 19 nt, Artificial Sequence
  Description of Artificial Sequence: Synthetic oligonucleotide
  Sense strand starting at position 3806 of SEQ ID NO: 1245152
cuguuauugcuauaaguac

SEQ ID NO: 1540519 - RNA, 19 nt, Artificial Sequence
  Description of Artificial Sequence: Synthetic oligonucleotide
  Antisense strand to SEQ ID NO: 1540518
guacuuauagcaauaacag

SEQ ID NO: 1540520 - RNA, 19 nt, Artificial Sequence
  Description of Artificial Sequence: Synthetic oligonucleotide
  Sense strand starting at position 3840 of SEQ ID NO: 1245152
uuuguauuugccuguuaca

SEQ ID NO: 1540521 - RNA, 19 nt, Artificial Sequence
  Description of Artificial Sequence: Synthetic oligonucleotide
  Antisense strand to SEQ ID NO: 1540520
uguaacaggcaaauacaaa

SEQ ID NO: 1540522 - RNA, 19 nt, Artificial Sequence
  Description of Artificial Sequence: Synthetic oligonucleotide
  Sense strand starting at position 3967 of SEQ ID NO: 1245152
uggugaguuuaggucauuu

SEQ ID NO: 1540523 - RNA, 19 nt, Artificial Sequence
  Description of Artificial Sequence: Synthetic oligonucleotide
  Antisense strand to SEQ ID NO: 1540522
aaaugaccuaaacucacca

SEQ ID NO: 1540524 - RNA, 19 nt, Artificial Sequence
  Description of Artificial Sequence: Synthetic oligonucleotide
  Sense strand starting at position 97 of SEQ ID NO: 1245153
ggaugaguacacugcugau

SEQ ID NO: 1540525 - RNA, 19 nt, Artificial Sequence
  Description of Artificial Sequence: Synthetic oligonucleotide
  Antisense strand to SEQ ID NO: 1540524
aucagcaguguacucaucc

SEQ ID NO: 1540526 - RNA, 19 nt, Artificial Sequence
  Description of Artificial Sequence: Synthetic oligonucleotide
  Sense strand starting at position 165 of SEQ ID NO: 1245153
gaaagucaugucggaaagu

SEQ ID NO: 1540527 - RNA, 19 nt, Artificial Sequence
  Description of Artificial Sequence: Synthetic oligonucleotide
  Antisense strand to SEQ ID NO: 1540526
acuuuccgacaugacuuuc

SEQ ID NO: 1540528 - RNA, 19 nt, Artificial Sequence
  Description of Artificial Sequence: Synthetic oligonucleotide
  Sense strand starting at position 171 of SEQ ID NO: 1245153
caugucggaaagugagaua

SEQ ID NO: 1540529 - RNA, 19 nt, Artificial Sequence
  Description of Artificial Sequence: Synthetic oligonucleotide
  Antisense strand to SEQ ID NO: 1540528
uaucucacuuuccgacaug

SEQ ID NO: 1540530 - RNA, 19 nt, Artificial Sequence
  Description of Artificial Sequence: Synthetic oligonucleotide
  Sense strand starting at position 357 of SEQ ID NO: 1245153
aaugaaacgcugugaauac

SEQ ID NO: 1540531 - RNA, 19 nt, Artificial Sequence
  Description of Artificial Sequence: Synthetic oligonucleotide
  Antisense strand to SEQ ID NO: 1540530
guauucacagcguuucauu

SEQ ID NO: 1540532 - RNA, 19 nt, Artificial Sequence
  Description of Artificial Sequence: Synthetic oligonucleotide
  Sense strand starting at position 446 of SEQ ID NO: 1245153
gcagaaacgccucaacaca

SEQ ID NO: 1540533 - RNA, 19 nt, Artificial Sequence
  Description of Artificial Sequence: Synthetic oligonucleotide
  Antisense strand to SEQ ID NO: 1540532
uguguugaggcguuucugc

SEQ ID NO: 1540534 - RNA, 19 nt, Artificial Sequence
  Description of Artificial Sequence: Synthetic oligonucleotide
  Sense strand starting at position 632 of SEQ ID NO: 1245153
cgaacuuuccugcaucuau

SEQ ID NO: 1540535 - RNA, 19 nt, Artificial Sequence
  Description of Artificial Sequence: Synthetic oligonucleotide
  Antisense strand to SEQ ID NO: 1540534
auagaugcaggaaaguucg

SEQ ID NO: 1540536 - RNA, 19 nt, Artificial Sequence
  Description of Artificial Sequence: Synthetic oligonucleotide
  Sense strand starting at position 712 of SEQ ID NO: 1245153
uccuuuguguauguauaca

SEQ ID NO: 1540537 - RNA, 19 nt, Artificial Sequence
  Description of Artificial Sequence: Synthetic oligonucleotide
  Antisense strand to SEQ ID NO: 1540536
uguauacauacacaaagga

SEQ ID NO: 1540538 - RNA, 19 nt, Artificial Sequence
  Description of Artificial Sequence: Synthetic oligonucleotide
  Sense strand starting at position 778 of SEQ ID NO: 1245153
gugccugugacucgaaaug

SEQ ID NO: 1540539 - RNA, 19 nt, Artificial Sequence
  Description of Artificial Sequence: Synthetic oligonucleotide
  Antisense strand to SEQ ID NO: 1540538
cauuucgagucacaggcac

SEQ ID NO: 1540540 - RNA, 19 nt, Artificial Sequence
  Description of Artificial Sequence: Synthetic oligonucleotide
  Sense strand starting at position 795 of SEQ ID NO: 1245153
ugacaucuuucugcuuagu

SEQ ID NO: 1540541 - RNA, 19 nt, Artificial Sequence
  Description of Artificial Sequence: Synthetic oligonucleotide
  Antisense strand to SEQ ID NO: 1540540
acuaagcagaaagauguca

SEQ ID NO: 1540542 - RNA, 19 nt, Artificial Sequence
  Description of Artificial Sequence: Synthetic oligonucleotide
  Sense strand starting at position 901 of SEQ ID NO: 1245153
aggcuucuuucugcaaaca

SEQ ID NO: 1540543 - RNA, 19 nt, Artificial Sequence
  Description of Artificial Sequence: Synthetic oligonucleotide
  Antisense strand to SEQ ID NO: 1540542
uguuugcagaaagaagccu

SEQ ID NO: 1540544 - RNA, 19 nt, Artificial Sequence
  Description of Artificial Sequence: Synthetic oligonucleotide
  Sense strand starting at position 946 of SEQ ID NO: 1245153
cacugaaguuaugaugaaa

SEQ ID NO: 1540545 - RNA, 19 nt, Artificial Sequence
  Description of Artificial Sequence: Synthetic oligonucleotide
  Antisense strand to SEQ ID NO: 1540544
uuucaucauaacuucagug

SEQ ID NO: 1540546 - RNA, 19 nt, Artificial Sequence
  Description of Artificial Sequence: Synthetic oligonucleotide
  Sense strand starting at position 1026 of SEQ ID NO: 1245153
ggugucuacuugcuugaca

SEQ ID NO: 1540547 - RNA, 19 nt, Artificial Sequence
  Description of Artificial Sequence: Synthetic oligonucleotide
  Antisense strand to SEQ ID NO: 1540546
ugucaagcaaguagacacc

SEQ ID NO: 1540548 - RNA, 19 nt, Artificial Sequence
  Description of Artificial Sequence: Synthetic oligonucleotide
  Sense strand starting at position 1029 of SEQ ID NO: 1245153
gucuacuugcuugacagua

SEQ ID NO: 1540549 - RNA, 19 nt, Artificial Sequence
  Description of Artificial Sequence: Synthetic oligonucleotide
  Antisense strand to SEQ ID NO: 1540548
uacugucaagcaaguagac

SEQ ID NO: 1540550 - RNA, 19 nt, Artificial Sequence
  Description of Artificial Sequence: Synthetic oligonucleotide
  Sense strand starting at position 1068 of SEQ ID NO: 1245153
gcugucacaccgcagaaua

SEQ ID NO: 1540551 - RNA, 19 nt, Artificial Sequence
  Description of Artificial Sequence: Synthetic oligonucleotide
  Antisense strand to SEQ ID NO: 1540550
uauucugcggugugacagc

SEQ ID NO: 1540552 - RNA, 19 nt, Artificial Sequence
  Description of Artificial Sequence: Synthetic oligonucleotide
  Sense strand starting at position 1070 of SEQ ID NO: 1245153
ugucacaccgcagaauaaa

SEQ ID NO: 1540553 - RNA, 19 nt, Artificial Sequence
  Description of Artificial Sequence: Synthetic oligonucleotide
  Antisense strand to SEQ ID NO: 1540552
uuuauucugcggugugaca

SEQ ID NO: 1540554 - RNA, 19 nt, Artificial Sequence
  Description of Artificial Sequence: Synthetic oligonucleotide
  Sense strand starting at position 1098 of SEQ ID NO: 1245153
gaaggaguuggguggguuu

SEQ ID NO: 1540555 - RNA, 19 nt, Artificial Sequence
  Description of Artificial Sequence: Synthetic oligonucleotide
  Antisense strand to SEQ ID NO: 1540554
aaacccacccaacuccuuc

SEQ ID NO: 1540556 - RNA, 19 nt, Artificial Sequence
  Description of Artificial Sequence: Synthetic oligonucleotide
  Sense strand starting at position 1207 of SEQ ID NO: 1245153
cuggaaaugcgcuaaaccu

SEQ ID NO: 1540557 - RNA, 19 nt, Artificial Sequence
  Description of Artificial Sequence: Synthetic oligonucleotide
  Antisense strand to SEQ ID NO: 1540556
agguuuagcgcauuuccag

SEQ ID NO: 1540558 - RNA, 19 nt, Artificial Sequence
  Description of Artificial Sequence: Synthetic oligonucleotide
  Sense strand starting at position 1245 of SEQ ID NO: 1245153
gccaucacuucugcugaaa

SEQ ID NO: 1540559 - RNA, 19 nt, Artificial Sequence
  Description of Artificial Sequence: Synthetic oligonucleotide
  Antisense strand to SEQ ID NO: 1540558
uuucagcagaagugauggc

SEQ ID NO: 1540560 - RNA, 19 nt, Artificial Sequence
  Description of Artificial Sequence: Synthetic oligonucleotide
  Sense strand starting at position 1333 of SEQ ID NO: 1245153
gucucugagaaaugugauc

SEQ ID NO: 1540561 - RNA, 19 nt, Artificial Sequence
  Description of Artificial Sequence: Synthetic oligonucleotide
  Antisense strand to SEQ ID NO: 1540560
gaucacauuucucagagac

SEQ ID NO: 1540562 - RNA, 19 nt, Artificial Sequence
  Description of Artificial Sequence: Synthetic oligonucleotide
  Sense strand starting at position 1443 of SEQ ID NO: 1245153
cccggagcacaaugauauu

SEQ ID NO: 1540563 - RNA, 19 nt, Artificial Sequence
  Description of Artificial Sequence: Synthetic oligonucleotide
  Antisense strand to SEQ ID NO: 1540562
aauaucauugugcuccggg

SEQ ID NO: 1540564 - RNA, 19 nt, Artificial Sequence
  Description of Artificial Sequence: Synthetic oligonucleotide
  Sense strand starting at position 1449 of SEQ ID NO: 1245153
gcacaaugauauucucaag

SEQ ID NO: 1540565 - RNA, 19 nt, Artificial Sequence
  Description of Artificial Sequence: Synthetic oligonucleotide
  Antisense strand to SEQ ID NO: 1540564
cuugagaauaucauugugc

SEQ ID NO: 1540566 - RNA, 19 nt, Artificial Sequence
  Description of Artificial Sequence: Synthetic oligonucleotide
  Sense strand starting at position 1463 of SEQ ID NO: 1245153
ucaagaaaguugccuaaga

SEQ ID NO: 1540567 - RNA, 19 nt, Artificial Sequence
  Description of Artificial Sequence: Synthetic oligonucleotide
  Antisense strand to SEQ ID NO: 1540566
ucuuaggcaacuuucuuga

SEQ ID NO: 1540568 - RNA, 19 nt, Artificial Sequence
  Description of Artificial Sequence: Synthetic oligonucleotide
  Sense strand starting at position 1492 of SEQ ID NO: 1245153
ggguuucccugguugagua

SEQ ID NO: 1540569 - RNA, 19 nt, Artificial Sequence
  Description of Artificial Sequence: Synthetic oligonucleotide
  Antisense strand to SEQ ID NO: 1540568
uacucaaccagggaaaccc

SEQ ID NO: 1540570 - RNA, 19 nt, Artificial Sequence
  Description of Artificial Sequence: Synthetic oligonucleotide
  Sense strand starting at position 1493 of SEQ ID NO: 1245153
gguuucccugguugaguaa

SEQ ID NO: 1540571 - RNA, 19 nt, Artificial Sequence
  Description of Artificial Sequence: Synthetic oligonucleotide
  Antisense strand to SEQ ID NO: 1540570
uuacucaaccagggaaacc

SEQ ID NO: 1540572 - RNA, 19 nt, Artificial Sequence
  Description of Artificial Sequence: Synthetic oligonucleotide
  Sense strand starting at position 1494 of SEQ ID NO: 1245153
guuucccugguugaguaau

SEQ ID NO: 1540573 - RNA, 19 nt, Artificial Sequence
  Description of Artificial Sequence: Synthetic oligonucleotide
  Antisense strand to SEQ ID NO: 1540572
auuacucaaccagggaaac

SEQ ID NO: 1540574 - RNA, 19 nt, Artificial Sequence
  Description of Artificial Sequence: Synthetic oligonucleotide
  Sense strand starting at position 1508 of SEQ ID NO: 1245153
guaauucuugcaggagggu

SEQ ID NO: 1540575 - RNA, 19 nt, Artificial Sequence
  Description of Artificial Sequence: Synthetic oligonucleotide
  Antisense strand to SEQ ID NO: 1540574
acccuccugcaagaauuac

SEQ ID NO: 1540576 - RNA, 19 nt, Artificial Sequence
  Description of Artificial Sequence: Synthetic oligonucleotide
  Sense strand starting at position 1535 of SEQ ID NO: 1245153
auaucuggcguccaagauu

SEQ ID NO: 1540577 - RNA, 19 nt, Artificial Sequence
  Description of Artificial Sequence: Synthetic oligonucleotide
  Antisense strand to SEQ ID NO: 1540576
aaucuuggacgccagauau

SEQ ID NO: 1540578 - RNA, 19 nt, Artificial Sequence
  Description of Artificial Sequence: Synthetic oligonucleotide
  Sense strand starting at position 2359 of SEQ ID NO: 1245153
gggucugagaaacgccaua

SEQ ID NO: 1540579 - RNA, 19 nt, Artificial Sequence
  Description of Artificial Sequence: Synthetic oligonucleotide
  Antisense strand to SEQ ID NO: 1540578
uauggcguuucucagaccc

SEQ ID NO: 1540580 - RNA, 19 nt, Artificial Sequence
  Description of Artificial Sequence: Synthetic oligonucleotide
  Sense strand starting at position 2827 of SEQ ID NO: 1245153
cccagacuuuggucagaag

SEQ ID NO: 1540581 - RNA, 19 nt, Artificial Sequence
  Description of Artificial Sequence: Synthetic oligonucleotide
  Antisense strand to SEQ ID NO: 1540580
cuucugaccaaagucuggg

SEQ ID NO: 1540582 - RNA, 19 nt, Artificial Sequence
  Description of Artificial Sequence: Synthetic oligonucleotide
  Sense strand starting at position 3014 of SEQ ID NO: 1245153
ggugaugaguacccacaua

SEQ ID NO: 1540583 - RNA, 19 nt, Artificial Sequence
  Description of Artificial Sequence: Synthetic oligonucleotide
  Antisense strand to SEQ ID NO: 1540582
uauguggguacucaucacc

SEQ ID NO: 1540584 - RNA, 19 nt, Artificial Sequence
  Description of Artificial Sequence: Synthetic oligonucleotide
  Sense strand starting at position 3252 of SEQ ID NO: 1245153
ccaagacauuagguaguuu

SEQ ID NO: 1540585 - RNA, 19 nt, Artificial Sequence
  Description of Artificial Sequence: Synthetic oligonucleotide
  Antisense strand to SEQ ID NO: 1540584
aaacuaccuaaugucuugg

SEQ ID NO: 1540586 - RNA, 19 nt, Artificial Sequence
  Description of Artificial Sequence: Synthetic oligonucleotide
  Sense strand starting at position 3260 of SEQ ID NO: 1245153
uuagguaguuuggcaagau

SEQ ID NO: 1540587 - RNA, 19 nt, Artificial Sequence
  Description of Artificial Sequence: Synthetic oligonucleotide
  Antisense strand to SEQ ID NO: 1540586
aucuugccaaacuaccuaa

SEQ ID NO: 1540588 - RNA, 19 nt, Artificial Sequence
  Description of Artificial Sequence: Synthetic oligonucleotide
  Sense strand starting at position 3317 of SEQ ID NO: 1245153
acaguuugcuuugcaugau

SEQ ID NO: 1540589 - RNA, 19 nt, Artificial Sequence
  Description of Artificial Sequence: Synthetic oligonucleotide
  Antisense strand to SEQ ID NO: 1540588
aucaugcaaagcaaacugu

SEQ ID NO: 1540590 - RNA, 19 nt, Artificial Sequence
  Description of Artificial Sequence: Synthetic oligonucleotide
  Sense strand starting at position 3321 of SEQ ID NO: 1245153
uuugcuuugcaugaucaau

SEQ ID NO: 1540591 - RNA, 19 nt, Artificial Sequence
  Description of Artificial Sequence: Synthetic oligonucleotide
  Antisense strand to SEQ ID NO: 1540590
auugaucaugcaaagcaaa

SEQ ID NO: 1540592 - RNA, 19 nt, Artificial Sequence
  Description of Artificial Sequence: Synthetic oligonucleotide
  Sense strand starting at position 3323 of SEQ ID NO: 1245153
ugcuuugcaugaucaauca

SEQ ID NO: 1540593 - RNA, 19 nt, Artificial Sequence
  Description of Artificial Sequence: Synthetic oligonucleotide
  Antisense strand to SEQ ID NO: 1540592
ugauugaucaugcaaagca

SEQ ID NO: 1540594 - RNA, 19 nt, Artificial Sequence
  Description of Artificial Sequence: Synthetic oligonucleotide
  Sense strand starting at position 3406 of SEQ ID NO: 1245153
uggcauguccugccuugua

SEQ ID NO: 1540595 - RNA, 19 nt, Artificial Sequence
  Description of Artificial Sequence: Synthetic oligonucleotide
  Antisense strand to SEQ ID NO: 1540594
uacaaggcaggacaugcca

SEQ ID NO: 1540596 - RNA, 19 nt, Artificial Sequence
  Description of Artificial Sequence: Synthetic oligonucleotide
  Sense strand starting at position 3460 of SEQ ID NO: 1245153
ucuuucuuucgcuugcuua

SEQ ID NO: 1540597 - RNA, 19 nt, Artificial Sequence
  Description of Artificial Sequence: Synthetic oligonucleotide
  Antisense strand to SEQ ID NO: 1540596
uaagcaagcgaaagaaaga

SEQ ID NO: 1540598 - RNA, 19 nt, Artificial Sequence
  Description of Artificial Sequence: Synthetic oligonucleotide
  Sense strand starting at position 3497 of SEQ ID NO: 1245153
agaggugagugguugcuaa

SEQ ID NO: 1540599 - RNA, 19 nt, Artificial Sequence
  Description of Artificial Sequence: Synthetic oligonucleotide
  Antisense strand to SEQ ID NO: 1540598
uuagcaaccacucaccucu

SEQ ID NO: 1540600 - RNA, 19 nt, Artificial Sequence
  Description of Artificial Sequence: Synthetic oligonucleotide
  Sense strand starting at position 3726 of SEQ ID NO: 1245153
uuugaagcauuagcgauaa

SEQ ID NO: 1540601 - RNA, 19 nt, Artificial Sequence
  Description of Artificial Sequence: Synthetic oligonucleotide
  Antisense strand to SEQ ID NO: 1540600
uuaucgcuaaugcuucaaa

SEQ ID NO: 1540602 - RNA, 19 nt, Artificial Sequence
  Description of Artificial Sequence: Synthetic oligonucleotide
  Sense strand starting at position 3836 of SEQ ID NO: 1245153
uauagaguguaugcagaau

SEQ ID NO: 1540603 - RNA, 19 nt, Artificial Sequence
  Description of Artificial Sequence: Synthetic oligonucleotide
  Antisense strand to SEQ ID NO: 1540602
auucugcauacacucuaua

SEQ ID NO: 1540604 - RNA, 19 nt, Artificial Sequence
  Description of Artificial Sequence: Synthetic oligonucleotide
  Sense strand starting at position 359 of SEQ ID NO: 1245154
guaggagaucgacggguua

SEQ ID NO: 1540605 - RNA, 19 nt, Artificial Sequence
  Description of Artificial Sequence: Synthetic oligonucleotide
  Antisense strand to SEQ ID NO: 1540604
uaacccgucgaucuccuac

SEQ ID NO: 1540606 - RNA, 19 nt, Artificial Sequence
  Description of Artificial Sequence: Synthetic oligonucleotide
  Sense strand starting at position 361 of SEQ ID NO: 1245154
aggagaucgacggguuaac

SEQ ID NO: 1540607 - RNA, 19 nt, Artificial Sequence
  Description of Artificial Sequence: Synthetic oligonucleotide
  Antisense strand to SEQ ID NO: 1540606
guuaacccgucgaucuccu

SEQ ID NO: 1540608 - RNA, 19 nt, Artificial Sequence
  Description of Artificial Sequence: Synthetic oligonucleotide
  Sense strand starting at position 826 of SEQ ID NO: 1245154
aaacccuucgcguaaggaa

SEQ ID NO: 1540609 - RNA, 19 nt, Artificial Sequence
  Description of Artificial Sequence: Synthetic oligonucleotide
  Antisense strand to SEQ ID NO: 1540608
uuccuuacgcgaaggguuu

SEQ ID NO: 1540610 - RNA, 19 nt, Artificial Sequence
  Description of Artificial Sequence: Synthetic oligonucleotide
  Sense strand starting at position 870 of SEQ ID NO: 1245154
cgccgcguucuccuauauu

SEQ ID NO: 1540611 - RNA, 19 nt, Artificial Sequence
  Description of Artificial Sequence: Synthetic oligonucleotide
  Antisense strand to SEQ ID NO: 1540610
aauauaggagaacgcggcg

SEQ ID NO: 1540612 - RNA, 19 nt, Artificial Sequence
  Description of Artificial Sequence: Synthetic oligonucleotide
  Sense strand starting at position 1153 of SEQ ID NO: 1245154
ggucaucuccagcagcaga

SEQ ID NO: 1540613 - RNA, 19 nt, Artificial Sequence
  Description of Artificial Sequence: Synthetic oligonucleotide
  Antisense strand to SEQ ID NO: 1540612
ucugcugcuggagaugacc

SEQ ID NO: 1540614 - RNA, 19 nt, Artificial Sequence
  Description of Artificial Sequence: Synthetic oligonucleotide
  Sense strand starting at position 1373 of SEQ ID NO: 1245154
ccaggcugcucuuccaaau

SEQ ID NO: 1540615 - RNA, 19 nt, Artificial Sequence
  Description of Artificial Sequence: Synthetic oligonucleotide
  Antisense strand to SEQ ID NO: 1540614
auuuggaagagcagccugg

SEQ ID NO: 1540616 - RNA, 19 nt, Artificial Sequence
  Description of Artificial Sequence: Synthetic oligonucleotide
  Sense strand starting at position 1459 of SEQ ID NO: 1245154
gaaagaaguuucucugccu

SEQ ID NO: 1540617 - RNA, 19 nt, Artificial Sequence
  Description of Artificial Sequence: Synthetic oligonucleotide
  Antisense strand to SEQ ID NO: 1540616
aggcagagaaacuucuuuc

SEQ ID NO: 1540618 - RNA, 19 nt, Artificial Sequence
  Description of Artificial Sequence: Synthetic oligonucleotide
  Sense strand starting at position 1507 of SEQ ID NO: 1245154
ccgagauaacucggagaua

SEQ ID NO: 1540619 - RNA, 19 nt, Artificial Sequence
  Description of Artificial Sequence: Synthetic oligonucleotide
  Antisense strand to SEQ ID NO: 1540618
uaucuccgaguuaucucgg

SEQ ID NO: 1540620 - RNA, 19 nt, Artificial Sequence
  Description of Artificial Sequence: Synthetic oligonucleotide
  Sense strand starting at position 1508 of SEQ ID NO: 1245154
cgagauaacucggagauaa

SEQ ID NO: 1540621 - RNA, 19 nt, Artificial Sequence
  Description of Artificial Sequence: Synthetic oligonucleotide
  Antisense strand to SEQ ID NO: 1540620
uuaucuccgaguuaucucg

SEQ ID NO: 1540622 - RNA, 19 nt, Artificial Sequence
  Description of Artificial Sequence: Synthetic oligonucleotide
  Sense strand starting at position 2517 of SEQ ID NO: 1245154
uugugugagaccgaccuua

SEQ ID NO: 1540623 - RNA, 19 nt, Artificial Sequence
  Description of Artificial Sequence: Synthetic oligonucleotide
  Antisense strand to SEQ ID NO: 1540622
uaaggucggucucacacaa

SEQ ID NO: 1540624 - RNA, 19 nt, Artificial Sequence
  Description of Artificial Sequence: Synthetic oligonucleotide
  Sense strand starting at position 2547 of SEQ ID NO: 1245154
acccuaucucgggaugcua

SEQ ID NO: 1540625 - RNA, 19 nt, Artificial Sequence
  Description of Artificial Sequence: Synthetic oligonucleotide
  Antisense strand to SEQ ID NO: 1540624
uagcaucccgagauagggu

SEQ ID NO: 1540626 - RNA, 19 nt, Artificial Sequence
  Description of Artificial Sequence: Synthetic oligonucleotide
  Sense strand starting at position 2640 of SEQ ID NO: 1245154
ucgucauguacggaaaggu

SEQ ID NO: 1540627 - RNA, 19 nt, Artificial Sequence
  Description of Artificial Sequence: Synthetic oligonucleotide
  Antisense strand to SEQ ID NO: 1540626
accuuuccguacaugacga

SEQ ID NO: 1540628 - RNA, 19 nt, Artificial Sequence
  Description of Artificial Sequence: Synthetic oligonucleotide
  Sense strand starting at position 2726 of SEQ ID NO: 1245154
uuugaugucccuggagagu

SEQ ID NO: 1540629 - RNA, 19 nt, Artificial Sequence
  Description of Artificial Sequence: Synthetic oligonucleotide
  Antisense strand to SEQ ID NO: 1540628
acucuccagggacaucaaa

SEQ ID NO: 1540630 - RNA, 19 nt, Artificial Sequence
  Description of Artificial Sequence: Synthetic oligonucleotide
  Sense strand starting at position 2737 of SEQ ID NO: 1245154
uggagaguuucugauauuu

SEQ ID NO: 1540631 - RNA, 19 nt, Artificial Sequence
  Description of Artificial Sequence: Synthetic oligonucleotide
  Antisense strand to SEQ ID NO: 1540630
aaauaucagaaacucucca

SEQ ID NO: 1540632 - RNA, 19 nt, Artificial Sequence
  Description of Artificial Sequence: Synthetic oligonucleotide
  Sense strand starting at position 2739 of SEQ ID NO: 1245154
gagaguuucugauauuucc

SEQ ID NO: 1540633 - RNA, 19 nt, Artificial Sequence
  Description of Artificial Sequence: Synthetic oligonucleotide
  Antisense strand to SEQ ID NO: 1540632
ggaaauaucagaaacucuc

SEQ ID NO: 1540634 - RNA, 19 nt, Artificial Sequence
  Description of Artificial Sequence: Synthetic oligonucleotide
  Sense strand starting at position 2779 of SEQ ID NO: 1245154
acagauaagucacugcgaa

SEQ ID NO: 1540635 - RNA, 19 nt, Artificial Sequence
  Description of Artificial Sequence: Synthetic oligonucleotide
  Antisense strand to SEQ ID NO: 1540634
uucgcagugacuuaucugu

SEQ ID NO: 1540636 - RNA, 19 nt, Artificial Sequence
  Description of Artificial Sequence: Synthetic oligonucleotide
  Sense strand starting at position 2780 of SEQ ID NO: 1245154
cagauaagucacugcgaag

SEQ ID NO: 1540637 - RNA, 19 nt, Artificial Sequence
  Description of Artificial Sequence: Synthetic oligonucleotide
  Antisense strand to SEQ ID NO: 1540636
cuucgcagugacuuaucug

SEQ ID NO: 1540638 - RNA, 19 nt, Artificial Sequence
  Description of Artificial Sequence: Synthetic oligonucleotide
  Sense strand starting at position 2958 of SEQ ID NO: 1245154
ggguuaucagcgccgaucu

SEQ ID NO: 1540639 - RNA, 19 nt, Artificial Sequence
  Description of Artificial Sequence: Synthetic oligonucleotide
  Antisense strand to SEQ ID NO: 1540638
agaucggcgcugauaaccc

SEQ ID NO: 1540640 - RNA, 19 nt, Artificial Sequence
  Description of Artificial Sequence: Synthetic oligonucleotide
  Sense strand starting at position 3021 of SEQ ID NO: 1245154
ccgugauauaugucucgcu

SEQ ID NO: 1540641 - RNA, 19 nt, Artificial Sequence
  Description of Artificial Sequence: Synthetic oligonucleotide
  Antisense strand to SEQ ID NO: 1540640
agcgagacauauaucacgg

SEQ ID NO: 1540642 - RNA, 19 nt, Artificial Sequence
  Description of Artificial Sequence: Synthetic oligonucleotide
  Sense strand starting at position 3038 of SEQ ID NO: 1245154
cucccuuucgcuuacagaa

SEQ ID NO: 1540643 - RNA, 19 nt, Artificial Sequence
  Description of Artificial Sequence: Synthetic oligonucleotide
  Antisense strand to SEQ ID NO: 1540642
uucuguaagcgaaagggag

SEQ ID NO: 1540644 - RNA, 19 nt, Artificial Sequence
  Description of Artificial Sequence: Synthetic oligonucleotide
  Sense strand starting at position 3056 of SEQ ID NO: 1245154
aaggauuucuuccgacaga

SEQ ID NO: 1540645 - RNA, 19 nt, Artificial Sequence
  Description of Artificial Sequence: Synthetic oligonucleotide
  Antisense strand to SEQ ID NO: 1540644
ucugucggaagaaauccuu

SEQ ID NO: 1540646 - RNA, 19 nt, Artificial Sequence
  Description of Artificial Sequence: Synthetic oligonucleotide
  Sense strand starting at position 3057 of SEQ ID NO: 1245154
aggauuucuuccgacagac

SEQ ID NO: 1540647 - RNA, 19 nt, Artificial Sequence
  Description of Artificial Sequence: Synthetic oligonucleotide
  Antisense strand to SEQ ID NO: 1540646
gucugucggaagaaauccu

SEQ ID NO: 1540648 - RNA, 19 nt, Artificial Sequence
  Description of Artificial Sequence: Synthetic oligonucleotide
  Sense strand starting at position 3097 of SEQ ID NO: 1245154
gggagacuuuaggacaaga

SEQ ID NO: 1540649 - RNA, 19 nt, Artificial Sequence
  Description of Artificial Sequence: Synthetic oligonucleotide
  Antisense strand to SEQ ID NO: 1540648
ucuuguccuaaagucuccc

SEQ ID NO: 1540650 - RNA, 19 nt, Artificial Sequence
  Description of Artificial Sequence: Synthetic oligonucleotide
  Sense strand starting at position 3206 of SEQ ID NO: 1245154
gaaggucggucuccuagaa

SEQ ID NO: 1540651 - RNA, 19 nt, Artificial Sequence
  Description of Artificial Sequence: Synthetic oligonucleotide
  Antisense strand to SEQ ID NO: 1540650
uucuaggagaccgaccuuc

SEQ ID NO: 1540652 - RNA, 19 nt, Artificial Sequence
  Description of Artificial Sequence: Synthetic oligonucleotide
  Sense strand starting at position 3332 of SEQ ID NO: 1245154
aaaguaugguuuccagaga

SEQ ID NO: 1540653 - RNA, 19 nt, Artificial Sequence
  Description of Artificial Sequence: Synthetic oligonucleotide
  Antisense strand to SEQ ID NO: 1540652
ucucuggaaaccauacuuu

SEQ ID NO: 1540654 - RNA, 19 nt, Artificial Sequence
  Description of Artificial Sequence: Synthetic oligonucleotide
  Sense strand starting at position 3337 of SEQ ID NO: 1245154
augguuuccagagauggug

SEQ ID NO: 1540655 - RNA, 19 nt, Artificial Sequence
  Description of Artificial Sequence: Synthetic oligonucleotide
  Antisense strand to SEQ ID NO: 1540654
caccaucucuggaaaccau

SEQ ID NO: 1540656 - RNA, 19 nt, Artificial Sequence
  Description of Artificial Sequence: Synthetic oligonucleotide
  Sense strand starting at position 3374 of SEQ ID NO: 1245154
uuguuuccucugcacguaa

SEQ ID NO: 1540657 - RNA, 19 nt, Artificial Sequence
  Description of Artificial Sequence: Synthetic oligonucleotide
  Antisense strand to SEQ ID NO: 1540656
uuacgugcagaggaaacaa

SEQ ID NO: 1540658 - RNA, 19 nt, Artificial Sequence
  Description of Artificial Sequence: Synthetic oligonucleotide
  Sense strand starting at position 3387 of SEQ ID NO: 1245154
acguaacugugaguuguga

SEQ ID NO: 1540659 - RNA, 19 nt, Artificial Sequence
  Description of Artificial Sequence: Synthetic oligonucleotide
  Antisense strand to SEQ ID NO: 1540658
ucacaacucacaguuacgu

SEQ ID NO: 1540660 - RNA, 19 nt, Artificial Sequence
  Description of Artificial Sequence: Synthetic oligonucleotide
  Sense strand starting at position 3389 of SEQ ID NO: 1245154
guaacugugaguugugaac

SEQ ID NO: 1540661 - RNA, 19 nt, Artificial Sequence
  Description of Artificial Sequence: Synthetic oligonucleotide
  Antisense strand to SEQ ID NO: 1540660
guucacaacucacaguuac

SEQ ID NO: 1540662 - RNA, 19 nt, Artificial Sequence
  Description of Artificial Sequence: Synthetic oligonucleotide
  Sense strand starting at position 3467 of SEQ ID NO: 1245154
caggaaguuggcgagaauu

SEQ ID NO: 1540663 - RNA, 19 nt, Artificial Sequence
  Description of Artificial Sequence: Synthetic oligonucleotide
  Antisense strand to SEQ ID NO: 1540662
aauucucgccaacuuccug

SEQ ID NO: 1540664 - RNA, 19 nt, Artificial Sequence
  Description of Artificial Sequence: Synthetic oligonucleotide
  Sense strand starting at position 3469 of SEQ ID NO: 1245154
ggaaguuggcgagaauucu

SEQ ID NO: 1540665 - RNA, 19 nt, Artificial Sequence
  Description of Artificial Sequence: Synthetic oligonucleotide
  Antisense strand to SEQ ID NO: 1540664
agaauucucgccaacuucc

SEQ ID NO: 1540666 - RNA, 19 nt, Artificial Sequence
  Description of Artificial Sequence: Synthetic oligonucleotide
  Sense strand starting at position 3503 of SEQ ID NO: 1245154
cguuguaaauugcuucuaa

SEQ ID NO: 1540667 - RNA, 19 nt, Artificial Sequence
  Description of Artificial Sequence: Synthetic oligonucleotide
  Antisense strand to SEQ ID NO: 1540666
uuagaagcaauuuacaacg

SEQ ID NO: 1540668 - RNA, 19 nt, Artificial Sequence
  Description of Artificial Sequence: Synthetic oligonucleotide
  Sense strand starting at position 3748 of SEQ ID NO: 1245154
gcgcgacucccagaagaga

SEQ ID NO: 1540669 - RNA, 19 nt, Artificial Sequence
  Description of Artificial Sequence: Synthetic oligonucleotide
  Antisense strand to SEQ ID NO: 1540668
ucucuucugggagucgcgc

SEQ ID NO: 1540670 - RNA, 19 nt, Artificial Sequence
  Description of Artificial Sequence: Synthetic oligonucleotide
  Sense strand starting at position 3835 of SEQ ID NO: 1245154
gugaguuccgaccaaaugu

SEQ ID NO: 1540671 - RNA, 19 nt, Artificial Sequence
  Description of Artificial Sequence: Synthetic oligonucleotide
  Antisense strand to SEQ ID NO: 1540670
acauuuggucggaacucac

SEQ ID NO: 1540672 - RNA, 19 nt, Artificial Sequence
  Description of Artificial Sequence: Synthetic oligonucleotide
  Sense strand starting at position 3871 of SEQ ID NO: 1245154
ugcagaagcucauuuguaa

SEQ ID NO: 1540673 - RNA, 19 nt, Artificial Sequence
  Description of Artificial Sequence: Synthetic oligonucleotide
  Antisense strand to SEQ ID NO: 1540672
uuacaaaugagcuucugca

SEQ ID NO: 1540674 - RNA, 19 nt, Artificial Sequence
  Description of Artificial Sequence: Synthetic oligonucleotide
  Sense strand starting at position 3878 of SEQ ID NO: 1245154
gcucauuuguaagcacuga

SEQ ID NO: 1540675 - RNA, 19 nt, Artificial Sequence
  Description of Artificial Sequence: Synthetic oligonucleotide
  Antisense strand to SEQ ID NO: 1540674
ucagugcuuacaaaugagc

SEQ ID NO: 1540676 - RNA, 19 nt, Artificial Sequence
  Description of Artificial Sequence: Synthetic oligonucleotide
  Sense strand starting at position 3943 of SEQ ID NO: 1245154
gaaauaauguuucucggau

SEQ ID NO: 1540677 - RNA, 19 nt, Artificial Sequence
  Description of Artificial Sequence: Synthetic oligonucleotide
  Antisense strand to SEQ ID NO: 1540676
auccgagaaacauuauuuc

SEQ ID NO: 1540678 - RNA, 19 nt, Artificial Sequence
  Description of Artificial Sequence: Synthetic oligonucleotide
  Sense strand starting at position 3944 of SEQ ID NO: 1245154
aaauaauguuucucggauu

SEQ ID NO: 1540679 - RNA, 19 nt, Artificial Sequence
  Description of Artificial Sequence: Synthetic oligonucleotide
  Antisense strand to SEQ ID NO: 1540678
aauccgagaaacauuauuu

SEQ ID NO: 1540680 - RNA, 19 nt, Artificial Sequence
  Description of Artificial Sequence: Synthetic oligonucleotide
  Sense strand starting at position 3951 of SEQ ID NO: 1245154
guuucucggauuugcuauu

SEQ ID NO: 1540681 - RNA, 19 nt, Artificial Sequence
  Description of Artificial Sequence: Synthetic oligonucleotide
  Antisense strand to SEQ ID NO: 1540680
aauagcaaauccgagaaac

SEQ ID NO: 1540682 - RNA, 19 nt, Artificial Sequence
  Description of Artificial Sequence: Synthetic oligonucleotide
  Sense strand starting at position 3958 of SEQ ID NO: 1245154
ggauuugcuauucgaagca

SEQ ID NO: 1540683 - RNA, 19 nt, Artificial Sequence
  Description of Artificial Sequence: Synthetic oligonucleotide
  Antisense strand to SEQ ID NO: 1540682
ugcuucgaauagcaaaucc

SEQ ID NO: 1540684 - RNA, 19 nt, Artificial Sequence
  Description of Artificial Sequence: Synthetic oligonucleotide
  Sense strand starting at position 177 of SEQ ID NO: 1245155
cuagaucuaucccauggau

SEQ ID NO: 1540685 - RNA, 19 nt, Artificial Sequence
  Description of Artificial Sequence: Synthetic oligonucleotide
  Antisense strand to SEQ ID NO: 1540684
auccaugggauagaucuag

SEQ ID NO: 1540686 - RNA, 19 nt, Artificial Sequence
  Description of Artificial Sequence: Synthetic oligonucleotide
  Sense strand starting at position 189 of SEQ ID NO: 1245155
cauggauaauauguugaca

SEQ ID NO: 1540687 - RNA, 19 nt, Artificial Sequence
  Description of Artificial Sequence: Synthetic oligonucleotide
  Antisense strand to SEQ ID NO: 1540686
ugucaacauauuauccaug

SEQ ID NO: 1540688 - RNA, 19 nt, Artificial Sequence
  Description of Artificial Sequence: Synthetic oligonucleotide
  Sense strand starting at position 260 of SEQ ID NO: 1245155
ucgagauauugguuaagug

SEQ ID NO: 1540689 - RNA, 19 nt, Artificial Sequence
  Description of Artificial Sequence: Synthetic oligonucleotide
  Antisense strand to SEQ ID NO: 1540688
cacuuaaccaauaucucga

SEQ ID NO: 1540690 - RNA, 19 nt, Artificial Sequence
  Description of Artificial Sequence: Synthetic oligonucleotide
  Sense strand starting at position 261 of SEQ ID NO: 1245155
cgagauauugguuaagugu

SEQ ID NO: 1540691 - RNA, 19 nt, Artificial Sequence
  Description of Artificial Sequence: Synthetic oligonucleotide
  Antisense strand to SEQ ID NO: 1540690
acacuuaaccaauaucucg

SEQ ID NO: 1540692 - RNA, 19 nt, Artificial Sequence
  Description of Artificial Sequence: Synthetic oligonucleotide
  Sense strand starting at position 268 of SEQ ID NO: 1245155
uugguuaagugugcucaga

SEQ ID NO: 1540693 - RNA, 19 nt, Artificial Sequence
  Description of Artificial Sequence: Synthetic oligonucleotide
  Antisense strand to SEQ ID NO: 1540692
ucugagcacacuuaaccaa

SEQ ID NO: 1540694 - RNA, 19 nt, Artificial Sequence
  Description of Artificial Sequence: Synthetic oligonucleotide
  Sense strand starting at position 270 of SEQ ID NO: 1245155
gguuaagugugcucagagc

SEQ ID NO: 1540695 - RNA, 19 nt, Artificial Sequence
  Description of Artificial Sequence: Synthetic oligonucleotide
  Antisense strand to SEQ ID NO: 1540694
gcucugagcacacuuaacc

SEQ ID NO: 1540696 - RNA, 19 nt, Artificial Sequence
  Description of Artificial Sequence: Synthetic oligonucleotide
  Sense strand starting at position 506 of SEQ ID NO: 1245155
cgaaguuugcaugcaguuu

SEQ ID NO: 1540697 - RNA, 19 nt, Artificial Sequence
  Description of Artificial Sequence: Synthetic oligonucleotide
  Antisense strand to SEQ ID NO: 1540696
aaacugcaugcaaacuucg

SEQ ID NO: 1540698 - RNA, 19 nt, Artificial Sequence
  Description of Artificial Sequence: Synthetic oligonucleotide
  Sense strand starting at position 535 of SEQ ID NO: 1245155
ugaacauucuuacucggga

SEQ ID NO: 1540699 - RNA, 19 nt, Artificial Sequence
  Description of Artificial Sequence: Synthetic oligonucleotide
  Antisense strand to SEQ ID NO: 1540698
ucccgaguaagaauguuca

SEQ ID NO: 1540700 - RNA, 19 nt, Artificial Sequence
  Description of Artificial Sequence: Synthetic oligonucleotide
  Sense strand starting at position 536 of SEQ ID NO: 1245155
gaacauucuuacucgggau

SEQ ID NO: 1540701 - RNA, 19 nt, Artificial Sequence
  Description of Artificial Sequence: Synthetic oligonucleotide
  Antisense strand to SEQ ID NO: 1540700
aucccgaguaagaauguuc

SEQ ID NO: 1540702 - RNA, 19 nt, Artificial Sequence
  Description of Artificial Sequence: Synthetic oligonucleotide
  Sense strand starting at position 538 of SEQ ID NO: 1245155
acauucuuacucgggauua

SEQ ID NO: 1540703 - RNA, 19 nt, Artificial Sequence
  Description of Artificial Sequence: Synthetic oligonucleotide
  Antisense strand to SEQ ID NO: 1540702
uaaucccgaguaagaaugu

SEQ ID NO: 1540704 - RNA, 19 nt, Artificial Sequence
  Description of Artificial Sequence: Synthetic oligonucleotide
  Sense strand starting at position 632 of SEQ ID NO: 1245155
cagaaagaacgcugugauc

SEQ ID NO: 1540705 - RNA, 19 nt, Artificial Sequence
  Description of Artificial Sequence: Synthetic oligonucleotide
  Antisense strand to SEQ ID NO: 1540704
gaucacagcguucuuucug

SEQ ID NO: 1540706 - RNA, 19 nt, Artificial Sequence
  Description of Artificial Sequence: Synthetic oligonucleotide
  Sense strand starting at position 634 of SEQ ID NO: 1245155
gaaagaacgcugugaucug

SEQ ID NO: 1540707 - RNA, 19 nt, Artificial Sequence
  Description of Artificial Sequence: Synthetic oligonucleotide
  Antisense strand to SEQ ID NO: 1540706
cagaucacagcguucuuuc

SEQ ID NO: 1540708 - RNA, 19 nt, Artificial Sequence
  Description of Artificial Sequence: Synthetic oligonucleotide
  Sense strand starting at position 644 of SEQ ID NO: 1245155
ugugaucuguguccggaua

SEQ ID NO: 1540709 - RNA, 19 nt, Artificial Sequence
  Description of Artificial Sequence: Synthetic oligonucleotide
  Antisense strand to SEQ ID NO: 1540708
uauccggacacagaucaca

SEQ ID NO: 1540710 - RNA, 19 nt, Artificial Sequence
  Description of Artificial Sequence: Synthetic oligonucleotide
  Sense strand starting at position 645 of SEQ ID NO: 1245155
gugaucuguguccggauau

SEQ ID NO: 1540711 - RNA, 19 nt, Artificial Sequence
  Description of Artificial Sequence: Synthetic oligonucleotide
  Antisense strand to SEQ ID NO: 1540710
auauccggacacagaucac

SEQ ID NO: 1540712 - RNA, 19 nt, Artificial Sequence
  Description of Artificial Sequence: Synthetic oligonucleotide
  Sense strand starting at position 2286 of SEQ ID NO: 1245155
gccgugggcguggagaaau

SEQ ID NO: 1540713 - RNA, 19 nt, Artificial Sequence
  Description of Artificial Sequence: Synthetic oligonucleotide
  Antisense strand to SEQ ID NO: 1540712
auuucuccacgcccacggc

SEQ ID NO: 1540714 - RNA, 19 nt, Artificial Sequence
  Description of Artificial Sequence: Synthetic oligonucleotide
  Sense strand starting at position 2594 of SEQ ID NO: 1245155
gcugguuucccucaagcaa

SEQ ID NO: 1540715 - RNA, 19 nt, Artificial Sequence
  Description of Artificial Sequence: Synthetic oligonucleotide
  Antisense strand to SEQ ID NO: 1540714
uugcuugagggaaaccagc

SEQ ID NO: 1540716 - RNA, 19 nt, Artificial Sequence
  Description of Artificial Sequence: Synthetic oligonucleotide
  Sense strand starting at position 2715 of SEQ ID NO: 1245155
uuagaaaggucgucugacu

SEQ ID NO: 1540717 - RNA, 19 nt, Artificial Sequence
  Description of Artificial Sequence: Synthetic oligonucleotide
  Antisense strand to SEQ ID NO: 1540716
agucagacgaccuuucuaa

SEQ ID NO: 1540718 - RNA, 19 nt, Artificial Sequence
  Description of Artificial Sequence: Synthetic oligonucleotide
  Sense strand starting at position 2726 of SEQ ID NO: 1245155
gucugacuccgccuguauu

SEQ ID NO: 1540719 - RNA, 19 nt, Artificial Sequence
  Description of Artificial Sequence: Synthetic oligonucleotide
  Antisense strand to SEQ ID NO: 1540718
aauacaggcggagucagac

SEQ ID NO: 1540720 - RNA, 19 nt, Artificial Sequence
  Description of Artificial Sequence: Synthetic oligonucleotide
  Sense strand starting at position 2843 of SEQ ID NO: 1245155
ggccaagucucauccauga

SEQ ID NO: 1540721 - RNA, 19 nt, Artificial Sequence
  Description of Artificial Sequence: Synthetic oligonucleotide
  Antisense strand to SEQ ID NO: 1540720
ucauggaugagacuuggcc

SEQ ID NO: 1540722 - RNA, 19 nt, Artificial Sequence
  Description of Artificial Sequence: Synthetic oligonucleotide
  Sense strand starting at position 2902 of SEQ ID NO: 1245155
uuugaucccuccuagagac

SEQ ID NO: 1540723 - RNA, 19 nt, Artificial Sequence
  Description of Artificial Sequence: Synthetic oligonucleotide
  Antisense strand to SEQ ID NO: 1540722
gucucuaggagggaucaaa

SEQ ID NO: 1540724 - RNA, 19 nt, Artificial Sequence
  Description of Artificial Sequence: Synthetic oligonucleotide
  Sense strand starting at position 3147 of SEQ ID NO: 1245155
gccgcaggugucuggaauu

SEQ ID NO: 1540725 - RNA, 19 nt, Artificial Sequence
  Description of Artificial Sequence: Synthetic oligonucleotide
  Antisense strand to SEQ ID NO: 1540724
aauuccagacaccugcggc

SEQ ID NO: 1540726 - RNA, 19 nt, Artificial Sequence
  Description of Artificial Sequence: Synthetic oligonucleotide
  Sense strand starting at position 3165 of SEQ ID NO: 1245155
ucaccuugccaaggauuga

SEQ ID NO: 1540727 - RNA, 19 nt, Artificial Sequence
  Description of Artificial Sequence: Synthetic oligonucleotide
  Antisense strand to SEQ ID NO: 1540726
ucaauccuuggcaagguga

SEQ ID NO: 1540728 - RNA, 19 nt, Artificial Sequence
  Description of Artificial Sequence: Synthetic oligonucleotide
  Sense strand starting at position 3219 of SEQ ID NO: 1245155
gcuccuuucucaguucuuu

SEQ ID NO: 1540729 - RNA, 19 nt, Artificial Sequence
  Description of Artificial Sequence: Synthetic oligonucleotide
  Antisense strand to SEQ ID NO: 1540728
aaagaacugagaaaggagc

SEQ ID NO: 1540730 - RNA, 19 nt, Artificial Sequence
  Description of Artificial Sequence: Synthetic oligonucleotide
  Sense strand starting at position 3227 of SEQ ID NO: 1245155
cucaguucuuucucuggaa

SEQ ID NO: 1540731 - RNA, 19 nt, Artificial Sequence
  Description of Artificial Sequence: Synthetic oligonucleotide
  Antisense strand to SEQ ID NO: 1540730
uuccagagaaagaacugag

SEQ ID NO: 1540732 - RNA, 19 nt, Artificial Sequence
  Description of Artificial Sequence: Synthetic oligonucleotide
  Sense strand starting at position 3228 of SEQ ID NO: 1245155
ucaguucuuucucuggaau

SEQ ID NO: 1540733 - RNA, 19 nt, Artificial Sequence
  Description of Artificial Sequence: Synthetic oligonucleotide
  Antisense strand to SEQ ID NO: 1540732
auuccagagaaagaacuga

SEQ ID NO: 1540734 - RNA, 19 nt, Artificial Sequence
  Description of Artificial Sequence: Synthetic oligonucleotide
  Sense strand starting at position 3231 of SEQ ID NO: 1245155
guucuuucucuggaauaag

SEQ ID NO: 1540735 - RNA, 19 nt, Artificial Sequence
  Description of Artificial Sequence: Synthetic oligonucleotide
  Antisense strand to SEQ ID NO: 1540734
cuuauuccagagaaagaac

SEQ ID NO: 1540736 - RNA, 19 nt, Artificial Sequence
  Description of Artificial Sequence: Synthetic oligonucleotide
  Sense strand starting at position 3267 of SEQ ID NO: 1245155
accagaacggugggaguua

SEQ ID NO: 1540737 - RNA, 19 nt, Artificial Sequence
  Description of Artificial Sequence: Synthetic oligonucleotide
  Antisense strand to SEQ ID NO: 1540736
uaacucccaccguucuggu

SEQ ID NO: 1540738 - RNA, 19 nt, Artificial Sequence
  Description of Artificial Sequence: Synthetic oligonucleotide
  Sense strand starting at position 3279 of SEQ ID NO: 1245155
ggaguuaugccagauucca

SEQ ID NO: 1540739 - RNA, 19 nt, Artificial Sequence
  Description of Artificial Sequence: Synthetic oligonucleotide
  Antisense strand to SEQ ID NO: 1540738
uggaaucuggcauaacucc

SEQ ID NO: 1540740 - RNA, 19 nt, Artificial Sequence
  Description of Artificial Sequence: Synthetic oligonucleotide
  Sense strand starting at position 3387 of SEQ ID NO: 1245155
guggucuuagauuacuaac

SEQ ID NO: 1540741 - RNA, 19 nt, Artificial Sequence
  Description of Artificial Sequence: Synthetic oligonucleotide
  Antisense strand to SEQ ID NO: 1540740
guuaguaaucuaagaccac

SEQ ID NO: 1540742 - RNA, 19 nt, Artificial Sequence
  Description of Artificial Sequence: Synthetic oligonucleotide
  Sense strand starting at position 3389 of SEQ ID NO: 1245155
ggucuuagauuacuaacag

SEQ ID NO: 1540743 - RNA, 19 nt, Artificial Sequence
  Description of Artificial Sequence: Synthetic oligonucleotide
  Antisense strand to SEQ ID NO: 1540742
cuguuaguaaucuaagacc

SEQ ID NO: 1540744 - RNA, 19 nt, Artificial Sequence
  Description of Artificial Sequence: Synthetic oligonucleotide
  Sense strand starting at position 3390 of SEQ ID NO: 1245155
gucuuagauuacuaacaga

SEQ ID NO: 1540745 - RNA, 19 nt, Artificial Sequence
  Description of Artificial Sequence: Synthetic oligonucleotide
  Antisense strand to SEQ ID NO: 1540744
ucuguuaguaaucuaagac

SEQ ID NO: 1540746 - RNA, 19 nt, Artificial Sequence
  Description of Artificial Sequence: Synthetic oligonucleotide
  Sense strand starting at position 3393 of SEQ ID NO: 1245155
uuagauuacuaacagagag

SEQ ID NO: 1540747 - RNA, 19 nt, Artificial Sequence
  Description of Artificial Sequence: Synthetic oligonucleotide
  Antisense strand to SEQ ID NO: 1540746
cucucuguuaguaaucuaa

SEQ ID NO: 1540748 - RNA, 19 nt, Artificial Sequence
  Description of Artificial Sequence: Synthetic oligonucleotide
  Sense strand starting at position 3480 of SEQ ID NO: 1245155
cucccacugcgauaauaca

SEQ ID NO: 1540749 - RNA, 19 nt, Artificial Sequence
  Description of Artificial Sequence: Synthetic oligonucleotide
  Antisense strand to SEQ ID NO: 1540748
uguauuaucgcagugggag

SEQ ID NO: 1540750 - RNA, 19 nt, Artificial Sequence
  Description of Artificial Sequence: Synthetic oligonucleotide
  Sense strand starting at position 3815 of SEQ ID NO: 1245155
auuguuaugguuuaacugu

SEQ ID NO: 1540751 - RNA, 19 nt, Artificial Sequence
  Description of Artificial Sequence: Synthetic oligonucleotide
  Antisense strand to SEQ ID NO: 1540750
acaguuaaaccauaacaau

SEQ ID NO: 1540752 - RNA, 19 nt, Artificial Sequence
  Description of Artificial Sequence: Synthetic oligonucleotide
  Sense strand starting at position 3876 of SEQ ID NO: 1245155
ggcugagccuauccuugua

SEQ ID NO: 1540753 - RNA, 19 nt, Artificial Sequence
  Description of Artificial Sequence: Synthetic oligonucleotide
  Antisense strand to SEQ ID NO: 1540752
uacaaggauaggcucagcc

SEQ ID NO: 1540754 - RNA, 19 nt, Artificial Sequence
  Description of Artificial Sequence: Synthetic oligonucleotide
  Sense strand starting at position 3932 of SEQ ID NO: 1245155
aggagaugcgcugggaaua

SEQ ID NO: 1540755 - RNA, 19 nt, Artificial Sequence
  Description of Artificial Sequence: Synthetic oligonucleotide
  Antisense strand to SEQ ID NO: 1540754
uauucccagcgcaucuccu

SEQ ID NO: 1540756 - RNA, 19 nt, Artificial Sequence
  Description of Artificial Sequence: Synthetic oligonucleotide
  Sense strand starting at position 3933 of SEQ ID NO: 1245155
ggagaugcgcugggaauau

SEQ ID NO: 1540757 - RNA, 19 nt, Artificial Sequence
  Description of Artificial Sequence: Synthetic oligonucleotide
  Antisense strand to SEQ ID NO: 1540756
auauucccagcgcaucucc

SEQ ID NO: 1540758 - RNA, 19 nt, Artificial Sequence
  Description of Artificial Sequence: Synthetic oligonucleotide
  Sense strand starting at position 3944 of SEQ ID NO: 1245155
gggaauauuugucaaggga

SEQ ID NO: 1540759 - RNA, 19 nt, Artificial Sequence
  Description of Artificial Sequence: Synthetic oligonucleotide
  Antisense strand to SEQ ID NO: 1540758
ucccuugacaaauauuccc

SEQ ID NO: 1540760 - RNA, 19 nt, Artificial Sequence
  Description of Artificial Sequence: Synthetic oligonucleotide
  Sense strand starting at position 3970 of SEQ ID NO: 1245155
acgucaugaaagcgaaaga

SEQ ID NO: 1540761 - RNA, 19 nt, Artificial Sequence
  Description of Artificial Sequence: Synthetic oligonucleotide
  Antisense strand to SEQ ID NO: 1540760
ucuuucgcuuucaugacgu

SEQ ID NO: 1540762 - RNA, 19 nt, Artificial Sequence
  Description of Artificial Sequence: Synthetic oligonucleotide
  Sense strand starting at position 3971 of SEQ ID NO: 1245155
cgucaugaaagcgaaagau

SEQ ID NO: 1540763 - RNA, 19 nt, Artificial Sequence
  Description of Artificial Sequence: Synthetic oligonucleotide
  Antisense strand to SEQ ID NO: 1540762
aucuuucgcuuucaugacg

SEQ ID NO: 1540764 - RNA, 19 nt, Artificial Sequence
  Description of Artificial Sequence: Synthetic oligonucleotide
  Sense strand starting at position 38 of SEQ ID NO: 1245156
cugaguuccugaccaucca

SEQ ID NO: 1540765 - RNA, 19 nt, Artificial Sequence
  Description of Artificial Sequence: Synthetic oligonucleotide
  Antisense strand to SEQ ID NO: 1540764
uggauggucaggaacucag

SEQ ID NO: 1540766 - RNA, 19 nt, Artificial Sequence
  Description of Artificial Sequence: Synthetic oligonucleotide
  Sense strand starting at position 143 of SEQ ID NO: 1245156
uggacagucagauggguuu

SEQ ID NO: 1540767 - RNA, 19 nt, Artificial Sequence
  Description of Artificial Sequence: Synthetic oligonucleotide
  Antisense strand to SEQ ID NO: 1540766
aaacccaucugacugucca

SEQ ID NO: 1540768 - RNA, 19 nt, Artificial Sequence
  Description of Artificial Sequence: Synthetic oligonucleotide
  Sense strand starting at position 154 of SEQ ID NO: 1245156
auggguuucugggugagaa

SEQ ID NO: 1540769 - RNA, 19 nt, Artificial Sequence
  Description of Artificial Sequence: Synthetic oligonucleotide
  Antisense strand to SEQ ID NO: 1540768
uucucacccagaaacccau

SEQ ID NO: 1540770 - RNA, 19 nt, Artificial Sequence
  Description of Artificial Sequence: Synthetic oligonucleotide
  Sense strand starting at position 155 of SEQ ID NO: 1245156
uggguuucugggugagaag

SEQ ID NO: 1540771 - RNA, 19 nt, Artificial Sequence
  Description of Artificial Sequence: Synthetic oligonucleotide
  Antisense strand to SEQ ID NO: 1540770
cuucucacccagaaaccca

SEQ ID NO: 1540772 - RNA, 19 nt, Artificial Sequence
  Description of Artificial Sequence: Synthetic oligonucleotide
  Sense strand starting at position 205 of SEQ ID NO: 1245156
aucagaaauggucgcaacu

SEQ ID NO: 1540773 - RNA, 19 nt, Artificial Sequence
  Description of Artificial Sequence: Synthetic oligonucleotide
  Antisense strand to SEQ ID NO: 1540772
aguugcgaccauuucugau

SEQ ID NO: 1540774 - RNA, 19 nt, Artificial Sequence
  Description of Artificial Sequence: Synthetic oligonucleotide
  Sense strand starting at position 251 of SEQ ID NO: 1245156
agaaaugaauucgcucuga

SEQ ID NO: 1540775 - RNA, 19 nt, Artificial Sequence
  Description of Artificial Sequence: Synthetic oligonucleotide
  Antisense strand to SEQ ID NO: 1540774
ucagagcgaauucauuucu

SEQ ID NO: 1540776 - RNA, 19 nt, Artificial Sequence
  Description of Artificial Sequence: Synthetic oligonucleotide
  Sense strand starting at position 255 of SEQ ID NO: 1245156
augaauucgcucugaugaa

SEQ ID NO: 1540777 - RNA, 19 nt, Artificial Sequence
  Description of Artificial Sequence: Synthetic oligonucleotide
  Antisense strand to SEQ ID NO: 1540776
uucaucagagcgaauucau

SEQ ID NO: 1540778 - RNA, 19 nt, Artificial Sequence
  Description of Artificial Sequence: Synthetic oligonucleotide
  Sense strand starting at position 368 of SEQ ID NO: 1245156
gagguagguggugaaugua

SEQ ID NO: 1540779 - RNA, 19 nt, Artificial Sequence
  Description of Artificial Sequence: Synthetic oligonucleotide
  Antisense strand to SEQ ID NO: 1540778
uacauucaccaccuaccuc

SEQ ID NO: 1540780 - RNA, 19 nt, Artificial Sequence
  Description of Artificial Sequence: Synthetic oligonucleotide
  Sense strand starting at position 419 of SEQ ID NO: 1245156
aaugaaguaugguuaacca

SEQ ID NO: 1540781 - RNA, 19 nt, Artificial Sequence
  Description of Artificial Sequence: Synthetic oligonucleotide
  Antisense strand to SEQ ID NO: 1540780
ugguuaaccauacuucauu

SEQ ID NO: 1540782 - RNA, 19 nt, Artificial Sequence
  Description of Artificial Sequence: Synthetic oligonucleotide
  Sense strand starting at position 447 of SEQ ID NO: 1245156
ucuggagugcuagagagau

SEQ ID NO: 1540783 - RNA, 19 nt, Artificial Sequence
  Description of Artificial Sequence: Synthetic oligonucleotide
  Antisense strand to SEQ ID NO: 1540782
aucucucuagcacuccaga

SEQ ID NO: 1540784 - RNA, 19 nt, Artificial Sequence
  Description of Artificial Sequence: Synthetic oligonucleotide
  Sense strand starting at position 451 of SEQ ID NO: 1245156
gagugcuagagagauguga

SEQ ID NO: 1540785 - RNA, 19 nt, Artificial Sequence
  Description of Artificial Sequence: Synthetic oligonucleotide
  Antisense strand to SEQ ID NO: 1540784
ucacaucucucuagcacuc

SEQ ID NO: 1540786 - RNA, 19 nt, Artificial Sequence
  Description of Artificial Sequence: Synthetic oligonucleotide
  Sense strand starting at position 453 of SEQ ID NO: 1245156
gugcuagagagaugugaug

SEQ ID NO: 1540787 - RNA, 19 nt, Artificial Sequence
  Description of Artificial Sequence: Synthetic oligonucleotide
  Antisense strand to SEQ ID NO: 1540786
caucacaucucucuagcac

SEQ ID NO: 1540788 - RNA, 19 nt, Artificial Sequence
  Description of Artificial Sequence: Synthetic oligonucleotide
  Sense strand starting at position 491 of SEQ ID NO: 1245156
cuuccugugcacuaugaaa

SEQ ID NO: 1540789 - RNA, 19 nt, Artificial Sequence
  Description of Artificial Sequence: Synthetic oligonucleotide
  Antisense strand to SEQ ID NO: 1540788
uuucauagugcacaggaag

SEQ ID NO: 1540790 - RNA, 19 nt, Artificial Sequence
  Description of Artificial Sequence: Synthetic oligonucleotide
  Sense strand starting at position 493 of SEQ ID NO: 1245156
uccugugcacuaugaaaga

SEQ ID NO: 1540791 - RNA, 19 nt, Artificial Sequence
  Description of Artificial Sequence: Synthetic oligonucleotide
  Antisense strand to SEQ ID NO: 1540790
ucuuucauagugcacagga

SEQ ID NO: 1540792 - RNA, 19 nt, Artificial Sequence
  Description of Artificial Sequence: Synthetic oligonucleotide
  Sense strand starting at position 504 of SEQ ID NO: 1245156
augaaagaccagugacuuu

SEQ ID NO: 1540793 - RNA, 19 nt, Artificial Sequence
  Description of Artificial Sequence: Synthetic oligonucleotide
  Antisense strand to SEQ ID NO: 1540792
aaagucacuggucuuucau

SEQ ID NO: 1540794 - RNA, 19 nt, Artificial Sequence
  Description of Artificial Sequence: Synthetic oligonucleotide
  Sense strand starting at position 550 of SEQ ID NO: 1245156
ggucuucuccugucgccaa

SEQ ID NO: 1540795 - RNA, 19 nt, Artificial Sequence
  Description of Artificial Sequence: Synthetic oligonucleotide
  Antisense strand to SEQ ID NO: 1540794
uuggcgacaggagaagacc

SEQ ID NO: 1540796 - RNA, 19 nt, Artificial Sequence
  Description of Artificial Sequence: Synthetic oligonucleotide
  Sense strand starting at position 597 of SEQ ID NO: 1245156
cagcucugauucucagaga

SEQ ID NO: 1540797 - RNA, 19 nt, Artificial Sequence
  Description of Artificial Sequence: Synthetic oligonucleotide
  Antisense strand to SEQ ID NO: 1540796
ucucugagaaucagagcug

SEQ ID NO: 1540798 - RNA, 19 nt, Artificial Sequence
  Description of Artificial Sequence: Synthetic oligonucleotide
  Sense strand starting at position 660 of SEQ ID NO: 1245156
gcuucugauuuguugcuga

SEQ ID NO: 1540799 - RNA, 19 nt, Artificial Sequence
  Description of Artificial Sequence: Synthetic oligonucleotide
  Antisense strand to SEQ ID NO: 1540798
ucagcaacaaaucagaagc

SEQ ID NO: 1540800 - RNA, 19 nt, Artificial Sequence
  Description of Artificial Sequence: Synthetic oligonucleotide
  Sense strand starting at position 795 of SEQ ID NO: 1245156
auaauagagugguagauuu

SEQ ID NO: 1540801 - RNA, 19 nt, Artificial Sequence
  Description of Artificial Sequence: Synthetic oligonucleotide
  Antisense strand to SEQ ID NO: 1540800
aaaucuaccacucuauuau

SEQ ID NO: 1540802 - RNA, 19 nt, Artificial Sequence
  Description of Artificial Sequence: Synthetic oligonucleotide
  Sense strand starting at position 890 of SEQ ID NO: 1245156
gggcuucugugauuacaua

SEQ ID NO: 1540803 - RNA, 19 nt, Artificial Sequence
  Description of Artificial Sequence: Synthetic oligonucleotide
  Antisense strand to SEQ ID NO: 1540802
uauguaaucacagaagccc

SEQ ID NO: 1540804 - RNA, 19 nt, Artificial Sequence
  Description of Artificial Sequence: Synthetic oligonucleotide
  Sense strand starting at position 891 of SEQ ID NO: 1245156
ggcuucugugauuacauac

SEQ ID NO: 1540805 - RNA, 19 nt, Artificial Sequence
  Description of Artificial Sequence: Synthetic oligonucleotide
  Antisense strand to SEQ ID NO: 1540804
guauguaaucacagaagcc

SEQ ID NO: 1540806 - RNA, 19 nt, Artificial Sequence
  Description of Artificial Sequence: Synthetic oligonucleotide
  Sense strand starting at position 1009 of SEQ ID NO: 1245156
gcaugcugaccagaagaau

SEQ ID NO: 1540807 - RNA, 19 nt, Artificial Sequence
  Description of Artificial Sequence: Synthetic oligonucleotide
  Antisense strand to SEQ ID NO: 1540806
auucuucuggucagcaugc

SEQ ID NO: 1540808 - RNA, 19 nt, Artificial Sequence
  Description of Artificial Sequence: Synthetic oligonucleotide
  Sense strand starting at position 1201 of SEQ ID NO: 1245156
ggacacucauguuugcaga

SEQ ID NO: 1540809 - RNA, 19 nt, Artificial Sequence
  Description of Artificial Sequence: Synthetic oligonucleotide
  Antisense strand to SEQ ID NO: 1540808
ucugcaaacaugagugucc

SEQ ID NO: 1540810 - RNA, 19 nt, Artificial Sequence
  Description of Artificial Sequence: Synthetic oligonucleotide
  Sense strand starting at position 1202 of SEQ ID NO: 1245156
gacacucauguuugcagaa

SEQ ID NO: 1540811 - RNA, 19 nt, Artificial Sequence
  Description of Artificial Sequence: Synthetic oligonucleotide
  Antisense strand to SEQ ID NO: 1540810
uucugcaaacaugaguguc

SEQ ID NO: 1540812 - RNA, 19 nt, Artificial Sequence
  Description of Artificial Sequence: Synthetic oligonucleotide
  Sense strand starting at position 1203 of SEQ ID NO: 1245156
acacucauguuugcagaaa

SEQ ID NO: 1540813 - RNA, 19 nt, Artificial Sequence
  Description of Artificial Sequence: Synthetic oligonucleotide
  Antisense strand to SEQ ID NO: 1540812
uuucugcaaacaugagugu

SEQ ID NO: 1540814 - RNA, 19 nt, Artificial Sequence
  Description of Artificial Sequence: Synthetic oligonucleotide
  Sense strand starting at position 1312 of SEQ ID NO: 1245156
gaauucuuauggccaugga

SEQ ID NO: 1540815 - RNA, 19 nt, Artificial Sequence
  Description of Artificial Sequence: Synthetic oligonucleotide
  Antisense strand to SEQ ID NO: 1540814
uccauggccauaagaauuc

SEQ ID NO: 1540816 - RNA, 19 nt, Artificial Sequence
  Description of Artificial Sequence: Synthetic oligonucleotide
  Sense strand starting at position 1315 of SEQ ID NO: 1245156
uucuuauggccauggaauu

SEQ ID NO: 1540817 - RNA, 19 nt, Artificial Sequence
  Description of Artificial Sequence: Synthetic oligonucleotide
  Antisense strand to SEQ ID NO: 1540816
aauuccauggccauaagaa

SEQ ID NO: 1540818 - RNA, 19 nt, Artificial Sequence
  Description of Artificial Sequence: Synthetic oligonucleotide
  Sense strand starting at position 1321 of SEQ ID NO: 1245156
uggccauggaauugaucau

SEQ ID NO: 1540819 - RNA, 19 nt, Artificial Sequence
  Description of Artificial Sequence: Synthetic oligonucleotide
  Antisense strand to SEQ ID NO: 1540818
augaucaauuccauggcca

SEQ ID NO: 1540820 - RNA, 19 nt, Artificial Sequence
  Description of Artificial Sequence: Synthetic oligonucleotide
  Sense strand starting at position 1484 of SEQ ID NO: 1245156
gaaaucugucaaggcaagu

SEQ ID NO: 1540821 - RNA, 19 nt, Artificial Sequence
  Description of Artificial Sequence: Synthetic oligonucleotide
  Antisense strand to SEQ ID NO: 1540820
acuugccuugacagauuuc

SEQ ID NO: 1540822 - RNA, 19 nt, Artificial Sequence
  Description of Artificial Sequence: Synthetic oligonucleotide
  Sense strand starting at position 2206 of SEQ ID NO: 1245156
ugccuuauacugugauuua

SEQ ID NO: 1540823 - RNA, 19 nt, Artificial Sequence
  Description of Artificial Sequence: Synthetic oligonucleotide
  Antisense strand to SEQ ID NO: 1540822
uaaaucacaguauaaggca

SEQ ID NO: 1540824 - RNA, 19 nt, Artificial Sequence
  Description of Artificial Sequence: Synthetic oligonucleotide
  Sense strand starting at position 2265 of SEQ ID NO: 1245156
guaaacaguccugaucuua

SEQ ID NO: 1540825 - RNA, 19 nt, Artificial Sequence
  Description of Artificial Sequence: Synthetic oligonucleotide
  Antisense strand to SEQ ID NO: 1540824
uaagaucaggacuguuuac

SEQ ID NO: 1540826 - RNA, 19 nt, Artificial Sequence
  Description of Artificial Sequence: Synthetic oligonucleotide
  Sense strand starting at position 2277 of SEQ ID NO: 1245156
gaucuuaaguguucuugau

SEQ ID NO: 1540827 - RNA, 19 nt, Artificial Sequence
  Description of Artificial Sequence: Synthetic oligonucleotide
  Antisense strand to SEQ ID NO: 1540826
aucaagaacacuuaagauc

SEQ ID NO: 1540828 - RNA, 19 nt, Artificial Sequence
  Description of Artificial Sequence: Synthetic oligonucleotide
  Sense strand starting at position 2279 of SEQ ID NO: 1245156
ucuuaaguguucuugauuu

SEQ ID NO: 1540829 - RNA, 19 nt, Artificial Sequence
  Description of Artificial Sequence: Synthetic oligonucleotide
  Antisense strand to SEQ ID NO: 1540828
aaaucaagaacacuuaaga

SEQ ID NO: 1540830 - RNA, 19 nt, Artificial Sequence
  Description of Artificial Sequence: Synthetic oligonucleotide
  Sense strand starting at position 2394 of SEQ ID NO: 1245156
uguucucaucucuagaaag

SEQ ID NO: 1540831 - RNA, 19 nt, Artificial Sequence
  Description of Artificial Sequence: Synthetic oligonucleotide
  Antisense strand to SEQ ID NO: 1540830
cuuucuagagaugagaaca

SEQ ID NO: 1540832 - RNA, 19 nt, Artificial Sequence
  Description of Artificial Sequence: Synthetic oligonucleotide
  Sense strand starting at position 2808 of SEQ ID NO: 1245156
uugaguaaacacugcugaa

SEQ ID NO: 1540833 - RNA, 19 nt, Artificial Sequence
  Description of Artificial Sequence: Synthetic oligonucleotide
  Antisense strand to SEQ ID NO: 1540832
uucagcaguguuuacucaa

SEQ ID NO: 1540834 - RNA, 19 nt, Artificial Sequence
  Description of Artificial Sequence: Synthetic oligonucleotide
  Sense strand starting at position 2826 of SEQ ID NO: 1245156
auuguuuguccuggcauuu

SEQ ID NO: 1540835 - RNA, 19 nt, Artificial Sequence
  Description of Artificial Sequence: Synthetic oligonucleotide
  Antisense strand to SEQ ID NO: 1540834
aaaugccaggacaaacaau

SEQ ID NO: 1540836 - RNA, 19 nt, Artificial Sequence
  Description of Artificial Sequence: Synthetic oligonucleotide
  Sense strand starting at position 2987 of SEQ ID NO: 1245156
gucugcugucaucagaaag

SEQ ID NO: 1540837 - RNA, 19 nt, Artificial Sequence
  Description of Artificial Sequence: Synthetic oligonucleotide
  Antisense strand to SEQ ID NO: 1540836
cuuucugaugacagcagac

SEQ ID NO: 1540838 - RNA, 19 nt, Artificial Sequence
  Description of Artificial Sequence: Synthetic oligonucleotide
  Sense strand starting at position 3293 of SEQ ID NO: 1245156
gaucuugagcuuuggacuu

SEQ ID NO: 1540839 - RNA, 19 nt, Artificial Sequence
  Description of Artificial Sequence: Synthetic oligonucleotide
  Antisense strand to SEQ ID NO: 1540838
aaguccaaagcucaagauc

SEQ ID NO: 1540840 - RNA, 19 nt, Artificial Sequence
  Description of Artificial Sequence: Synthetic oligonucleotide
  Sense strand starting at position 3398 of SEQ ID NO: 1245156
ugauacuaugcucaguuaa

SEQ ID NO: 1540841 - RNA, 19 nt, Artificial Sequence
  Description of Artificial Sequence: Synthetic oligonucleotide
  Antisense strand to SEQ ID NO: 1540840
uuaacugagcauaguauca

SEQ ID NO: 1540842 - RNA, 19 nt, Artificial Sequence
  Description of Artificial Sequence: Synthetic oligonucleotide
  Sense strand starting at position 3906 of SEQ ID NO: 1245156
ggguuccugaacugaaaua

SEQ ID NO: 1540843 - RNA, 19 nt, Artificial Sequence
  Description of Artificial Sequence: Synthetic oligonucleotide
  Antisense strand to SEQ ID NO: 1540842
uauuucaguucaggaaccc

SEQ ID NO: 1540844 - RNA, 19 nt, Artificial Sequence
  Description of Artificial Sequence: Synthetic oligonucleotide
  Sense strand starting at position 606 of SEQ ID NO: 1245157
acaacacugugauuggaau

SEQ ID NO: 1540845 - RNA, 19 nt, Artificial Sequence
  Description of Artificial Sequence: Synthetic oligonucleotide
  Antisense strand to SEQ ID NO: 1540844
auuccaaucacaguguugu

SEQ ID NO: 1540846 - RNA, 19 nt, Artificial Sequence
  Description of Artificial Sequence: Synthetic oligonucleotide
  Sense strand starting at position 607 of SEQ ID NO: 1245157
caacacugugauuggaaua

SEQ ID NO: 1540847 - RNA, 19 nt, Artificial Sequence
  Description of Artificial Sequence: Synthetic oligonucleotide
  Antisense strand to SEQ ID NO: 1540846
uauuccaaucacaguguug

SEQ ID NO: 1540848 - RNA, 19 nt, Artificial Sequence
  Description of Artificial Sequence: Synthetic oligonucleotide
  Sense strand starting at position 626 of SEQ ID NO: 1245157
aaagcuuugcggucaagcu

SEQ ID NO: 1540849 - RNA, 19 nt, Artificial Sequence
  Description of Artificial Sequence: Synthetic oligonucleotide
  Antisense strand to SEQ ID NO: 1540848
agcuugaccgcaaagcuuu

SEQ ID NO: 1540850 - RNA, 19 nt, Artificial Sequence
  Description of Artificial Sequence: Synthetic oligonucleotide
  Sense strand starting at position 627 of SEQ ID NO: 1245157
aagcuuugcggucaagcua

SEQ ID NO: 1540851 - RNA, 19 nt, Artificial Sequence
  Description of Artificial Sequence: Synthetic oligonucleotide
  Antisense strand to SEQ ID NO: 1540850
uagcuugaccgcaaagcuu

SEQ ID NO: 1540852 - RNA, 19 nt, Artificial Sequence
  Description of Artificial Sequence: Synthetic oligonucleotide
  Sense strand starting at position 741 of SEQ ID NO: 1245157
gggauucgacccuguggaa

SEQ ID NO: 1540853 - RNA, 19 nt, Artificial Sequence
  Description of Artificial Sequence: Synthetic oligonucleotide
  Antisense strand to SEQ ID NO: 1540852
uuccacagggucgaauccc

SEQ ID NO: 1540854 - RNA, 19 nt, Artificial Sequence
  Description of Artificial Sequence: Synthetic oligonucleotide
  Sense strand starting at position 790 of SEQ ID NO: 1245157
gaggcucauuaauuagaga

SEQ ID NO: 1540855 - RNA, 19 nt, Artificial Sequence
  Description of Artificial Sequence: Synthetic oligonucleotide
  Antisense strand to SEQ ID NO: 1540854
ucucuaauuaaugagccuc

SEQ ID NO: 1540856 - RNA, 19 nt, Artificial Sequence
  Description of Artificial Sequence: Synthetic oligonucleotide
  Sense strand starting at position 942 of SEQ ID NO: 1245157
gguccagucccgggauuca

SEQ ID NO: 1540857 - RNA, 19 nt, Artificial Sequence
  Description of Artificial Sequence: Synthetic oligonucleotide
  Antisense strand to SEQ ID NO: 1540856
ugaaucccgggacuggacc

SEQ ID NO: 1540858 - RNA, 19 nt, Artificial Sequence
  Description of Artificial Sequence: Synthetic oligonucleotide
  Sense strand starting at position 2011 of SEQ ID NO: 1245157
ggcuuugaucuugggcgau

SEQ ID NO: 1540859 - RNA, 19 nt, Artificial Sequence
  Description of Artificial Sequence: Synthetic oligonucleotide
  Antisense strand to SEQ ID NO: 1540858
aucgcccaagaucaaagcc

SEQ ID NO: 1540860 - RNA, 19 nt, Artificial Sequence
  Description of Artificial Sequence: Synthetic oligonucleotide
  Sense strand starting at position 2013 of SEQ ID NO: 1245157
cuuugaucuugggcgauag

SEQ ID NO: 1540861 - RNA, 19 nt, Artificial Sequence
  Description of Artificial Sequence: Synthetic oligonucleotide
  Antisense strand to SEQ ID NO: 1540860
cuaucgcccaagaucaaag

SEQ ID NO: 1540862 - RNA, 19 nt, Artificial Sequence
  Description of Artificial Sequence: Synthetic oligonucleotide
  Sense strand starting at position 2014 of SEQ ID NO: 1245157
uuugaucuugggcgauagu

SEQ ID NO: 1540863 - RNA, 19 nt, Artificial Sequence
  Description of Artificial Sequence: Synthetic oligonucleotide
  Antisense strand to SEQ ID NO: 1540862
acuaucgcccaagaucaaa

SEQ ID NO: 1540864 - RNA, 19 nt, Artificial Sequence
  Description of Artificial Sequence: Synthetic oligonucleotide
  Sense strand starting at position 2015 of SEQ ID NO: 1245157
uugaucuugggcgauagua

SEQ ID NO: 1540865 - RNA, 19 nt, Artificial Sequence
  Description of Artificial Sequence: Synthetic oligonucleotide
  Antisense strand to SEQ ID NO: 1540864
uacuaucgcccaagaucaa

SEQ ID NO: 1540866 - RNA, 19 nt, Artificial Sequence
  Description of Artificial Sequence: Synthetic oligonucleotide
  Sense strand starting at position 2017 of SEQ ID NO: 1245157
gaucuugggcgauaguaac

SEQ ID NO: 1540867 - RNA, 19 nt, Artificial Sequence
  Description of Artificial Sequence: Synthetic oligonucleotide
  Antisense strand to SEQ ID NO: 1540866
guuacuaucgcccaagauc

SEQ ID NO: 1540868 - RNA, 19 nt, Artificial Sequence
  Description of Artificial Sequence: Synthetic oligonucleotide
  Sense strand starting at position 2044 of SEQ ID NO: 1245157
gaaagcuggguguaggaau

SEQ ID NO: 1540869 - RNA, 19 nt, Artificial Sequence
  Description of Artificial Sequence: Synthetic oligonucleotide
  Antisense strand to SEQ ID NO: 1540868
auuccuacacccagcuuuc

SEQ ID NO: 1540870 - RNA, 19 nt, Artificial Sequence
  Description of Artificial Sequence: Synthetic oligonucleotide
  Sense strand starting at position 2060 of SEQ ID NO: 1245157
aauagagaccguggcuuua

SEQ ID NO: 1540871 - RNA, 19 nt, Artificial Sequence
  Description of Artificial Sequence: Synthetic oligonucleotide
  Antisense strand to SEQ ID NO: 1540870
uaaagccacggucucuauu

SEQ ID NO: 1540872 - RNA, 19 nt, Artificial Sequence
  Description of Artificial Sequence: Synthetic oligonucleotide
  Sense strand starting at position 2062 of SEQ ID NO: 1245157
uagagaccguggcuuuaaa

SEQ ID NO: 1540873 - RNA, 19 nt, Artificial Sequence
  Description of Artificial Sequence: Synthetic oligonucleotide
  Antisense strand to SEQ ID NO: 1540872
uuuaaagccacggucucua

SEQ ID NO: 1540874 - RNA, 19 nt, Artificial Sequence
  Description of Artificial Sequence: Synthetic oligonucleotide
  Sense strand starting at position 2097 of SEQ ID NO: 1245157
auccauuucuugcagagau

SEQ ID NO: 1540875 - RNA, 19 nt, Artificial Sequence
  Description of Artificial Sequence: Synthetic oligonucleotide
  Antisense strand to SEQ ID NO: 1540874
aucucugcaagaaauggau

SEQ ID NO: 1540876 - RNA, 19 nt, Artificial Sequence
  Description of Artificial Sequence: Synthetic oligonucleotide
  Sense strand starting at position 2107 of SEQ ID NO: 1245157
ugcagagaucucugcaccu

SEQ ID NO: 1540877 - RNA, 19 nt, Artificial Sequence
  Description of Artificial Sequence: Synthetic oligonucleotide
  Antisense strand to SEQ ID NO: 1540876
aggugcagagaucucugca

SEQ ID NO: 1540878 - RNA, 19 nt, Artificial Sequence
  Description of Artificial Sequence: Synthetic oligonucleotide
  Sense strand starting at position 2189 of SEQ ID NO: 1245157
auaguacuauaccuuugau

SEQ ID NO: 1540879 - RNA, 19 nt, Artificial Sequence
  Description of Artificial Sequence: Synthetic oligonucleotide
  Antisense strand to SEQ ID NO: 1540878
aucaaagguauaguacuau

SEQ ID NO: 1540880 - RNA, 19 nt, Artificial Sequence
  Description of Artificial Sequence: Synthetic oligonucleotide
  Sense strand starting at position 2192 of SEQ ID NO: 1245157
guacuauaccuuugaucuc

SEQ ID NO: 1540881 - RNA, 19 nt, Artificial Sequence
  Description of Artificial Sequence: Synthetic oligonucleotide
  Antisense strand to SEQ ID NO: 1540880
gagaucaaagguauaguac

SEQ ID NO: 1540882 - RNA, 19 nt, Artificial Sequence
  Description of Artificial Sequence: Synthetic oligonucleotide
  Sense strand starting at position 2295 of SEQ ID NO: 1245157
auugccauguacuauuuau

SEQ ID NO: 1540883 - RNA, 19 nt, Artificial Sequence
  Description of Artificial Sequence: Synthetic oligonucleotide
  Antisense strand to SEQ ID NO: 1540882
auaaauaguacauggcaau

SEQ ID NO: 1540884 - RNA, 19 nt, Artificial Sequence
  Description of Artificial Sequence: Synthetic oligonucleotide
  Sense strand starting at position 2411 of SEQ ID NO: 1245157
ucuccaugacgcugagaaa

SEQ ID NO: 1540885 - RNA, 19 nt, Artificial Sequence
  Description of Artificial Sequence: Synthetic oligonucleotide
  Antisense strand to SEQ ID NO: 1540884
uuucucagcgucauggaga

SEQ ID NO: 1540886 - RNA, 19 nt, Artificial Sequence
  Description of Artificial Sequence: Synthetic oligonucleotide
  Sense strand starting at position 2454 of SEQ ID NO: 1245157
uucgguuauuucccgcuga

SEQ ID NO: 1540887 - RNA, 19 nt, Artificial Sequence
  Description of Artificial Sequence: Synthetic oligonucleotide
  Antisense strand to SEQ ID NO: 1540886
ucagcgggaaauaaccgaa

SEQ ID NO: 1540888 - RNA, 19 nt, Artificial Sequence
  Description of Artificial Sequence: Synthetic oligonucleotide
  Sense strand starting at position 2458 of SEQ ID NO: 1245157
guuauuucccgcugaaugc

SEQ ID NO: 1540889 - RNA, 19 nt, Artificial Sequence
  Description of Artificial Sequence: Synthetic oligonucleotide
  Antisense strand to SEQ ID NO: 1540888
gcauucagcgggaaauaac

SEQ ID NO: 1540890 - RNA, 19 nt, Artificial Sequence
  Description of Artificial Sequence: Synthetic oligonucleotide
  Sense strand starting at position 2537 of SEQ ID NO: 1245157
gcuguaagauguguuccuu

SEQ ID NO: 1540891 - RNA, 19 nt, Artificial Sequence
  Description of Artificial Sequence: Synthetic oligonucleotide
  Antisense strand to SEQ ID NO: 1540890
aaggaacacaucuuacagc

SEQ ID NO: 1540892 - RNA, 19 nt, Artificial Sequence
  Description of Artificial Sequence: Synthetic oligonucleotide
  Sense strand starting at position 2541 of SEQ ID NO: 1245157
uaagauguguuccuuggaa

SEQ ID NO: 1540893 - RNA, 19 nt, Artificial Sequence
  Description of Artificial Sequence: Synthetic oligonucleotide
  Antisense strand to SEQ ID NO: 1540892
uuccaaggaacacaucuua

SEQ ID NO: 1540894 - RNA, 19 nt, Artificial Sequence
  Description of Artificial Sequence: Synthetic oligonucleotide
  Sense strand starting at position 2568 of SEQ ID NO: 1245157
ggaauauuauagcugauag

SEQ ID NO: 1540895 - RNA, 19 nt, Artificial Sequence
  Description of Artificial Sequence: Synthetic oligonucleotide
  Antisense strand to SEQ ID NO: 1540894
cuaucagcuauaauauucc

SEQ ID NO: 1540896 - RNA, 19 nt, Artificial Sequence
  Description of Artificial Sequence: Synthetic oligonucleotide
  Sense strand starting at position 2610 of SEQ ID NO: 1245157
accagauuaggcugcuuaa

SEQ ID NO: 1540897 - RNA, 19 nt, Artificial Sequence
  Description of Artificial Sequence: Synthetic oligonucleotide
  Antisense strand to SEQ ID NO: 1540896
uuaagcagccuaaucuggu

SEQ ID NO: 1540898 - RNA, 19 nt, Artificial Sequence
  Description of Artificial Sequence: Synthetic oligonucleotide
  Sense strand starting at position 2613 of SEQ ID NO: 1245157
agauuaggcugcuuaauga

SEQ ID NO: 1540899 - RNA, 19 nt, Artificial Sequence
  Description of Artificial Sequence: Synthetic oligonucleotide
  Antisense strand to SEQ ID NO: 1540898
ucauuaagcagccuaaucu

SEQ ID NO: 1540900 - RNA, 19 nt, Artificial Sequence
  Description of Artificial Sequence: Synthetic oligonucleotide
  Sense strand starting at position 2665 of SEQ ID NO: 1245157
guuggcacuagauguaaau

SEQ ID NO: 1540901 - RNA, 19 nt, Artificial Sequence
  Description of Artificial Sequence: Synthetic oligonucleotide
  Antisense strand to SEQ ID NO: 1540900
auuuacaucuagugccaac

SEQ ID NO: 1540902 - RNA, 19 nt, Artificial Sequence
  Description of Artificial Sequence: Synthetic oligonucleotide
  Sense strand starting at position 2712 of SEQ ID NO: 1245157
gaaacagucuggcucuguu

SEQ ID NO: 1540903 - RNA, 19 nt, Artificial Sequence
  Description of Artificial Sequence: Synthetic oligonucleotide
  Antisense strand to SEQ ID NO: 1540902
aacagagccagacuguuuc

SEQ ID NO: 1540904 - RNA, 19 nt, Artificial Sequence
  Description of Artificial Sequence: Synthetic oligonucleotide
  Sense strand starting at position 3067 of SEQ ID NO: 1245157
ggguccuacugauaacaaa

SEQ ID NO: 1540905 - RNA, 19 nt, Artificial Sequence
  Description of Artificial Sequence: Synthetic oligonucleotide
  Antisense strand to SEQ ID NO: 1540904
uuuguuaucaguaggaccc

SEQ ID NO: 1540906 - RNA, 19 nt, Artificial Sequence
  Description of Artificial Sequence: Synthetic oligonucleotide
  Sense strand starting at position 3284 of SEQ ID NO: 1245157
uuaauuaagugccuacagu

SEQ ID NO: 1540907 - RNA, 19 nt, Artificial Sequence
  Description of Artificial Sequence: Synthetic oligonucleotide
  Antisense strand to SEQ ID NO: 1540906
acuguaggcacuuaauuaa

SEQ ID NO: 1540908 - RNA, 19 nt, Artificial Sequence
  Description of Artificial Sequence: Synthetic oligonucleotide
  Sense strand starting at position 3361 of SEQ ID NO: 1245157
auagacuaaugagguagaa

SEQ ID NO: 1540909 - RNA, 19 nt, Artificial Sequence
  Description of Artificial Sequence: Synthetic oligonucleotide
  Antisense strand to SEQ ID NO: 1540908
uucuaccucauuagucuau

SEQ ID NO: 1540910 - RNA, 19 nt, Artificial Sequence
  Description of Artificial Sequence: Synthetic oligonucleotide
  Sense strand starting at position 3450 of SEQ ID NO: 1245157
acaggauucucagaguaua

SEQ ID NO: 1540911 - RNA, 19 nt, Artificial Sequence
  Description of Artificial Sequence: Synthetic oligonucleotide
  Antisense strand to SEQ ID NO: 1540910
uauacucugagaauccugu

SEQ ID NO: 1540912 - RNA, 19 nt, Artificial Sequence
  Description of Artificial Sequence: Synthetic oligonucleotide
  Sense strand starting at position 3477 of SEQ ID NO: 1245157
uccuguuuaaaucgagaug

SEQ ID NO: 1540913 - RNA, 19 nt, Artificial Sequence
  Description of Artificial Sequence: Synthetic oligonucleotide
  Antisense strand to SEQ ID NO: 1540912
caucucgauuuaaacagga

SEQ ID NO: 1540914 - RNA, 19 nt, Artificial Sequence
  Description of Artificial Sequence: Synthetic oligonucleotide
  Sense strand starting at position 3499 of SEQ ID NO: 1245157
aagaguagugugugaggca

SEQ ID NO: 1540915 - RNA, 19 nt, Artificial Sequence
  Description of Artificial Sequence: Synthetic oligonucleotide
  Antisense strand to SEQ ID NO: 1540914
ugccucacacacuacucuu

SEQ ID NO: 1540916 - RNA, 19 nt, Artificial Sequence
  Description of Artificial Sequence: Synthetic oligonucleotide
  Sense strand starting at position 3544 of SEQ ID NO: 1245157
ccaagagacuuacagcaau

SEQ ID NO: 1540917 - RNA, 19 nt, Artificial Sequence
  Description of Artificial Sequence: Synthetic oligonucleotide
  Antisense strand to SEQ ID NO: 1540916
auugcuguaagucucuugg

SEQ ID NO: 1540918 - RNA, 19 nt, Artificial Sequence
  Description of Artificial Sequence: Synthetic oligonucleotide
  Sense strand starting at position 3628 of SEQ ID NO: 1245157
auacuaaagucagcugaaa

SEQ ID NO: 1540919 - RNA, 19 nt, Artificial Sequence
  Description of Artificial Sequence: Synthetic oligonucleotide
  Antisense strand to SEQ ID NO: 1540918
uuucagcugacuuuaguau

SEQ ID NO: 1540920 - RNA, 19 nt, Artificial Sequence
  Description of Artificial Sequence: Synthetic oligonucleotide
  Sense strand starting at position 3731 of SEQ ID NO: 1245157
agcucacugcaauauagaa

SEQ ID NO: 1540921 - RNA, 19 nt, Artificial Sequence
  Description of Artificial Sequence: Synthetic oligonucleotide
  Antisense strand to SEQ ID NO: 1540920
uucuauauugcagugagcu

SEQ ID NO: 1540922 - RNA, 19 nt, Artificial Sequence
  Description of Artificial Sequence: Synthetic oligonucleotide
  Sense strand starting at position 3784 of SEQ ID NO: 1245157
ccagaauagccaggauuac

SEQ ID NO: 1540923 - RNA, 19 nt, Artificial Sequence
  Description of Artificial Sequence: Synthetic oligonucleotide
  Antisense strand to SEQ ID NO: 1540922
guaauccuggcuauucugg

SEQ ID NO: 1540924 - RNA, 19 nt, Artificial Sequence
  Description of Artificial Sequence: Synthetic oligonucleotide
  Sense strand starting at position 84 of SEQ ID NO: 1245158
acugcauacuguucuaaga

SEQ ID NO: 1540925 - RNA, 19 nt, Artificial Sequence
  Description of Artificial Sequence: Synthetic oligonucleotide
  Antisense strand to SEQ ID NO: 1540924
ucuuagaacaguaugcagu

SEQ ID NO: 1540926 - RNA, 19 nt, Artificial Sequence
  Description of Artificial Sequence: Synthetic oligonucleotide
  Sense strand starting at position 128 of SEQ ID NO: 1245158
agguaauaauuguccacau

SEQ ID NO: 1540927 - RNA, 19 nt, Artificial Sequence
  Description of Artificial Sequence: Synthetic oligonucleotide
  Antisense strand to SEQ ID NO: 1540926
auguggacaauuauuaccu

SEQ ID NO: 1540928 - RNA, 19 nt, Artificial Sequence
  Description of Artificial Sequence: Synthetic oligonucleotide
  Sense strand starting at position 129 of SEQ ID NO: 1245158
gguaauaauuguccacauu

SEQ ID NO: 1540929 - RNA, 19 nt, Artificial Sequence
  Description of Artificial Sequence: Synthetic oligonucleotide
  Antisense strand to SEQ ID NO: 1540928
aauguggacaauuauuacc

SEQ ID NO: 1540930 - RNA, 19 nt, Artificial Sequence
  Description of Artificial Sequence: Synthetic oligonucleotide
  Sense strand starting at position 158 of SEQ ID NO: 1245158
aucucaugucaucaugagu

SEQ ID NO: 1540931 - RNA, 19 nt, Artificial Sequence
  Description of Artificial Sequence: Synthetic oligonucleotide
  Antisense strand to SEQ ID NO: 1540930
acucaugaugacaugagau

SEQ ID NO: 1540932 - RNA, 19 nt, Artificial Sequence
  Description of Artificial Sequence: Synthetic oligonucleotide
  Sense strand starting at position 163 of SEQ ID NO: 1245158
augucaucaugagugggua

SEQ ID NO: 1540933 - RNA, 19 nt, Artificial Sequence
  Description of Artificial Sequence: Synthetic oligonucleotide
  Antisense strand to SEQ ID NO: 1540932
uacccacucaugaugacau

SEQ ID NO: 1540934 - RNA, 19 nt, Artificial Sequence
  Description of Artificial Sequence: Synthetic oligonucleotide
  Sense strand starting at position 164 of SEQ ID NO: 1245158
ugucaucaugaguggguau

SEQ ID NO: 1540935 - RNA, 19 nt, Artificial Sequence
  Description of Artificial Sequence: Synthetic oligonucleotide
  Antisense strand to SEQ ID NO: 1540934
auacccacucaugaugaca

SEQ ID NO: 1540936 - RNA, 19 nt, Artificial Sequence
  Description of Artificial Sequence: Synthetic oligonucleotide
  Sense strand starting at position 166 of SEQ ID NO: 1245158
ucaucaugaguggguauca

SEQ ID NO: 1540937 - RNA, 19 nt, Artificial Sequence
  Description of Artificial Sequence: Synthetic oligonucleotide
  Antisense strand to SEQ ID NO: 1540936
ugauacccacucaugauga

SEQ ID NO: 1540938 - RNA, 19 nt, Artificial Sequence
  Description of Artificial Sequence: Synthetic oligonucleotide
  Sense strand starting at position 167 of SEQ ID NO: 1245158
caucaugaguggguaucaa

SEQ ID NO: 1540939 - RNA, 19 nt, Artificial Sequence
  Description of Artificial Sequence: Synthetic oligonucleotide
  Antisense strand to SEQ ID NO: 1540938
uugauacccacucaugaug

SEQ ID NO: 1540940 - RNA, 19 nt, Artificial Sequence
  Description of Artificial Sequence: Synthetic oligonucleotide
  Sense strand starting at position 176 of SEQ ID NO: 1245158
uggguaucaaguuaauggu

SEQ ID NO: 1540941 - RNA, 19 nt, Artificial Sequence
  Description of Artificial Sequence: Synthetic oligonucleotide
  Antisense strand to SEQ ID NO: 1540940
accauuaacuugauaccca

SEQ ID NO: 1540942 - RNA, 19 nt, Artificial Sequence
  Description of Artificial Sequence: Synthetic oligonucleotide
  Sense strand starting at position 189 of SEQ ID NO: 1245158
aauggucaucaccacgaau

SEQ ID NO: 1540943 - RNA, 19 nt, Artificial Sequence
  Description of Artificial Sequence: Synthetic oligonucleotide
  Antisense strand to SEQ ID NO: 1540942
auucguggugaugaccauu

SEQ ID NO: 1540944 - RNA, 19 nt, Artificial Sequence
  Description of Artificial Sequence: Synthetic oligonucleotide
  Sense strand starting at position 191 of SEQ ID NO: 1245158
uggucaucaccacgaauau

SEQ ID NO: 1540945 - RNA, 19 nt, Artificial Sequence
  Description of Artificial Sequence: Synthetic oligonucleotide
  Antisense strand to SEQ ID NO: 1540944
auauucguggugaugacca

SEQ ID NO: 1540946 - RNA, 19 nt, Artificial Sequence
  Description of Artificial Sequence: Synthetic oligonucleotide
  Sense strand starting at position 192 of SEQ ID NO: 1245158
ggucaucaccacgaauaua

SEQ ID NO: 1540947 - RNA, 19 nt, Artificial Sequence
  Description of Artificial Sequence: Synthetic oligonucleotide
  Antisense strand to SEQ ID NO: 1540946
uauauucguggugaugacc

SEQ ID NO: 1540948 - RNA, 19 nt, Artificial Sequence
  Description of Artificial Sequence: Synthetic oligonucleotide
  Sense strand starting at position 383 of SEQ ID NO: 1245158
guuugaaauguuuacccua

SEQ ID NO: 1540949 - RNA, 19 nt, Artificial Sequence
  Description of Artificial Sequence: Synthetic oligonucleotide
  Antisense strand to SEQ ID NO: 1540948
uaggguaaacauuucaaac

SEQ ID NO: 1540950 - RNA, 19 nt, Artificial Sequence
  Description of Artificial Sequence: Synthetic oligonucleotide
  Sense strand starting at position 668 of SEQ ID NO: 1245158
ugggaaagcucuucccugu

SEQ ID NO: 1540951 - RNA, 19 nt, Artificial Sequence
  Description of Artificial Sequence: Synthetic oligonucleotide
  Antisense strand to SEQ ID NO: 1540950
acagggaagagcuuuccca

SEQ ID NO: 1540952 - RNA, 19 nt, Artificial Sequence
  Description of Artificial Sequence: Synthetic oligonucleotide
  Sense strand starting at position 759 of SEQ ID NO: 1245158
aacaccuuacggugugaaa

SEQ ID NO: 1540953 - RNA, 19 nt, Artificial Sequence
  Description of Artificial Sequence: Synthetic oligonucleotide
  Antisense strand to SEQ ID NO: 1540952
uuucacaccguaagguguu

SEQ ID NO: 1540954 - RNA, 19 nt, Artificial Sequence
  Description of Artificial Sequence: Synthetic oligonucleotide
  Sense strand starting at position 857 of SEQ ID NO: 1245158
ucacguucaccggagaaag

SEQ ID NO: 1540955 - RNA, 19 nt, Artificial Sequence
  Description of Artificial Sequence: Synthetic oligonucleotide
  Antisense strand to SEQ ID NO: 1540954
cuuucuccggugaacguga

SEQ ID NO: 1540956 - RNA, 19 nt, Artificial Sequence
  Description of Artificial Sequence: Synthetic oligonucleotide
  Sense strand starting at position 885 of SEQ ID NO: 1245158
ugaggaguuucuccaggac

SEQ ID NO: 1540957 - RNA, 19 nt, Artificial Sequence
  Description of Artificial Sequence: Synthetic oligonucleotide
  Antisense strand to SEQ ID NO: 1540956
guccuggagaaacuccuca

SEQ ID NO: 1540958 - RNA, 19 nt, Artificial Sequence
  Description of Artificial Sequence: Synthetic oligonucleotide
  Sense strand starting at position 1148 of SEQ ID NO: 1245158
uugugucucauucggaaua

SEQ ID NO: 1540959 - RNA, 19 nt, Artificial Sequence
  Description of Artificial Sequence: Synthetic oligonucleotide
  Antisense strand to SEQ ID NO: 1540958
uauuccgaaugagacacaa

SEQ ID NO: 1540960 - RNA, 19 nt, Artificial Sequence
  Description of Artificial Sequence: Synthetic oligonucleotide
  Sense strand starting at position 1153 of SEQ ID NO: 1245158
ucucauucggaauaagagu

SEQ ID NO: 1540961 - RNA, 19 nt, Artificial Sequence
  Description of Artificial Sequence: Synthetic oligonucleotide
  Antisense strand to SEQ ID NO: 1540960
acucuuauuccgaaugaga

SEQ ID NO: 1540962 - RNA, 19 nt, Artificial Sequence
  Description of Artificial Sequence: Synthetic oligonucleotide
  Sense strand starting at position 1162 of SEQ ID NO: 1245158
gaauaagagugguccucag

SEQ ID NO: 1540963 - RNA, 19 nt, Artificial Sequence
  Description of Artificial Sequence: Synthetic oligonucleotide
  Antisense strand to SEQ ID NO: 1540962
cugaggaccacucuuauuc

SEQ ID NO: 1540964 - RNA, 19 nt, Artificial Sequence
  Description of Artificial Sequence: Synthetic oligonucleotide
  Sense strand starting at position 1166 of SEQ ID NO: 1245158
aagagugguccucagccau

SEQ ID NO: 1540965 - RNA, 19 nt, Artificial Sequence
  Description of Artificial Sequence: Synthetic oligonucleotide
  Antisense strand to SEQ ID NO: 1540964
auggcugaggaccacucuu

SEQ ID NO: 1540966 - RNA, 19 nt, Artificial Sequence
  Description of Artificial Sequence: Synthetic oligonucleotide
  Sense strand starting at position 1235 of SEQ ID NO: 1245158
cgaagugacauuugguguu

SEQ ID NO: 1540967 - RNA, 19 nt, Artificial Sequence
  Description of Artificial Sequence: Synthetic oligonucleotide
  Antisense strand to SEQ ID NO: 1540966
aacaccaaaugucacuucg

SEQ ID NO: 1540968 - RNA, 19 nt, Artificial Sequence
  Description of Artificial Sequence: Synthetic oligonucleotide
  Sense strand starting at position 1241 of SEQ ID NO: 1245158
gacauuugguguugaggaa

SEQ ID NO: 1540969 - RNA, 19 nt, Artificial Sequence
  Description of Artificial Sequence: Synthetic oligonucleotide
  Antisense strand to SEQ ID NO: 1540968
uuccucaacaccaaauguc

SEQ ID NO: 1540970 - RNA, 19 nt, Artificial Sequence
  Description of Artificial Sequence: Synthetic oligonucleotide
  Sense strand starting at position 1307 of SEQ ID NO: 1245158
ucaacuuucccaggcugaa

SEQ ID NO: 1540971 - RNA, 19 nt, Artificial Sequence
  Description of Artificial Sequence: Synthetic oligonucleotide
  Antisense strand to SEQ ID NO: 1540970
uucagccugggaaaguuga

SEQ ID NO: 1540972 - RNA, 19 nt, Artificial Sequence
  Description of Artificial Sequence: Synthetic oligonucleotide
  Sense strand starting at position 2078 of SEQ ID NO: 1245158
ggcggauuccucaggugcu

SEQ ID NO: 1540973 - RNA, 19 nt, Artificial Sequence
  Description of Artificial Sequence: Synthetic oligonucleotide
  Antisense strand to SEQ ID NO: 1540972
agcaccugaggaauccgcc

SEQ ID NO: 1540974 - RNA, 19 nt, Artificial Sequence
  Description of Artificial Sequence: Synthetic oligonucleotide
  Sense strand starting at position 2488 of SEQ ID NO: 1245158
gcgcaauugcuuucucugu

SEQ ID NO: 1540975 - RNA, 19 nt, Artificial Sequence
  Description of Artificial Sequence: Synthetic oligonucleotide
  Antisense strand to SEQ ID NO: 1540974
acagagaaagcaauugcgc

SEQ ID NO: 1540976 - RNA, 19 nt, Artificial Sequence
  Description of Artificial Sequence: Synthetic oligonucleotide
  Sense strand starting at position 2953 of SEQ ID NO: 1245158
guggaagaaucgagguaag

SEQ ID NO: 1540977 - RNA, 19 nt, Artificial Sequence
  Description of Artificial Sequence: Synthetic oligonucleotide
  Antisense strand to SEQ ID NO: 1540976
cuuaccucgauucuuccac

SEQ ID NO: 1540978 - RNA, 19 nt, Artificial Sequence
  Description of Artificial Sequence: Synthetic oligonucleotide
  Sense strand starting at position 3076 of SEQ ID NO: 1245158
uuggaaucauugucaagug

SEQ ID NO: 1540979 - RNA, 19 nt, Artificial Sequence
  Description of Artificial Sequence: Synthetic oligonucleotide
  Antisense strand to SEQ ID NO: 1540978
cacuugacaaugauuccaa

SEQ ID NO: 1540980 - RNA, 19 nt, Artificial Sequence
  Description of Artificial Sequence: Synthetic oligonucleotide
  Sense strand starting at position 3081 of SEQ ID NO: 1245158
aucauugucaagugauagg

SEQ ID NO: 1540981 - RNA, 19 nt, Artificial Sequence
  Description of Artificial Sequence: Synthetic oligonucleotide
  Antisense strand to SEQ ID NO: 1540980
ccuaucacuugacaaugau

SEQ ID NO: 1540982 - RNA, 19 nt, Artificial Sequence
  Description of Artificial Sequence: Synthetic oligonucleotide
  Sense strand starting at position 3305 of SEQ ID NO: 1245158
aaacgauuuguucgagguu

SEQ ID NO: 1540983 - RNA, 19 nt, Artificial Sequence
  Description of Artificial Sequence: Synthetic oligonucleotide
  Antisense strand to SEQ ID NO: 1540982
aaccucgaacaaaucguuu

SEQ ID NO: 1540984 - RNA, 19 nt, Artificial Sequence
  Description of Artificial Sequence: Synthetic oligonucleotide
  Sense strand starting at position 3307 of SEQ ID NO: 1245158
acgauuuguucgagguuug

SEQ ID NO: 1540985 - RNA, 19 nt, Artificial Sequence
  Description of Artificial Sequence: Synthetic oligonucleotide
  Antisense strand to SEQ ID NO: 1540984
caaaccucgaacaaaucgu

SEQ ID NO: 1540986 - RNA, 19 nt, Artificial Sequence
  Description of Artificial Sequence: Synthetic oligonucleotide
  Sense strand starting at position 3308 of SEQ ID NO: 1245158
cgauuuguucgagguuuga

SEQ ID NO: 1540987 - RNA, 19 nt, Artificial Sequence
  Description of Artificial Sequence: Synthetic oligonucleotide
  Antisense strand to SEQ ID NO: 1540986
ucaaaccucgaacaaaucg

SEQ ID NO: 1540988 - RNA, 19 nt, Artificial Sequence
  Description of Artificial Sequence: Synthetic oligonucleotide
  Sense strand starting at position 3349 of SEQ ID NO: 1245158
ggaagacauaguugucuuu

SEQ ID NO: 1540989 - RNA, 19 nt, Artificial Sequence
  Description of Artificial Sequence: Synthetic oligonucleotide
  Antisense strand to SEQ ID NO: 1540988
aaagacaacuaugucuucc

SEQ ID NO: 1540990 - RNA, 19 nt, Artificial Sequence
  Description of Artificial Sequence: Synthetic oligonucleotide
  Sense strand starting at position 3503 of SEQ ID NO: 1245158
cccacaauucugggucaug

SEQ ID NO: 1540991 - RNA, 19 nt, Artificial Sequence
  Description of Artificial Sequence: Synthetic oligonucleotide
  Antisense strand to SEQ ID NO: 1540990
caugacccagaauuguggg

SEQ ID NO: 1540992 - RNA, 19 nt, Artificial Sequence
  Description of Artificial Sequence: Synthetic oligonucleotide
  Sense strand starting at position 3512 of SEQ ID NO: 1245158
cugggucaugcacacaaua

SEQ ID NO: 1540993 - RNA, 19 nt, Artificial Sequence
  Description of Artificial Sequence: Synthetic oligonucleotide
  Antisense strand to SEQ ID NO: 1540992
uauugugugcaugacccag

SEQ ID NO: 1540994 - RNA, 19 nt, Artificial Sequence
  Description of Artificial Sequence: Synthetic oligonucleotide
  Sense strand starting at position 3709 of SEQ ID NO: 1245158
ggugcagaugauuagcaau

SEQ ID NO: 1540995 - RNA, 19 nt, Artificial Sequence
  Description of Artificial Sequence: Synthetic oligonucleotide
  Antisense strand to SEQ ID NO: 1540994
auugcuaaucaucugcacc

SEQ ID NO: 1540996 - RNA, 19 nt, Artificial Sequence
  Description of Artificial Sequence: Synthetic oligonucleotide
  Sense strand starting at position 3750 of SEQ ID NO: 1245158
uuaguaaacucaucaugag

SEQ ID NO: 1540997 - RNA, 19 nt, Artificial Sequence
  Description of Artificial Sequence: Synthetic oligonucleotide
  Antisense strand to SEQ ID NO: 1540996
cucaugaugaguuuacuaa

SEQ ID NO: 1540998 - RNA, 19 nt, Artificial Sequence
  Description of Artificial Sequence: Synthetic oligonucleotide
  Sense strand starting at position 3789 of SEQ ID NO: 1245158
aagacagugcuguagaaac

SEQ ID NO: 1540999 - RNA, 19 nt, Artificial Sequence
  Description of Artificial Sequence: Synthetic oligonucleotide
  Antisense strand to SEQ ID NO: 1540998
guuucuacagcacugucuu

SEQ ID NO: 1541000 - RNA, 19 nt, Artificial Sequence
  Description of Artificial Sequence: Synthetic oligonucleotide
  Sense strand starting at position 3850 of SEQ ID NO: 1245158
gaaguuaaagcaggugaga

SEQ ID NO: 1541001 - RNA, 19 nt, Artificial Sequence
  Description of Artificial Sequence: Synthetic oligonucleotide
  Antisense strand to SEQ ID NO: 1541000
ucucaccugcuuuaacuuc

SEQ ID NO: 1541002 - RNA, 19 nt, Artificial Sequence
  Description of Artificial Sequence: Synthetic oligonucleotide
  Sense strand starting at position 3890 of SEQ ID NO: 1245158
aucacaaggucuguagagu

SEQ ID NO: 1541003 - RNA, 19 nt, Artificial Sequence
  Description of Artificial Sequence: Synthetic oligonucleotide
  Antisense strand to SEQ ID NO: 1541002
acucuacagaccuugugau

SEQ ID NO: 1541004 - RNA, 19 nt, Artificial Sequence
  Description of Artificial Sequence: Synthetic oligonucleotide
  Sense strand starting at position 1 of SEQ ID NO: 1245159
gcuuuauuagugcaauaau

SEQ ID NO: 1541005 - RNA, 19 nt, Artificial Sequence
  Description of Artificial Sequence: Synthetic oligonucleotide
  Antisense strand to SEQ ID NO: 1541004
auuauugcacuaauaaagc

SEQ ID NO: 1541006 - RNA, 19 nt, Artificial Sequence
  Description of Artificial Sequence: Synthetic oligonucleotide
  Sense strand starting at position 31 of SEQ ID NO: 1245159
caaagagauugggaaucca

SEQ ID NO: 1541007 - RNA, 19 nt, Artificial Sequence
  Description of Artificial Sequence: Synthetic oligonucleotide
  Antisense strand to SEQ ID NO: 1541006
uggauucccaaucucuuug

SEQ ID NO: 1541008 - RNA, 19 nt, Artificial Sequence
  Description of Artificial Sequence: Synthetic oligonucleotide
  Sense strand starting at position 301 of SEQ ID NO: 1245159
cugucaagacuuggcaaau

SEQ ID NO: 1541009 - RNA, 19 nt, Artificial Sequence
  Description of Artificial Sequence: Synthetic oligonucleotide
  Antisense strand to SEQ ID NO: 1541008
auuugccaagucuugacag

SEQ ID NO: 1541010 - RNA, 19 nt, Artificial Sequence
  Description of Artificial Sequence: Synthetic oligonucleotide
  Sense strand starting at position 302 of SEQ ID NO: 1245159
ugucaagacuuggcaaaug

SEQ ID NO: 1541011 - RNA, 19 nt, Artificial Sequence
  Description of Artificial Sequence: Synthetic oligonucleotide
  Antisense strand to SEQ ID NO: 1541010
cauuugccaagucuugaca

SEQ ID NO: 1541012 - RNA, 19 nt, Artificial Sequence
  Description of Artificial Sequence: Synthetic oligonucleotide
  Sense strand starting at position 347 of SEQ ID NO: 1245159
ucuauugcagcccaaagau

SEQ ID NO: 1541013 - RNA, 19 nt, Artificial Sequence
  Description of Artificial Sequence: Synthetic oligonucleotide
  Antisense strand to SEQ ID NO: 1541012
aucuuugggcugcaauaga

SEQ ID NO: 1541014 - RNA, 19 nt, Artificial Sequence
  Description of Artificial Sequence: Synthetic oligonucleotide
  Sense strand starting at position 466 of SEQ ID NO: 1245159
uugugaaucagccgauaua

SEQ ID NO: 1541015 - RNA, 19 nt, Artificial Sequence
  Description of Artificial Sequence: Synthetic oligonucleotide
  Antisense strand to SEQ ID NO: 1541014
uauaucggcugauucacaa

SEQ ID NO: 1541016 - RNA, 19 nt, Artificial Sequence
  Description of Artificial Sequence: Synthetic oligonucleotide
  Sense strand starting at position 467 of SEQ ID NO: 1245159
ugugaaucagccgauauau

SEQ ID NO: 1541017 - RNA, 19 nt, Artificial Sequence
  Description of Artificial Sequence: Synthetic oligonucleotide
  Antisense strand to SEQ ID NO: 1541016
auauaucggcugauucaca

SEQ ID NO: 1541018 - RNA, 19 nt, Artificial Sequence
  Description of Artificial Sequence: Synthetic oligonucleotide
  Sense strand starting at position 469 of SEQ ID NO: 1245159
ugaaucagccgauauauga

SEQ ID NO: 1541019 - RNA, 19 nt, Artificial Sequence
  Description of Artificial Sequence: Synthetic oligonucleotide
  Antisense strand to SEQ ID NO: 1541018
ucauauaucggcugauuca

SEQ ID NO: 1541020 - RNA, 19 nt, Artificial Sequence
  Description of Artificial Sequence: Synthetic oligonucleotide
  Sense strand starting at position 528 of SEQ ID NO: 1245159
guucuaaguagauggcuaa

SEQ ID NO: 1541021 - RNA, 19 nt, Artificial Sequence
  Description of Artificial Sequence: Synthetic oligonucleotide
  Antisense strand to SEQ ID NO: 1541020
uuagccaucuacuuagaac

SEQ ID NO: 1541022 - RNA, 19 nt, Artificial Sequence
  Description of Artificial Sequence: Synthetic oligonucleotide
  Sense strand starting at position 1043 of SEQ ID NO: 1245159
gagagaucgggaugagcuu

SEQ ID NO: 1541023 - RNA, 19 nt, Artificial Sequence
  Description of Artificial Sequence: Synthetic oligonucleotide
  Antisense strand to SEQ ID NO: 1541022
aagcucaucccgaucucuc

SEQ ID NO: 1541024 - RNA, 19 nt, Artificial Sequence
  Description of Artificial Sequence: Synthetic oligonucleotide
  Sense strand starting at position 1131 of SEQ ID NO: 1245159
aaagaauaucgcugcaaag

SEQ ID NO: 1541025 - RNA, 19 nt, Artificial Sequence
  Description of Artificial Sequence: Synthetic oligonucleotide
  Antisense strand to SEQ ID NO: 1541024
cuuugcagcgauauucuuu

SEQ ID NO: 1541026 - RNA, 19 nt, Artificial Sequence
  Description of Artificial Sequence: Synthetic oligonucleotide
  Sense strand starting at position 1377 of SEQ ID NO: 1245159
ccaagauuauucuaggaga

SEQ ID NO: 1541027 - RNA, 19 nt, Artificial Sequence
  Description of Artificial Sequence: Synthetic oligonucleotide
  Antisense strand to SEQ ID NO: 1541026
ucuccuagaauaaucuugg

SEQ ID NO: 1541028 - RNA, 19 nt, Artificial Sequence
  Description of Artificial Sequence: Synthetic oligonucleotide
  Sense strand starting at position 1380 of SEQ ID NO: 1245159
agauuauucuaggagagua

SEQ ID NO: 1541029 - RNA, 19 nt, Artificial Sequence
  Description of Artificial Sequence: Synthetic oligonucleotide
  Antisense strand to SEQ ID NO: 1541028
uacucuccuagaauaaucu

SEQ ID NO: 1541030 - RNA, 19 nt, Artificial Sequence
  Description of Artificial Sequence: Synthetic oligonucleotide
  Sense strand starting at position 1390 of SEQ ID NO: 1245159
aggagaguaccgugccaga

SEQ ID NO: 1541031 - RNA, 19 nt, Artificial Sequence
  Description of Artificial Sequence: Synthetic oligonucleotide
  Antisense strand to SEQ ID NO: 1541030
ucuggcacgguacucuccu

SEQ ID NO: 1541032 - RNA, 19 nt, Artificial Sequence
  Description of Artificial Sequence: Synthetic oligonucleotide
  Sense strand starting at position 1617 of SEQ ID NO: 1245159
gggaagguguuugccgaua

SEQ ID NO: 1541033 - RNA, 19 nt, Artificial Sequence
  Description of Artificial Sequence: Synthetic oligonucleotide
  Antisense strand to SEQ ID NO: 1541032
uaucggcaaacaccuuccc

SEQ ID NO: 1541034 - RNA, 19 nt, Artificial Sequence
  Description of Artificial Sequence: Synthetic oligonucleotide
  Sense strand starting at position 1622 of SEQ ID NO: 1245159
gguguuugccgauagaaag

SEQ ID NO: 1541035 - RNA, 19 nt, Artificial Sequence
  Description of Artificial Sequence: Synthetic oligonucleotide
  Antisense strand to SEQ ID NO: 1541034
cuuucuaucggcaaacacc

SEQ ID NO: 1541036 - RNA, 19 nt, Artificial Sequence
  Description of Artificial Sequence: Synthetic oligonucleotide
  Sense strand starting at position 1633 of SEQ ID NO: 1245159
auagaaaggucacaacaaa

SEQ ID NO: 1541037 - RNA, 19 nt, Artificial Sequence
  Description of Artificial Sequence: Synthetic oligonucleotide
  Antisense strand to SEQ ID NO: 1541036
uuuguugugaccuuucuau

SEQ ID NO: 1541038 - RNA, 19 nt, Artificial Sequence
  Description of Artificial Sequence: Synthetic oligonucleotide
  Sense strand starting at position 2070 of SEQ ID NO: 1245159
ucuucuaucgcggaccaga

SEQ ID NO: 1541039 - RNA, 19 nt, Artificial Sequence
  Description of Artificial Sequence: Synthetic oligonucleotide
  Antisense strand to SEQ ID NO: 1541038
ucugguccgcgauagaaga

SEQ ID NO: 1541040 - RNA, 19 nt, Artificial Sequence
  Description of Artificial Sequence: Synthetic oligonucleotide
  Sense strand starting at position 2096 of SEQ ID NO: 1245159
gacgucucccuauagcuaa

SEQ ID NO: 1541041 - RNA, 19 nt, Artificial Sequence
  Description of Artificial Sequence: Synthetic oligonucleotide
  Antisense strand to SEQ ID NO: 1541040
uuagcuauagggagacguc

SEQ ID NO: 1541042 - RNA, 19 nt, Artificial Sequence
  Description of Artificial Sequence: Synthetic oligonucleotide
  Sense strand starting at position 2234 of SEQ ID NO: 1245159
gauuaauuccuccgguccu

SEQ ID NO: 1541043 - RNA, 19 nt, Artificial Sequence
  Description of Artificial Sequence: Synthetic oligonucleotide
  Antisense strand to SEQ ID NO: 1541042
aggaccggaggaauuaauc

SEQ ID NO: 1541044 - RNA, 19 nt, Artificial Sequence
  Description of Artificial Sequence: Synthetic oligonucleotide
  Sense strand starting at position 2397 of SEQ ID NO: 1245159
acgggugagcucuaaagau

SEQ ID NO: 1541045 - RNA, 19 nt, Artificial Sequence
  Description of Artificial Sequence: Synthetic oligonucleotide
  Antisense strand to SEQ ID NO: 1541044
aucuuuagagcucacccgu

SEQ ID NO: 1541046 - RNA, 19 nt, Artificial Sequence
  Description of Artificial Sequence: Synthetic oligonucleotide
  Sense strand starting at position 2419 of SEQ ID NO: 1245159
ugggcuuugcuggagggau

SEQ ID NO: 1541047 - RNA, 19 nt, Artificial Sequence
  Description of Artificial Sequence: Synthetic oligonucleotide
  Antisense strand to SEQ ID NO: 1541046
aucccuccagcaaagccca

SEQ ID NO: 1541048 - RNA, 19 nt, Artificial Sequence
  Description of Artificial Sequence: Synthetic oligonucleotide
  Sense strand starting at position 2899 of SEQ ID NO: 1245159
augcaacuuccauggaaua

SEQ ID NO: 1541049 - RNA, 19 nt, Artificial Sequence
  Description of Artificial Sequence: Synthetic oligonucleotide
  Antisense strand to SEQ ID NO: 1541048
uauuccauggaaguugcau

SEQ ID NO: 1541050 - RNA, 19 nt, Artificial Sequence
  Description of Artificial Sequence: Synthetic oligonucleotide
  Sense strand starting at position 3004 of SEQ ID NO: 1245159
ucuagaguugcucaacguu

SEQ ID NO: 1541051 - RNA, 19 nt, Artificial Sequence
  Description of Artificial Sequence: Synthetic oligonucleotide
  Antisense strand to SEQ ID NO: 1541050
aacguugagcaacucuaga

SEQ ID NO: 1541052 - RNA, 19 nt, Artificial Sequence
  Description of Artificial Sequence: Synthetic oligonucleotide
  Sense strand starting at position 3103 of SEQ ID NO: 1245159
ggaucagcaccauagcaau

SEQ ID NO: 1541053 - RNA, 19 nt, Artificial Sequence
  Description of Artificial Sequence: Synthetic oligonucleotide
  Antisense strand to SEQ ID NO: 1541052
auugcuauggugcugaucc

SEQ ID NO: 1541054 - RNA, 19 nt, Artificial Sequence
  Description of Artificial Sequence: Synthetic oligonucleotide
  Sense strand starting at position 3109 of SEQ ID NO: 1245159
gcaccauagcaaugcaaca

SEQ ID NO: 1541055 - RNA, 19 nt, Artificial Sequence
  Description of Artificial Sequence: Synthetic oligonucleotide
  Antisense strand to SEQ ID NO: 1541054
uguugcauugcuauggugc

SEQ ID NO: 1541056 - RNA, 19 nt, Artificial Sequence
  Description of Artificial Sequence: Synthetic oligonucleotide
  Sense strand starting at position 3183 of SEQ ID NO: 1245159
gugugguuggaauagguga

SEQ ID NO: 1541057 - RNA, 19 nt, Artificial Sequence
  Description of Artificial Sequence: Synthetic oligonucleotide
  Antisense strand to SEQ ID NO: 1541056
ucaccuauuccaaccacac

SEQ ID NO: 1541058 - RNA, 19 nt, Artificial Sequence
  Description of Artificial Sequence: Synthetic oligonucleotide
  Sense strand starting at position 3214 of SEQ ID NO: 1245159
cucaaaugcuuguuaauug

SEQ ID NO: 1541059 - RNA, 19 nt, Artificial Sequence
  Description of Artificial Sequence: Synthetic oligonucleotide
  Antisense strand to SEQ ID NO: 1541058
caauuaacaagcauuugag

SEQ ID NO: 1541060 - RNA, 19 nt, Artificial Sequence
  Description of Artificial Sequence: Synthetic oligonucleotide
  Sense strand starting at position 3248 of SEQ ID NO: 1245159
uuuaguguuccaugucaac

SEQ ID NO: 1541061 - RNA, 19 nt, Artificial Sequence
  Description of Artificial Sequence: Synthetic oligonucleotide
  Antisense strand to SEQ ID NO: 1541060
guugacauggaacacuaaa

SEQ ID NO: 1541062 - RNA, 19 nt, Artificial Sequence
  Description of Artificial Sequence: Synthetic oligonucleotide
  Sense strand starting at position 3269 of SEQ ID NO: 1245159
gguguugauauugauauau

SEQ ID NO: 1541063 - RNA, 19 nt, Artificial Sequence
  Description of Artificial Sequence: Synthetic oligonucleotide
  Antisense strand to SEQ ID NO: 1541062
auauaucaauaucaacacc

SEQ ID NO: 1541064 - RNA, 19 nt, Artificial Sequence
  Description of Artificial Sequence: Synthetic oligonucleotide
  Sense strand starting at position 3310 of SEQ ID NO: 1245159
auacacuugugucugagua

SEQ ID NO: 1541065 - RNA, 19 nt, Artificial Sequence
  Description of Artificial Sequence: Synthetic oligonucleotide
  Antisense strand to SEQ ID NO: 1541064
uacucagacacaaguguau

SEQ ID NO: 1541066 - RNA, 19 nt, Artificial Sequence
  Description of Artificial Sequence: Synthetic oligonucleotide
  Sense strand starting at position 3311 of SEQ ID NO: 1245159
uacacuugugucugaguau

SEQ ID NO: 1541067 - RNA, 19 nt, Artificial Sequence
  Description of Artificial Sequence: Synthetic oligonucleotide
  Antisense strand to SEQ ID NO: 1541066
auacucagacacaagugua

SEQ ID NO: 1541068 - RNA, 19 nt, Artificial Sequence
  Description of Artificial Sequence: Synthetic oligonucleotide
  Sense strand starting at position 3320 of SEQ ID NO: 1245159
gucugaguaucugcugauu

SEQ ID NO: 1541069 - RNA, 19 nt, Artificial Sequence
  Description of Artificial Sequence: Synthetic oligonucleotide
  Antisense strand to SEQ ID NO: 1541068
aaucagcagauacucagac

SEQ ID NO: 1541070 - RNA, 19 nt, Artificial Sequence
  Description of Artificial Sequence: Synthetic oligonucleotide
  Sense strand starting at position 3683 of SEQ ID NO: 1245159
cacauugcaugacugagua

SEQ ID NO: 1541071 - RNA, 19 nt, Artificial Sequence
  Description of Artificial Sequence: Synthetic oligonucleotide
  Antisense strand to SEQ ID NO: 1541070
uacucagucaugcaaugug

SEQ ID NO: 1541072 - RNA, 19 nt, Artificial Sequence
  Description of Artificial Sequence: Synthetic oligonucleotide
  Sense strand starting at position 3691 of SEQ ID NO: 1245159
augacugaguacucuugga

SEQ ID NO: 1541073 - RNA, 19 nt, Artificial Sequence
  Description of Artificial Sequence: Synthetic oligonucleotide
  Antisense strand to SEQ ID NO: 1541072
uccaagaguacucagucau

SEQ ID NO: 1541074 - RNA, 19 nt, Artificial Sequence
  Description of Artificial Sequence: Synthetic oligonucleotide
  Sense strand starting at position 3731 of SEQ ID NO: 1245159
ugugucugggucuaagaga

SEQ ID NO: 1541075 - RNA, 19 nt, Artificial Sequence
  Description of Artificial Sequence: Synthetic oligonucleotide
  Antisense strand to SEQ ID NO: 1541074
ucucuuagacccagacaca

SEQ ID NO: 1541076 - RNA, 19 nt, Artificial Sequence
  Description of Artificial Sequence: Synthetic oligonucleotide
  Sense strand starting at position 3767 of SEQ ID NO: 1245159
gaucauuaauaguuuggua

SEQ ID NO: 1541077 - RNA, 19 nt, Artificial Sequence
  Description of Artificial Sequence: Synthetic oligonucleotide
  Antisense strand to SEQ ID NO: 1541076
uaccaaacuauuaaugauc

SEQ ID NO: 1541078 - RNA, 19 nt, Artificial Sequence
  Description of Artificial Sequence: Synthetic oligonucleotide
  Sense strand starting at position 3803 of SEQ ID NO: 1245159
auacuauccucagugagug

SEQ ID NO: 1541079 - RNA, 19 nt, Artificial Sequence
  Description of Artificial Sequence: Synthetic oligonucleotide
  Antisense strand to SEQ ID NO: 1541078
cacucacugaggauaguau

SEQ ID NO: 1541080 - RNA, 19 nt, Artificial Sequence
  Description of Artificial Sequence: Synthetic oligonucleotide
  Sense strand starting at position 3804 of SEQ ID NO: 1245159
uacuauccucagugaguga

SEQ ID NO: 1541081 - RNA, 19 nt, Artificial Sequence
  Description of Artificial Sequence: Synthetic oligonucleotide
  Antisense strand to SEQ ID NO: 1541080
ucacucacugaggauagua

SEQ ID NO: 1541082 - RNA, 19 nt, Artificial Sequence
  Description of Artificial Sequence: Synthetic oligonucleotide
  Sense strand starting at position 3813 of SEQ ID NO: 1245159
cagugagugagcuaaguga

SEQ ID NO: 1541083 - RNA, 19 nt, Artificial Sequence
  Description of Artificial Sequence: Synthetic oligonucleotide
  Antisense strand to SEQ ID NO: 1541082
ucacuuagcucacucacug

SEQ ID NO: 1541084 - RNA, 19 nt, Artificial Sequence
  Description of Artificial Sequence: Synthetic oligonucleotide
  Sense strand starting at position 152 of SEQ ID NO: 1245160
uaaugauagcuggaggcau

SEQ ID NO: 1541085 - RNA, 19 nt, Artificial Sequence
  Description of Artificial Sequence: Synthetic oligonucleotide
  Antisense strand to SEQ ID NO: 1541084
augccuccagcuaucauua

SEQ ID NO: 1541086 - RNA, 19 nt, Artificial Sequence
  Description of Artificial Sequence: Synthetic oligonucleotide
  Sense strand starting at position 434 of SEQ ID NO: 1245160
ugaagaucuuguuugaacu

SEQ ID NO: 1541087 - RNA, 19 nt, Artificial Sequence
  Description of Artificial Sequence: Synthetic oligonucleotide
  Antisense strand to SEQ ID NO: 1541086
aguucaaacaagaucuuca

SEQ ID NO: 1541088 - RNA, 19 nt, Artificial Sequence
  Description of Artificial Sequence: Synthetic oligonucleotide
  Sense strand starting at position 435 of SEQ ID NO: 1245160
gaagaucuuguuugaacuu

SEQ ID NO: 1541089 - RNA, 19 nt, Artificial Sequence
  Description of Artificial Sequence: Synthetic oligonucleotide
  Antisense strand to SEQ ID NO: 1541088
aaguucaaacaagaucuuc

SEQ ID NO: 1541090 - RNA, 19 nt, Artificial Sequence
  Description of Artificial Sequence: Synthetic oligonucleotide
  Sense strand starting at position 904 of SEQ ID NO: 1245160
guuugaaauuuacagauag

SEQ ID NO: 1541091 - RNA, 19 nt, Artificial Sequence
  Description of Artificial Sequence: Synthetic oligonucleotide
  Antisense strand to SEQ ID NO: 1541090
cuaucuguaaauuucaaac

SEQ ID NO: 1541092 - RNA, 19 nt, Artificial Sequence
  Description of Artificial Sequence: Synthetic oligonucleotide
  Sense strand starting at position 1073 of SEQ ID NO: 1245160
gagucaauacuguggaauc

SEQ ID NO: 1541093 - RNA, 19 nt, Artificial Sequence
  Description of Artificial Sequence: Synthetic oligonucleotide
  Antisense strand to SEQ ID NO: 1541092
gauuccacaguauugacuc

SEQ ID NO: 1541094 - RNA, 19 nt, Artificial Sequence
  Description of Artificial Sequence: Synthetic oligonucleotide
  Sense strand starting at position 1095 of SEQ ID NO: 1245160
ugacccuucuucuuggaaa

SEQ ID NO: 1541095 - RNA, 19 nt, Artificial Sequence
  Description of Artificial Sequence: Synthetic oligonucleotide
  Antisense strand to SEQ ID NO: 1541094
uuuccaagaagaaggguca

SEQ ID NO: 1541096 - RNA, 19 nt, Artificial Sequence
  Description of Artificial Sequence: Synthetic oligonucleotide
  Sense strand starting at position 1283 of SEQ ID NO: 1245160
uuguaaauaccauaguggu

SEQ ID NO: 1541097 - RNA, 19 nt, Artificial Sequence
  Description of Artificial Sequence: Synthetic oligonucleotide
  Antisense strand to SEQ ID NO: 1541096
accacuaugguauuuacaa

SEQ ID NO: 1541098 - RNA, 19 nt, Artificial Sequence
  Description of Artificial Sequence: Synthetic oligonucleotide
  Sense strand starting at position 1289 of SEQ ID NO: 1245160
auaccauagugguuacaag

SEQ ID NO: 1541099 - RNA, 19 nt, Artificial Sequence
  Description of Artificial Sequence: Synthetic oligonucleotide
  Antisense strand to SEQ ID NO: 1541098
cuuguaaccacuaugguau

SEQ ID NO: 1541100 - RNA, 19 nt, Artificial Sequence
  Description of Artificial Sequence: Synthetic oligonucleotide
  Sense strand starting at position 1590 of SEQ ID NO: 1245160
aaauaaugaggcuggaagu

SEQ ID NO: 1541101 - RNA, 19 nt, Artificial Sequence
  Description of Artificial Sequence: Synthetic oligonucleotide
  Antisense strand to SEQ ID NO: 1541100
acuuccagccucauuauuu

SEQ ID NO: 1541102 - RNA, 19 nt, Artificial Sequence
  Description of Artificial Sequence: Synthetic oligonucleotide
  Sense strand starting at position 1613 of SEQ ID NO: 1245160
aucugaaacugagugaauu

SEQ ID NO: 1541103 - RNA, 19 nt, Artificial Sequence
  Description of Artificial Sequence: Synthetic oligonucleotide
  Antisense strand to SEQ ID NO: 1541102
aauucacucaguuucagau

SEQ ID NO: 1541104 - RNA, 19 nt, Artificial Sequence
  Description of Artificial Sequence: Synthetic oligonucleotide
  Sense strand starting at position 1614 of SEQ ID NO: 1245160
ucugaaacugagugaauua

SEQ ID NO: 1541105 - RNA, 19 nt, Artificial Sequence
  Description of Artificial Sequence: Synthetic oligonucleotide
  Antisense strand to SEQ ID NO: 1541104
uaauucacucaguuucaga

SEQ ID NO: 1541106 - RNA, 19 nt, Artificial Sequence
  Description of Artificial Sequence: Synthetic oligonucleotide
  Sense strand starting at position 1738 of SEQ ID NO: 1245160
agagaucuugcuuaccucu

SEQ ID NO: 1541107 - RNA, 19 nt, Artificial Sequence
  Description of Artificial Sequence: Synthetic oligonucleotide
  Antisense strand to SEQ ID NO: 1541106
agagguaagcaagaucucu

SEQ ID NO: 1541108 - RNA, 19 nt, Artificial Sequence
  Description of Artificial Sequence: Synthetic oligonucleotide
  Sense strand starting at position 2004 of SEQ ID NO: 1245160
gagguagaauguuccagga

SEQ ID NO: 1541109 - RNA, 19 nt, Artificial Sequence
  Description of Artificial Sequence: Synthetic oligonucleotide
  Antisense strand to SEQ ID NO: 1541108
uccuggaacauucuaccuc

SEQ ID NO: 1541110 - RNA, 19 nt, Artificial Sequence
  Description of Artificial Sequence: Synthetic oligonucleotide
  Sense strand starting at position 2024 of SEQ ID NO: 1245160
ggagaugcagaauguacaa

SEQ ID NO: 1541111 - RNA, 19 nt, Artificial Sequence
  Description of Artificial Sequence: Synthetic oligonucleotide
  Antisense strand to SEQ ID NO: 1541110
uuguacauucugcaucucc

SEQ ID NO: 1541112 - RNA, 19 nt, Artificial Sequence
  Description of Artificial Sequence: Synthetic oligonucleotide
  Sense strand starting at position 2059 of SEQ ID NO: 1245160
gggagcaugauaggguaaa

SEQ ID NO: 1541113 - RNA, 19 nt, Artificial Sequence
  Description of Artificial Sequence: Synthetic oligonucleotide
  Antisense strand to SEQ ID NO: 1541112
uuuacccuaucaugcuccc

SEQ ID NO: 1541114 - RNA, 19 nt, Artificial Sequence
  Description of Artificial Sequence: Synthetic oligonucleotide
  Sense strand starting at position 2112 of SEQ ID NO: 1245160
guaaauggcaaaugugaaa

SEQ ID NO: 1541115 - RNA, 19 nt, Artificial Sequence
  Description of Artificial Sequence: Synthetic oligonucleotide
  Antisense strand to SEQ ID NO: 1541114
uuucacauuugccauuuac

SEQ ID NO: 1541116 - RNA, 19 nt, Artificial Sequence
  Description of Artificial Sequence: Synthetic oligonucleotide
  Sense strand starting at position 2154 of SEQ ID NO: 1245160
gggcaugugauguaaacua

SEQ ID NO: 1541117 - RNA, 19 nt, Artificial Sequence
  Description of Artificial Sequence: Synthetic oligonucleotide
  Antisense strand to SEQ ID NO: 1541116
uaguuuacaucacaugccc

SEQ ID NO: 1541118 - RNA, 19 nt, Artificial Sequence
  Description of Artificial Sequence: Synthetic oligonucleotide
  Sense strand starting at position 2291 of SEQ ID NO: 1245160
guagcauauuaguccauuu

SEQ ID NO: 1541119 - RNA, 19 nt, Artificial Sequence
  Description of Artificial Sequence: Synthetic oligonucleotide
  Antisense strand to SEQ ID NO: 1541118
aaauggacuaauaugcuac

SEQ ID NO: 1541120 - RNA, 19 nt, Artificial Sequence
  Description of Artificial Sequence: Synthetic oligonucleotide
  Sense strand starting at position 2739 of SEQ ID NO: 1245160
gguuaugcagggcagaaua

SEQ ID NO: 1541121 - RNA, 19 nt, Artificial Sequence
  Description of Artificial Sequence: Synthetic oligonucleotide
  Antisense strand to SEQ ID NO: 1541120
uauucugcccugcauaacc

SEQ ID NO: 1541122 - RNA, 19 nt, Artificial Sequence
  Description of Artificial Sequence: Synthetic oligonucleotide
  Sense strand starting at position 2751 of SEQ ID NO: 1245160
cagaauagaucgucugaag

SEQ ID NO: 1541123 - RNA, 19 nt, Artificial Sequence
  Description of Artificial Sequence: Synthetic oligonucleotide
  Antisense strand to SEQ ID NO: 1541122
cuucagacgaucuauucug

SEQ ID NO: 1541124 - RNA, 19 nt, Artificial Sequence
  Description of Artificial Sequence: Synthetic oligonucleotide
  Sense strand starting at position 2812 of SEQ ID NO: 1245160
uggcauauuacuggagaaa

SEQ ID NO: 1541125 - RNA, 19 nt, Artificial Sequence
  Description of Artificial Sequence: Synthetic oligonucleotide
  Antisense strand to SEQ ID NO: 1541124
uuucuccaguaauaugcca

SEQ ID NO: 1541126 - RNA, 19 nt, Artificial Sequence
  Description of Artificial Sequence: Synthetic oligonucleotide
  Sense strand starting at position 2832 of SEQ ID NO: 1245160
augacauuagcuuggacua

SEQ ID NO: 1541127 - RNA, 19 nt, Artificial Sequence
  Description of Artificial Sequence: Synthetic oligonucleotide
  Antisense strand to SEQ ID NO: 1541126
uaguccaagcuaaugucau

SEQ ID NO: 1541128 - RNA, 19 nt, Artificial Sequence
  Description of Artificial Sequence: Synthetic oligonucleotide
  Sense strand starting at position 2842 of SEQ ID NO: 1245160
cuuggacuacugugggaau

SEQ ID NO: 1541129 - RNA, 19 nt, Artificial Sequence
  Description of Artificial Sequence: Synthetic oligonucleotide
  Antisense strand to SEQ ID NO: 1541128
auucccacaguaguccaag

SEQ ID NO: 1541130 - RNA, 19 nt, Artificial Sequence
  Description of Artificial Sequence: Synthetic oligonucleotide
  Sense strand starting at position 2910 of SEQ ID NO: 1245160
aucgauaaagguuggauau

SEQ ID NO: 1541131 - RNA, 19 nt, Artificial Sequence
  Description of Artificial Sequence: Synthetic oligonucleotide
  Antisense strand to SEQ ID NO: 1541130
auauccaaccuuuaucgau

SEQ ID NO: 1541132 - RNA, 19 nt, Artificial Sequence
  Description of Artificial Sequence: Synthetic oligonucleotide
  Sense strand starting at position 2911 of SEQ ID NO: 1245160
ucgauaaagguuggauaug

SEQ ID NO: 1541133 - RNA, 19 nt, Artificial Sequence
  Description of Artificial Sequence: Synthetic oligonucleotide
  Antisense strand to SEQ ID NO: 1541132
cauauccaaccuuuaucga

SEQ ID NO: 1541134 - RNA, 19 nt, Artificial Sequence
  Description of Artificial Sequence: Synthetic oligonucleotide
  Sense strand starting at position 3157 of SEQ ID NO: 1245160
cugagaguacuguauggau

SEQ ID NO: 1541135 - RNA, 19 nt, Artificial Sequence
  Description of Artificial Sequence: Synthetic oligonucleotide
  Antisense strand to SEQ ID NO: 1541134
auccauacaguacucucag

SEQ ID NO: 1541136 - RNA, 19 nt, Artificial Sequence
  Description of Artificial Sequence: Synthetic oligonucleotide
  Sense strand starting at position 3159 of SEQ ID NO: 1245160
gagaguacuguauggauug

SEQ ID NO: 1541137 - RNA, 19 nt, Artificial Sequence
  Description of Artificial Sequence: Synthetic oligonucleotide
  Antisense strand to SEQ ID NO: 1541136
caauccauacaguacucuc

SEQ ID NO: 1541138 - RNA, 19 nt, Artificial Sequence
  Description of Artificial Sequence: Synthetic oligonucleotide
  Sense strand starting at position 3164 of SEQ ID NO: 1245160
uacuguauggauuggacau

SEQ ID NO: 1541139 - RNA, 19 nt, Artificial Sequence
  Description of Artificial Sequence: Synthetic oligonucleotide
  Antisense strand to SEQ ID NO: 1541138
auguccaauccauacagua

SEQ ID NO: 1541140 - RNA, 19 nt, Artificial Sequence
  Description of Artificial Sequence: Synthetic oligonucleotide
  Sense strand starting at position 3170 of SEQ ID NO: 1245160
auggauuggacaugugacu

SEQ ID NO: 1541141 - RNA, 19 nt, Artificial Sequence
  Description of Artificial Sequence: Synthetic oligonucleotide
  Antisense strand to SEQ ID NO: 1541140
agucacauguccaauccau

SEQ ID NO: 1541142 - RNA, 19 nt, Artificial Sequence
  Description of Artificial Sequence: Synthetic oligonucleotide
  Sense strand starting at position 3263 of SEQ ID NO: 1245160
acaugucuggcccaaauua

SEQ ID NO: 1541143 - RNA, 19 nt, Artificial Sequence
  Description of Artificial Sequence: Synthetic oligonucleotide
  Antisense strand to SEQ ID NO: 1541142
uaauuugggccagacaugu

SEQ ID NO: 1541144 - RNA, 19 nt, Artificial Sequence
  Description of Artificial Sequence: Synthetic oligonucleotide
  Sense strand starting at position 3333 of SEQ ID NO: 1245160
guauauuagugagcuauuu

SEQ ID NO: 1541145 - RNA, 19 nt, Artificial Sequence
  Description of Artificial Sequence: Synthetic oligonucleotide
  Antisense strand to SEQ ID NO: 1541144
aaauagcucacuaauauac

SEQ ID NO: 1541146 - RNA, 19 nt, Artificial Sequence
  Description of Artificial Sequence: Synthetic oligonucleotide
  Sense strand starting at position 3380 of SEQ ID NO: 1245160
uaguucuuccagggaaauu

SEQ ID NO: 1541147 - RNA, 19 nt, Artificial Sequence
  Description of Artificial Sequence: Synthetic oligonucleotide
  Antisense strand to SEQ ID NO: 1541146
aauuucccuggaagaacua

SEQ ID NO: 1541148 - RNA, 19 nt, Artificial Sequence
  Description of Artificial Sequence: Synthetic oligonucleotide
  Sense strand starting at position 3517 of SEQ ID NO: 1245160
ugaauaugacaugggucuu

SEQ ID NO: 1541149 - RNA, 19 nt, Artificial Sequence
  Description of Artificial Sequence: Synthetic oligonucleotide
  Antisense strand to SEQ ID NO: 1541148
aagacccaugucauauuca

SEQ ID NO: 1541150 - RNA, 19 nt, Artificial Sequence
  Description of Artificial Sequence: Synthetic oligonucleotide
  Sense strand starting at position 3529 of SEQ ID NO: 1245160
gggucuugcucacuaauuu

SEQ ID NO: 1541151 - RNA, 19 nt, Artificial Sequence
  Description of Artificial Sequence: Synthetic oligonucleotide
  Antisense strand to SEQ ID NO: 1541150
aaauuagugagcaagaccc

SEQ ID NO: 1541152 - RNA, 19 nt, Artificial Sequence
  Description of Artificial Sequence: Synthetic oligonucleotide
  Sense strand starting at position 3599 of SEQ ID NO: 1245160
guccauaugcaggacucaa

SEQ ID NO: 1541153 - RNA, 19 nt, Artificial Sequence
  Description of Artificial Sequence: Synthetic oligonucleotide
  Antisense strand to SEQ ID NO: 1541152
uugaguccugcauauggac

SEQ ID NO: 1541154 - RNA, 19 nt, Artificial Sequence
  Description of Artificial Sequence: Synthetic oligonucleotide
  Sense strand starting at position 3648 of SEQ ID NO: 1245160
agagcuugcagucauagaa

SEQ ID NO: 1541155 - RNA, 19 nt, Artificial Sequence
  Description of Artificial Sequence: Synthetic oligonucleotide
  Antisense strand to SEQ ID NO: 1541154
uucuaugacugcaagcucu

SEQ ID NO: 1541156 - RNA, 19 nt, Artificial Sequence
  Description of Artificial Sequence: Synthetic oligonucleotide
  Sense strand starting at position 3841 of SEQ ID NO: 1245160
ugacauuucugagaacaag

SEQ ID NO: 1541157 - RNA, 19 nt, Artificial Sequence
  Description of Artificial Sequence: Synthetic oligonucleotide
  Antisense strand to SEQ ID NO: 1541156
cuuguucucagaaauguca

SEQ ID NO: 1541158 - RNA, 19 nt, Artificial Sequence
  Description of Artificial Sequence: Synthetic oligonucleotide
  Sense strand starting at position 3849 of SEQ ID NO: 1245160
cugagaacaaguugaguau

SEQ ID NO: 1541159 - RNA, 19 nt, Artificial Sequence
  Description of Artificial Sequence: Synthetic oligonucleotide
  Antisense strand to SEQ ID NO: 1541158
auacucaacuuguucucag

SEQ ID NO: 1541160 - RNA, 19 nt, Artificial Sequence
  Description of Artificial Sequence: Synthetic oligonucleotide
  Sense strand starting at position 3855 of SEQ ID NO: 1245160
acaaguugaguauaaguca

SEQ ID NO: 1541161 - RNA, 19 nt, Artificial Sequence
  Description of Artificial Sequence: Synthetic oligonucleotide
  Antisense strand to SEQ ID NO: 1541160
ugacuuauacucaacuugu

SEQ ID NO: 1541162 - RNA, 19 nt, Artificial Sequence
  Description of Artificial Sequence: Synthetic oligonucleotide
  Sense strand starting at position 3924 of SEQ ID NO: 1245160
cucagacuccugcaaauug

SEQ ID NO: 1541163 - RNA, 19 nt, Artificial Sequence
  Description of Artificial Sequence: Synthetic oligonucleotide
  Antisense strand to SEQ ID NO: 1541162
caauuugcaggagucugag

SEQ ID NO: 1541164 - RNA, 19 nt, Artificial Sequence
  Description of Artificial Sequence: Synthetic oligonucleotide
  Sense strand starting at position 163 of SEQ ID NO: 1245161
acuauauaugcccagcaga

SEQ ID NO: 1541165 - RNA, 19 nt, Artificial Sequence
  Description of Artificial Sequence: Synthetic oligonucleotide
  Antisense strand to SEQ ID NO: 1541164
ucugcugggcauauauagu

SEQ ID NO: 1541166 - RNA, 19 nt, Artificial Sequence
  Description of Artificial Sequence: Synthetic oligonucleotide
  Sense strand starting at position 190 of SEQ ID NO: 1245161
augcaaucuccugauacgu

SEQ ID NO: 1541167 - RNA, 19 nt, Artificial Sequence
  Description of Artificial Sequence: Synthetic oligonucleotide
  Antisense strand to SEQ ID NO: 1541166
acguaucaggagauugcau

SEQ ID NO: 1541168 - RNA, 19 nt, Artificial Sequence
  Description of Artificial Sequence: Synthetic oligonucleotide
  Sense strand starting at position 199 of SEQ ID NO: 1245161
ccugauacguagucauaga

SEQ ID NO: 1541169 - RNA, 19 nt, Artificial Sequence
  Description of Artificial Sequence: Synthetic oligonucleotide
  Antisense strand to SEQ ID NO: 1541168
ucuaugacuacguaucagg

SEQ ID NO: 1541170 - RNA, 19 nt, Artificial Sequence
  Description of Artificial Sequence: Synthetic oligonucleotide
  Sense strand starting at position 200 of SEQ ID NO: 1245161
cugauacguagucauagag

SEQ ID NO: 1541171 - RNA, 19 nt, Artificial Sequence
  Description of Artificial Sequence: Synthetic oligonucleotide
  Antisense strand to SEQ ID NO: 1541170
cucuaugacuacguaucag

SEQ ID NO: 1541172 - RNA, 19 nt, Artificial Sequence
  Description of Artificial Sequence: Synthetic oligonucleotide
  Sense strand starting at position 215 of SEQ ID NO: 1245161
agaguaauuucguccaagu

SEQ ID NO: 1541173 - RNA, 19 nt, Artificial Sequence
  Description of Artificial Sequence: Synthetic oligonucleotide
  Antisense strand to SEQ ID NO: 1541172
acuuggacgaaauuacucu

SEQ ID NO: 1541174 - RNA, 19 nt, Artificial Sequence
  Description of Artificial Sequence: Synthetic oligonucleotide
  Sense strand starting at position 252 of SEQ ID NO: 1245161
caccucagguguccugaua

SEQ ID NO: 1541175 - RNA, 19 nt, Artificial Sequence
  Description of Artificial Sequence: Synthetic oligonucleotide
  Antisense strand to SEQ ID NO: 1541174
uaucaggacaccugaggug

SEQ ID NO: 1541176 - RNA, 19 nt, Artificial Sequence
  Description of Artificial Sequence: Synthetic oligonucleotide
  Sense strand starting at position 263 of SEQ ID NO: 1245161
uccugauagguccguauga

SEQ ID NO: 1541177 - RNA, 19 nt, Artificial Sequence
  Description of Artificial Sequence: Synthetic oligonucleotide
  Antisense strand to SEQ ID NO: 1541176
ucauacggaccuaucagga

SEQ ID NO: 1541178 - RNA, 19 nt, Artificial Sequence
  Description of Artificial Sequence: Synthetic oligonucleotide
  Sense strand starting at position 264 of SEQ ID NO: 1245161
ccugauagguccguaugac

SEQ ID NO: 1541179 - RNA, 19 nt, Artificial Sequence
  Description of Artificial Sequence: Synthetic oligonucleotide
  Antisense strand to SEQ ID NO: 1541178
gucauacggaccuaucagg

SEQ ID NO: 1541180 - RNA, 19 nt, Artificial Sequence
  Description of Artificial Sequence: Synthetic oligonucleotide
  Sense strand starting at position 265 of SEQ ID NO: 1245161
cugauagguccguaugacu

SEQ ID NO: 1541181 - RNA, 19 nt, Artificial Sequence
  Description of Artificial Sequence: Synthetic oligonucleotide
  Antisense strand to SEQ ID NO: 1541180
agucauacggaccuaucag

SEQ ID NO: 1541182 - RNA, 19 nt, Artificial Sequence
  Description of Artificial Sequence: Synthetic oligonucleotide
  Sense strand starting at position 389 of SEQ ID NO: 1245161
uugcuaucagaguaccaau

SEQ ID NO: 1541183 - RNA, 19 nt, Artificial Sequence
  Description of Artificial Sequence: Synthetic oligonucleotide
  Antisense strand to SEQ ID NO: 1541182
auugguacucugauagcaa

SEQ ID NO: 1541184 - RNA, 19 nt, Artificial Sequence
  Description of Artificial Sequence: Synthetic oligonucleotide
  Sense strand starting at position 868 of SEQ ID NO: 1245161
acaaguagucuacaguaaa

SEQ ID NO: 1541185 - RNA, 19 nt, Artificial Sequence
  Description of Artificial Sequence: Synthetic oligonucleotide
  Antisense strand to SEQ ID NO: 1541184
uuuacuguagacuacuugu

SEQ ID NO: 1541186 - RNA, 19 nt, Artificial Sequence
  Description of Artificial Sequence: Synthetic oligonucleotide
  Sense strand starting at position 871 of SEQ ID NO: 1245161
aguagucuacaguaaauua

SEQ ID NO: 1541187 - RNA, 19 nt, Artificial Sequence
  Description of Artificial Sequence: Synthetic oligonucleotide
  Antisense strand to SEQ ID NO: 1541186
uaauuuacuguagacuacu

SEQ ID NO: 1541188 - RNA, 19 nt, Artificial Sequence
  Description of Artificial Sequence: Synthetic oligonucleotide
  Sense strand starting at position 879 of SEQ ID NO: 1245161
acaguaaauuaauccugua

SEQ ID NO: 1541189 - RNA, 19 nt, Artificial Sequence
  Description of Artificial Sequence: Synthetic oligonucleotide
  Antisense strand to SEQ ID NO: 1541188
uacaggauuaauuuacugu

SEQ ID NO: 1541190 - RNA, 19 nt, Artificial Sequence
  Description of Artificial Sequence: Synthetic oligonucleotide
  Sense strand starting at position 891 of SEQ ID NO: 1245161
uccuguauacuuuaguguu

SEQ ID NO: 1541191 - RNA, 19 nt, Artificial Sequence
  Description of Artificial Sequence: Synthetic oligonucleotide
  Antisense strand to SEQ ID NO: 1541190
aacacuaaaguauacagga

SEQ ID NO: 1541192 - RNA, 19 nt, Artificial Sequence
  Description of Artificial Sequence: Synthetic oligonucleotide
  Sense strand starting at position 1180 of SEQ ID NO: 1245161
acuguaauggcucgaugag

SEQ ID NO: 1541193 - RNA, 19 nt, Artificial Sequence
  Description of Artificial Sequence: Synthetic oligonucleotide
  Antisense strand to SEQ ID NO: 1541192
cucaucgagccauuacagu

SEQ ID NO: 1541194 - RNA, 19 nt, Artificial Sequence
  Description of Artificial Sequence: Synthetic oligonucleotide
  Sense strand starting at position 1181 of SEQ ID NO: 1245161
cuguaauggcucgaugaga

SEQ ID NO: 1541195 - RNA, 19 nt, Artificial Sequence
  Description of Artificial Sequence: Synthetic oligonucleotide
  Antisense strand to SEQ ID NO: 1541194
ucucaucgagccauuacag

SEQ ID NO: 1541196 - RNA, 19 nt, Artificial Sequence
  Description of Artificial Sequence: Synthetic oligonucleotide
  Sense strand starting at position 1194 of SEQ ID NO: 1245161
augagaauaugacaaagaa

SEQ ID NO: 1541197 - RNA, 19 nt, Artificial Sequence
  Description of Artificial Sequence: Synthetic oligonucleotide
  Antisense strand to SEQ ID NO: 1541196
uucuuugucauauucucau

SEQ ID NO: 1541198 - RNA, 19 nt, Artificial Sequence
  Description of Artificial Sequence: Synthetic oligonucleotide
  Sense strand starting at position 1269 of SEQ ID NO: 1245161
ccucacuugucuuuaggga

SEQ ID NO: 1541199 - RNA, 19 nt, Artificial Sequence
  Description of Artificial Sequence: Synthetic oligonucleotide
  Antisense strand to SEQ ID NO: 1541198
ucccuaaagacaagugagg

SEQ ID NO: 1541200 - RNA, 19 nt, Artificial Sequence
  Description of Artificial Sequence: Synthetic oligonucleotide
  Sense strand starting at position 1355 of SEQ ID NO: 1245161
agagaacaauccguucuuu

SEQ ID NO: 1541201 - RNA, 19 nt, Artificial Sequence
  Description of Artificial Sequence: Synthetic oligonucleotide
  Antisense strand to SEQ ID NO: 1541200
aaagaacggauuguucucu

SEQ ID NO: 1541202 - RNA, 19 nt, Artificial Sequence
  Description of Artificial Sequence: Synthetic oligonucleotide
  Sense strand starting at position 1444 of SEQ ID NO: 1245161
uaauaaugcgaacgcauua

SEQ ID NO: 1541203 - RNA, 19 nt, Artificial Sequence
  Description of Artificial Sequence: Synthetic oligonucleotide
  Antisense strand to SEQ ID NO: 1541202
uaaugcguucgcauuauua

SEQ ID NO: 1541204 - RNA, 19 nt, Artificial Sequence
  Description of Artificial Sequence: Synthetic oligonucleotide
  Sense strand starting at position 1449 of SEQ ID NO: 1245161
augcgaacgcauuauuaga

SEQ ID NO: 1541205 - RNA, 19 nt, Artificial Sequence
  Description of Artificial Sequence: Synthetic oligonucleotide
  Antisense strand to SEQ ID NO: 1541204
ucuaauaaugcguucgcau

SEQ ID NO: 1541206 - RNA, 19 nt, Artificial Sequence
  Description of Artificial Sequence: Synthetic oligonucleotide
  Sense strand starting at position 1456 of SEQ ID NO: 1245161
cgcauuauuagaccgugca

SEQ ID NO: 1541207 - RNA, 19 nt, Artificial Sequence
  Description of Artificial Sequence: Synthetic oligonucleotide
  Antisense strand to SEQ ID NO: 1541206
ugcacggucuaauaaugcg

SEQ ID NO: 1541208 - RNA, 19 nt, Artificial Sequence
  Description of Artificial Sequence: Synthetic oligonucleotide
  Sense strand starting at position 1466 of SEQ ID NO: 1245161
gaccgugcauggucugaaa

SEQ ID NO: 1541209 - RNA, 19 nt, Artificial Sequence
  Description of Artificial Sequence: Synthetic oligonucleotide
  Antisense strand to SEQ ID NO: 1541208
uuucagaccaugcacgguc

SEQ ID NO: 1541210 - RNA, 19 nt, Artificial Sequence
  Description of Artificial Sequence: Synthetic oligonucleotide
  Sense strand starting at position 1486 of SEQ ID NO: 1245161
aagcaauugucccucgauc

SEQ ID NO: 1541211 - RNA, 19 nt, Artificial Sequence
  Description of Artificial Sequence: Synthetic oligonucleotide
  Antisense strand to SEQ ID NO: 1541210
gaucgagggacaauugcuu

SEQ ID NO: 1541212 - RNA, 19 nt, Artificial Sequence
  Description of Artificial Sequence: Synthetic oligonucleotide
  Sense strand starting at position 1606 of SEQ ID NO: 1245161
cggguuuggcuucauaagu

SEQ ID NO: 1541213 - RNA, 19 nt, Artificial Sequence
  Description of Artificial Sequence: Synthetic oligonucleotide
  Antisense strand to SEQ ID NO: 1541212
acuuaugaagccaaacccg

SEQ ID NO: 1541214 - RNA, 19 nt, Artificial Sequence
  Description of Artificial Sequence: Synthetic oligonucleotide
  Sense strand starting at position 2144 of SEQ ID NO: 1245161
ccgccuuccgcgguauaau

SEQ ID NO: 1541215 - RNA, 19 nt, Artificial Sequence
  Description of Artificial Sequence: Synthetic oligonucleotide
  Antisense strand to SEQ ID NO: 1541214
auuauaccgcggaaggcgg

SEQ ID NO: 1541216 - RNA, 19 nt, Artificial Sequence
  Description of Artificial Sequence: Synthetic oligonucleotide
  Sense strand starting at position 2231 of SEQ ID NO: 1245161
uugaaucacuugucguuaa

SEQ ID NO: 1541217 - RNA, 19 nt, Artificial Sequence
  Description of Artificial Sequence: Synthetic oligonucleotide
  Antisense strand to SEQ ID NO: 1541216
uuaacgacaagugauucaa

SEQ ID NO: 1541218 - RNA, 19 nt, Artificial Sequence
  Description of Artificial Sequence: Synthetic oligonucleotide
  Sense strand starting at position 2258 of SEQ ID NO: 1245161
acuugaaacguuugguucu

SEQ ID NO: 1541219 - RNA, 19 nt, Artificial Sequence
  Description of Artificial Sequence: Synthetic oligonucleotide
  Antisense strand to SEQ ID NO: 1541218
agaaccaaacguuucaagu

SEQ ID NO: 1541220 - RNA, 19 nt, Artificial Sequence
  Description of Artificial Sequence: Synthetic oligonucleotide
  Sense strand starting at position 2275 of SEQ ID NO: 1245161
cuugcuuagcaagauguuu

SEQ ID NO: 1541221 - RNA, 19 nt, Artificial Sequence
  Description of Artificial Sequence: Synthetic oligonucleotide
  Antisense strand to SEQ ID NO: 1541220
aaacaucuugcuaagcaag

SEQ ID NO: 1541222 - RNA, 19 nt, Artificial Sequence
  Description of Artificial Sequence: Synthetic oligonucleotide
  Sense strand starting at position 2294 of SEQ ID NO: 1245161
guguuucuuccacauugau

SEQ ID NO: 1541223 - RNA, 19 nt, Artificial Sequence
  Description of Artificial Sequence: Synthetic oligonucleotide
  Antisense strand to SEQ ID NO: 1541222
aucaauguggaagaaacac

SEQ ID NO: 1541224 - RNA, 19 nt, Artificial Sequence
  Description of Artificial Sequence: Synthetic oligonucleotide
  Sense strand starting at position 2344 of SEQ ID NO: 1245161
gcaauaugagcugaggcaa

SEQ ID NO: 1541225 - RNA, 19 nt, Artificial Sequence
  Description of Artificial Sequence: Synthetic oligonucleotide
  Antisense strand to SEQ ID NO: 1541224
uugccucagcucauauugc

SEQ ID NO: 1541226 - RNA, 19 nt, Artificial Sequence
  Description of Artificial Sequence: Synthetic oligonucleotide
  Sense strand starting at position 2357 of SEQ ID NO: 1245161
aggcaaucuuaacuugauc

SEQ ID NO: 1541227 - RNA, 19 nt, Artificial Sequence
  Description of Artificial Sequence: Synthetic oligonucleotide
  Antisense strand to SEQ ID NO: 1541226
gaucaaguuaagauugccu

SEQ ID NO: 1541228 - RNA, 19 nt, Artificial Sequence
  Description of Artificial Sequence: Synthetic oligonucleotide
  Sense strand starting at position 2362 of SEQ ID NO: 1245161
aucuuaacuugauccguua

SEQ ID NO: 1541229 - RNA, 19 nt, Artificial Sequence
  Description of Artificial Sequence: Synthetic oligonucleotide
  Antisense strand to SEQ ID NO: 1541228
uaacggaucaaguuaagau

SEQ ID NO: 1541230 - RNA, 19 nt, Artificial Sequence
  Description of Artificial Sequence: Synthetic oligonucleotide
  Sense strand starting at position 2725 of SEQ ID NO: 1245161
gauggagucucuguuguuc

SEQ ID NO: 1541231 - RNA, 19 nt, Artificial Sequence
  Description of Artificial Sequence: Synthetic oligonucleotide
  Antisense strand to SEQ ID NO: 1541230
gaacaacagagacuccauc

SEQ ID NO: 1541232 - RNA, 19 nt, Artificial Sequence
  Description of Artificial Sequence: Synthetic oligonucleotide
  Sense strand starting at position 3030 of SEQ ID NO: 1245161
aguguuucucugucgcuua

SEQ ID NO: 1541233 - RNA, 19 nt, Artificial Sequence
  Description of Artificial Sequence: Synthetic oligonucleotide
  Antisense strand to SEQ ID NO: 1541232
uaagcgacagagaaacacu

SEQ ID NO: 1541234 - RNA, 19 nt, Artificial Sequence
  Description of Artificial Sequence: Synthetic oligonucleotide
  Sense strand starting at position 3057 of SEQ ID NO: 1245161
ugcagagugacaugaucuu

SEQ ID NO: 1541235 - RNA, 19 nt, Artificial Sequence
  Description of Artificial Sequence: Synthetic oligonucleotide
  Antisense strand to SEQ ID NO: 1541234
aagaucaugucacucugca

SEQ ID NO: 1541236 - RNA, 19 nt, Artificial Sequence
  Description of Artificial Sequence: Synthetic oligonucleotide
  Sense strand starting at position 3162 of SEQ ID NO: 1245161
gcuagcaugcagggauaau

SEQ ID NO: 1541237 - RNA, 19 nt, Artificial Sequence
  Description of Artificial Sequence: Synthetic oligonucleotide
  Antisense strand to SEQ ID NO: 1541236
auuaucccugcaugcuagc

SEQ ID NO: 1541238 - RNA, 19 nt, Artificial Sequence
  Description of Artificial Sequence: Synthetic oligonucleotide
  Sense strand starting at position 3163 of SEQ ID NO: 1245161
cuagcaugcagggauaauu

SEQ ID NO: 1541239 - RNA, 19 nt, Artificial Sequence
  Description of Artificial Sequence: Synthetic oligonucleotide
  Antisense strand to SEQ ID NO: 1541238
aauuaucccugcaugcuag

SEQ ID NO: 1541240 - RNA, 19 nt, Artificial Sequence
  Description of Artificial Sequence: Synthetic oligonucleotide
  Sense strand starting at position 3419 of SEQ ID NO: 1245161
gaguauaguggugaucaca

SEQ ID NO: 1541241 - RNA, 19 nt, Artificial Sequence
  Description of Artificial Sequence: Synthetic oligonucleotide
  Antisense strand to SEQ ID NO: 1541240
ugugaucaccacuauacuc

SEQ ID NO: 1541242 - RNA, 19 nt, Artificial Sequence
  Description of Artificial Sequence: Synthetic oligonucleotide
  Sense strand starting at position 3422 of SEQ ID NO: 1245161
uauaguggugaucacaguu

SEQ ID NO: 1541243 - RNA, 19 nt, Artificial Sequence
  Description of Artificial Sequence: Synthetic oligonucleotide
  Antisense strand to SEQ ID NO: 1541242
aacugugaucaccacuaua

SEQ ID NO: 1541244 - RNA, 19 nt, Artificial Sequence
  Description of Artificial Sequence: Synthetic oligonucleotide
  Sense strand starting at position 65 of SEQ ID NO: 1245162
gaggacaucugggcuugaa

SEQ ID NO: 1541245 - RNA, 19 nt, Artificial Sequence
  Description of Artificial Sequence: Synthetic oligonucleotide
  Antisense strand to SEQ ID NO: 1541244
uucaagcccagauguccuc

SEQ ID NO: 1541246 - RNA, 19 nt, Artificial Sequence
  Description of Artificial Sequence: Synthetic oligonucleotide
  Sense strand starting at position 68 of SEQ ID NO: 1245162
gacaucugggcuugaauau

SEQ ID NO: 1541247 - RNA, 19 nt, Artificial Sequence
  Description of Artificial Sequence: Synthetic oligonucleotide
  Antisense strand to SEQ ID NO: 1541246
auauucaagcccagauguc

SEQ ID NO: 1541248 - RNA, 19 nt, Artificial Sequence
  Description of Artificial Sequence: Synthetic oligonucleotide
  Sense strand starting at position 135 of SEQ ID NO: 1245162
cccagccauccuuaugagu

SEQ ID NO: 1541249 - RNA, 19 nt, Artificial Sequence
  Description of Artificial Sequence: Synthetic oligonucleotide
  Antisense strand to SEQ ID NO: 1541248
acucauaaggauggcuggg

SEQ ID NO: 1541250 - RNA, 19 nt, Artificial Sequence
  Description of Artificial Sequence: Synthetic oligonucleotide
  Sense strand starting at position 177 of SEQ ID NO: 1245162
acaccaaauuaugucaguu

SEQ ID NO: 1541251 - RNA, 19 nt, Artificial Sequence
  Description of Artificial Sequence: Synthetic oligonucleotide
  Antisense strand to SEQ ID NO: 1541250
aacugacauaauuuggugu

SEQ ID NO: 1541252 - RNA, 19 nt, Artificial Sequence
  Description of Artificial Sequence: Synthetic oligonucleotide
  Sense strand starting at position 404 of SEQ ID NO: 1245162
uuuauagccuggguauaca

SEQ ID NO: 1541253 - RNA, 19 nt, Artificial Sequence
  Description of Artificial Sequence: Synthetic oligonucleotide
  Antisense strand to SEQ ID NO: 1541252
uguauacccaggcuauaaa

SEQ ID NO: 1541254 - RNA, 19 nt, Artificial Sequence
  Description of Artificial Sequence: Synthetic oligonucleotide
  Sense strand starting at position 414 of SEQ ID NO: 1245162
ggguauacaucuccacuca

SEQ ID NO: 1541255 - RNA, 19 nt, Artificial Sequence
  Description of Artificial Sequence: Synthetic oligonucleotide
  Antisense strand to SEQ ID NO: 1541254
ugaguggagauguauaccc

SEQ ID NO: 1541256 - RNA, 19 nt, Artificial Sequence
  Description of Artificial Sequence: Synthetic oligonucleotide
  Sense strand starting at position 559 of SEQ ID NO: 1245162
uugugaauugugucccgcu

SEQ ID NO: 1541257 - RNA, 19 nt, Artificial Sequence
  Description of Artificial Sequence: Synthetic oligonucleotide
  Antisense strand to SEQ ID NO: 1541256
agcgggacacaauucacaa

SEQ ID NO: 1541258 - RNA, 19 nt, Artificial Sequence
  Description of Artificial Sequence: Synthetic oligonucleotide
  Sense strand starting at position 561 of SEQ ID NO: 1245162
gugaauugugucccgcuca

SEQ ID NO: 1541259 - RNA, 19 nt, Artificial Sequence
  Description of Artificial Sequence: Synthetic oligonucleotide
  Antisense strand to SEQ ID NO: 1541258
ugagcgggacacaauucac

SEQ ID NO: 1541260 - RNA, 19 nt, Artificial Sequence
  Description of Artificial Sequence: Synthetic oligonucleotide
  Sense strand starting at position 580 of SEQ ID NO: 1245162
gagaaagguuggguuaugu

SEQ ID NO: 1541261 - RNA, 19 nt, Artificial Sequence
  Description of Artificial Sequence: Synthetic oligonucleotide
  Antisense strand to SEQ ID NO: 1541260
acauaacccaaccuuucuc

SEQ ID NO: 1541262 - RNA, 19 nt, Artificial Sequence
  Description of Artificial Sequence: Synthetic oligonucleotide
  Sense strand starting at position 639 of SEQ ID NO: 1245162
uggauauaucaagggcuac

SEQ ID NO: 1541263 - RNA, 19 nt, Artificial Sequence
  Description of Artificial Sequence: Synthetic oligonucleotide
  Antisense strand to SEQ ID NO: 1541262
guagcccuugauauaucca

SEQ ID NO: 1541264 - RNA, 19 nt, Artificial Sequence
  Description of Artificial Sequence: Synthetic oligonucleotide
  Sense strand starting at position 640 of SEQ ID NO: 1245162
ggauauaucaagggcuaca

SEQ ID NO: 1541265 - RNA, 19 nt, Artificial Sequence
  Description of Artificial Sequence: Synthetic oligonucleotide
  Antisense strand to SEQ ID NO: 1541264
uguagcccuugauauaucc

SEQ ID NO: 1541266 - RNA, 19 nt, Artificial Sequence
  Description of Artificial Sequence: Synthetic oligonucleotide
  Sense strand starting at position 686 of SEQ ID NO: 1245162
guucuaaagcauuaguaua

SEQ ID NO: 1541267 - RNA, 19 nt, Artificial Sequence
  Description of Artificial Sequence: Synthetic oligonucleotide
  Antisense strand to SEQ ID NO: 1541266
uauacuaaugcuuuagaac

SEQ ID NO: 1541268 - RNA, 19 nt, Artificial Sequence
  Description of Artificial Sequence: Synthetic oligonucleotide
  Sense strand starting at position 699 of SEQ ID NO: 1245162
aguauaacuugaggauuug

SEQ ID NO: 1541269 - RNA, 19 nt, Artificial Sequence
  Description of Artificial Sequence: Synthetic oligonucleotide
  Antisense strand to SEQ ID NO: 1541268
caaauccucaaguuauacu

SEQ ID NO: 1541270 - RNA, 19 nt, Artificial Sequence
  Description of Artificial Sequence: Synthetic oligonucleotide
  Sense strand starting at position 866 of SEQ ID NO: 1245162
uucccuauaugguuccaga

SEQ ID NO: 1541271 - RNA, 19 nt, Artificial Sequence
  Description of Artificial Sequence: Synthetic oligonucleotide
  Antisense strand to SEQ ID NO: 1541270
ucuggaaccauauagggaa

SEQ ID NO: 1541272 - RNA, 19 nt, Artificial Sequence
  Description of Artificial Sequence: Synthetic oligonucleotide
  Sense strand starting at position 909 of SEQ ID NO: 1245162
ucaauaaaugacgguauua

SEQ ID NO: 1541273 - RNA, 19 nt, Artificial Sequence
  Description of Artificial Sequence: Synthetic oligonucleotide
  Antisense strand to SEQ ID NO: 1541272
uaauaccgucauuuauuga

SEQ ID NO: 1541274 - RNA, 19 nt, Artificial Sequence
  Description of Artificial Sequence: Synthetic oligonucleotide
  Sense strand starting at position 967 of SEQ ID NO: 1245162
cgcugaccucuggauaaag

SEQ ID NO: 1541275 - RNA, 19 nt, Artificial Sequence
  Description of Artificial Sequence: Synthetic oligonucleotide
  Antisense strand to SEQ ID NO: 1541274
cuuuauccagaggucagcg

SEQ ID NO: 1541276 - RNA, 19 nt, Artificial Sequence
  Description of Artificial Sequence: Synthetic oligonucleotide
  Sense strand starting at position 1078 of SEQ ID NO: 1245162
ggccaagagcucuacacuu

SEQ ID NO: 1541277 - RNA, 19 nt, Artificial Sequence
  Description of Artificial Sequence: Synthetic oligonucleotide
  Antisense strand to SEQ ID NO: 1541276
aaguguagagcucuuggcc

SEQ ID NO: 1541278 - RNA, 19 nt, Artificial Sequence
  Description of Artificial Sequence: Synthetic oligonucleotide
  Sense strand starting at position 1173 of SEQ ID NO: 1245162
agcccucagucucugauaa

SEQ ID NO: 1541279 - RNA, 19 nt, Artificial Sequence
  Description of Artificial Sequence: Synthetic oligonucleotide
  Antisense strand to SEQ ID NO: 1541278
uuaucagagacugagggcu

SEQ ID NO: 1541280 - RNA, 19 nt, Artificial Sequence
  Description of Artificial Sequence: Synthetic oligonucleotide
  Sense strand starting at position 1362 of SEQ ID NO: 1245162
uggguuauuuaggcguuca

SEQ ID NO: 1541281 - RNA, 19 nt, Artificial Sequence
  Description of Artificial Sequence: Synthetic oligonucleotide
  Antisense strand to SEQ ID NO: 1541280
ugaacgccuaaauaaccca

SEQ ID NO: 1541282 - RNA, 19 nt, Artificial Sequence
  Description of Artificial Sequence: Synthetic oligonucleotide
  Sense strand starting at position 1790 of SEQ ID NO: 1245162
cuaguaguucccgaacccu

SEQ ID NO: 1541283 - RNA, 19 nt, Artificial Sequence
  Description of Artificial Sequence: Synthetic oligonucleotide
  Antisense strand to SEQ ID NO: 1541282
aggguucgggaacuacuag

SEQ ID NO: 1541284 - RNA, 19 nt, Artificial Sequence
  Description of Artificial Sequence: Synthetic oligonucleotide
  Sense strand starting at position 2309 of SEQ ID NO: 1245162
acucucgagguuuaacuaa

SEQ ID NO: 1541285 - RNA, 19 nt, Artificial Sequence
  Description of Artificial Sequence: Synthetic oligonucleotide
  Antisense strand to SEQ ID NO: 1541284
uuaguuaaaccucgagagu

SEQ ID NO: 1541286 - RNA, 19 nt, Artificial Sequence
  Description of Artificial Sequence: Synthetic oligonucleotide
  Sense strand starting at position 2330 of SEQ ID NO: 1245162
agucauacuuuacuagaca

SEQ ID NO: 1541287 - RNA, 19 nt, Artificial Sequence
  Description of Artificial Sequence: Synthetic oligonucleotide
  Antisense strand to SEQ ID NO: 1541286
ugucuaguaaaguaugacu

SEQ ID NO: 1541288 - RNA, 19 nt, Artificial Sequence
  Description of Artificial Sequence: Synthetic oligonucleotide
  Sense strand starting at position 2456 of SEQ ID NO: 1245162
cucuucucucccgauuaga

SEQ ID NO: 1541289 - RNA, 19 nt, Artificial Sequence
  Description of Artificial Sequence: Synthetic oligonucleotide
  Antisense strand to SEQ ID NO: 1541288
ucuaaucgggagagaagag

SEQ ID NO: 1541290 - RNA, 19 nt, Artificial Sequence
  Description of Artificial Sequence: Synthetic oligonucleotide
  Sense strand starting at position 2583 of SEQ ID NO: 1245162
ccucuugauccagguaagu

SEQ ID NO: 1541291 - RNA, 19 nt, Artificial Sequence
  Description of Artificial Sequence: Synthetic oligonucleotide
  Antisense strand to SEQ ID NO: 1541290
acuuaccuggaucaagagg

SEQ ID NO: 1541292 - RNA, 19 nt, Artificial Sequence
  Description of Artificial Sequence: Synthetic oligonucleotide
  Sense strand starting at position 2596 of SEQ ID NO: 1245162
guaaguuauguggaccuga

SEQ ID NO: 1541293 - RNA, 19 nt, Artificial Sequence
  Description of Artificial Sequence: Synthetic oligonucleotide
  Antisense strand to SEQ ID NO: 1541292
ucagguccacauaacuuac

SEQ ID NO: 1541294 - RNA, 19 nt, Artificial Sequence
  Description of Artificial Sequence: Synthetic oligonucleotide
  Sense strand starting at position 2696 of SEQ ID NO: 1245162
aggauacucacucggguua

SEQ ID NO: 1541295 - RNA, 19 nt, Artificial Sequence
  Description of Artificial Sequence: Synthetic oligonucleotide
  Antisense strand to SEQ ID NO: 1541294
uaacccgagugaguauccu

SEQ ID NO: 1541296 - RNA, 19 nt, Artificial Sequence
  Description of Artificial Sequence: Synthetic oligonucleotide
  Sense strand starting at position 2708 of SEQ ID NO: 1245162
cggguuacaccuuauacaa

SEQ ID NO: 1541297 - RNA, 19 nt, Artificial Sequence
  Description of Artificial Sequence: Synthetic oligonucleotide
  Antisense strand to SEQ ID NO: 1541296
uuguauaagguguaacccg

SEQ ID NO: 1541298 - RNA, 19 nt, Artificial Sequence
  Description of Artificial Sequence: Synthetic oligonucleotide
  Sense strand starting at position 2785 of SEQ ID NO: 1245162
acccguaugccacaaucua

SEQ ID NO: 1541299 - RNA, 19 nt, Artificial Sequence
  Description of Artificial Sequence: Synthetic oligonucleotide
  Antisense strand to SEQ ID NO: 1541298
uagauuguggcauacgggu

SEQ ID NO: 1541300 - RNA, 19 nt, Artificial Sequence
  Description of Artificial Sequence: Synthetic oligonucleotide
  Sense strand starting at position 2822 of SEQ ID NO: 1245162
gcugcagucagcccuguua

SEQ ID NO: 1541301 - RNA, 19 nt, Artificial Sequence
  Description of Artificial Sequence: Synthetic oligonucleotide
  Antisense strand to SEQ ID NO: 1541300
uaacagggcugacugcagc

SEQ ID NO: 1541302 - RNA, 19 nt, Artificial Sequence
  Description of Artificial Sequence: Synthetic oligonucleotide
  Sense strand starting at position 2952 of SEQ ID NO: 1245162
gagggucuaauugguugaa

SEQ ID NO: 1541303 - RNA, 19 nt, Artificial Sequence
  Description of Artificial Sequence: Synthetic oligonucleotide
  Antisense strand to SEQ ID NO: 1541302
uucaaccaauuagacccuc

SEQ ID NO: 1541304 - RNA, 19 nt, Artificial Sequence
  Description of Artificial Sequence: Synthetic oligonucleotide
  Sense strand starting at position 2955 of SEQ ID NO: 1245162
ggucuaauugguugaagga

SEQ ID NO: 1541305 - RNA, 19 nt, Artificial Sequence
  Description of Artificial Sequence: Synthetic oligonucleotide
  Antisense strand to SEQ ID NO: 1541304
uccuucaaccaauuagacc

SEQ ID NO: 1541306 - RNA, 19 nt, Artificial Sequence
  Description of Artificial Sequence: Synthetic oligonucleotide
  Sense strand starting at position 3008 of SEQ ID NO: 1245162
agcugucuuugaccagauu

SEQ ID NO: 1541307 - RNA, 19 nt, Artificial Sequence
  Description of Artificial Sequence: Synthetic oligonucleotide
  Antisense strand to SEQ ID NO: 1541306
aaucuggucaaagacagcu

SEQ ID NO: 1541308 - RNA, 19 nt, Artificial Sequence
  Description of Artificial Sequence: Synthetic oligonucleotide
  Sense strand starting at position 3009 of SEQ ID NO: 1245162
gcugucuuugaccagauua

SEQ ID NO: 1541309 - RNA, 19 nt, Artificial Sequence
  Description of Artificial Sequence: Synthetic oligonucleotide
  Antisense strand to SEQ ID NO: 1541308
uaaucuggucaaagacagc

SEQ ID NO: 1541310 - RNA, 19 nt, Artificial Sequence
  Description of Artificial Sequence: Synthetic oligonucleotide
  Sense strand starting at position 3175 of SEQ ID NO: 1245162
ugaacuagaauguguggaa

SEQ ID NO: 1541311 - RNA, 19 nt, Artificial Sequence
  Description of Artificial Sequence: Synthetic oligonucleotide
  Antisense strand to SEQ ID NO: 1541310
uuccacacauucuaguuca

SEQ ID NO: 1541312 - RNA, 19 nt, Artificial Sequence
  Description of Artificial Sequence: Synthetic oligonucleotide
  Sense strand starting at position 3789 of SEQ ID NO: 1245162
gccauaaagcaguaucuga

SEQ ID NO: 1541313 - RNA, 19 nt, Artificial Sequence
  Description of Artificial Sequence: Synthetic oligonucleotide
  Antisense strand to SEQ ID NO: 1541312
ucagauacugcuuuauggc

SEQ ID NO: 1541314 - RNA, 19 nt, Artificial Sequence
  Description of Artificial Sequence: Synthetic oligonucleotide
  Sense strand starting at position 3831 of SEQ ID NO: 1245162
aacuuaucuugaucguuga

SEQ ID NO: 1541315 - RNA, 19 nt, Artificial Sequence
  Description of Artificial Sequence: Synthetic oligonucleotide
  Antisense strand to SEQ ID NO: 1541314
ucaacgaucaagauaaguu

SEQ ID NO: 1541316 - RNA, 19 nt, Artificial Sequence
  Description of Artificial Sequence: Synthetic oligonucleotide
  Sense strand starting at position 3834 of SEQ ID NO: 1245162
uuaucuugaucguugauac

SEQ ID NO: 1541317 - RNA, 19 nt, Artificial Sequence
  Description of Artificial Sequence: Synthetic oligonucleotide
  Antisense strand to SEQ ID NO: 1541316
guaucaacgaucaagauaa

SEQ ID NO: 1541318 - RNA, 19 nt, Artificial Sequence
  Description of Artificial Sequence: Synthetic oligonucleotide
  Sense strand starting at position 3844 of SEQ ID NO: 1245162
cguugauacccuuggacau

SEQ ID NO: 1541319 - RNA, 19 nt, Artificial Sequence
  Description of Artificial Sequence: Synthetic oligonucleotide
  Antisense strand to SEQ ID NO: 1541318
auguccaaggguaucaacg

SEQ ID NO: 1541320 - RNA, 19 nt, Artificial Sequence
  Description of Artificial Sequence: Synthetic oligonucleotide
  Sense strand starting at position 3845 of SEQ ID NO: 1245162
guugauacccuuggacaua

SEQ ID NO: 1541321 - RNA, 19 nt, Artificial Sequence
  Description of Artificial Sequence: Synthetic oligonucleotide
  Antisense strand to SEQ ID NO: 1541320
uauguccaaggguaucaac

SEQ ID NO: 1541322 - RNA, 19 nt, Artificial Sequence
  Description of Artificial Sequence: Synthetic oligonucleotide
  Sense strand starting at position 3959 of SEQ ID NO: 1245162
uuccauuaccauugguauc

SEQ ID NO: 1541323 - RNA, 19 nt, Artificial Sequence
  Description of Artificial Sequence: Synthetic oligonucleotide
  Antisense strand to SEQ ID NO: 1541322
gauaccaaugguaauggaa

SEQ ID NO: 1541324 - RNA, 19 nt, Artificial Sequence
  Description of Artificial Sequence: Synthetic oligonucleotide
  Sense strand starting at position 297 of SEQ ID NO: 1245163
acuguacaacagugauuau

SEQ ID NO: 1541325 - RNA, 19 nt, Artificial Sequence
  Description of Artificial Sequence: Synthetic oligonucleotide
  Antisense strand to SEQ ID NO: 1541324
auaaucacuguuguacagu

SEQ ID NO: 1541326 - RNA, 19 nt, Artificial Sequence
  Description of Artificial Sequence: Synthetic oligonucleotide
  Sense strand starting at position 300 of SEQ ID NO: 1245163
guacaacagugauuauaaa

SEQ ID NO: 1541327 - RNA, 19 nt, Artificial Sequence
  Description of Artificial Sequence: Synthetic oligonucleotide
  Antisense strand to SEQ ID NO: 1541326
uuuauaaucacuguuguac

SEQ ID NO: 1541328 - RNA, 19 nt, Artificial Sequence
  Description of Artificial Sequence: Synthetic oligonucleotide
  Sense strand starting at position 486 of SEQ ID NO: 1245163
cagauugaugguugggaca

SEQ ID NO: 1541329 - RNA, 19 nt, Artificial Sequence
  Description of Artificial Sequence: Synthetic oligonucleotide
  Antisense strand to SEQ ID NO: 1541328
ugucccaaccaucaaucug

SEQ ID NO: 1541330 - RNA, 19 nt, Artificial Sequence
  Description of Artificial Sequence: Synthetic oligonucleotide
  Sense strand starting at position 500 of SEQ ID NO: 1245163
ggacaugggcucugacuga

SEQ ID NO: 1541331 - RNA, 19 nt, Artificial Sequence
  Description of Artificial Sequence: Synthetic oligonucleotide
  Antisense strand to SEQ ID NO: 1541330
ucagucagagcccaugucc

SEQ ID NO: 1541332 - RNA, 19 nt, Artificial Sequence
  Description of Artificial Sequence: Synthetic oligonucleotide
  Sense strand starting at position 652 of SEQ ID NO: 1245163
augccuuuccuugaaauga

SEQ ID NO: 1541333 - RNA, 19 nt, Artificial Sequence
  Description of Artificial Sequence: Synthetic oligonucleotide
  Antisense strand to SEQ ID NO: 1541332
ucauuucaaggaaaggcau

SEQ ID NO: 1541334 - RNA, 19 nt, Artificial Sequence
  Description of Artificial Sequence: Synthetic oligonucleotide
  Sense strand starting at position 690 of SEQ ID NO: 1245163
gugcaucugauuugcguaa

SEQ ID NO: 1541335 - RNA, 19 nt, Artificial Sequence
  Description of Artificial Sequence: Synthetic oligonucleotide
  Antisense strand to SEQ ID NO: 1541334
uuacgcaaaucagaugcac

SEQ ID NO: 1541336 - RNA, 19 nt, Artificial Sequence
  Description of Artificial Sequence: Synthetic oligonucleotide
  Sense strand starting at position 713 of SEQ ID NO: 1245163
gaguucuauccacaaguug

SEQ ID NO: 1541337 - RNA, 19 nt, Artificial Sequence
  Description of Artificial Sequence: Synthetic oligonucleotide
  Antisense strand to SEQ ID NO: 1541336
caacuuguggauagaacuc

SEQ ID NO: 1541338 - RNA, 19 nt, Artificial Sequence
  Description of Artificial Sequence: Synthetic oligonucleotide
  Sense strand starting at position 740 of SEQ ID NO: 1245163
agucuccugguuuaauauu

SEQ ID NO: 1541339 - RNA, 19 nt, Artificial Sequence
  Description of Artificial Sequence: Synthetic oligonucleotide
  Antisense strand to SEQ ID NO: 1541338
aauauuaaaccaggagacu

SEQ ID NO: 1541340 - RNA, 19 nt, Artificial Sequence
  Description of Artificial Sequence: Synthetic oligonucleotide
  Sense strand starting at position 828 of SEQ ID NO: 1245163
acagcagucguauaugaau

SEQ ID NO: 1541341 - RNA, 19 nt, Artificial Sequence
  Description of Artificial Sequence: Synthetic oligonucleotide
  Antisense strand to SEQ ID NO: 1541340
auucauauacgacugcugu

SEQ ID NO: 1541342 - RNA, 19 nt, Artificial Sequence
  Description of Artificial Sequence: Synthetic oligonucleotide
  Sense strand starting at position 1236 of SEQ ID NO: 1245163
aucugaauuuacuaaagga

SEQ ID NO: 1541343 - RNA, 19 nt, Artificial Sequence
  Description of Artificial Sequence: Synthetic oligonucleotide
  Antisense strand to SEQ ID NO: 1541342
uccuuuaguaaauucagau

SEQ ID NO: 1541344 - RNA, 19 nt, Artificial Sequence
  Description of Artificial Sequence: Synthetic oligonucleotide
  Sense strand starting at position 1305 of SEQ ID NO: 1245163
uuuguucuugagcaaauuc

SEQ ID NO: 1541345 - RNA, 19 nt, Artificial Sequence
  Description of Artificial Sequence: Synthetic oligonucleotide
  Antisense strand to SEQ ID NO: 1541344
gaauuugcucaagaacaaa

SEQ ID NO: 1541346 - RNA, 19 nt, Artificial Sequence
  Description of Artificial Sequence: Synthetic oligonucleotide
  Sense strand starting at position 1329 of SEQ ID NO: 1245163
acuugucuacugggaaucu

SEQ ID NO: 1541347 - RNA, 19 nt, Artificial Sequence
  Description of Artificial Sequence: Synthetic oligonucleotide
  Antisense strand to SEQ ID NO: 1541346
agauucccaguagacaagu

SEQ ID NO: 1541348 - RNA, 19 nt, Artificial Sequence
  Description of Artificial Sequence: Synthetic oligonucleotide
  Sense strand starting at position 1338 of SEQ ID NO: 1245163
cugggaaucucuguaaauu

SEQ ID NO: 1541349 - RNA, 19 nt, Artificial Sequence
  Description of Artificial Sequence: Synthetic oligonucleotide
  Antisense strand to SEQ ID NO: 1541348
aauuuacagagauucccag

SEQ ID NO: 1541350 - RNA, 19 nt, Artificial Sequence
  Description of Artificial Sequence: Synthetic oligonucleotide
  Sense strand starting at position 1521 of SEQ ID NO: 1245163
aguuucgguaccgacaaau

SEQ ID NO: 1541351 - RNA, 19 nt, Artificial Sequence
  Description of Artificial Sequence: Synthetic oligonucleotide
  Antisense strand to SEQ ID NO: 1541350
auuugucgguaccgaaacu

SEQ ID NO: 1541352 - RNA, 19 nt, Artificial Sequence
  Description of Artificial Sequence: Synthetic oligonucleotide
  Sense strand starting at position 2007 of SEQ ID NO: 1245163
cgggaauagagaugucuga

SEQ ID NO: 1541353 - RNA, 19 nt, Artificial Sequence
  Description of Artificial Sequence: Synthetic oligonucleotide
  Antisense strand to SEQ ID NO: 1541352
ucagacaucucuauucccg

SEQ ID NO: 1541354 - RNA, 19 nt, Artificial Sequence
  Description of Artificial Sequence: Synthetic oligonucleotide
  Sense strand starting at position 2165 of SEQ ID NO: 1245163
ccaaucucugugcaggaaa

SEQ ID NO: 1541355 - RNA, 19 nt, Artificial Sequence
  Description of Artificial Sequence: Synthetic oligonucleotide
  Antisense strand to SEQ ID NO: 1541354
uuuccugcacagagauugg

SEQ ID NO: 1541356 - RNA, 19 nt, Artificial Sequence
  Description of Artificial Sequence: Synthetic oligonucleotide
  Sense strand starting at position 2207 of SEQ ID NO: 1245163
ucagucaagaagcgauaau

SEQ ID NO: 1541357 - RNA, 19 nt, Artificial Sequence
  Description of Artificial Sequence: Synthetic oligonucleotide
  Antisense strand to SEQ ID NO: 1541356
auuaucgcuucuugacuga

SEQ ID NO: 1541358 - RNA, 19 nt, Artificial Sequence
  Description of Artificial Sequence: Synthetic oligonucleotide
  Sense strand starting at position 2218 of SEQ ID NO: 1245163
gcgauaaugcgcuuuggcu

SEQ ID NO: 1541359 - RNA, 19 nt, Artificial Sequence
  Description of Artificial Sequence: Synthetic oligonucleotide
  Antisense strand to SEQ ID NO: 1541358
agccaaagcgcauuaucgc

SEQ ID NO: 1541360 - RNA, 19 nt, Artificial Sequence
  Description of Artificial Sequence: Synthetic oligonucleotide
  Sense strand starting at position 2219 of SEQ ID NO: 1245163
cgauaaugcgcuuuggcua

SEQ ID NO: 1541361 - RNA, 19 nt, Artificial Sequence
  Description of Artificial Sequence: Synthetic oligonucleotide
  Antisense strand to SEQ ID NO: 1541360
uagccaaagcgcauuaucg

SEQ ID NO: 1541362 - RNA, 19 nt, Artificial Sequence
  Description of Artificial Sequence: Synthetic oligonucleotide
  Sense strand starting at position 2694 of SEQ ID NO: 1245163
agauuauaccauuggugag

SEQ ID NO: 1541363 - RNA, 19 nt, Artificial Sequence
  Description of Artificial Sequence: Synthetic oligonucleotide
  Antisense strand to SEQ ID NO: 1541362
cucaccaaugguauaaucu

SEQ ID NO: 1541364 - RNA, 19 nt, Artificial Sequence
  Description of Artificial Sequence: Synthetic oligonucleotide
  Sense strand starting at position 2698 of SEQ ID NO: 1245163
uauaccauuggugagcaaa

SEQ ID NO: 1541365 - RNA, 19 nt, Artificial Sequence
  Description of Artificial Sequence: Synthetic oligonucleotide
  Antisense strand to SEQ ID NO: 1541364
uuugcucaccaaugguaua

SEQ ID NO: 1541366 - RNA, 19 nt, Artificial Sequence
  Description of Artificial Sequence: Synthetic oligonucleotide
  Sense strand starting at position 3004 of SEQ ID NO: 1245163
ucggcaucuauugaaauga

SEQ ID NO: 1541367 - RNA, 19 nt, Artificial Sequence
  Description of Artificial Sequence: Synthetic oligonucleotide
  Antisense strand to SEQ ID NO: 1541366
ucauuucaauagaugccga

SEQ ID NO: 1541368 - RNA, 19 nt, Artificial Sequence
  Description of Artificial Sequence: Synthetic oligonucleotide
  Sense strand starting at position 3118 of SEQ ID NO: 1245163
cuugaucguggugagugau

SEQ ID NO: 1541369 - RNA, 19 nt, Artificial Sequence
  Description of Artificial Sequence: Synthetic oligonucleotide
  Antisense strand to SEQ ID NO: 1541368
aucacucaccacgaucaag

SEQ ID NO: 1541370 - RNA, 19 nt, Artificial Sequence
  Description of Artificial Sequence: Synthetic oligonucleotide
  Sense strand starting at position 3130 of SEQ ID NO: 1245163
gagugaucuguuuaaugug

SEQ ID NO: 1541371 - RNA, 19 nt, Artificial Sequence
  Description of Artificial Sequence: Synthetic oligonucleotide
  Antisense strand to SEQ ID NO: 1541370
cacauuaaacagaucacuc

SEQ ID NO: 1541372 - RNA, 19 nt, Artificial Sequence
  Description of Artificial Sequence: Synthetic oligonucleotide
  Sense strand starting at position 3203 of SEQ ID NO: 1245163
guugauaugacggauuccu

SEQ ID NO: 1541373 - RNA, 19 nt, Artificial Sequence
  Description of Artificial Sequence: Synthetic oligonucleotide
  Antisense strand to SEQ ID NO: 1541372
aggaauccgucauaucaac

SEQ ID NO: 1541374 - RNA, 19 nt, Artificial Sequence
  Description of Artificial Sequence: Synthetic oligonucleotide
  Sense strand starting at position 3321 of SEQ ID NO: 1245163
gugaauauguuguucagga

SEQ ID NO: 1541375 - RNA, 19 nt, Artificial Sequence
  Description of Artificial Sequence: Synthetic oligonucleotide
  Antisense strand to SEQ ID NO: 1541374
uccugaacaacauauucac

SEQ ID NO: 1541376 - RNA, 19 nt, Artificial Sequence
  Description of Artificial Sequence: Synthetic oligonucleotide
  Sense strand starting at position 3358 of SEQ ID NO: 1245163
gaaagauauuggucuuuaa

SEQ ID NO: 1541377 - RNA, 19 nt, Artificial Sequence
  Description of Artificial Sequence: Synthetic oligonucleotide
  Antisense strand to SEQ ID NO: 1541376
uuaaagaccaauaucuuuc

SEQ ID NO: 1541378 - RNA, 19 nt, Artificial Sequence
  Description of Artificial Sequence: Synthetic oligonucleotide
  Sense strand starting at position 3361 of SEQ ID NO: 1245163
agauauuggucuuuaaguu

SEQ ID NO: 1541379 - RNA, 19 nt, Artificial Sequence
  Description of Artificial Sequence: Synthetic oligonucleotide
  Antisense strand to SEQ ID NO: 1541378
aacuuaaagaccaauaucu

SEQ ID NO: 1541380 - RNA, 19 nt, Artificial Sequence
  Description of Artificial Sequence: Synthetic oligonucleotide
  Sense strand starting at position 3362 of SEQ ID NO: 1245163
gauauuggucuuuaaguuu

SEQ ID NO: 1541381 - RNA, 19 nt, Artificial Sequence
  Description of Artificial Sequence: Synthetic oligonucleotide
  Antisense strand to SEQ ID NO: 1541380
aaacuuaaagaccaauauc

SEQ ID NO: 1541382 - RNA, 19 nt, Artificial Sequence
  Description of Artificial Sequence: Synthetic oligonucleotide
  Sense strand starting at position 3408 of SEQ ID NO: 1245163
uuguuaucagaguaauucc

SEQ ID NO: 1541383 - RNA, 19 nt, Artificial Sequence
  Description of Artificial Sequence: Synthetic oligonucleotide
  Antisense strand to SEQ ID NO: 1541382
ggaauuacucugauaacaa

SEQ ID NO: 1541384 - RNA, 19 nt, Artificial Sequence
  Description of Artificial Sequence: Synthetic oligonucleotide
  Sense strand starting at position 3427 of SEQ ID NO: 1245163
agcccuauagaaugaauua

SEQ ID NO: 1541385 - RNA, 19 nt, Artificial Sequence
  Description of Artificial Sequence: Synthetic oligonucleotide
  Antisense strand to SEQ ID NO: 1541384
uaauucauucuauagggcu

SEQ ID NO: 1541386 - RNA, 19 nt, Artificial Sequence
  Description of Artificial Sequence: Synthetic oligonucleotide
  Sense strand starting at position 3537 of SEQ ID NO: 1245163
cccaucugggucugguaau

SEQ ID NO: 1541387 - RNA, 19 nt, Artificial Sequence
  Description of Artificial Sequence: Synthetic oligonucleotide
  Antisense strand to SEQ ID NO: 1541386
auuaccagacccagauggg

SEQ ID NO: 1541388 - RNA, 19 nt, Artificial Sequence
  Description of Artificial Sequence: Synthetic oligonucleotide
  Sense strand starting at position 3657 of SEQ ID NO: 1245163
ucaagaaauugauccacgu

SEQ ID NO: 1541389 - RNA, 19 nt, Artificial Sequence
  Description of Artificial Sequence: Synthetic oligonucleotide
  Antisense strand to SEQ ID NO: 1541388
acguggaucaauuucuuga

SEQ ID NO: 1541390 - RNA, 19 nt, Artificial Sequence
  Description of Artificial Sequence: Synthetic oligonucleotide
  Sense strand starting at position 3661 of SEQ ID NO: 1245163
gaaauugauccacgucaug

SEQ ID NO: 1541391 - RNA, 19 nt, Artificial Sequence
  Description of Artificial Sequence: Synthetic oligonucleotide
  Antisense strand to SEQ ID NO: 1541390
caugacguggaucaauuuc

SEQ ID NO: 1541392 - RNA, 19 nt, Artificial Sequence
  Description of Artificial Sequence: Synthetic oligonucleotide
  Sense strand starting at position 3673 of SEQ ID NO: 1245163
cgucauguaguuuaucaaa

SEQ ID NO: 1541393 - RNA, 19 nt, Artificial Sequence
  Description of Artificial Sequence: Synthetic oligonucleotide
  Antisense strand to SEQ ID NO: 1541392
uuugauaaacuacaugacg

SEQ ID NO: 1541394 - RNA, 19 nt, Artificial Sequence
  Description of Artificial Sequence: Synthetic oligonucleotide
  Sense strand starting at position 3702 of SEQ ID NO: 1245163
cagagcuguccugaguauu

SEQ ID NO: 1541395 - RNA, 19 nt, Artificial Sequence
  Description of Artificial Sequence: Synthetic oligonucleotide
  Antisense strand to SEQ ID NO: 1541394
aauacucaggacagcucug

SEQ ID NO: 1541396 - RNA, 19 nt, Artificial Sequence
  Description of Artificial Sequence: Synthetic oligonucleotide
  Sense strand starting at position 3710 of SEQ ID NO: 1245163
uccugaguauuccuuuaug

SEQ ID NO: 1541397 - RNA, 19 nt, Artificial Sequence
  Description of Artificial Sequence: Synthetic oligonucleotide
  Antisense strand to SEQ ID NO: 1541396
cauaaaggaauacucagga

SEQ ID NO: 1541398 - RNA, 19 nt, Artificial Sequence
  Description of Artificial Sequence: Synthetic oligonucleotide
  Sense strand starting at position 3713 of SEQ ID NO: 1245163
ugaguauuccuuuaugauu

SEQ ID NO: 1541399 - RNA, 19 nt, Artificial Sequence
  Description of Artificial Sequence: Synthetic oligonucleotide
  Antisense strand to SEQ ID NO: 1541398
aaucauaaaggaauacuca

SEQ ID NO: 1541400 - RNA, 19 nt, Artificial Sequence
  Description of Artificial Sequence: Synthetic oligonucleotide
  Sense strand starting at position 3815 of SEQ ID NO: 1245163
gguacagucucaucaauuc

SEQ ID NO: 1541401 - RNA, 19 nt, Artificial Sequence
  Description of Artificial Sequence: Synthetic oligonucleotide
  Antisense strand to SEQ ID NO: 1541400
gaauugaugagacuguacc

SEQ ID NO: 1541402 - RNA, 19 nt, Artificial Sequence
  Description of Artificial Sequence: Synthetic oligonucleotide
  Sense strand starting at position 3974 of SEQ ID NO: 1245163
agaagcuguggugauugau

SEQ ID NO: 1541403 - RNA, 19 nt, Artificial Sequence
  Description of Artificial Sequence: Synthetic oligonucleotide
  Antisense strand to SEQ ID NO: 1541402
aucaaucaccacagcuucu

SEQ ID NO: 1541404 - RNA, 19 nt, Artificial Sequence
  Description of Artificial Sequence: Synthetic oligonucleotide
  Sense strand starting at position 49 of SEQ ID NO: 1245164
gucucagaagcccaaucuu

SEQ ID NO: 1541405 - RNA, 19 nt, Artificial Sequence
  Description of Artificial Sequence: Synthetic oligonucleotide
  Antisense strand to SEQ ID NO: 1541404
aagauugggcuucugagac

SEQ ID NO: 1541406 - RNA, 19 nt, Artificial Sequence
  Description of Artificial Sequence: Synthetic oligonucleotide
  Sense strand starting at position 149 of SEQ ID NO: 1245164
agguccuaacugcaugauu

SEQ ID NO: 1541407 - RNA, 19 nt, Artificial Sequence
  Description of Artificial Sequence: Synthetic oligonucleotide
  Antisense strand to SEQ ID NO: 1541406
aaucaugcaguuaggaccu

SEQ ID NO: 1541408 - RNA, 19 nt, Artificial Sequence
  Description of Artificial Sequence: Synthetic oligonucleotide
  Sense strand starting at position 151 of SEQ ID NO: 1245164
guccuaacugcaugauuuc

SEQ ID NO: 1541409 - RNA, 19 nt, Artificial Sequence
  Description of Artificial Sequence: Synthetic oligonucleotide
  Antisense strand to SEQ ID NO: 1541408
gaaaucaugcaguuaggac

SEQ ID NO: 1541410 - RNA, 19 nt, Artificial Sequence
  Description of Artificial Sequence: Synthetic oligonucleotide
  Sense strand starting at position 172 of SEQ ID NO: 1245164
ccuagauugcugcaggauc

SEQ ID NO: 1541411 - RNA, 19 nt, Artificial Sequence
  Description of Artificial Sequence: Synthetic oligonucleotide
  Antisense strand to SEQ ID NO: 1541410
gauccugcagcaaucuagg

SEQ ID NO: 1541412 - RNA, 19 nt, Artificial Sequence
  Description of Artificial Sequence: Synthetic oligonucleotide
  Sense strand starting at position 243 of SEQ ID NO: 1245164
uuccgaugucucuaaagua

SEQ ID NO: 1541413 - RNA, 19 nt, Artificial Sequence
  Description of Artificial Sequence: Synthetic oligonucleotide
  Antisense strand to SEQ ID NO: 1541412
uacuuuagagacaucggaa

SEQ ID NO: 1541414 - RNA, 19 nt, Artificial Sequence
  Description of Artificial Sequence: Synthetic oligonucleotide
  Sense strand starting at position 256 of SEQ ID NO: 1245164
aaaguaaagcuuugaucug

SEQ ID NO: 1541415 - RNA, 19 nt, Artificial Sequence
  Description of Artificial Sequence: Synthetic oligonucleotide
  Antisense strand to SEQ ID NO: 1541414
cagaucaaagcuuuacuuu

SEQ ID NO: 1541416 - RNA, 19 nt, Artificial Sequence
  Description of Artificial Sequence: Synthetic oligonucleotide
  Sense strand starting at position 360 of SEQ ID NO: 1245164
aggcccucacuuuauagau

SEQ ID NO: 1541417 - RNA, 19 nt, Artificial Sequence
  Description of Artificial Sequence: Synthetic oligonucleotide
  Antisense strand to SEQ ID NO: 1541416
aucuauaaagugagggccu

SEQ ID NO: 1541418 - RNA, 19 nt, Artificial Sequence
  Description of Artificial Sequence: Synthetic oligonucleotide
  Sense strand starting at position 651 of SEQ ID NO: 1245164
ucuauacugcuauagucau

SEQ ID NO: 1541419 - RNA, 19 nt, Artificial Sequence
  Description of Artificial Sequence: Synthetic oligonucleotide
  Antisense strand to SEQ ID NO: 1541418
augacuauagcaguauaga

SEQ ID NO: 1541420 - RNA, 19 nt, Artificial Sequence
  Description of Artificial Sequence: Synthetic oligonucleotide
  Sense strand starting at position 657 of SEQ ID NO: 1245164
cugcuauagucauuucuga

SEQ ID NO: 1541421 - RNA, 19 nt, Artificial Sequence
  Description of Artificial Sequence: Synthetic oligonucleotide
  Antisense strand to SEQ ID NO: 1541420
ucagaaaugacuauagcag

SEQ ID NO: 1541422 - RNA, 19 nt, Artificial Sequence
  Description of Artificial Sequence: Synthetic oligonucleotide
  Sense strand starting at position 827 of SEQ ID NO: 1245164
ugacccauaucugcagaga

SEQ ID NO: 1541423 - RNA, 19 nt, Artificial Sequence
  Description of Artificial Sequence: Synthetic oligonucleotide
  Antisense strand to SEQ ID NO: 1541422
ucucugcagauauggguca

SEQ ID NO: 1541424 - RNA, 19 nt, Artificial Sequence
  Description of Artificial Sequence: Synthetic oligonucleotide
  Sense strand starting at position 890 of SEQ ID NO: 1245164
aacuguauuccagggaaug

SEQ ID NO: 1541425 - RNA, 19 nt, Artificial Sequence
  Description of Artificial Sequence: Synthetic oligonucleotide
  Antisense strand to SEQ ID NO: 1541424
cauucccuggaauacaguu

SEQ ID NO: 1541426 - RNA, 19 nt, Artificial Sequence
  Description of Artificial Sequence: Synthetic oligonucleotide
  Sense strand starting at position 891 of SEQ ID NO: 1245164
acuguauuccagggaauga

SEQ ID NO: 1541427 - RNA, 19 nt, Artificial Sequence
  Description of Artificial Sequence: Synthetic oligonucleotide
  Antisense strand to SEQ ID NO: 1541426
ucauucccuggaauacagu

SEQ ID NO: 1541428 - RNA, 19 nt, Artificial Sequence
  Description of Artificial Sequence: Synthetic oligonucleotide
  Sense strand starting at position 945 of SEQ ID NO: 1245164
aaauguaagcuuuauguag

SEQ ID NO: 1541429 - RNA, 19 nt, Artificial Sequence
  Description of Artificial Sequence: Synthetic oligonucleotide
  Antisense strand to SEQ ID NO: 1541428
cuacauaaagcuuacauuu

SEQ ID NO: 1541430 - RNA, 19 nt, Artificial Sequence
  Description of Artificial Sequence: Synthetic oligonucleotide
  Sense strand starting at position 1022 of SEQ ID NO: 1245164
auaguaucaucagcugaca

SEQ ID NO: 1541431 - RNA, 19 nt, Artificial Sequence
  Description of Artificial Sequence: Synthetic oligonucleotide
  Antisense strand to SEQ ID NO: 1541430
ugucagcugaugauacuau

SEQ ID NO: 1541432 - RNA, 19 nt, Artificial Sequence
  Description of Artificial Sequence: Synthetic oligonucleotide
  Sense strand starting at position 1034 of SEQ ID NO: 1245164
gcugacauuucuguacauc

SEQ ID NO: 1541433 - RNA, 19 nt, Artificial Sequence
  Description of Artificial Sequence: Synthetic oligonucleotide
  Antisense strand to SEQ ID NO: 1541432
gauguacagaaaugucagc

SEQ ID NO: 1541434 - RNA, 19 nt, Artificial Sequence
  Description of Artificial Sequence: Synthetic oligonucleotide
  Sense strand starting at position 1124 of SEQ ID NO: 1245164
cagagaaaguugguuugau

SEQ ID NO: 1541435 - RNA, 19 nt, Artificial Sequence
  Description of Artificial Sequence: Synthetic oligonucleotide
  Antisense strand to SEQ ID NO: 1541434
aucaaaccaacuuucucug

SEQ ID NO: 1541436 - RNA, 19 nt, Artificial Sequence
  Description of Artificial Sequence: Synthetic oligonucleotide
  Sense strand starting at position 1125 of SEQ ID NO: 1245164
agagaaaguugguuugauu

SEQ ID NO: 1541437 - RNA, 19 nt, Artificial Sequence
  Description of Artificial Sequence: Synthetic oligonucleotide
  Antisense strand to SEQ ID NO: 1541436
aaucaaaccaacuuucucu

SEQ ID NO: 1541438 - RNA, 19 nt, Artificial Sequence
  Description of Artificial Sequence: Synthetic oligonucleotide
  Sense strand starting at position 1136 of SEQ ID NO: 1245164
guuugauuucuauggucuc

SEQ ID NO: 1541439 - RNA, 19 nt, Artificial Sequence
  Description of Artificial Sequence: Synthetic oligonucleotide
  Antisense strand to SEQ ID NO: 1541438
gagaccauagaaaucaaac

SEQ ID NO: 1541440 - RNA, 19 nt, Artificial Sequence
  Description of Artificial Sequence: Synthetic oligonucleotide
  Sense strand starting at position 1148 of SEQ ID NO: 1245164
uggucucuuaacgaugaua

SEQ ID NO: 1541441 - RNA, 19 nt, Artificial Sequence
  Description of Artificial Sequence: Synthetic oligonucleotide
  Antisense strand to SEQ ID NO: 1541440
uaucaucguuaagagacca

SEQ ID NO: 1541442 - RNA, 19 nt, Artificial Sequence
  Description of Artificial Sequence: Synthetic oligonucleotide
  Sense strand starting at position 1150 of SEQ ID NO: 1245164
gucucuuaacgaugauaua

SEQ ID NO: 1541443 - RNA, 19 nt, Artificial Sequence
  Description of Artificial Sequence: Synthetic oligonucleotide
  Antisense strand to SEQ ID NO: 1541442
uauaucaucguuaagagac

SEQ ID NO: 1541444 - RNA, 19 nt, Artificial Sequence
  Description of Artificial Sequence: Synthetic oligonucleotide
  Sense strand starting at position 1303 of SEQ ID NO: 1245164
ugguuacuagcauauacau

SEQ ID NO: 1541445 - RNA, 19 nt, Artificial Sequence
  Description of Artificial Sequence: Synthetic oligonucleotide
  Antisense strand to SEQ ID NO: 1541444
auguauaugcuaguaacca

SEQ ID NO: 1541446 - RNA, 19 nt, Artificial Sequence
  Description of Artificial Sequence: Synthetic oligonucleotide
  Sense strand starting at position 1445 of SEQ ID NO: 1245164
uggagcuauacuggacuua

SEQ ID NO: 1541447 - RNA, 19 nt, Artificial Sequence
  Description of Artificial Sequence: Synthetic oligonucleotide
  Antisense strand to SEQ ID NO: 1541446
uaaguccaguauagcucca

SEQ ID NO: 1541448 - RNA, 19 nt, Artificial Sequence
  Description of Artificial Sequence: Synthetic oligonucleotide
  Sense strand starting at position 2039 of SEQ ID NO: 1245164
auaguacuuccugauucuu

SEQ ID NO: 1541449 - RNA, 19 nt, Artificial Sequence
  Description of Artificial Sequence: Synthetic oligonucleotide
  Antisense strand to SEQ ID NO: 1541448
aagaaucaggaaguacuau

SEQ ID NO: 1541450 - RNA, 19 nt, Artificial Sequence
  Description of Artificial Sequence: Synthetic oligonucleotide
  Sense strand starting at position 2041 of SEQ ID NO: 1245164
aguacuuccugauucuuga

SEQ ID NO: 1541451 - RNA, 19 nt, Artificial Sequence
  Description of Artificial Sequence: Synthetic oligonucleotide
  Antisense strand to SEQ ID NO: 1541450
ucaagaaucaggaaguacu

SEQ ID NO: 1541452 - RNA, 19 nt, Artificial Sequence
  Description of Artificial Sequence: Synthetic oligonucleotide
  Sense strand starting at position 2074 of SEQ ID NO: 1245164
gguaacaguuucccuuuaa

SEQ ID NO: 1541453 - RNA, 19 nt, Artificial Sequence
  Description of Artificial Sequence: Synthetic oligonucleotide
  Antisense strand to SEQ ID NO: 1541452
uuaaagggaaacuguuacc

SEQ ID NO: 1541454 - RNA, 19 nt, Artificial Sequence
  Description of Artificial Sequence: Synthetic oligonucleotide
  Sense strand starting at position 2407 of SEQ ID NO: 1245164
ugggauuccaggcacucau

SEQ ID NO: 1541455 - RNA, 19 nt, Artificial Sequence
  Description of Artificial Sequence: Synthetic oligonucleotide
  Antisense strand to SEQ ID NO: 1541454
augagugccuggaauccca

SEQ ID NO: 1541456 - RNA, 19 nt, Artificial Sequence
  Description of Artificial Sequence: Synthetic oligonucleotide
  Sense strand starting at position 2492 of SEQ ID NO: 1245164
ucuugagcucaugaccuaa

SEQ ID NO: 1541457 - RNA, 19 nt, Artificial Sequence
  Description of Artificial Sequence: Synthetic oligonucleotide
  Antisense strand to SEQ ID NO: 1541456
uuaggucaugagcucaaga

SEQ ID NO: 1541458 - RNA, 19 nt, Artificial Sequence
  Description of Artificial Sequence: Synthetic oligonucleotide
  Sense strand starting at position 2607 of SEQ ID NO: 1245164
auucucaucuggccaugau

SEQ ID NO: 1541459 - RNA, 19 nt, Artificial Sequence
  Description of Artificial Sequence: Synthetic oligonucleotide
  Antisense strand to SEQ ID NO: 1541458
aucauggccagaugagaau

SEQ ID NO: 1541460 - RNA, 19 nt, Artificial Sequence
  Description of Artificial Sequence: Synthetic oligonucleotide
  Sense strand starting at position 2692 of SEQ ID NO: 1245164
aggcacuugucauuaacaa

SEQ ID NO: 1541461 - RNA, 19 nt, Artificial Sequence
  Description of Artificial Sequence: Synthetic oligonucleotide
  Antisense strand to SEQ ID NO: 1541460
uuguuaaugacaagugccu

SEQ ID NO: 1541462 - RNA, 19 nt, Artificial Sequence
  Description of Artificial Sequence: Synthetic oligonucleotide
  Sense strand starting at position 2693 of SEQ ID NO: 1245164
ggcacuugucauuaacaag

SEQ ID NO: 1541463 - RNA, 19 nt, Artificial Sequence
  Description of Artificial Sequence: Synthetic oligonucleotide
  Antisense strand to SEQ ID NO: 1541462
cuuguuaaugacaagugcc

SEQ ID NO: 1541464 - RNA, 19 nt, Artificial Sequence
  Description of Artificial Sequence: Synthetic oligonucleotide
  Sense strand starting at position 2716 of SEQ ID NO: 1245164
gacggugaucccugagaga

SEQ ID NO: 1541465 - RNA, 19 nt, Artificial Sequence
  Description of Artificial Sequence: Synthetic oligonucleotide
  Antisense strand to SEQ ID NO: 1541464
ucucucagggaucaccguc

SEQ ID NO: 1541466 - RNA, 19 nt, Artificial Sequence
  Description of Artificial Sequence: Synthetic oligonucleotide
  Sense strand starting at position 2760 of SEQ ID NO: 1245164
ccuuacuaucuugagaguu

SEQ ID NO: 1541467 - RNA, 19 nt, Artificial Sequence
  Description of Artificial Sequence: Synthetic oligonucleotide
  Antisense strand to SEQ ID NO: 1541466
aacucucaagauaguaagg

SEQ ID NO: 1541468 - RNA, 19 nt, Artificial Sequence
  Description of Artificial Sequence: Synthetic oligonucleotide
  Sense strand starting at position 2943 of SEQ ID NO: 1245164
cagaguacugauuagcacu

SEQ ID NO: 1541469 - RNA, 19 nt, Artificial Sequence
  Description of Artificial Sequence: Synthetic oligonucleotide
  Antisense strand to SEQ ID NO: 1541468
agugcuaaucaguacucug

SEQ ID NO: 1541470 - RNA, 19 nt, Artificial Sequence
  Description of Artificial Sequence: Synthetic oligonucleotide
  Sense strand starting at position 3124 of SEQ ID NO: 1245164
ugccucaguagucaggaau

SEQ ID NO: 1541471 - RNA, 19 nt, Artificial Sequence
  Description of Artificial Sequence: Synthetic oligonucleotide
  Antisense strand to SEQ ID NO: 1541470
auuccugacuacugaggca

SEQ ID NO: 1541472 - RNA, 19 nt, Artificial Sequence
  Description of Artificial Sequence: Synthetic oligonucleotide
  Sense strand starting at position 3137 of SEQ ID NO: 1245164
aggaauaauuagcccuaua

SEQ ID NO: 1541473 - RNA, 19 nt, Artificial Sequence
  Description of Artificial Sequence: Synthetic oligonucleotide
  Antisense strand to SEQ ID NO: 1541472
uauagggcuaauuauuccu

SEQ ID NO: 1541474 - RNA, 19 nt, Artificial Sequence
  Description of Artificial Sequence: Synthetic oligonucleotide
  Sense strand starting at position 3281 of SEQ ID NO: 1245164
uccaguacccaacaaugua

SEQ ID NO: 1541475 - RNA, 19 nt, Artificial Sequence
  Description of Artificial Sequence: Synthetic oligonucleotide
  Antisense strand to SEQ ID NO: 1541474
uacauuguuggguacugga

SEQ ID NO: 1541476 - RNA, 19 nt, Artificial Sequence
  Description of Artificial Sequence: Synthetic oligonucleotide
  Sense strand starting at position 3351 of SEQ ID NO: 1245164
aggcaaaugugaucuauaa

SEQ ID NO: 1541477 - RNA, 19 nt, Artificial Sequence
  Description of Artificial Sequence: Synthetic oligonucleotide
  Antisense strand to SEQ ID NO: 1541476
uuauagaucacauuugccu

SEQ ID NO: 1541478 - RNA, 19 nt, Artificial Sequence
  Description of Artificial Sequence: Synthetic oligonucleotide
  Sense strand starting at position 3476 of SEQ ID NO: 1245164
aauggaauauagcuguauu

SEQ ID NO: 1541479 - RNA, 19 nt, Artificial Sequence
  Description of Artificial Sequence: Synthetic oligonucleotide
  Antisense strand to SEQ ID NO: 1541478
aauacagcuauauuccauu

SEQ ID NO: 1541480 - RNA, 19 nt, Artificial Sequence
  Description of Artificial Sequence: Synthetic oligonucleotide
  Sense strand starting at position 3479 of SEQ ID NO: 1245164
ggaauauagcuguauucca

SEQ ID NO: 1541481 - RNA, 19 nt, Artificial Sequence
  Description of Artificial Sequence: Synthetic oligonucleotide
  Antisense strand to SEQ ID NO: 1541480
uggaauacagcuauauucc

SEQ ID NO: 1541482 - RNA, 19 nt, Artificial Sequence
  Description of Artificial Sequence: Synthetic oligonucleotide
  Sense strand starting at position 3983 of SEQ ID NO: 1245164
auaagaaagguaugagugu

SEQ ID NO: 1541483 - RNA, 19 nt, Artificial Sequence
  Description of Artificial Sequence: Synthetic oligonucleotide
  Antisense strand to SEQ ID NO: 1541482
acacucauaccuuucuuau

SEQ ID NO: 1541484 - RNA, 19 nt, Artificial Sequence
  Description of Artificial Sequence: Synthetic oligonucleotide
  Sense strand starting at position 6 of SEQ ID NO: 1245165
auuuacuguuggcauauga

SEQ ID NO: 1541485 - RNA, 19 nt, Artificial Sequence
  Description of Artificial Sequence: Synthetic oligonucleotide
  Antisense strand to SEQ ID NO: 1541484
ucauaugccaacaguaaau

SEQ ID NO: 1541486 - RNA, 19 nt, Artificial Sequence
  Description of Artificial Sequence: Synthetic oligonucleotide
  Sense strand starting at position 10 of SEQ ID NO: 1245165
acuguuggcauaugaguuu

SEQ ID NO: 1541487 - RNA, 19 nt, Artificial Sequence
  Description of Artificial Sequence: Synthetic oligonucleotide
  Antisense strand to SEQ ID NO: 1541486
aaacucauaugccaacagu

SEQ ID NO: 1541488 - RNA, 19 nt, Artificial Sequence
  Description of Artificial Sequence: Synthetic oligonucleotide
  Sense strand starting at position 685 of SEQ ID NO: 1245165
ucuguugacuucugacaaa

SEQ ID NO: 1541489 - RNA, 19 nt, Artificial Sequence
  Description of Artificial Sequence: Synthetic oligonucleotide
  Antisense strand to SEQ ID NO: 1541488
uuugucagaagucaacaga

SEQ ID NO: 1541490 - RNA, 19 nt, Artificial Sequence
  Description of Artificial Sequence: Synthetic oligonucleotide
  Sense strand starting at position 688 of SEQ ID NO: 1245165
guugacuucugacaaaggu

SEQ ID NO: 1541491 - RNA, 19 nt, Artificial Sequence
  Description of Artificial Sequence: Synthetic oligonucleotide
  Antisense strand to SEQ ID NO: 1541490
accuuugucagaagucaac

SEQ ID NO: 1541492 - RNA, 19 nt, Artificial Sequence
  Description of Artificial Sequence: Synthetic oligonucleotide
  Sense strand starting at position 904 of SEQ ID NO: 1245165
cccugcgcuccucaagaau

SEQ ID NO: 1541493 - RNA, 19 nt, Artificial Sequence
  Description of Artificial Sequence: Synthetic oligonucleotide
  Antisense strand to SEQ ID NO: 1541492
auucuugaggagcgcaggg

SEQ ID NO: 1541494 - RNA, 19 nt, Artificial Sequence
  Description of Artificial Sequence: Synthetic oligonucleotide
  Sense strand starting at position 970 of SEQ ID NO: 1245165
cugaaagcguuuccuguuu

SEQ ID NO: 1541495 - RNA, 19 nt, Artificial Sequence
  Description of Artificial Sequence: Synthetic oligonucleotide
  Antisense strand to SEQ ID NO: 1541494
aaacaggaaacgcuuucag

SEQ ID NO: 1541496 - RNA, 19 nt, Artificial Sequence
  Description of Artificial Sequence: Synthetic oligonucleotide
  Sense strand starting at position 972 of SEQ ID NO: 1245165
gaaagcguuuccuguuuau

SEQ ID NO: 1541497 - RNA, 19 nt, Artificial Sequence
  Description of Artificial Sequence: Synthetic oligonucleotide
  Antisense strand to SEQ ID NO: 1541496
auaaacaggaaacgcuuuc

SEQ ID NO: 1541498 - RNA, 19 nt, Artificial Sequence
  Description of Artificial Sequence: Synthetic oligonucleotide
  Sense strand starting at position 975 of SEQ ID NO: 1245165
agcguuuccuguuuauaua

SEQ ID NO: 1541499 - RNA, 19 nt, Artificial Sequence
  Description of Artificial Sequence: Synthetic oligonucleotide
  Antisense strand to SEQ ID NO: 1541498
uauauaaacaggaaacgcu

SEQ ID NO: 1541500 - RNA, 19 nt, Artificial Sequence
  Description of Artificial Sequence: Synthetic oligonucleotide
  Sense strand starting at position 976 of SEQ ID NO: 1245165
gcguuuccuguuuauauac

SEQ ID NO: 1541501 - RNA, 19 nt, Artificial Sequence
  Description of Artificial Sequence: Synthetic oligonucleotide
  Antisense strand to SEQ ID NO: 1541500
guauauaaacaggaaacgc

SEQ ID NO: 1541502 - RNA, 19 nt, Artificial Sequence
  Description of Artificial Sequence: Synthetic oligonucleotide
  Sense strand starting at position 1034 of SEQ ID NO: 1245165
gguguaaucuacuccucac

SEQ ID NO: 1541503 - RNA, 19 nt, Artificial Sequence
  Description of Artificial Sequence: Synthetic oligonucleotide
  Antisense strand to SEQ ID NO: 1541502
gugaggaguagauuacacc

SEQ ID NO: 1541504 - RNA, 19 nt, Artificial Sequence
  Description of Artificial Sequence: Synthetic oligonucleotide
  Sense strand starting at position 1058 of SEQ ID NO: 1245165
gaccguguccagggugaga

SEQ ID NO: 1541505 - RNA, 19 nt, Artificial Sequence
  Description of Artificial Sequence: Synthetic oligonucleotide
  Antisense strand to SEQ ID NO: 1541504
ucucacccuggacacgguc

SEQ ID NO: 1541506 - RNA, 19 nt, Artificial Sequence
  Description of Artificial Sequence: Synthetic oligonucleotide
  Sense strand starting at position 1142 of SEQ ID NO: 1245165
cacguaccauggugugaau

SEQ ID NO: 1541507 - RNA, 19 nt, Artificial Sequence
  Description of Artificial Sequence: Synthetic oligonucleotide
  Antisense strand to SEQ ID NO: 1541506
auucacaccaugguacgug

SEQ ID NO: 1541508 - RNA, 19 nt, Artificial Sequence
  Description of Artificial Sequence: Synthetic oligonucleotide
  Sense strand starting at position 1145 of SEQ ID NO: 1245165
guaccauggugugaaucua

SEQ ID NO: 1541509 - RNA, 19 nt, Artificial Sequence
  Description of Artificial Sequence: Synthetic oligonucleotide
  Antisense strand to SEQ ID NO: 1541508
uagauucacaccaugguac

SEQ ID NO: 1541510 - RNA, 19 nt, Artificial Sequence
  Description of Artificial Sequence: Synthetic oligonucleotide
  Sense strand starting at position 1161 of SEQ ID NO: 1245165
cuagaaucccgucgacaua

SEQ ID NO: 1541511 - RNA, 19 nt, Artificial Sequence
  Description of Artificial Sequence: Synthetic oligonucleotide
  Antisense strand to SEQ ID NO: 1541510
uaugucgacgggauucuag

SEQ ID NO: 1541512 - RNA, 19 nt, Artificial Sequence
  Description of Artificial Sequence: Synthetic oligonucleotide
  Sense strand starting at position 1213 of SEQ ID NO: 1245165
uuucuaccuuugucaggaa

SEQ ID NO: 1541513 - RNA, 19 nt, Artificial Sequence
  Description of Artificial Sequence: Synthetic oligonucleotide
  Antisense strand to SEQ ID NO: 1541512
uuccugacaaagguagaaa

SEQ ID NO: 1541514 - RNA, 19 nt, Artificial Sequence
  Description of Artificial Sequence: Synthetic oligonucleotide
  Sense strand starting at position 1214 of SEQ ID NO: 1245165
uucuaccuuugucaggaaa

SEQ ID NO: 1541515 - RNA, 19 nt, Artificial Sequence
  Description of Artificial Sequence: Synthetic oligonucleotide
  Antisense strand to SEQ ID NO: 1541514
uuuccugacaaagguagaa

SEQ ID NO: 1541516 - RNA, 19 nt, Artificial Sequence
  Description of Artificial Sequence: Synthetic oligonucleotide
  Sense strand starting at position 1216 of SEQ ID NO: 1245165
cuaccuuugucaggaaauu

SEQ ID NO: 1541517 - RNA, 19 nt, Artificial Sequence
  Description of Artificial Sequence: Synthetic oligonucleotide
  Antisense strand to SEQ ID NO: 1541516
aauuuccugacaaagguag

SEQ ID NO: 1541518 - RNA, 19 nt, Artificial Sequence
  Description of Artificial Sequence: Synthetic oligonucleotide
  Sense strand starting at position 1313 of SEQ ID NO: 1245165
cuggaacucuuuggcaagu

SEQ ID NO: 1541519 - RNA, 19 nt, Artificial Sequence
  Description of Artificial Sequence: Synthetic oligonucleotide
  Antisense strand to SEQ ID NO: 1541518
acuugccaaagaguuccag

SEQ ID NO: 1541520 - RNA, 19 nt, Artificial Sequence
  Description of Artificial Sequence: Synthetic oligonucleotide
  Sense strand starting at position 1314 of SEQ ID NO: 1245165
uggaacucuuuggcaagua

SEQ ID NO: 1541521 - RNA, 19 nt, Artificial Sequence
  Description of Artificial Sequence: Synthetic oligonucleotide
  Antisense strand to SEQ ID NO: 1541520
uacuugccaaagaguucca

SEQ ID NO: 1541522 - RNA, 19 nt, Artificial Sequence
  Description of Artificial Sequence: Synthetic oligonucleotide
  Sense strand starting at position 2221 of SEQ ID NO: 1245165
cccugcugcguuucucaga

SEQ ID NO: 1541523 - RNA, 19 nt, Artificial Sequence
  Description of Artificial Sequence: Synthetic oligonucleotide
  Antisense strand to SEQ ID NO: 1541522
ucugagaaacgcagcaggg

SEQ ID NO: 1541524 - RNA, 19 nt, Artificial Sequence
  Description of Artificial Sequence: Synthetic oligonucleotide
  Sense strand starting at position 2592 of SEQ ID NO: 1245165
uuaccagucuuguugccau

SEQ ID NO: 1541525 - RNA, 19 nt, Artificial Sequence
  Description of Artificial Sequence: Synthetic oligonucleotide
  Antisense strand to SEQ ID NO: 1541524
auggcaacaagacugguaa

SEQ ID NO: 1541526 - RNA, 19 nt, Artificial Sequence
  Description of Artificial Sequence: Synthetic oligonucleotide
  Sense strand starting at position 2708 of SEQ ID NO: 1245165
gucuccaugugcggauaaa

SEQ ID NO: 1541527 - RNA, 19 nt, Artificial Sequence
  Description of Artificial Sequence: Synthetic oligonucleotide
  Antisense strand to SEQ ID NO: 1541526
uuuauccgcacauggagac

SEQ ID NO: 1541528 - RNA, 19 nt, Artificial Sequence
  Description of Artificial Sequence: Synthetic oligonucleotide
  Sense strand starting at position 2709 of SEQ ID NO: 1245165
ucuccaugugcggauaaau

SEQ ID NO: 1541529 - RNA, 19 nt, Artificial Sequence
  Description of Artificial Sequence: Synthetic oligonucleotide
  Antisense strand to SEQ ID NO: 1541528
auuuauccgcacauggaga

SEQ ID NO: 1541530 - RNA, 19 nt, Artificial Sequence
  Description of Artificial Sequence: Synthetic oligonucleotide
  Sense strand starting at position 2977 of SEQ ID NO: 1245165
gcacgcucaucucuagagu

SEQ ID NO: 1541531 - RNA, 19 nt, Artificial Sequence
  Description of Artificial Sequence: Synthetic oligonucleotide
  Antisense strand to SEQ ID NO: 1541530
acucuagagaugagcgugc

SEQ ID NO: 1541532 - RNA, 19 nt, Artificial Sequence
  Description of Artificial Sequence: Synthetic oligonucleotide
  Sense strand starting at position 2978 of SEQ ID NO: 1245165
cacgcucaucucuagaguu

SEQ ID NO: 1541533 - RNA, 19 nt, Artificial Sequence
  Description of Artificial Sequence: Synthetic oligonucleotide
  Antisense strand to SEQ ID NO: 1541532
aacucuagagaugagcgug

SEQ ID NO: 1541534 - RNA, 19 nt, Artificial Sequence
  Description of Artificial Sequence: Synthetic oligonucleotide
  Sense strand starting at position 2980 of SEQ ID NO: 1245165
cgcucaucucuagaguugu

SEQ ID NO: 1541535 - RNA, 19 nt, Artificial Sequence
  Description of Artificial Sequence: Synthetic oligonucleotide
  Antisense strand to SEQ ID NO: 1541534
acaacucuagagaugagcg

SEQ ID NO: 1541536 - RNA, 19 nt, Artificial Sequence
  Description of Artificial Sequence: Synthetic oligonucleotide
  Sense strand starting at position 3020 of SEQ ID NO: 1245165
acaugugaguccuaauaaa

SEQ ID NO: 1541537 - RNA, 19 nt, Artificial Sequence
  Description of Artificial Sequence: Synthetic oligonucleotide
  Antisense strand to SEQ ID NO: 1541536
uuuauuaggacucacaugu

SEQ ID NO: 1541538 - RNA, 19 nt, Artificial Sequence
  Description of Artificial Sequence: Synthetic oligonucleotide
  Sense strand starting at position 3311 of SEQ ID NO: 1245165
cggguggguccucagaagu

SEQ ID NO: 1541539 - RNA, 19 nt, Artificial Sequence
  Description of Artificial Sequence: Synthetic oligonucleotide
  Antisense strand to SEQ ID NO: 1541538
acuucugaggacccacccg

SEQ ID NO: 1541540 - RNA, 19 nt, Artificial Sequence
  Description of Artificial Sequence: Synthetic oligonucleotide
  Sense strand starting at position 3581 of SEQ ID NO: 1245165
ugaagacccugagugguaa

SEQ ID NO: 1541541 - RNA, 19 nt, Artificial Sequence
  Description of Artificial Sequence: Synthetic oligonucleotide
  Antisense strand to SEQ ID NO: 1541540
uuaccacucagggucuuca

SEQ ID NO: 1541542 - RNA, 19 nt, Artificial Sequence
  Description of Artificial Sequence: Synthetic oligonucleotide
  Sense strand starting at position 3594 of SEQ ID NO: 1245165
ugguaaguccauggagagu

SEQ ID NO: 1541543 - RNA, 19 nt, Artificial Sequence
  Description of Artificial Sequence: Synthetic oligonucleotide
  Antisense strand to SEQ ID NO: 1541542
acucuccauggacuuacca

SEQ ID NO: 1541544 - RNA, 19 nt, Artificial Sequence
  Description of Artificial Sequence: Synthetic oligonucleotide
  Sense strand starting at position 3635 of SEQ ID NO: 1245165
acagaaaguugacuucugu

SEQ ID NO: 1541545 - RNA, 19 nt, Artificial Sequence
  Description of Artificial Sequence: Synthetic oligonucleotide
  Antisense strand to SEQ ID NO: 1541544
acagaagucaacuuucugu

SEQ ID NO: 1541546 - RNA, 19 nt, Artificial Sequence
  Description of Artificial Sequence: Synthetic oligonucleotide
  Sense strand starting at position 3739 of SEQ ID NO: 1245165
auuagaucguaagaagguu

SEQ ID NO: 1541547 - RNA, 19 nt, Artificial Sequence
  Description of Artificial Sequence: Synthetic oligonucleotide
  Antisense strand to SEQ ID NO: 1541546
aaccuucuuacgaucuaau

SEQ ID NO: 1541548 - RNA, 19 nt, Artificial Sequence
  Description of Artificial Sequence: Synthetic oligonucleotide
  Sense strand starting at position 3786 of SEQ ID NO: 1245165
guugaauuaugcccuuuaa

SEQ ID NO: 1541549 - RNA, 19 nt, Artificial Sequence
  Description of Artificial Sequence: Synthetic oligonucleotide
  Antisense strand to SEQ ID NO: 1541548
uuaaagggcauaauucaac

SEQ ID NO: 1541550 - RNA, 19 nt, Artificial Sequence
  Description of Artificial Sequence: Synthetic oligonucleotide
  Sense strand starting at position 3798 of SEQ ID NO: 1245165
ccuuuaaauggguggguuu

SEQ ID NO: 1541551 - RNA, 19 nt, Artificial Sequence
  Description of Artificial Sequence: Synthetic oligonucleotide
  Antisense strand to SEQ ID NO: 1541550
aaacccacccauuuaaagg

SEQ ID NO: 1541552 - RNA, 19 nt, Artificial Sequence
  Description of Artificial Sequence: Synthetic oligonucleotide
  Sense strand starting at position 3964 of SEQ ID NO: 1245165
aguguggacggcugagaaa

SEQ ID NO: 1541553 - RNA, 19 nt, Artificial Sequence
  Description of Artificial Sequence: Synthetic oligonucleotide
  Antisense strand to SEQ ID NO: 1541552
uuucucagccguccacacu

SEQ ID NO: 1541554 - RNA, 19 nt, Artificial Sequence
  Description of Artificial Sequence: Synthetic oligonucleotide
  Sense strand starting at position 20 of SEQ ID NO: 1245166
guaucuacuugcccuauuu

SEQ ID NO: 1541555 - RNA, 19 nt, Artificial Sequence
  Description of Artificial Sequence: Synthetic oligonucleotide
  Antisense strand to SEQ ID NO: 1541554
aaauagggcaaguagauac

SEQ ID NO: 1541556 - RNA, 19 nt, Artificial Sequence
  Description of Artificial Sequence: Synthetic oligonucleotide
  Sense strand starting at position 37 of SEQ ID NO: 1245166
uuagaauuguucuuccuug

SEQ ID NO: 1541557 - RNA, 19 nt, Artificial Sequence
  Description of Artificial Sequence: Synthetic oligonucleotide
  Antisense strand to SEQ ID NO: 1541556
caaggaagaacaauucuaa

SEQ ID NO: 1541558 - RNA, 19 nt, Artificial Sequence
  Description of Artificial Sequence: Synthetic oligonucleotide
  Sense strand starting at position 343 of SEQ ID NO: 1245166
aucuuuccuccguauugua

SEQ ID NO: 1541559 - RNA, 19 nt, Artificial Sequence
  Description of Artificial Sequence: Synthetic oligonucleotide
  Antisense strand to SEQ ID NO: 1541558
uacaauacggaggaaagau

SEQ ID NO: 1541560 - RNA, 19 nt, Artificial Sequence
  Description of Artificial Sequence: Synthetic oligonucleotide
  Sense strand starting at position 383 of SEQ ID NO: 1245166
acacaaaucuggucauguc

SEQ ID NO: 1541561 - RNA, 19 nt, Artificial Sequence
  Description of Artificial Sequence: Synthetic oligonucleotide
  Antisense strand to SEQ ID NO: 1541560
gacaugaccagauuugugu

SEQ ID NO: 1541562 - RNA, 19 nt, Artificial Sequence
  Description of Artificial Sequence: Synthetic oligonucleotide
  Sense strand starting at position 393 of SEQ ID NO: 1245166
ggucaugucgcugucuuaa

SEQ ID NO: 1541563 - RNA, 19 nt, Artificial Sequence
  Description of Artificial Sequence: Synthetic oligonucleotide
  Antisense strand to SEQ ID NO: 1541562
uuaagacagcgacaugacc

SEQ ID NO: 1541564 - RNA, 19 nt, Artificial Sequence
  Description of Artificial Sequence: Synthetic oligonucleotide
  Sense strand starting at position 443 of SEQ ID NO: 1245166
ccaggucuacacugcuuaa

SEQ ID NO: 1541565 - RNA, 19 nt, Artificial Sequence
  Description of Artificial Sequence: Synthetic oligonucleotide
  Antisense strand to SEQ ID NO: 1541564
uuaagcaguguagaccugg

SEQ ID NO: 1541566 - RNA, 19 nt, Artificial Sequence
  Description of Artificial Sequence: Synthetic oligonucleotide
  Sense strand starting at position 505 of SEQ ID NO: 1245166
ccgaguuaauguuuacuca

SEQ ID NO: 1541567 - RNA, 19 nt, Artificial Sequence
  Description of Artificial Sequence: Synthetic oligonucleotide
  Antisense strand to SEQ ID NO: 1541566
ugaguaaacauuaacucgg

SEQ ID NO: 1541568 - RNA, 19 nt, Artificial Sequence
  Description of Artificial Sequence: Synthetic oligonucleotide
  Sense strand starting at position 506 of SEQ ID NO: 1245166
cgaguuaauguuuacucau

SEQ ID NO: 1541569 - RNA, 19 nt, Artificial Sequence
  Description of Artificial Sequence: Synthetic oligonucleotide
  Antisense strand to SEQ ID NO: 1541568
augaguaaacauuaacucg

SEQ ID NO: 1541570 - RNA, 19 nt, Artificial Sequence
  Description of Artificial Sequence: Synthetic oligonucleotide
  Sense strand starting at position 508 of SEQ ID NO: 1245166
aguuaauguuuacucaugu

SEQ ID NO: 1541571 - RNA, 19 nt, Artificial Sequence
  Description of Artificial Sequence: Synthetic oligonucleotide
  Antisense strand to SEQ ID NO: 1541570
acaugaguaaacauuaacu

SEQ ID NO: 1541572 - RNA, 19 nt, Artificial Sequence
  Description of Artificial Sequence: Synthetic oligonucleotide
  Sense strand starting at position 509 of SEQ ID NO: 1245166
guuaauguuuacucaugua

SEQ ID NO: 1541573 - RNA, 19 nt, Artificial Sequence
  Description of Artificial Sequence: Synthetic oligonucleotide
  Antisense strand to SEQ ID NO: 1541572
uacaugaguaaacauuaac

SEQ ID NO: 1541574 - RNA, 19 nt, Artificial Sequence
  Description of Artificial Sequence: Synthetic oligonucleotide
  Sense strand starting at position 517 of SEQ ID NO: 1245166
uuacucauguaucagauuu

SEQ ID NO: 1541575 - RNA, 19 nt, Artificial Sequence
  Description of Artificial Sequence: Synthetic oligonucleotide
  Antisense strand to SEQ ID NO: 1541574
aaaucugauacaugaguaa

SEQ ID NO: 1541576 - RNA, 19 nt, Artificial Sequence
  Description of Artificial Sequence: Synthetic oligonucleotide
  Sense strand starting at position 556 of SEQ ID NO: 1245166
caagaagcuuucgcagaua

SEQ ID NO: 1541577 - RNA, 19 nt, Artificial Sequence
  Description of Artificial Sequence: Synthetic oligonucleotide
  Antisense strand to SEQ ID NO: 1541576
uaucugcgaaagcuucuug

SEQ ID NO: 1541578 - RNA, 19 nt, Artificial Sequence
  Description of Artificial Sequence: Synthetic oligonucleotide
  Sense strand starting at position 559 of SEQ ID NO: 1245166
gaagcuuucgcagauacac

SEQ ID NO: 1541579 - RNA, 19 nt, Artificial Sequence
  Description of Artificial Sequence: Synthetic oligonucleotide
  Antisense strand to SEQ ID NO: 1541578
guguaucugcgaaagcuuc

SEQ ID NO: 1541580 - RNA, 19 nt, Artificial Sequence
  Description of Artificial Sequence: Synthetic oligonucleotide
  Sense strand starting at position 614 of SEQ ID NO: 1245166
ucucuauacuuguuauugu

SEQ ID NO: 1541581 - RNA, 19 nt, Artificial Sequence
  Description of Artificial Sequence: Synthetic oligonucleotide
  Antisense strand to SEQ ID NO: 1541580
acaauaacaaguauagaga

SEQ ID NO: 1541582 - RNA, 19 nt, Artificial Sequence
  Description of Artificial Sequence: Synthetic oligonucleotide
  Sense strand starting at position 617 of SEQ ID NO: 1245166
cuauacuuguuauugucau

SEQ ID NO: 1541583 - RNA, 19 nt, Artificial Sequence
  Description of Artificial Sequence: Synthetic oligonucleotide
  Antisense strand to SEQ ID NO: 1541582
augacaauaacaaguauag

SEQ ID NO: 1541584 - RNA, 19 nt, Artificial Sequence
  Description of Artificial Sequence: Synthetic oligonucleotide
  Sense strand starting at position 625 of SEQ ID NO: 1245166
guuauugucauuuguuuag

SEQ ID NO: 1541585 - RNA, 19 nt, Artificial Sequence
  Description of Artificial Sequence: Synthetic oligonucleotide
  Antisense strand to SEQ ID NO: 1541584
cuaaacaaaugacaauaac

SEQ ID NO: 1541586 - RNA, 19 nt, Artificial Sequence
  Description of Artificial Sequence: Synthetic oligonucleotide
  Sense strand starting at position 766 of SEQ ID NO: 1245166
aaucuugcuccuggguuua

SEQ ID NO: 1541587 - RNA, 19 nt, Artificial Sequence
  Description of Artificial Sequence: Synthetic oligonucleotide
  Antisense strand to SEQ ID NO: 1541586
uaaacccaggagcaagauu

SEQ ID NO: 1541588 - RNA, 19 nt, Artificial Sequence
  Description of Artificial Sequence: Synthetic oligonucleotide
  Sense strand starting at position 802 of SEQ ID NO: 1245166
cgggcauacuugguacaca

SEQ ID NO: 1541589 - RNA, 19 nt, Artificial Sequence
  Description of Artificial Sequence: Synthetic oligonucleotide
  Antisense strand to SEQ ID NO: 1541588
uguguaccaaguaugcccg

SEQ ID NO: 1541590 - RNA, 19 nt, Artificial Sequence
  Description of Artificial Sequence: Synthetic oligonucleotide
  Sense strand starting at position 822 of SEQ ID NO: 1245166
cgugagguccuggaaggua

SEQ ID NO: 1541591 - RNA, 19 nt, Artificial Sequence
  Description of Artificial Sequence: Synthetic oligonucleotide
  Antisense strand to SEQ ID NO: 1541590
uaccuuccaggaccucacg

SEQ ID NO: 1541592 - RNA, 19 nt, Artificial Sequence
  Description of Artificial Sequence: Synthetic oligonucleotide
  Sense strand starting at position 825 of SEQ ID NO: 1245166
gagguccuggaagguauaa

SEQ ID NO: 1541593 - RNA, 19 nt, Artificial Sequence
  Description of Artificial Sequence: Synthetic oligonucleotide
  Antisense strand to SEQ ID NO: 1541592
uuauaccuuccaggaccuc

SEQ ID NO: 1541594 - RNA, 19 nt, Artificial Sequence
  Description of Artificial Sequence: Synthetic oligonucleotide
  Sense strand starting at position 827 of SEQ ID NO: 1245166
gguccuggaagguauaacu

SEQ ID NO: 1541595 - RNA, 19 nt, Artificial Sequence
  Description of Artificial Sequence: Synthetic oligonucleotide
  Antisense strand to SEQ ID NO: 1541594
aguuauaccuuccaggacc

SEQ ID NO: 1541596 - RNA, 19 nt, Artificial Sequence
  Description of Artificial Sequence: Synthetic oligonucleotide
  Sense strand starting at position 934 of SEQ ID NO: 1245166
gaacaugagugucugaaug

SEQ ID NO: 1541597 - RNA, 19 nt, Artificial Sequence
  Description of Artificial Sequence: Synthetic oligonucleotide
  Antisense strand to SEQ ID NO: 1541596
cauucagacacucauguuc

SEQ ID NO: 1541598 - RNA, 19 nt, Artificial Sequence
  Description of Artificial Sequence: Synthetic oligonucleotide
  Sense strand starting at position 942 of SEQ ID NO: 1245166
gugucugaauguccugaua

SEQ ID NO: 1541599 - RNA, 19 nt, Artificial Sequence
  Description of Artificial Sequence: Synthetic oligonucleotide
  Antisense strand to SEQ ID NO: 1541598
uaucaggacauucagacac

SEQ ID NO: 1541600 - RNA, 19 nt, Artificial Sequence
  Description of Artificial Sequence: Synthetic oligonucleotide
  Sense strand starting at position 945 of SEQ ID NO: 1245166
ucugaauguccugauaacu

SEQ ID NO: 1541601 - RNA, 19 nt, Artificial Sequence
  Description of Artificial Sequence: Synthetic oligonucleotide
  Antisense strand to SEQ ID NO: 1541600
aguuaucaggacauucaga

SEQ ID NO: 1541602 - RNA, 19 nt, Artificial Sequence
  Description of Artificial Sequence: Synthetic oligonucleotide
  Sense strand starting at position 1566 of SEQ ID NO: 1245166
gucccugacugacuucuau

SEQ ID NO: 1541603 - RNA, 19 nt, Artificial Sequence
  Description of Artificial Sequence: Synthetic oligonucleotide
  Antisense strand to SEQ ID NO: 1541602
auagaagucagucagggac

SEQ ID NO: 1541604 - RNA, 19 nt, Artificial Sequence
  Description of Artificial Sequence: Synthetic oligonucleotide
  Sense strand starting at position 1808 of SEQ ID NO: 1245166
cucacuguucuugaggaau

SEQ ID NO: 1541605 - RNA, 19 nt, Artificial Sequence
  Description of Artificial Sequence: Synthetic oligonucleotide
  Antisense strand to SEQ ID NO: 1541604
auuccucaagaacagugag

SEQ ID NO: 1541606 - RNA, 19 nt, Artificial Sequence
  Description of Artificial Sequence: Synthetic oligonucleotide
  Sense strand starting at position 2032 of SEQ ID NO: 1245166
gccuccaucuggcuaagaa

SEQ ID NO: 1541607 - RNA, 19 nt, Artificial Sequence
  Description of Artificial Sequence: Synthetic oligonucleotide
  Antisense strand to SEQ ID NO: 1541606
uucuuagccagauggaggc

SEQ ID NO: 1541608 - RNA, 19 nt, Artificial Sequence
  Description of Artificial Sequence: Synthetic oligonucleotide
  Sense strand starting at position 2033 of SEQ ID NO: 1245166
ccuccaucuggcuaagaac

SEQ ID NO: 1541609 - RNA, 19 nt, Artificial Sequence
  Description of Artificial Sequence: Synthetic oligonucleotide
  Antisense strand to SEQ ID NO: 1541608
guucuuagccagauggagg

SEQ ID NO: 1541610 - RNA, 19 nt, Artificial Sequence
  Description of Artificial Sequence: Synthetic oligonucleotide
  Sense strand starting at position 2092 of SEQ ID NO: 1245166
accggugaugugcaaucaa

SEQ ID NO: 1541611 - RNA, 19 nt, Artificial Sequence
  Description of Artificial Sequence: Synthetic oligonucleotide
  Antisense strand to SEQ ID NO: 1541610
uugauugcacaucaccggu

SEQ ID NO: 1541612 - RNA, 19 nt, Artificial Sequence
  Description of Artificial Sequence: Synthetic oligonucleotide
  Sense strand starting at position 2104 of SEQ ID NO: 1245166
caaucaaugcucugaugug

SEQ ID NO: 1541613 - RNA, 19 nt, Artificial Sequence
  Description of Artificial Sequence: Synthetic oligonucleotide
  Antisense strand to SEQ ID NO: 1541612
cacaucagagcauugauug

SEQ ID NO: 1541614 - RNA, 19 nt, Artificial Sequence
  Description of Artificial Sequence: Synthetic oligonucleotide
  Sense strand starting at position 2778 of SEQ ID NO: 1245166
ggaggaagguuucuuguuu

SEQ ID NO: 1541615 - RNA, 19 nt, Artificial Sequence
  Description of Artificial Sequence: Synthetic oligonucleotide
  Antisense strand to SEQ ID NO: 1541614
aaacaagaaaccuuccucc

SEQ ID NO: 1541616 - RNA, 19 nt, Artificial Sequence
  Description of Artificial Sequence: Synthetic oligonucleotide
  Sense strand starting at position 2779 of SEQ ID NO: 1245166
gaggaagguuucuuguuua

SEQ ID NO: 1541617 - RNA, 19 nt, Artificial Sequence
  Description of Artificial Sequence: Synthetic oligonucleotide
  Antisense strand to SEQ ID NO: 1541616
uaaacaagaaaccuuccuc

SEQ ID NO: 1541618 - RNA, 19 nt, Artificial Sequence
  Description of Artificial Sequence: Synthetic oligonucleotide
  Sense strand starting at position 2848 of SEQ ID NO: 1245166
ugacgcuugcauuauauuu

SEQ ID NO: 1541619 - RNA, 19 nt, Artificial Sequence
  Description of Artificial Sequence: Synthetic oligonucleotide
  Antisense strand to SEQ ID NO: 1541618
aaauauaaugcaagcguca

SEQ ID NO: 1541620 - RNA, 19 nt, Artificial Sequence
  Description of Artificial Sequence: Synthetic oligonucleotide
  Sense strand starting at position 3153 of SEQ ID NO: 1245166
ccugcuuagcuguauguga

SEQ ID NO: 1541621 - RNA, 19 nt, Artificial Sequence
  Description of Artificial Sequence: Synthetic oligonucleotide
  Antisense strand to SEQ ID NO: 1541620
ucacauacagcuaagcagg

SEQ ID NO: 1541622 - RNA, 19 nt, Artificial Sequence
  Description of Artificial Sequence: Synthetic oligonucleotide
  Sense strand starting at position 3161 of SEQ ID NO: 1245166
gcuguaugugaugguuaag

SEQ ID NO: 1541623 - RNA, 19 nt, Artificial Sequence
  Description of Artificial Sequence: Synthetic oligonucleotide
  Antisense strand to SEQ ID NO: 1541622
cuuaaccaucacauacagc

SEQ ID NO: 1541624 - RNA, 19 nt, Artificial Sequence
  Description of Artificial Sequence: Synthetic oligonucleotide
  Sense strand starting at position 3164 of SEQ ID NO: 1245166
guaugugaugguuaagacu

SEQ ID NO: 1541625 - RNA, 19 nt, Artificial Sequence
  Description of Artificial Sequence: Synthetic oligonucleotide
  Antisense strand to SEQ ID NO: 1541624
agucuuaaccaucacauac

SEQ ID NO: 1541626 - RNA, 19 nt, Artificial Sequence
  Description of Artificial Sequence: Synthetic oligonucleotide
  Sense strand starting at position 3292 of SEQ ID NO: 1245166
guccacucuuaauccaagu

SEQ ID NO: 1541627 - RNA, 19 nt, Artificial Sequence
  Description of Artificial Sequence: Synthetic oligonucleotide
  Antisense strand to SEQ ID NO: 1541626
acuuggauuaagaguggac

SEQ ID NO: 1541628 - RNA, 19 nt, Artificial Sequence
  Description of Artificial Sequence: Synthetic oligonucleotide
  Sense strand starting at position 3820 of SEQ ID NO: 1245166
gcuaguuuauggccagacu

SEQ ID NO: 1541629 - RNA, 19 nt, Artificial Sequence
  Description of Artificial Sequence: Synthetic oligonucleotide
  Antisense strand to SEQ ID NO: 1541628
agucuggccauaaacuagc

SEQ ID NO: 1541630 - RNA, 19 nt, Artificial Sequence
  Description of Artificial Sequence: Synthetic oligonucleotide
  Sense strand starting at position 3823 of SEQ ID NO: 1245166
aguuuauggccagacuguu

SEQ ID NO: 1541631 - RNA, 19 nt, Artificial Sequence
  Description of Artificial Sequence: Synthetic oligonucleotide
  Antisense strand to SEQ ID NO: 1541630
aacagucuggccauaaacu

SEQ ID NO: 1541632 - RNA, 19 nt, Artificial Sequence
  Description of Artificial Sequence: Synthetic oligonucleotide
  Sense strand starting at position 3983 of SEQ ID NO: 1245166
cggcuuauugugggaucuu

SEQ ID NO: 1541633 - RNA, 19 nt, Artificial Sequence
  Description of Artificial Sequence: Synthetic oligonucleotide
  Antisense strand to SEQ ID NO: 1541632
aagaucccacaauaagccg

SEQ ID NO: 1541634 - RNA, 19 nt, Artificial Sequence
  Description of Artificial Sequence: Synthetic oligonucleotide
  Sense strand starting at position 91 of SEQ ID NO: 1245167
ggcugaugcuugcucugga

SEQ ID NO: 1541635 - RNA, 19 nt, Artificial Sequence
  Description of Artificial Sequence: Synthetic oligonucleotide
  Antisense strand to SEQ ID NO: 1541634
uccagagcaagcaucagcc

SEQ ID NO: 1541636 - RNA, 19 nt, Artificial Sequence
  Description of Artificial Sequence: Synthetic oligonucleotide
  Sense strand starting at position 92 of SEQ ID NO: 1245167
gcugaugcuugcucuggaa

SEQ ID NO: 1541637 - RNA, 19 nt, Artificial Sequence
  Description of Artificial Sequence: Synthetic oligonucleotide
  Antisense strand to SEQ ID NO: 1541636
uuccagagcaagcaucagc

SEQ ID NO: 1541638 - RNA, 19 nt, Artificial Sequence
  Description of Artificial Sequence: Synthetic oligonucleotide
  Sense strand starting at position 96 of SEQ ID NO: 1245167
augcuugcucuggaaggaa

SEQ ID NO: 1541639 - RNA, 19 nt, Artificial Sequence
  Description of Artificial Sequence: Synthetic oligonucleotide
  Antisense strand to SEQ ID NO: 1541638
uuccuuccagagcaagcau

SEQ ID NO: 1541640 - RNA, 19 nt, Artificial Sequence
  Description of Artificial Sequence: Synthetic oligonucleotide
  Sense strand starting at position 169 of SEQ ID NO: 1245167
cucugcuuuccaggaagaa

SEQ ID NO: 1541641 - RNA, 19 nt, Artificial Sequence
  Description of Artificial Sequence: Synthetic oligonucleotide
  Antisense strand to SEQ ID NO: 1541640
uucuuccuggaaagcagag

SEQ ID NO: 1541642 - RNA, 19 nt, Artificial Sequence
  Description of Artificial Sequence: Synthetic oligonucleotide
  Sense strand starting at position 170 of SEQ ID NO: 1245167
ucugcuuuccaggaagaac

SEQ ID NO: 1541643 - RNA, 19 nt, Artificial Sequence
  Description of Artificial Sequence: Synthetic oligonucleotide
  Antisense strand to SEQ ID NO: 1541642
guucuuccuggaaagcaga

SEQ ID NO: 1541644 - RNA, 19 nt, Artificial Sequence
  Description of Artificial Sequence: Synthetic oligonucleotide
  Sense strand starting at position 274 of SEQ ID NO: 1245167
ggaguuucgcaacacucuu

SEQ ID NO: 1541645 - RNA, 19 nt, Artificial Sequence
  Description of Artificial Sequence: Synthetic oligonucleotide
  Antisense strand to SEQ ID NO: 1541644
aagaguguugcgaaacucc

SEQ ID NO: 1541646 - RNA, 19 nt, Artificial Sequence
  Description of Artificial Sequence: Synthetic oligonucleotide
  Sense strand starting at position 377 of SEQ ID NO: 1245167
cuuaguauugcagauuaau

SEQ ID NO: 1541647 - RNA, 19 nt, Artificial Sequence
  Description of Artificial Sequence: Synthetic oligonucleotide
  Antisense strand to SEQ ID NO: 1541646
auuaaucugcaauacuaag

SEQ ID NO: 1541648 - RNA, 19 nt, Artificial Sequence
  Description of Artificial Sequence: Synthetic oligonucleotide
  Sense strand starting at position 955 of SEQ ID NO: 1245167
ucuuacaguccugggagaa

SEQ ID NO: 1541649 - RNA, 19 nt, Artificial Sequence
  Description of Artificial Sequence: Synthetic oligonucleotide
  Antisense strand to SEQ ID NO: 1541648
uucucccaggacuguaaga

SEQ ID NO: 1541650 - RNA, 19 nt, Artificial Sequence
  Description of Artificial Sequence: Synthetic oligonucleotide
  Sense strand starting at position 956 of SEQ ID NO: 1245167
cuuacaguccugggagaac

SEQ ID NO: 1541651 - RNA, 19 nt, Artificial Sequence
  Description of Artificial Sequence: Synthetic oligonucleotide
  Antisense strand to SEQ ID NO: 1541650
guucucccaggacuguaag

SEQ ID NO: 1541652 - RNA, 19 nt, Artificial Sequence
  Description of Artificial Sequence: Synthetic oligonucleotide
  Sense strand starting at position 1005 of SEQ ID NO: 1245167
ugugucaggcacugcuaaa

SEQ ID NO: 1541653 - RNA, 19 nt, Artificial Sequence
  Description of Artificial Sequence: Synthetic oligonucleotide
  Antisense strand to SEQ ID NO: 1541652
uuuagcagugccugacaca

SEQ ID NO: 1541654 - RNA, 19 nt, Artificial Sequence
  Description of Artificial Sequence: Synthetic oligonucleotide
  Sense strand starting at position 1152 of SEQ ID NO: 1245167
guaacaaguuccuccugaa

SEQ ID NO: 1541655 - RNA, 19 nt, Artificial Sequence
  Description of Artificial Sequence: Synthetic oligonucleotide
  Antisense strand to SEQ ID NO: 1541654
uucaggaggaacuuguuac

SEQ ID NO: 1541656 - RNA, 19 nt, Artificial Sequence
  Description of Artificial Sequence: Synthetic oligonucleotide
  Sense strand starting at position 1208 of SEQ ID NO: 1245167
cagggugugggucagagua

SEQ ID NO: 1541657 - RNA, 19 nt, Artificial Sequence
  Description of Artificial Sequence: Synthetic oligonucleotide
  Antisense strand to SEQ ID NO: 1541656
uacucugacccacacccug

SEQ ID NO: 1541658 - RNA, 19 nt, Artificial Sequence
  Description of Artificial Sequence: Synthetic oligonucleotide
  Sense strand starting at position 1224 of SEQ ID NO: 1245167
guaaguuuggguugaggau

SEQ ID NO: 1541659 - RNA, 19 nt, Artificial Sequence
  Description of Artificial Sequence: Synthetic oligonucleotide
  Antisense strand to SEQ ID NO: 1541658
auccucaacccaaacuuac

SEQ ID NO: 1541660 - RNA, 19 nt, Artificial Sequence
  Description of Artificial Sequence: Synthetic oligonucleotide
  Sense strand starting at position 1319 of SEQ ID NO: 1245167
cgagcugaauccguucaua

SEQ ID NO: 1541661 - RNA, 19 nt, Artificial Sequence
  Description of Artificial Sequence: Synthetic oligonucleotide
  Antisense strand to SEQ ID NO: 1541660
uaugaacggauucagcucg

SEQ ID NO: 1541662 - RNA, 19 nt, Artificial Sequence
  Description of Artificial Sequence: Synthetic oligonucleotide
  Sense strand starting at position 1322 of SEQ ID NO: 1245167
gcugaauccguucauaggu

SEQ ID NO: 1541663 - RNA, 19 nt, Artificial Sequence
  Description of Artificial Sequence: Synthetic oligonucleotide
  Antisense strand to SEQ ID NO: 1541662
accuaugaacggauucagc

SEQ ID NO: 1541664 - RNA, 19 nt, Artificial Sequence
  Description of Artificial Sequence: Synthetic oligonucleotide
  Sense strand starting at position 1373 of SEQ ID NO: 1245167
uggagagauuucuacauuc

SEQ ID NO: 1541665 - RNA, 19 nt, Artificial Sequence
  Description of Artificial Sequence: Synthetic oligonucleotide
  Antisense strand to SEQ ID NO: 1541664
gaauguagaaaucucucca

SEQ ID NO: 1541666 - RNA, 19 nt, Artificial Sequence
  Description of Artificial Sequence: Synthetic oligonucleotide
  Sense strand starting at position 1485 of SEQ ID NO: 1245167
gggagguguguccaggaca

SEQ ID NO: 1541667 - RNA, 19 nt, Artificial Sequence
  Description of Artificial Sequence: Synthetic oligonucleotide
  Antisense strand to SEQ ID NO: 1541666
uguccuggacacaccuccc

SEQ ID NO: 1541668 - RNA, 19 nt, Artificial Sequence
  Description of Artificial Sequence: Synthetic oligonucleotide
  Sense strand starting at position 1486 of SEQ ID NO: 1245167
ggagguguguccaggacac

SEQ ID NO: 1541669 - RNA, 19 nt, Artificial Sequence
  Description of Artificial Sequence: Synthetic oligonucleotide
  Antisense strand to SEQ ID NO: 1541668
guguccuggacacaccucc

SEQ ID NO: 1541670 - RNA, 19 nt, Artificial Sequence
  Description of Artificial Sequence: Synthetic oligonucleotide
  Sense strand starting at position 2502 of SEQ ID NO: 1245167
ugcagaacuccguacuguu

SEQ ID NO: 1541671 - RNA, 19 nt, Artificial Sequence
  Description of Artificial Sequence: Synthetic oligonucleotide
  Antisense strand to SEQ ID NO: 1541670
aacaguacggaguucugca

SEQ ID NO: 1541672 - RNA, 19 nt, Artificial Sequence
  Description of Artificial Sequence: Synthetic oligonucleotide
  Sense strand starting at position 2512 of SEQ ID NO: 1245167
cguacuguucugggucaag

SEQ ID NO: 1541673 - RNA, 19 nt, Artificial Sequence
  Description of Artificial Sequence: Synthetic oligonucleotide
  Antisense strand to SEQ ID NO: 1541672
cuugacccagaacaguacg

SEQ ID NO: 1541674 - RNA, 19 nt, Artificial Sequence
  Description of Artificial Sequence: Synthetic oligonucleotide
  Sense strand starting at position 2984 of SEQ ID NO: 1245167
uggagacggaacugugauu

SEQ ID NO: 1541675 - RNA, 19 nt, Artificial Sequence
  Description of Artificial Sequence: Synthetic oligonucleotide
  Antisense strand to SEQ ID NO: 1541674
aaucacaguuccgucucca

SEQ ID NO: 1541676 - RNA, 19 nt, Artificial Sequence
  Description of Artificial Sequence: Synthetic oligonucleotide
  Sense strand starting at position 2989 of SEQ ID NO: 1245167
acggaacugugauugcgau

SEQ ID NO: 1541677 - RNA, 19 nt, Artificial Sequence
  Description of Artificial Sequence: Synthetic oligonucleotide
  Antisense strand to SEQ ID NO: 1541676
aucgcaaucacaguuccgu

SEQ ID NO: 1541678 - RNA, 19 nt, Artificial Sequence
  Description of Artificial Sequence: Synthetic oligonucleotide
  Sense strand starting at position 2995 of SEQ ID NO: 1245167
cugugauugcgaugagccu

SEQ ID NO: 1541679 - RNA, 19 nt, Artificial Sequence
  Description of Artificial Sequence: Synthetic oligonucleotide
  Antisense strand to SEQ ID NO: 1541678
aggcucaucgcaaucacag

SEQ ID NO: 1541680 - RNA, 19 nt, Artificial Sequence
  Description of Artificial Sequence: Synthetic oligonucleotide
  Sense strand starting at position 3002 of SEQ ID NO: 1245167
ugcgaugagccucuguagu

SEQ ID NO: 1541681 - RNA, 19 nt, Artificial Sequence
  Description of Artificial Sequence: Synthetic oligonucleotide
  Antisense strand to SEQ ID NO: 1541680
acuacagaggcucaucgca

SEQ ID NO: 1541682 - RNA, 19 nt, Artificial Sequence
  Description of Artificial Sequence: Synthetic oligonucleotide
  Sense strand starting at position 3004 of SEQ ID NO: 1245167
cgaugagccucuguaguga

SEQ ID NO: 1541683 - RNA, 19 nt, Artificial Sequence
  Description of Artificial Sequence: Synthetic oligonucleotide
  Antisense strand to SEQ ID NO: 1541682
ucacuacagaggcucaucg

SEQ ID NO: 1541684 - RNA, 19 nt, Artificial Sequence
  Description of Artificial Sequence: Synthetic oligonucleotide
  Sense strand starting at position 3009 of SEQ ID NO: 1245167
agccucuguagugaggaau

SEQ ID NO: 1541685 - RNA, 19 nt, Artificial Sequence
  Description of Artificial Sequence: Synthetic oligonucleotide
  Antisense strand to SEQ ID NO: 1541684
auuccucacuacagaggcu

SEQ ID NO: 1541686 - RNA, 19 nt, Artificial Sequence
  Description of Artificial Sequence: Synthetic oligonucleotide
  Sense strand starting at position 3076 of SEQ ID NO: 1245167
ggaggcauuucccgaaaga

SEQ ID NO: 1541687 - RNA, 19 nt, Artificial Sequence
  Description of Artificial Sequence: Synthetic oligonucleotide
  Antisense strand to SEQ ID NO: 1541686
ucuuucgggaaaugccucc

SEQ ID NO: 1541688 - RNA, 19 nt, Artificial Sequence
  Description of Artificial Sequence: Synthetic oligonucleotide
  Sense strand starting at position 3102 of SEQ ID NO: 1245167
cgugguuuccaagguuaau

SEQ ID NO: 1541689 - RNA, 19 nt, Artificial Sequence
  Description of Artificial Sequence: Synthetic oligonucleotide
  Antisense strand to SEQ ID NO: 1541688
auuaaccuuggaaaccacg

SEQ ID NO: 1541690 - RNA, 19 nt, Artificial Sequence
  Description of Artificial Sequence: Synthetic oligonucleotide
  Sense strand starting at position 3191 of SEQ ID NO: 1245167
uucggagucugggagaaua

SEQ ID NO: 1541691 - RNA, 19 nt, Artificial Sequence
  Description of Artificial Sequence: Synthetic oligonucleotide
  Antisense strand to SEQ ID NO: 1541690
uauucucccagacuccgaa

SEQ ID NO: 1541692 - RNA, 19 nt, Artificial Sequence
  Description of Artificial Sequence: Synthetic oligonucleotide
  Sense strand starting at position 3214 of SEQ ID NO: 1245167
gaguuuguacaagaaccuu

SEQ ID NO: 1541693 - RNA, 19 nt, Artificial Sequence
  Description of Artificial Sequence: Synthetic oligonucleotide
  Antisense strand to SEQ ID NO: 1541692
aagguucuuguacaaacuc

SEQ ID NO: 1541694 - RNA, 19 nt, Artificial Sequence
  Description of Artificial Sequence: Synthetic oligonucleotide
  Sense strand starting at position 3289 of SEQ ID NO: 1245167
ugaguacuuuaugcugaaa

SEQ ID NO: 1541695 - RNA, 19 nt, Artificial Sequence
  Description of Artificial Sequence: Synthetic oligonucleotide
  Antisense strand to SEQ ID NO: 1541694
uuucagcauaaaguacuca

SEQ ID NO: 1541696 - RNA, 19 nt, Artificial Sequence
  Description of Artificial Sequence: Synthetic oligonucleotide
  Sense strand starting at position 3292 of SEQ ID NO: 1245167
guacuuuaugcugaaacac

SEQ ID NO: 1541697 - RNA, 19 nt, Artificial Sequence
  Description of Artificial Sequence: Synthetic oligonucleotide
  Antisense strand to SEQ ID NO: 1541696
guguuucagcauaaaguac

SEQ ID NO: 1541698 - RNA, 19 nt, Artificial Sequence
  Description of Artificial Sequence: Synthetic oligonucleotide
  Sense strand starting at position 3304 of SEQ ID NO: 1245167
gaaacaccuuguggagaaa

SEQ ID NO: 1541699 - RNA, 19 nt, Artificial Sequence
  Description of Artificial Sequence: Synthetic oligonucleotide
  Antisense strand to SEQ ID NO: 1541698
uuucuccacaagguguuuc

SEQ ID NO: 1541700 - RNA, 19 nt, Artificial Sequence
  Description of Artificial Sequence: Synthetic oligonucleotide
  Sense strand starting at position 3325 of SEQ ID NO: 1245167
uuaaguguaccguauaaga

SEQ ID NO: 1541701 - RNA, 19 nt, Artificial Sequence
  Description of Artificial Sequence: Synthetic oligonucleotide
  Antisense strand to SEQ ID NO: 1541700
ucuuauacgguacacuuaa

SEQ ID NO: 1541702 - RNA, 19 nt, Artificial Sequence
  Description of Artificial Sequence: Synthetic oligonucleotide
  Sense strand starting at position 3327 of SEQ ID NO: 1245167
aaguguaccguauaagaga

SEQ ID NO: 1541703 - RNA, 19 nt, Artificial Sequence
  Description of Artificial Sequence: Synthetic oligonucleotide
  Antisense strand to SEQ ID NO: 1541702
ucucuuauacgguacacuu

SEQ ID NO: 1541704 - RNA, 19 nt, Artificial Sequence
  Description of Artificial Sequence: Synthetic oligonucleotide
  Sense strand starting at position 3390 of SEQ ID NO: 1245167
cgcagauauggguacaacu

SEQ ID NO: 1541705 - RNA, 19 nt, Artificial Sequence
  Description of Artificial Sequence: Synthetic oligonucleotide
  Antisense strand to SEQ ID NO: 1541704
aguuguacccauaucugcg

SEQ ID NO: 1541706 - RNA, 19 nt, Artificial Sequence
  Description of Artificial Sequence: Synthetic oligonucleotide
  Sense strand starting at position 3885 of SEQ ID NO: 1245167
acuuaagauugugcuguga

SEQ ID NO: 1541707 - RNA, 19 nt, Artificial Sequence
  Description of Artificial Sequence: Synthetic oligonucleotide
  Antisense strand to SEQ ID NO: 1541706
ucacagcacaaucuuaagu

SEQ ID NO: 1541708 - RNA, 19 nt, Artificial Sequence
  Description of Artificial Sequence: Synthetic oligonucleotide
  Sense strand starting at position 3898 of SEQ ID NO: 1245167
cugugaaugcguuacuuua

SEQ ID NO: 1541709 - RNA, 19 nt, Artificial Sequence
  Description of Artificial Sequence: Synthetic oligonucleotide
  Antisense strand to SEQ ID NO: 1541708
uaaaguaacgcauucacag

SEQ ID NO: 1541710 - RNA, 19 nt, Artificial Sequence
  Description of Artificial Sequence: Synthetic oligonucleotide
  Sense strand starting at position 3900 of SEQ ID NO: 1245167
gugaaugcguuacuuuaaa

SEQ ID NO: 1541711 - RNA, 19 nt, Artificial Sequence
  Description of Artificial Sequence: Synthetic oligonucleotide
  Antisense strand to SEQ ID NO: 1541710
uuuaaaguaacgcauucac

SEQ ID NO: 1541712 - RNA, 19 nt, Artificial Sequence
  Description of Artificial Sequence: Synthetic oligonucleotide
  Sense strand starting at position 3919 of SEQ ID NO: 1245167
agaaaugcauucucuuguu

SEQ ID NO: 1541713 - RNA, 19 nt, Artificial Sequence
  Description of Artificial Sequence: Synthetic oligonucleotide
  Antisense strand to SEQ ID NO: 1541712
aacaagagaaugcauuucu

SEQ ID NO: 1541714 - RNA, 19 nt, Artificial Sequence
  Description of Artificial Sequence: Synthetic oligonucleotide
  Sense strand starting at position 97 of SEQ ID NO: 1245168
ugcauccuuuauguugaaa

SEQ ID NO: 1541715 - RNA, 19 nt, Artificial Sequence
  Description of Artificial Sequence: Synthetic oligonucleotide
  Antisense strand to SEQ ID NO: 1541714
uuucaacauaaaggaugca

SEQ ID NO: 1541716 - RNA, 19 nt, Artificial Sequence
  Description of Artificial Sequence: Synthetic oligonucleotide
  Sense strand starting at position 100 of SEQ ID NO: 1245168
auccuuuauguugaaagua

SEQ ID NO: 1541717 - RNA, 19 nt, Artificial Sequence
  Description of Artificial Sequence: Synthetic oligonucleotide
  Antisense strand to SEQ ID NO: 1541716
uacuuucaacauaaaggau

SEQ ID NO: 1541718 - RNA, 19 nt, Artificial Sequence
  Description of Artificial Sequence: Synthetic oligonucleotide
  Sense strand starting at position 232 of SEQ ID NO: 1245168
augacugucuccucuacga

SEQ ID NO: 1541719 - RNA, 19 nt, Artificial Sequence
  Description of Artificial Sequence: Synthetic oligonucleotide
  Antisense strand to SEQ ID NO: 1541718
ucguagaggagacagucau

SEQ ID NO: 1541720 - RNA, 19 nt, Artificial Sequence
  Description of Artificial Sequence: Synthetic oligonucleotide
  Sense strand starting at position 234 of SEQ ID NO: 1245168
gacugucuccucuacgagu

SEQ ID NO: 1541721 - RNA, 19 nt, Artificial Sequence
  Description of Artificial Sequence: Synthetic oligonucleotide
  Antisense strand to SEQ ID NO: 1541720
acucguagaggagacaguc

SEQ ID NO: 1541722 - RNA, 19 nt, Artificial Sequence
  Description of Artificial Sequence: Synthetic oligonucleotide
  Sense strand starting at position 243 of SEQ ID NO: 1245168
cucuacgagucaucuacau

SEQ ID NO: 1541723 - RNA, 19 nt, Artificial Sequence
  Description of Artificial Sequence: Synthetic oligonucleotide
  Antisense strand to SEQ ID NO: 1541722
auguagaugacucguagag

SEQ ID NO: 1541724 - RNA, 19 nt, Artificial Sequence
  Description of Artificial Sequence: Synthetic oligonucleotide
  Sense strand starting at position 247 of SEQ ID NO: 1245168
acgagucaucuacauuacu

SEQ ID NO: 1541725 - RNA, 19 nt, Artificial Sequence
  Description of Artificial Sequence: Synthetic oligonucleotide
  Antisense strand to SEQ ID NO: 1541724
aguaauguagaugacucgu

SEQ ID NO: 1541726 - RNA, 19 nt, Artificial Sequence
  Description of Artificial Sequence: Synthetic oligonucleotide
  Sense strand starting at position 358 of SEQ ID NO: 1245168
gucucucaaggguacauua

SEQ ID NO: 1541727 - RNA, 19 nt, Artificial Sequence
  Description of Artificial Sequence: Synthetic oligonucleotide
  Antisense strand to SEQ ID NO: 1541726
uaauguacccuugagagac

SEQ ID NO: 1541728 - RNA, 19 nt, Artificial Sequence
  Description of Artificial Sequence: Synthetic oligonucleotide
  Sense strand starting at position 429 of SEQ ID NO: 1245168
aauguaugauuugaaagug

SEQ ID NO: 1541729 - RNA, 19 nt, Artificial Sequence
  Description of Artificial Sequence: Synthetic oligonucleotide
  Antisense strand to SEQ ID NO: 1541728
cacuuucaaaucauacauu

SEQ ID NO: 1541730 - RNA, 19 nt, Artificial Sequence
  Description of Artificial Sequence: Synthetic oligonucleotide
  Sense strand starting at position 444 of SEQ ID NO: 1245168
agugaucugagauguaacu

SEQ ID NO: 1541731 - RNA, 19 nt, Artificial Sequence
  Description of Artificial Sequence: Synthetic oligonucleotide
  Antisense strand to SEQ ID NO: 1541730
aguuacaucucagaucacu

SEQ ID NO: 1541732 - RNA, 19 nt, Artificial Sequence
  Description of Artificial Sequence: Synthetic oligonucleotide
  Sense strand starting at position 462 of SEQ ID NO: 1245168
ugcccauguguuuaaucau

SEQ ID NO: 1541733 - RNA, 19 nt, Artificial Sequence
  Description of Artificial Sequence: Synthetic oligonucleotide
  Antisense strand to SEQ ID NO: 1541732
augauuaaacacaugggca

SEQ ID NO: 1541734 - RNA, 19 nt, Artificial Sequence
  Description of Artificial Sequence: Synthetic oligonucleotide
  Sense strand starting at position 465 of SEQ ID NO: 1245168
ccauguguuuaaucauuga

SEQ ID NO: 1541735 - RNA, 19 nt, Artificial Sequence
  Description of Artificial Sequence: Synthetic oligonucleotide
  Antisense strand to SEQ ID NO: 1541734
ucaaugauuaaacacaugg

SEQ ID NO: 1541736 - RNA, 19 nt, Artificial Sequence
  Description of Artificial Sequence: Synthetic oligonucleotide
  Sense strand starting at position 468 of SEQ ID NO: 1245168
uguguuuaaucauugagaa

SEQ ID NO: 1541737 - RNA, 19 nt, Artificial Sequence
  Description of Artificial Sequence: Synthetic oligonucleotide
  Antisense strand to SEQ ID NO: 1541736
uucucaaugauuaaacaca

SEQ ID NO: 1541738 - RNA, 19 nt, Artificial Sequence
  Description of Artificial Sequence: Synthetic oligonucleotide
  Sense strand starting at position 469 of SEQ ID NO: 1245168
guguuuaaucauugagaaa

SEQ ID NO: 1541739 - RNA, 19 nt, Artificial Sequence
  Description of Artificial Sequence: Synthetic oligonucleotide
  Antisense strand to SEQ ID NO: 1541738
uuucucaaugauuaaacac

SEQ ID NO: 1541740 - RNA, 19 nt, Artificial Sequence
  Description of Artificial Sequence: Synthetic oligonucleotide
  Sense strand starting at position 997 of SEQ ID NO: 1245168
cucccauacuuuguaguga

SEQ ID NO: 1541741 - RNA, 19 nt, Artificial Sequence
  Description of Artificial Sequence: Synthetic oligonucleotide
  Antisense strand to SEQ ID NO: 1541740
ucacuacaaaguaugggag

SEQ ID NO: 1541742 - RNA, 19 nt, Artificial Sequence
  Description of Artificial Sequence: Synthetic oligonucleotide
  Sense strand starting at position 1114 of SEQ ID NO: 1245168
cccacauuaucuguguacu

SEQ ID NO: 1541743 - RNA, 19 nt, Artificial Sequence
  Description of Artificial Sequence: Synthetic oligonucleotide
  Antisense strand to SEQ ID NO: 1541742
aguacacagauaauguggg

SEQ ID NO: 1541744 - RNA, 19 nt, Artificial Sequence
  Description of Artificial Sequence: Synthetic oligonucleotide
  Sense strand starting at position 1115 of SEQ ID NO: 1245168
ccacauuaucuguguacuc

SEQ ID NO: 1541745 - RNA, 19 nt, Artificial Sequence
  Description of Artificial Sequence: Synthetic oligonucleotide
  Antisense strand to SEQ ID NO: 1541744
gaguacacagauaaugugg

SEQ ID NO: 1541746 - RNA, 19 nt, Artificial Sequence
  Description of Artificial Sequence: Synthetic oligonucleotide
  Sense strand starting at position 1117 of SEQ ID NO: 1245168
acauuaucuguguacuccu

SEQ ID NO: 1541747 - RNA, 19 nt, Artificial Sequence
  Description of Artificial Sequence: Synthetic oligonucleotide
  Antisense strand to SEQ ID NO: 1541746
aggaguacacagauaaugu

SEQ ID NO: 1541748 - RNA, 19 nt, Artificial Sequence
  Description of Artificial Sequence: Synthetic oligonucleotide
  Sense strand starting at position 1414 of SEQ ID NO: 1245168
gggaaagcucgaugccaag

SEQ ID NO: 1541749 - RNA, 19 nt, Artificial Sequence
  Description of Artificial Sequence: Synthetic oligonucleotide
  Antisense strand to SEQ ID NO: 1541748
cuuggcaucgagcuuuccc

SEQ ID NO: 1541750 - RNA, 19 nt, Artificial Sequence
  Description of Artificial Sequence: Synthetic oligonucleotide
  Sense strand starting at position 1594 of SEQ ID NO: 1245168
cugcuuagucgcguguuaa

SEQ ID NO: 1541751 - RNA, 19 nt, Artificial Sequence
  Description of Artificial Sequence: Synthetic oligonucleotide
  Antisense strand to SEQ ID NO: 1541750
uuaacacgcgacuaagcag

SEQ ID NO: 1541752 - RNA, 19 nt, Artificial Sequence
  Description of Artificial Sequence: Synthetic oligonucleotide
  Sense strand starting at position 2329 of SEQ ID NO: 1245168
ccagacucgucuuuacauu

SEQ ID NO: 1541753 - RNA, 19 nt, Artificial Sequence
  Description of Artificial Sequence: Synthetic oligonucleotide
  Antisense strand to SEQ ID NO: 1541752
aauguaaagacgagucugg

SEQ ID NO: 1541754 - RNA, 19 nt, Artificial Sequence
  Description of Artificial Sequence: Synthetic oligonucleotide
  Sense strand starting at position 2337 of SEQ ID NO: 1245168
gucuuuacauuccuaggga

SEQ ID NO: 1541755 - RNA, 19 nt, Artificial Sequence
  Description of Artificial Sequence: Synthetic oligonucleotide
  Antisense strand to SEQ ID NO: 1541754
ucccuaggaauguaaagac

SEQ ID NO: 1541756 - RNA, 19 nt, Artificial Sequence
  Description of Artificial Sequence: Synthetic oligonucleotide
  Sense strand starting at position 2412 of SEQ ID NO: 1245168
uggcaaagauagguuugau

SEQ ID NO: 1541757 - RNA, 19 nt, Artificial Sequence
  Description of Artificial Sequence: Synthetic oligonucleotide
  Antisense strand to SEQ ID NO: 1541756
aucaaaccuaucuuugcca

SEQ ID NO: 1541758 - RNA, 19 nt, Artificial Sequence
  Description of Artificial Sequence: Synthetic oligonucleotide
  Sense strand starting at position 2524 of SEQ ID NO: 1245168
uucuuuagucucgaauauu

SEQ ID NO: 1541759 - RNA, 19 nt, Artificial Sequence
  Description of Artificial Sequence: Synthetic oligonucleotide
  Antisense strand to SEQ ID NO: 1541758
aauauucgagacuaaagaa

SEQ ID NO: 1541760 - RNA, 19 nt, Artificial Sequence
  Description of Artificial Sequence: Synthetic oligonucleotide
  Sense strand starting at position 2617 of SEQ ID NO: 1245168
augaaucaguuugucauua

SEQ ID NO: 1541761 - RNA, 19 nt, Artificial Sequence
  Description of Artificial Sequence: Synthetic oligonucleotide
  Antisense strand to SEQ ID NO: 1541760
uaaugacaaacugauucau

SEQ ID NO: 1541762 - RNA, 19 nt, Artificial Sequence
  Description of Artificial Sequence: Synthetic oligonucleotide
  Sense strand starting at position 2618 of SEQ ID NO: 1245168
ugaaucaguuugucauuac

SEQ ID NO: 1541763 - RNA, 19 nt, Artificial Sequence
  Description of Artificial Sequence: Synthetic oligonucleotide
  Antisense strand to SEQ ID NO: 1541762
guaaugacaaacugauuca

SEQ ID NO: 1541764 - RNA, 19 nt, Artificial Sequence
  Description of Artificial Sequence: Synthetic oligonucleotide
  Sense strand starting at position 2663 of SEQ ID NO: 1245168
ucuaauacauugguuauga

SEQ ID NO: 1541765 - RNA, 19 nt, Artificial Sequence
  Description of Artificial Sequence: Synthetic oligonucleotide
  Antisense strand to SEQ ID NO: 1541764
ucauaaccaauguauuaga

SEQ ID NO: 1541766 - RNA, 19 nt, Artificial Sequence
  Description of Artificial Sequence: Synthetic oligonucleotide
  Sense strand starting at position 2664 of SEQ ID NO: 1245168
cuaauacauugguuaugaa

SEQ ID NO: 1541767 - RNA, 19 nt, Artificial Sequence
  Description of Artificial Sequence: Synthetic oligonucleotide
  Antisense strand to SEQ ID NO: 1541766
uucauaaccaauguauuag

SEQ ID NO: 1541768 - RNA, 19 nt, Artificial Sequence
  Description of Artificial Sequence: Synthetic oligonucleotide
  Sense strand starting at position 2803 of SEQ ID NO: 1245168
ucccuuaaucauggguauu

SEQ ID NO: 1541769 - RNA, 19 nt, Artificial Sequence
  Description of Artificial Sequence: Synthetic oligonucleotide
  Antisense strand to SEQ ID NO: 1541768
aauacccaugauuaaggga

SEQ ID NO: 1541770 - RNA, 19 nt, Artificial Sequence
  Description of Artificial Sequence: Synthetic oligonucleotide
  Sense strand starting at position 2882 of SEQ ID NO: 1245168
cuucucaagaguuaggagu

SEQ ID NO: 1541771 - RNA, 19 nt, Artificial Sequence
  Description of Artificial Sequence: Synthetic oligonucleotide
  Antisense strand to SEQ ID NO: 1541770
acuccuaacucuugagaag

SEQ ID NO: 1541772 - RNA, 19 nt, Artificial Sequence
  Description of Artificial Sequence: Synthetic oligonucleotide
  Sense strand starting at position 2923 of SEQ ID NO: 1245168
cuuacauuacuuugaguau

SEQ ID NO: 1541773 - RNA, 19 nt, Artificial Sequence
  Description of Artificial Sequence: Synthetic oligonucleotide
  Antisense strand to SEQ ID NO: 1541772
auacucaaaguaauguaag

SEQ ID NO: 1541774 - RNA, 19 nt, Artificial Sequence
  Description of Artificial Sequence: Synthetic oligonucleotide
  Sense strand starting at position 2936 of SEQ ID NO: 1245168
gaguauaaaccuuguggau

SEQ ID NO: 1541775 - RNA, 19 nt, Artificial Sequence
  Description of Artificial Sequence: Synthetic oligonucleotide
  Antisense strand to SEQ ID NO: 1541774
auccacaagguuuauacuc

SEQ ID NO: 1541776 - RNA, 19 nt, Artificial Sequence
  Description of Artificial Sequence: Synthetic oligonucleotide
  Sense strand starting at position 2990 of SEQ ID NO: 1245168
gugcuaaacacuggagaug

SEQ ID NO: 1541777 - RNA, 19 nt, Artificial Sequence
  Description of Artificial Sequence: Synthetic oligonucleotide
  Antisense strand to SEQ ID NO: 1541776
caucuccaguguuuagcac

SEQ ID NO: 1541778 - RNA, 19 nt, Artificial Sequence
  Description of Artificial Sequence: Synthetic oligonucleotide
  Sense strand starting at position 3202 of SEQ ID NO: 1245168
acuuaucugggcuauguau

SEQ ID NO: 1541779 - RNA, 19 nt, Artificial Sequence
  Description of Artificial Sequence: Synthetic oligonucleotide
  Antisense strand to SEQ ID NO: 1541778
auacauagcccagauaagu

SEQ ID NO: 1541780 - RNA, 19 nt, Artificial Sequence
  Description of Artificial Sequence: Synthetic oligonucleotide
  Sense strand starting at position 3277 of SEQ ID NO: 1245168
guuguaacacauggcauuu

SEQ ID NO: 1541781 - RNA, 19 nt, Artificial Sequence
  Description of Artificial Sequence: Synthetic oligonucleotide
  Antisense strand to SEQ ID NO: 1541780
aaaugccauguguuacaac

SEQ ID NO: 1541782 - RNA, 19 nt, Artificial Sequence
  Description of Artificial Sequence: Synthetic oligonucleotide
  Sense strand starting at position 3286 of SEQ ID NO: 1245168
cauggcauuuguguaucua

SEQ ID NO: 1541783 - RNA, 19 nt, Artificial Sequence
  Description of Artificial Sequence: Synthetic oligonucleotide
  Antisense strand to SEQ ID NO: 1541782
uagauacacaaaugccaug

SEQ ID NO: 1541784 - RNA, 19 nt, Artificial Sequence
  Description of Artificial Sequence: Synthetic oligonucleotide
  Sense strand starting at position 3381 of SEQ ID NO: 1245168
uaugguauuggacaugcaa

SEQ ID NO: 1541785 - RNA, 19 nt, Artificial Sequence
  Description of Artificial Sequence: Synthetic oligonucleotide
  Antisense strand to SEQ ID NO: 1541784
uugcauguccaauaccaua

SEQ ID NO: 1541786 - RNA, 19 nt, Artificial Sequence
  Description of Artificial Sequence: Synthetic oligonucleotide
  Sense strand starting at position 3383 of SEQ ID NO: 1245168
ugguauuggacaugcaagu

SEQ ID NO: 1541787 - RNA, 19 nt, Artificial Sequence
  Description of Artificial Sequence: Synthetic oligonucleotide
  Antisense strand to SEQ ID NO: 1541786
acuugcauguccaauacca

SEQ ID NO: 1541788 - RNA, 19 nt, Artificial Sequence
  Description of Artificial Sequence: Synthetic oligonucleotide
  Sense strand starting at position 3390 of SEQ ID NO: 1245168
ggacaugcaaguggucuua

SEQ ID NO: 1541789 - RNA, 19 nt, Artificial Sequence
  Description of Artificial Sequence: Synthetic oligonucleotide
  Antisense strand to SEQ ID NO: 1541788
uaagaccacuugcaugucc

SEQ ID NO: 1541790 - RNA, 19 nt, Artificial Sequence
  Description of Artificial Sequence: Synthetic oligonucleotide
  Sense strand starting at position 3411 of SEQ ID NO: 1245168
agaccacugucauauauuu

SEQ ID NO: 1541791 - RNA, 19 nt, Artificial Sequence
  Description of Artificial Sequence: Synthetic oligonucleotide
  Antisense strand to SEQ ID NO: 1541790
aaauauaugacaguggucu

SEQ ID NO: 1541792 - RNA, 19 nt, Artificial Sequence
  Description of Artificial Sequence: Synthetic oligonucleotide
  Sense strand starting at position 3792 of SEQ ID NO: 1245168
uuuguucuggcugaaauga

SEQ ID NO: 1541793 - RNA, 19 nt, Artificial Sequence
  Description of Artificial Sequence: Synthetic oligonucleotide
  Antisense strand to SEQ ID NO: 1541792
ucauuucagccagaacaaa

SEQ ID NO: 1541794 - RNA, 19 nt, Artificial Sequence
  Description of Artificial Sequence: Synthetic oligonucleotide
  Sense strand starting at position 13 of SEQ ID NO: 1245169
cugacaauacucuguauug

SEQ ID NO: 1541795 - RNA, 19 nt, Artificial Sequence
  Description of Artificial Sequence: Synthetic oligonucleotide
  Antisense strand to SEQ ID NO: 1541794
caauacagaguauugucag

SEQ ID NO: 1541796 - RNA, 19 nt, Artificial Sequence
  Description of Artificial Sequence: Synthetic oligonucleotide
  Sense strand starting at position 14 of SEQ ID NO: 1245169
ugacaauacucuguauugu

SEQ ID NO: 1541797 - RNA, 19 nt, Artificial Sequence
  Description of Artificial Sequence: Synthetic oligonucleotide
  Antisense strand to SEQ ID NO: 1541796
acaauacagaguauuguca

SEQ ID NO: 1541798 - RNA, 19 nt, Artificial Sequence
  Description of Artificial Sequence: Synthetic oligonucleotide
  Sense strand starting at position 20 of SEQ ID NO: 1245169
uacucuguauuguugagga

SEQ ID NO: 1541799 - RNA, 19 nt, Artificial Sequence
  Description of Artificial Sequence: Synthetic oligonucleotide
  Antisense strand to SEQ ID NO: 1541798
uccucaacaauacagagua

SEQ ID NO: 1541800 - RNA, 19 nt, Artificial Sequence
  Description of Artificial Sequence: Synthetic oligonucleotide
  Sense strand starting at position 22 of SEQ ID NO: 1245169
cucuguauuguugaggauu

SEQ ID NO: 1541801 - RNA, 19 nt, Artificial Sequence
  Description of Artificial Sequence: Synthetic oligonucleotide
  Antisense strand to SEQ ID NO: 1541800
aauccucaacaauacagag

SEQ ID NO: 1541802 - RNA, 19 nt, Artificial Sequence
  Description of Artificial Sequence: Synthetic oligonucleotide
  Sense strand starting at position 60 of SEQ ID NO: 1245169
auacuuugccgguaagaau

SEQ ID NO: 1541803 - RNA, 19 nt, Artificial Sequence
  Description of Artificial Sequence: Synthetic oligonucleotide
  Antisense strand to SEQ ID NO: 1541802
auucuuaccggcaaaguau

SEQ ID NO: 1541804 - RNA, 19 nt, Artificial Sequence
  Description of Artificial Sequence: Synthetic oligonucleotide
  Sense strand starting at position 88 of SEQ ID NO: 1245169
gugcaacuacuuugagaaa

SEQ ID NO: 1541805 - RNA, 19 nt, Artificial Sequence
  Description of Artificial Sequence: Synthetic oligonucleotide
  Antisense strand to SEQ ID NO: 1541804
uuucucaaaguaguugcac

SEQ ID NO: 1541806 - RNA, 19 nt, Artificial Sequence
  Description of Artificial Sequence: Synthetic oligonucleotide
  Sense strand starting at position 355 of SEQ ID NO: 1245169
agaauauguucccuauugu

SEQ ID NO: 1541807 - RNA, 19 nt, Artificial Sequence
  Description of Artificial Sequence: Synthetic oligonucleotide
  Antisense strand to SEQ ID NO: 1541806
acaauagggaacauauucu

SEQ ID NO: 1541808 - RNA, 19 nt, Artificial Sequence
  Description of Artificial Sequence: Synthetic oligonucleotide
  Sense strand starting at position 366 of SEQ ID NO: 1245169
ccuauuguccuguauuauu

SEQ ID NO: 1541809 - RNA, 19 nt, Artificial Sequence
  Description of Artificial Sequence: Synthetic oligonucleotide
  Antisense strand to SEQ ID NO: 1541808
aauaauacaggacaauagg

SEQ ID NO: 1541810 - RNA, 19 nt, Artificial Sequence
  Description of Artificial Sequence: Synthetic oligonucleotide
  Sense strand starting at position 521 of SEQ ID NO: 1245169
uggccauagguguauacaa

SEQ ID NO: 1541811 - RNA, 19 nt, Artificial Sequence
  Description of Artificial Sequence: Synthetic oligonucleotide
  Antisense strand to SEQ ID NO: 1541810
uuguauacaccuauggcca

SEQ ID NO: 1541812 - RNA, 19 nt, Artificial Sequence
  Description of Artificial Sequence: Synthetic oligonucleotide
  Sense strand starting at position 523 of SEQ ID NO: 1245169
gccauagguguauacaaau

SEQ ID NO: 1541813 - RNA, 19 nt, Artificial Sequence
  Description of Artificial Sequence: Synthetic oligonucleotide
  Antisense strand to SEQ ID NO: 1541812
auuuguauacaccuauggc

SEQ ID NO: 1541814 - RNA, 19 nt, Artificial Sequence
  Description of Artificial Sequence: Synthetic oligonucleotide
  Sense strand starting at position 641 of SEQ ID NO: 1245169
cgcuguaaccuugaaaucu

SEQ ID NO: 1541815 - RNA, 19 nt, Artificial Sequence
  Description of Artificial Sequence: Synthetic oligonucleotide
  Antisense strand to SEQ ID NO: 1541814
agauuucaagguuacagcg

SEQ ID NO: 1541816 - RNA, 19 nt, Artificial Sequence
  Description of Artificial Sequence: Synthetic oligonucleotide
  Sense strand starting at position 649 of SEQ ID NO: 1245169
ccuugaaaucuugggcuua

SEQ ID NO: 1541817 - RNA, 19 nt, Artificial Sequence
  Description of Artificial Sequence: Synthetic oligonucleotide
  Antisense strand to SEQ ID NO: 1541816
uaagcccaagauuucaagg

SEQ ID NO: 1541818 - RNA, 19 nt, Artificial Sequence
  Description of Artificial Sequence: Synthetic oligonucleotide
  Sense strand starting at position 708 of SEQ ID NO: 1245169
acgcccagcuauuuguaaa

SEQ ID NO: 1541819 - RNA, 19 nt, Artificial Sequence
  Description of Artificial Sequence: Synthetic oligonucleotide
  Antisense strand to SEQ ID NO: 1541818
uuuacaaauagcugggcgu

SEQ ID NO: 1541820 - RNA, 19 nt, Artificial Sequence
  Description of Artificial Sequence: Synthetic oligonucleotide
  Sense strand starting at position 866 of SEQ ID NO: 1245169
gugcauuguacucugugua

SEQ ID NO: 1541821 - RNA, 19 nt, Artificial Sequence
  Description of Artificial Sequence: Synthetic oligonucleotide
  Antisense strand to SEQ ID NO: 1541820
uacacagaguacaaugcac

SEQ ID NO: 1541822 - RNA, 19 nt, Artificial Sequence
  Description of Artificial Sequence: Synthetic oligonucleotide
  Sense strand starting at position 871 of SEQ ID NO: 1245169
uuguacucuguguaaaucu

SEQ ID NO: 1541823 - RNA, 19 nt, Artificial Sequence
  Description of Artificial Sequence: Synthetic oligonucleotide
  Antisense strand to SEQ ID NO: 1541822
agauuuacacagaguacaa

SEQ ID NO: 1541824 - RNA, 19 nt, Artificial Sequence
  Description of Artificial Sequence: Synthetic oligonucleotide
  Sense strand starting at position 1123 of SEQ ID NO: 1245169
gcuggaauuacggaaccua

SEQ ID NO: 1541825 - RNA, 19 nt, Artificial Sequence
  Description of Artificial Sequence: Synthetic oligonucleotide
  Antisense strand to SEQ ID NO: 1541824
uagguuccguaauuccagc

SEQ ID NO: 1541826 - RNA, 19 nt, Artificial Sequence
  Description of Artificial Sequence: Synthetic oligonucleotide
  Sense strand starting at position 1213 of SEQ ID NO: 1245169
uuaacaagcccaugaguua

SEQ ID NO: 1541827 - RNA, 19 nt, Artificial Sequence
  Description of Artificial Sequence: Synthetic oligonucleotide
  Antisense strand to SEQ ID NO: 1541826
uaacucaugggcuuguuaa

SEQ ID NO: 1541828 - RNA, 19 nt, Artificial Sequence
  Description of Artificial Sequence: Synthetic oligonucleotide
  Sense strand starting at position 1241 of SEQ ID NO: 1245169
cugccuuuggauugggaaa

SEQ ID NO: 1541829 - RNA, 19 nt, Artificial Sequence
  Description of Artificial Sequence: Synthetic oligonucleotide
  Antisense strand to SEQ ID NO: 1541828
uuucccaauccaaaggcag

SEQ ID NO: 1541830 - RNA, 19 nt, Artificial Sequence
  Description of Artificial Sequence: Synthetic oligonucleotide
  Sense strand starting at position 1343 of SEQ ID NO: 1245169
cagcgcuaugcgccucaaa

SEQ ID NO: 1541831 - RNA, 19 nt, Artificial Sequence
  Description of Artificial Sequence: Synthetic oligonucleotide
  Antisense strand to SEQ ID NO: 1541830
uuugaggcgcauagcgcug

SEQ ID NO: 1541832 - RNA, 19 nt, Artificial Sequence
  Description of Artificial Sequence: Synthetic oligonucleotide
  Sense strand starting at position 1345 of SEQ ID NO: 1245169
gcgcuaugcgccucaaaga

SEQ ID NO: 1541833 - RNA, 19 nt, Artificial Sequence
  Description of Artificial Sequence: Synthetic oligonucleotide
  Antisense strand to SEQ ID NO: 1541832
ucuuugaggcgcauagcgc

SEQ ID NO: 1541834 - RNA, 19 nt, Artificial Sequence
  Description of Artificial Sequence: Synthetic oligonucleotide
  Sense strand starting at position 1367 of SEQ ID NO: 1245169
uggguagaugucugcagaa

SEQ ID NO: 1541835 - RNA, 19 nt, Artificial Sequence
  Description of Artificial Sequence: Synthetic oligonucleotide
  Antisense strand to SEQ ID NO: 1541834
uucugcagacaucuaccca

SEQ ID NO: 1541836 - RNA, 19 nt, Artificial Sequence
  Description of Artificial Sequence: Synthetic oligonucleotide
  Sense strand starting at position 1549 of SEQ ID NO: 1245169
agcccauguguccaaacga

SEQ ID NO: 1541837 - RNA, 19 nt, Artificial Sequence
  Description of Artificial Sequence: Synthetic oligonucleotide
  Antisense strand to SEQ ID NO: 1541836
ucguuuggacacaugggcu

SEQ ID NO: 1541838 - RNA, 19 nt, Artificial Sequence
  Description of Artificial Sequence: Synthetic oligonucleotide
  Sense strand starting at position 1569 of SEQ ID NO: 1245169
gggaaagaguagucauuca

SEQ ID NO: 1541839 - RNA, 19 nt, Artificial Sequence
  Description of Artificial Sequence: Synthetic oligonucleotide
  Antisense strand to SEQ ID NO: 1541838
ugaaugacuacucuuuccc

SEQ ID NO: 1541840 - RNA, 19 nt, Artificial Sequence
  Description of Artificial Sequence: Synthetic oligonucleotide
  Sense strand starting at position 1848 of SEQ ID NO: 1245169
ggaagugguggccacaauu

SEQ ID NO: 1541841 - RNA, 19 nt, Artificial Sequence
  Description of Artificial Sequence: Synthetic oligonucleotide
  Antisense strand to SEQ ID NO: 1541840
aauuguggccaccacuucc

SEQ ID NO: 1541842 - RNA, 19 nt, Artificial Sequence
  Description of Artificial Sequence: Synthetic oligonucleotide
  Sense strand starting at position 2226 of SEQ ID NO: 1245169
auagaagagugauuacuuu

SEQ ID NO: 1541843 - RNA, 19 nt, Artificial Sequence
  Description of Artificial Sequence: Synthetic oligonucleotide
  Antisense strand to SEQ ID NO: 1541842
aaaguaaucacucuucuau

SEQ ID NO: 1541844 - RNA, 19 nt, Artificial Sequence
  Description of Artificial Sequence: Synthetic oligonucleotide
  Sense strand starting at position 2373 of SEQ ID NO: 1245169
aggguagagugguucuuaa

SEQ ID NO: 1541845 - RNA, 19 nt, Artificial Sequence
  Description of Artificial Sequence: Synthetic oligonucleotide
  Antisense strand to SEQ ID NO: 1541844
uuaagaaccacucuacccu

SEQ ID NO: 1541846 - RNA, 19 nt, Artificial Sequence
  Description of Artificial Sequence: Synthetic oligonucleotide
  Sense strand starting at position 2702 of SEQ ID NO: 1245169
gguucuuaaucucuuagga

SEQ ID NO: 1541847 - RNA, 19 nt, Artificial Sequence
  Description of Artificial Sequence: Synthetic oligonucleotide
  Antisense strand to SEQ ID NO: 1541846
uccuaagagauuaagaacc

SEQ ID NO: 1541848 - RNA, 19 nt, Artificial Sequence
  Description of Artificial Sequence: Synthetic oligonucleotide
  Sense strand starting at position 2727 of SEQ ID NO: 1245169
gacucuugagcauggaauc

SEQ ID NO: 1541849 - RNA, 19 nt, Artificial Sequence
  Description of Artificial Sequence: Synthetic oligonucleotide
  Antisense strand to SEQ ID NO: 1541848
gauuccaugcucaagaguc

SEQ ID NO: 1541850 - RNA, 19 nt, Artificial Sequence
  Description of Artificial Sequence: Synthetic oligonucleotide
  Sense strand starting at position 2952 of SEQ ID NO: 1245169
uuuauaaucggaugguuaa

SEQ ID NO: 1541851 - RNA, 19 nt, Artificial Sequence
  Description of Artificial Sequence: Synthetic oligonucleotide
  Antisense strand to SEQ ID NO: 1541850
uuaaccauccgauuauaaa

SEQ ID NO: 1541852 - RNA, 19 nt, Artificial Sequence
  Description of Artificial Sequence: Synthetic oligonucleotide
  Sense strand starting at position 2953 of SEQ ID NO: 1245169
uuauaaucggaugguuaau

SEQ ID NO: 1541853 - RNA, 19 nt, Artificial Sequence
  Description of Artificial Sequence: Synthetic oligonucleotide
  Antisense strand to SEQ ID NO: 1541852
auuaaccauccgauuauaa

SEQ ID NO: 1541854 - RNA, 19 nt, Artificial Sequence
  Description of Artificial Sequence: Synthetic oligonucleotide
  Sense strand starting at position 2994 of SEQ ID NO: 1245169
auguaaucuguaugaggga

SEQ ID NO: 1541855 - RNA, 19 nt, Artificial Sequence
  Description of Artificial Sequence: Synthetic oligonucleotide
  Antisense strand to SEQ ID NO: 1541854
ucccucauacagauuacau

SEQ ID NO: 1541856 - RNA, 19 nt, Artificial Sequence
  Description of Artificial Sequence: Synthetic oligonucleotide
  Sense strand starting at position 3008 of SEQ ID NO: 1245169
agggaagggucaguuaugu

SEQ ID NO: 1541857 - RNA, 19 nt, Artificial Sequence
  Description of Artificial Sequence: Synthetic oligonucleotide
  Antisense strand to SEQ ID NO: 1541856
acauaacugacccuucccu

SEQ ID NO: 1541858 - RNA, 19 nt, Artificial Sequence
  Description of Artificial Sequence: Synthetic oligonucleotide
  Sense strand starting at position 3066 of SEQ ID NO: 1245169
aagucauuggugcauuaua

SEQ ID NO: 1541859 - RNA, 19 nt, Artificial Sequence
  Description of Artificial Sequence: Synthetic oligonucleotide
  Antisense strand to SEQ ID NO: 1541858
uauaaugcaccaaugacuu

SEQ ID NO: 1541860 - RNA, 19 nt, Artificial Sequence
  Description of Artificial Sequence: Synthetic oligonucleotide
  Sense strand starting at position 3127 of SEQ ID NO: 1245169
cagugauugguggaagcua

SEQ ID NO: 1541861 - RNA, 19 nt, Artificial Sequence
  Description of Artificial Sequence: Synthetic oligonucleotide
  Antisense strand to SEQ ID NO: 1541860
uagcuuccaccaaucacug

SEQ ID NO: 1541862 - RNA, 19 nt, Artificial Sequence
  Description of Artificial Sequence: Synthetic oligonucleotide
  Sense strand starting at position 3138 of SEQ ID NO: 1245169
ggaagcuacuauguuugaa

SEQ ID NO: 1541863 - RNA, 19 nt, Artificial Sequence
  Description of Artificial Sequence: Synthetic oligonucleotide
  Antisense strand to SEQ ID NO: 1541862
uucaaacauaguagcuucc

SEQ ID NO: 1541864 - RNA, 19 nt, Artificial Sequence
  Description of Artificial Sequence: Synthetic oligonucleotide
  Sense strand starting at position 3162 of SEQ ID NO: 1245169
gaaguugauguauaugagu

SEQ ID NO: 1541865 - RNA, 19 nt, Artificial Sequence
  Description of Artificial Sequence: Synthetic oligonucleotide
  Antisense strand to SEQ ID NO: 1541864
acucauauacaucaacuuc

SEQ ID NO: 1541866 - RNA, 19 nt, Artificial Sequence
  Description of Artificial Sequence: Synthetic oligonucleotide
  Sense strand starting at position 3167 of SEQ ID NO: 1245169
ugauguauaugagucuuga

SEQ ID NO: 1541867 - RNA, 19 nt, Artificial Sequence
  Description of Artificial Sequence: Synthetic oligonucleotide
  Antisense strand to SEQ ID NO: 1541866
ucaagacucauauacauca

SEQ ID NO: 1541868 - RNA, 19 nt, Artificial Sequence
  Description of Artificial Sequence: Synthetic oligonucleotide
  Sense strand starting at position 3204 of SEQ ID NO: 1245169
ugcacaaugacuuagaggu

SEQ ID NO: 1541869 - RNA, 19 nt, Artificial Sequence
  Description of Artificial Sequence: Synthetic oligonucleotide
  Antisense strand to SEQ ID NO: 1541868
accucuaagucauugugca

SEQ ID NO: 1541870 - RNA, 19 nt, Artificial Sequence
  Description of Artificial Sequence: Synthetic oligonucleotide
  Sense strand starting at position 3243 of SEQ ID NO: 1245169
ggaaacuugcaauauuguu

SEQ ID NO: 1541871 - RNA, 19 nt, Artificial Sequence
  Description of Artificial Sequence: Synthetic oligonucleotide
  Antisense strand to SEQ ID NO: 1541870
aacaauauugcaaguuucc

SEQ ID NO: 1541872 - RNA, 19 nt, Artificial Sequence
  Description of Artificial Sequence: Synthetic oligonucleotide
  Sense strand starting at position 3251 of SEQ ID NO: 1245169
gcaauauuguuacugacau

SEQ ID NO: 1541873 - RNA, 19 nt, Artificial Sequence
  Description of Artificial Sequence: Synthetic oligonucleotide
  Antisense strand to SEQ ID NO: 1541872
augucaguaacaauauugc

SEQ ID NO: 1541874 - RNA, 19 nt, Artificial Sequence
  Description of Artificial Sequence: Synthetic oligonucleotide
  Sense strand starting at position 405 of SEQ ID NO: 1245170
gaagaagucggccaggcau

SEQ ID NO: 1541875 - RNA, 19 nt, Artificial Sequence
  Description of Artificial Sequence: Synthetic oligonucleotide
  Antisense strand to SEQ ID NO: 1541874
augccuggccgacuucuuc

SEQ ID NO: 1541876 - RNA, 19 nt, Artificial Sequence
  Description of Artificial Sequence: Synthetic oligonucleotide
  Sense strand starting at position 739 of SEQ ID NO: 1245170
aauauaugagaacguuuac

SEQ ID NO: 1541877 - RNA, 19 nt, Artificial Sequence
  Description of Artificial Sequence: Synthetic oligonucleotide
  Antisense strand to SEQ ID NO: 1541876
guaaacguucucauauauu

SEQ ID NO: 1541878 - RNA, 19 nt, Artificial Sequence
  Description of Artificial Sequence: Synthetic oligonucleotide
  Sense strand starting at position 748 of SEQ ID NO: 1245170
gaacguuuacggcuguguu

SEQ ID NO: 1541879 - RNA, 19 nt, Artificial Sequence
  Description of Artificial Sequence: Synthetic oligonucleotide
  Antisense strand to SEQ ID NO: 1541878
aacacagccguaaacguuc

SEQ ID NO: 1541880 - RNA, 19 nt, Artificial Sequence
  Description of Artificial Sequence: Synthetic oligonucleotide
  Sense strand starting at position 774 of SEQ ID NO: 1245170
cguagaguucgugcuuaaa

SEQ ID NO: 1541881 - RNA, 19 nt, Artificial Sequence
  Description of Artificial Sequence: Synthetic oligonucleotide
  Antisense strand to SEQ ID NO: 1541880
uuuaagcacgaacucuacg

SEQ ID NO: 1541882 - RNA, 19 nt, Artificial Sequence
  Description of Artificial Sequence: Synthetic oligonucleotide
  Sense strand starting at position 999 of SEQ ID NO: 1245170
agaggcugguaaccauaau

SEQ ID NO: 1541883 - RNA, 19 nt, Artificial Sequence
  Description of Artificial Sequence: Synthetic oligonucleotide
  Antisense strand to SEQ ID NO: 1541882
auuaugguuaccagccucu

SEQ ID NO: 1541884 - RNA, 19 nt, Artificial Sequence
  Description of Artificial Sequence: Synthetic oligonucleotide
  Sense strand starting at position 1277 of SEQ ID NO: 1245170
agacaaauguguccucaau

SEQ ID NO: 1541885 - RNA, 19 nt, Artificial Sequence
  Description of Artificial Sequence: Synthetic oligonucleotide
  Antisense strand to SEQ ID NO: 1541884
auugaggacacauuugucu

SEQ ID NO: 1541886 - RNA, 19 nt, Artificial Sequence
  Description of Artificial Sequence: Synthetic oligonucleotide
  Sense strand starting at position 1279 of SEQ ID NO: 1245170
acaaauguguccucaauuc

SEQ ID NO: 1541887 - RNA, 19 nt, Artificial Sequence
  Description of Artificial Sequence: Synthetic oligonucleotide
  Antisense strand to SEQ ID NO: 1541886
gaauugaggacacauuugu

SEQ ID NO: 1541888 - RNA, 19 nt, Artificial Sequence
  Description of Artificial Sequence: Synthetic oligonucleotide
  Sense strand starting at position 1362 of SEQ ID NO: 1245170
uaauguauuguagagcuca

SEQ ID NO: 1541889 - RNA, 19 nt, Artificial Sequence
  Description of Artificial Sequence: Synthetic oligonucleotide
  Antisense strand to SEQ ID NO: 1541888
ugagcucuacaauacauua

SEQ ID NO: 1541890 - RNA, 19 nt, Artificial Sequence
  Description of Artificial Sequence: Synthetic oligonucleotide
  Sense strand starting at position 1367 of SEQ ID NO: 1245170
uauuguagagcucauguaa

SEQ ID NO: 1541891 - RNA, 19 nt, Artificial Sequence
  Description of Artificial Sequence: Synthetic oligonucleotide
  Antisense strand to SEQ ID NO: 1541890
uuacaugagcucuacaaua

SEQ ID NO: 1541892 - RNA, 19 nt, Artificial Sequence
  Description of Artificial Sequence: Synthetic oligonucleotide
  Sense strand starting at position 1831 of SEQ ID NO: 1245170
cggaaucgucccgcagcaa

SEQ ID NO: 1541893 - RNA, 19 nt, Artificial Sequence
  Description of Artificial Sequence: Synthetic oligonucleotide
  Antisense strand to SEQ ID NO: 1541892
uugcugcgggacgauuccg

SEQ ID NO: 1541894 - RNA, 19 nt, Artificial Sequence
  Description of Artificial Sequence: Synthetic oligonucleotide
  Sense strand starting at position 1861 of SEQ ID NO: 1245170
ggguucuugguauaaucau

SEQ ID NO: 1541895 - RNA, 19 nt, Artificial Sequence
  Description of Artificial Sequence: Synthetic oligonucleotide
  Antisense strand to SEQ ID NO: 1541894
augauuauaccaagaaccc

SEQ ID NO: 1541896 - RNA, 19 nt, Artificial Sequence
  Description of Artificial Sequence: Synthetic oligonucleotide
  Sense strand starting at position 2135 of SEQ ID NO: 1245170
gcauguuuaauccagagug

SEQ ID NO: 1541897 - RNA, 19 nt, Artificial Sequence
  Description of Artificial Sequence: Synthetic oligonucleotide
  Antisense strand to SEQ ID NO: 1541896
cacucuggauuaaacaugc

SEQ ID NO: 1541898 - RNA, 19 nt, Artificial Sequence
  Description of Artificial Sequence: Synthetic oligonucleotide
  Sense strand starting at position 2137 of SEQ ID NO: 1245170
auguuuaauccagaguguu

SEQ ID NO: 1541899 - RNA, 19 nt, Artificial Sequence
  Description of Artificial Sequence: Synthetic oligonucleotide
  Antisense strand to SEQ ID NO: 1541898
aacacucuggauuaaacau

SEQ ID NO: 1541900 - RNA, 19 nt, Artificial Sequence
  Description of Artificial Sequence: Synthetic oligonucleotide
  Sense strand starting at position 2149 of SEQ ID NO: 1245170
gaguguuugcaugacacug

SEQ ID NO: 1541901 - RNA, 19 nt, Artificial Sequence
  Description of Artificial Sequence: Synthetic oligonucleotide
  Antisense strand to SEQ ID NO: 1541900
cagugucaugcaaacacuc

SEQ ID NO: 1541902 - RNA, 19 nt, Artificial Sequence
  Description of Artificial Sequence: Synthetic oligonucleotide
  Sense strand starting at position 2269 of SEQ ID NO: 1245170
ggccauguaccauaauauu

SEQ ID NO: 1541903 - RNA, 19 nt, Artificial Sequence
  Description of Artificial Sequence: Synthetic oligonucleotide
  Antisense strand to SEQ ID NO: 1541902
aauauuaugguacauggcc

SEQ ID NO: 1541904 - RNA, 19 nt, Artificial Sequence
  Description of Artificial Sequence: Synthetic oligonucleotide
  Sense strand starting at position 2382 of SEQ ID NO: 1245170
aggguaaagguuuggaaau

SEQ ID NO: 1541905 - RNA, 19 nt, Artificial Sequence
  Description of Artificial Sequence: Synthetic oligonucleotide
  Antisense strand to SEQ ID NO: 1541904
auuuccaaaccuuuacccu

SEQ ID NO: 1541906 - RNA, 19 nt, Artificial Sequence
  Description of Artificial Sequence: Synthetic oligonucleotide
  Sense strand starting at position 2393 of SEQ ID NO: 1245170
uuggaaaucuauucugcuu

SEQ ID NO: 1541907 - RNA, 19 nt, Artificial Sequence
  Description of Artificial Sequence: Synthetic oligonucleotide
  Antisense strand to SEQ ID NO: 1541906
aagcagaauagauuuccaa

SEQ ID NO: 1541908 - RNA, 19 nt, Artificial Sequence
  Description of Artificial Sequence: Synthetic oligonucleotide
  Sense strand starting at position 2462 of SEQ ID NO: 1245170
uggacacuuugguugucaa

SEQ ID NO: 1541909 - RNA, 19 nt, Artificial Sequence
  Description of Artificial Sequence: Synthetic oligonucleotide
  Antisense strand to SEQ ID NO: 1541908
uugacaaccaaagugucca

SEQ ID NO: 1541910 - RNA, 19 nt, Artificial Sequence
  Description of Artificial Sequence: Synthetic oligonucleotide
  Sense strand starting at position 2463 of SEQ ID NO: 1245170
ggacacuuugguugucaag

SEQ ID NO: 1541911 - RNA, 19 nt, Artificial Sequence
  Description of Artificial Sequence: Synthetic oligonucleotide
  Antisense strand to SEQ ID NO: 1541910
cuugacaaccaaagugucc

SEQ ID NO: 1541912 - RNA, 19 nt, Artificial Sequence
  Description of Artificial Sequence: Synthetic oligonucleotide
  Sense strand starting at position 2465 of SEQ ID NO: 1245170
acacuuugguugucaagag

SEQ ID NO: 1541913 - RNA, 19 nt, Artificial Sequence
  Description of Artificial Sequence: Synthetic oligonucleotide
  Antisense strand to SEQ ID NO: 1541912
cucuugacaaccaaagugu

SEQ ID NO: 1541914 - RNA, 19 nt, Artificial Sequence
  Description of Artificial Sequence: Synthetic oligonucleotide
  Sense strand starting at position 2788 of SEQ ID NO: 1245170
cucguaaguguugaacuga

SEQ ID NO: 1541915 - RNA, 19 nt, Artificial Sequence
  Description of Artificial Sequence: Synthetic oligonucleotide
  Antisense strand to SEQ ID NO: 1541914
ucaguucaacacuuacgag

SEQ ID NO: 1541916 - RNA, 19 nt, Artificial Sequence
  Description of Artificial Sequence: Synthetic oligonucleotide
  Sense strand starting at position 2825 of SEQ ID NO: 1245170
agggcaagcuuucugaaag

SEQ ID NO: 1541917 - RNA, 19 nt, Artificial Sequence
  Description of Artificial Sequence: Synthetic oligonucleotide
  Antisense strand to SEQ ID NO: 1541916
cuuucagaaagcuugcccu

SEQ ID NO: 1541918 - RNA, 19 nt, Artificial Sequence
  Description of Artificial Sequence: Synthetic oligonucleotide
  Sense strand starting at position 2928 of SEQ ID NO: 1245170
cagagucgucaauaacuuc

SEQ ID NO: 1541919 - RNA, 19 nt, Artificial Sequence
  Description of Artificial Sequence: Synthetic oligonucleotide
  Antisense strand to SEQ ID NO: 1541918
gaaguuauugacgacucug

SEQ ID NO: 1541920 - RNA, 19 nt, Artificial Sequence
  Description of Artificial Sequence: Synthetic oligonucleotide
  Sense strand starting at position 3009 of SEQ ID NO: 1245170
ugugaaauuguugaccacu

SEQ ID NO: 1541921 - RNA, 19 nt, Artificial Sequence
  Description of Artificial Sequence: Synthetic oligonucleotide
  Antisense strand to SEQ ID NO: 1541920
aguggucaacaauuucaca

SEQ ID NO: 1541922 - RNA, 19 nt, Artificial Sequence
  Description of Artificial Sequence: Synthetic oligonucleotide
  Sense strand starting at position 3011 of SEQ ID NO: 1245170
ugaaauuguugaccacuuu

SEQ ID NO: 1541923 - RNA, 19 nt, Artificial Sequence
  Description of Artificial Sequence: Synthetic oligonucleotide
  Antisense strand to SEQ ID NO: 1541922
aaaguggucaacaauuuca

SEQ ID NO: 1541924 - RNA, 19 nt, Artificial Sequence
  Description of Artificial Sequence: Synthetic oligonucleotide
  Sense strand starting at position 3083 of SEQ ID NO: 1245170
augcgauuuacuuggcuau

SEQ ID NO: 1541925 - RNA, 19 nt, Artificial Sequence
  Description of Artificial Sequence: Synthetic oligonucleotide
  Antisense strand to SEQ ID NO: 1541924
auagccaaguaaaucgcau

SEQ ID NO: 1541926 - RNA, 19 nt, Artificial Sequence
  Description of Artificial Sequence: Synthetic oligonucleotide
  Sense strand starting at position 3085 of SEQ ID NO: 1245170
gcgauuuacuuggcuaucu

SEQ ID NO: 1541927 - RNA, 19 nt, Artificial Sequence
  Description of Artificial Sequence: Synthetic oligonucleotide
  Antisense strand to SEQ ID NO: 1541926
agauagccaaguaaaucgc

SEQ ID NO: 1541928 - RNA, 19 nt, Artificial Sequence
  Description of Artificial Sequence: Synthetic oligonucleotide
  Sense strand starting at position 3086 of SEQ ID NO: 1245170
cgauuuacuuggcuaucua

SEQ ID NO: 1541929 - RNA, 19 nt, Artificial Sequence
  Description of Artificial Sequence: Synthetic oligonucleotide
  Antisense strand to SEQ ID NO: 1541928
uagauagccaaguaaaucg

SEQ ID NO: 1541930 - RNA, 19 nt, Artificial Sequence
  Description of Artificial Sequence: Synthetic oligonucleotide
  Sense strand starting at position 3190 of SEQ ID NO: 1245170
aguaguucuagauagaguu

SEQ ID NO: 1541931 - RNA, 19 nt, Artificial Sequence
  Description of Artificial Sequence: Synthetic oligonucleotide
  Antisense strand to SEQ ID NO: 1541930
aacucuaucuagaacuacu

SEQ ID NO: 1541932 - RNA, 19 nt, Artificial Sequence
  Description of Artificial Sequence: Synthetic oligonucleotide
  Sense strand starting at position 3329 of SEQ ID NO: 1245170
aagcgaacugcuuacaaug

SEQ ID NO: 1541933 - RNA, 19 nt, Artificial Sequence
  Description of Artificial Sequence: Synthetic oligonucleotide
  Antisense strand to SEQ ID NO: 1541932
cauuguaagcaguucgcuu

SEQ ID NO: 1541934 - RNA, 19 nt, Artificial Sequence
  Description of Artificial Sequence: Synthetic oligonucleotide
  Sense strand starting at position 3347 of SEQ ID NO: 1245170
gcuugugaaugacuaauga

SEQ ID NO: 1541935 - RNA, 19 nt, Artificial Sequence
  Description of Artificial Sequence: Synthetic oligonucleotide
  Antisense strand to SEQ ID NO: 1541934
ucauuagucauucacaagc

SEQ ID NO: 1541936 - RNA, 19 nt, Artificial Sequence
  Description of Artificial Sequence: Synthetic oligonucleotide
  Sense strand starting at position 3363 of SEQ ID NO: 1245170
ugaguaguuuauuuggcuu

SEQ ID NO: 1541937 - RNA, 19 nt, Artificial Sequence
  Description of Artificial Sequence: Synthetic oligonucleotide
  Antisense strand to SEQ ID NO: 1541936
aagccaaauaaacuacuca

SEQ ID NO: 1541938 - RNA, 19 nt, Artificial Sequence
  Description of Artificial Sequence: Synthetic oligonucleotide
  Sense strand starting at position 3366 of SEQ ID NO: 1245170
guaguuuauuuggcuugga

SEQ ID NO: 1541939 - RNA, 19 nt, Artificial Sequence
  Description of Artificial Sequence: Synthetic oligonucleotide
  Antisense strand to SEQ ID NO: 1541938
uccaagccaaauaaacuac

SEQ ID NO: 1541940 - RNA, 19 nt, Artificial Sequence
  Description of Artificial Sequence: Synthetic oligonucleotide
  Sense strand starting at position 3445 of SEQ ID NO: 1245170
ugucacuuucuaggauaac

SEQ ID NO: 1541941 - RNA, 19 nt, Artificial Sequence
  Description of Artificial Sequence: Synthetic oligonucleotide
  Antisense strand to SEQ ID NO: 1541940
guuauccuagaaagugaca

SEQ ID NO: 1541942 - RNA, 19 nt, Artificial Sequence
  Description of Artificial Sequence: Synthetic oligonucleotide
  Sense strand starting at position 3527 of SEQ ID NO: 1245170
auuaguuccugauuccaca

SEQ ID NO: 1541943 - RNA, 19 nt, Artificial Sequence
  Description of Artificial Sequence: Synthetic oligonucleotide
  Antisense strand to SEQ ID NO: 1541942
uguggaaucaggaacuaau

SEQ ID NO: 1541944 - RNA, 19 nt, Artificial Sequence
  Description of Artificial Sequence: Synthetic oligonucleotide
  Sense strand starting at position 3650 of SEQ ID NO: 1245170
ugccuaacucauuaaugag

SEQ ID NO: 1541945 - RNA, 19 nt, Artificial Sequence
  Description of Artificial Sequence: Synthetic oligonucleotide
  Antisense strand to SEQ ID NO: 1541944
cucauuaaugaguuaggca

SEQ ID NO: 1541946 - RNA, 19 nt, Artificial Sequence
  Description of Artificial Sequence: Synthetic oligonucleotide
  Sense strand starting at position 3680 of SEQ ID NO: 1245170
gaugguaaagcugguuuaa

SEQ ID NO: 1541947 - RNA, 19 nt, Artificial Sequence
  Description of Artificial Sequence: Synthetic oligonucleotide
  Antisense strand to SEQ ID NO: 1541946
uuaaaccagcuuuaccauc

SEQ ID NO: 1541948 - RNA, 19 nt, Artificial Sequence
  Description of Artificial Sequence: Synthetic oligonucleotide
  Sense strand starting at position 3682 of SEQ ID NO: 1245170
ugguaaagcugguuuaaag

SEQ ID NO: 1541949 - RNA, 19 nt, Artificial Sequence
  Description of Artificial Sequence: Synthetic oligonucleotide
  Antisense strand to SEQ ID NO: 1541948
cuuuaaaccagcuuuacca

SEQ ID NO: 1541950 - RNA, 19 nt, Artificial Sequence
  Description of Artificial Sequence: Synthetic oligonucleotide
  Sense strand starting at position 3691 of SEQ ID NO: 1245170
ugguuuaaagagcauuaua

SEQ ID NO: 1541951 - RNA, 19 nt, Artificial Sequence
  Description of Artificial Sequence: Synthetic oligonucleotide
  Antisense strand to SEQ ID NO: 1541950
uauaaugcucuuuaaacca

SEQ ID NO: 1541952 - RNA, 19 nt, Artificial Sequence
  Description of Artificial Sequence: Synthetic oligonucleotide
  Sense strand starting at position 3813 of SEQ ID NO: 1245170
gggauccuuaugugaaaug

SEQ ID NO: 1541953 - RNA, 19 nt, Artificial Sequence
  Description of Artificial Sequence: Synthetic oligonucleotide
  Antisense strand to SEQ ID NO: 1541952
cauuucacauaaggauccc

SEQ ID NO: 1541954 - RNA, 19 nt, Artificial Sequence
  Description of Artificial Sequence: Synthetic oligonucleotide
  Sense strand starting at position 977 of SEQ ID NO: 1245171
gggucuccuugguccagaa

SEQ ID NO: 1541955 - RNA, 19 nt, Artificial Sequence
  Description of Artificial Sequence: Synthetic oligonucleotide
  Antisense strand to SEQ ID NO: 1541954
uucuggaccaaggagaccc

SEQ ID NO: 1541956 - RNA, 19 nt, Artificial Sequence
  Description of Artificial Sequence: Synthetic oligonucleotide
  Sense strand starting at position 1105 of SEQ ID NO: 1245171
ccggaugcugcgucggaaa

SEQ ID NO: 1541957 - RNA, 19 nt, Artificial Sequence
  Description of Artificial Sequence: Synthetic oligonucleotide
  Antisense strand to SEQ ID NO: 1541956
uuuccgacgcagcauccgg

SEQ ID NO: 1541958 - RNA, 19 nt, Artificial Sequence
  Description of Artificial Sequence: Synthetic oligonucleotide
  Sense strand starting at position 1117 of SEQ ID NO: 1245171
ucggaaaccgaauguaacu

SEQ ID NO: 1541959 - RNA, 19 nt, Artificial Sequence
  Description of Artificial Sequence: Synthetic oligonucleotide
  Antisense strand to SEQ ID NO: 1541958
aguuacauucgguuuccga

SEQ ID NO: 1541960 - RNA, 19 nt, Artificial Sequence
  Description of Artificial Sequence: Synthetic oligonucleotide
  Sense strand starting at position 2252 of SEQ ID NO: 1245171
ggugacccgccuugaguua

SEQ ID NO: 1541961 - RNA, 19 nt, Artificial Sequence
  Description of Artificial Sequence: Synthetic oligonucleotide
  Antisense strand to SEQ ID NO: 1541960
uaacucaaggcgggucacc

SEQ ID NO: 1541962 - RNA, 19 nt, Artificial Sequence
  Description of Artificial Sequence: Synthetic oligonucleotide
  Sense strand starting at position 2259 of SEQ ID NO: 1245171
cgccuugaguuaucaccaa

SEQ ID NO: 1541963 - RNA, 19 nt, Artificial Sequence
  Description of Artificial Sequence: Synthetic oligonucleotide
  Antisense strand to SEQ ID NO: 1541962
uuggugauaacucaaggcg

SEQ ID NO: 1541964 - RNA, 19 nt, Artificial Sequence
  Description of Artificial Sequence: Synthetic oligonucleotide
  Sense strand starting at position 2352 of SEQ ID NO: 1245171
uccaaagagccagauguuu

SEQ ID NO: 1541965 - RNA, 19 nt, Artificial Sequence
  Description of Artificial Sequence: Synthetic oligonucleotide
  Antisense strand to SEQ ID NO: 1541964
aaacaucuggcucuuugga

SEQ ID NO: 1541966 - RNA, 19 nt, Artificial Sequence
  Description of Artificial Sequence: Synthetic oligonucleotide
  Sense strand starting at position 2402 of SEQ ID NO: 1245171
cgugaugucuggagggaga

SEQ ID NO: 1541967 - RNA, 19 nt, Artificial Sequence
  Description of Artificial Sequence: Synthetic oligonucleotide
  Antisense strand to SEQ ID NO: 1541966
ucucccuccagacaucacg

SEQ ID NO: 1541968 - RNA, 19 nt, Artificial Sequence
  Description of Artificial Sequence: Synthetic oligonucleotide
  Sense strand starting at position 2421 of SEQ ID NO: 1245171
gacgcaguccuagcuuagu

SEQ ID NO: 1541969 - RNA, 19 nt, Artificial Sequence
  Description of Artificial Sequence: Synthetic oligonucleotide
  Antisense strand to SEQ ID NO: 1541968
acuaagcuaggacugcguc

SEQ ID NO: 1541970 - RNA, 19 nt, Artificial Sequence
  Description of Artificial Sequence: Synthetic oligonucleotide
  Sense strand starting at position 2423 of SEQ ID NO: 1245171
cgcaguccuagcuuaguuu

SEQ ID NO: 1541971 - RNA, 19 nt, Artificial Sequence
  Description of Artificial Sequence: Synthetic oligonucleotide
  Antisense strand to SEQ ID NO: 1541970
aaacuaagcuaggacugcg

SEQ ID NO: 1541972 - RNA, 19 nt, Artificial Sequence
  Description of Artificial Sequence: Synthetic oligonucleotide
  Sense strand starting at position 2683 of SEQ ID NO: 1245171
agcugagucuucgucacaa

SEQ ID NO: 1541973 - RNA, 19 nt, Artificial Sequence
  Description of Artificial Sequence: Synthetic oligonucleotide
  Antisense strand to SEQ ID NO: 1541972
uugugacgaagacucagcu

SEQ ID NO: 1541974 - RNA, 19 nt, Artificial Sequence
  Description of Artificial Sequence: Synthetic oligonucleotide
  Sense strand starting at position 2685 of SEQ ID NO: 1245171
cugagucuucgucacaaua

SEQ ID NO: 1541975 - RNA, 19 nt, Artificial Sequence
  Description of Artificial Sequence: Synthetic oligonucleotide
  Antisense strand to SEQ ID NO: 1541974
uauugugacgaagacucag

SEQ ID NO: 1541976 - RNA, 19 nt, Artificial Sequence
  Description of Artificial Sequence: Synthetic oligonucleotide
  Sense strand starting at position 2687 of SEQ ID NO: 1245171
gagucuucgucacaauaau

SEQ ID NO: 1541977 - RNA, 19 nt, Artificial Sequence
  Description of Artificial Sequence: Synthetic oligonucleotide
  Antisense strand to SEQ ID NO: 1541976
auuauugugacgaagacuc

SEQ ID NO: 1541978 - RNA, 19 nt, Artificial Sequence
  Description of Artificial Sequence: Synthetic oligonucleotide
  Sense strand starting at position 2791 of SEQ ID NO: 1245171
uugacuaggaaucguaauu

SEQ ID NO: 1541979 - RNA, 19 nt, Artificial Sequence
  Description of Artificial Sequence: Synthetic oligonucleotide
  Antisense strand to SEQ ID NO: 1541978
aauuacgauuccuagucaa

SEQ ID NO: 1541980 - RNA, 19 nt, Artificial Sequence
  Description of Artificial Sequence: Synthetic oligonucleotide
  Sense strand starting at position 2796 of SEQ ID NO: 1245171
uaggaaucguaauuacuuu

SEQ ID NO: 1541981 - RNA, 19 nt, Artificial Sequence
  Description of Artificial Sequence: Synthetic oligonucleotide
  Antisense strand to SEQ ID NO: 1541980
aaaguaauuacgauuccua

SEQ ID NO: 1541982 - RNA, 19 nt, Artificial Sequence
  Description of Artificial Sequence: Synthetic oligonucleotide
  Sense strand starting at position 2808 of SEQ ID NO: 1245171
uuacuuugacuccguggaa

SEQ ID NO: 1541983 - RNA, 19 nt, Artificial Sequence
  Description of Artificial Sequence: Synthetic oligonucleotide
  Antisense strand to SEQ ID NO: 1541982
uuccacggagucaaaguaa

SEQ ID NO: 1541984 - RNA, 19 nt, Artificial Sequence
  Description of Artificial Sequence: Synthetic oligonucleotide
  Sense strand starting at position 2864 of SEQ ID NO: 1245171
ggaacuccgucugugcaaa

SEQ ID NO: 1541985 - RNA, 19 nt, Artificial Sequence
  Description of Artificial Sequence: Synthetic oligonucleotide
  Antisense strand to SEQ ID NO: 1541984
uuugcacagacggaguucc

SEQ ID NO: 1541986 - RNA, 19 nt, Artificial Sequence
  Description of Artificial Sequence: Synthetic oligonucleotide
  Sense strand starting at position 2943 of SEQ ID NO: 1245171
gccugaggcaauggauuau

SEQ ID NO: 1541987 - RNA, 19 nt, Artificial Sequence
  Description of Artificial Sequence: Synthetic oligonucleotide
  Antisense strand to SEQ ID NO: 1541986
auaauccauugccucaggc

SEQ ID NO: 1541988 - RNA, 19 nt, Artificial Sequence
  Description of Artificial Sequence: Synthetic oligonucleotide
  Sense strand starting at position 2947 of SEQ ID NO: 1245171
gaggcaauggauuaugguu

SEQ ID NO: 1541989 - RNA, 19 nt, Artificial Sequence
  Description of Artificial Sequence: Synthetic oligonucleotide
  Antisense strand to SEQ ID NO: 1541988
aaccauaauccauugccuc

SEQ ID NO: 1541990 - RNA, 19 nt, Artificial Sequence
  Description of Artificial Sequence: Synthetic oligonucleotide
  Sense strand starting at position 3011 of SEQ ID NO: 1245171
ugagaugauuuaggaaaug

SEQ ID NO: 1541991 - RNA, 19 nt, Artificial Sequence
  Description of Artificial Sequence: Synthetic oligonucleotide
  Antisense strand to SEQ ID NO: 1541990
cauuuccuaaaucaucuca

SEQ ID NO: 1541992 - RNA, 19 nt, Artificial Sequence
  Description of Artificial Sequence: Synthetic oligonucleotide
  Sense strand starting at position 3035 of SEQ ID NO: 1245171
cugauaaaguucuaagagu

SEQ ID NO: 1541993 - RNA, 19 nt, Artificial Sequence
  Description of Artificial Sequence: Synthetic oligonucleotide
  Antisense strand to SEQ ID NO: 1541992
acucuuagaacuuuaucag

SEQ ID NO: 1541994 - RNA, 19 nt, Artificial Sequence
  Description of Artificial Sequence: Synthetic oligonucleotide
  Sense strand starting at position 3044 of SEQ ID NO: 1245171
uucuaagaguucccgggaa

SEQ ID NO: 1541995 - RNA, 19 nt, Artificial Sequence
  Description of Artificial Sequence: Synthetic oligonucleotide
  Antisense strand to SEQ ID NO: 1541994
uucccgggaacucuuagaa

SEQ ID NO: 1541996 - RNA, 19 nt, Artificial Sequence
  Description of Artificial Sequence: Synthetic oligonucleotide
  Sense strand starting at position 3046 of SEQ ID NO: 1245171
cuaagaguucccgggaauc

SEQ ID NO: 1541997 - RNA, 19 nt, Artificial Sequence
  Description of Artificial Sequence: Synthetic oligonucleotide
  Antisense strand to SEQ ID NO: 1541996
gauucccgggaacucuuag

SEQ ID NO: 1541998 - RNA, 19 nt, Artificial Sequence
  Description of Artificial Sequence: Synthetic oligonucleotide
  Sense strand starting at position 3111 of SEQ ID NO: 1245171
ccgagaagucccugaagug

SEQ ID NO: 1541999 - RNA, 19 nt, Artificial Sequence
  Description of Artificial Sequence: Synthetic oligonucleotide
  Antisense strand to SEQ ID NO: 1541998
cacuucagggacuucucgg

SEQ ID NO: 1542000 - RNA, 19 nt, Artificial Sequence
  Description of Artificial Sequence: Synthetic oligonucleotide
  Sense strand starting at position 3202 of SEQ ID NO: 1245171
gcugaagguugcuccaaga

SEQ ID NO: 1542001 - RNA, 19 nt, Artificial Sequence
  Description of Artificial Sequence: Synthetic oligonucleotide
  Antisense strand to SEQ ID NO: 1542000
ucuuggagcaaccuucagc

SEQ ID NO: 1542002 - RNA, 19 nt, Artificial Sequence
  Description of Artificial Sequence: Synthetic oligonucleotide
  Sense strand starting at position 3259 of SEQ ID NO: 1245171
auuccagacguuuaagaau

SEQ ID NO: 1542003 - RNA, 19 nt, Artificial Sequence
  Description of Artificial Sequence: Synthetic oligonucleotide
  Antisense strand to SEQ ID NO: 1542002
auucuuaaacgucuggaau

SEQ ID NO: 1542004 - RNA, 19 nt, Artificial Sequence
  Description of Artificial Sequence: Synthetic oligonucleotide
  Sense strand starting at position 3262 of SEQ ID NO: 1245171
ccagacguuuaagaaucua

SEQ ID NO: 1542005 - RNA, 19 nt, Artificial Sequence
  Description of Artificial Sequence: Synthetic oligonucleotide
  Antisense strand to SEQ ID NO: 1542004
uagauucuuaaacgucugg

SEQ ID NO: 1542006 - RNA, 19 nt, Artificial Sequence
  Description of Artificial Sequence: Synthetic oligonucleotide
  Sense strand starting at position 3301 of SEQ ID NO: 1245171
ccucuaagcuauuggaaca

SEQ ID NO: 1542007 - RNA, 19 nt, Artificial Sequence
  Description of Artificial Sequence: Synthetic oligonucleotide
  Antisense strand to SEQ ID NO: 1542006
uguuccaauagcuuagagg

SEQ ID NO: 1542008 - RNA, 19 nt, Artificial Sequence
  Description of Artificial Sequence: Synthetic oligonucleotide
  Sense strand starting at position 3425 of SEQ ID NO: 1245171
gagucugauuuccagaacu

SEQ ID NO: 1542009 - RNA, 19 nt, Artificial Sequence
  Description of Artificial Sequence: Synthetic oligonucleotide
  Antisense strand to SEQ ID NO: 1542008
aguucuggaaaucagacuc

SEQ ID NO: 1542010 - RNA, 19 nt, Artificial Sequence
  Description of Artificial Sequence: Synthetic oligonucleotide
  Sense strand starting at position 3500 of SEQ ID NO: 1245171
aagaguguagcucauagac

SEQ ID NO: 1542011 - RNA, 19 nt, Artificial Sequence
  Description of Artificial Sequence: Synthetic oligonucleotide
  Antisense strand to SEQ ID NO: 1542010
gucuaugagcuacacucuu

SEQ ID NO: 1542012 - RNA, 19 nt, Artificial Sequence
  Description of Artificial Sequence: Synthetic oligonucleotide
  Sense strand starting at position 3502 of SEQ ID NO: 1245171
gaguguagcucauagacag

SEQ ID NO: 1542013 - RNA, 19 nt, Artificial Sequence
  Description of Artificial Sequence: Synthetic oligonucleotide
  Antisense strand to SEQ ID NO: 1542012
cugucuaugagcuacacuc

SEQ ID NO: 1542014 - RNA, 19 nt, Artificial Sequence
  Description of Artificial Sequence: Synthetic oligonucleotide
  Sense strand starting at position 3618 of SEQ ID NO: 1245171
agaggaauuugugagaaug

SEQ ID NO: 1542015 - RNA, 19 nt, Artificial Sequence
  Description of Artificial Sequence: Synthetic oligonucleotide
  Antisense strand to SEQ ID NO: 1542014
cauucucacaaauuccucu

SEQ ID NO: 1542016 - RNA, 19 nt, Artificial Sequence
  Description of Artificial Sequence: Synthetic oligonucleotide
  Sense strand starting at position 3620 of SEQ ID NO: 1245171
aggaauuugugagaaugau

SEQ ID NO: 1542017 - RNA, 19 nt, Artificial Sequence
  Description of Artificial Sequence: Synthetic oligonucleotide
  Antisense strand to SEQ ID NO: 1542016
aucauucucacaaauuccu

SEQ ID NO: 1542018 - RNA, 19 nt, Artificial Sequence
  Description of Artificial Sequence: Synthetic oligonucleotide
  Sense strand starting at position 3694 of SEQ ID NO: 1245171
gauagaaauucugguguug

SEQ ID NO: 1542019 - RNA, 19 nt, Artificial Sequence
  Description of Artificial Sequence: Synthetic oligonucleotide
  Antisense strand to SEQ ID NO: 1542018
caacaccagaauuucuauc

SEQ ID NO: 1542020 - RNA, 19 nt, Artificial Sequence
  Description of Artificial Sequence: Synthetic oligonucleotide
  Sense strand starting at position 3705 of SEQ ID NO: 1245171
ugguguugaaaguguaaua

SEQ ID NO: 1542021 - RNA, 19 nt, Artificial Sequence
  Description of Artificial Sequence: Synthetic oligonucleotide
  Antisense strand to SEQ ID NO: 1542020
uauuacacuuucaacacca

SEQ ID NO: 1542022 - RNA, 19 nt, Artificial Sequence
  Description of Artificial Sequence: Synthetic oligonucleotide
  Sense strand starting at position 3710 of SEQ ID NO: 1245171
uugaaaguguaauagcuga

SEQ ID NO: 1542023 - RNA, 19 nt, Artificial Sequence
  Description of Artificial Sequence: Synthetic oligonucleotide
  Antisense strand to SEQ ID NO: 1542022
ucagcuauuacacuuucaa

SEQ ID NO: 1542024 - RNA, 19 nt, Artificial Sequence
  Description of Artificial Sequence: Synthetic oligonucleotide
  Sense strand starting at position 3715 of SEQ ID NO: 1245171
aguguaauagcugaaauga

SEQ ID NO: 1542025 - RNA, 19 nt, Artificial Sequence
  Description of Artificial Sequence: Synthetic oligonucleotide
  Antisense strand to SEQ ID NO: 1542024
ucauuucagcuauuacacu

SEQ ID NO: 1542026 - RNA, 19 nt, Artificial Sequence
  Description of Artificial Sequence: Synthetic oligonucleotide
  Sense strand starting at position 3762 of SEQ ID NO: 1245171
cuaugaacacgcugaagaa

SEQ ID NO: 1542027 - RNA, 19 nt, Artificial Sequence
  Description of Artificial Sequence: Synthetic oligonucleotide
  Antisense strand to SEQ ID NO: 1542026
uucuucagcguguucauag

SEQ ID NO: 1542028 - RNA, 19 nt, Artificial Sequence
  Description of Artificial Sequence: Synthetic oligonucleotide
  Sense strand starting at position 3812 of SEQ ID NO: 1245171
augcuauccuaucugagga

SEQ ID NO: 1542029 - RNA, 19 nt, Artificial Sequence
  Description of Artificial Sequence: Synthetic oligonucleotide
  Antisense strand to SEQ ID NO: 1542028
uccucagauaggauagcau

SEQ ID NO: 1542030 - RNA, 19 nt, Artificial Sequence
  Description of Artificial Sequence: Synthetic oligonucleotide
  Sense strand starting at position 3908 of SEQ ID NO: 1245171
uagugagaguccugaaagg

SEQ ID NO: 1542031 - RNA, 19 nt, Artificial Sequence
  Description of Artificial Sequence: Synthetic oligonucleotide
  Antisense strand to SEQ ID NO: 1542030
ccuuucaggacucucacua

SEQ ID NO: 1542032 - RNA, 19 nt, Artificial Sequence
  Description of Artificial Sequence: Synthetic oligonucleotide
  Sense strand starting at position 3976 of SEQ ID NO: 1245171
cccuccaaauucgaugaaa

SEQ ID NO: 1542033 - RNA, 19 nt, Artificial Sequence
  Description of Artificial Sequence: Synthetic oligonucleotide
  Antisense strand to SEQ ID NO: 1542032
uuucaucgaauuuggaggg

SEQ ID NO: 1542034 - RNA, 19 nt, Artificial Sequence
  Description of Artificial Sequence: Synthetic oligonucleotide
  Sense strand starting at position 45 of SEQ ID NO: 1245172
gcccgagggacuugaagua

SEQ ID NO: 1542035 - RNA, 19 nt, Artificial Sequence
  Description of Artificial Sequence: Synthetic oligonucleotide
  Antisense strand to SEQ ID NO: 1542034
uacuucaagucccucgggc

SEQ ID NO: 1542036 - RNA, 19 nt, Artificial Sequence
  Description of Artificial Sequence: Synthetic oligonucleotide
  Sense strand starting at position 194 of SEQ ID NO: 1245172
ggcguguuggugcugaaga

SEQ ID NO: 1542037 - RNA, 19 nt, Artificial Sequence
  Description of Artificial Sequence: Synthetic oligonucleotide
  Antisense strand to SEQ ID NO: 1542036
ucuucagcaccaacacgcc

SEQ ID NO: 1542038 - RNA, 19 nt, Artificial Sequence
  Description of Artificial Sequence: Synthetic oligonucleotide
  Sense strand starting at position 528 of SEQ ID NO: 1245172
gcgccuucucgcucaggua

SEQ ID NO: 1542039 - RNA, 19 nt, Artificial Sequence
  Description of Artificial Sequence: Synthetic oligonucleotide
  Antisense strand to SEQ ID NO: 1542038
uaccugagcgagaaggcgc

SEQ ID NO: 1542040 - RNA, 19 nt, Artificial Sequence
  Description of Artificial Sequence: Synthetic oligonucleotide
  Sense strand starting at position 540 of SEQ ID NO: 1245172
ucagguacucccggaagau

SEQ ID NO: 1542041 - RNA, 19 nt, Artificial Sequence
  Description of Artificial Sequence: Synthetic oligonucleotide
  Antisense strand to SEQ ID NO: 1542040
aucuuccgggaguaccuga

SEQ ID NO: 1542042 - RNA, 19 nt, Artificial Sequence
  Description of Artificial Sequence: Synthetic oligonucleotide
  Sense strand starting at position 541 of SEQ ID NO: 1245172
cagguacucccggaagaug

SEQ ID NO: 1542043 - RNA, 19 nt, Artificial Sequence
  Description of Artificial Sequence: Synthetic oligonucleotide
  Antisense strand to SEQ ID NO: 1542042
caucuuccgggaguaccug

SEQ ID NO: 1542044 - RNA, 19 nt, Artificial Sequence
  Description of Artificial Sequence: Synthetic oligonucleotide
  Sense strand starting at position 714 of SEQ ID NO: 1245172
cggcgcucugguccauauu

SEQ ID NO: 1542045 - RNA, 19 nt, Artificial Sequence
  Description of Artificial Sequence: Synthetic oligonucleotide
  Antisense strand to SEQ ID NO: 1542044
aauauggaccagagcgccg

SEQ ID NO: 1542046 - RNA, 19 nt, Artificial Sequence
  Description of Artificial Sequence: Synthetic oligonucleotide
  Sense strand starting at position 717 of SEQ ID NO: 1245172
cgcucugguccauauugau

SEQ ID NO: 1542047 - RNA, 19 nt, Artificial Sequence
  Description of Artificial Sequence: Synthetic oligonucleotide
  Antisense strand to SEQ ID NO: 1542046
aucaauauggaccagagcg

SEQ ID NO: 1542048 - RNA, 19 nt, Artificial Sequence
  Description of Artificial Sequence: Synthetic oligonucleotide
  Sense strand starting at position 723 of SEQ ID NO: 1245172
gguccauauugaucauaug

SEQ ID NO: 1542049 - RNA, 19 nt, Artificial Sequence
  Description of Artificial Sequence: Synthetic oligonucleotide
  Antisense strand to SEQ ID NO: 1542048
cauaugaucaauauggacc

SEQ ID NO: 1542050 - RNA, 19 nt, Artificial Sequence
  Description of Artificial Sequence: Synthetic oligonucleotide
  Sense strand starting at position 726 of SEQ ID NO: 1245172
ccauauugaucauauggac

SEQ ID NO: 1542051 - RNA, 19 nt, Artificial Sequence
  Description of Artificial Sequence: Synthetic oligonucleotide
  Antisense strand to SEQ ID NO: 1542050
guccauaugaucaauaugg

SEQ ID NO: 1542052 - RNA, 19 nt, Artificial Sequence
  Description of Artificial Sequence: Synthetic oligonucleotide
  Sense strand starting at position 1086 of SEQ ID NO: 1245172
caggcauucucgccauauu

SEQ ID NO: 1542053 - RNA, 19 nt, Artificial Sequence
  Description of Artificial Sequence: Synthetic oligonucleotide
  Antisense strand to SEQ ID NO: 1542052
aauauggcgagaaugccug

SEQ ID NO: 1542054 - RNA, 19 nt, Artificial Sequence
  Description of Artificial Sequence: Synthetic oligonucleotide
  Sense strand starting at position 1087 of SEQ ID NO: 1245172
aggcauucucgccauauug

SEQ ID NO: 1542055 - RNA, 19 nt, Artificial Sequence
  Description of Artificial Sequence: Synthetic oligonucleotide
  Antisense strand to SEQ ID NO: 1542054
caauauggcgagaaugccu

SEQ ID NO: 1542056 - RNA, 19 nt, Artificial Sequence
  Description of Artificial Sequence: Synthetic oligonucleotide
  Sense strand starting at position 1097 of SEQ ID NO: 1245172
gccauauugccgucucucu

SEQ ID NO: 1542057 - RNA, 19 nt, Artificial Sequence
  Description of Artificial Sequence: Synthetic oligonucleotide
  Antisense strand to SEQ ID NO: 1542056
agagagacggcaauauggc

SEQ ID NO: 1542058 - RNA, 19 nt, Artificial Sequence
  Description of Artificial Sequence: Synthetic oligonucleotide
  Sense strand starting at position 1133 of SEQ ID NO: 1245172
gcgcaugcgcuauauugga

SEQ ID NO: 1542059 - RNA, 19 nt, Artificial Sequence
  Description of Artificial Sequence: Synthetic oligonucleotide
  Antisense strand to SEQ ID NO: 1542058
uccaauauagcgcaugcgc

SEQ ID NO: 1542060 - RNA, 19 nt, Artificial Sequence
  Description of Artificial Sequence: Synthetic oligonucleotide
  Sense strand starting at position 1228 of SEQ ID NO: 1245172
cuccaauugucauucccga

SEQ ID NO: 1542061 - RNA, 19 nt, Artificial Sequence
  Description of Artificial Sequence: Synthetic oligonucleotide
  Antisense strand to SEQ ID NO: 1542060
ucgggaaugacaauuggag

SEQ ID NO: 1542062 - RNA, 19 nt, Artificial Sequence
  Description of Artificial Sequence: Synthetic oligonucleotide
  Sense strand starting at position 1369 of SEQ ID NO: 1245172
ggcucccacuucuaagaaa

SEQ ID NO: 1542063 - RNA, 19 nt, Artificial Sequence
  Description of Artificial Sequence: Synthetic oligonucleotide
  Antisense strand to SEQ ID NO: 1542062
uuucuuagaagugggagcc

SEQ ID NO: 1542064 - RNA, 19 nt, Artificial Sequence
  Description of Artificial Sequence: Synthetic oligonucleotide
  Sense strand starting at position 1453 of SEQ ID NO: 1245172
uacccucuggcggagaauu

SEQ ID NO: 1542065 - RNA, 19 nt, Artificial Sequence
  Description of Artificial Sequence: Synthetic oligonucleotide
  Antisense strand to SEQ ID NO: 1542064
aauucuccgccagagggua

SEQ ID NO: 1542066 - RNA, 19 nt, Artificial Sequence
  Description of Artificial Sequence: Synthetic oligonucleotide
  Sense strand starting at position 1519 of SEQ ID NO: 1245172
ggucucguuucucuaagua

SEQ ID NO: 1542067 - RNA, 19 nt, Artificial Sequence
  Description of Artificial Sequence: Synthetic oligonucleotide
  Antisense strand to SEQ ID NO: 1542066
uacuuagagaaacgagacc

SEQ ID NO: 1542068 - RNA, 19 nt, Artificial Sequence
  Description of Artificial Sequence: Synthetic oligonucleotide
  Sense strand starting at position 1937 of SEQ ID NO: 1245172
uuaagcugucauuaaagac

SEQ ID NO: 1542069 - RNA, 19 nt, Artificial Sequence
  Description of Artificial Sequence: Synthetic oligonucleotide
  Antisense strand to SEQ ID NO: 1542068
gucuuuaaugacagcuuaa

SEQ ID NO: 1542070 - RNA, 19 nt, Artificial Sequence
  Description of Artificial Sequence: Synthetic oligonucleotide
  Sense strand starting at position 2396 of SEQ ID NO: 1245172
cgggucucgcuuucccaua

SEQ ID NO: 1542071 - RNA, 19 nt, Artificial Sequence
  Description of Artificial Sequence: Synthetic oligonucleotide
  Antisense strand to SEQ ID NO: 1542070
uaugggaaagcgagacccg

SEQ ID NO: 1542072 - RNA, 19 nt, Artificial Sequence
  Description of Artificial Sequence: Synthetic oligonucleotide
  Sense strand starting at position 2401 of SEQ ID NO: 1245172
cucgcuuucccauaggaga

SEQ ID NO: 1542073 - RNA, 19 nt, Artificial Sequence
  Description of Artificial Sequence: Synthetic oligonucleotide
  Antisense strand to SEQ ID NO: 1542072
ucuccuaugggaaagcgag

SEQ ID NO: 1542074 - RNA, 19 nt, Artificial Sequence
  Description of Artificial Sequence: Synthetic oligonucleotide
  Sense strand starting at position 2403 of SEQ ID NO: 1245172
cgcuuucccauaggagaca

SEQ ID NO: 1542075 - RNA, 19 nt, Artificial Sequence
  Description of Artificial Sequence: Synthetic oligonucleotide
  Antisense strand to SEQ ID NO: 1542074
ugucuccuaugggaaagcg

SEQ ID NO: 1542076 - RNA, 19 nt, Artificial Sequence
  Description of Artificial Sequence: Synthetic oligonucleotide
  Sense strand starting at position 2743 of SEQ ID NO: 1245172
cucgggugcguccucgaau

SEQ ID NO: 1542077 - RNA, 19 nt, Artificial Sequence
  Description of Artificial Sequence: Synthetic oligonucleotide
  Antisense strand to SEQ ID NO: 1542076
auucgaggacgcacccgag

SEQ ID NO: 1542078 - RNA, 19 nt, Artificial Sequence
  Description of Artificial Sequence: Synthetic oligonucleotide
  Sense strand starting at position 2745 of SEQ ID NO: 1245172
cgggugcguccucgaauuu

SEQ ID NO: 1542079 - RNA, 19 nt, Artificial Sequence
  Description of Artificial Sequence: Synthetic oligonucleotide
  Antisense strand to SEQ ID NO: 1542078
aaauucgaggacgcacccg

SEQ ID NO: 1542080 - RNA, 19 nt, Artificial Sequence
  Description of Artificial Sequence: Synthetic oligonucleotide
  Sense strand starting at position 2746 of SEQ ID NO: 1245172
gggugcguccucgaauuua

SEQ ID NO: 1542081 - RNA, 19 nt, Artificial Sequence
  Description of Artificial Sequence: Synthetic oligonucleotide
  Antisense strand to SEQ ID NO: 1542080
uaaauucgaggacgcaccc

SEQ ID NO: 1542082 - RNA, 19 nt, Artificial Sequence
  Description of Artificial Sequence: Synthetic oligonucleotide
  Sense strand starting at position 2772 of SEQ ID NO: 1245172
guccgaauucucggcaguu

SEQ ID NO: 1542083 - RNA, 19 nt, Artificial Sequence
  Description of Artificial Sequence: Synthetic oligonucleotide
  Antisense strand to SEQ ID NO: 1542082
aacugccgagaauucggac

SEQ ID NO: 1542084 - RNA, 19 nt, Artificial Sequence
  Description of Artificial Sequence: Synthetic oligonucleotide
  Sense strand starting at position 2773 of SEQ ID NO: 1245172
uccgaauucucggcaguua

SEQ ID NO: 1542085 - RNA, 19 nt, Artificial Sequence
  Description of Artificial Sequence: Synthetic oligonucleotide
  Antisense strand to SEQ ID NO: 1542084
uaacugccgagaauucgga

SEQ ID NO: 1542086 - RNA, 19 nt, Artificial Sequence
  Description of Artificial Sequence: Synthetic oligonucleotide
  Sense strand starting at position 2774 of SEQ ID NO: 1245172
ccgaauucucggcaguuag

SEQ ID NO: 1542087 - RNA, 19 nt, Artificial Sequence
  Description of Artificial Sequence: Synthetic oligonucleotide
  Antisense strand to SEQ ID NO: 1542086
cuaacugccgagaauucgg

SEQ ID NO: 1542088 - RNA, 19 nt, Artificial Sequence
  Description of Artificial Sequence: Synthetic oligonucleotide
  Sense strand starting at position 2783 of SEQ ID NO: 1245172
cggcaguuaggcugugaga

SEQ ID NO: 1542089 - RNA, 19 nt, Artificial Sequence
  Description of Artificial Sequence: Synthetic oligonucleotide
  Antisense strand to SEQ ID NO: 1542088
ucucacagccuaacugccg

SEQ ID NO: 1542090 - RNA, 19 nt, Artificial Sequence
  Description of Artificial Sequence: Synthetic oligonucleotide
  Sense strand starting at position 2785 of SEQ ID NO: 1245172
gcaguuaggcugugagagu

SEQ ID NO: 1542091 - RNA, 19 nt, Artificial Sequence
  Description of Artificial Sequence: Synthetic oligonucleotide
  Antisense strand to SEQ ID NO: 1542090
acucucacagccuaacugc

SEQ ID NO: 1542092 - RNA, 19 nt, Artificial Sequence
  Description of Artificial Sequence: Synthetic oligonucleotide
  Sense strand starting at position 2792 of SEQ ID NO: 1245172
ggcugugagaguuauguca

SEQ ID NO: 1542093 - RNA, 19 nt, Artificial Sequence
  Description of Artificial Sequence: Synthetic oligonucleotide
  Antisense strand to SEQ ID NO: 1542092
ugacauaacucucacagcc

SEQ ID NO: 1542094 - RNA, 19 nt, Artificial Sequence
  Description of Artificial Sequence: Synthetic oligonucleotide
  Sense strand starting at position 2947 of SEQ ID NO: 1245172
gggcuucugagugggaguu

SEQ ID NO: 1542095 - RNA, 19 nt, Artificial Sequence
  Description of Artificial Sequence: Synthetic oligonucleotide
  Antisense strand to SEQ ID NO: 1542094
aacucccacucagaagccc

SEQ ID NO: 1542096 - RNA, 19 nt, Artificial Sequence
  Description of Artificial Sequence: Synthetic oligonucleotide
  Sense strand starting at position 3053 of SEQ ID NO: 1245172
ccaggugugaaacaaguua

SEQ ID NO: 1542097 - RNA, 19 nt, Artificial Sequence
  Description of Artificial Sequence: Synthetic oligonucleotide
  Antisense strand to SEQ ID NO: 1542096
uaacuuguuucacaccugg

SEQ ID NO: 1542098 - RNA, 19 nt, Artificial Sequence
  Description of Artificial Sequence: Synthetic oligonucleotide
  Sense strand starting at position 3197 of SEQ ID NO: 1245172
cggagaaccguccgggaau

SEQ ID NO: 1542099 - RNA, 19 nt, Artificial Sequence
  Description of Artificial Sequence: Synthetic oligonucleotide
  Antisense strand to SEQ ID NO: 1542098
auucccggacgguucuccg

SEQ ID NO: 1542100 - RNA, 19 nt, Artificial Sequence
  Description of Artificial Sequence: Synthetic oligonucleotide
  Sense strand starting at position 3390 of SEQ ID NO: 1245172
cggcuaauuccagagggcu

SEQ ID NO: 1542101 - RNA, 19 nt, Artificial Sequence
  Description of Artificial Sequence: Synthetic oligonucleotide
  Antisense strand to SEQ ID NO: 1542100
agcccucuggaauuagccg

SEQ ID NO: 1542102 - RNA, 19 nt, Artificial Sequence
  Description of Artificial Sequence: Synthetic oligonucleotide
  Sense strand starting at position 3688 of SEQ ID NO: 1245172
cuuugaauugcucgcaguu

SEQ ID NO: 1542103 - RNA, 19 nt, Artificial Sequence
  Description of Artificial Sequence: Synthetic oligonucleotide
  Antisense strand to SEQ ID NO: 1542102
aacugcgagcaauucaaag

SEQ ID NO: 1542104 - RNA, 19 nt, Artificial Sequence
  Description of Artificial Sequence: Synthetic oligonucleotide
  Sense strand starting at position 3689 of SEQ ID NO: 1245172
uuugaauugcucgcaguuu

SEQ ID NO: 1542105 - RNA, 19 nt, Artificial Sequence
  Description of Artificial Sequence: Synthetic oligonucleotide
  Antisense strand to SEQ ID NO: 1542104
aaacugcgagcaauucaaa

SEQ ID NO: 1542106 - RNA, 19 nt, Artificial Sequence
  Description of Artificial Sequence: Synthetic oligonucleotide
  Sense strand starting at position 3765 of SEQ ID NO: 1245172
cccaguugacgucaacuua

SEQ ID NO: 1542107 - RNA, 19 nt, Artificial Sequence
  Description of Artificial Sequence: Synthetic oligonucleotide
  Antisense strand to SEQ ID NO: 1542106
uaaguugacgucaacuggg

SEQ ID NO: 1542108 - RNA, 19 nt, Artificial Sequence
  Description of Artificial Sequence: Synthetic oligonucleotide
  Sense strand starting at position 3972 of SEQ ID NO: 1245172
gcaggacccgcgcuuaaau

SEQ ID NO: 1542109 - RNA, 19 nt, Artificial Sequence
  Description of Artificial Sequence: Synthetic oligonucleotide
  Antisense strand to SEQ ID NO: 1542108
auuuaagcgcggguccugc

SEQ ID NO: 1542110 - RNA, 19 nt, Artificial Sequence
  Description of Artificial Sequence: Synthetic oligonucleotide
  Sense strand starting at position 3979 of SEQ ID NO: 1245172
ccgcgcuuaaauucgauau

SEQ ID NO: 1542111 - RNA, 19 nt, Artificial Sequence
  Description of Artificial Sequence: Synthetic oligonucleotide
  Antisense strand to SEQ ID NO: 1542110
auaucgaauuuaagcgcgg

SEQ ID NO: 1542112 - RNA, 19 nt, Artificial Sequence
  Description of Artificial Sequence: Synthetic oligonucleotide
  Sense strand starting at position 3983 of SEQ ID NO: 1245172
gcuuaaauucgauaugaaa

SEQ ID NO: 1542113 - RNA, 19 nt, Artificial Sequence
  Description of Artificial Sequence: Synthetic oligonucleotide
  Antisense strand to SEQ ID NO: 1542112
uuucauaucgaauuuaagc

SEQ ID NO: 1542114 - RNA, 19 nt, Artificial Sequence
  Description of Artificial Sequence: Synthetic oligonucleotide
  Sense strand starting at position 6 of SEQ ID NO: 1245173
uaagguuagguguaaaguu

SEQ ID NO: 1542115 - RNA, 19 nt, Artificial Sequence
  Description of Artificial Sequence: Synthetic oligonucleotide
  Antisense strand to SEQ ID NO: 1542114
aacuuuacaccuaaccuua

SEQ ID NO: 1542116 - RNA, 19 nt, Artificial Sequence
  Description of Artificial Sequence: Synthetic oligonucleotide
  Sense strand starting at position 42 of SEQ ID NO: 1245173
agaguuaacuucuaagggu

SEQ ID NO: 1542117 - RNA, 19 nt, Artificial Sequence
  Description of Artificial Sequence: Synthetic oligonucleotide
  Antisense strand to SEQ ID NO: 1542116
acccuuagaaguuaacucu

SEQ ID NO: 1542118 - RNA, 19 nt, Artificial Sequence
  Description of Artificial Sequence: Synthetic oligonucleotide
  Sense strand starting at position 171 of SEQ ID NO: 1245173
cauagaguuugguuugguu

SEQ ID NO: 1542119 - RNA, 19 nt, Artificial Sequence
  Description of Artificial Sequence: Synthetic oligonucleotide
  Antisense strand to SEQ ID NO: 1542118
aaccaaaccaaacucuaug

SEQ ID NO: 1542120 - RNA, 19 nt, Artificial Sequence
  Description of Artificial Sequence: Synthetic oligonucleotide
  Sense strand starting at position 216 of SEQ ID NO: 1245173
ugaaacuauugugggagaa

SEQ ID NO: 1542121 - RNA, 19 nt, Artificial Sequence
  Description of Artificial Sequence: Synthetic oligonucleotide
  Antisense strand to SEQ ID NO: 1542120
uucucccacaauaguuuca

SEQ ID NO: 1542122 - RNA, 19 nt, Artificial Sequence
  Description of Artificial Sequence: Synthetic oligonucleotide
  Sense strand starting at position 218 of SEQ ID NO: 1245173
aaacuauugugggagaauu

SEQ ID NO: 1542123 - RNA, 19 nt, Artificial Sequence
  Description of Artificial Sequence: Synthetic oligonucleotide
  Antisense strand to SEQ ID NO: 1542122
aauucucccacaauaguuu

SEQ ID NO: 1542124 - RNA, 19 nt, Artificial Sequence
  Description of Artificial Sequence: Synthetic oligonucleotide
  Sense strand starting at position 803 of SEQ ID NO: 1245173
gguugcguuucgacaggua

SEQ ID NO: 1542125 - RNA, 19 nt, Artificial Sequence
  Description of Artificial Sequence: Synthetic oligonucleotide
  Antisense strand to SEQ ID NO: 1542124
uaccugucgaaacgcaacc

SEQ ID NO: 1542126 - RNA, 19 nt, Artificial Sequence
  Description of Artificial Sequence: Synthetic oligonucleotide
  Sense strand starting at position 806 of SEQ ID NO: 1245173
ugcguuucgacagguacuu

SEQ ID NO: 1542127 - RNA, 19 nt, Artificial Sequence
  Description of Artificial Sequence: Synthetic oligonucleotide
  Antisense strand to SEQ ID NO: 1542126
aaguaccugucgaaacgca

SEQ ID NO: 1542128 - RNA, 19 nt, Artificial Sequence
  Description of Artificial Sequence: Synthetic oligonucleotide
  Sense strand starting at position 812 of SEQ ID NO: 1245173
ucgacagguacuugacgaa

SEQ ID NO: 1542129 - RNA, 19 nt, Artificial Sequence
  Description of Artificial Sequence: Synthetic oligonucleotide
  Antisense strand to SEQ ID NO: 1542128
uucgucaaguaccugucga

SEQ ID NO: 1542130 - RNA, 19 nt, Artificial Sequence
  Description of Artificial Sequence: Synthetic oligonucleotide
  Sense strand starting at position 944 of SEQ ID NO: 1245173
gcccgagggacuugaagua

SEQ ID NO: 1542131 - RNA, 19 nt, Artificial Sequence
  Description of Artificial Sequence: Synthetic oligonucleotide
  Antisense strand to SEQ ID NO: 1542130
uacuucaagucccucgggc

SEQ ID NO: 1542132 - RNA, 19 nt, Artificial Sequence
  Description of Artificial Sequence: Synthetic oligonucleotide
  Sense strand starting at position 1093 of SEQ ID NO: 1245173
ggcguguuggugcugaaga

SEQ ID NO: 1542133 - RNA, 19 nt, Artificial Sequence
  Description of Artificial Sequence: Synthetic oligonucleotide
  Antisense strand to SEQ ID NO: 1542132
ucuucagcaccaacacgcc

SEQ ID NO: 1542134 - RNA, 19 nt, Artificial Sequence
  Description of Artificial Sequence: Synthetic oligonucleotide
  Sense strand starting at position 1427 of SEQ ID NO: 1245173
gcgccuucucgcucaggua

SEQ ID NO: 1542135 - RNA, 19 nt, Artificial Sequence
  Description of Artificial Sequence: Synthetic oligonucleotide
  Antisense strand to SEQ ID NO: 1542134
uaccugagcgagaaggcgc

SEQ ID NO: 1542136 - RNA, 19 nt, Artificial Sequence
  Description of Artificial Sequence: Synthetic oligonucleotide
  Sense strand starting at position 1439 of SEQ ID NO: 1245173
ucagguacucccggaagau

SEQ ID NO: 1542137 - RNA, 19 nt, Artificial Sequence
  Description of Artificial Sequence: Synthetic oligonucleotide
  Antisense strand to SEQ ID NO: 1542136
aucuuccgggaguaccuga

SEQ ID NO: 1542138 - RNA, 19 nt, Artificial Sequence
  Description of Artificial Sequence: Synthetic oligonucleotide
  Sense strand starting at position 1440 of SEQ ID NO: 1245173
cagguacucccggaagaug

SEQ ID NO: 1542139 - RNA, 19 nt, Artificial Sequence
  Description of Artificial Sequence: Synthetic oligonucleotide
  Antisense strand to SEQ ID NO: 1542138
caucuuccgggaguaccug

SEQ ID NO: 1542140 - RNA, 19 nt, Artificial Sequence
  Description of Artificial Sequence: Synthetic oligonucleotide
  Sense strand starting at position 1613 of SEQ ID NO: 1245173
cggcgcucugguccauauu

SEQ ID NO: 1542141 - RNA, 19 nt, Artificial Sequence
  Description of Artificial Sequence: Synthetic oligonucleotide
  Antisense strand to SEQ ID NO: 1542140
aauauggaccagagcgccg

SEQ ID NO: 1542142 - RNA, 19 nt, Artificial Sequence
  Description of Artificial Sequence: Synthetic oligonucleotide
  Sense strand starting at position 1616 of SEQ ID NO: 1245173
cgcucugguccauauugau

SEQ ID NO: 1542143 - RNA, 19 nt, Artificial Sequence
  Description of Artificial Sequence: Synthetic oligonucleotide
  Antisense strand to SEQ ID NO: 1542142
aucaauauggaccagagcg

SEQ ID NO: 1542144 - RNA, 19 nt, Artificial Sequence
  Description of Artificial Sequence: Synthetic oligonucleotide
  Sense strand starting at position 1622 of SEQ ID NO: 1245173
gguccauauugaucauaug

SEQ ID NO: 1542145 - RNA, 19 nt, Artificial Sequence
  Description of Artificial Sequence: Synthetic oligonucleotide
  Antisense strand to SEQ ID NO: 1542144
cauaugaucaauauggacc

SEQ ID NO: 1542146 - RNA, 19 nt, Artificial Sequence
  Description of Artificial Sequence: Synthetic oligonucleotide
  Sense strand starting at position 1625 of SEQ ID NO: 1245173
ccauauugaucauauggac

SEQ ID NO: 1542147 - RNA, 19 nt, Artificial Sequence
  Description of Artificial Sequence: Synthetic oligonucleotide
  Antisense strand to SEQ ID NO: 1542146
guccauaugaucaauaugg

SEQ ID NO: 1542148 - RNA, 19 nt, Artificial Sequence
  Description of Artificial Sequence: Synthetic oligonucleotide
  Sense strand starting at position 1985 of SEQ ID NO: 1245173
caggcauucucgccauauu

SEQ ID NO: 1542149 - RNA, 19 nt, Artificial Sequence
  Description of Artificial Sequence: Synthetic oligonucleotide
  Antisense strand to SEQ ID NO: 1542148
aauauggcgagaaugccug

SEQ ID NO: 1542150 - RNA, 19 nt, Artificial Sequence
  Description of Artificial Sequence: Synthetic oligonucleotide
  Sense strand starting at position 1986 of SEQ ID NO: 1245173
aggcauucucgccauauug

SEQ ID NO: 1542151 - RNA, 19 nt, Artificial Sequence
  Description of Artificial Sequence: Synthetic oligonucleotide
  Antisense strand to SEQ ID NO: 1542150
caauauggcgagaaugccu

SEQ ID NO: 1542152 - RNA, 19 nt, Artificial Sequence
  Description of Artificial Sequence: Synthetic oligonucleotide
  Sense strand starting at position 1996 of SEQ ID NO: 1245173
gccauauugccgucucucu

SEQ ID NO: 1542153 - RNA, 19 nt, Artificial Sequence
  Description of Artificial Sequence: Synthetic oligonucleotide
  Antisense strand to SEQ ID NO: 1542152
agagagacggcaauauggc

SEQ ID NO: 1542154 - RNA, 19 nt, Artificial Sequence
  Description of Artificial Sequence: Synthetic oligonucleotide
  Sense strand starting at position 2032 of SEQ ID NO: 1245173
gcgcaugcgcuauauugga

SEQ ID NO: 1542155 - RNA, 19 nt, Artificial Sequence
  Description of Artificial Sequence: Synthetic oligonucleotide
  Antisense strand to SEQ ID NO: 1542154
uccaauauagcgcaugcgc

SEQ ID NO: 1542156 - RNA, 19 nt, Artificial Sequence
  Description of Artificial Sequence: Synthetic oligonucleotide
  Sense strand starting at position 2127 of SEQ ID NO: 1245173
cuccaauugucauucccga

SEQ ID NO: 1542157 - RNA, 19 nt, Artificial Sequence
  Description of Artificial Sequence: Synthetic oligonucleotide
  Antisense strand to SEQ ID NO: 1542156
ucgggaaugacaauuggag

SEQ ID NO: 1542158 - RNA, 19 nt, Artificial Sequence
  Description of Artificial Sequence: Synthetic oligonucleotide
  Sense strand starting at position 2268 of SEQ ID NO: 1245173
ggcucccacuucuaagaaa

SEQ ID NO: 1542159 - RNA, 19 nt, Artificial Sequence
  Description of Artificial Sequence: Synthetic oligonucleotide
  Antisense strand to SEQ ID NO: 1542158
uuucuuagaagugggagcc

SEQ ID NO: 1542160 - RNA, 19 nt, Artificial Sequence
  Description of Artificial Sequence: Synthetic oligonucleotide
  Sense strand starting at position 2352 of SEQ ID NO: 1245173
uacccucuggcggagaauu

SEQ ID NO: 1542161 - RNA, 19 nt, Artificial Sequence
  Description of Artificial Sequence: Synthetic oligonucleotide
  Antisense strand to SEQ ID NO: 1542160
aauucuccgccagagggua

SEQ ID NO: 1542162 - RNA, 19 nt, Artificial Sequence
  Description of Artificial Sequence: Synthetic oligonucleotide
  Sense strand starting at position 2418 of SEQ ID NO: 1245173
ggucucguuucucuaagua

SEQ ID NO: 1542163 - RNA, 19 nt, Artificial Sequence
  Description of Artificial Sequence: Synthetic oligonucleotide
  Antisense strand to SEQ ID NO: 1542162
uacuuagagaaacgagacc

SEQ ID NO: 1542164 - RNA, 19 nt, Artificial Sequence
  Description of Artificial Sequence: Synthetic oligonucleotide
  Sense strand starting at position 2836 of SEQ ID NO: 1245173
uuaagcugucauuaaagac

SEQ ID NO: 1542165 - RNA, 19 nt, Artificial Sequence
  Description of Artificial Sequence: Synthetic oligonucleotide
  Antisense strand to SEQ ID NO: 1542164
gucuuuaaugacagcuuaa

SEQ ID NO: 1542166 - RNA, 19 nt, Artificial Sequence
  Description of Artificial Sequence: Synthetic oligonucleotide
  Sense strand starting at position 3295 of SEQ ID NO: 1245173
cgggucucgcuuucccaua

SEQ ID NO: 1542167 - RNA, 19 nt, Artificial Sequence
  Description of Artificial Sequence: Synthetic oligonucleotide
  Antisense strand to SEQ ID NO: 1542166
uaugggaaagcgagacccg

SEQ ID NO: 1542168 - RNA, 19 nt, Artificial Sequence
  Description of Artificial Sequence: Synthetic oligonucleotide
  Sense strand starting at position 3300 of SEQ ID NO: 1245173
cucgcuuucccauaggaga

SEQ ID NO: 1542169 - RNA, 19 nt, Artificial Sequence
  Description of Artificial Sequence: Synthetic oligonucleotide
  Antisense strand to SEQ ID NO: 1542168
ucuccuaugggaaagcgag

SEQ ID NO: 1542170 - RNA, 19 nt, Artificial Sequence
  Description of Artificial Sequence: Synthetic oligonucleotide
  Sense strand starting at position 3302 of SEQ ID NO: 1245173
cgcuuucccauaggagaca

SEQ ID NO: 1542171 - RNA, 19 nt, Artificial Sequence
  Description of Artificial Sequence: Synthetic oligonucleotide
  Antisense strand to SEQ ID NO: 1542170
ugucuccuaugggaaagcg

SEQ ID NO: 1542172 - RNA, 19 nt, Artificial Sequence
  Description of Artificial Sequence: Synthetic oligonucleotide
  Sense strand starting at position 3642 of SEQ ID NO: 1245173
cucgggugcguccucgaau

SEQ ID NO: 1542173 - RNA, 19 nt, Artificial Sequence
  Description of Artificial Sequence: Synthetic oligonucleotide
  Antisense strand to SEQ ID NO: 1542172
auucgaggacgcacccgag

SEQ ID NO: 1542174 - RNA, 19 nt, Artificial Sequence
  Description of Artificial Sequence: Synthetic oligonucleotide
  Sense strand starting at position 3644 of SEQ ID NO: 1245173
cgggugcguccucgaauuu

SEQ ID NO: 1542175 - RNA, 19 nt, Artificial Sequence
  Description of Artificial Sequence: Synthetic oligonucleotide
  Antisense strand to SEQ ID NO: 1542174
aaauucgaggacgcacccg

SEQ ID NO: 1542176 - RNA, 19 nt, Artificial Sequence
  Description of Artificial Sequence: Synthetic oligonucleotide
  Sense strand starting at position 3645 of SEQ ID NO: 1245173
gggugcguccucgaauuua

SEQ ID NO: 1542177 - RNA, 19 nt, Artificial Sequence
  Description of Artificial Sequence: Synthetic oligonucleotide
  Antisense strand to SEQ ID NO: 1542176
uaaauucgaggacgcaccc

SEQ ID NO: 1542178 - RNA, 19 nt, Artificial Sequence
  Description of Artificial Sequence: Synthetic oligonucleotide
  Sense strand starting at position 3671 of SEQ ID NO: 1245173
guccgaauucucggcaguu

SEQ ID NO: 1542179 - RNA, 19 nt, Artificial Sequence
  Description of Artificial Sequence: Synthetic oligonucleotide
  Antisense strand to SEQ ID NO: 1542178
aacugccgagaauucggac

SEQ ID NO: 1542180 - RNA, 19 nt, Artificial Sequence
  Description of Artificial Sequence: Synthetic oligonucleotide
  Sense strand starting at position 3672 of SEQ ID NO: 1245173
uccgaauucucggcaguua

SEQ ID NO: 1542181 - RNA, 19 nt, Artificial Sequence
  Description of Artificial Sequence: Synthetic oligonucleotide
  Antisense strand to SEQ ID NO: 1542180
uaacugccgagaauucgga

SEQ ID NO: 1542182 - RNA, 19 nt, Artificial Sequence
  Description of Artificial Sequence: Synthetic oligonucleotide
  Sense strand starting at position 3673 of SEQ ID NO: 1245173
ccgaauucucggcaguuag

SEQ ID NO: 1542183 - RNA, 19 nt, Artificial Sequence
  Description of Artificial Sequence: Synthetic oligonucleotide
  Antisense strand to SEQ ID NO: 1542182
cuaacugccgagaauucgg

SEQ ID NO: 1542184 - RNA, 19 nt, Artificial Sequence
  Description of Artificial Sequence: Synthetic oligonucleotide
  Sense strand starting at position 3682 of SEQ ID NO: 1245173
cggcaguuaggcugugaga

SEQ ID NO: 1542185 - RNA, 19 nt, Artificial Sequence
  Description of Artificial Sequence: Synthetic oligonucleotide
  Antisense strand to SEQ ID NO: 1542184
ucucacagccuaacugccg

SEQ ID NO: 1542186 - RNA, 19 nt, Artificial Sequence
  Description of Artificial Sequence: Synthetic oligonucleotide
  Sense strand starting at position 3684 of SEQ ID NO: 1245173
gcaguuaggcugugagagu

SEQ ID NO: 1542187 - RNA, 19 nt, Artificial Sequence
  Description of Artificial Sequence: Synthetic oligonucleotide
  Antisense strand to SEQ ID NO: 1542186
acucucacagccuaacugc

SEQ ID NO: 1542188 - RNA, 19 nt, Artificial Sequence
  Description of Artificial Sequence: Synthetic oligonucleotide
  Sense strand starting at position 3691 of SEQ ID NO: 1245173
ggcugugagaguuauguca

SEQ ID NO: 1542189 - RNA, 19 nt, Artificial Sequence
  Description of Artificial Sequence: Synthetic oligonucleotide
  Antisense strand to SEQ ID NO: 1542188
ugacauaacucucacagcc

SEQ ID NO: 1542190 - RNA, 19 nt, Artificial Sequence
  Description of Artificial Sequence: Synthetic oligonucleotide
  Sense strand starting at position 3846 of SEQ ID NO: 1245173
gggcuucugagugggaguu

SEQ ID NO: 1542191 - RNA, 19 nt, Artificial Sequence
  Description of Artificial Sequence: Synthetic oligonucleotide
  Antisense strand to SEQ ID NO: 1542190
aacucccacucagaagccc

SEQ ID NO: 1542192 - RNA, 19 nt, Artificial Sequence
  Description of Artificial Sequence: Synthetic oligonucleotide
  Sense strand starting at position 3952 of SEQ ID NO: 1245173
ccaggugugaaacaaguua

SEQ ID NO: 1542193 - RNA, 19 nt, Artificial Sequence
  Description of Artificial Sequence: Synthetic oligonucleotide
  Antisense strand to SEQ ID NO: 1542192
uaacuuguuucacaccugg

SEQ ID NO: 1542194 - RNA, 19 nt, Artificial Sequence
  Description of Artificial Sequence: Synthetic oligonucleotide
  Sense strand starting at position 149 of SEQ ID NO: 1245174
gcgccuucucgcucaggua

SEQ ID NO: 1542195 - RNA, 19 nt, Artificial Sequence
  Description of Artificial Sequence: Synthetic oligonucleotide
  Antisense strand to SEQ ID NO: 1542194
uaccugagcgagaaggcgc

SEQ ID NO: 1542196 - RNA, 19 nt, Artificial Sequence
  Description of Artificial Sequence: Synthetic oligonucleotide
  Sense strand starting at position 161 of SEQ ID NO: 1245174
ucagguacucccggaagau

SEQ ID NO: 1542197 - RNA, 19 nt, Artificial Sequence
  Description of Artificial Sequence: Synthetic oligonucleotide
  Antisense strand to SEQ ID NO: 1542196
aucuuccgggaguaccuga

SEQ ID NO: 1542198 - RNA, 19 nt, Artificial Sequence
  Description of Artificial Sequence: Synthetic oligonucleotide
  Sense strand starting at position 162 of SEQ ID NO: 1245174
cagguacucccggaagaug

SEQ ID NO: 1542199 - RNA, 19 nt, Artificial Sequence
  Description of Artificial Sequence: Synthetic oligonucleotide
  Antisense strand to SEQ ID NO: 1542198
caucuuccgggaguaccug

SEQ ID NO: 1542200 - RNA, 19 nt, Artificial Sequence
  Description of Artificial Sequence: Synthetic oligonucleotide
  Sense strand starting at position 335 of SEQ ID NO: 1245174
cggcgcucugguccauauu

SEQ ID NO: 1542201 - RNA, 19 nt, Artificial Sequence
  Description of Artificial Sequence: Synthetic oligonucleotide
  Antisense strand to SEQ ID NO: 1542200
aauauggaccagagcgccg

SEQ ID NO: 1542202 - RNA, 19 nt, Artificial Sequence
  Description of Artificial Sequence: Synthetic oligonucleotide
  Sense strand starting at position 338 of SEQ ID NO: 1245174
cgcucugguccauauugau

SEQ ID NO: 1542203 - RNA, 19 nt, Artificial Sequence
  Description of Artificial Sequence: Synthetic oligonucleotide
  Antisense strand to SEQ ID NO: 1542202
aucaauauggaccagagcg

SEQ ID NO: 1542204 - RNA, 19 nt, Artificial Sequence
  Description of Artificial Sequence: Synthetic oligonucleotide
  Sense strand starting at position 344 of SEQ ID NO: 1245174
gguccauauugaucauaug

SEQ ID NO: 1542205 - RNA, 19 nt, Artificial Sequence
  Description of Artificial Sequence: Synthetic oligonucleotide
  Antisense strand to SEQ ID NO: 1542204
cauaugaucaauauggacc

SEQ ID NO: 1542206 - RNA, 19 nt, Artificial Sequence
  Description of Artificial Sequence: Synthetic oligonucleotide
  Sense strand starting at position 347 of SEQ ID NO: 1245174
ccauauugaucauauggac

SEQ ID NO: 1542207 - RNA, 19 nt, Artificial Sequence
  Description of Artificial Sequence: Synthetic oligonucleotide
  Antisense strand to SEQ ID NO: 1542206
guccauaugaucaauaugg

SEQ ID NO: 1542208 - RNA, 19 nt, Artificial Sequence
  Description of Artificial Sequence: Synthetic oligonucleotide
  Sense strand starting at position 707 of SEQ ID NO: 1245174
caggcauucucgccauauu

SEQ ID NO: 1542209 - RNA, 19 nt, Artificial Sequence
  Description of Artificial Sequence: Synthetic oligonucleotide
  Antisense strand to SEQ ID NO: 1542208
aauauggcgagaaugccug

SEQ ID NO: 1542210 - RNA, 19 nt, Artificial Sequence
  Description of Artificial Sequence: Synthetic oligonucleotide
  Sense strand starting at position 708 of SEQ ID NO: 1245174
aggcauucucgccauauug

SEQ ID NO: 1542211 - RNA, 19 nt, Artificial Sequence
  Description of Artificial Sequence: Synthetic oligonucleotide
  Antisense strand to SEQ ID NO: 1542210
caauauggcgagaaugccu

SEQ ID NO: 1542212 - RNA, 19 nt, Artificial Sequence
  Description of Artificial Sequence: Synthetic oligonucleotide
  Sense strand starting at position 718 of SEQ ID NO: 1245174
gccauauugccgucucucu

SEQ ID NO: 1542213 - RNA, 19 nt, Artificial Sequence
  Description of Artificial Sequence: Synthetic oligonucleotide
  Antisense strand to SEQ ID NO: 1542212
agagagacggcaauauggc

SEQ ID NO: 1542214 - RNA, 19 nt, Artificial Sequence
  Description of Artificial Sequence: Synthetic oligonucleotide
  Sense strand starting at position 849 of SEQ ID NO: 1245174
cuccaauugucauucccga

SEQ ID NO: 1542215 - RNA, 19 nt, Artificial Sequence
  Description of Artificial Sequence: Synthetic oligonucleotide
  Antisense strand to SEQ ID NO: 1542214
ucgggaaugacaauuggag

SEQ ID NO: 1542216 - RNA, 19 nt, Artificial Sequence
  Description of Artificial Sequence: Synthetic oligonucleotide
  Sense strand starting at position 1074 of SEQ ID NO: 1245174
uacccucuggcggagaauu

SEQ ID NO: 1542217 - RNA, 19 nt, Artificial Sequence
  Description of Artificial Sequence: Synthetic oligonucleotide
  Antisense strand to SEQ ID NO: 1542216
aauucuccgccagagggua

SEQ ID NO: 1542218 - RNA, 19 nt, Artificial Sequence
  Description of Artificial Sequence: Synthetic oligonucleotide
  Sense strand starting at position 1140 of SEQ ID NO: 1245174
ggucucguuucucuaagua

SEQ ID NO: 1542219 - RNA, 19 nt, Artificial Sequence
  Description of Artificial Sequence: Synthetic oligonucleotide
  Antisense strand to SEQ ID NO: 1542218
uacuuagagaaacgagacc

SEQ ID NO: 1542220 - RNA, 19 nt, Artificial Sequence
  Description of Artificial Sequence: Synthetic oligonucleotide
  Sense strand starting at position 1558 of SEQ ID NO: 1245174
uuaagcugucauuaaagac

SEQ ID NO: 1542221 - RNA, 19 nt, Artificial Sequence
  Description of Artificial Sequence: Synthetic oligonucleotide
  Antisense strand to SEQ ID NO: 1542220
gucuuuaaugacagcuuaa

SEQ ID NO: 1542222 - RNA, 19 nt, Artificial Sequence
  Description of Artificial Sequence: Synthetic oligonucleotide
  Sense strand starting at position 2017 of SEQ ID NO: 1245174
cgggucucgcuuucccaua

SEQ ID NO: 1542223 - RNA, 19 nt, Artificial Sequence
  Description of Artificial Sequence: Synthetic oligonucleotide
  Antisense strand to SEQ ID NO: 1542222
uaugggaaagcgagacccg

SEQ ID NO: 1542224 - RNA, 19 nt, Artificial Sequence
  Description of Artificial Sequence: Synthetic oligonucleotide
  Sense strand starting at position 2022 of SEQ ID NO: 1245174
cucgcuuucccauaggaga

SEQ ID NO: 1542225 - RNA, 19 nt, Artificial Sequence
  Description of Artificial Sequence: Synthetic oligonucleotide
  Antisense strand to SEQ ID NO: 1542224
ucuccuaugggaaagcgag

SEQ ID NO: 1542226 - RNA, 19 nt, Artificial Sequence
  Description of Artificial Sequence: Synthetic oligonucleotide
  Sense strand starting at position 2024 of SEQ ID NO: 1245174
cgcuuucccauaggagaca

SEQ ID NO: 1542227 - RNA, 19 nt, Artificial Sequence
  Description of Artificial Sequence: Synthetic oligonucleotide
  Antisense strand to SEQ ID NO: 1542226
ugucuccuaugggaaagcg

SEQ ID NO: 1542228 - RNA, 19 nt, Artificial Sequence
  Description of Artificial Sequence: Synthetic oligonucleotide
  Sense strand starting at position 2364 of SEQ ID NO: 1245174
cucgggugcguccucgaau

SEQ ID NO: 1542229 - RNA, 19 nt, Artificial Sequence
  Description of Artificial Sequence: Synthetic oligonucleotide
  Antisense strand to SEQ ID NO: 1542228
auucgaggacgcacccgag

SEQ ID NO: 1542230 - RNA, 19 nt, Artificial Sequence
  Description of Artificial Sequence: Synthetic oligonucleotide
  Sense strand starting at position 2366 of SEQ ID NO: 1245174
cgggugcguccucgaauuu

SEQ ID NO: 1542231 - RNA, 19 nt, Artificial Sequence
  Description of Artificial Sequence: Synthetic oligonucleotide
  Antisense strand to SEQ ID NO: 1542230
aaauucgaggacgcacccg

SEQ ID NO: 1542232 - RNA, 19 nt, Artificial Sequence
  Description of Artificial Sequence: Synthetic oligonucleotide
  Sense strand starting at position 2367 of SEQ ID NO: 1245174
gggugcguccucgaauuua

SEQ ID NO: 1542233 - RNA, 19 nt, Artificial Sequence
  Description of Artificial Sequence: Synthetic oligonucleotide
  Antisense strand to SEQ ID NO: 1542232
uaaauucgaggacgcaccc

SEQ ID NO: 1542234 - RNA, 19 nt, Artificial Sequence
  Description of Artificial Sequence: Synthetic oligonucleotide
  Sense strand starting at position 2394 of SEQ ID NO: 1245174
uccgaauucucggcaguua

SEQ ID NO: 1542235 - RNA, 19 nt, Artificial Sequence
  Description of Artificial Sequence: Synthetic oligonucleotide
  Antisense strand to SEQ ID NO: 1542234
uaacugccgagaauucgga

SEQ ID NO: 1542236 - RNA, 19 nt, Artificial Sequence
  Description of Artificial Sequence: Synthetic oligonucleotide
  Sense strand starting at position 2395 of SEQ ID NO: 1245174
ccgaauucucggcaguuag

SEQ ID NO: 1542237 - RNA, 19 nt, Artificial Sequence
  Description of Artificial Sequence: Synthetic oligonucleotide
  Antisense strand to SEQ ID NO: 1542236
cuaacugccgagaauucgg

SEQ ID NO: 1542238 - RNA, 19 nt, Artificial Sequence
  Description of Artificial Sequence: Synthetic oligonucleotide
  Sense strand starting at position 2413 of SEQ ID NO: 1245174
ggcugugagaguuauguca

SEQ ID NO: 1542239 - RNA, 19 nt, Artificial Sequence
  Description of Artificial Sequence: Synthetic oligonucleotide
  Antisense strand to SEQ ID NO: 1542238
ugacauaacucucacagcc

SEQ ID NO: 1542240 - RNA, 19 nt, Artificial Sequence
  Description of Artificial Sequence: Synthetic oligonucleotide
  Sense strand starting at position 2568 of SEQ ID NO: 1245174
gggcuucugagugggaguu

SEQ ID NO: 1542241 - RNA, 19 nt, Artificial Sequence
  Description of Artificial Sequence: Synthetic oligonucleotide
  Antisense strand to SEQ ID NO: 1542240
aacucccacucagaagccc

SEQ ID NO: 1542242 - RNA, 19 nt, Artificial Sequence
  Description of Artificial Sequence: Synthetic oligonucleotide
  Sense strand starting at position 2674 of SEQ ID NO: 1245174
ccaggugugaaacaaguua

SEQ ID NO: 1542243 - RNA, 19 nt, Artificial Sequence
  Description of Artificial Sequence: Synthetic oligonucleotide
  Antisense strand to SEQ ID NO: 1542242
uaacuuguuucacaccugg

SEQ ID NO: 1542244 - RNA, 19 nt, Artificial Sequence
  Description of Artificial Sequence: Synthetic oligonucleotide
  Sense strand starting at position 2818 of SEQ ID NO: 1245174
cggagaaccguccgggaau

SEQ ID NO: 1542245 - RNA, 19 nt, Artificial Sequence
  Description of Artificial Sequence: Synthetic oligonucleotide
  Antisense strand to SEQ ID NO: 1542244
auucccggacgguucuccg

SEQ ID NO: 1542246 - RNA, 19 nt, Artificial Sequence
  Description of Artificial Sequence: Synthetic oligonucleotide
  Sense strand starting at position 3011 of SEQ ID NO: 1245174
cggcuaauuccagagggcu

SEQ ID NO: 1542247 - RNA, 19 nt, Artificial Sequence
  Description of Artificial Sequence: Synthetic oligonucleotide
  Antisense strand to SEQ ID NO: 1542246
agcccucuggaauuagccg

SEQ ID NO: 1542248 - RNA, 19 nt, Artificial Sequence
  Description of Artificial Sequence: Synthetic oligonucleotide
  Sense strand starting at position 3310 of SEQ ID NO: 1245174
uuugaauugcucgcaguuu

SEQ ID NO: 1542249 - RNA, 19 nt, Artificial Sequence
  Description of Artificial Sequence: Synthetic oligonucleotide
  Antisense strand to SEQ ID NO: 1542248
aaacugcgagcaauucaaa

SEQ ID NO: 1542250 - RNA, 19 nt, Artificial Sequence
  Description of Artificial Sequence: Synthetic oligonucleotide
  Sense strand starting at position 3386 of SEQ ID NO: 1245174
cccaguugacgucaacuua

SEQ ID NO: 1542251 - RNA, 19 nt, Artificial Sequence
  Description of Artificial Sequence: Synthetic oligonucleotide
  Antisense strand to SEQ ID NO: 1542250
uaaguugacgucaacuggg

SEQ ID NO: 1542252 - RNA, 19 nt, Artificial Sequence
  Description of Artificial Sequence: Synthetic oligonucleotide
  Sense strand starting at position 3593 of SEQ ID NO: 1245174
gcaggacccgcgcuuaaau

SEQ ID NO: 1542253 - RNA, 19 nt, Artificial Sequence
  Description of Artificial Sequence: Synthetic oligonucleotide
  Antisense strand to SEQ ID NO: 1542252
auuuaagcgcggguccugc

SEQ ID NO: 1542254 - RNA, 19 nt, Artificial Sequence
  Description of Artificial Sequence: Synthetic oligonucleotide
  Sense strand starting at position 3600 of SEQ ID NO: 1245174
ccgcgcuuaaauucgauau

SEQ ID NO: 1542255 - RNA, 19 nt, Artificial Sequence
  Description of Artificial Sequence: Synthetic oligonucleotide
  Antisense strand to SEQ ID NO: 1542254
auaucgaauuuaagcgcgg

SEQ ID NO: 1542256 - RNA, 19 nt, Artificial Sequence
  Description of Artificial Sequence: Synthetic oligonucleotide
  Sense strand starting at position 3604 of SEQ ID NO: 1245174
gcuuaaauucgauaugaaa

SEQ ID NO: 1542257 - RNA, 19 nt, Artificial Sequence
  Description of Artificial Sequence: Synthetic oligonucleotide
  Antisense strand to SEQ ID NO: 1542256
uuucauaucgaauuuaagc

SEQ ID NO: 1542258 - RNA, 19 nt, Artificial Sequence
  Description of Artificial Sequence: Synthetic oligonucleotide
  Sense strand starting at position 3639 of SEQ ID NO: 1245174
uaugccuuggccugauuau

SEQ ID NO: 1542259 - RNA, 19 nt, Artificial Sequence
  Description of Artificial Sequence: Synthetic oligonucleotide
  Antisense strand to SEQ ID NO: 1542258
auaaucaggccaaggcaua

SEQ ID NO: 1542260 - RNA, 19 nt, Artificial Sequence
  Description of Artificial Sequence: Synthetic oligonucleotide
  Sense strand starting at position 3640 of SEQ ID NO: 1245174
augccuuggccugauuauc

SEQ ID NO: 1542261 - RNA, 19 nt, Artificial Sequence
  Description of Artificial Sequence: Synthetic oligonucleotide
  Antisense strand to SEQ ID NO: 1542260
gauaaucaggccaaggcau

SEQ ID NO: 1542262 - RNA, 19 nt, Artificial Sequence
  Description of Artificial Sequence: Synthetic oligonucleotide
  Sense strand starting at position 3650 of SEQ ID NO: 1245174
cugauuaucgggcaacugu

SEQ ID NO: 1542263 - RNA, 19 nt, Artificial Sequence
  Description of Artificial Sequence: Synthetic oligonucleotide
  Antisense strand to SEQ ID NO: 1542262
acaguugcccgauaaucag

SEQ ID NO: 1542264 - RNA, 19 nt, Artificial Sequence
  Description of Artificial Sequence: Synthetic oligonucleotide
  Sense strand starting at position 3707 of SEQ ID NO: 1245174
aaaugaucugcccguagga

SEQ ID NO: 1542265 - RNA, 19 nt, Artificial Sequence
  Description of Artificial Sequence: Synthetic oligonucleotide
  Antisense strand to SEQ ID NO: 1542264
uccuacgggcagaucauuu

SEQ ID NO: 1542266 - RNA, 19 nt, Artificial Sequence
  Description of Artificial Sequence: Synthetic oligonucleotide
  Sense strand starting at position 3709 of SEQ ID NO: 1245174
augaucugcccguaggaua

SEQ ID NO: 1542267 - RNA, 19 nt, Artificial Sequence
  Description of Artificial Sequence: Synthetic oligonucleotide
  Antisense strand to SEQ ID NO: 1542266
uauccuacgggcagaucau

SEQ ID NO: 1542268 - RNA, 19 nt, Artificial Sequence
  Description of Artificial Sequence: Synthetic oligonucleotide
  Sense strand starting at position 3747 of SEQ ID NO: 1245174
agaagacgucuuugggcua

SEQ ID NO: 1542269 - RNA, 19 nt, Artificial Sequence
  Description of Artificial Sequence: Synthetic oligonucleotide
  Antisense strand to SEQ ID NO: 1542268
uagcccaaagacgucuucu

SEQ ID NO: 1542270 - RNA, 19 nt, Artificial Sequence
  Description of Artificial Sequence: Synthetic oligonucleotide
  Sense strand starting at position 3750 of SEQ ID NO: 1245174
agacgucuuugggcuacua

SEQ ID NO: 1542271 - RNA, 19 nt, Artificial Sequence
  Description of Artificial Sequence: Synthetic oligonucleotide
  Antisense strand to SEQ ID NO: 1542270
uaguagcccaaagacgucu

SEQ ID NO: 1542272 - RNA, 19 nt, Artificial Sequence
  Description of Artificial Sequence: Synthetic oligonucleotide
  Sense strand starting at position 3761 of SEQ ID NO: 1245174
ggcuacuaucuauaggagu

SEQ ID NO: 1542273 - RNA, 19 nt, Artificial Sequence
  Description of Artificial Sequence: Synthetic oligonucleotide
  Antisense strand to SEQ ID NO: 1542272
acuccuauagauaguagcc

SEQ ID NO: 1542274 - RNA, 19 nt, Artificial Sequence
  Description of Artificial Sequence: Synthetic oligonucleotide
  Sense strand starting at position 65 of SEQ ID NO: 1245175
acacauaccgcauagucaa

SEQ ID NO: 1542275 - RNA, 19 nt, Artificial Sequence
  Description of Artificial Sequence: Synthetic oligonucleotide
  Antisense strand to SEQ ID NO: 1542274
uugacuaugcgguaugugu

SEQ ID NO: 1542276 - RNA, 19 nt, Artificial Sequence
  Description of Artificial Sequence: Synthetic oligonucleotide
  Sense strand starting at position 122 of SEQ ID NO: 1245175
guaauacauuuguaccaaa

SEQ ID NO: 1542277 - RNA, 19 nt, Artificial Sequence
  Description of Artificial Sequence: Synthetic oligonucleotide
  Antisense strand to SEQ ID NO: 1542276
uuugguacaaauguauuac

SEQ ID NO: 1542278 - RNA, 19 nt, Artificial Sequence
  Description of Artificial Sequence: Synthetic oligonucleotide
  Sense strand starting at position 759 of SEQ ID NO: 1245175
ccgggaaacugucccuuua

SEQ ID NO: 1542279 - RNA, 19 nt, Artificial Sequence
  Description of Artificial Sequence: Synthetic oligonucleotide
  Antisense strand to SEQ ID NO: 1542278
uaaagggacaguuucccgg

SEQ ID NO: 1542280 - RNA, 19 nt, Artificial Sequence
  Description of Artificial Sequence: Synthetic oligonucleotide
  Sense strand starting at position 761 of SEQ ID NO: 1245175
gggaaacugucccuuuaag

SEQ ID NO: 1542281 - RNA, 19 nt, Artificial Sequence
  Description of Artificial Sequence: Synthetic oligonucleotide
  Antisense strand to SEQ ID NO: 1542280
cuuaaagggacaguuuccc

SEQ ID NO: 1542282 - RNA, 19 nt, Artificial Sequence
  Description of Artificial Sequence: Synthetic oligonucleotide
  Sense strand starting at position 1376 of SEQ ID NO: 1245175
cagagaugugcgcuuggcu

SEQ ID NO: 1542283 - RNA, 19 nt, Artificial Sequence
  Description of Artificial Sequence: Synthetic oligonucleotide
  Antisense strand to SEQ ID NO: 1542282
agccaagcgcacaucucug

SEQ ID NO: 1542284 - RNA, 19 nt, Artificial Sequence
  Description of Artificial Sequence: Synthetic oligonucleotide
  Sense strand starting at position 1947 of SEQ ID NO: 1245175
gucagaucuuaccugaaac

SEQ ID NO: 1542285 - RNA, 19 nt, Artificial Sequence
  Description of Artificial Sequence: Synthetic oligonucleotide
  Antisense strand to SEQ ID NO: 1542284
guuucagguaagaucugac

SEQ ID NO: 1542286 - RNA, 19 nt, Artificial Sequence
  Description of Artificial Sequence: Synthetic oligonucleotide
  Sense strand starting at position 2479 of SEQ ID NO: 1245175
gcagcagaugaugauaauu

SEQ ID NO: 1542287 - RNA, 19 nt, Artificial Sequence
  Description of Artificial Sequence: Synthetic oligonucleotide
  Antisense strand to SEQ ID NO: 1542286
aauuaucaucaucugcugc

SEQ ID NO: 1542288 - RNA, 19 nt, Artificial Sequence
  Description of Artificial Sequence: Synthetic oligonucleotide
  Sense strand starting at position 2499 of SEQ ID NO: 1245175
uaaggauuguugguuguuu

SEQ ID NO: 1542289 - RNA, 19 nt, Artificial Sequence
  Description of Artificial Sequence: Synthetic oligonucleotide
  Antisense strand to SEQ ID NO: 1542288
aaacaaccaacaauccuua

SEQ ID NO: 1542290 - RNA, 19 nt, Artificial Sequence
  Description of Artificial Sequence: Synthetic oligonucleotide
  Sense strand starting at position 2631 of SEQ ID NO: 1245175
aggugauaauuuggcaaua

SEQ ID NO: 1542291 - RNA, 19 nt, Artificial Sequence
  Description of Artificial Sequence: Synthetic oligonucleotide
  Antisense strand to SEQ ID NO: 1542290
uauugccaaauuaucaccu

SEQ ID NO: 1542292 - RNA, 19 nt, Artificial Sequence
  Description of Artificial Sequence: Synthetic oligonucleotide
  Sense strand starting at position 2633 of SEQ ID NO: 1245175
gugauaauuuggcaauaga

SEQ ID NO: 1542293 - RNA, 19 nt, Artificial Sequence
  Description of Artificial Sequence: Synthetic oligonucleotide
  Antisense strand to SEQ ID NO: 1542292
ucuauugccaaauuaucac

SEQ ID NO: 1542294 - RNA, 19 nt, Artificial Sequence
  Description of Artificial Sequence: Synthetic oligonucleotide
  Sense strand starting at position 2665 of SEQ ID NO: 1245175
gguuccuuuggcgacauaa

SEQ ID NO: 1542295 - RNA, 19 nt, Artificial Sequence
  Description of Artificial Sequence: Synthetic oligonucleotide
  Antisense strand to SEQ ID NO: 1542294
uuaugucgccaaaggaacc

SEQ ID NO: 1542296 - RNA, 19 nt, Artificial Sequence
  Description of Artificial Sequence: Synthetic oligonucleotide
  Sense strand starting at position 2686 of SEQ ID NO: 1245175
ucccaaaugacguggauaa

SEQ ID NO: 1542297 - RNA, 19 nt, Artificial Sequence
  Description of Artificial Sequence: Synthetic oligonucleotide
  Antisense strand to SEQ ID NO: 1542296
uuauccacgucauuuggga

SEQ ID NO: 1542298 - RNA, 19 nt, Artificial Sequence
  Description of Artificial Sequence: Synthetic oligonucleotide
  Sense strand starting at position 2687 of SEQ ID NO: 1245175
cccaaaugacguggauaaa

SEQ ID NO: 1542299 - RNA, 19 nt, Artificial Sequence
  Description of Artificial Sequence: Synthetic oligonucleotide
  Antisense strand to SEQ ID NO: 1542298
uuuauccacgucauuuggg

SEQ ID NO: 1542300 - RNA, 19 nt, Artificial Sequence
  Description of Artificial Sequence: Synthetic oligonucleotide
  Sense strand starting at position 2992 of SEQ ID NO: 1245175
auuccauuauuugacggaa

SEQ ID NO: 1542301 - RNA, 19 nt, Artificial Sequence
  Description of Artificial Sequence: Synthetic oligonucleotide
  Antisense strand to SEQ ID NO: 1542300
uuccgucaaauaauggaau

SEQ ID NO: 1542302 - RNA, 19 nt, Artificial Sequence
  Description of Artificial Sequence: Synthetic oligonucleotide
  Sense strand starting at position 3004 of SEQ ID NO: 1245175
gacggaagugcucaacaga

SEQ ID NO: 1542303 - RNA, 19 nt, Artificial Sequence
  Description of Artificial Sequence: Synthetic oligonucleotide
  Antisense strand to SEQ ID NO: 1542302
ucuguugagcacuuccguc

SEQ ID NO: 1542304 - RNA, 19 nt, Artificial Sequence
  Description of Artificial Sequence: Synthetic oligonucleotide
  Sense strand starting at position 3052 of SEQ ID NO: 1245175
ccagauuguuacucugguu

SEQ ID NO: 1542305 - RNA, 19 nt, Artificial Sequence
  Description of Artificial Sequence: Synthetic oligonucleotide
  Antisense strand to SEQ ID NO: 1542304
aaccagaguaacaaucugg

SEQ ID NO: 1542306 - RNA, 19 nt, Artificial Sequence
  Description of Artificial Sequence: Synthetic oligonucleotide
  Sense strand starting at position 3105 of SEQ ID NO: 1245175
cuaggucuuuguucaggga

SEQ ID NO: 1542307 - RNA, 19 nt, Artificial Sequence
  Description of Artificial Sequence: Synthetic oligonucleotide
  Antisense strand to SEQ ID NO: 1542306
ucccugaacaaagaccuag

SEQ ID NO: 1542308 - RNA, 19 nt, Artificial Sequence
  Description of Artificial Sequence: Synthetic oligonucleotide
  Sense strand starting at position 3109 of SEQ ID NO: 1245175
gucuuuguucagggagauu

SEQ ID NO: 1542309 - RNA, 19 nt, Artificial Sequence
  Description of Artificial Sequence: Synthetic oligonucleotide
  Antisense strand to SEQ ID NO: 1542308
aaucucccugaacaaagac

SEQ ID NO: 1542310 - RNA, 19 nt, Artificial Sequence
  Description of Artificial Sequence: Synthetic oligonucleotide
  Sense strand starting at position 3121 of SEQ ID NO: 1245175
ggagauugugccugggcca

SEQ ID NO: 1542311 - RNA, 19 nt, Artificial Sequence
  Description of Artificial Sequence: Synthetic oligonucleotide
  Antisense strand to SEQ ID NO: 1542310
uggcccaggcacaaucucc

SEQ ID NO: 1542312 - RNA, 19 nt, Artificial Sequence
  Description of Artificial Sequence: Synthetic oligonucleotide
  Sense strand starting at position 3133 of SEQ ID NO: 1245175
ugggccagugguuaucuua

SEQ ID NO: 1542313 - RNA, 19 nt, Artificial Sequence
  Description of Artificial Sequence: Synthetic oligonucleotide
  Antisense strand to SEQ ID NO: 1542312
uaagauaaccacuggccca

SEQ ID NO: 1542314 - RNA, 19 nt, Artificial Sequence
  Description of Artificial Sequence: Synthetic oligonucleotide
  Sense strand starting at position 3158 of SEQ ID NO: 1245175
uuuaguuagggugggauau

SEQ ID NO: 1542315 - RNA, 19 nt, Artificial Sequence
  Description of Artificial Sequence: Synthetic oligonucleotide
  Antisense strand to SEQ ID NO: 1542314
auaucccacccuaacuaaa

SEQ ID NO: 1542316 - RNA, 19 nt, Artificial Sequence
  Description of Artificial Sequence: Synthetic oligonucleotide
  Sense strand starting at position 3159 of SEQ ID NO: 1245175
uuaguuagggugggauauu

SEQ ID NO: 1542317 - RNA, 19 nt, Artificial Sequence
  Description of Artificial Sequence: Synthetic oligonucleotide
  Antisense strand to SEQ ID NO: 1542316
aauaucccacccuaacuaa

SEQ ID NO: 1542318 - RNA, 19 nt, Artificial Sequence
  Description of Artificial Sequence: Synthetic oligonucleotide
  Sense strand starting at position 3160 of SEQ ID NO: 1245175
uaguuagggugggauauuu

SEQ ID NO: 1542319 - RNA, 19 nt, Artificial Sequence
  Description of Artificial Sequence: Synthetic oligonucleotide
  Antisense strand to SEQ ID NO: 1542318
aaauaucccacccuaacua

SEQ ID NO: 1542320 - RNA, 19 nt, Artificial Sequence
  Description of Artificial Sequence: Synthetic oligonucleotide
  Sense strand starting at position 3209 of SEQ ID NO: 1245175
cuguuauauccuuguagga

SEQ ID NO: 1542321 - RNA, 19 nt, Artificial Sequence
  Description of Artificial Sequence: Synthetic oligonucleotide
  Antisense strand to SEQ ID NO: 1542320
uccuacaaggauauaacag

SEQ ID NO: 1542322 - RNA, 19 nt, Artificial Sequence
  Description of Artificial Sequence: Synthetic oligonucleotide
  Sense strand starting at position 3285 of SEQ ID NO: 1245175
gcugacauuucuuauggaa

SEQ ID NO: 1542323 - RNA, 19 nt, Artificial Sequence
  Description of Artificial Sequence: Synthetic oligonucleotide
  Antisense strand to SEQ ID NO: 1542322
uuccauaagaaaugucagc

SEQ ID NO: 1542324 - RNA, 19 nt, Artificial Sequence
  Description of Artificial Sequence: Synthetic oligonucleotide
  Sense strand starting at position 3309 of SEQ ID NO: 1245175
cagguuauauggccaagga

SEQ ID NO: 1542325 - RNA, 19 nt, Artificial Sequence
  Description of Artificial Sequence: Synthetic oligonucleotide
  Antisense strand to SEQ ID NO: 1542324
uccuuggccauauaaccug

SEQ ID NO: 1542326 - RNA, 19 nt, Artificial Sequence
  Description of Artificial Sequence: Synthetic oligonucleotide
  Sense strand starting at position 3361 of SEQ ID NO: 1245175
agacauguccugcaaauac

SEQ ID NO: 1542327 - RNA, 19 nt, Artificial Sequence
  Description of Artificial Sequence: Synthetic oligonucleotide
  Antisense strand to SEQ ID NO: 1542326
guauuugcaggacaugucu

SEQ ID NO: 1542328 - RNA, 19 nt, Artificial Sequence
  Description of Artificial Sequence: Synthetic oligonucleotide
  Sense strand starting at position 3497 of SEQ ID NO: 1245175
agucaaucagauuagugca

SEQ ID NO: 1542329 - RNA, 19 nt, Artificial Sequence
  Description of Artificial Sequence: Synthetic oligonucleotide
  Antisense strand to SEQ ID NO: 1542328
ugcacuaaucugauugacu

SEQ ID NO: 1542330 - RNA, 19 nt, Artificial Sequence
  Description of Artificial Sequence: Synthetic oligonucleotide
  Sense strand starting at position 3499 of SEQ ID NO: 1245175
ucaaucagauuagugcaua

SEQ ID NO: 1542331 - RNA, 19 nt, Artificial Sequence
  Description of Artificial Sequence: Synthetic oligonucleotide
  Antisense strand to SEQ ID NO: 1542330
uaugcacuaaucugauuga

SEQ ID NO: 1542332 - RNA, 19 nt, Artificial Sequence
  Description of Artificial Sequence: Synthetic oligonucleotide
  Sense strand starting at position 3502 of SEQ ID NO: 1245175
aucagauuagugcauaaua

SEQ ID NO: 1542333 - RNA, 19 nt, Artificial Sequence
  Description of Artificial Sequence: Synthetic oligonucleotide
  Antisense strand to SEQ ID NO: 1542332
uauuaugcacuaaucugau

SEQ ID NO: 1542334 - RNA, 19 nt, Artificial Sequence
  Description of Artificial Sequence: Synthetic oligonucleotide
  Sense strand starting at position 3527 of SEQ ID NO: 1245175
agauuaacaucauaaugag

SEQ ID NO: 1542335 - RNA, 19 nt, Artificial Sequence
  Description of Artificial Sequence: Synthetic oligonucleotide
  Antisense strand to SEQ ID NO: 1542334
cucauuaugauguuaaucu

SEQ ID NO: 1542336 - RNA, 19 nt, Artificial Sequence
  Description of Artificial Sequence: Synthetic oligonucleotide
  Sense strand starting at position 3592 of SEQ ID NO: 1245175
acaugagaaucuuugcaca

SEQ ID NO: 1542337 - RNA, 19 nt, Artificial Sequence
  Description of Artificial Sequence: Synthetic oligonucleotide
  Antisense strand to SEQ ID NO: 1542336
ugugcaaagauucucaugu

SEQ ID NO: 1542338 - RNA, 19 nt, Artificial Sequence
  Description of Artificial Sequence: Synthetic oligonucleotide
  Sense strand starting at position 3594 of SEQ ID NO: 1245175
augagaaucuuugcacauu

SEQ ID NO: 1542339 - RNA, 19 nt, Artificial Sequence
  Description of Artificial Sequence: Synthetic oligonucleotide
  Antisense strand to SEQ ID NO: 1542338
aaugugcaaagauucucau

SEQ ID NO: 1542340 - RNA, 19 nt, Artificial Sequence
  Description of Artificial Sequence: Synthetic oligonucleotide
  Sense strand starting at position 3640 of SEQ ID NO: 1245175
guugauacauucucugauc

SEQ ID NO: 1542341 - RNA, 19 nt, Artificial Sequence
  Description of Artificial Sequence: Synthetic oligonucleotide
  Antisense strand to SEQ ID NO: 1542340
gaucagagaauguaucaac

SEQ ID NO: 1542342 - RNA, 19 nt, Artificial Sequence
  Description of Artificial Sequence: Synthetic oligonucleotide
  Sense strand starting at position 3724 of SEQ ID NO: 1245175
ccuaaauggcacuaaaugu

SEQ ID NO: 1542343 - RNA, 19 nt, Artificial Sequence
  Description of Artificial Sequence: Synthetic oligonucleotide
  Antisense strand to SEQ ID NO: 1542342
acauuuagugccauuuagg

SEQ ID NO: 1542344 - RNA, 19 nt, Artificial Sequence
  Description of Artificial Sequence: Synthetic oligonucleotide
  Sense strand starting at position 3749 of SEQ ID NO: 1245175
aggagagugugagaagaaa

SEQ ID NO: 1542345 - RNA, 19 nt, Artificial Sequence
  Description of Artificial Sequence: Synthetic oligonucleotide
  Antisense strand to SEQ ID NO: 1542344
uuucuucucacacucuccu

SEQ ID NO: 1542346 - RNA, 19 nt, Artificial Sequence
  Description of Artificial Sequence: Synthetic oligonucleotide
  Sense strand starting at position 3815 of SEQ ID NO: 1245175
acauuaaagguguggccua

SEQ ID NO: 1542347 - RNA, 19 nt, Artificial Sequence
  Description of Artificial Sequence: Synthetic oligonucleotide
  Antisense strand to SEQ ID NO: 1542346
uaggccacaccuuuaaugu

SEQ ID NO: 1542348 - RNA, 19 nt, Artificial Sequence
  Description of Artificial Sequence: Synthetic oligonucleotide
  Sense strand starting at position 3892 of SEQ ID NO: 1245175
augcaucauuguccuagaa

SEQ ID NO: 1542349 - RNA, 19 nt, Artificial Sequence
  Description of Artificial Sequence: Synthetic oligonucleotide
  Antisense strand to SEQ ID NO: 1542348
uucuaggacaaugaugcau

SEQ ID NO: 1542350 - RNA, 19 nt, Artificial Sequence
  Description of Artificial Sequence: Synthetic oligonucleotide
  Sense strand starting at position 3919 of SEQ ID NO: 1245175
cuggaaagauccuuugcag

SEQ ID NO: 1542351 - RNA, 19 nt, Artificial Sequence
  Description of Artificial Sequence: Synthetic oligonucleotide
  Antisense strand to SEQ ID NO: 1542350
cugcaaaggaucuuuccag

SEQ ID NO: 1542352 - RNA, 19 nt, Artificial Sequence
  Description of Artificial Sequence: Synthetic oligonucleotide
  Sense strand starting at position 3922 of SEQ ID NO: 1245175
gaaagauccuuugcaggca

SEQ ID NO: 1542353 - RNA, 19 nt, Artificial Sequence
  Description of Artificial Sequence: Synthetic oligonucleotide
  Antisense strand to SEQ ID NO: 1542352
ugccugcaaaggaucuuuc

SEQ ID NO: 1542354 - RNA, 19 nt, Artificial Sequence
  Description of Artificial Sequence: Synthetic oligonucleotide
  Sense strand starting at position 373 of SEQ ID NO: 1245176
gccaguccaccugagaaca

SEQ ID NO: 1542355 - RNA, 19 nt, Artificial Sequence
  Description of Artificial Sequence: Synthetic oligonucleotide
  Antisense strand to SEQ ID NO: 1542354
uguucucagguggacuggc

SEQ ID NO: 1542356 - RNA, 19 nt, Artificial Sequence
  Description of Artificial Sequence: Synthetic oligonucleotide
  Sense strand starting at position 566 of SEQ ID NO: 1245176
uuuagaguccugcaugcaa

SEQ ID NO: 1542357 - RNA, 19 nt, Artificial Sequence
  Description of Artificial Sequence: Synthetic oligonucleotide
  Antisense strand to SEQ ID NO: 1542356
uugcaugcaggacucuaaa

SEQ ID NO: 1542358 - RNA, 19 nt, Artificial Sequence
  Description of Artificial Sequence: Synthetic oligonucleotide
  Sense strand starting at position 644 of SEQ ID NO: 1245176
ucuacagaugucuggagau

SEQ ID NO: 1542359 - RNA, 19 nt, Artificial Sequence
  Description of Artificial Sequence: Synthetic oligonucleotide
  Antisense strand to SEQ ID NO: 1542358
aucuccagacaucuguaga

SEQ ID NO: 1542360 - RNA, 19 nt, Artificial Sequence
  Description of Artificial Sequence: Synthetic oligonucleotide
  Sense strand starting at position 774 of SEQ ID NO: 1245176
gguucugaaccauggagau

SEQ ID NO: 1542361 - RNA, 19 nt, Artificial Sequence
  Description of Artificial Sequence: Synthetic oligonucleotide
  Antisense strand to SEQ ID NO: 1542360
aucuccaugguucagaacc

SEQ ID NO: 1542362 - RNA, 19 nt, Artificial Sequence
  Description of Artificial Sequence: Synthetic oligonucleotide
  Sense strand starting at position 829 of SEQ ID NO: 1245176
cucauugagcaguagugaa

SEQ ID NO: 1542363 - RNA, 19 nt, Artificial Sequence
  Description of Artificial Sequence: Synthetic oligonucleotide
  Antisense strand to SEQ ID NO: 1542362
uucacuacugcucaaugag

SEQ ID NO: 1542364 - RNA, 19 nt, Artificial Sequence
  Description of Artificial Sequence: Synthetic oligonucleotide
  Sense strand starting at position 859 of SEQ ID NO: 1245176
ugagaaucucugcgaagua

SEQ ID NO: 1542365 - RNA, 19 nt, Artificial Sequence
  Description of Artificial Sequence: Synthetic oligonucleotide
  Antisense strand to SEQ ID NO: 1542364
uacuucgcagagauucuca

SEQ ID NO: 1542366 - RNA, 19 nt, Artificial Sequence
  Description of Artificial Sequence: Synthetic oligonucleotide
  Sense strand starting at position 971 of SEQ ID NO: 1245176
gggaggagucgccagucua

SEQ ID NO: 1542367 - RNA, 19 nt, Artificial Sequence
  Description of Artificial Sequence: Synthetic oligonucleotide
  Antisense strand to SEQ ID NO: 1542366
uagacuggcgacuccuccc

SEQ ID NO: 1542368 - RNA, 19 nt, Artificial Sequence
  Description of Artificial Sequence: Synthetic oligonucleotide
  Sense strand starting at position 1212 of SEQ ID NO: 1245176
agaguuaaacguuauugug

SEQ ID NO: 1542369 - RNA, 19 nt, Artificial Sequence
  Description of Artificial Sequence: Synthetic oligonucleotide
  Antisense strand to SEQ ID NO: 1542368
cacaauaacguuuaacucu

SEQ ID NO: 1542370 - RNA, 19 nt, Artificial Sequence
  Description of Artificial Sequence: Synthetic oligonucleotide
  Sense strand starting at position 1219 of SEQ ID NO: 1245176
aacguuauuguguaacaau

SEQ ID NO: 1542371 - RNA, 19 nt, Artificial Sequence
  Description of Artificial Sequence: Synthetic oligonucleotide
  Antisense strand to SEQ ID NO: 1542370
auuguuacacaauaacguu

SEQ ID NO: 1542372 - RNA, 19 nt, Artificial Sequence
  Description of Artificial Sequence: Synthetic oligonucleotide
  Sense strand starting at position 1351 of SEQ ID NO: 1245176
agauuugcuuuguuuaauc

SEQ ID NO: 1542373 - RNA, 19 nt, Artificial Sequence
  Description of Artificial Sequence: Synthetic oligonucleotide
  Antisense strand to SEQ ID NO: 1542372
gauuaaacaaagcaaaucu

SEQ ID NO: 1542374 - RNA, 19 nt, Artificial Sequence
  Description of Artificial Sequence: Synthetic oligonucleotide
  Sense strand starting at position 1469 of SEQ ID NO: 1245176
ggucuaggcccagauaauc

SEQ ID NO: 1542375 - RNA, 19 nt, Artificial Sequence
  Description of Artificial Sequence: Synthetic oligonucleotide
  Antisense strand to SEQ ID NO: 1542374
gauuaucugggccuagacc

SEQ ID NO: 1542376 - RNA, 19 nt, Artificial Sequence
  Description of Artificial Sequence: Synthetic oligonucleotide
  Sense strand starting at position 1618 of SEQ ID NO: 1245176
ucugaacuggguugucaaa

SEQ ID NO: 1542377 - RNA, 19 nt, Artificial Sequence
  Description of Artificial Sequence: Synthetic oligonucleotide
  Antisense strand to SEQ ID NO: 1542376
uuugacaacccaguucaga

SEQ ID NO: 1542378 - RNA, 19 nt, Artificial Sequence
  Description of Artificial Sequence: Synthetic oligonucleotide
  Sense strand starting at position 1723 of SEQ ID NO: 1245176
acggcaaugguccagagaa

SEQ ID NO: 1542379 - RNA, 19 nt, Artificial Sequence
  Description of Artificial Sequence: Synthetic oligonucleotide
  Antisense strand to SEQ ID NO: 1542378
uucucuggaccauugccgu

SEQ ID NO: 1542380 - RNA, 19 nt, Artificial Sequence
  Description of Artificial Sequence: Synthetic oligonucleotide
  Sense strand starting at position 1785 of SEQ ID NO: 1245176
guagaugaguaaguguaga

SEQ ID NO: 1542381 - RNA, 19 nt, Artificial Sequence
  Description of Artificial Sequence: Synthetic oligonucleotide
  Antisense strand to SEQ ID NO: 1542380
ucuacacuuacucaucuac

SEQ ID NO: 1542382 - RNA, 19 nt, Artificial Sequence
  Description of Artificial Sequence: Synthetic oligonucleotide
  Sense strand starting at position 1795 of SEQ ID NO: 1245176
aaguguagagaaugagagu

SEQ ID NO: 1542383 - RNA, 19 nt, Artificial Sequence
  Description of Artificial Sequence: Synthetic oligonucleotide
  Antisense strand to SEQ ID NO: 1542382
acucucauucucuacacuu

SEQ ID NO: 1542384 - RNA, 19 nt, Artificial Sequence
  Description of Artificial Sequence: Synthetic oligonucleotide
  Sense strand starting at position 2352 of SEQ ID NO: 1245176
ugaggaguuuacuuuggga

SEQ ID NO: 1542385 - RNA, 19 nt, Artificial Sequence
  Description of Artificial Sequence: Synthetic oligonucleotide
  Antisense strand to SEQ ID NO: 1542384
ucccaaaguaaacuccuca

SEQ ID NO: 1542386 - RNA, 19 nt, Artificial Sequence
  Description of Artificial Sequence: Synthetic oligonucleotide
  Sense strand starting at position 2379 of SEQ ID NO: 1245176
gagugugugcugucuguca

SEQ ID NO: 1542387 - RNA, 19 nt, Artificial Sequence
  Description of Artificial Sequence: Synthetic oligonucleotide
  Antisense strand to SEQ ID NO: 1542386
ugacagacagcacacacuc

SEQ ID NO: 1542388 - RNA, 19 nt, Artificial Sequence
  Description of Artificial Sequence: Synthetic oligonucleotide
  Sense strand starting at position 2570 of SEQ ID NO: 1245176
ggcagaguuggaugguauc

SEQ ID NO: 1542389 - RNA, 19 nt, Artificial Sequence
  Description of Artificial Sequence: Synthetic oligonucleotide
  Antisense strand to SEQ ID NO: 1542388
gauaccauccaacucugcc

SEQ ID NO: 1542390 - RNA, 19 nt, Artificial Sequence
  Description of Artificial Sequence: Synthetic oligonucleotide
  Sense strand starting at position 2580 of SEQ ID NO: 1245176
gaugguaucgugggaucua

SEQ ID NO: 1542391 - RNA, 19 nt, Artificial Sequence
  Description of Artificial Sequence: Synthetic oligonucleotide
  Antisense strand to SEQ ID NO: 1542390
uagaucccacgauaccauc

SEQ ID NO: 1542392 - RNA, 19 nt, Artificial Sequence
  Description of Artificial Sequence: Synthetic oligonucleotide
  Sense strand starting at position 2654 of SEQ ID NO: 1245176
ggcugaauuuguguuucuc

SEQ ID NO: 1542393 - RNA, 19 nt, Artificial Sequence
  Description of Artificial Sequence: Synthetic oligonucleotide
  Antisense strand to SEQ ID NO: 1542392
gagaaacacaaauucagcc

SEQ ID NO: 1542394 - RNA, 19 nt, Artificial Sequence
  Description of Artificial Sequence: Synthetic oligonucleotide
  Sense strand starting at position 2952 of SEQ ID NO: 1245176
gaaccaggugcugauuaau

SEQ ID NO: 1542395 - RNA, 19 nt, Artificial Sequence
  Description of Artificial Sequence: Synthetic oligonucleotide
  Antisense strand to SEQ ID NO: 1542394
auuaaucagcaccugguuc

SEQ ID NO: 1542396 - RNA, 19 nt, Artificial Sequence
  Description of Artificial Sequence: Synthetic oligonucleotide
  Sense strand starting at position 2976 of SEQ ID NO: 1245176
gcuuguaacccacagcaua

SEQ ID NO: 1542397 - RNA, 19 nt, Artificial Sequence
  Description of Artificial Sequence: Synthetic oligonucleotide
  Antisense strand to SEQ ID NO: 1542396
uaugcuguggguuacaagc

SEQ ID NO: 1542398 - RNA, 19 nt, Artificial Sequence
  Description of Artificial Sequence: Synthetic oligonucleotide
  Sense strand starting at position 2986 of SEQ ID NO: 1245176
cacagcauagaguguaaua

SEQ ID NO: 1542399 - RNA, 19 nt, Artificial Sequence
  Description of Artificial Sequence: Synthetic oligonucleotide
  Antisense strand to SEQ ID NO: 1542398
uauuacacucuaugcugug

SEQ ID NO: 1542400 - RNA, 19 nt, Artificial Sequence
  Description of Artificial Sequence: Synthetic oligonucleotide
  Sense strand starting at position 2988 of SEQ ID NO: 1245176
cagcauagaguguaauauu

SEQ ID NO: 1542401 - RNA, 19 nt, Artificial Sequence
  Description of Artificial Sequence: Synthetic oligonucleotide
  Antisense strand to SEQ ID NO: 1542400
aauauuacacucuaugcug

SEQ ID NO: 1542402 - RNA, 19 nt, Artificial Sequence
  Description of Artificial Sequence: Synthetic oligonucleotide
  Sense strand starting at position 3007 of SEQ ID NO: 1245176
uuacuuguauaguuuggau

SEQ ID NO: 1542403 - RNA, 19 nt, Artificial Sequence
  Description of Artificial Sequence: Synthetic oligonucleotide
  Antisense strand to SEQ ID NO: 1542402
auccaaacuauacaaguaa

SEQ ID NO: 1542404 - RNA, 19 nt, Artificial Sequence
  Description of Artificial Sequence: Synthetic oligonucleotide
  Sense strand starting at position 3033 of SEQ ID NO: 1245176
aguauucuuucucuagaca

SEQ ID NO: 1542405 - RNA, 19 nt, Artificial Sequence
  Description of Artificial Sequence: Synthetic oligonucleotide
  Antisense strand to SEQ ID NO: 1542404
ugucuagagaaagaauacu

SEQ ID NO: 1542406 - RNA, 19 nt, Artificial Sequence
  Description of Artificial Sequence: Synthetic oligonucleotide
  Sense strand starting at position 3034 of SEQ ID NO: 1245176
guauucuuucucuagacac

SEQ ID NO: 1542407 - RNA, 19 nt, Artificial Sequence
  Description of Artificial Sequence: Synthetic oligonucleotide
  Antisense strand to SEQ ID NO: 1542406
gugucuagagaaagaauac

SEQ ID NO: 1542408 - RNA, 19 nt, Artificial Sequence
  Description of Artificial Sequence: Synthetic oligonucleotide
  Sense strand starting at position 3079 of SEQ ID NO: 1245176
cagacacagcuuugugaau

SEQ ID NO: 1542409 - RNA, 19 nt, Artificial Sequence
  Description of Artificial Sequence: Synthetic oligonucleotide
  Antisense strand to SEQ ID NO: 1542408
auucacaaagcugugucug

SEQ ID NO: 1542410 - RNA, 19 nt, Artificial Sequence
  Description of Artificial Sequence: Synthetic oligonucleotide
  Sense strand starting at position 3298 of SEQ ID NO: 1245176
gccauauuugccuagcugu

SEQ ID NO: 1542411 - RNA, 19 nt, Artificial Sequence
  Description of Artificial Sequence: Synthetic oligonucleotide
  Antisense strand to SEQ ID NO: 1542410
acagcuaggcaaauauggc

SEQ ID NO: 1542412 - RNA, 19 nt, Artificial Sequence
  Description of Artificial Sequence: Synthetic oligonucleotide
  Sense strand starting at position 3301 of SEQ ID NO: 1245176
auauuugccuagcuguuua

SEQ ID NO: 1542413 - RNA, 19 nt, Artificial Sequence
  Description of Artificial Sequence: Synthetic oligonucleotide
  Antisense strand to SEQ ID NO: 1542412
uaaacagcuaggcaaauau

SEQ ID NO: 1542414 - RNA, 19 nt, Artificial Sequence
  Description of Artificial Sequence: Synthetic oligonucleotide
  Sense strand starting at position 3436 of SEQ ID NO: 1245176
acucuaauggcagguauca

SEQ ID NO: 1542415 - RNA, 19 nt, Artificial Sequence
  Description of Artificial Sequence: Synthetic oligonucleotide
  Antisense strand to SEQ ID NO: 1542414
ugauaccugccauuagagu

SEQ ID NO: 1542416 - RNA, 19 nt, Artificial Sequence
  Description of Artificial Sequence: Synthetic oligonucleotide
  Sense strand starting at position 3438 of SEQ ID NO: 1245176
ucuaauggcagguaucaga

SEQ ID NO: 1542417 - RNA, 19 nt, Artificial Sequence
  Description of Artificial Sequence: Synthetic oligonucleotide
  Antisense strand to SEQ ID NO: 1542416
ucugauaccugccauuaga

SEQ ID NO: 1542418 - RNA, 19 nt, Artificial Sequence
  Description of Artificial Sequence: Synthetic oligonucleotide
  Sense strand starting at position 3578 of SEQ ID NO: 1245176
auauuuauaugaugaggac

SEQ ID NO: 1542419 - RNA, 19 nt, Artificial Sequence
  Description of Artificial Sequence: Synthetic oligonucleotide
  Antisense strand to SEQ ID NO: 1542418
guccucaucauauaaauau

SEQ ID NO: 1542420 - RNA, 19 nt, Artificial Sequence
  Description of Artificial Sequence: Synthetic oligonucleotide
  Sense strand starting at position 3676 of SEQ ID NO: 1245176
caaagugcucucuagaugu

SEQ ID NO: 1542421 - RNA, 19 nt, Artificial Sequence
  Description of Artificial Sequence: Synthetic oligonucleotide
  Antisense strand to SEQ ID NO: 1542420
acaucuagagagcacuuug

SEQ ID NO: 1542422 - RNA, 19 nt, Artificial Sequence
  Description of Artificial Sequence: Synthetic oligonucleotide
  Sense strand starting at position 3686 of SEQ ID NO: 1245176
ucuagauguugcucuauuu

SEQ ID NO: 1542423 - RNA, 19 nt, Artificial Sequence
  Description of Artificial Sequence: Synthetic oligonucleotide
  Antisense strand to SEQ ID NO: 1542422
aaauagagcaacaucuaga

SEQ ID NO: 1542424 - RNA, 19 nt, Artificial Sequence
  Description of Artificial Sequence: Synthetic oligonucleotide
  Sense strand starting at position 3731 of SEQ ID NO: 1245176
uuccaugcccuauggaauu

SEQ ID NO: 1542425 - RNA, 19 nt, Artificial Sequence
  Description of Artificial Sequence: Synthetic oligonucleotide
  Antisense strand to SEQ ID NO: 1542424
aauuccauagggcauggaa

SEQ ID NO: 1542426 - RNA, 19 nt, Artificial Sequence
  Description of Artificial Sequence: Synthetic oligonucleotide
  Sense strand starting at position 3743 of SEQ ID NO: 1245176
uggaauugggcuugaucuu

SEQ ID NO: 1542427 - RNA, 19 nt, Artificial Sequence
  Description of Artificial Sequence: Synthetic oligonucleotide
  Antisense strand to SEQ ID NO: 1542426
aagaucaagcccaauucca

SEQ ID NO: 1542428 - RNA, 19 nt, Artificial Sequence
  Description of Artificial Sequence: Synthetic oligonucleotide
  Sense strand starting at position 3744 of SEQ ID NO: 1245176
ggaauugggcuugaucuua

SEQ ID NO: 1542429 - RNA, 19 nt, Artificial Sequence
  Description of Artificial Sequence: Synthetic oligonucleotide
  Antisense strand to SEQ ID NO: 1542428
uaagaucaagcccaauucc

SEQ ID NO: 1542430 - RNA, 19 nt, Artificial Sequence
  Description of Artificial Sequence: Synthetic oligonucleotide
  Sense strand starting at position 3873 of SEQ ID NO: 1245176
aguggaagugaauguccua

SEQ ID NO: 1542431 - RNA, 19 nt, Artificial Sequence
  Description of Artificial Sequence: Synthetic oligonucleotide
  Antisense strand to SEQ ID NO: 1542430
uaggacauucacuuccacu

SEQ ID NO: 1542432 - RNA, 19 nt, Artificial Sequence
  Description of Artificial Sequence: Synthetic oligonucleotide
  Sense strand starting at position 3876 of SEQ ID NO: 1245176
ggaagugaauguccuaauc

SEQ ID NO: 1542433 - RNA, 19 nt, Artificial Sequence
  Description of Artificial Sequence: Synthetic oligonucleotide
  Antisense strand to SEQ ID NO: 1542432
gauuaggacauucacuucc

SEQ ID NO: 1542434 - RNA, 19 nt, Artificial Sequence
  Description of Artificial Sequence: Synthetic oligonucleotide
  Sense strand starting at position 39 of SEQ ID NO: 1245177
aauuauguaugggcagaca

SEQ ID NO: 1542435 - RNA, 19 nt, Artificial Sequence
  Description of Artificial Sequence: Synthetic oligonucleotide
  Antisense strand to SEQ ID NO: 1542434
ugucugcccauacauaauu

SEQ ID NO: 1542436 - RNA, 19 nt, Artificial Sequence
  Description of Artificial Sequence: Synthetic oligonucleotide
  Sense strand starting at position 166 of SEQ ID NO: 1245177
ggugacaccaugugaacua

SEQ ID NO: 1542437 - RNA, 19 nt, Artificial Sequence
  Description of Artificial Sequence: Synthetic oligonucleotide
  Antisense strand to SEQ ID NO: 1542436
uaguucacauggugucacc

SEQ ID NO: 1542438 - RNA, 19 nt, Artificial Sequence
  Description of Artificial Sequence: Synthetic oligonucleotide
  Sense strand starting at position 194 of SEQ ID NO: 1245177
uucucacauuacuuagagu

SEQ ID NO: 1542439 - RNA, 19 nt, Artificial Sequence
  Description of Artificial Sequence: Synthetic oligonucleotide
  Antisense strand to SEQ ID NO: 1542438
acucuaaguaaugugagaa

SEQ ID NO: 1542440 - RNA, 19 nt, Artificial Sequence
  Description of Artificial Sequence: Synthetic oligonucleotide
  Sense strand starting at position 200 of SEQ ID NO: 1245177
cauuacuuagagugugaaa

SEQ ID NO: 1542441 - RNA, 19 nt, Artificial Sequence
  Description of Artificial Sequence: Synthetic oligonucleotide
  Antisense strand to SEQ ID NO: 1542440
uuucacacucuaaguaaug

SEQ ID NO: 1542442 - RNA, 19 nt, Artificial Sequence
  Description of Artificial Sequence: Synthetic oligonucleotide
  Sense strand starting at position 202 of SEQ ID NO: 1245177
uuacuuagagugugaaaua

SEQ ID NO: 1542443 - RNA, 19 nt, Artificial Sequence
  Description of Artificial Sequence: Synthetic oligonucleotide
  Antisense strand to SEQ ID NO: 1542442
uauuucacacucuaaguaa

SEQ ID NO: 1542444 - RNA, 19 nt, Artificial Sequence
  Description of Artificial Sequence: Synthetic oligonucleotide
  Sense strand starting at position 218 of SEQ ID NO: 1245177
auaauaauccugcguauua

SEQ ID NO: 1542445 - RNA, 19 nt, Artificial Sequence
  Description of Artificial Sequence: Synthetic oligonucleotide
  Antisense strand to SEQ ID NO: 1542444
uaauacgcaggauuauuau

SEQ ID NO: 1542446 - RNA, 19 nt, Artificial Sequence
  Description of Artificial Sequence: Synthetic oligonucleotide
  Sense strand starting at position 231 of SEQ ID NO: 1245177
guauuaaagcgggauggua

SEQ ID NO: 1542447 - RNA, 19 nt, Artificial Sequence
  Description of Artificial Sequence: Synthetic oligonucleotide
  Antisense strand to SEQ ID NO: 1542446
uaccaucccgcuuuaauac

SEQ ID NO: 1542448 - RNA, 19 nt, Artificial Sequence
  Description of Artificial Sequence: Synthetic oligonucleotide
  Sense strand starting at position 233 of SEQ ID NO: 1245177
auuaaagcgggaugguaaa

SEQ ID NO: 1542449 - RNA, 19 nt, Artificial Sequence
  Description of Artificial Sequence: Synthetic oligonucleotide
  Antisense strand to SEQ ID NO: 1542448
uuuaccaucccgcuuuaau

SEQ ID NO: 1542450 - RNA, 19 nt, Artificial Sequence
  Description of Artificial Sequence: Synthetic oligonucleotide
  Sense strand starting at position 336 of SEQ ID NO: 1245177
ggagucaaggcucagugaa

SEQ ID NO: 1542451 - RNA, 19 nt, Artificial Sequence
  Description of Artificial Sequence: Synthetic oligonucleotide
  Antisense strand to SEQ ID NO: 1542450
uucacugagccuugacucc

SEQ ID NO: 1542452 - RNA, 19 nt, Artificial Sequence
  Description of Artificial Sequence: Synthetic oligonucleotide
  Sense strand starting at position 338 of SEQ ID NO: 1245177
agucaaggcucagugaaac

SEQ ID NO: 1542453 - RNA, 19 nt, Artificial Sequence
  Description of Artificial Sequence: Synthetic oligonucleotide
  Antisense strand to SEQ ID NO: 1542452
guuucacugagccuugacu

SEQ ID NO: 1542454 - RNA, 19 nt, Artificial Sequence
  Description of Artificial Sequence: Synthetic oligonucleotide
  Sense strand starting at position 389 of SEQ ID NO: 1245177
cugcguuuagcuuuaguuu

SEQ ID NO: 1542455 - RNA, 19 nt, Artificial Sequence
  Description of Artificial Sequence: Synthetic oligonucleotide
  Antisense strand to SEQ ID NO: 1542454
aaacuaaagcuaaacgcag

SEQ ID NO: 1542456 - RNA, 19 nt, Artificial Sequence
  Description of Artificial Sequence: Synthetic oligonucleotide
  Sense strand starting at position 474 of SEQ ID NO: 1245177
gcagcaguucucuugcgga

SEQ ID NO: 1542457 - RNA, 19 nt, Artificial Sequence
  Description of Artificial Sequence: Synthetic oligonucleotide
  Antisense strand to SEQ ID NO: 1542456
uccgcaagagaacugcugc

SEQ ID NO: 1542458 - RNA, 19 nt, Artificial Sequence
  Description of Artificial Sequence: Synthetic oligonucleotide
  Sense strand starting at position 479 of SEQ ID NO: 1245177
aguucucuugcggauguaa

SEQ ID NO: 1542459 - RNA, 19 nt, Artificial Sequence
  Description of Artificial Sequence: Synthetic oligonucleotide
  Antisense strand to SEQ ID NO: 1542458
uuacauccgcaagagaacu

SEQ ID NO: 1542460 - RNA, 19 nt, Artificial Sequence
  Description of Artificial Sequence: Synthetic oligonucleotide
  Sense strand starting at position 598 of SEQ ID NO: 1245177
agcuaauagcuuuacaaag

SEQ ID NO: 1542461 - RNA, 19 nt, Artificial Sequence
  Description of Artificial Sequence: Synthetic oligonucleotide
  Antisense strand to SEQ ID NO: 1542460
cuuuguaaagcuauuagcu

SEQ ID NO: 1542462 - RNA, 19 nt, Artificial Sequence
  Description of Artificial Sequence: Synthetic oligonucleotide
  Sense strand starting at position 723 of SEQ ID NO: 1245177
ggaucuccggugcagagau

SEQ ID NO: 1542463 - RNA, 19 nt, Artificial Sequence
  Description of Artificial Sequence: Synthetic oligonucleotide
  Antisense strand to SEQ ID NO: 1542462
aucucugcaccggagaucc

SEQ ID NO: 1542464 - RNA, 19 nt, Artificial Sequence
  Description of Artificial Sequence: Synthetic oligonucleotide
  Sense strand starting at position 814 of SEQ ID NO: 1245177
ucggguuugggagauccaa

SEQ ID NO: 1542465 - RNA, 19 nt, Artificial Sequence
  Description of Artificial Sequence: Synthetic oligonucleotide
  Antisense strand to SEQ ID NO: 1542464
uuggaucucccaaacccga

SEQ ID NO: 1542466 - RNA, 19 nt, Artificial Sequence
  Description of Artificial Sequence: Synthetic oligonucleotide
  Sense strand starting at position 835 of SEQ ID NO: 1245177
gagaaugcucgugagaaag

SEQ ID NO: 1542467 - RNA, 19 nt, Artificial Sequence
  Description of Artificial Sequence: Synthetic oligonucleotide
  Antisense strand to SEQ ID NO: 1542466
cuuucucacgagcauucuc

SEQ ID NO: 1542468 - RNA, 19 nt, Artificial Sequence
  Description of Artificial Sequence: Synthetic oligonucleotide
  Sense strand starting at position 889 of SEQ ID NO: 1245177
gaggcauucucucuguuua

SEQ ID NO: 1542469 - RNA, 19 nt, Artificial Sequence
  Description of Artificial Sequence: Synthetic oligonucleotide
  Antisense strand to SEQ ID NO: 1542468
uaaacagagagaaugccuc

SEQ ID NO: 1542470 - RNA, 19 nt, Artificial Sequence
  Description of Artificial Sequence: Synthetic oligonucleotide
  Sense strand starting at position 890 of SEQ ID NO: 1245177
aggcauucucucuguuuaa

SEQ ID NO: 1542471 - RNA, 19 nt, Artificial Sequence
  Description of Artificial Sequence: Synthetic oligonucleotide
  Antisense strand to SEQ ID NO: 1542470
uuaaacagagagaaugccu

SEQ ID NO: 1542472 - RNA, 19 nt, Artificial Sequence
  Description of Artificial Sequence: Synthetic oligonucleotide
  Sense strand starting at position 891 of SEQ ID NO: 1245177
ggcauucucucuguuuaag

SEQ ID NO: 1542473 - RNA, 19 nt, Artificial Sequence
  Description of Artificial Sequence: Synthetic oligonucleotide
  Antisense strand to SEQ ID NO: 1542472
cuuaaacagagagaaugcc

SEQ ID NO: 1542474 - RNA, 19 nt, Artificial Sequence
  Description of Artificial Sequence: Synthetic oligonucleotide
  Sense strand starting at position 906 of SEQ ID NO: 1245177
uaagaaaggugccacauuu

SEQ ID NO: 1542475 - RNA, 19 nt, Artificial Sequence
  Description of Artificial Sequence: Synthetic oligonucleotide
  Antisense strand to SEQ ID NO: 1542474
aaauguggcaccuuucuua

SEQ ID NO: 1542476 - RNA, 19 nt, Artificial Sequence
  Description of Artificial Sequence: Synthetic oligonucleotide
  Sense strand starting at position 951 of SEQ ID NO: 1245177
agcuuccgccaagaaauaa

SEQ ID NO: 1542477 - RNA, 19 nt, Artificial Sequence
  Description of Artificial Sequence: Synthetic oligonucleotide
  Antisense strand to SEQ ID NO: 1542476
uuauuucuuggcggaagcu

SEQ ID NO: 1542478 - RNA, 19 nt, Artificial Sequence
  Description of Artificial Sequence: Synthetic oligonucleotide
  Sense strand starting at position 1048 of SEQ ID NO: 1245177
aaaggauugcauuggagca

SEQ ID NO: 1542479 - RNA, 19 nt, Artificial Sequence
  Description of Artificial Sequence: Synthetic oligonucleotide
  Antisense strand to SEQ ID NO: 1542478
ugcuccaaugcaauccuuu

SEQ ID NO: 1542480 - RNA, 19 nt, Artificial Sequence
  Description of Artificial Sequence: Synthetic oligonucleotide
  Sense strand starting at position 1180 of SEQ ID NO: 1245177
gugagucacuuccuggaau

SEQ ID NO: 1542481 - RNA, 19 nt, Artificial Sequence
  Description of Artificial Sequence: Synthetic oligonucleotide
  Antisense strand to SEQ ID NO: 1542480
auuccaggaagugacucac

SEQ ID NO: 1542482 - RNA, 19 nt, Artificial Sequence
  Description of Artificial Sequence: Synthetic oligonucleotide
  Sense strand starting at position 1381 of SEQ ID NO: 1245177
ucaguugacucaucggaaa

SEQ ID NO: 1542483 - RNA, 19 nt, Artificial Sequence
  Description of Artificial Sequence: Synthetic oligonucleotide
  Antisense strand to SEQ ID NO: 1542482
uuuccgaugagucaacuga

SEQ ID NO: 1542484 - RNA, 19 nt, Artificial Sequence
  Description of Artificial Sequence: Synthetic oligonucleotide
  Sense strand starting at position 1416 of SEQ ID NO: 1245177
uccacaucccagggauguu

SEQ ID NO: 1542485 - RNA, 19 nt, Artificial Sequence
  Description of Artificial Sequence: Synthetic oligonucleotide
  Antisense strand to SEQ ID NO: 1542484
aacaucccugggaugugga

SEQ ID NO: 1542486 - RNA, 19 nt, Artificial Sequence
  Description of Artificial Sequence: Synthetic oligonucleotide
  Sense strand starting at position 2703 of SEQ ID NO: 1245177
cccgauuuaacgugcguaa

SEQ ID NO: 1542487 - RNA, 19 nt, Artificial Sequence
  Description of Artificial Sequence: Synthetic oligonucleotide
  Antisense strand to SEQ ID NO: 1542486
uuacgcacguuaaaucggg

SEQ ID NO: 1542488 - RNA, 19 nt, Artificial Sequence
  Description of Artificial Sequence: Synthetic oligonucleotide
  Sense strand starting at position 2705 of SEQ ID NO: 1245177
cgauuuaacgugcguaaua

SEQ ID NO: 1542489 - RNA, 19 nt, Artificial Sequence
  Description of Artificial Sequence: Synthetic oligonucleotide
  Antisense strand to SEQ ID NO: 1542488
uauuacgcacguuaaaucg

SEQ ID NO: 1542490 - RNA, 19 nt, Artificial Sequence
  Description of Artificial Sequence: Synthetic oligonucleotide
  Sense strand starting at position 2706 of SEQ ID NO: 1245177
gauuuaacgugcguaauag

SEQ ID NO: 1542491 - RNA, 19 nt, Artificial Sequence
  Description of Artificial Sequence: Synthetic oligonucleotide
  Antisense strand to SEQ ID NO: 1542490
cuauuacgcacguuaaauc

SEQ ID NO: 1542492 - RNA, 19 nt, Artificial Sequence
  Description of Artificial Sequence: Synthetic oligonucleotide
  Sense strand starting at position 2778 of SEQ ID NO: 1245177
ggcggaucucuucaggucu

SEQ ID NO: 1542493 - RNA, 19 nt, Artificial Sequence
  Description of Artificial Sequence: Synthetic oligonucleotide
  Antisense strand to SEQ ID NO: 1542492
agaccugaagagauccgcc

SEQ ID NO: 1542494 - RNA, 19 nt, Artificial Sequence
  Description of Artificial Sequence: Synthetic oligonucleotide
  Sense strand starting at position 3039 of SEQ ID NO: 1245177
ucuuuaauauagucacagu

SEQ ID NO: 1542495 - RNA, 19 nt, Artificial Sequence
  Description of Artificial Sequence: Synthetic oligonucleotide
  Antisense strand to SEQ ID NO: 1542494
acugugacuauauuaaaga

SEQ ID NO: 1542496 - RNA, 19 nt, Artificial Sequence
  Description of Artificial Sequence: Synthetic oligonucleotide
  Sense strand starting at position 3177 of SEQ ID NO: 1245177
ucauguuucugucucuaua

SEQ ID NO: 1542497 - RNA, 19 nt, Artificial Sequence
  Description of Artificial Sequence: Synthetic oligonucleotide
  Antisense strand to SEQ ID NO: 1542496
uauagagacagaaacauga

SEQ ID NO: 1542498 - RNA, 19 nt, Artificial Sequence
  Description of Artificial Sequence: Synthetic oligonucleotide
  Sense strand starting at position 3179 of SEQ ID NO: 1245177
auguuucugucucuauaau

SEQ ID NO: 1542499 - RNA, 19 nt, Artificial Sequence
  Description of Artificial Sequence: Synthetic oligonucleotide
  Antisense strand to SEQ ID NO: 1542498
auuauagagacagaaacau

SEQ ID NO: 1542500 - RNA, 19 nt, Artificial Sequence
  Description of Artificial Sequence: Synthetic oligonucleotide
  Sense strand starting at position 3180 of SEQ ID NO: 1245177
uguuucugucucuauaauc

SEQ ID NO: 1542501 - RNA, 19 nt, Artificial Sequence
  Description of Artificial Sequence: Synthetic oligonucleotide
  Antisense strand to SEQ ID NO: 1542500
gauuauagagacagaaaca

SEQ ID NO: 1542502 - RNA, 19 nt, Artificial Sequence
  Description of Artificial Sequence: Synthetic oligonucleotide
  Sense strand starting at position 3353 of SEQ ID NO: 1245177
auuguaugacuauacgaca

SEQ ID NO: 1542503 - RNA, 19 nt, Artificial Sequence
  Description of Artificial Sequence: Synthetic oligonucleotide
  Antisense strand to SEQ ID NO: 1542502
ugucguauagucauacaau

SEQ ID NO: 1542504 - RNA, 19 nt, Artificial Sequence
  Description of Artificial Sequence: Synthetic oligonucleotide
  Sense strand starting at position 3663 of SEQ ID NO: 1245177
cgucuuucugauuauagcu

SEQ ID NO: 1542505 - RNA, 19 nt, Artificial Sequence
  Description of Artificial Sequence: Synthetic oligonucleotide
  Antisense strand to SEQ ID NO: 1542504
agcuauaaucagaaagacg

SEQ ID NO: 1542506 - RNA, 19 nt, Artificial Sequence
  Description of Artificial Sequence: Synthetic oligonucleotide
  Sense strand starting at position 3693 of SEQ ID NO: 1245177
ugugaagucucauugugau

SEQ ID NO: 1542507 - RNA, 19 nt, Artificial Sequence
  Description of Artificial Sequence: Synthetic oligonucleotide
  Antisense strand to SEQ ID NO: 1542506
aucacaaugagacuucaca

SEQ ID NO: 1542508 - RNA, 19 nt, Artificial Sequence
  Description of Artificial Sequence: Synthetic oligonucleotide
  Sense strand starting at position 3865 of SEQ ID NO: 1245177
aggcauaauguccaagacu

SEQ ID NO: 1542509 - RNA, 19 nt, Artificial Sequence
  Description of Artificial Sequence: Synthetic oligonucleotide
  Antisense strand to SEQ ID NO: 1542508
agucuuggacauuaugccu

SEQ ID NO: 1542510 - RNA, 19 nt, Artificial Sequence
  Description of Artificial Sequence: Synthetic oligonucleotide
  Sense strand starting at position 3883 of SEQ ID NO: 1245177
uucugauaucaaugcaagu

SEQ ID NO: 1542511 - RNA, 19 nt, Artificial Sequence
  Description of Artificial Sequence: Synthetic oligonucleotide
  Antisense strand to SEQ ID NO: 1542510
acuugcauugauaucagaa

SEQ ID NO: 1542512 - RNA, 19 nt, Artificial Sequence
  Description of Artificial Sequence: Synthetic oligonucleotide
  Sense strand starting at position 3967 of SEQ ID NO: 1245177
agccauuaugcucauaguu

SEQ ID NO: 1542513 - RNA, 19 nt, Artificial Sequence
  Description of Artificial Sequence: Synthetic oligonucleotide
  Antisense strand to SEQ ID NO: 1542512
aacuaugagcauaauggcu

SEQ ID NO: 1542514 - RNA, 19 nt, Artificial Sequence
  Description of Artificial Sequence: Synthetic oligonucleotide
  Sense strand starting at position 7 of SEQ ID NO: 1245178
uaggguggucugggaaaua

SEQ ID NO: 1542515 - RNA, 19 nt, Artificial Sequence
  Description of Artificial Sequence: Synthetic oligonucleotide
  Antisense strand to SEQ ID NO: 1542514
uauuucccagaccacccua

SEQ ID NO: 1542516 - RNA, 19 nt, Artificial Sequence
  Description of Artificial Sequence: Synthetic oligonucleotide
  Sense strand starting at position 142 of SEQ ID NO: 1245178
cagugacauucucuaugga

SEQ ID NO: 1542517 - RNA, 19 nt, Artificial Sequence
  Description of Artificial Sequence: Synthetic oligonucleotide
  Antisense strand to SEQ ID NO: 1542516
uccauagagaaugucacug

SEQ ID NO: 1542518 - RNA, 19 nt, Artificial Sequence
  Description of Artificial Sequence: Synthetic oligonucleotide
  Sense strand starting at position 145 of SEQ ID NO: 1245178
ugacauucucuauggagau

SEQ ID NO: 1542519 - RNA, 19 nt, Artificial Sequence
  Description of Artificial Sequence: Synthetic oligonucleotide
  Antisense strand to SEQ ID NO: 1542518
aucuccauagagaauguca

SEQ ID NO: 1542520 - RNA, 19 nt, Artificial Sequence
  Description of Artificial Sequence: Synthetic oligonucleotide
  Sense strand starting at position 188 of SEQ ID NO: 1245178
gauguuaacuggucauuac

SEQ ID NO: 1542521 - RNA, 19 nt, Artificial Sequence
  Description of Artificial Sequence: Synthetic oligonucleotide
  Antisense strand to SEQ ID NO: 1542520
guaaugaccaguuaacauc

SEQ ID NO: 1542522 - RNA, 19 nt, Artificial Sequence
  Description of Artificial Sequence: Synthetic oligonucleotide
  Sense strand starting at position 195 of SEQ ID NO: 1245178
acuggucauuacguggaau

SEQ ID NO: 1542523 - RNA, 19 nt, Artificial Sequence
  Description of Artificial Sequence: Synthetic oligonucleotide
  Antisense strand to SEQ ID NO: 1542522
auuccacguaaugaccagu

SEQ ID NO: 1542524 - RNA, 19 nt, Artificial Sequence
  Description of Artificial Sequence: Synthetic oligonucleotide
  Sense strand starting at position 196 of SEQ ID NO: 1245178
cuggucauuacguggaaua

SEQ ID NO: 1542525 - RNA, 19 nt, Artificial Sequence
  Description of Artificial Sequence: Synthetic oligonucleotide
  Antisense strand to SEQ ID NO: 1542524
uauuccacguaaugaccag

SEQ ID NO: 1542526 - RNA, 19 nt, Artificial Sequence
  Description of Artificial Sequence: Synthetic oligonucleotide
  Sense strand starting at position 197 of SEQ ID NO: 1245178
uggucauuacguggaauag

SEQ ID NO: 1542527 - RNA, 19 nt, Artificial Sequence
  Description of Artificial Sequence: Synthetic oligonucleotide
  Antisense strand to SEQ ID NO: 1542526
cuauuccacguaaugacca

SEQ ID NO: 1542528 - RNA, 19 nt, Artificial Sequence
  Description of Artificial Sequence: Synthetic oligonucleotide
  Sense strand starting at position 198 of SEQ ID NO: 1245178
ggucauuacguggaauagu

SEQ ID NO: 1542529 - RNA, 19 nt, Artificial Sequence
  Description of Artificial Sequence: Synthetic oligonucleotide
  Antisense strand to SEQ ID NO: 1542528
acuauuccacguaaugacc

SEQ ID NO: 1542530 - RNA, 19 nt, Artificial Sequence
  Description of Artificial Sequence: Synthetic oligonucleotide
  Sense strand starting at position 280 of SEQ ID NO: 1245178
aggauauaaucgccaccau

SEQ ID NO: 1542531 - RNA, 19 nt, Artificial Sequence
  Description of Artificial Sequence: Synthetic oligonucleotide
  Antisense strand to SEQ ID NO: 1542530
augguggcgauuauauccu

SEQ ID NO: 1542532 - RNA, 19 nt, Artificial Sequence
  Description of Artificial Sequence: Synthetic oligonucleotide
  Sense strand starting at position 281 of SEQ ID NO: 1245178
ggauauaaucgccaccauu

SEQ ID NO: 1542533 - RNA, 19 nt, Artificial Sequence
  Description of Artificial Sequence: Synthetic oligonucleotide
  Antisense strand to SEQ ID NO: 1542532
aaugguggcgauuauaucc

SEQ ID NO: 1542534 - RNA, 19 nt, Artificial Sequence
  Description of Artificial Sequence: Synthetic oligonucleotide
  Sense strand starting at position 630 of SEQ ID NO: 1245178
gaagcaguguuucuugaga

SEQ ID NO: 1542535 - RNA, 19 nt, Artificial Sequence
  Description of Artificial Sequence: Synthetic oligonucleotide
  Antisense strand to SEQ ID NO: 1542534
ucucaagaaacacugcuuc

SEQ ID NO: 1542536 - RNA, 19 nt, Artificial Sequence
  Description of Artificial Sequence: Synthetic oligonucleotide
  Sense strand starting at position 824 of SEQ ID NO: 1245178
ugguaauuaugucuaguaa

SEQ ID NO: 1542537 - RNA, 19 nt, Artificial Sequence
  Description of Artificial Sequence: Synthetic oligonucleotide
  Antisense strand to SEQ ID NO: 1542536
uuacuagacauaauuacca

SEQ ID NO: 1542538 - RNA, 19 nt, Artificial Sequence
  Description of Artificial Sequence: Synthetic oligonucleotide
  Sense strand starting at position 825 of SEQ ID NO: 1245178
gguaauuaugucuaguaag

SEQ ID NO: 1542539 - RNA, 19 nt, Artificial Sequence
  Description of Artificial Sequence: Synthetic oligonucleotide
  Antisense strand to SEQ ID NO: 1542538
cuuacuagacauaauuacc

SEQ ID NO: 1542540 - RNA, 19 nt, Artificial Sequence
  Description of Artificial Sequence: Synthetic oligonucleotide
  Sense strand starting at position 968 of SEQ ID NO: 1245178
aagaaugcccagugauucu

SEQ ID NO: 1542541 - RNA, 19 nt, Artificial Sequence
  Description of Artificial Sequence: Synthetic oligonucleotide
  Antisense strand to SEQ ID NO: 1542540
agaaucacugggcauucuu

SEQ ID NO: 1542542 - RNA, 19 nt, Artificial Sequence
  Description of Artificial Sequence: Synthetic oligonucleotide
  Sense strand starting at position 975 of SEQ ID NO: 1245178
cccagugauucugccaaag

SEQ ID NO: 1542543 - RNA, 19 nt, Artificial Sequence
  Description of Artificial Sequence: Synthetic oligonucleotide
  Antisense strand to SEQ ID NO: 1542542
cuuuggcagaaucacuggg

SEQ ID NO: 1542544 - RNA, 19 nt, Artificial Sequence
  Description of Artificial Sequence: Synthetic oligonucleotide
  Sense strand starting at position 997 of SEQ ID NO: 1245178
acagcaacgccucaauuaa

SEQ ID NO: 1542545 - RNA, 19 nt, Artificial Sequence
  Description of Artificial Sequence: Synthetic oligonucleotide
  Antisense strand to SEQ ID NO: 1542544
uuaauugaggcguugcugu

SEQ ID NO: 1542546 - RNA, 19 nt, Artificial Sequence
  Description of Artificial Sequence: Synthetic oligonucleotide
  Sense strand starting at position 1057 of SEQ ID NO: 1245178
gcaagcacucaguaacaca

SEQ ID NO: 1542547 - RNA, 19 nt, Artificial Sequence
  Description of Artificial Sequence: Synthetic oligonucleotide
  Antisense strand to SEQ ID NO: 1542546
uguguuacugagugcuugc

SEQ ID NO: 1542548 - RNA, 19 nt, Artificial Sequence
  Description of Artificial Sequence: Synthetic oligonucleotide
  Sense strand starting at position 1103 of SEQ ID NO: 1245178
cucuaaggaacgugaagua

SEQ ID NO: 1542549 - RNA, 19 nt, Artificial Sequence
  Description of Artificial Sequence: Synthetic oligonucleotide
  Antisense strand to SEQ ID NO: 1542548
uacuucacguuccuuagag

SEQ ID NO: 1542550 - RNA, 19 nt, Artificial Sequence
  Description of Artificial Sequence: Synthetic oligonucleotide
  Sense strand starting at position 1474 of SEQ ID NO: 1245178
ccuagcaaugcagacuaaa

SEQ ID NO: 1542551 - RNA, 19 nt, Artificial Sequence
  Description of Artificial Sequence: Synthetic oligonucleotide
  Antisense strand to SEQ ID NO: 1542550
uuuagucugcauugcuagg

SEQ ID NO: 1542552 - RNA, 19 nt, Artificial Sequence
  Description of Artificial Sequence: Synthetic oligonucleotide
  Sense strand starting at position 1815 of SEQ ID NO: 1245178
ggguuaguucggagcuucu

SEQ ID NO: 1542553 - RNA, 19 nt, Artificial Sequence
  Description of Artificial Sequence: Synthetic oligonucleotide
  Antisense strand to SEQ ID NO: 1542552
agaagcuccgaacuaaccc

SEQ ID NO: 1542554 - RNA, 19 nt, Artificial Sequence
  Description of Artificial Sequence: Synthetic oligonucleotide
  Sense strand starting at position 2561 of SEQ ID NO: 1245178
uccguuguuacagaggaaa

SEQ ID NO: 1542555 - RNA, 19 nt, Artificial Sequence
  Description of Artificial Sequence: Synthetic oligonucleotide
  Antisense strand to SEQ ID NO: 1542554
uuuccucuguaacaacgga

SEQ ID NO: 1542556 - RNA, 19 nt, Artificial Sequence
  Description of Artificial Sequence: Synthetic oligonucleotide
  Sense strand starting at position 2584 of SEQ ID NO: 1245178
gggaccuggguuugugauu

SEQ ID NO: 1542557 - RNA, 19 nt, Artificial Sequence
  Description of Artificial Sequence: Synthetic oligonucleotide
  Antisense strand to SEQ ID NO: 1542556
aaucacaaacccagguccc

SEQ ID NO: 1542558 - RNA, 19 nt, Artificial Sequence
  Description of Artificial Sequence: Synthetic oligonucleotide
  Sense strand starting at position 2585 of SEQ ID NO: 1245178
ggaccuggguuugugauua

SEQ ID NO: 1542559 - RNA, 19 nt, Artificial Sequence
  Description of Artificial Sequence: Synthetic oligonucleotide
  Antisense strand to SEQ ID NO: 1542558
uaaucacaaacccaggucc

SEQ ID NO: 1542560 - RNA, 19 nt, Artificial Sequence
  Description of Artificial Sequence: Synthetic oligonucleotide
  Sense strand starting at position 2597 of SEQ ID NO: 1245178
gugauuaggccuugaaagu

SEQ ID NO: 1542561 - RNA, 19 nt, Artificial Sequence
  Description of Artificial Sequence: Synthetic oligonucleotide
  Antisense strand to SEQ ID NO: 1542560
acuuucaaggccuaaucac

SEQ ID NO: 1542562 - RNA, 19 nt, Artificial Sequence
  Description of Artificial Sequence: Synthetic oligonucleotide
  Sense strand starting at position 2598 of SEQ ID NO: 1245178
ugauuaggccuugaaagug

SEQ ID NO: 1542563 - RNA, 19 nt, Artificial Sequence
  Description of Artificial Sequence: Synthetic oligonucleotide
  Antisense strand to SEQ ID NO: 1542562
cacuuucaaggccuaauca

SEQ ID NO: 1542564 - RNA, 19 nt, Artificial Sequence
  Description of Artificial Sequence: Synthetic oligonucleotide
  Sense strand starting at position 3210 of SEQ ID NO: 1245178
aguacucaccacuauguua

SEQ ID NO: 1542565 - RNA, 19 nt, Artificial Sequence
  Description of Artificial Sequence: Synthetic oligonucleotide
  Antisense strand to SEQ ID NO: 1542564
uaacauaguggugaguacu

SEQ ID NO: 1542566 - RNA, 19 nt, Artificial Sequence
  Description of Artificial Sequence: Synthetic oligonucleotide
  Sense strand starting at position 3222 of SEQ ID NO: 1245178
uauguuagacgugagguua

SEQ ID NO: 1542567 - RNA, 19 nt, Artificial Sequence
  Description of Artificial Sequence: Synthetic oligonucleotide
  Antisense strand to SEQ ID NO: 1542566
uaaccucacgucuaacaua

SEQ ID NO: 1542568 - RNA, 19 nt, Artificial Sequence
  Description of Artificial Sequence: Synthetic oligonucleotide
  Sense strand starting at position 3286 of SEQ ID NO: 1245178
ggucacuaggagugugaaa

SEQ ID NO: 1542569 - RNA, 19 nt, Artificial Sequence
  Description of Artificial Sequence: Synthetic oligonucleotide
  Antisense strand to SEQ ID NO: 1542568
uuucacacuccuagugacc

SEQ ID NO: 1542570 - RNA, 19 nt, Artificial Sequence
  Description of Artificial Sequence: Synthetic oligonucleotide
  Sense strand starting at position 3305 of SEQ ID NO: 1245178
agaggucaguaaucuguua

SEQ ID NO: 1542571 - RNA, 19 nt, Artificial Sequence
  Description of Artificial Sequence: Synthetic oligonucleotide
  Antisense strand to SEQ ID NO: 1542570
uaacagauuacugaccucu

SEQ ID NO: 1542572 - RNA, 19 nt, Artificial Sequence
  Description of Artificial Sequence: Synthetic oligonucleotide
  Sense strand starting at position 3313 of SEQ ID NO: 1245178
guaaucuguuacucagaga

SEQ ID NO: 1542573 - RNA, 19 nt, Artificial Sequence
  Description of Artificial Sequence: Synthetic oligonucleotide
  Antisense strand to SEQ ID NO: 1542572
ucucugaguaacagauuac

SEQ ID NO: 1542574 - RNA, 19 nt, Artificial Sequence
  Description of Artificial Sequence: Synthetic oligonucleotide
  Sense strand starting at position 3349 of SEQ ID NO: 1245178
cugaucuuaccagggaagu

SEQ ID NO: 1542575 - RNA, 19 nt, Artificial Sequence
  Description of Artificial Sequence: Synthetic oligonucleotide
  Antisense strand to SEQ ID NO: 1542574
acuucccugguaagaucag

SEQ ID NO: 1542576 - RNA, 19 nt, Artificial Sequence
  Description of Artificial Sequence: Synthetic oligonucleotide
  Sense strand starting at position 3350 of SEQ ID NO: 1245178
ugaucuuaccagggaaguu

SEQ ID NO: 1542577 - RNA, 19 nt, Artificial Sequence
  Description of Artificial Sequence: Synthetic oligonucleotide
  Antisense strand to SEQ ID NO: 1542576
aacuucccugguaagauca

SEQ ID NO: 1542578 - RNA, 19 nt, Artificial Sequence
  Description of Artificial Sequence: Synthetic oligonucleotide
  Sense strand starting at position 3385 of SEQ ID NO: 1245178
aggagaugaugcuagauuu

SEQ ID NO: 1542579 - RNA, 19 nt, Artificial Sequence
  Description of Artificial Sequence: Synthetic oligonucleotide
  Antisense strand to SEQ ID NO: 1542578
aaaucuagcaucaucuccu

SEQ ID NO: 1542580 - RNA, 19 nt, Artificial Sequence
  Description of Artificial Sequence: Synthetic oligonucleotide
  Sense strand starting at position 3506 of SEQ ID NO: 1245178
auccaaaugucuguaccau

SEQ ID NO: 1542581 - RNA, 19 nt, Artificial Sequence
  Description of Artificial Sequence: Synthetic oligonucleotide
  Antisense strand to SEQ ID NO: 1542580
augguacagacauuuggau

SEQ ID NO: 1542582 - RNA, 19 nt, Artificial Sequence
  Description of Artificial Sequence: Synthetic oligonucleotide
  Sense strand starting at position 3507 of SEQ ID NO: 1245178
uccaaaugucuguaccaug

SEQ ID NO: 1542583 - RNA, 19 nt, Artificial Sequence
  Description of Artificial Sequence: Synthetic oligonucleotide
  Antisense strand to SEQ ID NO: 1542582
caugguacagacauuugga

SEQ ID NO: 1542584 - RNA, 19 nt, Artificial Sequence
  Description of Artificial Sequence: Synthetic oligonucleotide
  Sense strand starting at position 3527 of SEQ ID NO: 1245178
cccacaagucccuguaaga

SEQ ID NO: 1542585 - RNA, 19 nt, Artificial Sequence
  Description of Artificial Sequence: Synthetic oligonucleotide
  Antisense strand to SEQ ID NO: 1542584
ucuuacagggacuuguggg

SEQ ID NO: 1542586 - RNA, 19 nt, Artificial Sequence
  Description of Artificial Sequence: Synthetic oligonucleotide
  Sense strand starting at position 3668 of SEQ ID NO: 1245178
ggaauuaucuuucucugaa

SEQ ID NO: 1542587 - RNA, 19 nt, Artificial Sequence
  Description of Artificial Sequence: Synthetic oligonucleotide
  Antisense strand to SEQ ID NO: 1542586
uucagagaaagauaauucc

SEQ ID NO: 1542588 - RNA, 19 nt, Artificial Sequence
  Description of Artificial Sequence: Synthetic oligonucleotide
  Sense strand starting at position 3748 of SEQ ID NO: 1245178
cccugaauauaguucgaau

SEQ ID NO: 1542589 - RNA, 19 nt, Artificial Sequence
  Description of Artificial Sequence: Synthetic oligonucleotide
  Antisense strand to SEQ ID NO: 1542588
auucgaacuauauucaggg

SEQ ID NO: 1542590 - RNA, 19 nt, Artificial Sequence
  Description of Artificial Sequence: Synthetic oligonucleotide
  Sense strand starting at position 3750 of SEQ ID NO: 1245178
cugaauauaguucgaauaa

SEQ ID NO: 1542591 - RNA, 19 nt, Artificial Sequence
  Description of Artificial Sequence: Synthetic oligonucleotide
  Antisense strand to SEQ ID NO: 1542590
uuauucgaacuauauucag

SEQ ID NO: 1542592 - RNA, 19 nt, Artificial Sequence
  Description of Artificial Sequence: Synthetic oligonucleotide
  Sense strand starting at position 3844 of SEQ ID NO: 1245178
uauguauuuguuugguuga

SEQ ID NO: 1542593 - RNA, 19 nt, Artificial Sequence
  Description of Artificial Sequence: Synthetic oligonucleotide
  Antisense strand to SEQ ID NO: 1542592
ucaaccaaacaaauacaua

SEQ ID NO: 1542594 - RNA, 19 nt, Artificial Sequence
  Description of Artificial Sequence: Synthetic oligonucleotide
  Sense strand starting at position 90 of SEQ ID NO: 1245179
agucuuaaaggucagcaau

SEQ ID NO: 1542595 - RNA, 19 nt, Artificial Sequence
  Description of Artificial Sequence: Synthetic oligonucleotide
  Antisense strand to SEQ ID NO: 1542594
auugcugaccuuuaagacu

SEQ ID NO: 1542596 - RNA, 19 nt, Artificial Sequence
  Description of Artificial Sequence: Synthetic oligonucleotide
  Sense strand starting at position 92 of SEQ ID NO: 1245179
ucuuaaaggucagcaauga

SEQ ID NO: 1542597 - RNA, 19 nt, Artificial Sequence
  Description of Artificial Sequence: Synthetic oligonucleotide
  Antisense strand to SEQ ID NO: 1542596
ucauugcugaccuuuaaga

SEQ ID NO: 1542598 - RNA, 19 nt, Artificial Sequence
  Description of Artificial Sequence: Synthetic oligonucleotide
  Sense strand starting at position 140 of SEQ ID NO: 1245179
ccuacauauuggguaagga

SEQ ID NO: 1542599 - RNA, 19 nt, Artificial Sequence
  Description of Artificial Sequence: Synthetic oligonucleotide
  Antisense strand to SEQ ID NO: 1542598
uccuuacccaauauguagg

SEQ ID NO: 1542600 - RNA, 19 nt, Artificial Sequence
  Description of Artificial Sequence: Synthetic oligonucleotide
  Sense strand starting at position 249 of SEQ ID NO: 1245179
cgucuacguuuggcaauuu

SEQ ID NO: 1542601 - RNA, 19 nt, Artificial Sequence
  Description of Artificial Sequence: Synthetic oligonucleotide
  Antisense strand to SEQ ID NO: 1542600
aaauugccaaacguagacg

SEQ ID NO: 1542602 - RNA, 19 nt, Artificial Sequence
  Description of Artificial Sequence: Synthetic oligonucleotide
  Sense strand starting at position 310 of SEQ ID NO: 1245179
ucaauuaggcugcaguuua

SEQ ID NO: 1542603 - RNA, 19 nt, Artificial Sequence
  Description of Artificial Sequence: Synthetic oligonucleotide
  Antisense strand to SEQ ID NO: 1542602
uaaacugcagccuaauuga

SEQ ID NO: 1542604 - RNA, 19 nt, Artificial Sequence
  Description of Artificial Sequence: Synthetic oligonucleotide
  Sense strand starting at position 404 of SEQ ID NO: 1245179
gggaauauuuaagauaccu

SEQ ID NO: 1542605 - RNA, 19 nt, Artificial Sequence
  Description of Artificial Sequence: Synthetic oligonucleotide
  Antisense strand to SEQ ID NO: 1542604
agguaucuuaaauauuccc

SEQ ID NO: 1542606 - RNA, 19 nt, Artificial Sequence
  Description of Artificial Sequence: Synthetic oligonucleotide
  Sense strand starting at position 458 of SEQ ID NO: 1245179
acacuacaucuuugacagu

SEQ ID NO: 1542607 - RNA, 19 nt, Artificial Sequence
  Description of Artificial Sequence: Synthetic oligonucleotide
  Antisense strand to SEQ ID NO: 1542606
acugucaaagauguagugu

SEQ ID NO: 1542608 - RNA, 19 nt, Artificial Sequence
  Description of Artificial Sequence: Synthetic oligonucleotide
  Sense strand starting at position 639 of SEQ ID NO: 1245179
ugccuugcuccuuggauuu

SEQ ID NO: 1542609 - RNA, 19 nt, Artificial Sequence
  Description of Artificial Sequence: Synthetic oligonucleotide
  Antisense strand to SEQ ID NO: 1542608
aaauccaaggagcaaggca

SEQ ID NO: 1542610 - RNA, 19 nt, Artificial Sequence
  Description of Artificial Sequence: Synthetic oligonucleotide
  Sense strand starting at position 786 of SEQ ID NO: 1245179
gggucuuaaguacaucuga

SEQ ID NO: 1542611 - RNA, 19 nt, Artificial Sequence
  Description of Artificial Sequence: Synthetic oligonucleotide
  Antisense strand to SEQ ID NO: 1542610
ucagauguacuuaagaccc

SEQ ID NO: 1542612 - RNA, 19 nt, Artificial Sequence
  Description of Artificial Sequence: Synthetic oligonucleotide
  Sense strand starting at position 975 of SEQ ID NO: 1245179
ucccguaauagccagugaa

SEQ ID NO: 1542613 - RNA, 19 nt, Artificial Sequence
  Description of Artificial Sequence: Synthetic oligonucleotide
  Antisense strand to SEQ ID NO: 1542612
uucacuggcuauuacggga

SEQ ID NO: 1542614 - RNA, 19 nt, Artificial Sequence
  Description of Artificial Sequence: Synthetic oligonucleotide
  Sense strand starting at position 979 of SEQ ID NO: 1245179
guaauagccagugaacuag

SEQ ID NO: 1542615 - RNA, 19 nt, Artificial Sequence
  Description of Artificial Sequence: Synthetic oligonucleotide
  Antisense strand to SEQ ID NO: 1542614
cuaguucacuggcuauuac

SEQ ID NO: 1542616 - RNA, 19 nt, Artificial Sequence
  Description of Artificial Sequence: Synthetic oligonucleotide
  Sense strand starting at position 1084 of SEQ ID NO: 1245179
gagaacagucauugccuga

SEQ ID NO: 1542617 - RNA, 19 nt, Artificial Sequence
  Description of Artificial Sequence: Synthetic oligonucleotide
  Antisense strand to SEQ ID NO: 1542616
ucaggcaaugacuguucuc

SEQ ID NO: 1542618 - RNA, 19 nt, Artificial Sequence
  Description of Artificial Sequence: Synthetic oligonucleotide
  Sense strand starting at position 1201 of SEQ ID NO: 1245179
acaguaacuccguacaauc

SEQ ID NO: 1542619 - RNA, 19 nt, Artificial Sequence
  Description of Artificial Sequence: Synthetic oligonucleotide
  Antisense strand to SEQ ID NO: 1542618
gauuguacggaguuacugu

SEQ ID NO: 1542620 - RNA, 19 nt, Artificial Sequence
  Description of Artificial Sequence: Synthetic oligonucleotide
  Sense strand starting at position 2172 of SEQ ID NO: 1245179
ccacgacuccuccaugauu

SEQ ID NO: 1542621 - RNA, 19 nt, Artificial Sequence
  Description of Artificial Sequence: Synthetic oligonucleotide
  Antisense strand to SEQ ID NO: 1542620
aaucauggaggagucgugg

SEQ ID NO: 1542622 - RNA, 19 nt, Artificial Sequence
  Description of Artificial Sequence: Synthetic oligonucleotide
  Sense strand starting at position 2181 of SEQ ID NO: 1245179
cuccaugauuggucagaga

SEQ ID NO: 1542623 - RNA, 19 nt, Artificial Sequence
  Description of Artificial Sequence: Synthetic oligonucleotide
  Antisense strand to SEQ ID NO: 1542622
ucucugaccaaucauggag

SEQ ID NO: 1542624 - RNA, 19 nt, Artificial Sequence
  Description of Artificial Sequence: Synthetic oligonucleotide
  Sense strand starting at position 2223 of SEQ ID NO: 1245179
gggagacuggcccgagaau

SEQ ID NO: 1542625 - RNA, 19 nt, Artificial Sequence
  Description of Artificial Sequence: Synthetic oligonucleotide
  Antisense strand to SEQ ID NO: 1542624
auucucgggccagucuccc

SEQ ID NO: 1542626 - RNA, 19 nt, Artificial Sequence
  Description of Artificial Sequence: Synthetic oligonucleotide
  Sense strand starting at position 2224 of SEQ ID NO: 1245179
ggagacuggcccgagaauu

SEQ ID NO: 1542627 - RNA, 19 nt, Artificial Sequence
  Description of Artificial Sequence: Synthetic oligonucleotide
  Antisense strand to SEQ ID NO: 1542626
aauucucgggccagucucc

SEQ ID NO: 1542628 - RNA, 19 nt, Artificial Sequence
  Description of Artificial Sequence: Synthetic oligonucleotide
  Sense strand starting at position 2236 of SEQ ID NO: 1245179
gagaauuaucgcgauagca

SEQ ID NO: 1542629 - RNA, 19 nt, Artificial Sequence
  Description of Artificial Sequence: Synthetic oligonucleotide
  Antisense strand to SEQ ID NO: 1542628
ugcuaucgcgauaauucuc

SEQ ID NO: 1542630 - RNA, 19 nt, Artificial Sequence
  Description of Artificial Sequence: Synthetic oligonucleotide
  Sense strand starting at position 2362 of SEQ ID NO: 1245179
gcccgagagcuuuaaugga

SEQ ID NO: 1542631 - RNA, 19 nt, Artificial Sequence
  Description of Artificial Sequence: Synthetic oligonucleotide
  Antisense strand to SEQ ID NO: 1542630
uccauuaaagcucucgggc

SEQ ID NO: 1542632 - RNA, 19 nt, Artificial Sequence
  Description of Artificial Sequence: Synthetic oligonucleotide
  Sense strand starting at position 2434 of SEQ ID NO: 1245179
cgggauaagcuccagguaa

SEQ ID NO: 1542633 - RNA, 19 nt, Artificial Sequence
  Description of Artificial Sequence: Synthetic oligonucleotide
  Antisense strand to SEQ ID NO: 1542632
uuaccuggagcuuaucccg

SEQ ID NO: 1542634 - RNA, 19 nt, Artificial Sequence
  Description of Artificial Sequence: Synthetic oligonucleotide
  Sense strand starting at position 2436 of SEQ ID NO: 1245179
ggauaagcuccagguaaag

SEQ ID NO: 1542635 - RNA, 19 nt, Artificial Sequence
  Description of Artificial Sequence: Synthetic oligonucleotide
  Antisense strand to SEQ ID NO: 1542634
cuuuaccuggagcuuaucc

SEQ ID NO: 1542636 - RNA, 19 nt, Artificial Sequence
  Description of Artificial Sequence: Synthetic oligonucleotide
  Sense strand starting at position 2801 of SEQ ID NO: 1245179
acaaauuguuagguacuca

SEQ ID NO: 1542637 - RNA, 19 nt, Artificial Sequence
  Description of Artificial Sequence: Synthetic oligonucleotide
  Antisense strand to SEQ ID NO: 1542636
ugaguaccuaacaauuugu

SEQ ID NO: 1542638 - RNA, 19 nt, Artificial Sequence
  Description of Artificial Sequence: Synthetic oligonucleotide
  Sense strand starting at position 2817 of SEQ ID NO: 1245179
ucaauaaacgcuuaggauu

SEQ ID NO: 1542639 - RNA, 19 nt, Artificial Sequence
  Description of Artificial Sequence: Synthetic oligonucleotide
  Antisense strand to SEQ ID NO: 1542638
aauccuaagcguuuauuga

SEQ ID NO: 1542640 - RNA, 19 nt, Artificial Sequence
  Description of Artificial Sequence: Synthetic oligonucleotide
  Sense strand starting at position 3352 of SEQ ID NO: 1245179
gcaggcuagaaucaagguu

SEQ ID NO: 1542641 - RNA, 19 nt, Artificial Sequence
  Description of Artificial Sequence: Synthetic oligonucleotide
  Antisense strand to SEQ ID NO: 1542640
aaccuugauucuagccugc

SEQ ID NO: 1542642 - RNA, 19 nt, Artificial Sequence
  Description of Artificial Sequence: Synthetic oligonucleotide
  Sense strand starting at position 3426 of SEQ ID NO: 1245179
gaugaaauguuagcauaua

SEQ ID NO: 1542643 - RNA, 19 nt, Artificial Sequence
  Description of Artificial Sequence: Synthetic oligonucleotide
  Antisense strand to SEQ ID NO: 1542642
uauaugcuaacauuucauc

SEQ ID NO: 1542644 - RNA, 19 nt, Artificial Sequence
  Description of Artificial Sequence: Synthetic oligonucleotide
  Sense strand starting at position 3459 of SEQ ID NO: 1245179
aguuuagaagaucaacguu

SEQ ID NO: 1542645 - RNA, 19 nt, Artificial Sequence
  Description of Artificial Sequence: Synthetic oligonucleotide
  Antisense strand to SEQ ID NO: 1542644
aacguugaucuucuaaacu

SEQ ID NO: 1542646 - RNA, 19 nt, Artificial Sequence
  Description of Artificial Sequence: Synthetic oligonucleotide
  Sense strand starting at position 3462 of SEQ ID NO: 1245179
uuagaagaucaacguuuau

SEQ ID NO: 1542647 - RNA, 19 nt, Artificial Sequence
  Description of Artificial Sequence: Synthetic oligonucleotide
  Antisense strand to SEQ ID NO: 1542646
auaaacguugaucuucuaa

SEQ ID NO: 1542648 - RNA, 19 nt, Artificial Sequence
  Description of Artificial Sequence: Synthetic oligonucleotide
  Sense strand starting at position 3484 of SEQ ID NO: 1245179
uuaugucauuccuugauua

SEQ ID NO: 1542649 - RNA, 19 nt, Artificial Sequence
  Description of Artificial Sequence: Synthetic oligonucleotide
  Antisense strand to SEQ ID NO: 1542648
uaaucaaggaaugacauaa

SEQ ID NO: 1542650 - RNA, 19 nt, Artificial Sequence
  Description of Artificial Sequence: Synthetic oligonucleotide
  Sense strand starting at position 3486 of SEQ ID NO: 1245179
augucauuccuugauuaug

SEQ ID NO: 1542651 - RNA, 19 nt, Artificial Sequence
  Description of Artificial Sequence: Synthetic oligonucleotide
  Antisense strand to SEQ ID NO: 1542650
cauaaucaaggaaugacau

SEQ ID NO: 1542652 - RNA, 19 nt, Artificial Sequence
  Description of Artificial Sequence: Synthetic oligonucleotide
  Sense strand starting at position 3488 of SEQ ID NO: 1245179
gucauuccuugauuaugau

SEQ ID NO: 1542653 - RNA, 19 nt, Artificial Sequence
  Description of Artificial Sequence: Synthetic oligonucleotide
  Antisense strand to SEQ ID NO: 1542652
aucauaaucaaggaaugac

SEQ ID NO: 1542654 - RNA, 19 nt, Artificial Sequence
  Description of Artificial Sequence: Synthetic oligonucleotide
  Sense strand starting at position 3604 of SEQ ID NO: 1245179
agauuuccuuucuuagugu

SEQ ID NO: 1542655 - RNA, 19 nt, Artificial Sequence
  Description of Artificial Sequence: Synthetic oligonucleotide
  Antisense strand to SEQ ID NO: 1542654
acacuaagaaaggaaaucu

SEQ ID NO: 1542656 - RNA, 19 nt, Artificial Sequence
  Description of Artificial Sequence: Synthetic oligonucleotide
  Sense strand starting at position 3612 of SEQ ID NO: 1245179
uuucuuaguguacagguaa

SEQ ID NO: 1542657 - RNA, 19 nt, Artificial Sequence
  Description of Artificial Sequence: Synthetic oligonucleotide
  Antisense strand to SEQ ID NO: 1542656
uuaccuguacacuaagaaa

SEQ ID NO: 1542658 - RNA, 19 nt, Artificial Sequence
  Description of Artificial Sequence: Synthetic oligonucleotide
  Sense strand starting at position 3620 of SEQ ID NO: 1245179
uguacagguaagugacaua

SEQ ID NO: 1542659 - RNA, 19 nt, Artificial Sequence
  Description of Artificial Sequence: Synthetic oligonucleotide
  Antisense strand to SEQ ID NO: 1542658
uaugucacuuaccuguaca

SEQ ID NO: 1542660 - RNA, 19 nt, Artificial Sequence
  Description of Artificial Sequence: Synthetic oligonucleotide
  Sense strand starting at position 3648 of SEQ ID NO: 1245179
guguguaguaaacauucca

SEQ ID NO: 1542661 - RNA, 19 nt, Artificial Sequence
  Description of Artificial Sequence: Synthetic oligonucleotide
  Antisense strand to SEQ ID NO: 1542660
uggaauguuuacuacacac

SEQ ID NO: 1542662 - RNA, 19 nt, Artificial Sequence
  Description of Artificial Sequence: Synthetic oligonucleotide
  Sense strand starting at position 3679 of SEQ ID NO: 1245179
ucccguuagcuccauggaa

SEQ ID NO: 1542663 - RNA, 19 nt, Artificial Sequence
  Description of Artificial Sequence: Synthetic oligonucleotide
  Antisense strand to SEQ ID NO: 1542662
uuccauggagcuaacggga

SEQ ID NO: 1542664 - RNA, 19 nt, Artificial Sequence
  Description of Artificial Sequence: Synthetic oligonucleotide
  Sense strand starting at position 3732 of SEQ ID NO: 1245179
ucagguuauugguuuacau

SEQ ID NO: 1542665 - RNA, 19 nt, Artificial Sequence
  Description of Artificial Sequence: Synthetic oligonucleotide
  Antisense strand to SEQ ID NO: 1542664
auguaaaccaauaaccuga

SEQ ID NO: 1542666 - RNA, 19 nt, Artificial Sequence
  Description of Artificial Sequence: Synthetic oligonucleotide
  Sense strand starting at position 3734 of SEQ ID NO: 1245179
agguuauugguuuacaugu

SEQ ID NO: 1542667 - RNA, 19 nt, Artificial Sequence
  Description of Artificial Sequence: Synthetic oligonucleotide
  Antisense strand to SEQ ID NO: 1542666
acauguaaaccaauaaccu

SEQ ID NO: 1542668 - RNA, 19 nt, Artificial Sequence
  Description of Artificial Sequence: Synthetic oligonucleotide
  Sense strand starting at position 3766 of SEQ ID NO: 1245179
caguuaagaguaggcuuua

SEQ ID NO: 1542669 - RNA, 19 nt, Artificial Sequence
  Description of Artificial Sequence: Synthetic oligonucleotide
  Antisense strand to SEQ ID NO: 1542668
uaaagccuacucuuaacug

SEQ ID NO: 1542670 - RNA, 19 nt, Artificial Sequence
  Description of Artificial Sequence: Synthetic oligonucleotide
  Sense strand starting at position 3767 of SEQ ID NO: 1245179
aguuaagaguaggcuuuaa

SEQ ID NO: 1542671 - RNA, 19 nt, Artificial Sequence
  Description of Artificial Sequence: Synthetic oligonucleotide
  Antisense strand to SEQ ID NO: 1542670
uuaaagccuacucuuaacu

SEQ ID NO: 1542672 - RNA, 19 nt, Artificial Sequence
  Description of Artificial Sequence: Synthetic oligonucleotide
  Sense strand starting at position 3909 of SEQ ID NO: 1245179
ggacauuaguucccaaugu

SEQ ID NO: 1542673 - RNA, 19 nt, Artificial Sequence
  Description of Artificial Sequence: Synthetic oligonucleotide
  Antisense strand to SEQ ID NO: 1542672
acauugggaacuaaugucc

SEQ ID NO: 1542674 - RNA, 19 nt, Artificial Sequence
  Description of Artificial Sequence: Synthetic oligonucleotide
  Sense strand starting at position 242 of SEQ ID NO: 1245180
agaaacuccuaggcuaaua

SEQ ID NO: 1542675 - RNA, 19 nt, Artificial Sequence
  Description of Artificial Sequence: Synthetic oligonucleotide
  Antisense strand to SEQ ID NO: 1542674
uauuagccuaggaguuucu

SEQ ID NO: 1542676 - RNA, 19 nt, Artificial Sequence
  Description of Artificial Sequence: Synthetic oligonucleotide
  Sense strand starting at position 252 of SEQ ID NO: 1245180
aggcuaauagucugaggga

SEQ ID NO: 1542677 - RNA, 19 nt, Artificial Sequence
  Description of Artificial Sequence: Synthetic oligonucleotide
  Antisense strand to SEQ ID NO: 1542676
ucccucagacuauuagccu

SEQ ID NO: 1542678 - RNA, 19 nt, Artificial Sequence
  Description of Artificial Sequence: Synthetic oligonucleotide
  Sense strand starting at position 283 of SEQ ID NO: 1245180
cuuucuucucccgggaaag

SEQ ID NO: 1542679 - RNA, 19 nt, Artificial Sequence
  Description of Artificial Sequence: Synthetic oligonucleotide
  Antisense strand to SEQ ID NO: 1542678
cuuucccgggagaagaaag

SEQ ID NO: 1542680 - RNA, 19 nt, Artificial Sequence
  Description of Artificial Sequence: Synthetic oligonucleotide
  Sense strand starting at position 348 of SEQ ID NO: 1245180
gggagcuguccuuaucaau

SEQ ID NO: 1542681 - RNA, 19 nt, Artificial Sequence
  Description of Artificial Sequence: Synthetic oligonucleotide
  Antisense strand to SEQ ID NO: 1542680
auugauaaggacagcuccc

SEQ ID NO: 1542682 - RNA, 19 nt, Artificial Sequence
  Description of Artificial Sequence: Synthetic oligonucleotide
  Sense strand starting at position 464 of SEQ ID NO: 1245180
ggcuuuaaaccuggcagga

SEQ ID NO: 1542683 - RNA, 19 nt, Artificial Sequence
  Description of Artificial Sequence: Synthetic oligonucleotide
  Antisense strand to SEQ ID NO: 1542682
uccugccagguuuaaagcc

SEQ ID NO: 1542684 - RNA, 19 nt, Artificial Sequence
  Description of Artificial Sequence: Synthetic oligonucleotide
  Sense strand starting at position 1339 of SEQ ID NO: 1245180
ucuggcuugccugaaacau

SEQ ID NO: 1542685 - RNA, 19 nt, Artificial Sequence
  Description of Artificial Sequence: Synthetic oligonucleotide
  Antisense strand to SEQ ID NO: 1542684
auguuucaggcaagccaga

SEQ ID NO: 1542686 - RNA, 19 nt, Artificial Sequence
  Description of Artificial Sequence: Synthetic oligonucleotide
  Sense strand starting at position 1378 of SEQ ID NO: 1245180
uuaagaggacccggucaua

SEQ ID NO: 1542687 - RNA, 19 nt, Artificial Sequence
  Description of Artificial Sequence: Synthetic oligonucleotide
  Antisense strand to SEQ ID NO: 1542686
uaugaccggguccucuuaa

SEQ ID NO: 1542688 - RNA, 19 nt, Artificial Sequence
  Description of Artificial Sequence: Synthetic oligonucleotide
  Sense strand starting at position 1521 of SEQ ID NO: 1245180
ucuuuaugagcguuugcca

SEQ ID NO: 1542689 - RNA, 19 nt, Artificial Sequence
  Description of Artificial Sequence: Synthetic oligonucleotide
  Antisense strand to SEQ ID NO: 1542688
uggcaaacgcucauaaaga

SEQ ID NO: 1542690 - RNA, 19 nt, Artificial Sequence
  Description of Artificial Sequence: Synthetic oligonucleotide
  Sense strand starting at position 1522 of SEQ ID NO: 1245180
cuuuaugagcguuugccau

SEQ ID NO: 1542691 - RNA, 19 nt, Artificial Sequence
  Description of Artificial Sequence: Synthetic oligonucleotide
  Antisense strand to SEQ ID NO: 1542690
auggcaaacgcucauaaag

SEQ ID NO: 1542692 - RNA, 19 nt, Artificial Sequence
  Description of Artificial Sequence: Synthetic oligonucleotide
  Sense strand starting at position 1805 of SEQ ID NO: 1245180
ugucguacaucauuugauc

SEQ ID NO: 1542693 - RNA, 19 nt, Artificial Sequence
  Description of Artificial Sequence: Synthetic oligonucleotide
  Antisense strand to SEQ ID NO: 1542692
gaucaaaugauguacgaca

SEQ ID NO: 1542694 - RNA, 19 nt, Artificial Sequence
  Description of Artificial Sequence: Synthetic oligonucleotide
  Sense strand starting at position 1902 of SEQ ID NO: 1245180
agcuuucugcaagagaaga

SEQ ID NO: 1542695 - RNA, 19 nt, Artificial Sequence
  Description of Artificial Sequence: Synthetic oligonucleotide
  Antisense strand to SEQ ID NO: 1542694
ucuucucuugcagaaagcu

SEQ ID NO: 1542696 - RNA, 19 nt, Artificial Sequence
  Description of Artificial Sequence: Synthetic oligonucleotide
  Sense strand starting at position 1939 of SEQ ID NO: 1245180
gugacaaauuaugcuacca

SEQ ID NO: 1542697 - RNA, 19 nt, Artificial Sequence
  Description of Artificial Sequence: Synthetic oligonucleotide
  Antisense strand to SEQ ID NO: 1542696
ugguagcauaauuugucac

SEQ ID NO: 1542698 - RNA, 19 nt, Artificial Sequence
  Description of Artificial Sequence: Synthetic oligonucleotide
  Sense strand starting at position 2129 of SEQ ID NO: 1245180
aauugucgagcguaaauga

SEQ ID NO: 1542699 - RNA, 19 nt, Artificial Sequence
  Description of Artificial Sequence: Synthetic oligonucleotide
  Antisense strand to SEQ ID NO: 1542698
ucauuuacgcucgacaauu

SEQ ID NO: 1542700 - RNA, 19 nt, Artificial Sequence
  Description of Artificial Sequence: Synthetic oligonucleotide
  Sense strand starting at position 2139 of SEQ ID NO: 1245180
cguaaaugacugcgauuuc

SEQ ID NO: 1542701 - RNA, 19 nt, Artificial Sequence
  Description of Artificial Sequence: Synthetic oligonucleotide
  Antisense strand to SEQ ID NO: 1542700
gaaaucgcagucauuuacg

SEQ ID NO: 1542702 - RNA, 19 nt, Artificial Sequence
  Description of Artificial Sequence: Synthetic oligonucleotide
  Sense strand starting at position 2331 of SEQ ID NO: 1245180
cugcuaauuucugugacca

SEQ ID NO: 1542703 - RNA, 19 nt, Artificial Sequence
  Description of Artificial Sequence: Synthetic oligonucleotide
  Antisense strand to SEQ ID NO: 1542702
uggucacagaaauuagcag

SEQ ID NO: 1542704 - RNA, 19 nt, Artificial Sequence
  Description of Artificial Sequence: Synthetic oligonucleotide
  Sense strand starting at position 2359 of SEQ ID NO: 1245180
uuagcugugaucuggauga

SEQ ID NO: 1542705 - RNA, 19 nt, Artificial Sequence
  Description of Artificial Sequence: Synthetic oligonucleotide
  Antisense strand to SEQ ID NO: 1542704
ucauccagaucacagcuaa

SEQ ID NO: 1542706 - RNA, 19 nt, Artificial Sequence
  Description of Artificial Sequence: Synthetic oligonucleotide
  Sense strand starting at position 2361 of SEQ ID NO: 1245180
agcugugaucuggaugaau

SEQ ID NO: 1542707 - RNA, 19 nt, Artificial Sequence
  Description of Artificial Sequence: Synthetic oligonucleotide
  Antisense strand to SEQ ID NO: 1542706
auucauccagaucacagcu

SEQ ID NO: 1542708 - RNA, 19 nt, Artificial Sequence
  Description of Artificial Sequence: Synthetic oligonucleotide
  Sense strand starting at position 2363 of SEQ ID NO: 1245180
cugugaucuggaugaauga

SEQ ID NO: 1542709 - RNA, 19 nt, Artificial Sequence
  Description of Artificial Sequence: Synthetic oligonucleotide
  Antisense strand to SEQ ID NO: 1542708
ucauucauccagaucacag

SEQ ID NO: 1542710 - RNA, 19 nt, Artificial Sequence
  Description of Artificial Sequence: Synthetic oligonucleotide
  Sense strand starting at position 2384 of SEQ ID NO: 1245180
agcugucucacagagauga

SEQ ID NO: 1542711 - RNA, 19 nt, Artificial Sequence
  Description of Artificial Sequence: Synthetic oligonucleotide
  Antisense strand to SEQ ID NO: 1542710
ucaucucugugagacagcu

SEQ ID NO: 1542712 - RNA, 19 nt, Artificial Sequence
  Description of Artificial Sequence: Synthetic oligonucleotide
  Sense strand starting at position 2587 of SEQ ID NO: 1245180
agcacugugaaaugcagaa

SEQ ID NO: 1542713 - RNA, 19 nt, Artificial Sequence
  Description of Artificial Sequence: Synthetic oligonucleotide
  Antisense strand to SEQ ID NO: 1542712
uucugcauuucacagugcu

SEQ ID NO: 1542714 - RNA, 19 nt, Artificial Sequence
  Description of Artificial Sequence: Synthetic oligonucleotide
  Sense strand starting at position 2614 of SEQ ID NO: 1245180
aucucaaaguaugcuaaga

SEQ ID NO: 1542715 - RNA, 19 nt, Artificial Sequence
  Description of Artificial Sequence: Synthetic oligonucleotide
  Antisense strand to SEQ ID NO: 1542714
ucuuagcauacuuugagau

SEQ ID NO: 1542716 - RNA, 19 nt, Artificial Sequence
  Description of Artificial Sequence: Synthetic oligonucleotide
  Sense strand starting at position 2665 of SEQ ID NO: 1245180
ugggucuguccugaaagac

SEQ ID NO: 1542717 - RNA, 19 nt, Artificial Sequence
  Description of Artificial Sequence: Synthetic oligonucleotide
  Antisense strand to SEQ ID NO: 1542716
gucuuucaggacagaccca

SEQ ID NO: 1542718 - RNA, 19 nt, Artificial Sequence
  Description of Artificial Sequence: Synthetic oligonucleotide
  Sense strand starting at position 2701 of SEQ ID NO: 1245180
aggugaguggcugaggaua

SEQ ID NO: 1542719 - RNA, 19 nt, Artificial Sequence
  Description of Artificial Sequence: Synthetic oligonucleotide
  Antisense strand to SEQ ID NO: 1542718
uauccucagccacucaccu

SEQ ID NO: 1542720 - RNA, 19 nt, Artificial Sequence
  Description of Artificial Sequence: Synthetic oligonucleotide
  Sense strand starting at position 3082 of SEQ ID NO: 1245180
accacauagugcucacauu

SEQ ID NO: 1542721 - RNA, 19 nt, Artificial Sequence
  Description of Artificial Sequence: Synthetic oligonucleotide
  Antisense strand to SEQ ID NO: 1542720
aaugugagcacuauguggu

SEQ ID NO: 1542722 - RNA, 19 nt, Artificial Sequence
  Description of Artificial Sequence: Synthetic oligonucleotide
  Sense strand starting at position 3185 of SEQ ID NO: 1245180
aggacauguucuccagacu

SEQ ID NO: 1542723 - RNA, 19 nt, Artificial Sequence
  Description of Artificial Sequence: Synthetic oligonucleotide
  Antisense strand to SEQ ID NO: 1542722
agucuggagaacauguccu

SEQ ID NO: 1542724 - RNA, 19 nt, Artificial Sequence
  Description of Artificial Sequence: Synthetic oligonucleotide
  Sense strand starting at position 3186 of SEQ ID NO: 1245180
ggacauguucuccagacuu

SEQ ID NO: 1542725 - RNA, 19 nt, Artificial Sequence
  Description of Artificial Sequence: Synthetic oligonucleotide
  Antisense strand to SEQ ID NO: 1542724
aagucuggagaacaugucc

SEQ ID NO: 1542726 - RNA, 19 nt, Artificial Sequence
  Description of Artificial Sequence: Synthetic oligonucleotide
  Sense strand starting at position 3188 of SEQ ID NO: 1245180
acauguucuccagacuuau

SEQ ID NO: 1542727 - RNA, 19 nt, Artificial Sequence
  Description of Artificial Sequence: Synthetic oligonucleotide
  Antisense strand to SEQ ID NO: 1542726
auaagucuggagaacaugu

SEQ ID NO: 1542728 - RNA, 19 nt, Artificial Sequence
  Description of Artificial Sequence: Synthetic oligonucleotide
  Sense strand starting at position 3229 of SEQ ID NO: 1245180
uguuuauagcccugcauuu

SEQ ID NO: 1542729 - RNA, 19 nt, Artificial Sequence
  Description of Artificial Sequence: Synthetic oligonucleotide
  Antisense strand to SEQ ID NO: 1542728
aaaugcagggcuauaaaca

SEQ ID NO: 1542730 - RNA, 19 nt, Artificial Sequence
  Description of Artificial Sequence: Synthetic oligonucleotide
  Sense strand starting at position 3240 of SEQ ID NO: 1245180
cugcauuucgguugucaau

SEQ ID NO: 1542731 - RNA, 19 nt, Artificial Sequence
  Description of Artificial Sequence: Synthetic oligonucleotide
  Antisense strand to SEQ ID NO: 1542730
auugacaaccgaaaugcag

SEQ ID NO: 1542732 - RNA, 19 nt, Artificial Sequence
  Description of Artificial Sequence: Synthetic oligonucleotide
  Sense strand starting at position 3263 of SEQ ID NO: 1245180
guuggagguguccaagaaa

SEQ ID NO: 1542733 - RNA, 19 nt, Artificial Sequence
  Description of Artificial Sequence: Synthetic oligonucleotide
  Antisense strand to SEQ ID NO: 1542732
uuucuuggacaccuccaac

SEQ ID NO: 1542734 - RNA, 19 nt, Artificial Sequence
  Description of Artificial Sequence: Synthetic oligonucleotide
  Sense strand starting at position 3309 of SEQ ID NO: 1245180
aagguaugcccuugaguaa

SEQ ID NO: 1542735 - RNA, 19 nt, Artificial Sequence
  Description of Artificial Sequence: Synthetic oligonucleotide
  Antisense strand to SEQ ID NO: 1542734
uuacucaagggcauaccuu

SEQ ID NO: 1542736 - RNA, 19 nt, Artificial Sequence
  Description of Artificial Sequence: Synthetic oligonucleotide
  Sense strand starting at position 3310 of SEQ ID NO: 1245180
agguaugcccuugaguaaa

SEQ ID NO: 1542737 - RNA, 19 nt, Artificial Sequence
  Description of Artificial Sequence: Synthetic oligonucleotide
  Antisense strand to SEQ ID NO: 1542736
uuuacucaagggcauaccu

SEQ ID NO: 1542738 - RNA, 19 nt, Artificial Sequence
  Description of Artificial Sequence: Synthetic oligonucleotide
  Sense strand starting at position 3353 of SEQ ID NO: 1245180
gaacuaaauugagcuuugu

SEQ ID NO: 1542739 - RNA, 19 nt, Artificial Sequence
  Description of Artificial Sequence: Synthetic oligonucleotide
  Antisense strand to SEQ ID NO: 1542738
acaaagcucaauuuaguuc

SEQ ID NO: 1542740 - RNA, 19 nt, Artificial Sequence
  Description of Artificial Sequence: Synthetic oligonucleotide
  Sense strand starting at position 3405 of SEQ ID NO: 1245180
auuuauaugugcucugauu

SEQ ID NO: 1542741 - RNA, 19 nt, Artificial Sequence
  Description of Artificial Sequence: Synthetic oligonucleotide
  Antisense strand to SEQ ID NO: 1542740
aaucagagcacauauaaau

SEQ ID NO: 1542742 - RNA, 19 nt, Artificial Sequence
  Description of Artificial Sequence: Synthetic oligonucleotide
  Sense strand starting at position 3411 of SEQ ID NO: 1245180
augugcucugauuaguaaa

SEQ ID NO: 1542743 - RNA, 19 nt, Artificial Sequence
  Description of Artificial Sequence: Synthetic oligonucleotide
  Antisense strand to SEQ ID NO: 1542742
uuuacuaaucagagcacau

SEQ ID NO: 1542744 - RNA, 19 nt, Artificial Sequence
  Description of Artificial Sequence: Synthetic oligonucleotide
  Sense strand starting at position 3451 of SEQ ID NO: 1245180
gcaccauugcaagacaucu

SEQ ID NO: 1542745 - RNA, 19 nt, Artificial Sequence
  Description of Artificial Sequence: Synthetic oligonucleotide
  Antisense strand to SEQ ID NO: 1542744
agaugucuugcaauggugc

SEQ ID NO: 1542746 - RNA, 19 nt, Artificial Sequence
  Description of Artificial Sequence: Synthetic oligonucleotide
  Sense strand starting at position 3687 of SEQ ID NO: 1245180
gguucuagauuaucugaga

SEQ ID NO: 1542747 - RNA, 19 nt, Artificial Sequence
  Description of Artificial Sequence: Synthetic oligonucleotide
  Antisense strand to SEQ ID NO: 1542746
ucucagauaaucuagaacc

SEQ ID NO: 1542748 - RNA, 19 nt, Artificial Sequence
  Description of Artificial Sequence: Synthetic oligonucleotide
  Sense strand starting at position 3688 of SEQ ID NO: 1245180
guucuagauuaucugagag

SEQ ID NO: 1542749 - RNA, 19 nt, Artificial Sequence
  Description of Artificial Sequence: Synthetic oligonucleotide
  Antisense strand to SEQ ID NO: 1542748
cucucagauaaucuagaac

SEQ ID NO: 1542750 - RNA, 19 nt, Artificial Sequence
  Description of Artificial Sequence: Synthetic oligonucleotide
  Sense strand starting at position 3741 of SEQ ID NO: 1245180
gcauucucauauuuauguu

SEQ ID NO: 1542751 - RNA, 19 nt, Artificial Sequence
  Description of Artificial Sequence: Synthetic oligonucleotide
  Antisense strand to SEQ ID NO: 1542750
aacauaaauaugagaaugc

SEQ ID NO: 1542752 - RNA, 19 nt, Artificial Sequence
  Description of Artificial Sequence: Synthetic oligonucleotide
  Sense strand starting at position 3908 of SEQ ID NO: 1245180
ggguguugaacaggaagau

SEQ ID NO: 1542753 - RNA, 19 nt, Artificial Sequence
  Description of Artificial Sequence: Synthetic oligonucleotide
  Antisense strand to SEQ ID NO: 1542752
aucuuccuguucaacaccc

SEQ ID NO: 1542754 - RNA, 19 nt, Artificial Sequence
  Description of Artificial Sequence: Synthetic oligonucleotide
  Sense strand starting at position 353 of SEQ ID NO: 1245181
agugcuaagugauucugca

SEQ ID NO: 1542755 - RNA, 19 nt, Artificial Sequence
  Description of Artificial Sequence: Synthetic oligonucleotide
  Antisense strand to SEQ ID NO: 1542754
ugcagaaucacuuagcacu

SEQ ID NO: 1542756 - RNA, 19 nt, Artificial Sequence
  Description of Artificial Sequence: Synthetic oligonucleotide
  Sense strand starting at position 357 of SEQ ID NO: 1245181
cuaagugauucugcaguca

SEQ ID NO: 1542757 - RNA, 19 nt, Artificial Sequence
  Description of Artificial Sequence: Synthetic oligonucleotide
  Antisense strand to SEQ ID NO: 1542756
ugacugcagaaucacuuag

SEQ ID NO: 1542758 - RNA, 19 nt, Artificial Sequence
  Description of Artificial Sequence: Synthetic oligonucleotide
  Sense strand starting at position 476 of SEQ ID NO: 1245181
aagucaguguagucgaauc

SEQ ID NO: 1542759 - RNA, 19 nt, Artificial Sequence
  Description of Artificial Sequence: Synthetic oligonucleotide
  Antisense strand to SEQ ID NO: 1542758
gauucgacuacacugacuu

SEQ ID NO: 1542760 - RNA, 19 nt, Artificial Sequence
  Description of Artificial Sequence: Synthetic oligonucleotide
  Sense strand starting at position 478 of SEQ ID NO: 1245181
gucaguguagucgaaucca

SEQ ID NO: 1542761 - RNA, 19 nt, Artificial Sequence
  Description of Artificial Sequence: Synthetic oligonucleotide
  Antisense strand to SEQ ID NO: 1542760
uggauucgacuacacugac

SEQ ID NO: 1542762 - RNA, 19 nt, Artificial Sequence
  Description of Artificial Sequence: Synthetic oligonucleotide
  Sense strand starting at position 540 of SEQ ID NO: 1245181
cguuucuccuaauucugua

SEQ ID NO: 1542763 - RNA, 19 nt, Artificial Sequence
  Description of Artificial Sequence: Synthetic oligonucleotide
  Antisense strand to SEQ ID NO: 1542762
uacagaauuaggagaaacg

SEQ ID NO: 1542764 - RNA, 19 nt, Artificial Sequence
  Description of Artificial Sequence: Synthetic oligonucleotide
  Sense strand starting at position 544 of SEQ ID NO: 1245181
ucuccuaauucuguaguaa

SEQ ID NO: 1542765 - RNA, 19 nt, Artificial Sequence
  Description of Artificial Sequence: Synthetic oligonucleotide
  Antisense strand to SEQ ID NO: 1542764
uuacuacagaauuaggaga

SEQ ID NO: 1542766 - RNA, 19 nt, Artificial Sequence
  Description of Artificial Sequence: Synthetic oligonucleotide
  Sense strand starting at position 545 of SEQ ID NO: 1245181
cuccuaauucuguaguaau

SEQ ID NO: 1542767 - RNA, 19 nt, Artificial Sequence
  Description of Artificial Sequence: Synthetic oligonucleotide
  Antisense strand to SEQ ID NO: 1542766
auuacuacagaauuaggag

SEQ ID NO: 1542768 - RNA, 19 nt, Artificial Sequence
  Description of Artificial Sequence: Synthetic oligonucleotide
  Sense strand starting at position 628 of SEQ ID NO: 1245181
accuguuugucaccuuaac

SEQ ID NO: 1542769 - RNA, 19 nt, Artificial Sequence
  Description of Artificial Sequence: Synthetic oligonucleotide
  Antisense strand to SEQ ID NO: 1542768
guuaaggugacaaacaggu

SEQ ID NO: 1542770 - RNA, 19 nt, Artificial Sequence
  Description of Artificial Sequence: Synthetic oligonucleotide
  Sense strand starting at position 817 of SEQ ID NO: 1245181
gcgagucuucagcauggga

SEQ ID NO: 1542771 - RNA, 19 nt, Artificial Sequence
  Description of Artificial Sequence: Synthetic oligonucleotide
  Antisense strand to SEQ ID NO: 1542770
ucccaugcugaagacucgc

SEQ ID NO: 1542772 - RNA, 19 nt, Artificial Sequence
  Description of Artificial Sequence: Synthetic oligonucleotide
  Sense strand starting at position 864 of SEQ ID NO: 1245181
gccuuccucugacuguuaa

SEQ ID NO: 1542773 - RNA, 19 nt, Artificial Sequence
  Description of Artificial Sequence: Synthetic oligonucleotide
  Antisense strand to SEQ ID NO: 1542772
uuaacagucagaggaaggc

SEQ ID NO: 1542774 - RNA, 19 nt, Artificial Sequence
  Description of Artificial Sequence: Synthetic oligonucleotide
  Sense strand starting at position 965 of SEQ ID NO: 1245181
ccucuaaaggcauauguaa

SEQ ID NO: 1542775 - RNA, 19 nt, Artificial Sequence
  Description of Artificial Sequence: Synthetic oligonucleotide
  Antisense strand to SEQ ID NO: 1542774
uuacauaugccuuuagagg

SEQ ID NO: 1542776 - RNA, 19 nt, Artificial Sequence
  Description of Artificial Sequence: Synthetic oligonucleotide
  Sense strand starting at position 972 of SEQ ID NO: 1245181
aggcauauguaagauaaag

SEQ ID NO: 1542777 - RNA, 19 nt, Artificial Sequence
  Description of Artificial Sequence: Synthetic oligonucleotide
  Antisense strand to SEQ ID NO: 1542776
cuuuaucuuacauaugccu

SEQ ID NO: 1542778 - RNA, 19 nt, Artificial Sequence
  Description of Artificial Sequence: Synthetic oligonucleotide
  Sense strand starting at position 2201 of SEQ ID NO: 1245181
cuguauucguucccuggga

SEQ ID NO: 1542779 - RNA, 19 nt, Artificial Sequence
  Description of Artificial Sequence: Synthetic oligonucleotide
  Antisense strand to SEQ ID NO: 1542778
ucccagggaacgaauacag

SEQ ID NO: 1542780 - RNA, 19 nt, Artificial Sequence
  Description of Artificial Sequence: Synthetic oligonucleotide
  Sense strand starting at position 2202 of SEQ ID NO: 1245181
uguauucguucccugggaa

SEQ ID NO: 1542781 - RNA, 19 nt, Artificial Sequence
  Description of Artificial Sequence: Synthetic oligonucleotide
  Antisense strand to SEQ ID NO: 1542780
uucccagggaacgaauaca

SEQ ID NO: 1542782 - RNA, 19 nt, Artificial Sequence
  Description of Artificial Sequence: Synthetic oligonucleotide
  Sense strand starting at position 2203 of SEQ ID NO: 1245181
guauucguucccugggaag

SEQ ID NO: 1542783 - RNA, 19 nt, Artificial Sequence
  Description of Artificial Sequence: Synthetic oligonucleotide
  Antisense strand to SEQ ID NO: 1542782
cuucccagggaacgaauac

SEQ ID NO: 1542784 - RNA, 19 nt, Artificial Sequence
  Description of Artificial Sequence: Synthetic oligonucleotide
  Sense strand starting at position 2205 of SEQ ID NO: 1245181
auucguucccugggaagga

SEQ ID NO: 1542785 - RNA, 19 nt, Artificial Sequence
  Description of Artificial Sequence: Synthetic oligonucleotide
  Antisense strand to SEQ ID NO: 1542784
uccuucccagggaacgaau

SEQ ID NO: 1542786 - RNA, 19 nt, Artificial Sequence
  Description of Artificial Sequence: Synthetic oligonucleotide
  Sense strand starting at position 2423 of SEQ ID NO: 1245181
cgaguaccuggauaccauu

SEQ ID NO: 1542787 - RNA, 19 nt, Artificial Sequence
  Description of Artificial Sequence: Synthetic oligonucleotide
  Antisense strand to SEQ ID NO: 1542786
aaugguauccagguacucg

SEQ ID NO: 1542788 - RNA, 19 nt, Artificial Sequence
  Description of Artificial Sequence: Synthetic oligonucleotide
  Sense strand starting at position 2452 of SEQ ID NO: 1245181
agaauacucuuuccaagug

SEQ ID NO: 1542789 - RNA, 19 nt, Artificial Sequence
  Description of Artificial Sequence: Synthetic oligonucleotide
  Antisense strand to SEQ ID NO: 1542788
cacuuggaaagaguauucu

SEQ ID NO: 1542790 - RNA, 19 nt, Artificial Sequence
  Description of Artificial Sequence: Synthetic oligonucleotide
  Sense strand starting at position 2480 of SEQ ID NO: 1245181
guuuacugacccuguucua

SEQ ID NO: 1542791 - RNA, 19 nt, Artificial Sequence
  Description of Artificial Sequence: Synthetic oligonucleotide
  Antisense strand to SEQ ID NO: 1542790
uagaacagggucaguaaac

SEQ ID NO: 1542792 - RNA, 19 nt, Artificial Sequence
  Description of Artificial Sequence: Synthetic oligonucleotide
  Sense strand starting at position 2492 of SEQ ID NO: 1245181
uguucuaacugcuuggaau

SEQ ID NO: 1542793 - RNA, 19 nt, Artificial Sequence
  Description of Artificial Sequence: Synthetic oligonucleotide
  Antisense strand to SEQ ID NO: 1542792
auuccaagcaguuagaaca

SEQ ID NO: 1542794 - RNA, 19 nt, Artificial Sequence
  Description of Artificial Sequence: Synthetic oligonucleotide
  Sense strand starting at position 2493 of SEQ ID NO: 1245181
guucuaacugcuuggaauu

SEQ ID NO: 1542795 - RNA, 19 nt, Artificial Sequence
  Description of Artificial Sequence: Synthetic oligonucleotide
  Antisense strand to SEQ ID NO: 1542794
aauuccaagcaguuagaac

SEQ ID NO: 1542796 - RNA, 19 nt, Artificial Sequence
  Description of Artificial Sequence: Synthetic oligonucleotide
  Sense strand starting at position 2600 of SEQ ID NO: 1245181
ccaguuugggaggacugua

SEQ ID NO: 1542797 - RNA, 19 nt, Artificial Sequence
  Description of Artificial Sequence: Synthetic oligonucleotide
  Antisense strand to SEQ ID NO: 1542796
uacaguccucccaaacugg

SEQ ID NO: 1542798 - RNA, 19 nt, Artificial Sequence
  Description of Artificial Sequence: Synthetic oligonucleotide
  Sense strand starting at position 2608 of SEQ ID NO: 1245181
ggaggacuguauuaaauca

SEQ ID NO: 1542799 - RNA, 19 nt, Artificial Sequence
  Description of Artificial Sequence: Synthetic oligonucleotide
  Antisense strand to SEQ ID NO: 1542798
ugauuuaauacaguccucc

SEQ ID NO: 1542800 - RNA, 19 nt, Artificial Sequence
  Description of Artificial Sequence: Synthetic oligonucleotide
  Sense strand starting at position 2649 of SEQ ID NO: 1245181
gguagcugauaauugaaga

SEQ ID NO: 1542801 - RNA, 19 nt, Artificial Sequence
  Description of Artificial Sequence: Synthetic oligonucleotide
  Antisense strand to SEQ ID NO: 1542800
ucuucaauuaucagcuacc

SEQ ID NO: 1542802 - RNA, 19 nt, Artificial Sequence
  Description of Artificial Sequence: Synthetic oligonucleotide
  Sense strand starting at position 2662 of SEQ ID NO: 1245181
ugaagacuauauguuguga

SEQ ID NO: 1542803 - RNA, 19 nt, Artificial Sequence
  Description of Artificial Sequence: Synthetic oligonucleotide
  Antisense strand to SEQ ID NO: 1542802
ucacaacauauagucuuca

SEQ ID NO: 1542804 - RNA, 19 nt, Artificial Sequence
  Description of Artificial Sequence: Synthetic oligonucleotide
  Sense strand starting at position 2715 of SEQ ID NO: 1245181
guguauaaacccuaguaug

SEQ ID NO: 1542805 - RNA, 19 nt, Artificial Sequence
  Description of Artificial Sequence: Synthetic oligonucleotide
  Antisense strand to SEQ ID NO: 1542804
cauacuaggguuuauacac

SEQ ID NO: 1542806 - RNA, 19 nt, Artificial Sequence
  Description of Artificial Sequence: Synthetic oligonucleotide
  Sense strand starting at position 2890 of SEQ ID NO: 1245181
gagacugggcauuguugaa

SEQ ID NO: 1542807 - RNA, 19 nt, Artificial Sequence
  Description of Artificial Sequence: Synthetic oligonucleotide
  Antisense strand to SEQ ID NO: 1542806
uucaacaaugcccagucuc

SEQ ID NO: 1542808 - RNA, 19 nt, Artificial Sequence
  Description of Artificial Sequence: Synthetic oligonucleotide
  Sense strand starting at position 2894 of SEQ ID NO: 1245181
cugggcauuguugaaacau

SEQ ID NO: 1542809 - RNA, 19 nt, Artificial Sequence
  Description of Artificial Sequence: Synthetic oligonucleotide
  Antisense strand to SEQ ID NO: 1542808
auguuucaacaaugcccag

SEQ ID NO: 1542810 - RNA, 19 nt, Artificial Sequence
  Description of Artificial Sequence: Synthetic oligonucleotide
  Sense strand starting at position 2911 of SEQ ID NO: 1245181
auaauuucguguccuuacu

SEQ ID NO: 1542811 - RNA, 19 nt, Artificial Sequence
  Description of Artificial Sequence: Synthetic oligonucleotide
  Antisense strand to SEQ ID NO: 1542810
aguaaggacacgaaauuau

SEQ ID NO: 1542812 - RNA, 19 nt, Artificial Sequence
  Description of Artificial Sequence: Synthetic oligonucleotide
  Sense strand starting at position 2913 of SEQ ID NO: 1245181
aauuucguguccuuacuga

SEQ ID NO: 1542813 - RNA, 19 nt, Artificial Sequence
  Description of Artificial Sequence: Synthetic oligonucleotide
  Antisense strand to SEQ ID NO: 1542812
ucaguaaggacacgaaauu

SEQ ID NO: 1542814 - RNA, 19 nt, Artificial Sequence
  Description of Artificial Sequence: Synthetic oligonucleotide
  Sense strand starting at position 3014 of SEQ ID NO: 1245181
auuuguguucugugcucua

SEQ ID NO: 1542815 - RNA, 19 nt, Artificial Sequence
  Description of Artificial Sequence: Synthetic oligonucleotide
  Antisense strand to SEQ ID NO: 1542814
uagagcacagaacacaaau

SEQ ID NO: 1542816 - RNA, 19 nt, Artificial Sequence
  Description of Artificial Sequence: Synthetic oligonucleotide
  Sense strand starting at position 3018 of SEQ ID NO: 1245181
guguucugugcucuaguca

SEQ ID NO: 1542817 - RNA, 19 nt, Artificial Sequence
  Description of Artificial Sequence: Synthetic oligonucleotide
  Antisense strand to SEQ ID NO: 1542816
ugacuagagcacagaacac

SEQ ID NO: 1542818 - RNA, 19 nt, Artificial Sequence
  Description of Artificial Sequence: Synthetic oligonucleotide
  Sense strand starting at position 3021 of SEQ ID NO: 1245181
uucugugcucuagucaguu

SEQ ID NO: 1542819 - RNA, 19 nt, Artificial Sequence
  Description of Artificial Sequence: Synthetic oligonucleotide
  Antisense strand to SEQ ID NO: 1542818
aacugacuagagcacagaa

SEQ ID NO: 1542820 - RNA, 19 nt, Artificial Sequence
  Description of Artificial Sequence: Synthetic oligonucleotide
  Sense strand starting at position 3023 of SEQ ID NO: 1245181
cugugcucuagucaguuaa

SEQ ID NO: 1542821 - RNA, 19 nt, Artificial Sequence
  Description of Artificial Sequence: Synthetic oligonucleotide
  Antisense strand to SEQ ID NO: 1542820
uuaacugacuagagcacag

SEQ ID NO: 1542822 - RNA, 19 nt, Artificial Sequence
  Description of Artificial Sequence: Synthetic oligonucleotide
  Sense strand starting at position 3025 of SEQ ID NO: 1245181
gugcucuagucaguuaaga

SEQ ID NO: 1542823 - RNA, 19 nt, Artificial Sequence
  Description of Artificial Sequence: Synthetic oligonucleotide
  Antisense strand to SEQ ID NO: 1542822
ucuuaacugacuagagcac

SEQ ID NO: 1542824 - RNA, 19 nt, Artificial Sequence
  Description of Artificial Sequence: Synthetic oligonucleotide
  Sense strand starting at position 3271 of SEQ ID NO: 1245181
gcuccagugagcugagaua

SEQ ID NO: 1542825 - RNA, 19 nt, Artificial Sequence
  Description of Artificial Sequence: Synthetic oligonucleotide
  Antisense strand to SEQ ID NO: 1542824
uaucucagcucacuggagc

SEQ ID NO: 1542826 - RNA, 19 nt, Artificial Sequence
  Description of Artificial Sequence: Synthetic oligonucleotide
  Sense strand starting at position 3489 of SEQ ID NO: 1245181
guugcauuacugugacaau

SEQ ID NO: 1542827 - RNA, 19 nt, Artificial Sequence
  Description of Artificial Sequence: Synthetic oligonucleotide
  Antisense strand to SEQ ID NO: 1542826
auugucacaguaaugcaac

SEQ ID NO: 1542828 - RNA, 19 nt, Artificial Sequence
  Description of Artificial Sequence: Synthetic oligonucleotide
  Sense strand starting at position 3672 of SEQ ID NO: 1245181
caguccaucccagagguau

SEQ ID NO: 1542829 - RNA, 19 nt, Artificial Sequence
  Description of Artificial Sequence: Synthetic oligonucleotide
  Antisense strand to SEQ ID NO: 1542828
auaccucugggauggacug

SEQ ID NO: 1542830 - RNA, 19 nt, Artificial Sequence
  Description of Artificial Sequence: Synthetic oligonucleotide
  Sense strand starting at position 3702 of SEQ ID NO: 1245181
uggagauucuagguauuag

SEQ ID NO: 1542831 - RNA, 19 nt, Artificial Sequence
  Description of Artificial Sequence: Synthetic oligonucleotide
  Antisense strand to SEQ ID NO: 1542830
cuaauaccuagaaucucca

SEQ ID NO: 1542832 - RNA, 19 nt, Artificial Sequence
  Description of Artificial Sequence: Synthetic oligonucleotide
  Sense strand starting at position 3703 of SEQ ID NO: 1245181
ggagauucuagguauuagu

SEQ ID NO: 1542833 - RNA, 19 nt, Artificial Sequence
  Description of Artificial Sequence: Synthetic oligonucleotide
  Antisense strand to SEQ ID NO: 1542832
acuaauaccuagaaucucc

SEQ ID NO: 1542834 - RNA, 19 nt, Artificial Sequence
  Description of Artificial Sequence: Synthetic oligonucleotide
  Sense strand starting at position 239 of SEQ ID NO: 1245182
gggaaugcgauaugaaaca

SEQ ID NO: 1542835 - RNA, 19 nt, Artificial Sequence
  Description of Artificial Sequence: Synthetic oligonucleotide
  Antisense strand to SEQ ID NO: 1542834
uguuucauaucgcauuccc

SEQ ID NO: 1542836 - RNA, 19 nt, Artificial Sequence
  Description of Artificial Sequence: Synthetic oligonucleotide
  Sense strand starting at position 392 of SEQ ID NO: 1245182
aggccaucuccucagucua

SEQ ID NO: 1542837 - RNA, 19 nt, Artificial Sequence
  Description of Artificial Sequence: Synthetic oligonucleotide
  Antisense strand to SEQ ID NO: 1542836
uagacugaggagauggccu

SEQ ID NO: 1542838 - RNA, 19 nt, Artificial Sequence
  Description of Artificial Sequence: Synthetic oligonucleotide
  Sense strand starting at position 443 of SEQ ID NO: 1245182
gcaagcugcucuuucucua

SEQ ID NO: 1542839 - RNA, 19 nt, Artificial Sequence
  Description of Artificial Sequence: Synthetic oligonucleotide
  Antisense strand to SEQ ID NO: 1542838
uagagaaagagcagcuugc

SEQ ID NO: 1542840 - RNA, 19 nt, Artificial Sequence
  Description of Artificial Sequence: Synthetic oligonucleotide
  Sense strand starting at position 455 of SEQ ID NO: 1245182
uucucuacccugugggaaa

SEQ ID NO: 1542841 - RNA, 19 nt, Artificial Sequence
  Description of Artificial Sequence: Synthetic oligonucleotide
  Antisense strand to SEQ ID NO: 1542840
uuucccacaggguagagaa

SEQ ID NO: 1542842 - RNA, 19 nt, Artificial Sequence
  Description of Artificial Sequence: Synthetic oligonucleotide
  Sense strand starting at position 517 of SEQ ID NO: 1245182
cucgcaauccuuuaaggcu

SEQ ID NO: 1542843 - RNA, 19 nt, Artificial Sequence
  Description of Artificial Sequence: Synthetic oligonucleotide
  Antisense strand to SEQ ID NO: 1542842
agccuuaaaggauugcgag

SEQ ID NO: 1542844 - RNA, 19 nt, Artificial Sequence
  Description of Artificial Sequence: Synthetic oligonucleotide
  Sense strand starting at position 556 of SEQ ID NO: 1245182
ccuuucuucuggcugauaa

SEQ ID NO: 1542845 - RNA, 19 nt, Artificial Sequence
  Description of Artificial Sequence: Synthetic oligonucleotide
  Antisense strand to SEQ ID NO: 1542844
uuaucagccagaagaaagg

SEQ ID NO: 1542846 - RNA, 19 nt, Artificial Sequence
  Description of Artificial Sequence: Synthetic oligonucleotide
  Sense strand starting at position 557 of SEQ ID NO: 1245182
cuuucuucuggcugauaac

SEQ ID NO: 1542847 - RNA, 19 nt, Artificial Sequence
  Description of Artificial Sequence: Synthetic oligonucleotide
  Antisense strand to SEQ ID NO: 1542846
guuaucagccagaagaaag

SEQ ID NO: 1542848 - RNA, 19 nt, Artificial Sequence
  Description of Artificial Sequence: Synthetic oligonucleotide
  Sense strand starting at position 558 of SEQ ID NO: 1245182
uuucuucuggcugauaacu

SEQ ID NO: 1542849 - RNA, 19 nt, Artificial Sequence
  Description of Artificial Sequence: Synthetic oligonucleotide
  Antisense strand to SEQ ID NO: 1542848
aguuaucagccagaagaaa

SEQ ID NO: 1542850 - RNA, 19 nt, Artificial Sequence
  Description of Artificial Sequence: Synthetic oligonucleotide
  Sense strand starting at position 566 of SEQ ID NO: 1245182
ggcugauaacuauguaaau

SEQ ID NO: 1542851 - RNA, 19 nt, Artificial Sequence
  Description of Artificial Sequence: Synthetic oligonucleotide
  Antisense strand to SEQ ID NO: 1542850
auuuacauaguuaucagcc

SEQ ID NO: 1542852 - RNA, 19 nt, Artificial Sequence
  Description of Artificial Sequence: Synthetic oligonucleotide
  Sense strand starting at position 567 of SEQ ID NO: 1245182
gcugauaacuauguaaauu

SEQ ID NO: 1542853 - RNA, 19 nt, Artificial Sequence
  Description of Artificial Sequence: Synthetic oligonucleotide
  Antisense strand to SEQ ID NO: 1542852
aauuuacauaguuaucagc

SEQ ID NO: 1542854 - RNA, 19 nt, Artificial Sequence
  Description of Artificial Sequence: Synthetic oligonucleotide
  Sense strand starting at position 680 of SEQ ID NO: 1245182
ugaaugagauggucgcguu

SEQ ID NO: 1542855 - RNA, 19 nt, Artificial Sequence
  Description of Artificial Sequence: Synthetic oligonucleotide
  Antisense strand to SEQ ID NO: 1542854
aacgcgaccaucucauuca

SEQ ID NO: 1542856 - RNA, 19 nt, Artificial Sequence
  Description of Artificial Sequence: Synthetic oligonucleotide
  Sense strand starting at position 681 of SEQ ID NO: 1245182
gaaugagauggucgcguuu

SEQ ID NO: 1542857 - RNA, 19 nt, Artificial Sequence
  Description of Artificial Sequence: Synthetic oligonucleotide
  Antisense strand to SEQ ID NO: 1542856
aaacgcgaccaucucauuc

SEQ ID NO: 1542858 - RNA, 19 nt, Artificial Sequence
  Description of Artificial Sequence: Synthetic oligonucleotide
  Sense strand starting at position 756 of SEQ ID NO: 1245182
gcaaauuccgcccacuacu

SEQ ID NO: 1542859 - RNA, 19 nt, Artificial Sequence
  Description of Artificial Sequence: Synthetic oligonucleotide
  Antisense strand to SEQ ID NO: 1542858
aguagugggcggaauuugc

SEQ ID NO: 1542860 - RNA, 19 nt, Artificial Sequence
  Description of Artificial Sequence: Synthetic oligonucleotide
  Sense strand starting at position 798 of SEQ ID NO: 1245182
gaaguuuauauucguggga

SEQ ID NO: 1542861 - RNA, 19 nt, Artificial Sequence
  Description of Artificial Sequence: Synthetic oligonucleotide
  Antisense strand to SEQ ID NO: 1542860
ucccacgaauauaaacuuc

SEQ ID NO: 1542862 - RNA, 19 nt, Artificial Sequence
  Description of Artificial Sequence: Synthetic oligonucleotide
  Sense strand starting at position 799 of SEQ ID NO: 1245182
aaguuuauauucgugggaa

SEQ ID NO: 1542863 - RNA, 19 nt, Artificial Sequence
  Description of Artificial Sequence: Synthetic oligonucleotide
  Antisense strand to SEQ ID NO: 1542862
uucccacgaauauaaacuu

SEQ ID NO: 1542864 - RNA, 19 nt, Artificial Sequence
  Description of Artificial Sequence: Synthetic oligonucleotide
  Sense strand starting at position 801 of SEQ ID NO: 1245182
guuuauauucgugggaaua

SEQ ID NO: 1542865 - RNA, 19 nt, Artificial Sequence
  Description of Artificial Sequence: Synthetic oligonucleotide
  Antisense strand to SEQ ID NO: 1542864
uauucccacgaauauaaac

SEQ ID NO: 1542866 - RNA, 19 nt, Artificial Sequence
  Description of Artificial Sequence: Synthetic oligonucleotide
  Sense strand starting at position 802 of SEQ ID NO: 1245182
uuuauauucgugggaauac

SEQ ID NO: 1542867 - RNA, 19 nt, Artificial Sequence
  Description of Artificial Sequence: Synthetic oligonucleotide
  Antisense strand to SEQ ID NO: 1542866
guauucccacgaauauaaa

SEQ ID NO: 1542868 - RNA, 19 nt, Artificial Sequence
  Description of Artificial Sequence: Synthetic oligonucleotide
  Sense strand starting at position 827 of SEQ ID NO: 1245182
ugucaugugcugcauacau

SEQ ID NO: 1542869 - RNA, 19 nt, Artificial Sequence
  Description of Artificial Sequence: Synthetic oligonucleotide
  Antisense strand to SEQ ID NO: 1542868
auguaugcagcacaugaca

SEQ ID NO: 1542870 - RNA, 19 nt, Artificial Sequence
  Description of Artificial Sequence: Synthetic oligonucleotide
  Sense strand starting at position 829 of SEQ ID NO: 1245182
ucaugugcugcauacauua

SEQ ID NO: 1542871 - RNA, 19 nt, Artificial Sequence
  Description of Artificial Sequence: Synthetic oligonucleotide
  Antisense strand to SEQ ID NO: 1542870
uaauguaugcagcacauga

SEQ ID NO: 1542872 - RNA, 19 nt, Artificial Sequence
  Description of Artificial Sequence: Synthetic oligonucleotide
  Sense strand starting at position 2477 of SEQ ID NO: 1245182
cccgacuuuguuugccuaa

SEQ ID NO: 1542873 - RNA, 19 nt, Artificial Sequence
  Description of Artificial Sequence: Synthetic oligonucleotide
  Antisense strand to SEQ ID NO: 1542872
uuaggcaaacaaagucggg

SEQ ID NO: 1542874 - RNA, 19 nt, Artificial Sequence
  Description of Artificial Sequence: Synthetic oligonucleotide
  Sense strand starting at position 2478 of SEQ ID NO: 1245182
ccgacuuuguuugccuaaa

SEQ ID NO: 1542875 - RNA, 19 nt, Artificial Sequence
  Description of Artificial Sequence: Synthetic oligonucleotide
  Antisense strand to SEQ ID NO: 1542874
uuuaggcaaacaaagucgg

SEQ ID NO: 1542876 - RNA, 19 nt, Artificial Sequence
  Description of Artificial Sequence: Synthetic oligonucleotide
  Sense strand starting at position 2502 of SEQ ID NO: 1245182
caaggucacuuggacuuaa

SEQ ID NO: 1542877 - RNA, 19 nt, Artificial Sequence
  Description of Artificial Sequence: Synthetic oligonucleotide
  Antisense strand to SEQ ID NO: 1542876
uuaaguccaagugaccuug

SEQ ID NO: 1542878 - RNA, 19 nt, Artificial Sequence
  Description of Artificial Sequence: Synthetic oligonucleotide
  Sense strand starting at position 2536 of SEQ ID NO: 1245182
acccuuacugcuggagaga

SEQ ID NO: 1542879 - RNA, 19 nt, Artificial Sequence
  Description of Artificial Sequence: Synthetic oligonucleotide
  Antisense strand to SEQ ID NO: 1542878
ucucuccagcaguaagggu

SEQ ID NO: 1542880 - RNA, 19 nt, Artificial Sequence
  Description of Artificial Sequence: Synthetic oligonucleotide
  Sense strand starting at position 3031 of SEQ ID NO: 1245182
gggacaauaucucauuauc

SEQ ID NO: 1542881 - RNA, 19 nt, Artificial Sequence
  Description of Artificial Sequence: Synthetic oligonucleotide
  Antisense strand to SEQ ID NO: 1542880
gauaaugagauauuguccc

SEQ ID NO: 1542882 - RNA, 19 nt, Artificial Sequence
  Description of Artificial Sequence: Synthetic oligonucleotide
  Sense strand starting at position 3114 of SEQ ID NO: 1245182
gugaaucuauuugacaacu

SEQ ID NO: 1542883 - RNA, 19 nt, Artificial Sequence
  Description of Artificial Sequence: Synthetic oligonucleotide
  Antisense strand to SEQ ID NO: 1542882
aguugucaaauagauucac

SEQ ID NO: 1542884 - RNA, 19 nt, Artificial Sequence
  Description of Artificial Sequence: Synthetic oligonucleotide
  Sense strand starting at position 3176 of SEQ ID NO: 1245182
gugaguagaacuuaguuau

SEQ ID NO: 1542885 - RNA, 19 nt, Artificial Sequence
  Description of Artificial Sequence: Synthetic oligonucleotide
  Antisense strand to SEQ ID NO: 1542884
auaacuaaguucuacucac

SEQ ID NO: 1542886 - RNA, 19 nt, Artificial Sequence
  Description of Artificial Sequence: Synthetic oligonucleotide
  Sense strand starting at position 3180 of SEQ ID NO: 1245182
guagaacuuaguuauagua

SEQ ID NO: 1542887 - RNA, 19 nt, Artificial Sequence
  Description of Artificial Sequence: Synthetic oligonucleotide
  Antisense strand to SEQ ID NO: 1542886
uacuauaacuaaguucuac

SEQ ID NO: 1542888 - RNA, 19 nt, Artificial Sequence
  Description of Artificial Sequence: Synthetic oligonucleotide
  Sense strand starting at position 3182 of SEQ ID NO: 1245182
agaacuuaguuauaguacu

SEQ ID NO: 1542889 - RNA, 19 nt, Artificial Sequence
  Description of Artificial Sequence: Synthetic oligonucleotide
  Antisense strand to SEQ ID NO: 1542888
aguacuauaacuaaguucu

SEQ ID NO: 1542890 - RNA, 19 nt, Artificial Sequence
  Description of Artificial Sequence: Synthetic oligonucleotide
  Sense strand starting at position 3192 of SEQ ID NO: 1245182
uauaguacuuagccaucga

SEQ ID NO: 1542891 - RNA, 19 nt, Artificial Sequence
  Description of Artificial Sequence: Synthetic oligonucleotide
  Antisense strand to SEQ ID NO: 1542890
ucgauggcuaaguacuaua

SEQ ID NO: 1542892 - RNA, 19 nt, Artificial Sequence
  Description of Artificial Sequence: Synthetic oligonucleotide
  Sense strand starting at position 3196 of SEQ ID NO: 1245182
guacuuagccaucgauuaa

SEQ ID NO: 1542893 - RNA, 19 nt, Artificial Sequence
  Description of Artificial Sequence: Synthetic oligonucleotide
  Antisense strand to SEQ ID NO: 1542892
uuaaucgauggcuaaguac

SEQ ID NO: 1542894 - RNA, 19 nt, Artificial Sequence
  Description of Artificial Sequence: Synthetic oligonucleotide
  Sense strand starting at position 3311 of SEQ ID NO: 1245182
agacguucguaacuauuaa

SEQ ID NO: 1542895 - RNA, 19 nt, Artificial Sequence
  Description of Artificial Sequence: Synthetic oligonucleotide
  Antisense strand to SEQ ID NO: 1542894
uuaauaguuacgaacgucu

SEQ ID NO: 1542896 - RNA, 19 nt, Artificial Sequence
  Description of Artificial Sequence: Synthetic oligonucleotide
  Sense strand starting at position 3497 of SEQ ID NO: 1245182
acaacucuaugagaugcuu

SEQ ID NO: 1542897 - RNA, 19 nt, Artificial Sequence
  Description of Artificial Sequence: Synthetic oligonucleotide
  Antisense strand to SEQ ID NO: 1542896
aagcaucucauagaguugu

SEQ ID NO: 1542898 - RNA, 19 nt, Artificial Sequence
  Description of Artificial Sequence: Synthetic oligonucleotide
  Sense strand starting at position 3508 of SEQ ID NO: 1245182
agaugcuugccaggagaua

SEQ ID NO: 1542899 - RNA, 19 nt, Artificial Sequence
  Description of Artificial Sequence: Synthetic oligonucleotide
  Antisense strand to SEQ ID NO: 1542898
uaucuccuggcaagcaucu

SEQ ID NO: 1542900 - RNA, 19 nt, Artificial Sequence
  Description of Artificial Sequence: Synthetic oligonucleotide
  Sense strand starting at position 3509 of SEQ ID NO: 1245182
gaugcuugccaggagauaa

SEQ ID NO: 1542901 - RNA, 19 nt, Artificial Sequence
  Description of Artificial Sequence: Synthetic oligonucleotide
  Antisense strand to SEQ ID NO: 1542900
uuaucuccuggcaagcauc

SEQ ID NO: 1542902 - RNA, 19 nt, Artificial Sequence
  Description of Artificial Sequence: Synthetic oligonucleotide
  Sense strand starting at position 3528 of SEQ ID NO: 1245182
ggaagugaguucucagugu

SEQ ID NO: 1542903 - RNA, 19 nt, Artificial Sequence
  Description of Artificial Sequence: Synthetic oligonucleotide
  Antisense strand to SEQ ID NO: 1542902
acacugagaacucacuucc

SEQ ID NO: 1542904 - RNA, 19 nt, Artificial Sequence
  Description of Artificial Sequence: Synthetic oligonucleotide
  Sense strand starting at position 3532 of SEQ ID NO: 1245182
gugaguucucagugucagc

SEQ ID NO: 1542905 - RNA, 19 nt, Artificial Sequence
  Description of Artificial Sequence: Synthetic oligonucleotide
  Antisense strand to SEQ ID NO: 1542904
gcugacacugagaacucac

SEQ ID NO: 1542906 - RNA, 19 nt, Artificial Sequence
  Description of Artificial Sequence: Synthetic oligonucleotide
  Sense strand starting at position 3546 of SEQ ID NO: 1245182
ucagcaaaugucuggucua

SEQ ID NO: 1542907 - RNA, 19 nt, Artificial Sequence
  Description of Artificial Sequence: Synthetic oligonucleotide
  Antisense strand to SEQ ID NO: 1542906
uagaccagacauuugcuga

SEQ ID NO: 1542908 - RNA, 19 nt, Artificial Sequence
  Description of Artificial Sequence: Synthetic oligonucleotide
  Sense strand starting at position 3549 of SEQ ID NO: 1245182
gcaaaugucuggucuagag

SEQ ID NO: 1542909 - RNA, 19 nt, Artificial Sequence
  Description of Artificial Sequence: Synthetic oligonucleotide
  Antisense strand to SEQ ID NO: 1542908
cucuagaccagacauuugc

SEQ ID NO: 1542910 - RNA, 19 nt, Artificial Sequence
  Description of Artificial Sequence: Synthetic oligonucleotide
  Sense strand starting at position 3551 of SEQ ID NO: 1245182
aaaugucuggucuagagcu

SEQ ID NO: 1542911 - RNA, 19 nt, Artificial Sequence
  Description of Artificial Sequence: Synthetic oligonucleotide
  Antisense strand to SEQ ID NO: 1542910
agcucuagaccagacauuu

SEQ ID NO: 1542912 - RNA, 19 nt, Artificial Sequence
  Description of Artificial Sequence: Synthetic oligonucleotide
  Sense strand starting at position 3590 of SEQ ID NO: 1245182
aguccauaguccuuuacaa

SEQ ID NO: 1542913 - RNA, 19 nt, Artificial Sequence
  Description of Artificial Sequence: Synthetic oligonucleotide
  Antisense strand to SEQ ID NO: 1542912
uuguaaaggacuauggacu

SEQ ID NO: 1542914 - RNA, 19 nt, Artificial Sequence
  Description of Artificial Sequence: Synthetic oligonucleotide
  Sense strand starting at position 339 of SEQ ID NO: 1245183
cacucauggccauaaaggu

SEQ ID NO: 1542915 - RNA, 19 nt, Artificial Sequence
  Description of Artificial Sequence: Synthetic oligonucleotide
  Antisense strand to SEQ ID NO: 1542914
accuuuauggccaugagug

SEQ ID NO: 1542916 - RNA, 19 nt, Artificial Sequence
  Description of Artificial Sequence: Synthetic oligonucleotide
  Sense strand starting at position 616 of SEQ ID NO: 1245183
gaaucaaaguaugaaagga

SEQ ID NO: 1542917 - RNA, 19 nt, Artificial Sequence
  Description of Artificial Sequence: Synthetic oligonucleotide
  Antisense strand to SEQ ID NO: 1542916
uccuuucauacuuugauuc

SEQ ID NO: 1542918 - RNA, 19 nt, Artificial Sequence
  Description of Artificial Sequence: Synthetic oligonucleotide
  Sense strand starting at position 624 of SEQ ID NO: 1245183
guaugaaaggaauguuauu

SEQ ID NO: 1542919 - RNA, 19 nt, Artificial Sequence
  Description of Artificial Sequence: Synthetic oligonucleotide
  Antisense strand to SEQ ID NO: 1542918
aauaacauuccuuucauac

SEQ ID NO: 1542920 - RNA, 19 nt, Artificial Sequence
  Description of Artificial Sequence: Synthetic oligonucleotide
  Sense strand starting at position 656 of SEQ ID NO: 1245183
aauugagauuuacauguga

SEQ ID NO: 1542921 - RNA, 19 nt, Artificial Sequence
  Description of Artificial Sequence: Synthetic oligonucleotide
  Antisense strand to SEQ ID NO: 1542920
ucacauguaaaucucaauu

SEQ ID NO: 1542922 - RNA, 19 nt, Artificial Sequence
  Description of Artificial Sequence: Synthetic oligonucleotide
  Sense strand starting at position 661 of SEQ ID NO: 1245183
agauuuacaugugaacgaa

SEQ ID NO: 1542923 - RNA, 19 nt, Artificial Sequence
  Description of Artificial Sequence: Synthetic oligonucleotide
  Antisense strand to SEQ ID NO: 1542922
uucguucacauguaaaucu

SEQ ID NO: 1542924 - RNA, 19 nt, Artificial Sequence
  Description of Artificial Sequence: Synthetic oligonucleotide
  Sense strand starting at position 664 of SEQ ID NO: 1245183
uuuacaugugaacgaaaug

SEQ ID NO: 1542925 - RNA, 19 nt, Artificial Sequence
  Description of Artificial Sequence: Synthetic oligonucleotide
  Antisense strand to SEQ ID NO: 1542924
cauuucguucacauguaaa

SEQ ID NO: 1542926 - RNA, 19 nt, Artificial Sequence
  Description of Artificial Sequence: Synthetic oligonucleotide
  Sense strand starting at position 730 of SEQ ID NO: 1245183
aguggcaaguaacuuauaa

SEQ ID NO: 1542927 - RNA, 19 nt, Artificial Sequence
  Description of Artificial Sequence: Synthetic oligonucleotide
  Antisense strand to SEQ ID NO: 1542926
uuauaaguuacuugccacu

SEQ ID NO: 1542928 - RNA, 19 nt, Artificial Sequence
  Description of Artificial Sequence: Synthetic oligonucleotide
  Sense strand starting at position 818 of SEQ ID NO: 1245183
agcagauagaucugguuag

SEQ ID NO: 1542929 - RNA, 19 nt, Artificial Sequence
  Description of Artificial Sequence: Synthetic oligonucleotide
  Antisense strand to SEQ ID NO: 1542928
cuaaccagaucuaucugcu

SEQ ID NO: 1542930 - RNA, 19 nt, Artificial Sequence
  Description of Artificial Sequence: Synthetic oligonucleotide
  Sense strand starting at position 822 of SEQ ID NO: 1245183
gauagaucugguuaguuua

SEQ ID NO: 1542931 - RNA, 19 nt, Artificial Sequence
  Description of Artificial Sequence: Synthetic oligonucleotide
  Antisense strand to SEQ ID NO: 1542930
uaaacuaaccagaucuauc

SEQ ID NO: 1542932 - RNA, 19 nt, Artificial Sequence
  Description of Artificial Sequence: Synthetic oligonucleotide
  Sense strand starting at position 825 of SEQ ID NO: 1245183
agaucugguuaguuuauga

SEQ ID NO: 1542933 - RNA, 19 nt, Artificial Sequence
  Description of Artificial Sequence: Synthetic oligonucleotide
  Antisense strand to SEQ ID NO: 1542932
ucauaaacuaaccagaucu

SEQ ID NO: 1542934 - RNA, 19 nt, Artificial Sequence
  Description of Artificial Sequence: Synthetic oligonucleotide
  Sense strand starting at position 841 of SEQ ID NO: 1245183
ugacaacaugccugagaaa

SEQ ID NO: 1542935 - RNA, 19 nt, Artificial Sequence
  Description of Artificial Sequence: Synthetic oligonucleotide
  Antisense strand to SEQ ID NO: 1542934
uuucucaggcauguuguca

SEQ ID NO: 1542936 - RNA, 19 nt, Artificial Sequence
  Description of Artificial Sequence: Synthetic oligonucleotide
  Sense strand starting at position 886 of SEQ ID NO: 1245183
ggaguauagucuguccuga

SEQ ID NO: 1542937 - RNA, 19 nt, Artificial Sequence
  Description of Artificial Sequence: Synthetic oligonucleotide
  Antisense strand to SEQ ID NO: 1542936
ucaggacagacuauacucc

SEQ ID NO: 1542938 - RNA, 19 nt, Artificial Sequence
  Description of Artificial Sequence: Synthetic oligonucleotide
  Sense strand starting at position 891 of SEQ ID NO: 1245183
auagucuguccugauuaaa

SEQ ID NO: 1542939 - RNA, 19 nt, Artificial Sequence
  Description of Artificial Sequence: Synthetic oligonucleotide
  Antisense strand to SEQ ID NO: 1542938
uuuaaucaggacagacuau

SEQ ID NO: 1542940 - RNA, 19 nt, Artificial Sequence
  Description of Artificial Sequence: Synthetic oligonucleotide
  Sense strand starting at position 1110 of SEQ ID NO: 1245183
aaacgaauguguucuaaug

SEQ ID NO: 1542941 - RNA, 19 nt, Artificial Sequence
  Description of Artificial Sequence: Synthetic oligonucleotide
  Antisense strand to SEQ ID NO: 1542940
cauuagaacacauucguuu

SEQ ID NO: 1542942 - RNA, 19 nt, Artificial Sequence
  Description of Artificial Sequence: Synthetic oligonucleotide
  Sense strand starting at position 1300 of SEQ ID NO: 1245183
ugcagcauccaggaaguuu

SEQ ID NO: 1542943 - RNA, 19 nt, Artificial Sequence
  Description of Artificial Sequence: Synthetic oligonucleotide
  Antisense strand to SEQ ID NO: 1542942
aaacuuccuggaugcugca

SEQ ID NO: 1542944 - RNA, 19 nt, Artificial Sequence
  Description of Artificial Sequence: Synthetic oligonucleotide
  Sense strand starting at position 1469 of SEQ ID NO: 1245183
uuuggaaagcuauaggcau

SEQ ID NO: 1542945 - RNA, 19 nt, Artificial Sequence
  Description of Artificial Sequence: Synthetic oligonucleotide
  Antisense strand to SEQ ID NO: 1542944
augccuauagcuuuccaaa

SEQ ID NO: 1542946 - RNA, 19 nt, Artificial Sequence
  Description of Artificial Sequence: Synthetic oligonucleotide
  Sense strand starting at position 1613 of SEQ ID NO: 1245183
ggguuugcgguuaauagcu

SEQ ID NO: 1542947 - RNA, 19 nt, Artificial Sequence
  Description of Artificial Sequence: Synthetic oligonucleotide
  Antisense strand to SEQ ID NO: 1542946
agcuauuaaccgcaaaccc

SEQ ID NO: 1542948 - RNA, 19 nt, Artificial Sequence
  Description of Artificial Sequence: Synthetic oligonucleotide
  Sense strand starting at position 1621 of SEQ ID NO: 1245183
gguuaauagcucgggagag

SEQ ID NO: 1542949 - RNA, 19 nt, Artificial Sequence
  Description of Artificial Sequence: Synthetic oligonucleotide
  Antisense strand to SEQ ID NO: 1542948
cucucccgagcuauuaacc

SEQ ID NO: 1542950 - RNA, 19 nt, Artificial Sequence
  Description of Artificial Sequence: Synthetic oligonucleotide
  Sense strand starting at position 2061 of SEQ ID NO: 1245183
gccugacucaggugaggaa

SEQ ID NO: 1542951 - RNA, 19 nt, Artificial Sequence
  Description of Artificial Sequence: Synthetic oligonucleotide
  Antisense strand to SEQ ID NO: 1542950
uuccucaccugagucaggc

SEQ ID NO: 1542952 - RNA, 19 nt, Artificial Sequence
  Description of Artificial Sequence: Synthetic oligonucleotide
  Sense strand starting at position 2305 of SEQ ID NO: 1245183
uuucccucgggcuaucaau

SEQ ID NO: 1542953 - RNA, 19 nt, Artificial Sequence
  Description of Artificial Sequence: Synthetic oligonucleotide
  Antisense strand to SEQ ID NO: 1542952
auugauagcccgagggaaa

SEQ ID NO: 1542954 - RNA, 19 nt, Artificial Sequence
  Description of Artificial Sequence: Synthetic oligonucleotide
  Sense strand starting at position 2369 of SEQ ID NO: 1245183
caaccugugggcuaaauau

SEQ ID NO: 1542955 - RNA, 19 nt, Artificial Sequence
  Description of Artificial Sequence: Synthetic oligonucleotide
  Antisense strand to SEQ ID NO: 1542954
auauuuagcccacagguug

SEQ ID NO: 1542956 - RNA, 19 nt, Artificial Sequence
  Description of Artificial Sequence: Synthetic oligonucleotide
  Sense strand starting at position 2527 of SEQ ID NO: 1245183
agccuacguacuuauggau

SEQ ID NO: 1542957 - RNA, 19 nt, Artificial Sequence
  Description of Artificial Sequence: Synthetic oligonucleotide
  Antisense strand to SEQ ID NO: 1542956
auccauaaguacguaggcu

SEQ ID NO: 1542958 - RNA, 19 nt, Artificial Sequence
  Description of Artificial Sequence: Synthetic oligonucleotide
  Sense strand starting at position 2605 of SEQ ID NO: 1245183
uugcccugaucuuuaagaa

SEQ ID NO: 1542959 - RNA, 19 nt, Artificial Sequence
  Description of Artificial Sequence: Synthetic oligonucleotide
  Antisense strand to SEQ ID NO: 1542958
uucuuaaagaucagggcaa

SEQ ID NO: 1542960 - RNA, 19 nt, Artificial Sequence
  Description of Artificial Sequence: Synthetic oligonucleotide
  Sense strand starting at position 2606 of SEQ ID NO: 1245183
ugcccugaucuuuaagaaa

SEQ ID NO: 1542961 - RNA, 19 nt, Artificial Sequence
  Description of Artificial Sequence: Synthetic oligonucleotide
  Antisense strand to SEQ ID NO: 1542960
uuucuuaaagaucagggca

SEQ ID NO: 1542962 - RNA, 19 nt, Artificial Sequence
  Description of Artificial Sequence: Synthetic oligonucleotide
  Sense strand starting at position 2627 of SEQ ID NO: 1245183
acauacuuauagccagaga

SEQ ID NO: 1542963 - RNA, 19 nt, Artificial Sequence
  Description of Artificial Sequence: Synthetic oligonucleotide
  Antisense strand to SEQ ID NO: 1542962
ucucuggcuauaaguaugu

SEQ ID NO: 1542964 - RNA, 19 nt, Artificial Sequence
  Description of Artificial Sequence: Synthetic oligonucleotide
  Sense strand starting at position 2684 of SEQ ID NO: 1245183
ugaagacagcucugguuga

SEQ ID NO: 1542965 - RNA, 19 nt, Artificial Sequence
  Description of Artificial Sequence: Synthetic oligonucleotide
  Antisense strand to SEQ ID NO: 1542964
ucaaccagagcugucuuca

SEQ ID NO: 1542966 - RNA, 19 nt, Artificial Sequence
  Description of Artificial Sequence: Synthetic oligonucleotide
  Sense strand starting at position 2762 of SEQ ID NO: 1245183
ccaggauauucucuggaau

SEQ ID NO: 1542967 - RNA, 19 nt, Artificial Sequence
  Description of Artificial Sequence: Synthetic oligonucleotide
  Antisense strand to SEQ ID NO: 1542966
auuccagagaauauccugg

SEQ ID NO: 1542968 - RNA, 19 nt, Artificial Sequence
  Description of Artificial Sequence: Synthetic oligonucleotide
  Sense strand starting at position 2833 of SEQ ID NO: 1245183
aagguauaaggucaguuau

SEQ ID NO: 1542969 - RNA, 19 nt, Artificial Sequence
  Description of Artificial Sequence: Synthetic oligonucleotide
  Antisense strand to SEQ ID NO: 1542968
auaacugaccuuauaccuu

SEQ ID NO: 1542970 - RNA, 19 nt, Artificial Sequence
  Description of Artificial Sequence: Synthetic oligonucleotide
  Sense strand starting at position 2835 of SEQ ID NO: 1245183
gguauaaggucaguuauug

SEQ ID NO: 1542971 - RNA, 19 nt, Artificial Sequence
  Description of Artificial Sequence: Synthetic oligonucleotide
  Antisense strand to SEQ ID NO: 1542970
caauaacugaccuuauacc

SEQ ID NO: 1542972 - RNA, 19 nt, Artificial Sequence
  Description of Artificial Sequence: Synthetic oligonucleotide
  Sense strand starting at position 2839 of SEQ ID NO: 1245183
uaaggucaguuauugggaa

SEQ ID NO: 1542973 - RNA, 19 nt, Artificial Sequence
  Description of Artificial Sequence: Synthetic oligonucleotide
  Antisense strand to SEQ ID NO: 1542972
uucccaauaacugaccuua

SEQ ID NO: 1542974 - RNA, 19 nt, Artificial Sequence
  Description of Artificial Sequence: Synthetic oligonucleotide
  Sense strand starting at position 2841 of SEQ ID NO: 1245183
aggucaguuauugggaaag

SEQ ID NO: 1542975 - RNA, 19 nt, Artificial Sequence
  Description of Artificial Sequence: Synthetic oligonucleotide
  Antisense strand to SEQ ID NO: 1542974
cuuucccaauaacugaccu

SEQ ID NO: 1542976 - RNA, 19 nt, Artificial Sequence
  Description of Artificial Sequence: Synthetic oligonucleotide
  Sense strand starting at position 2978 of SEQ ID NO: 1245183
acauacaacguuuagugau

SEQ ID NO: 1542977 - RNA, 19 nt, Artificial Sequence
  Description of Artificial Sequence: Synthetic oligonucleotide
  Antisense strand to SEQ ID NO: 1542976
aucacuaaacguuguaugu

SEQ ID NO: 1542978 - RNA, 19 nt, Artificial Sequence
  Description of Artificial Sequence: Synthetic oligonucleotide
  Sense strand starting at position 2984 of SEQ ID NO: 1245183
aacguuuagugaucagaua

SEQ ID NO: 1542979 - RNA, 19 nt, Artificial Sequence
  Description of Artificial Sequence: Synthetic oligonucleotide
  Antisense strand to SEQ ID NO: 1542978
uaucugaucacuaaacguu

SEQ ID NO: 1542980 - RNA, 19 nt, Artificial Sequence
  Description of Artificial Sequence: Synthetic oligonucleotide
  Sense strand starting at position 2985 of SEQ ID NO: 1245183
acguuuagugaucagauaa

SEQ ID NO: 1542981 - RNA, 19 nt, Artificial Sequence
  Description of Artificial Sequence: Synthetic oligonucleotide
  Antisense strand to SEQ ID NO: 1542980
uuaucugaucacuaaacgu

SEQ ID NO: 1542982 - RNA, 19 nt, Artificial Sequence
  Description of Artificial Sequence: Synthetic oligonucleotide
  Sense strand starting at position 3317 of SEQ ID NO: 1245183
aggagcucccuagggaaau

SEQ ID NO: 1542983 - RNA, 19 nt, Artificial Sequence
  Description of Artificial Sequence: Synthetic oligonucleotide
  Antisense strand to SEQ ID NO: 1542982
auuucccuagggagcuccu

SEQ ID NO: 1542984 - RNA, 19 nt, Artificial Sequence
  Description of Artificial Sequence: Synthetic oligonucleotide
  Sense strand starting at position 3330 of SEQ ID NO: 1245183
ggaaauguugcggauggga

SEQ ID NO: 1542985 - RNA, 19 nt, Artificial Sequence
  Description of Artificial Sequence: Synthetic oligonucleotide
  Antisense strand to SEQ ID NO: 1542984
ucccauccgcaacauuucc

SEQ ID NO: 1542986 - RNA, 19 nt, Artificial Sequence
  Description of Artificial Sequence: Synthetic oligonucleotide
  Sense strand starting at position 3332 of SEQ ID NO: 1245183
aaauguugcggaugggaaa

SEQ ID NO: 1542987 - RNA, 19 nt, Artificial Sequence
  Description of Artificial Sequence: Synthetic oligonucleotide
  Antisense strand to SEQ ID NO: 1542986
uuucccauccgcaacauuu

SEQ ID NO: 1542988 - RNA, 19 nt, Artificial Sequence
  Description of Artificial Sequence: Synthetic oligonucleotide
  Sense strand starting at position 3728 of SEQ ID NO: 1245183
accugccuccuggaguauu

SEQ ID NO: 1542989 - RNA, 19 nt, Artificial Sequence
  Description of Artificial Sequence: Synthetic oligonucleotide
  Antisense strand to SEQ ID NO: 1542988
aauacuccaggaggcaggu

SEQ ID NO: 1542990 - RNA, 19 nt, Artificial Sequence
  Description of Artificial Sequence: Synthetic oligonucleotide
  Sense strand starting at position 3770 of SEQ ID NO: 1245183
ggguuauucccaugaagga

SEQ ID NO: 1542991 - RNA, 19 nt, Artificial Sequence
  Description of Artificial Sequence: Synthetic oligonucleotide
  Antisense strand to SEQ ID NO: 1542990
uccuucaugggaauaaccc

SEQ ID NO: 1542992 - RNA, 19 nt, Artificial Sequence
  Description of Artificial Sequence: Synthetic oligonucleotide
  Sense strand starting at position 3962 of SEQ ID NO: 1245183
guacacaucggugacagaa

SEQ ID NO: 1542993 - RNA, 19 nt, Artificial Sequence
  Description of Artificial Sequence: Synthetic oligonucleotide
  Antisense strand to SEQ ID NO: 1542992
uucugucaccgauguguac

SEQ ID NO: 1542994 - RNA, 19 nt, Artificial Sequence
  Description of Artificial Sequence: Synthetic oligonucleotide
  Sense strand starting at position 167 of SEQ ID NO: 1245184
auaauacaugcauguaguu

SEQ ID NO: 1542995 - RNA, 19 nt, Artificial Sequence
  Description of Artificial Sequence: Synthetic oligonucleotide
  Antisense strand to SEQ ID NO: 1542994
aacuacaugcauguauuau

SEQ ID NO: 1542996 - RNA, 19 nt, Artificial Sequence
  Description of Artificial Sequence: Synthetic oligonucleotide
  Sense strand starting at position 172 of SEQ ID NO: 1245184
acaugcauguaguuuauaa

SEQ ID NO: 1542997 - RNA, 19 nt, Artificial Sequence
  Description of Artificial Sequence: Synthetic oligonucleotide
  Antisense strand to SEQ ID NO: 1542996
uuauaaacuacaugcaugu

SEQ ID NO: 1542998 - RNA, 19 nt, Artificial Sequence
  Description of Artificial Sequence: Synthetic oligonucleotide
  Sense strand starting at position 174 of SEQ ID NO: 1245184
augcauguaguuuauaagu

SEQ ID NO: 1542999 - RNA, 19 nt, Artificial Sequence
  Description of Artificial Sequence: Synthetic oligonucleotide
  Antisense strand to SEQ ID NO: 1542998
acuuauaaacuacaugcau

SEQ ID NO: 1543000 - RNA, 19 nt, Artificial Sequence
  Description of Artificial Sequence: Synthetic oligonucleotide
  Sense strand starting at position 200 of SEQ ID NO: 1245184
cacauauggcacuagaugu

SEQ ID NO: 1543001 - RNA, 19 nt, Artificial Sequence
  Description of Artificial Sequence: Synthetic oligonucleotide
  Antisense strand to SEQ ID NO: 1543000
acaucuagugccauaugug

SEQ ID NO: 1543002 - RNA, 19 nt, Artificial Sequence
  Description of Artificial Sequence: Synthetic oligonucleotide
  Sense strand starting at position 225 of SEQ ID NO: 1245184
acuugucauuuauggaagu

SEQ ID NO: 1543003 - RNA, 19 nt, Artificial Sequence
  Description of Artificial Sequence: Synthetic oligonucleotide
  Antisense strand to SEQ ID NO: 1543002
acuuccauaaaugacaagu

SEQ ID NO: 1543004 - RNA, 19 nt, Artificial Sequence
  Description of Artificial Sequence: Synthetic oligonucleotide
  Sense strand starting at position 236 of SEQ ID NO: 1245184
auggaagugcauggucaaa

SEQ ID NO: 1543005 - RNA, 19 nt, Artificial Sequence
  Description of Artificial Sequence: Synthetic oligonucleotide
  Antisense strand to SEQ ID NO: 1543004
uuugaccaugcacuuccau

SEQ ID NO: 1543006 - RNA, 19 nt, Artificial Sequence
  Description of Artificial Sequence: Synthetic oligonucleotide
  Sense strand starting at position 373 of SEQ ID NO: 1245184
gaggcaauuugggcuuagu

SEQ ID NO: 1543007 - RNA, 19 nt, Artificial Sequence
  Description of Artificial Sequence: Synthetic oligonucleotide
  Antisense strand to SEQ ID NO: 1543006
acuaagcccaaauugccuc

SEQ ID NO: 1543008 - RNA, 19 nt, Artificial Sequence
  Description of Artificial Sequence: Synthetic oligonucleotide
  Sense strand starting at position 382 of SEQ ID NO: 1245184
ugggcuuaguguccaggau

SEQ ID NO: 1543009 - RNA, 19 nt, Artificial Sequence
  Description of Artificial Sequence: Synthetic oligonucleotide
  Antisense strand to SEQ ID NO: 1543008
auccuggacacuaagccca

SEQ ID NO: 1543010 - RNA, 19 nt, Artificial Sequence
  Description of Artificial Sequence: Synthetic oligonucleotide
  Sense strand starting at position 383 of SEQ ID NO: 1245184
gggcuuaguguccaggauu

SEQ ID NO: 1543011 - RNA, 19 nt, Artificial Sequence
  Description of Artificial Sequence: Synthetic oligonucleotide
  Antisense strand to SEQ ID NO: 1543010
aauccuggacacuaagccc

SEQ ID NO: 1543012 - RNA, 19 nt, Artificial Sequence
  Description of Artificial Sequence: Synthetic oligonucleotide
  Sense strand starting at position 458 of SEQ ID NO: 1245184
acagcuugaggcuaagagu

SEQ ID NO: 1543013 - RNA, 19 nt, Artificial Sequence
  Description of Artificial Sequence: Synthetic oligonucleotide
  Antisense strand to SEQ ID NO: 1543012
acucuuagccucaagcugu

SEQ ID NO: 1543014 - RNA, 19 nt, Artificial Sequence
  Description of Artificial Sequence: Synthetic oligonucleotide
  Sense strand starting at position 789 of SEQ ID NO: 1245184
cuggcugagaccugugagu

SEQ ID NO: 1543015 - RNA, 19 nt, Artificial Sequence
  Description of Artificial Sequence: Synthetic oligonucleotide
  Antisense strand to SEQ ID NO: 1543014
acucacaggucucagccag

SEQ ID NO: 1543016 - RNA, 19 nt, Artificial Sequence
  Description of Artificial Sequence: Synthetic oligonucleotide
  Sense strand starting at position 791 of SEQ ID NO: 1245184
ggcugagaccugugaguaa

SEQ ID NO: 1543017 - RNA, 19 nt, Artificial Sequence
  Description of Artificial Sequence: Synthetic oligonucleotide
  Antisense strand to SEQ ID NO: 1543016
uuacucacaggucucagcc

SEQ ID NO: 1543018 - RNA, 19 nt, Artificial Sequence
  Description of Artificial Sequence: Synthetic oligonucleotide
  Sense strand starting at position 822 of SEQ ID NO: 1245184
gcaagaugcugcuuaacau

SEQ ID NO: 1543019 - RNA, 19 nt, Artificial Sequence
  Description of Artificial Sequence: Synthetic oligonucleotide
  Antisense strand to SEQ ID NO: 1543018
auguuaagcagcaucuugc

SEQ ID NO: 1543020 - RNA, 19 nt, Artificial Sequence
  Description of Artificial Sequence: Synthetic oligonucleotide
  Sense strand starting at position 982 of SEQ ID NO: 1245184
ucaguaacauuagagugau

SEQ ID NO: 1543021 - RNA, 19 nt, Artificial Sequence
  Description of Artificial Sequence: Synthetic oligonucleotide
  Antisense strand to SEQ ID NO: 1543020
aucacucuaauguuacuga

SEQ ID NO: 1543022 - RNA, 19 nt, Artificial Sequence
  Description of Artificial Sequence: Synthetic oligonucleotide
  Sense strand starting at position 985 of SEQ ID NO: 1245184
guaacauuagagugauacc

SEQ ID NO: 1543023 - RNA, 19 nt, Artificial Sequence
  Description of Artificial Sequence: Synthetic oligonucleotide
  Antisense strand to SEQ ID NO: 1543022
gguaucacucuaauguuac

SEQ ID NO: 1543024 - RNA, 19 nt, Artificial Sequence
  Description of Artificial Sequence: Synthetic oligonucleotide
  Sense strand starting at position 994 of SEQ ID NO: 1245184
gagugauaccgcuguuaua

SEQ ID NO: 1543025 - RNA, 19 nt, Artificial Sequence
  Description of Artificial Sequence: Synthetic oligonucleotide
  Antisense strand to SEQ ID NO: 1543024
uauaacagcgguaucacuc

SEQ ID NO: 1543026 - RNA, 19 nt, Artificial Sequence
  Description of Artificial Sequence: Synthetic oligonucleotide
  Sense strand starting at position 1054 of SEQ ID NO: 1245184
gccaccgacuucuccgaau

SEQ ID NO: 1543027 - RNA, 19 nt, Artificial Sequence
  Description of Artificial Sequence: Synthetic oligonucleotide
  Antisense strand to SEQ ID NO: 1543026
auucggagaagucgguggc

SEQ ID NO: 1543028 - RNA, 19 nt, Artificial Sequence
  Description of Artificial Sequence: Synthetic oligonucleotide
  Sense strand starting at position 1167 of SEQ ID NO: 1245184
ggcgccugcaucucuuaga

SEQ ID NO: 1543029 - RNA, 19 nt, Artificial Sequence
  Description of Artificial Sequence: Synthetic oligonucleotide
  Antisense strand to SEQ ID NO: 1543028
ucuaagagaugcaggcgcc

SEQ ID NO: 1543030 - RNA, 19 nt, Artificial Sequence
  Description of Artificial Sequence: Synthetic oligonucleotide
  Sense strand starting at position 1284 of SEQ ID NO: 1245184
ugcggugcuuccacgagau

SEQ ID NO: 1543031 - RNA, 19 nt, Artificial Sequence
  Description of Artificial Sequence: Synthetic oligonucleotide
  Antisense strand to SEQ ID NO: 1543030
aucucguggaagcaccgca

SEQ ID NO: 1543032 - RNA, 19 nt, Artificial Sequence
  Description of Artificial Sequence: Synthetic oligonucleotide
  Sense strand starting at position 2151 of SEQ ID NO: 1245184
uuaauuagaucguucuccu

SEQ ID NO: 1543033 - RNA, 19 nt, Artificial Sequence
  Description of Artificial Sequence: Synthetic oligonucleotide
  Antisense strand to SEQ ID NO: 1543032
aggagaacgaucuaauuaa

SEQ ID NO: 1543034 - RNA, 19 nt, Artificial Sequence
  Description of Artificial Sequence: Synthetic oligonucleotide
  Sense strand starting at position 2160 of SEQ ID NO: 1245184
ucguucuccucucuggaua

SEQ ID NO: 1543035 - RNA, 19 nt, Artificial Sequence
  Description of Artificial Sequence: Synthetic oligonucleotide
  Antisense strand to SEQ ID NO: 1543034
uauccagagaggagaacga

SEQ ID NO: 1543036 - RNA, 19 nt, Artificial Sequence
  Description of Artificial Sequence: Synthetic oligonucleotide
  Sense strand starting at position 2226 of SEQ ID NO: 1245184
aaaggaggcuuguaaacga

SEQ ID NO: 1543037 - RNA, 19 nt, Artificial Sequence
  Description of Artificial Sequence: Synthetic oligonucleotide
  Antisense strand to SEQ ID NO: 1543036
ucguuuacaagccuccuuu

SEQ ID NO: 1543038 - RNA, 19 nt, Artificial Sequence
  Description of Artificial Sequence: Synthetic oligonucleotide
  Sense strand starting at position 2242 of SEQ ID NO: 1245184
cgaauuugguugagagcag

SEQ ID NO: 1543039 - RNA, 19 nt, Artificial Sequence
  Description of Artificial Sequence: Synthetic oligonucleotide
  Antisense strand to SEQ ID NO: 1543038
cugcucucaaccaaauucg

SEQ ID NO: 1543040 - RNA, 19 nt, Artificial Sequence
  Description of Artificial Sequence: Synthetic oligonucleotide
  Sense strand starting at position 2243 of SEQ ID NO: 1245184
gaauuugguugagagcaga

SEQ ID NO: 1543041 - RNA, 19 nt, Artificial Sequence
  Description of Artificial Sequence: Synthetic oligonucleotide
  Antisense strand to SEQ ID NO: 1543040
ucugcucucaaccaaauuc

SEQ ID NO: 1543042 - RNA, 19 nt, Artificial Sequence
  Description of Artificial Sequence: Synthetic oligonucleotide
  Sense strand starting at position 2317 of SEQ ID NO: 1245184
aguguugagucgucaacuc

SEQ ID NO: 1543043 - RNA, 19 nt, Artificial Sequence
  Description of Artificial Sequence: Synthetic oligonucleotide
  Antisense strand to SEQ ID NO: 1543042
gaguugacgacucaacacu

SEQ ID NO: 1543044 - RNA, 19 nt, Artificial Sequence
  Description of Artificial Sequence: Synthetic oligonucleotide
  Sense strand starting at position 2399 of SEQ ID NO: 1245184
agugguggaacguacauau

SEQ ID NO: 1543045 - RNA, 19 nt, Artificial Sequence
  Description of Artificial Sequence: Synthetic oligonucleotide
  Antisense strand to SEQ ID NO: 1543044
auauguacguuccaccacu

SEQ ID NO: 1543046 - RNA, 19 nt, Artificial Sequence
  Description of Artificial Sequence: Synthetic oligonucleotide
  Sense strand starting at position 2440 of SEQ ID NO: 1245184
aguuguaauuugccaaccu

SEQ ID NO: 1543047 - RNA, 19 nt, Artificial Sequence
  Description of Artificial Sequence: Synthetic oligonucleotide
  Antisense strand to SEQ ID NO: 1543046
agguuggcaaauuacaacu

SEQ ID NO: 1543048 - RNA, 19 nt, Artificial Sequence
  Description of Artificial Sequence: Synthetic oligonucleotide
  Sense strand starting at position 2481 of SEQ ID NO: 1245184
ccuuuagaugccuaaucug

SEQ ID NO: 1543049 - RNA, 19 nt, Artificial Sequence
  Description of Artificial Sequence: Synthetic oligonucleotide
  Antisense strand to SEQ ID NO: 1543048
cagauuaggcaucuaaagg

SEQ ID NO: 1543050 - RNA, 19 nt, Artificial Sequence
  Description of Artificial Sequence: Synthetic oligonucleotide
  Sense strand starting at position 2517 of SEQ ID NO: 1245184
gcuaacagagauugaguga

SEQ ID NO: 1543051 - RNA, 19 nt, Artificial Sequence
  Description of Artificial Sequence: Synthetic oligonucleotide
  Antisense strand to SEQ ID NO: 1543050
ucacucaaucucuguuagc

SEQ ID NO: 1543052 - RNA, 19 nt, Artificial Sequence
  Description of Artificial Sequence: Synthetic oligonucleotide
  Sense strand starting at position 2596 of SEQ ID NO: 1245184
gacugaugcuuggucuuau

SEQ ID NO: 1543053 - RNA, 19 nt, Artificial Sequence
  Description of Artificial Sequence: Synthetic oligonucleotide
  Antisense strand to SEQ ID NO: 1543052
auaagaccaagcaucaguc

SEQ ID NO: 1543054 - RNA, 19 nt, Artificial Sequence
  Description of Artificial Sequence: Synthetic oligonucleotide
  Sense strand starting at position 2597 of SEQ ID NO: 1245184
acugaugcuuggucuuaua

SEQ ID NO: 1543055 - RNA, 19 nt, Artificial Sequence
  Description of Artificial Sequence: Synthetic oligonucleotide
  Antisense strand to SEQ ID NO: 1543054
uauaagaccaagcaucagu

SEQ ID NO: 1543056 - RNA, 19 nt, Artificial Sequence
  Description of Artificial Sequence: Synthetic oligonucleotide
  Sense strand starting at position 2643 of SEQ ID NO: 1245184
cacauaggcccucgaagaa

SEQ ID NO: 1543057 - RNA, 19 nt, Artificial Sequence
  Description of Artificial Sequence: Synthetic oligonucleotide
  Antisense strand to SEQ ID NO: 1543056
uucuucgagggccuaugug

SEQ ID NO: 1543058 - RNA, 19 nt, Artificial Sequence
  Description of Artificial Sequence: Synthetic oligonucleotide
  Sense strand starting at position 2647 of SEQ ID NO: 1245184
uaggcccucgaagaaauua

SEQ ID NO: 1543059 - RNA, 19 nt, Artificial Sequence
  Description of Artificial Sequence: Synthetic oligonucleotide
  Antisense strand to SEQ ID NO: 1543058
uaauuucuucgagggccua

SEQ ID NO: 1543060 - RNA, 19 nt, Artificial Sequence
  Description of Artificial Sequence: Synthetic oligonucleotide
  Sense strand starting at position 2766 of SEQ ID NO: 1245184
gagacaauauugugaagau

SEQ ID NO: 1543061 - RNA, 19 nt, Artificial Sequence
  Description of Artificial Sequence: Synthetic oligonucleotide
  Antisense strand to SEQ ID NO: 1543060
aucuucacaauauugucuc

SEQ ID NO: 1543062 - RNA, 19 nt, Artificial Sequence
  Description of Artificial Sequence: Synthetic oligonucleotide
  Sense strand starting at position 2785 of SEQ ID NO: 1245184
ggcaauauuuccuaaagca

SEQ ID NO: 1543063 - RNA, 19 nt, Artificial Sequence
  Description of Artificial Sequence: Synthetic oligonucleotide
  Antisense strand to SEQ ID NO: 1543062
ugcuuuaggaaauauugcc

SEQ ID NO: 1543064 - RNA, 19 nt, Artificial Sequence
  Description of Artificial Sequence: Synthetic oligonucleotide
  Sense strand starting at position 2923 of SEQ ID NO: 1245184
aaacgauucugagaaagaa

SEQ ID NO: 1543065 - RNA, 19 nt, Artificial Sequence
  Description of Artificial Sequence: Synthetic oligonucleotide
  Antisense strand to SEQ ID NO: 1543064
uucuuucucagaaucguuu

SEQ ID NO: 1543066 - RNA, 19 nt, Artificial Sequence
  Description of Artificial Sequence: Synthetic oligonucleotide
  Sense strand starting at position 3008 of SEQ ID NO: 1245184
guaguaccgacauaacgau

SEQ ID NO: 1543067 - RNA, 19 nt, Artificial Sequence
  Description of Artificial Sequence: Synthetic oligonucleotide
  Antisense strand to SEQ ID NO: 1543066
aucguuaugucgguacuac

SEQ ID NO: 1543068 - RNA, 19 nt, Artificial Sequence
  Description of Artificial Sequence: Synthetic oligonucleotide
  Sense strand starting at position 3331 of SEQ ID NO: 1245184
uagcaaugcugucuuagcu

SEQ ID NO: 1543069 - RNA, 19 nt, Artificial Sequence
  Description of Artificial Sequence: Synthetic oligonucleotide
  Antisense strand to SEQ ID NO: 1543068
agcuaagacagcauugcua

SEQ ID NO: 1543070 - RNA, 19 nt, Artificial Sequence
  Description of Artificial Sequence: Synthetic oligonucleotide
  Sense strand starting at position 3335 of SEQ ID NO: 1245184
aaugcugucuuagcuauga

SEQ ID NO: 1543071 - RNA, 19 nt, Artificial Sequence
  Description of Artificial Sequence: Synthetic oligonucleotide
  Antisense strand to SEQ ID NO: 1543070
ucauagcuaagacagcauu

SEQ ID NO: 1543072 - RNA, 19 nt, Artificial Sequence
  Description of Artificial Sequence: Synthetic oligonucleotide
  Sense strand starting at position 3339 of SEQ ID NO: 1245184
cugucuuagcuaugauauc

SEQ ID NO: 1543073 - RNA, 19 nt, Artificial Sequence
  Description of Artificial Sequence: Synthetic oligonucleotide
  Antisense strand to SEQ ID NO: 1543072
gauaucauagcuaagacag

SEQ ID NO: 1543074 - RNA, 19 nt, Artificial Sequence
  Description of Artificial Sequence: Synthetic oligonucleotide
  Sense strand starting at position 130 of SEQ ID NO: 1245185
ggagagugguggcuucuga

SEQ ID NO: 1543075 - RNA, 19 nt, Artificial Sequence
  Description of Artificial Sequence: Synthetic oligonucleotide
  Antisense strand to SEQ ID NO: 1543074
ucagaagccaccacucucc

SEQ ID NO: 1543076 - RNA, 19 nt, Artificial Sequence
  Description of Artificial Sequence: Synthetic oligonucleotide
  Sense strand starting at position 275 of SEQ ID NO: 1245185
ccagccacauccugagaaa

SEQ ID NO: 1543077 - RNA, 19 nt, Artificial Sequence
  Description of Artificial Sequence: Synthetic oligonucleotide
  Antisense strand to SEQ ID NO: 1543076
uuucucaggauguggcugg

SEQ ID NO: 1543078 - RNA, 19 nt, Artificial Sequence
  Description of Artificial Sequence: Synthetic oligonucleotide
  Sense strand starting at position 278 of SEQ ID NO: 1245185
gccacauccugagaaauac

SEQ ID NO: 1543079 - RNA, 19 nt, Artificial Sequence
  Description of Artificial Sequence: Synthetic oligonucleotide
  Antisense strand to SEQ ID NO: 1543078
guauuucucaggauguggc

SEQ ID NO: 1543080 - RNA, 19 nt, Artificial Sequence
  Description of Artificial Sequence: Synthetic oligonucleotide
  Sense strand starting at position 320 of SEQ ID NO: 1245185
agcucaugagggugaagaa

SEQ ID NO: 1543081 - RNA, 19 nt, Artificial Sequence
  Description of Artificial Sequence: Synthetic oligonucleotide
  Antisense strand to SEQ ID NO: 1543080
uucuucacccucaugagcu

SEQ ID NO: 1543082 - RNA, 19 nt, Artificial Sequence
  Description of Artificial Sequence: Synthetic oligonucleotide
  Sense strand starting at position 375 of SEQ ID NO: 1245185
aggucucagccuuauauac

SEQ ID NO: 1543083 - RNA, 19 nt, Artificial Sequence
  Description of Artificial Sequence: Synthetic oligonucleotide
  Antisense strand to SEQ ID NO: 1543082
guauauaaggcugagaccu

SEQ ID NO: 1543084 - RNA, 19 nt, Artificial Sequence
  Description of Artificial Sequence: Synthetic oligonucleotide
  Sense strand starting at position 422 of SEQ ID NO: 1245185
gcaacaaacuguguacuca

SEQ ID NO: 1543085 - RNA, 19 nt, Artificial Sequence
  Description of Artificial Sequence: Synthetic oligonucleotide
  Antisense strand to SEQ ID NO: 1543084
ugaguacacaguuuguugc

SEQ ID NO: 1543086 - RNA, 19 nt, Artificial Sequence
  Description of Artificial Sequence: Synthetic oligonucleotide
  Sense strand starting at position 519 of SEQ ID NO: 1245185
gggagucccacccggaaau

SEQ ID NO: 1543087 - RNA, 19 nt, Artificial Sequence
  Description of Artificial Sequence: Synthetic oligonucleotide
  Antisense strand to SEQ ID NO: 1543086
auuuccgggugggacuccc

SEQ ID NO: 1543088 - RNA, 19 nt, Artificial Sequence
  Description of Artificial Sequence: Synthetic oligonucleotide
  Sense strand starting at position 531 of SEQ ID NO: 1245185
cggaaauguucugaguuga

SEQ ID NO: 1543089 - RNA, 19 nt, Artificial Sequence
  Description of Artificial Sequence: Synthetic oligonucleotide
  Antisense strand to SEQ ID NO: 1543088
ucaacucagaacauuuccg

SEQ ID NO: 1543090 - RNA, 19 nt, Artificial Sequence
  Description of Artificial Sequence: Synthetic oligonucleotide
  Sense strand starting at position 571 of SEQ ID NO: 1245185
gaaacuucuugagaaagag

SEQ ID NO: 1543091 - RNA, 19 nt, Artificial Sequence
  Description of Artificial Sequence: Synthetic oligonucleotide
  Antisense strand to SEQ ID NO: 1543090
cucuuucucaagaaguuuc

SEQ ID NO: 1543092 - RNA, 19 nt, Artificial Sequence
  Description of Artificial Sequence: Synthetic oligonucleotide
  Sense strand starting at position 657 of SEQ ID NO: 1245185
augcaucauccauagcagu

SEQ ID NO: 1543093 - RNA, 19 nt, Artificial Sequence
  Description of Artificial Sequence: Synthetic oligonucleotide
  Antisense strand to SEQ ID NO: 1543092
acugcuauggaugaugcau

SEQ ID NO: 1543094 - RNA, 19 nt, Artificial Sequence
  Description of Artificial Sequence: Synthetic oligonucleotide
  Sense strand starting at position 668 of SEQ ID NO: 1245185
auagcaguucuugggaaau

SEQ ID NO: 1543095 - RNA, 19 nt, Artificial Sequence
  Description of Artificial Sequence: Synthetic oligonucleotide
  Antisense strand to SEQ ID NO: 1543094
auuucccaagaacugcuau

SEQ ID NO: 1543096 - RNA, 19 nt, Artificial Sequence
  Description of Artificial Sequence: Synthetic oligonucleotide
  Sense strand starting at position 2086 of SEQ ID NO: 1245185
augguaacgcugcaaauaa

SEQ ID NO: 1543097 - RNA, 19 nt, Artificial Sequence
  Description of Artificial Sequence: Synthetic oligonucleotide
  Antisense strand to SEQ ID NO: 1543096
uuauuugcagcguuaccau

SEQ ID NO: 1543098 - RNA, 19 nt, Artificial Sequence
  Description of Artificial Sequence: Synthetic oligonucleotide
  Sense strand starting at position 2148 of SEQ ID NO: 1245185
uuuccuuauuuaggguaaa

SEQ ID NO: 1543099 - RNA, 19 nt, Artificial Sequence
  Description of Artificial Sequence: Synthetic oligonucleotide
  Antisense strand to SEQ ID NO: 1543098
uuuacccuaaauaaggaaa

SEQ ID NO: 1543100 - RNA, 19 nt, Artificial Sequence
  Description of Artificial Sequence: Synthetic oligonucleotide
  Sense strand starting at position 2149 of SEQ ID NO: 1245185
uuccuuauuuaggguaaau

SEQ ID NO: 1543101 - RNA, 19 nt, Artificial Sequence
  Description of Artificial Sequence: Synthetic oligonucleotide
  Antisense strand to SEQ ID NO: 1543100
auuuacccuaaauaaggaa

SEQ ID NO: 1543102 - RNA, 19 nt, Artificial Sequence
  Description of Artificial Sequence: Synthetic oligonucleotide
  Sense strand starting at position 2170 of SEQ ID NO: 1245185
gaaugacaugugggccaua

SEQ ID NO: 1543103 - RNA, 19 nt, Artificial Sequence
  Description of Artificial Sequence: Synthetic oligonucleotide
  Antisense strand to SEQ ID NO: 1543102
uauggcccacaugucauuc

SEQ ID NO: 1543104 - RNA, 19 nt, Artificial Sequence
  Description of Artificial Sequence: Synthetic oligonucleotide
  Sense strand starting at position 2173 of SEQ ID NO: 1245185
ugacaugugggccauaaca

SEQ ID NO: 1543105 - RNA, 19 nt, Artificial Sequence
  Description of Artificial Sequence: Synthetic oligonucleotide
  Antisense strand to SEQ ID NO: 1543104
uguuauggcccacauguca

SEQ ID NO: 1543106 - RNA, 19 nt, Artificial Sequence
  Description of Artificial Sequence: Synthetic oligonucleotide
  Sense strand starting at position 2175 of SEQ ID NO: 1245185
acaugugggccauaacaau

SEQ ID NO: 1543107 - RNA, 19 nt, Artificial Sequence
  Description of Artificial Sequence: Synthetic oligonucleotide
  Antisense strand to SEQ ID NO: 1543106
auuguuauggcccacaugu

SEQ ID NO: 1543108 - RNA, 19 nt, Artificial Sequence
  Description of Artificial Sequence: Synthetic oligonucleotide
  Sense strand starting at position 2240 of SEQ ID NO: 1245185
gguuacuaccagcguuaga

SEQ ID NO: 1543109 - RNA, 19 nt, Artificial Sequence
  Description of Artificial Sequence: Synthetic oligonucleotide
  Antisense strand to SEQ ID NO: 1543108
ucuaacgcugguaguaacc

SEQ ID NO: 1543110 - RNA, 19 nt, Artificial Sequence
  Description of Artificial Sequence: Synthetic oligonucleotide
  Sense strand starting at position 2525 of SEQ ID NO: 1245185
gggaaauccggaugguaug

SEQ ID NO: 1543111 - RNA, 19 nt, Artificial Sequence
  Description of Artificial Sequence: Synthetic oligonucleotide
  Antisense strand to SEQ ID NO: 1543110
cauaccauccggauuuccc

SEQ ID NO: 1543112 - RNA, 19 nt, Artificial Sequence
  Description of Artificial Sequence: Synthetic oligonucleotide
  Sense strand starting at position 2526 of SEQ ID NO: 1245185
ggaaauccggaugguauga

SEQ ID NO: 1543113 - RNA, 19 nt, Artificial Sequence
  Description of Artificial Sequence: Synthetic oligonucleotide
  Antisense strand to SEQ ID NO: 1543112
ucauaccauccggauuucc

SEQ ID NO: 1543114 - RNA, 19 nt, Artificial Sequence
  Description of Artificial Sequence: Synthetic oligonucleotide
  Sense strand starting at position 2536 of SEQ ID NO: 1245185
augguaugauucuuccuga

SEQ ID NO: 1543115 - RNA, 19 nt, Artificial Sequence
  Description of Artificial Sequence: Synthetic oligonucleotide
  Antisense strand to SEQ ID NO: 1543114
ucaggaagaaucauaccau

SEQ ID NO: 1543116 - RNA, 19 nt, Artificial Sequence
  Description of Artificial Sequence: Synthetic oligonucleotide
  Sense strand starting at position 2537 of SEQ ID NO: 1245185
ugguaugauucuuccugag

SEQ ID NO: 1543117 - RNA, 19 nt, Artificial Sequence
  Description of Artificial Sequence: Synthetic oligonucleotide
  Antisense strand to SEQ ID NO: 1543116
cucaggaagaaucauacca

SEQ ID NO: 1543118 - RNA, 19 nt, Artificial Sequence
  Description of Artificial Sequence: Synthetic oligonucleotide
  Sense strand starting at position 2539 of SEQ ID NO: 1245185
guaugauucuuccugagca

SEQ ID NO: 1543119 - RNA, 19 nt, Artificial Sequence
  Description of Artificial Sequence: Synthetic oligonucleotide
  Antisense strand to SEQ ID NO: 1543118
ugcucaggaagaaucauac

SEQ ID NO: 1543120 - RNA, 19 nt, Artificial Sequence
  Description of Artificial Sequence: Synthetic oligonucleotide
  Sense strand starting at position 2541 of SEQ ID NO: 1245185
augauucuuccugagcaau

SEQ ID NO: 1543121 - RNA, 19 nt, Artificial Sequence
  Description of Artificial Sequence: Synthetic oligonucleotide
  Antisense strand to SEQ ID NO: 1543120
auugcucaggaagaaucau

SEQ ID NO: 1543122 - RNA, 19 nt, Artificial Sequence
  Description of Artificial Sequence: Synthetic oligonucleotide
  Sense strand starting at position 2551 of SEQ ID NO: 1245185
cugagcaauuuccgaauua

SEQ ID NO: 1543123 - RNA, 19 nt, Artificial Sequence
  Description of Artificial Sequence: Synthetic oligonucleotide
  Antisense strand to SEQ ID NO: 1543122
uaauucggaaauugcucag

SEQ ID NO: 1543124 - RNA, 19 nt, Artificial Sequence
  Description of Artificial Sequence: Synthetic oligonucleotide
  Sense strand starting at position 2552 of SEQ ID NO: 1245185
ugagcaauuuccgaauuaa

SEQ ID NO: 1543125 - RNA, 19 nt, Artificial Sequence
  Description of Artificial Sequence: Synthetic oligonucleotide
  Antisense strand to SEQ ID NO: 1543124
uuaauucggaaauugcuca

SEQ ID NO: 1543126 - RNA, 19 nt, Artificial Sequence
  Description of Artificial Sequence: Synthetic oligonucleotide
  Sense strand starting at position 2592 of SEQ ID NO: 1245185
gccagacuuucccugacuu

SEQ ID NO: 1543127 - RNA, 19 nt, Artificial Sequence
  Description of Artificial Sequence: Synthetic oligonucleotide
  Antisense strand to SEQ ID NO: 1543126
aagucagggaaagucuggc

SEQ ID NO: 1543128 - RNA, 19 nt, Artificial Sequence
  Description of Artificial Sequence: Synthetic oligonucleotide
  Sense strand starting at position 2600 of SEQ ID NO: 1245185
uucccugacuucucagagu

SEQ ID NO: 1543129 - RNA, 19 nt, Artificial Sequence
  Description of Artificial Sequence: Synthetic oligonucleotide
  Antisense strand to SEQ ID NO: 1543128
acucugagaagucagggaa

SEQ ID NO: 1543130 - RNA, 19 nt, Artificial Sequence
  Description of Artificial Sequence: Synthetic oligonucleotide
  Sense strand starting at position 2779 of SEQ ID NO: 1245185
caggcucagucacaugaua

SEQ ID NO: 1543131 - RNA, 19 nt, Artificial Sequence
  Description of Artificial Sequence: Synthetic oligonucleotide
  Antisense strand to SEQ ID NO: 1543130
uaucaugugacugagccug

SEQ ID NO: 1543132 - RNA, 19 nt, Artificial Sequence
  Description of Artificial Sequence: Synthetic oligonucleotide
  Sense strand starting at position 2845 of SEQ ID NO: 1245185
guaccugucuguuucuuaa

SEQ ID NO: 1543133 - RNA, 19 nt, Artificial Sequence
  Description of Artificial Sequence: Synthetic oligonucleotide
  Antisense strand to SEQ ID NO: 1543132
uuaagaaacagacagguac

SEQ ID NO: 1543134 - RNA, 19 nt, Artificial Sequence
  Description of Artificial Sequence: Synthetic oligonucleotide
  Sense strand starting at position 3197 of SEQ ID NO: 1245185
aaauuagggcuuuggugaa

SEQ ID NO: 1543135 - RNA, 19 nt, Artificial Sequence
  Description of Artificial Sequence: Synthetic oligonucleotide
  Antisense strand to SEQ ID NO: 1543134
uucaccaaagcccuaauuu

SEQ ID NO: 1543136 - RNA, 19 nt, Artificial Sequence
  Description of Artificial Sequence: Synthetic oligonucleotide
  Sense strand starting at position 3234 of SEQ ID NO: 1245185
guucuucucuccuuugcua

SEQ ID NO: 1543137 - RNA, 19 nt, Artificial Sequence
  Description of Artificial Sequence: Synthetic oligonucleotide
  Antisense strand to SEQ ID NO: 1543136
uagcaaaggagagaagaac

SEQ ID NO: 1543138 - RNA, 19 nt, Artificial Sequence
  Description of Artificial Sequence: Synthetic oligonucleotide
  Sense strand starting at position 3401 of SEQ ID NO: 1245185
cacuuacuguguuuggcua

SEQ ID NO: 1543139 - RNA, 19 nt, Artificial Sequence
  Description of Artificial Sequence: Synthetic oligonucleotide
  Antisense strand to SEQ ID NO: 1543138
uagccaaacacaguaagug

SEQ ID NO: 1543140 - RNA, 19 nt, Artificial Sequence
  Description of Artificial Sequence: Synthetic oligonucleotide
  Sense strand starting at position 3523 of SEQ ID NO: 1245185
uggcgaaauuucugauuac

SEQ ID NO: 1543141 - RNA, 19 nt, Artificial Sequence
  Description of Artificial Sequence: Synthetic oligonucleotide
  Antisense strand to SEQ ID NO: 1543140
guaaucagaaauuucgcca

SEQ ID NO: 1543142 - RNA, 19 nt, Artificial Sequence
  Description of Artificial Sequence: Synthetic oligonucleotide
  Sense strand starting at position 3524 of SEQ ID NO: 1245185
ggcgaaauuucugauuacu

SEQ ID NO: 1543143 - RNA, 19 nt, Artificial Sequence
  Description of Artificial Sequence: Synthetic oligonucleotide
  Antisense strand to SEQ ID NO: 1543142
aguaaucagaaauuucgcc

SEQ ID NO: 1543144 - RNA, 19 nt, Artificial Sequence
  Description of Artificial Sequence: Synthetic oligonucleotide
  Sense strand starting at position 3776 of SEQ ID NO: 1245185
uggagccgaucuuaauuaa

SEQ ID NO: 1543145 - RNA, 19 nt, Artificial Sequence
  Description of Artificial Sequence: Synthetic oligonucleotide
  Antisense strand to SEQ ID NO: 1543144
uuaauuaagaucggcucca

SEQ ID NO: 1543146 - RNA, 19 nt, Artificial Sequence
  Description of Artificial Sequence: Synthetic oligonucleotide
  Sense strand starting at position 3779 of SEQ ID NO: 1245185
agccgaucuuaauuaagcu

SEQ ID NO: 1543147 - RNA, 19 nt, Artificial Sequence
  Description of Artificial Sequence: Synthetic oligonucleotide
  Antisense strand to SEQ ID NO: 1543146
agcuuaauuaagaucggcu

SEQ ID NO: 1543148 - RNA, 19 nt, Artificial Sequence
  Description of Artificial Sequence: Synthetic oligonucleotide
  Sense strand starting at position 3808 of SEQ ID NO: 1245185
ucaguuuaauguucucaca

SEQ ID NO: 1543149 - RNA, 19 nt, Artificial Sequence
  Description of Artificial Sequence: Synthetic oligonucleotide
  Antisense strand to SEQ ID NO: 1543148
ugugagaacauuaaacuga

SEQ ID NO: 1543150 - RNA, 19 nt, Artificial Sequence
  Description of Artificial Sequence: Synthetic oligonucleotide
  Sense strand starting at position 3810 of SEQ ID NO: 1245185
aguuuaauguucucacagu

SEQ ID NO: 1543151 - RNA, 19 nt, Artificial Sequence
  Description of Artificial Sequence: Synthetic oligonucleotide
  Antisense strand to SEQ ID NO: 1543150
acugugagaacauuaaacu

SEQ ID NO: 1543152 - RNA, 19 nt, Artificial Sequence
  Description of Artificial Sequence: Synthetic oligonucleotide
  Sense strand starting at position 3947 of SEQ ID NO: 1245185
gcauaaugagcgcuccugu

SEQ ID NO: 1543153 - RNA, 19 nt, Artificial Sequence
  Description of Artificial Sequence: Synthetic oligonucleotide
  Antisense strand to SEQ ID NO: 1543152
acaggagcgcucauuaugc

SEQ ID NO: 1543154 - RNA, 19 nt, Artificial Sequence
  Description of Artificial Sequence: Synthetic oligonucleotide
  Sense strand starting at position 21 of SEQ ID NO: 1245186
agggaaucccucgaaugca

SEQ ID NO: 1543155 - RNA, 19 nt, Artificial Sequence
  Description of Artificial Sequence: Synthetic oligonucleotide
  Antisense strand to SEQ ID NO: 1543154
ugcauucgagggauucccu

SEQ ID NO: 1543156 - RNA, 19 nt, Artificial Sequence
  Description of Artificial Sequence: Synthetic oligonucleotide
  Sense strand starting at position 64 of SEQ ID NO: 1245186
aguggcaucuccucacuuu

SEQ ID NO: 1543157 - RNA, 19 nt, Artificial Sequence
  Description of Artificial Sequence: Synthetic oligonucleotide
  Antisense strand to SEQ ID NO: 1543156
aaagugaggagaugccacu

SEQ ID NO: 1543158 - RNA, 19 nt, Artificial Sequence
  Description of Artificial Sequence: Synthetic oligonucleotide
  Sense strand starting at position 65 of SEQ ID NO: 1245186
guggcaucuccucacuuua

SEQ ID NO: 1543159 - RNA, 19 nt, Artificial Sequence
  Description of Artificial Sequence: Synthetic oligonucleotide
  Antisense strand to SEQ ID NO: 1543158
uaaagugaggagaugccac

SEQ ID NO: 1543160 - RNA, 19 nt, Artificial Sequence
  Description of Artificial Sequence: Synthetic oligonucleotide
  Sense strand starting at position 190 of SEQ ID NO: 1245186
aaagaugacugacaggauu

SEQ ID NO: 1543161 - RNA, 19 nt, Artificial Sequence
  Description of Artificial Sequence: Synthetic oligonucleotide
  Antisense strand to SEQ ID NO: 1543160
aauccugucagucaucuuu

SEQ ID NO: 1543162 - RNA, 19 nt, Artificial Sequence
  Description of Artificial Sequence: Synthetic oligonucleotide
  Sense strand starting at position 430 of SEQ ID NO: 1245186
ggagagugguggcuucuga

SEQ ID NO: 1543163 - RNA, 19 nt, Artificial Sequence
  Description of Artificial Sequence: Synthetic oligonucleotide
  Antisense strand to SEQ ID NO: 1543162
ucagaagccaccacucucc

SEQ ID NO: 1543164 - RNA, 19 nt, Artificial Sequence
  Description of Artificial Sequence: Synthetic oligonucleotide
  Sense strand starting at position 575 of SEQ ID NO: 1245186
ccagccacauccugagaaa

SEQ ID NO: 1543165 - RNA, 19 nt, Artificial Sequence
  Description of Artificial Sequence: Synthetic oligonucleotide
  Antisense strand to SEQ ID NO: 1543164
uuucucaggauguggcugg

SEQ ID NO: 1543166 - RNA, 19 nt, Artificial Sequence
  Description of Artificial Sequence: Synthetic oligonucleotide
  Sense strand starting at position 578 of SEQ ID NO: 1245186
gccacauccugagaaauac

SEQ ID NO: 1543167 - RNA, 19 nt, Artificial Sequence
  Description of Artificial Sequence: Synthetic oligonucleotide
  Antisense strand to SEQ ID NO: 1543166
guauuucucaggauguggc

SEQ ID NO: 1543168 - RNA, 19 nt, Artificial Sequence
  Description of Artificial Sequence: Synthetic oligonucleotide
  Sense strand starting at position 620 of SEQ ID NO: 1245186
agcucaugagggugaagaa

SEQ ID NO: 1543169 - RNA, 19 nt, Artificial Sequence
  Description of Artificial Sequence: Synthetic oligonucleotide
  Antisense strand to SEQ ID NO: 1543168
uucuucacccucaugagcu

SEQ ID NO: 1543170 - RNA, 19 nt, Artificial Sequence
  Description of Artificial Sequence: Synthetic oligonucleotide
  Sense strand starting at position 675 of SEQ ID NO: 1245186
aggucucagccuuauauac

SEQ ID NO: 1543171 - RNA, 19 nt, Artificial Sequence
  Description of Artificial Sequence: Synthetic oligonucleotide
  Antisense strand to SEQ ID NO: 1543170
guauauaaggcugagaccu

SEQ ID NO: 1543172 - RNA, 19 nt, Artificial Sequence
  Description of Artificial Sequence: Synthetic oligonucleotide
  Sense strand starting at position 722 of SEQ ID NO: 1245186
gcaacaaacuguguacuca

SEQ ID NO: 1543173 - RNA, 19 nt, Artificial Sequence
  Description of Artificial Sequence: Synthetic oligonucleotide
  Antisense strand to SEQ ID NO: 1543172
ugaguacacaguuuguugc

SEQ ID NO: 1543174 - RNA, 19 nt, Artificial Sequence
  Description of Artificial Sequence: Synthetic oligonucleotide
  Sense strand starting at position 819 of SEQ ID NO: 1245186
gggagucccacccggaaau

SEQ ID NO: 1543175 - RNA, 19 nt, Artificial Sequence
  Description of Artificial Sequence: Synthetic oligonucleotide
  Antisense strand to SEQ ID NO: 1543174
auuuccgggugggacuccc

SEQ ID NO: 1543176 - RNA, 19 nt, Artificial Sequence
  Description of Artificial Sequence: Synthetic oligonucleotide
  Sense strand starting at position 831 of SEQ ID NO: 1245186
cggaaauguucugaguuga

SEQ ID NO: 1543177 - RNA, 19 nt, Artificial Sequence
  Description of Artificial Sequence: Synthetic oligonucleotide
  Antisense strand to SEQ ID NO: 1543176
ucaacucagaacauuuccg

SEQ ID NO: 1543178 - RNA, 19 nt, Artificial Sequence
  Description of Artificial Sequence: Synthetic oligonucleotide
  Sense strand starting at position 871 of SEQ ID NO: 1245186
gaaacuucuugagaaagag

SEQ ID NO: 1543179 - RNA, 19 nt, Artificial Sequence
  Description of Artificial Sequence: Synthetic oligonucleotide
  Antisense strand to SEQ ID NO: 1543178
cucuuucucaagaaguuuc

SEQ ID NO: 1543180 - RNA, 19 nt, Artificial Sequence
  Description of Artificial Sequence: Synthetic oligonucleotide
  Sense strand starting at position 957 of SEQ ID NO: 1245186
augcaucauccauagcagu

SEQ ID NO: 1543181 - RNA, 19 nt, Artificial Sequence
  Description of Artificial Sequence: Synthetic oligonucleotide
  Antisense strand to SEQ ID NO: 1543180
acugcuauggaugaugcau

SEQ ID NO: 1543182 - RNA, 19 nt, Artificial Sequence
  Description of Artificial Sequence: Synthetic oligonucleotide
  Sense strand starting at position 968 of SEQ ID NO: 1245186
auagcaguucuugggaaau

SEQ ID NO: 1543183 - RNA, 19 nt, Artificial Sequence
  Description of Artificial Sequence: Synthetic oligonucleotide
  Antisense strand to SEQ ID NO: 1543182
auuucccaagaacugcuau

SEQ ID NO: 1543184 - RNA, 19 nt, Artificial Sequence
  Description of Artificial Sequence: Synthetic oligonucleotide
  Sense strand starting at position 970 of SEQ ID NO: 1245186
agcaguucuugggaaaugu

SEQ ID NO: 1543185 - RNA, 19 nt, Artificial Sequence
  Description of Artificial Sequence: Synthetic oligonucleotide
  Antisense strand to SEQ ID NO: 1543184
acauuucccaagaacugcu

SEQ ID NO: 1543186 - RNA, 19 nt, Artificial Sequence
  Description of Artificial Sequence: Synthetic oligonucleotide
  Sense strand starting at position 2386 of SEQ ID NO: 1245186
augguaacgcugcaaauaa

SEQ ID NO: 1543187 - RNA, 19 nt, Artificial Sequence
  Description of Artificial Sequence: Synthetic oligonucleotide
  Antisense strand to SEQ ID NO: 1543186
uuauuugcagcguuaccau

SEQ ID NO: 1543188 - RNA, 19 nt, Artificial Sequence
  Description of Artificial Sequence: Synthetic oligonucleotide
  Sense strand starting at position 2448 of SEQ ID NO: 1245186
uuuccuuauuuaggguaaa

SEQ ID NO: 1543189 - RNA, 19 nt, Artificial Sequence
  Description of Artificial Sequence: Synthetic oligonucleotide
  Antisense strand to SEQ ID NO: 1543188
uuuacccuaaauaaggaaa

SEQ ID NO: 1543190 - RNA, 19 nt, Artificial Sequence
  Description of Artificial Sequence: Synthetic oligonucleotide
  Sense strand starting at position 2449 of SEQ ID NO: 1245186
uuccuuauuuaggguaaau

SEQ ID NO: 1543191 - RNA, 19 nt, Artificial Sequence
  Description of Artificial Sequence: Synthetic oligonucleotide
  Antisense strand to SEQ ID NO: 1543190
auuuacccuaaauaaggaa

SEQ ID NO: 1543192 - RNA, 19 nt, Artificial Sequence
  Description of Artificial Sequence: Synthetic oligonucleotide
  Sense strand starting at position 2470 of SEQ ID NO: 1245186
gaaugacaugugggccaua

SEQ ID NO: 1543193 - RNA, 19 nt, Artificial Sequence
  Description of Artificial Sequence: Synthetic oligonucleotide
  Antisense strand to SEQ ID NO: 1543192
uauggcccacaugucauuc

SEQ ID NO: 1543194 - RNA, 19 nt, Artificial Sequence
  Description of Artificial Sequence: Synthetic oligonucleotide
  Sense strand starting at position 2473 of SEQ ID NO: 1245186
ugacaugugggccauaaca

SEQ ID NO: 1543195 - RNA, 19 nt, Artificial Sequence
  Description of Artificial Sequence: Synthetic oligonucleotide
  Antisense strand to SEQ ID NO: 1543194
uguuauggcccacauguca

SEQ ID NO: 1543196 - RNA, 19 nt, Artificial Sequence
  Description of Artificial Sequence: Synthetic oligonucleotide
  Sense strand starting at position 2475 of SEQ ID NO: 1245186
acaugugggccauaacaau

SEQ ID NO: 1543197 - RNA, 19 nt, Artificial Sequence
  Description of Artificial Sequence: Synthetic oligonucleotide
  Antisense strand to SEQ ID NO: 1543196
auuguuauggcccacaugu

SEQ ID NO: 1543198 - RNA, 19 nt, Artificial Sequence
  Description of Artificial Sequence: Synthetic oligonucleotide
  Sense strand starting at position 2540 of SEQ ID NO: 1245186
gguuacuaccagcguuaga

SEQ ID NO: 1543199 - RNA, 19 nt, Artificial Sequence
  Description of Artificial Sequence: Synthetic oligonucleotide
  Antisense strand to SEQ ID NO: 1543198
ucuaacgcugguaguaacc

SEQ ID NO: 1543200 - RNA, 19 nt, Artificial Sequence
  Description of Artificial Sequence: Synthetic oligonucleotide
  Sense strand starting at position 2825 of SEQ ID NO: 1245186
gggaaauccggaugguaug

SEQ ID NO: 1543201 - RNA, 19 nt, Artificial Sequence
  Description of Artificial Sequence: Synthetic oligonucleotide
  Antisense strand to SEQ ID NO: 1543200
cauaccauccggauuuccc

SEQ ID NO: 1543202 - RNA, 19 nt, Artificial Sequence
  Description of Artificial Sequence: Synthetic oligonucleotide
  Sense strand starting at position 2826 of SEQ ID NO: 1245186
ggaaauccggaugguauga

SEQ ID NO: 1543203 - RNA, 19 nt, Artificial Sequence
  Description of Artificial Sequence: Synthetic oligonucleotide
  Antisense strand to SEQ ID NO: 1543202
ucauaccauccggauuucc

SEQ ID NO: 1543204 - RNA, 19 nt, Artificial Sequence
  Description of Artificial Sequence: Synthetic oligonucleotide
  Sense strand starting at position 2836 of SEQ ID NO: 1245186
augguaugauucuuccuga

SEQ ID NO: 1543205 - RNA, 19 nt, Artificial Sequence
  Description of Artificial Sequence: Synthetic oligonucleotide
  Antisense strand to SEQ ID NO: 1543204
ucaggaagaaucauaccau

SEQ ID NO: 1543206 - RNA, 19 nt, Artificial Sequence
  Description of Artificial Sequence: Synthetic oligonucleotide
  Sense strand starting at position 2837 of SEQ ID NO: 1245186
ugguaugauucuuccugag

SEQ ID NO: 1543207 - RNA, 19 nt, Artificial Sequence
  Description of Artificial Sequence: Synthetic oligonucleotide
  Antisense strand to SEQ ID NO: 1543206
cucaggaagaaucauacca

SEQ ID NO: 1543208 - RNA, 19 nt, Artificial Sequence
  Description of Artificial Sequence: Synthetic oligonucleotide
  Sense strand starting at position 2839 of SEQ ID NO: 1245186
guaugauucuuccugagca

SEQ ID NO: 1543209 - RNA, 19 nt, Artificial Sequence
  Description of Artificial Sequence: Synthetic oligonucleotide
  Antisense strand to SEQ ID NO: 1543208
ugcucaggaagaaucauac

SEQ ID NO: 1543210 - RNA, 19 nt, Artificial Sequence
  Description of Artificial Sequence: Synthetic oligonucleotide
  Sense strand starting at position 2841 of SEQ ID NO: 1245186
augauucuuccugagcaau

SEQ ID NO: 1543211 - RNA, 19 nt, Artificial Sequence
  Description of Artificial Sequence: Synthetic oligonucleotide
  Antisense strand to SEQ ID NO: 1543210
auugcucaggaagaaucau

SEQ ID NO: 1543212 - RNA, 19 nt, Artificial Sequence
  Description of Artificial Sequence: Synthetic oligonucleotide
  Sense strand starting at position 2851 of SEQ ID NO: 1245186
cugagcaauuuccgaauua

SEQ ID NO: 1543213 - RNA, 19 nt, Artificial Sequence
  Description of Artificial Sequence: Synthetic oligonucleotide
  Antisense strand to SEQ ID NO: 1543212
uaauucggaaauugcucag

SEQ ID NO: 1543214 - RNA, 19 nt, Artificial Sequence
  Description of Artificial Sequence: Synthetic oligonucleotide
  Sense strand starting at position 2852 of SEQ ID NO: 1245186
ugagcaauuuccgaauuaa

SEQ ID NO: 1543215 - RNA, 19 nt, Artificial Sequence
  Description of Artificial Sequence: Synthetic oligonucleotide
  Antisense strand to SEQ ID NO: 1543214
uuaauucggaaauugcuca

SEQ ID NO: 1543216 - RNA, 19 nt, Artificial Sequence
  Description of Artificial Sequence: Synthetic oligonucleotide
  Sense strand starting at position 2892 of SEQ ID NO: 1245186
gccagacuuucccugacuu

SEQ ID NO: 1543217 - RNA, 19 nt, Artificial Sequence
  Description of Artificial Sequence: Synthetic oligonucleotide
  Antisense strand to SEQ ID NO: 1543216
aagucagggaaagucuggc

SEQ ID NO: 1543218 - RNA, 19 nt, Artificial Sequence
  Description of Artificial Sequence: Synthetic oligonucleotide
  Sense strand starting at position 2900 of SEQ ID NO: 1245186
uucccugacuucucagagu

SEQ ID NO: 1543219 - RNA, 19 nt, Artificial Sequence
  Description of Artificial Sequence: Synthetic oligonucleotide
  Antisense strand to SEQ ID NO: 1543218
acucugagaagucagggaa

SEQ ID NO: 1543220 - RNA, 19 nt, Artificial Sequence
  Description of Artificial Sequence: Synthetic oligonucleotide
  Sense strand starting at position 3079 of SEQ ID NO: 1245186
caggcucagucacaugaua

SEQ ID NO: 1543221 - RNA, 19 nt, Artificial Sequence
  Description of Artificial Sequence: Synthetic oligonucleotide
  Antisense strand to SEQ ID NO: 1543220
uaucaugugacugagccug

SEQ ID NO: 1543222 - RNA, 19 nt, Artificial Sequence
  Description of Artificial Sequence: Synthetic oligonucleotide
  Sense strand starting at position 3145 of SEQ ID NO: 1245186
guaccugucuguuucuuaa

SEQ ID NO: 1543223 - RNA, 19 nt, Artificial Sequence
  Description of Artificial Sequence: Synthetic oligonucleotide
  Antisense strand to SEQ ID NO: 1543222
uuaagaaacagacagguac

SEQ ID NO: 1543224 - RNA, 19 nt, Artificial Sequence
  Description of Artificial Sequence: Synthetic oligonucleotide
  Sense strand starting at position 3497 of SEQ ID NO: 1245186
aaauuagggcuuuggugaa

SEQ ID NO: 1543225 - RNA, 19 nt, Artificial Sequence
  Description of Artificial Sequence: Synthetic oligonucleotide
  Antisense strand to SEQ ID NO: 1543224
uucaccaaagcccuaauuu

SEQ ID NO: 1543226 - RNA, 19 nt, Artificial Sequence
  Description of Artificial Sequence: Synthetic oligonucleotide
  Sense strand starting at position 3534 of SEQ ID NO: 1245186
guucuucucuccuuugcua

SEQ ID NO: 1543227 - RNA, 19 nt, Artificial Sequence
  Description of Artificial Sequence: Synthetic oligonucleotide
  Antisense strand to SEQ ID NO: 1543226
uagcaaaggagagaagaac

SEQ ID NO: 1543228 - RNA, 19 nt, Artificial Sequence
  Description of Artificial Sequence: Synthetic oligonucleotide
  Sense strand starting at position 3701 of SEQ ID NO: 1245186
cacuuacuguguuuggcua

SEQ ID NO: 1543229 - RNA, 19 nt, Artificial Sequence
  Description of Artificial Sequence: Synthetic oligonucleotide
  Antisense strand to SEQ ID NO: 1543228
uagccaaacacaguaagug

SEQ ID NO: 1543230 - RNA, 19 nt, Artificial Sequence
  Description of Artificial Sequence: Synthetic oligonucleotide
  Sense strand starting at position 3823 of SEQ ID NO: 1245186
uggcgaaauuucugauuac

SEQ ID NO: 1543231 - RNA, 19 nt, Artificial Sequence
  Description of Artificial Sequence: Synthetic oligonucleotide
  Antisense strand to SEQ ID NO: 1543230
guaaucagaaauuucgcca

SEQ ID NO: 1543232 - RNA, 19 nt, Artificial Sequence
  Description of Artificial Sequence: Synthetic oligonucleotide
  Sense strand starting at position 3824 of SEQ ID NO: 1245186
ggcgaaauuucugauuacu

SEQ ID NO: 1543233 - RNA, 19 nt, Artificial Sequence
  Description of Artificial Sequence: Synthetic oligonucleotide
  Antisense strand to SEQ ID NO: 1543232
aguaaucagaaauuucgcc

SEQ ID NO: 1543234 - RNA, 19 nt, Artificial Sequence
  Description of Artificial Sequence: Synthetic oligonucleotide
  Sense strand starting at position 5 of SEQ ID NO: 1245187
uuauuacacuuggagaugu

SEQ ID NO: 1543235 - RNA, 19 nt, Artificial Sequence
  Description of Artificial Sequence: Synthetic oligonucleotide
  Antisense strand to SEQ ID NO: 1543234
acaucuccaaguguaauaa

SEQ ID NO: 1543236 - RNA, 19 nt, Artificial Sequence
  Description of Artificial Sequence: Synthetic oligonucleotide
  Sense strand starting at position 24 of SEQ ID NO: 1245187
gggaaugaaucaugcuaug

SEQ ID NO: 1543237 - RNA, 19 nt, Artificial Sequence
  Description of Artificial Sequence: Synthetic oligonucleotide
  Antisense strand to SEQ ID NO: 1543236
cauagcaugauucauuccc

SEQ ID NO: 1543238 - RNA, 19 nt, Artificial Sequence
  Description of Artificial Sequence: Synthetic oligonucleotide
  Sense strand starting at position 29 of SEQ ID NO: 1245187
ugaaucaugcuaugauauu

SEQ ID NO: 1543239 - RNA, 19 nt, Artificial Sequence
  Description of Artificial Sequence: Synthetic oligonucleotide
  Antisense strand to SEQ ID NO: 1543238
aauaucauagcaugauuca

SEQ ID NO: 1543240 - RNA, 19 nt, Artificial Sequence
  Description of Artificial Sequence: Synthetic oligonucleotide
  Sense strand starting at position 71 of SEQ ID NO: 1245187
ggcacauuaguagaagcuu

SEQ ID NO: 1543241 - RNA, 19 nt, Artificial Sequence
  Description of Artificial Sequence: Synthetic oligonucleotide
  Antisense strand to SEQ ID NO: 1543240
aagcuucuacuaaugugcc

SEQ ID NO: 1543242 - RNA, 19 nt, Artificial Sequence
  Description of Artificial Sequence: Synthetic oligonucleotide
  Sense strand starting at position 85 of SEQ ID NO: 1245187
agcuuacgggaucauguaa

SEQ ID NO: 1543243 - RNA, 19 nt, Artificial Sequence
  Description of Artificial Sequence: Synthetic oligonucleotide
  Antisense strand to SEQ ID NO: 1543242
uuacaugaucccguaagcu

SEQ ID NO: 1543244 - RNA, 19 nt, Artificial Sequence
  Description of Artificial Sequence: Synthetic oligonucleotide
  Sense strand starting at position 106 of SEQ ID NO: 1245187
auaagugauucucaaauug

SEQ ID NO: 1543245 - RNA, 19 nt, Artificial Sequence
  Description of Artificial Sequence: Synthetic oligonucleotide
  Antisense strand to SEQ ID NO: 1543244
caauuugagaaucacuuau

SEQ ID NO: 1543246 - RNA, 19 nt, Artificial Sequence
  Description of Artificial Sequence: Synthetic oligonucleotide
  Sense strand starting at position 140 of SEQ ID NO: 1245187
uuuagacuagcaggaauaa

SEQ ID NO: 1543247 - RNA, 19 nt, Artificial Sequence
  Description of Artificial Sequence: Synthetic oligonucleotide
  Antisense strand to SEQ ID NO: 1543246
uuauuccugcuagucuaaa

SEQ ID NO: 1543248 - RNA, 19 nt, Artificial Sequence
  Description of Artificial Sequence: Synthetic oligonucleotide
  Sense strand starting at position 198 of SEQ ID NO: 1245187
accaaaguucuaggcaaug

SEQ ID NO: 1543249 - RNA, 19 nt, Artificial Sequence
  Description of Artificial Sequence: Synthetic oligonucleotide
  Antisense strand to SEQ ID NO: 1543248
cauugccuagaacuuuggu

SEQ ID NO: 1543250 - RNA, 19 nt, Artificial Sequence
  Description of Artificial Sequence: Synthetic oligonucleotide
  Sense strand starting at position 210 of SEQ ID NO: 1245187
ggcaaugccuuccuccaaa

SEQ ID NO: 1543251 - RNA, 19 nt, Artificial Sequence
  Description of Artificial Sequence: Synthetic oligonucleotide
  Antisense strand to SEQ ID NO: 1543250
uuuggaggaaggcauugcc

SEQ ID NO: 1543252 - RNA, 19 nt, Artificial Sequence
  Description of Artificial Sequence: Synthetic oligonucleotide
  Sense strand starting at position 897 of SEQ ID NO: 1245187
ucagaccucuugucuacau

SEQ ID NO: 1543253 - RNA, 19 nt, Artificial Sequence
  Description of Artificial Sequence: Synthetic oligonucleotide
  Antisense strand to SEQ ID NO: 1543252
auguagacaagaggucuga

SEQ ID NO: 1543254 - RNA, 19 nt, Artificial Sequence
  Description of Artificial Sequence: Synthetic oligonucleotide
  Sense strand starting at position 913 of SEQ ID NO: 1245187
cauggagggcugugaacaa

SEQ ID NO: 1543255 - RNA, 19 nt, Artificial Sequence
  Description of Artificial Sequence: Synthetic oligonucleotide
  Antisense strand to SEQ ID NO: 1543254
uuguucacagcccuccaug

SEQ ID NO: 1543256 - RNA, 19 nt, Artificial Sequence
  Description of Artificial Sequence: Synthetic oligonucleotide
  Sense strand starting at position 947 of SEQ ID NO: 1245187
aguugaacuccuggccaga

SEQ ID NO: 1543257 - RNA, 19 nt, Artificial Sequence
  Description of Artificial Sequence: Synthetic oligonucleotide
  Antisense strand to SEQ ID NO: 1543256
ucuggccaggaguucaacu

SEQ ID NO: 1543258 - RNA, 19 nt, Artificial Sequence
  Description of Artificial Sequence: Synthetic oligonucleotide
  Sense strand starting at position 949 of SEQ ID NO: 1245187
uugaacuccuggccagauu

SEQ ID NO: 1543259 - RNA, 19 nt, Artificial Sequence
  Description of Artificial Sequence: Synthetic oligonucleotide
  Antisense strand to SEQ ID NO: 1543258
aaucuggccaggaguucaa

SEQ ID NO: 1543260 - RNA, 19 nt, Artificial Sequence
  Description of Artificial Sequence: Synthetic oligonucleotide
  Sense strand starting at position 950 of SEQ ID NO: 1245187
ugaacuccuggccagauua

SEQ ID NO: 1543261 - RNA, 19 nt, Artificial Sequence
  Description of Artificial Sequence: Synthetic oligonucleotide
  Antisense strand to SEQ ID NO: 1543260
uaaucuggccaggaguuca

SEQ ID NO: 1543262 - RNA, 19 nt, Artificial Sequence
  Description of Artificial Sequence: Synthetic oligonucleotide
  Sense strand starting at position 998 of SEQ ID NO: 1245187
acaccugugugcuugaaau

SEQ ID NO: 1543263 - RNA, 19 nt, Artificial Sequence
  Description of Artificial Sequence: Synthetic oligonucleotide
  Antisense strand to SEQ ID NO: 1543262
auuucaagcacacaggugu

SEQ ID NO: 1543264 - RNA, 19 nt, Artificial Sequence
  Description of Artificial Sequence: Synthetic oligonucleotide
  Sense strand starting at position 2235 of SEQ ID NO: 1245187
ugcuguggcuugccugaau

SEQ ID NO: 1543265 - RNA, 19 nt, Artificial Sequence
  Description of Artificial Sequence: Synthetic oligonucleotide
  Antisense strand to SEQ ID NO: 1543264
auucaggcaagccacagca

SEQ ID NO: 1543266 - RNA, 19 nt, Artificial Sequence
  Description of Artificial Sequence: Synthetic oligonucleotide
  Sense strand starting at position 2246 of SEQ ID NO: 1245187
gccugaaugcaaggacuau

SEQ ID NO: 1543267 - RNA, 19 nt, Artificial Sequence
  Description of Artificial Sequence: Synthetic oligonucleotide
  Antisense strand to SEQ ID NO: 1543266
auaguccuugcauucaggc

SEQ ID NO: 1543268 - RNA, 19 nt, Artificial Sequence
  Description of Artificial Sequence: Synthetic oligonucleotide
  Sense strand starting at position 2371 of SEQ ID NO: 1245187
auccauuugucucugccua

SEQ ID NO: 1543269 - RNA, 19 nt, Artificial Sequence
  Description of Artificial Sequence: Synthetic oligonucleotide
  Antisense strand to SEQ ID NO: 1543268
uaggcagagacaaauggau

SEQ ID NO: 1543270 - RNA, 19 nt, Artificial Sequence
  Description of Artificial Sequence: Synthetic oligonucleotide
  Sense strand starting at position 2372 of SEQ ID NO: 1245187
uccauuugucucugccuau

SEQ ID NO: 1543271 - RNA, 19 nt, Artificial Sequence
  Description of Artificial Sequence: Synthetic oligonucleotide
  Antisense strand to SEQ ID NO: 1543270
auaggcagagacaaaugga

SEQ ID NO: 1543272 - RNA, 19 nt, Artificial Sequence
  Description of Artificial Sequence: Synthetic oligonucleotide
  Sense strand starting at position 2410 of SEQ ID NO: 1245187
agcaaucuaggcuaucuau

SEQ ID NO: 1543273 - RNA, 19 nt, Artificial Sequence
  Description of Artificial Sequence: Synthetic oligonucleotide
  Antisense strand to SEQ ID NO: 1543272
auagauagccuagauugcu

SEQ ID NO: 1543274 - RNA, 19 nt, Artificial Sequence
  Description of Artificial Sequence: Synthetic oligonucleotide
  Sense strand starting at position 2559 of SEQ ID NO: 1245187
ugcuaaagugcugaaauca

SEQ ID NO: 1543275 - RNA, 19 nt, Artificial Sequence
  Description of Artificial Sequence: Synthetic oligonucleotide
  Antisense strand to SEQ ID NO: 1543274
ugauuucagcacuuuagca

SEQ ID NO: 1543276 - RNA, 19 nt, Artificial Sequence
  Description of Artificial Sequence: Synthetic oligonucleotide
  Sense strand starting at position 2599 of SEQ ID NO: 1245187
uccuccucucugggaaauu

SEQ ID NO: 1543277 - RNA, 19 nt, Artificial Sequence
  Description of Artificial Sequence: Synthetic oligonucleotide
  Antisense strand to SEQ ID NO: 1543276
aauuucccagagaggagga

SEQ ID NO: 1543278 - RNA, 19 nt, Artificial Sequence
  Description of Artificial Sequence: Synthetic oligonucleotide
  Sense strand starting at position 2633 of SEQ ID NO: 1245187
uaagaauuguugcuguuga

SEQ ID NO: 1543279 - RNA, 19 nt, Artificial Sequence
  Description of Artificial Sequence: Synthetic oligonucleotide
  Antisense strand to SEQ ID NO: 1543278
ucaacagcaacaauucuua

SEQ ID NO: 1543280 - RNA, 19 nt, Artificial Sequence
  Description of Artificial Sequence: Synthetic oligonucleotide
  Sense strand starting at position 2647 of SEQ ID NO: 1245187
guugacaucucaucagacu

SEQ ID NO: 1543281 - RNA, 19 nt, Artificial Sequence
  Description of Artificial Sequence: Synthetic oligonucleotide
  Antisense strand to SEQ ID NO: 1543280
agucugaugagaugucaac

SEQ ID NO: 1543282 - RNA, 19 nt, Artificial Sequence
  Description of Artificial Sequence: Synthetic oligonucleotide
  Sense strand starting at position 2656 of SEQ ID NO: 1245187
ucaucagacuugucucauc

SEQ ID NO: 1543283 - RNA, 19 nt, Artificial Sequence
  Description of Artificial Sequence: Synthetic oligonucleotide
  Antisense strand to SEQ ID NO: 1543282
gaugagacaagucugauga

SEQ ID NO: 1543284 - RNA, 19 nt, Artificial Sequence
  Description of Artificial Sequence: Synthetic oligonucleotide
  Sense strand starting at position 2679 of SEQ ID NO: 1245187
ccucuauauguguacuuua

SEQ ID NO: 1543285 - RNA, 19 nt, Artificial Sequence
  Description of Artificial Sequence: Synthetic oligonucleotide
  Antisense strand to SEQ ID NO: 1543284
uaaaguacacauauagagg

SEQ ID NO: 1543286 - RNA, 19 nt, Artificial Sequence
  Description of Artificial Sequence: Synthetic oligonucleotide
  Sense strand starting at position 2832 of SEQ ID NO: 1245187
gaccuacaugcgugacaca

SEQ ID NO: 1543287 - RNA, 19 nt, Artificial Sequence
  Description of Artificial Sequence: Synthetic oligonucleotide
  Antisense strand to SEQ ID NO: 1543286
ugugucacgcauguagguc

SEQ ID NO: 1543288 - RNA, 19 nt, Artificial Sequence
  Description of Artificial Sequence: Synthetic oligonucleotide
  Sense strand starting at position 2842 of SEQ ID NO: 1245187
cgugacacacauuguuuaa

SEQ ID NO: 1543289 - RNA, 19 nt, Artificial Sequence
  Description of Artificial Sequence: Synthetic oligonucleotide
  Antisense strand to SEQ ID NO: 1543288
uuaaacaaugugugucacg

SEQ ID NO: 1543290 - RNA, 19 nt, Artificial Sequence
  Description of Artificial Sequence: Synthetic oligonucleotide
  Sense strand starting at position 2885 of SEQ ID NO: 1245187
uuucuuaaggccugugaac

SEQ ID NO: 1543291 - RNA, 19 nt, Artificial Sequence
  Description of Artificial Sequence: Synthetic oligonucleotide
  Antisense strand to SEQ ID NO: 1543290
guucacaggccuuaagaaa

SEQ ID NO: 1543292 - RNA, 19 nt, Artificial Sequence
  Description of Artificial Sequence: Synthetic oligonucleotide
  Sense strand starting at position 2979 of SEQ ID NO: 1245187
cagagaguuccugaggcca

SEQ ID NO: 1543293 - RNA, 19 nt, Artificial Sequence
  Description of Artificial Sequence: Synthetic oligonucleotide
  Antisense strand to SEQ ID NO: 1543292
uggccucaggaacucucug

SEQ ID NO: 1543294 - RNA, 19 nt, Artificial Sequence
  Description of Artificial Sequence: Synthetic oligonucleotide
  Sense strand starting at position 3206 of SEQ ID NO: 1245187
gguguucugcccugagguu

SEQ ID NO: 1543295 - RNA, 19 nt, Artificial Sequence
  Description of Artificial Sequence: Synthetic oligonucleotide
  Antisense strand to SEQ ID NO: 1543294
aaccucagggcagaacacc

SEQ ID NO: 1543296 - RNA, 19 nt, Artificial Sequence
  Description of Artificial Sequence: Synthetic oligonucleotide
  Sense strand starting at position 3256 of SEQ ID NO: 1245187
agaguuggccacugguaga

SEQ ID NO: 1543297 - RNA, 19 nt, Artificial Sequence
  Description of Artificial Sequence: Synthetic oligonucleotide
  Antisense strand to SEQ ID NO: 1543296
ucuaccaguggccaacucu

SEQ ID NO: 1543298 - RNA, 19 nt, Artificial Sequence
  Description of Artificial Sequence: Synthetic oligonucleotide
  Sense strand starting at position 3363 of SEQ ID NO: 1245187
gcaggaauguaacagcaaa

SEQ ID NO: 1543299 - RNA, 19 nt, Artificial Sequence
  Description of Artificial Sequence: Synthetic oligonucleotide
  Antisense strand to SEQ ID NO: 1543298
uuugcuguuacauuccugc

SEQ ID NO: 1543300 - RNA, 19 nt, Artificial Sequence
  Description of Artificial Sequence: Synthetic oligonucleotide
  Sense strand starting at position 3750 of SEQ ID NO: 1245187
uugccaguuucuuucuuua

SEQ ID NO: 1543301 - RNA, 19 nt, Artificial Sequence
  Description of Artificial Sequence: Synthetic oligonucleotide
  Antisense strand to SEQ ID NO: 1543300
uaaagaaagaaacuggcaa

SEQ ID NO: 1543302 - RNA, 19 nt, Artificial Sequence
  Description of Artificial Sequence: Synthetic oligonucleotide
  Sense strand starting at position 3752 of SEQ ID NO: 1245187
gccaguuucuuucuuuaag

SEQ ID NO: 1543303 - RNA, 19 nt, Artificial Sequence
  Description of Artificial Sequence: Synthetic oligonucleotide
  Antisense strand to SEQ ID NO: 1543302
cuuaaagaaagaaacuggc

SEQ ID NO: 1543304 - RNA, 19 nt, Artificial Sequence
  Description of Artificial Sequence: Synthetic oligonucleotide
  Sense strand starting at position 3753 of SEQ ID NO: 1245187
ccaguuucuuucuuuaagu

SEQ ID NO: 1543305 - RNA, 19 nt, Artificial Sequence
  Description of Artificial Sequence: Synthetic oligonucleotide
  Antisense strand to SEQ ID NO: 1543304
acuuaaagaaagaaacugg

SEQ ID NO: 1543306 - RNA, 19 nt, Artificial Sequence
  Description of Artificial Sequence: Synthetic oligonucleotide
  Sense strand starting at position 3807 of SEQ ID NO: 1245187
uuuauacaguuguaaccau

SEQ ID NO: 1543307 - RNA, 19 nt, Artificial Sequence
  Description of Artificial Sequence: Synthetic oligonucleotide
  Antisense strand to SEQ ID NO: 1543306
augguuacaacuguauaaa

SEQ ID NO: 1543308 - RNA, 19 nt, Artificial Sequence
  Description of Artificial Sequence: Synthetic oligonucleotide
  Sense strand starting at position 3821 of SEQ ID NO: 1245187
accauaauguggccagagu

SEQ ID NO: 1543309 - RNA, 19 nt, Artificial Sequence
  Description of Artificial Sequence: Synthetic oligonucleotide
  Antisense strand to SEQ ID NO: 1543308
acucuggccacauuauggu

SEQ ID NO: 1543310 - RNA, 19 nt, Artificial Sequence
  Description of Artificial Sequence: Synthetic oligonucleotide
  Sense strand starting at position 3822 of SEQ ID NO: 1245187
ccauaauguggccagaguu

SEQ ID NO: 1543311 - RNA, 19 nt, Artificial Sequence
  Description of Artificial Sequence: Synthetic oligonucleotide
  Antisense strand to SEQ ID NO: 1543310
aacucuggccacauuaugg

SEQ ID NO: 1543312 - RNA, 19 nt, Artificial Sequence
  Description of Artificial Sequence: Synthetic oligonucleotide
  Sense strand starting at position 3837 of SEQ ID NO: 1245187
aguuguguauucucuucuu

SEQ ID NO: 1543313 - RNA, 19 nt, Artificial Sequence
  Description of Artificial Sequence: Synthetic oligonucleotide
  Antisense strand to SEQ ID NO: 1543312
aagaagagaauacacaacu

SEQ ID NO: 1543314 - RNA, 19 nt, Artificial Sequence
  Description of Artificial Sequence: Synthetic oligonucleotide
  Sense strand starting at position 26 of SEQ ID NO: 1245188
aggcacauccugcaguuaa

SEQ ID NO: 1543315 - RNA, 19 nt, Artificial Sequence
  Description of Artificial Sequence: Synthetic oligonucleotide
  Antisense strand to SEQ ID NO: 1543314
uuaacugcaggaugugccu

SEQ ID NO: 1543316 - RNA, 19 nt, Artificial Sequence
  Description of Artificial Sequence: Synthetic oligonucleotide
  Sense strand starting at position 127 of SEQ ID NO: 1245188
agcucuuaggaaugucuca

SEQ ID NO: 1543317 - RNA, 19 nt, Artificial Sequence
  Description of Artificial Sequence: Synthetic oligonucleotide
  Antisense strand to SEQ ID NO: 1543316
ugagacauuccuaagagcu

SEQ ID NO: 1543318 - RNA, 19 nt, Artificial Sequence
  Description of Artificial Sequence: Synthetic oligonucleotide
  Sense strand starting at position 154 of SEQ ID NO: 1245188
cugugagcugcuuaaggga

SEQ ID NO: 1543319 - RNA, 19 nt, Artificial Sequence
  Description of Artificial Sequence: Synthetic oligonucleotide
  Antisense strand to SEQ ID NO: 1543318
ucccuuaagcagcucacag

SEQ ID NO: 1543320 - RNA, 19 nt, Artificial Sequence
  Description of Artificial Sequence: Synthetic oligonucleotide
  Sense strand starting at position 207 of SEQ ID NO: 1245188
ccaggacagucagcuguaa

SEQ ID NO: 1543321 - RNA, 19 nt, Artificial Sequence
  Description of Artificial Sequence: Synthetic oligonucleotide
  Antisense strand to SEQ ID NO: 1543320
uuacagcugacuguccugg

SEQ ID NO: 1543322 - RNA, 19 nt, Artificial Sequence
  Description of Artificial Sequence: Synthetic oligonucleotide
  Sense strand starting at position 209 of SEQ ID NO: 1245188
aggacagucagcuguaaga

SEQ ID NO: 1543323 - RNA, 19 nt, Artificial Sequence
  Description of Artificial Sequence: Synthetic oligonucleotide
  Antisense strand to SEQ ID NO: 1543322
ucuuacagcugacuguccu

SEQ ID NO: 1543324 - RNA, 19 nt, Artificial Sequence
  Description of Artificial Sequence: Synthetic oligonucleotide
  Sense strand starting at position 211 of SEQ ID NO: 1245188
gacagucagcuguaagaac

SEQ ID NO: 1543325 - RNA, 19 nt, Artificial Sequence
  Description of Artificial Sequence: Synthetic oligonucleotide
  Antisense strand to SEQ ID NO: 1543324
guucuuacagcugacuguc

SEQ ID NO: 1543326 - RNA, 19 nt, Artificial Sequence
  Description of Artificial Sequence: Synthetic oligonucleotide
  Sense strand starting at position 329 of SEQ ID NO: 1245188
agugauuucuucuuuagcu

SEQ ID NO: 1543327 - RNA, 19 nt, Artificial Sequence
  Description of Artificial Sequence: Synthetic oligonucleotide
  Antisense strand to SEQ ID NO: 1543326
agcuaaagaagaaaucacu

SEQ ID NO: 1543328 - RNA, 19 nt, Artificial Sequence
  Description of Artificial Sequence: Synthetic oligonucleotide
  Sense strand starting at position 330 of SEQ ID NO: 1245188
gugauuucuucuuuagcug

SEQ ID NO: 1543329 - RNA, 19 nt, Artificial Sequence
  Description of Artificial Sequence: Synthetic oligonucleotide
  Antisense strand to SEQ ID NO: 1543328
cagcuaaagaagaaaucac

SEQ ID NO: 1543330 - RNA, 19 nt, Artificial Sequence
  Description of Artificial Sequence: Synthetic oligonucleotide
  Sense strand starting at position 368 of SEQ ID NO: 1245188
caacguagcucuguauuua

SEQ ID NO: 1543331 - RNA, 19 nt, Artificial Sequence
  Description of Artificial Sequence: Synthetic oligonucleotide
  Antisense strand to SEQ ID NO: 1543330
uaaauacagagcuacguug

SEQ ID NO: 1543332 - RNA, 19 nt, Artificial Sequence
  Description of Artificial Sequence: Synthetic oligonucleotide
  Sense strand starting at position 440 of SEQ ID NO: 1245188
uuugaaaguugcuuaaacu

SEQ ID NO: 1543333 - RNA, 19 nt, Artificial Sequence
  Description of Artificial Sequence: Synthetic oligonucleotide
  Antisense strand to SEQ ID NO: 1543332
aguuuaagcaacuuucaaa

SEQ ID NO: 1543334 - RNA, 19 nt, Artificial Sequence
  Description of Artificial Sequence: Synthetic oligonucleotide
  Sense strand starting at position 441 of SEQ ID NO: 1245188
uugaaaguugcuuaaacua

SEQ ID NO: 1543335 - RNA, 19 nt, Artificial Sequence
  Description of Artificial Sequence: Synthetic oligonucleotide
  Antisense strand to SEQ ID NO: 1543334
uaguuuaagcaacuuucaa

SEQ ID NO: 1543336 - RNA, 19 nt, Artificial Sequence
  Description of Artificial Sequence: Synthetic oligonucleotide
  Sense strand starting at position 449 of SEQ ID NO: 1245188
ugcuuaaacuaauugauga

SEQ ID NO: 1543337 - RNA, 19 nt, Artificial Sequence
  Description of Artificial Sequence: Synthetic oligonucleotide
  Antisense strand to SEQ ID NO: 1543336
ucaucaauuaguuuaagca

SEQ ID NO: 1543338 - RNA, 19 nt, Artificial Sequence
  Description of Artificial Sequence: Synthetic oligonucleotide
  Sense strand starting at position 457 of SEQ ID NO: 1245188
cuaauugaugagugaggua

SEQ ID NO: 1543339 - RNA, 19 nt, Artificial Sequence
  Description of Artificial Sequence: Synthetic oligonucleotide
  Antisense strand to SEQ ID NO: 1543338
uaccucacucaucaauuag

SEQ ID NO: 1543340 - RNA, 19 nt, Artificial Sequence
  Description of Artificial Sequence: Synthetic oligonucleotide
  Sense strand starting at position 583 of SEQ ID NO: 1245188
ugguguguuccgcuaccua

SEQ ID NO: 1543341 - RNA, 19 nt, Artificial Sequence
  Description of Artificial Sequence: Synthetic oligonucleotide
  Antisense strand to SEQ ID NO: 1543340
uagguagcggaacacacca

SEQ ID NO: 1543342 - RNA, 19 nt, Artificial Sequence
  Description of Artificial Sequence: Synthetic oligonucleotide
  Sense strand starting at position 586 of SEQ ID NO: 1245188
uguguuccgcuaccuagua

SEQ ID NO: 1543343 - RNA, 19 nt, Artificial Sequence
  Description of Artificial Sequence: Synthetic oligonucleotide
  Antisense strand to SEQ ID NO: 1543342
uacuagguagcggaacaca

SEQ ID NO: 1543344 - RNA, 19 nt, Artificial Sequence
  Description of Artificial Sequence: Synthetic oligonucleotide
  Sense strand starting at position 612 of SEQ ID NO: 1245188
acuugaagacagugcuagu

SEQ ID NO: 1543345 - RNA, 19 nt, Artificial Sequence
  Description of Artificial Sequence: Synthetic oligonucleotide
  Antisense strand to SEQ ID NO: 1543344
acuagcacugucuucaagu

SEQ ID NO: 1543346 - RNA, 19 nt, Artificial Sequence
  Description of Artificial Sequence: Synthetic oligonucleotide
  Sense strand starting at position 652 of SEQ ID NO: 1245188
gcaacuguauuugagacaa

SEQ ID NO: 1543347 - RNA, 19 nt, Artificial Sequence
  Description of Artificial Sequence: Synthetic oligonucleotide
  Antisense strand to SEQ ID NO: 1543346
uugucucaaauacaguugc

SEQ ID NO: 1543348 - RNA, 19 nt, Artificial Sequence
  Description of Artificial Sequence: Synthetic oligonucleotide
  Sense strand starting at position 828 of SEQ ID NO: 1245188
cgugcuguucugucagguu

SEQ ID NO: 1543349 - RNA, 19 nt, Artificial Sequence
  Description of Artificial Sequence: Synthetic oligonucleotide
  Antisense strand to SEQ ID NO: 1543348
aaccugacagaacagcacg

SEQ ID NO: 1543350 - RNA, 19 nt, Artificial Sequence
  Description of Artificial Sequence: Synthetic oligonucleotide
  Sense strand starting at position 846 of SEQ ID NO: 1245188
uaauaaagggaucguguga

SEQ ID NO: 1543351 - RNA, 19 nt, Artificial Sequence
  Description of Artificial Sequence: Synthetic oligonucleotide
  Antisense strand to SEQ ID NO: 1543350
ucacacgaucccuuuauua

SEQ ID NO: 1543352 - RNA, 19 nt, Artificial Sequence
  Description of Artificial Sequence: Synthetic oligonucleotide
  Sense strand starting at position 958 of SEQ ID NO: 1245188
aucgauugggcaugaaauu

SEQ ID NO: 1543353 - RNA, 19 nt, Artificial Sequence
  Description of Artificial Sequence: Synthetic oligonucleotide
  Antisense strand to SEQ ID NO: 1543352
aauuucaugcccaaucgau

SEQ ID NO: 1543354 - RNA, 19 nt, Artificial Sequence
  Description of Artificial Sequence: Synthetic oligonucleotide
  Sense strand starting at position 1291 of SEQ ID NO: 1245188
uguucuagacccugaagaa

SEQ ID NO: 1543355 - RNA, 19 nt, Artificial Sequence
  Description of Artificial Sequence: Synthetic oligonucleotide
  Antisense strand to SEQ ID NO: 1543354
uucuucagggucuagaaca

SEQ ID NO: 1543356 - RNA, 19 nt, Artificial Sequence
  Description of Artificial Sequence: Synthetic oligonucleotide
  Sense strand starting at position 1508 of SEQ ID NO: 1245188
guucuuugacaucaaguga

SEQ ID NO: 1543357 - RNA, 19 nt, Artificial Sequence
  Description of Artificial Sequence: Synthetic oligonucleotide
  Antisense strand to SEQ ID NO: 1543356
ucacuugaugucaaagaac

SEQ ID NO: 1543358 - RNA, 19 nt, Artificial Sequence
  Description of Artificial Sequence: Synthetic oligonucleotide
  Sense strand starting at position 1519 of SEQ ID NO: 1245188
ucaagugaagccugacaau

SEQ ID NO: 1543359 - RNA, 19 nt, Artificial Sequence
  Description of Artificial Sequence: Synthetic oligonucleotide
  Antisense strand to SEQ ID NO: 1543358
auugucaggcuucacuuga

SEQ ID NO: 1543360 - RNA, 19 nt, Artificial Sequence
  Description of Artificial Sequence: Synthetic oligonucleotide
  Sense strand starting at position 1723 of SEQ ID NO: 1245188
aagcuucuacugugaauag

SEQ ID NO: 1543361 - RNA, 19 nt, Artificial Sequence
  Description of Artificial Sequence: Synthetic oligonucleotide
  Antisense strand to SEQ ID NO: 1543360
cuauucacaguagaagcuu

SEQ ID NO: 1543362 - RNA, 19 nt, Artificial Sequence
  Description of Artificial Sequence: Synthetic oligonucleotide
  Sense strand starting at position 1794 of SEQ ID NO: 1245188
gaggcacacccuugucaaa

SEQ ID NO: 1543363 - RNA, 19 nt, Artificial Sequence
  Description of Artificial Sequence: Synthetic oligonucleotide
  Antisense strand to SEQ ID NO: 1543362
uuugacaagggugugccuc

SEQ ID NO: 1543364 - RNA, 19 nt, Artificial Sequence
  Description of Artificial Sequence: Synthetic oligonucleotide
  Sense strand starting at position 2016 of SEQ ID NO: 1245188
gaagaacuucugugagcca

SEQ ID NO: 1543365 - RNA, 19 nt, Artificial Sequence
  Description of Artificial Sequence: Synthetic oligonucleotide
  Antisense strand to SEQ ID NO: 1543364
uggcucacagaaguucuuc

SEQ ID NO: 1543366 - RNA, 19 nt, Artificial Sequence
  Description of Artificial Sequence: Synthetic oligonucleotide
  Sense strand starting at position 2086 of SEQ ID NO: 1245188
gagggcugucacgagaaga

SEQ ID NO: 1543367 - RNA, 19 nt, Artificial Sequence
  Description of Artificial Sequence: Synthetic oligonucleotide
  Antisense strand to SEQ ID NO: 1543366
ucuucucgugacagcccuc

SEQ ID NO: 1543368 - RNA, 19 nt, Artificial Sequence
  Description of Artificial Sequence: Synthetic oligonucleotide
  Sense strand starting at position 2247 of SEQ ID NO: 1245188
gaguccucaucuguuaaag

SEQ ID NO: 1543369 - RNA, 19 nt, Artificial Sequence
  Description of Artificial Sequence: Synthetic oligonucleotide
  Antisense strand to SEQ ID NO: 1543368
cuuuaacagaugaggacuc

SEQ ID NO: 1543370 - RNA, 19 nt, Artificial Sequence
  Description of Artificial Sequence: Synthetic oligonucleotide
  Sense strand starting at position 2338 of SEQ ID NO: 1245188
uuggacuggucuucuuaaa

SEQ ID NO: 1543371 - RNA, 19 nt, Artificial Sequence
  Description of Artificial Sequence: Synthetic oligonucleotide
  Antisense strand to SEQ ID NO: 1543370
uuuaagaagaccaguccaa

SEQ ID NO: 1543372 - RNA, 19 nt, Artificial Sequence
  Description of Artificial Sequence: Synthetic oligonucleotide
  Sense strand starting at position 2452 of SEQ ID NO: 1245188
agugauuccucugcugaaa

SEQ ID NO: 1543373 - RNA, 19 nt, Artificial Sequence
  Description of Artificial Sequence: Synthetic oligonucleotide
  Antisense strand to SEQ ID NO: 1543372
uuucagcagaggaaucacu

SEQ ID NO: 1543374 - RNA, 19 nt, Artificial Sequence
  Description of Artificial Sequence: Synthetic oligonucleotide
  Sense strand starting at position 2745 of SEQ ID NO: 1245188
aggugaacucagcaaagcu

SEQ ID NO: 1543375 - RNA, 19 nt, Artificial Sequence
  Description of Artificial Sequence: Synthetic oligonucleotide
  Antisense strand to SEQ ID NO: 1543374
agcuuugcugaguucaccu

SEQ ID NO: 1543376 - RNA, 19 nt, Artificial Sequence
  Description of Artificial Sequence: Synthetic oligonucleotide
  Sense strand starting at position 2899 of SEQ ID NO: 1245188
aagcgugcuccugccauau

SEQ ID NO: 1543377 - RNA, 19 nt, Artificial Sequence
  Description of Artificial Sequence: Synthetic oligonucleotide
  Antisense strand to SEQ ID NO: 1543376
auauggcaggagcacgcuu

SEQ ID NO: 1543378 - RNA, 19 nt, Artificial Sequence
  Description of Artificial Sequence: Synthetic oligonucleotide
  Sense strand starting at position 2915 of SEQ ID NO: 1245188
uaugccacuccugagugau

SEQ ID NO: 1543379 - RNA, 19 nt, Artificial Sequence
  Description of Artificial Sequence: Synthetic oligonucleotide
  Antisense strand to SEQ ID NO: 1543378
aucacucaggaguggcaua

SEQ ID NO: 1543380 - RNA, 19 nt, Artificial Sequence
  Description of Artificial Sequence: Synthetic oligonucleotide
  Sense strand starting at position 2927 of SEQ ID NO: 1245188
gagugaucagcccauguaa

SEQ ID NO: 1543381 - RNA, 19 nt, Artificial Sequence
  Description of Artificial Sequence: Synthetic oligonucleotide
  Antisense strand to SEQ ID NO: 1543380
uuacaugggcugaucacuc

SEQ ID NO: 1543382 - RNA, 19 nt, Artificial Sequence
  Description of Artificial Sequence: Synthetic oligonucleotide
  Sense strand starting at position 2929 of SEQ ID NO: 1245188
gugaucagcccauguaaag

SEQ ID NO: 1543383 - RNA, 19 nt, Artificial Sequence
  Description of Artificial Sequence: Synthetic oligonucleotide
  Antisense strand to SEQ ID NO: 1543382
cuuuacaugggcugaucac

SEQ ID NO: 1543384 - RNA, 19 nt, Artificial Sequence
  Description of Artificial Sequence: Synthetic oligonucleotide
  Sense strand starting at position 3182 of SEQ ID NO: 1245188
cagauuucuugggaacgga

SEQ ID NO: 1543385 - RNA, 19 nt, Artificial Sequence
  Description of Artificial Sequence: Synthetic oligonucleotide
  Antisense strand to SEQ ID NO: 1543384
uccguucccaagaaaucug

SEQ ID NO: 1543386 - RNA, 19 nt, Artificial Sequence
  Description of Artificial Sequence: Synthetic oligonucleotide
  Sense strand starting at position 3195 of SEQ ID NO: 1245188
aacggaaguccaugaaaua

SEQ ID NO: 1543387 - RNA, 19 nt, Artificial Sequence
  Description of Artificial Sequence: Synthetic oligonucleotide
  Antisense strand to SEQ ID NO: 1543386
uauuucauggacuuccguu

SEQ ID NO: 1543388 - RNA, 19 nt, Artificial Sequence
  Description of Artificial Sequence: Synthetic oligonucleotide
  Sense strand starting at position 3224 of SEQ ID NO: 1245188
uacuguggugggcagaauu

SEQ ID NO: 1543389 - RNA, 19 nt, Artificial Sequence
  Description of Artificial Sequence: Synthetic oligonucleotide
  Antisense strand to SEQ ID NO: 1543388
aauucugcccaccacagua

SEQ ID NO: 1543390 - RNA, 19 nt, Artificial Sequence
  Description of Artificial Sequence: Synthetic oligonucleotide
  Sense strand starting at position 3547 of SEQ ID NO: 1245188
guuacaagucaaugaauuc

SEQ ID NO: 1543391 - RNA, 19 nt, Artificial Sequence
  Description of Artificial Sequence: Synthetic oligonucleotide
  Antisense strand to SEQ ID NO: 1543390
gaauucauugacuuguaac

SEQ ID NO: 1543392 - RNA, 19 nt, Artificial Sequence
  Description of Artificial Sequence: Synthetic oligonucleotide
  Sense strand starting at position 3588 of SEQ ID NO: 1245188
ggagguggauucuuccaua

SEQ ID NO: 1543393 - RNA, 19 nt, Artificial Sequence
  Description of Artificial Sequence: Synthetic oligonucleotide
  Antisense strand to SEQ ID NO: 1543392
uauggaagaauccaccucc

SEQ ID NO: 1543394 - RNA, 19 nt, Artificial Sequence
  Description of Artificial Sequence: Synthetic oligonucleotide
  Sense strand starting at position 152 of SEQ ID NO: 1245189
uauauacuccagugggagu

SEQ ID NO: 1543395 - RNA, 19 nt, Artificial Sequence
  Description of Artificial Sequence: Synthetic oligonucleotide
  Antisense strand to SEQ ID NO: 1543394
acucccacuggaguauaua

SEQ ID NO: 1543396 - RNA, 19 nt, Artificial Sequence
  Description of Artificial Sequence: Synthetic oligonucleotide
  Sense strand starting at position 153 of SEQ ID NO: 1245189
auauacuccagugggagua

SEQ ID NO: 1543397 - RNA, 19 nt, Artificial Sequence
  Description of Artificial Sequence: Synthetic oligonucleotide
  Antisense strand to SEQ ID NO: 1543396
uacucccacuggaguauau

SEQ ID NO: 1543398 - RNA, 19 nt, Artificial Sequence
  Description of Artificial Sequence: Synthetic oligonucleotide
  Sense strand starting at position 258 of SEQ ID NO: 1245189
gcaggauuguggucuugca

SEQ ID NO: 1543399 - RNA, 19 nt, Artificial Sequence
  Description of Artificial Sequence: Synthetic oligonucleotide
  Antisense strand to SEQ ID NO: 1543398
ugcaagaccacaauccugc

SEQ ID NO: 1543400 - RNA, 19 nt, Artificial Sequence
  Description of Artificial Sequence: Synthetic oligonucleotide
  Sense strand starting at position 322 of SEQ ID NO: 1245189
cgggaagagucuucuccaa

SEQ ID NO: 1543401 - RNA, 19 nt, Artificial Sequence
  Description of Artificial Sequence: Synthetic oligonucleotide
  Antisense strand to SEQ ID NO: 1543400
uuggagaagacucuucccg

SEQ ID NO: 1543402 - RNA, 19 nt, Artificial Sequence
  Description of Artificial Sequence: Synthetic oligonucleotide
  Sense strand starting at position 324 of SEQ ID NO: 1245189
ggaagagucuucuccaaug

SEQ ID NO: 1543403 - RNA, 19 nt, Artificial Sequence
  Description of Artificial Sequence: Synthetic oligonucleotide
  Antisense strand to SEQ ID NO: 1543402
cauuggagaagacucuucc

SEQ ID NO: 1543404 - RNA, 19 nt, Artificial Sequence
  Description of Artificial Sequence: Synthetic oligonucleotide
  Sense strand starting at position 329 of SEQ ID NO: 1245189
agucuucuccaauguaaau

SEQ ID NO: 1543405 - RNA, 19 nt, Artificial Sequence
  Description of Artificial Sequence: Synthetic oligonucleotide
  Antisense strand to SEQ ID NO: 1543404
auuuacauuggagaagacu

SEQ ID NO: 1543406 - RNA, 19 nt, Artificial Sequence
  Description of Artificial Sequence: Synthetic oligonucleotide
  Sense strand starting at position 403 of SEQ ID NO: 1245189
acagcagaauguuaagaaa

SEQ ID NO: 1543407 - RNA, 19 nt, Artificial Sequence
  Description of Artificial Sequence: Synthetic oligonucleotide
  Antisense strand to SEQ ID NO: 1543406
uuucuuaacauucugcugu

SEQ ID NO: 1543408 - RNA, 19 nt, Artificial Sequence
  Description of Artificial Sequence: Synthetic oligonucleotide
  Sense strand starting at position 406 of SEQ ID NO: 1245189
gcagaauguuaagaaauua

SEQ ID NO: 1543409 - RNA, 19 nt, Artificial Sequence
  Description of Artificial Sequence: Synthetic oligonucleotide
  Antisense strand to SEQ ID NO: 1543408
uaauuucuuaacauucugc

SEQ ID NO: 1543410 - RNA, 19 nt, Artificial Sequence
  Description of Artificial Sequence: Synthetic oligonucleotide
  Sense strand starting at position 445 of SEQ ID NO: 1245189
ggaggaagguagcuacaau

SEQ ID NO: 1543411 - RNA, 19 nt, Artificial Sequence
  Description of Artificial Sequence: Synthetic oligonucleotide
  Antisense strand to SEQ ID NO: 1543410
auuguagcuaccuuccucc

SEQ ID NO: 1543412 - RNA, 19 nt, Artificial Sequence
  Description of Artificial Sequence: Synthetic oligonucleotide
  Sense strand starting at position 683 of SEQ ID NO: 1245189
ggguaauacucagacaucc

SEQ ID NO: 1543413 - RNA, 19 nt, Artificial Sequence
  Description of Artificial Sequence: Synthetic oligonucleotide
  Antisense strand to SEQ ID NO: 1543412
ggaugucugaguauuaccc

SEQ ID NO: 1543414 - RNA, 19 nt, Artificial Sequence
  Description of Artificial Sequence: Synthetic oligonucleotide
  Sense strand starting at position 706 of SEQ ID NO: 1245189
uugucuauguaaugacuca

SEQ ID NO: 1543415 - RNA, 19 nt, Artificial Sequence
  Description of Artificial Sequence: Synthetic oligonucleotide
  Antisense strand to SEQ ID NO: 1543414
ugagucauuacauagacaa

SEQ ID NO: 1543416 - RNA, 19 nt, Artificial Sequence
  Description of Artificial Sequence: Synthetic oligonucleotide
  Sense strand starting at position 713 of SEQ ID NO: 1245189
uguaaugacucagauuuga

SEQ ID NO: 1543417 - RNA, 19 nt, Artificial Sequence
  Description of Artificial Sequence: Synthetic oligonucleotide
  Antisense strand to SEQ ID NO: 1543416
ucaaaucugagucauuaca

SEQ ID NO: 1543418 - RNA, 19 nt, Artificial Sequence
  Description of Artificial Sequence: Synthetic oligonucleotide
  Sense strand starting at position 735 of SEQ ID NO: 1245189
ucugauccuugacugaaca

SEQ ID NO: 1543419 - RNA, 19 nt, Artificial Sequence
  Description of Artificial Sequence: Synthetic oligonucleotide
  Antisense strand to SEQ ID NO: 1543418
uguucagucaaggaucaga

SEQ ID NO: 1543420 - RNA, 19 nt, Artificial Sequence
  Description of Artificial Sequence: Synthetic oligonucleotide
  Sense strand starting at position 771 of SEQ ID NO: 1245189
aagaauugugcagaguaca

SEQ ID NO: 1543421 - RNA, 19 nt, Artificial Sequence
  Description of Artificial Sequence: Synthetic oligonucleotide
  Antisense strand to SEQ ID NO: 1543420
uguacucugcacaauucuu

SEQ ID NO: 1543422 - RNA, 19 nt, Artificial Sequence
  Description of Artificial Sequence: Synthetic oligonucleotide
  Sense strand starting at position 857 of SEQ ID NO: 1245189
gcagacaugacuugaugca

SEQ ID NO: 1543423 - RNA, 19 nt, Artificial Sequence
  Description of Artificial Sequence: Synthetic oligonucleotide
  Antisense strand to SEQ ID NO: 1543422
ugcaucaagucaugucugc

SEQ ID NO: 1543424 - RNA, 19 nt, Artificial Sequence
  Description of Artificial Sequence: Synthetic oligonucleotide
  Sense strand starting at position 892 of SEQ ID NO: 1245189
gcagacuuugcagaaccuu

SEQ ID NO: 1543425 - RNA, 19 nt, Artificial Sequence
  Description of Artificial Sequence: Synthetic oligonucleotide
  Antisense strand to SEQ ID NO: 1543424
aagguucugcaaagucugc

SEQ ID NO: 1543426 - RNA, 19 nt, Artificial Sequence
  Description of Artificial Sequence: Synthetic oligonucleotide
  Sense strand starting at position 900 of SEQ ID NO: 1245189
ugcagaaccuucucuguca

SEQ ID NO: 1543427 - RNA, 19 nt, Artificial Sequence
  Description of Artificial Sequence: Synthetic oligonucleotide
  Antisense strand to SEQ ID NO: 1543426
ugacagagaagguucugca

SEQ ID NO: 1543428 - RNA, 19 nt, Artificial Sequence
  Description of Artificial Sequence: Synthetic oligonucleotide
  Sense strand starting at position 966 of SEQ ID NO: 1245189
gccauucuuggcuagccaa

SEQ ID NO: 1543429 - RNA, 19 nt, Artificial Sequence
  Description of Artificial Sequence: Synthetic oligonucleotide
  Antisense strand to SEQ ID NO: 1543428
uuggcuagccaagaauggc

SEQ ID NO: 1543430 - RNA, 19 nt, Artificial Sequence
  Description of Artificial Sequence: Synthetic oligonucleotide
  Sense strand starting at position 1023 of SEQ ID NO: 1245189
gcacuagcccuucgagaag

SEQ ID NO: 1543431 - RNA, 19 nt, Artificial Sequence
  Description of Artificial Sequence: Synthetic oligonucleotide
  Antisense strand to SEQ ID NO: 1543430
cuucucgaagggcuagugc

SEQ ID NO: 1543432 - RNA, 19 nt, Artificial Sequence
  Description of Artificial Sequence: Synthetic oligonucleotide
  Sense strand starting at position 1082 of SEQ ID NO: 1245189
agucaaugcugcucaccau

SEQ ID NO: 1543433 - RNA, 19 nt, Artificial Sequence
  Description of Artificial Sequence: Synthetic oligonucleotide
  Antisense strand to SEQ ID NO: 1543432
auggugagcagcauugacu

SEQ ID NO: 1543434 - RNA, 19 nt, Artificial Sequence
  Description of Artificial Sequence: Synthetic oligonucleotide
  Sense strand starting at position 1218 of SEQ ID NO: 1245189
uauguauugcaaugguaau

SEQ ID NO: 1543435 - RNA, 19 nt, Artificial Sequence
  Description of Artificial Sequence: Synthetic oligonucleotide
  Antisense strand to SEQ ID NO: 1543434
auuaccauugcaauacaua

SEQ ID NO: 1543436 - RNA, 19 nt, Artificial Sequence
  Description of Artificial Sequence: Synthetic oligonucleotide
  Sense strand starting at position 1224 of SEQ ID NO: 1245189
uugcaaugguaauuaacau

SEQ ID NO: 1543437 - RNA, 19 nt, Artificial Sequence
  Description of Artificial Sequence: Synthetic oligonucleotide
  Antisense strand to SEQ ID NO: 1543436
auguuaauuaccauugcaa

SEQ ID NO: 1543438 - RNA, 19 nt, Artificial Sequence
  Description of Artificial Sequence: Synthetic oligonucleotide
  Sense strand starting at position 1460 of SEQ ID NO: 1245189
aggaguccugcuugcuuua

SEQ ID NO: 1543439 - RNA, 19 nt, Artificial Sequence
  Description of Artificial Sequence: Synthetic oligonucleotide
  Antisense strand to SEQ ID NO: 1543438
uaaagcaagcaggacuccu

SEQ ID NO: 1543440 - RNA, 19 nt, Artificial Sequence
  Description of Artificial Sequence: Synthetic oligonucleotide
  Sense strand starting at position 1462 of SEQ ID NO: 1245189
gaguccugcuugcuuuaaa

SEQ ID NO: 1543441 - RNA, 19 nt, Artificial Sequence
  Description of Artificial Sequence: Synthetic oligonucleotide
  Antisense strand to SEQ ID NO: 1543440
uuuaaagcaagcaggacuc

SEQ ID NO: 1543442 - RNA, 19 nt, Artificial Sequence
  Description of Artificial Sequence: Synthetic oligonucleotide
  Sense strand starting at position 1587 of SEQ ID NO: 1245189
cgucccugucguccugaaa

SEQ ID NO: 1543443 - RNA, 19 nt, Artificial Sequence
  Description of Artificial Sequence: Synthetic oligonucleotide
  Antisense strand to SEQ ID NO: 1543442
uuucaggacgacagggacg

SEQ ID NO: 1543444 - RNA, 19 nt, Artificial Sequence
  Description of Artificial Sequence: Synthetic oligonucleotide
  Sense strand starting at position 1686 of SEQ ID NO: 1245189
cgccacgauagcgauuuaa

SEQ ID NO: 1543445 - RNA, 19 nt, Artificial Sequence
  Description of Artificial Sequence: Synthetic oligonucleotide
  Antisense strand to SEQ ID NO: 1543444
uuaaaucgcuaucguggcg

SEQ ID NO: 1543446 - RNA, 19 nt, Artificial Sequence
  Description of Artificial Sequence: Synthetic oligonucleotide
  Sense strand starting at position 2946 of SEQ ID NO: 1245189
aacgcacucgccugcuaau

SEQ ID NO: 1543447 - RNA, 19 nt, Artificial Sequence
  Description of Artificial Sequence: Synthetic oligonucleotide
  Antisense strand to SEQ ID NO: 1543446
auuagcaggcgagugcguu

SEQ ID NO: 1543448 - RNA, 19 nt, Artificial Sequence
  Description of Artificial Sequence: Synthetic oligonucleotide
  Sense strand starting at position 3698 of SEQ ID NO: 1245189
ccuagaaggucagauggau

SEQ ID NO: 1543449 - RNA, 19 nt, Artificial Sequence
  Description of Artificial Sequence: Synthetic oligonucleotide
  Antisense strand to SEQ ID NO: 1543448
auccaucugaccuucuagg

SEQ ID NO: 1543450 - RNA, 19 nt, Artificial Sequence
  Description of Artificial Sequence: Synthetic oligonucleotide
  Sense strand starting at position 3710 of SEQ ID NO: 1245189
gauggauucuucgcgcugu

SEQ ID NO: 1543451 - RNA, 19 nt, Artificial Sequence
  Description of Artificial Sequence: Synthetic oligonucleotide
  Antisense strand to SEQ ID NO: 1543450
acagcgcgaagaauccauc

SEQ ID NO: 1543452 - RNA, 19 nt, Artificial Sequence
  Description of Artificial Sequence: Synthetic oligonucleotide
  Sense strand starting at position 3712 of SEQ ID NO: 1245189
uggauucuucgcgcuguga

SEQ ID NO: 1543453 - RNA, 19 nt, Artificial Sequence
  Description of Artificial Sequence: Synthetic oligonucleotide
  Antisense strand to SEQ ID NO: 1543452
ucacagcgcgaagaaucca

SEQ ID NO: 1543454 - RNA, 19 nt, Artificial Sequence
  Description of Artificial Sequence: Synthetic oligonucleotide
  Sense strand starting at position 3713 of SEQ ID NO: 1245189
ggauucuucgcgcugugac

SEQ ID NO: 1543455 - RNA, 19 nt, Artificial Sequence
  Description of Artificial Sequence: Synthetic oligonucleotide
  Antisense strand to SEQ ID NO: 1543454
gucacagcgcgaagaaucc

SEQ ID NO: 1543456 - RNA, 19 nt, Artificial Sequence
  Description of Artificial Sequence: Synthetic oligonucleotide
  Sense strand starting at position 3854 of SEQ ID NO: 1245189
gggauugguuacugccaga

SEQ ID NO: 1543457 - RNA, 19 nt, Artificial Sequence
  Description of Artificial Sequence: Synthetic oligonucleotide
  Antisense strand to SEQ ID NO: 1543456
ucuggcaguaaccaauccc

SEQ ID NO: 1543458 - RNA, 19 nt, Artificial Sequence
  Description of Artificial Sequence: Synthetic oligonucleotide
  Sense strand starting at position 3857 of SEQ ID NO: 1245189
auugguuacugccagagca

SEQ ID NO: 1543459 - RNA, 19 nt, Artificial Sequence
  Description of Artificial Sequence: Synthetic oligonucleotide
  Antisense strand to SEQ ID NO: 1543458
ugcucuggcaguaaccaau

SEQ ID NO: 1543460 - RNA, 19 nt, Artificial Sequence
  Description of Artificial Sequence: Synthetic oligonucleotide
  Sense strand starting at position 3859 of SEQ ID NO: 1245189
ugguuacugccagagcaua

SEQ ID NO: 1543461 - RNA, 19 nt, Artificial Sequence
  Description of Artificial Sequence: Synthetic oligonucleotide
  Antisense strand to SEQ ID NO: 1543460
uaugcucuggcaguaacca

SEQ ID NO: 1543462 - RNA, 19 nt, Artificial Sequence
  Description of Artificial Sequence: Synthetic oligonucleotide
  Sense strand starting at position 3915 of SEQ ID NO: 1245189
uuaguucgccucugccaaa

SEQ ID NO: 1543463 - RNA, 19 nt, Artificial Sequence
  Description of Artificial Sequence: Synthetic oligonucleotide
  Antisense strand to SEQ ID NO: 1543462
uuuggcagaggcgaacuaa

SEQ ID NO: 1543464 - RNA, 19 nt, Artificial Sequence
  Description of Artificial Sequence: Synthetic oligonucleotide
  Sense strand starting at position 3977 of SEQ ID NO: 1245189
gguuucaggcuggguuuaa

SEQ ID NO: 1543465 - RNA, 19 nt, Artificial Sequence
  Description of Artificial Sequence: Synthetic oligonucleotide
  Antisense strand to SEQ ID NO: 1543464
uuaaacccagccugaaacc

SEQ ID NO: 1543466 - RNA, 19 nt, Artificial Sequence
  Description of Artificial Sequence: Synthetic oligonucleotide
  Sense strand starting at position 3981 of SEQ ID NO: 1245189
ucaggcuggguuuaagaua

SEQ ID NO: 1543467 - RNA, 19 nt, Artificial Sequence
  Description of Artificial Sequence: Synthetic oligonucleotide
  Antisense strand to SEQ ID NO: 1543466
uaucuuaaacccagccuga

SEQ ID NO: 1543468 - RNA, 19 nt, Artificial Sequence
  Description of Artificial Sequence: Synthetic oligonucleotide
  Sense strand starting at position 5 of SEQ ID NO: 1245190
cagguuaaccgucaugaaa

SEQ ID NO: 1543469 - RNA, 19 nt, Artificial Sequence
  Description of Artificial Sequence: Synthetic oligonucleotide
  Antisense strand to SEQ ID NO: 1543468
uuucaugacgguuaaccug

SEQ ID NO: 1543470 - RNA, 19 nt, Artificial Sequence
  Description of Artificial Sequence: Synthetic oligonucleotide
  Sense strand starting at position 8 of SEQ ID NO: 1245190
guuaaccgucaugaaagua

SEQ ID NO: 1543471 - RNA, 19 nt, Artificial Sequence
  Description of Artificial Sequence: Synthetic oligonucleotide
  Antisense strand to SEQ ID NO: 1543470
uacuuucaugacgguuaac

SEQ ID NO: 1543472 - RNA, 19 nt, Artificial Sequence
  Description of Artificial Sequence: Synthetic oligonucleotide
  Sense strand starting at position 13 of SEQ ID NO: 1245190
ccgucaugaaaguaaugaa

SEQ ID NO: 1543473 - RNA, 19 nt, Artificial Sequence
  Description of Artificial Sequence: Synthetic oligonucleotide
  Antisense strand to SEQ ID NO: 1543472
uucauuacuuucaugacgg

SEQ ID NO: 1543474 - RNA, 19 nt, Artificial Sequence
  Description of Artificial Sequence: Synthetic oligonucleotide
  Sense strand starting at position 66 of SEQ ID NO: 1245190
acauaaugaguucgacaac

SEQ ID NO: 1543475 - RNA, 19 nt, Artificial Sequence
  Description of Artificial Sequence: Synthetic oligonucleotide
  Antisense strand to SEQ ID NO: 1543474
guugucgaacucauuaugu

SEQ ID NO: 1543476 - RNA, 19 nt, Artificial Sequence
  Description of Artificial Sequence: Synthetic oligonucleotide
  Sense strand starting at position 163 of SEQ ID NO: 1245190
cugagacagaucugcggau

SEQ ID NO: 1543477 - RNA, 19 nt, Artificial Sequence
  Description of Artificial Sequence: Synthetic oligonucleotide
  Antisense strand to SEQ ID NO: 1543476
auccgcagaucugucucag

SEQ ID NO: 1543478 - RNA, 19 nt, Artificial Sequence
  Description of Artificial Sequence: Synthetic oligonucleotide
  Sense strand starting at position 164 of SEQ ID NO: 1245190
ugagacagaucugcggaua

SEQ ID NO: 1543479 - RNA, 19 nt, Artificial Sequence
  Description of Artificial Sequence: Synthetic oligonucleotide
  Antisense strand to SEQ ID NO: 1543478
uauccgcagaucugucuca

SEQ ID NO: 1543480 - RNA, 19 nt, Artificial Sequence
  Description of Artificial Sequence: Synthetic oligonucleotide
  Sense strand starting at position 165 of SEQ ID NO: 1245190
gagacagaucugcggauaa

SEQ ID NO: 1543481 - RNA, 19 nt, Artificial Sequence
  Description of Artificial Sequence: Synthetic oligonucleotide
  Antisense strand to SEQ ID NO: 1543480
uuauccgcagaucugucuc

SEQ ID NO: 1543482 - RNA, 19 nt, Artificial Sequence
  Description of Artificial Sequence: Synthetic oligonucleotide
  Sense strand starting at position 234 of SEQ ID NO: 1245190
cccaaaguucucuagguac

SEQ ID NO: 1543483 - RNA, 19 nt, Artificial Sequence
  Description of Artificial Sequence: Synthetic oligonucleotide
  Antisense strand to SEQ ID NO: 1543482
guaccuagagaacuuuggg

SEQ ID NO: 1543484 - RNA, 19 nt, Artificial Sequence
  Description of Artificial Sequence: Synthetic oligonucleotide
  Sense strand starting at position 291 of SEQ ID NO: 1245190
ggacuuucugauuguuccu

SEQ ID NO: 1543485 - RNA, 19 nt, Artificial Sequence
  Description of Artificial Sequence: Synthetic oligonucleotide
  Antisense strand to SEQ ID NO: 1543484
aggaacaaucagaaagucc

SEQ ID NO: 1543486 - RNA, 19 nt, Artificial Sequence
  Description of Artificial Sequence: Synthetic oligonucleotide
  Sense strand starting at position 297 of SEQ ID NO: 1245190
ucugauuguuccucaccca

SEQ ID NO: 1543487 - RNA, 19 nt, Artificial Sequence
  Description of Artificial Sequence: Synthetic oligonucleotide
  Antisense strand to SEQ ID NO: 1543486
ugggugaggaacaaucaga

SEQ ID NO: 1543488 - RNA, 19 nt, Artificial Sequence
  Description of Artificial Sequence: Synthetic oligonucleotide
  Sense strand starting at position 351 of SEQ ID NO: 1245190
cucuuugcucaauggucaa

SEQ ID NO: 1543489 - RNA, 19 nt, Artificial Sequence
  Description of Artificial Sequence: Synthetic oligonucleotide
  Antisense strand to SEQ ID NO: 1543488
uugaccauugagcaaagag

SEQ ID NO: 1543490 - RNA, 19 nt, Artificial Sequence
  Description of Artificial Sequence: Synthetic oligonucleotide
  Sense strand starting at position 362 of SEQ ID NO: 1245190
auggucaacuucuccagaa

SEQ ID NO: 1543491 - RNA, 19 nt, Artificial Sequence
  Description of Artificial Sequence: Synthetic oligonucleotide
  Antisense strand to SEQ ID NO: 1543490
uucuggagaaguugaccau

SEQ ID NO: 1543492 - RNA, 19 nt, Artificial Sequence
  Description of Artificial Sequence: Synthetic oligonucleotide
  Sense strand starting at position 363 of SEQ ID NO: 1245190
uggucaacuucuccagaaa

SEQ ID NO: 1543493 - RNA, 19 nt, Artificial Sequence
  Description of Artificial Sequence: Synthetic oligonucleotide
  Antisense strand to SEQ ID NO: 1543492
uuucuggagaaguugacca

SEQ ID NO: 1543494 - RNA, 19 nt, Artificial Sequence
  Description of Artificial Sequence: Synthetic oligonucleotide
  Sense strand starting at position 586 of SEQ ID NO: 1245190
cagaauagugucugacacu

SEQ ID NO: 1543495 - RNA, 19 nt, Artificial Sequence
  Description of Artificial Sequence: Synthetic oligonucleotide
  Antisense strand to SEQ ID NO: 1543494
agugucagacacuauucug

SEQ ID NO: 1543496 - RNA, 19 nt, Artificial Sequence
  Description of Artificial Sequence: Synthetic oligonucleotide
  Sense strand starting at position 639 of SEQ ID NO: 1245190
ggaaaugacucacacauac

SEQ ID NO: 1543497 - RNA, 19 nt, Artificial Sequence
  Description of Artificial Sequence: Synthetic oligonucleotide
  Antisense strand to SEQ ID NO: 1543496
guaugugugagucauuucc

SEQ ID NO: 1543498 - RNA, 19 nt, Artificial Sequence
  Description of Artificial Sequence: Synthetic oligonucleotide
  Sense strand starting at position 716 of SEQ ID NO: 1245190
agagaugagaccugcccua

SEQ ID NO: 1543499 - RNA, 19 nt, Artificial Sequence
  Description of Artificial Sequence: Synthetic oligonucleotide
  Antisense strand to SEQ ID NO: 1543498
uagggcaggucucaucucu

SEQ ID NO: 1543500 - RNA, 19 nt, Artificial Sequence
  Description of Artificial Sequence: Synthetic oligonucleotide
  Sense strand starting at position 744 of SEQ ID NO: 1245190
ucuaguuagcaccagaguu

SEQ ID NO: 1543501 - RNA, 19 nt, Artificial Sequence
  Description of Artificial Sequence: Synthetic oligonucleotide
  Antisense strand to SEQ ID NO: 1543500
aacucuggugcuaacuaga

SEQ ID NO: 1543502 - RNA, 19 nt, Artificial Sequence
  Description of Artificial Sequence: Synthetic oligonucleotide
  Sense strand starting at position 765 of SEQ ID NO: 1245190
aaacauguugaguaaagca

SEQ ID NO: 1543503 - RNA, 19 nt, Artificial Sequence
  Description of Artificial Sequence: Synthetic oligonucleotide
  Antisense strand to SEQ ID NO: 1543502
ugcuuuacucaacauguuu

SEQ ID NO: 1543504 - RNA, 19 nt, Artificial Sequence
  Description of Artificial Sequence: Synthetic oligonucleotide
  Sense strand starting at position 1089 of SEQ ID NO: 1245190
ggagcacaagaguguugaa

SEQ ID NO: 1543505 - RNA, 19 nt, Artificial Sequence
  Description of Artificial Sequence: Synthetic oligonucleotide
  Antisense strand to SEQ ID NO: 1543504
uucaacacucuugugcucc

SEQ ID NO: 1543506 - RNA, 19 nt, Artificial Sequence
  Description of Artificial Sequence: Synthetic oligonucleotide
  Sense strand starting at position 1375 of SEQ ID NO: 1245190
ggcuuagggagccguauaa

SEQ ID NO: 1543507 - RNA, 19 nt, Artificial Sequence
  Description of Artificial Sequence: Synthetic oligonucleotide
  Antisense strand to SEQ ID NO: 1543506
uuauacggcucccuaagcc

SEQ ID NO: 1543508 - RNA, 19 nt, Artificial Sequence
  Description of Artificial Sequence: Synthetic oligonucleotide
  Sense strand starting at position 1457 of SEQ ID NO: 1245190
gcaugacuugccgggaaug

SEQ ID NO: 1543509 - RNA, 19 nt, Artificial Sequence
  Description of Artificial Sequence: Synthetic oligonucleotide
  Antisense strand to SEQ ID NO: 1543508
cauucccggcaagucaugc

SEQ ID NO: 1543510 - RNA, 19 nt, Artificial Sequence
  Description of Artificial Sequence: Synthetic oligonucleotide
  Sense strand starting at position 1569 of SEQ ID NO: 1245190
caaggaggguuugaagaau

SEQ ID NO: 1543511 - RNA, 19 nt, Artificial Sequence
  Description of Artificial Sequence: Synthetic oligonucleotide
  Antisense strand to SEQ ID NO: 1543510
auucuucaaacccuccuug

SEQ ID NO: 1543512 - RNA, 19 nt, Artificial Sequence
  Description of Artificial Sequence: Synthetic oligonucleotide
  Sense strand starting at position 2034 of SEQ ID NO: 1245190
augggagucaucugaccca

SEQ ID NO: 1543513 - RNA, 19 nt, Artificial Sequence
  Description of Artificial Sequence: Synthetic oligonucleotide
  Antisense strand to SEQ ID NO: 1543512
ugggucagaugacucccau

SEQ ID NO: 1543514 - RNA, 19 nt, Artificial Sequence
  Description of Artificial Sequence: Synthetic oligonucleotide
  Sense strand starting at position 2055 of SEQ ID NO: 1245190
gccagauggugauuugcau

SEQ ID NO: 1543515 - RNA, 19 nt, Artificial Sequence
  Description of Artificial Sequence: Synthetic oligonucleotide
  Antisense strand to SEQ ID NO: 1543514
augcaaaucaccaucuggc

SEQ ID NO: 1543516 - RNA, 19 nt, Artificial Sequence
  Description of Artificial Sequence: Synthetic oligonucleotide
  Sense strand starting at position 2059 of SEQ ID NO: 1245190
gauggugauuugcauaauu

SEQ ID NO: 1543517 - RNA, 19 nt, Artificial Sequence
  Description of Artificial Sequence: Synthetic oligonucleotide
  Antisense strand to SEQ ID NO: 1543516
aauuaugcaaaucaccauc

SEQ ID NO: 1543518 - RNA, 19 nt, Artificial Sequence
  Description of Artificial Sequence: Synthetic oligonucleotide
  Sense strand starting at position 2133 of SEQ ID NO: 1245190
uggagaaaguuugaaugaa

SEQ ID NO: 1543519 - RNA, 19 nt, Artificial Sequence
  Description of Artificial Sequence: Synthetic oligonucleotide
  Antisense strand to SEQ ID NO: 1543518
uucauucaaacuuucucca

SEQ ID NO: 1543520 - RNA, 19 nt, Artificial Sequence
  Description of Artificial Sequence: Synthetic oligonucleotide
  Sense strand starting at position 2345 of SEQ ID NO: 1245190
ggaggcgaucccuggagaa

SEQ ID NO: 1543521 - RNA, 19 nt, Artificial Sequence
  Description of Artificial Sequence: Synthetic oligonucleotide
  Antisense strand to SEQ ID NO: 1543520
uucuccagggaucgccucc

SEQ ID NO: 1543522 - RNA, 19 nt, Artificial Sequence
  Description of Artificial Sequence: Synthetic oligonucleotide
  Sense strand starting at position 2363 of SEQ ID NO: 1245190
aggagagcauccucuccaa

SEQ ID NO: 1543523 - RNA, 19 nt, Artificial Sequence
  Description of Artificial Sequence: Synthetic oligonucleotide
  Antisense strand to SEQ ID NO: 1543522
uuggagaggaugcucuccu

SEQ ID NO: 1543524 - RNA, 19 nt, Artificial Sequence
  Description of Artificial Sequence: Synthetic oligonucleotide
  Sense strand starting at position 2444 of SEQ ID NO: 1245190
gggagagccaccuggucau

SEQ ID NO: 1543525 - RNA, 19 nt, Artificial Sequence
  Description of Artificial Sequence: Synthetic oligonucleotide
  Antisense strand to SEQ ID NO: 1543524
augaccagguggcucuccc

SEQ ID NO: 1543526 - RNA, 19 nt, Artificial Sequence
  Description of Artificial Sequence: Synthetic oligonucleotide
  Sense strand starting at position 2590 of SEQ ID NO: 1245190
cacaguaccugcucggaau

SEQ ID NO: 1543527 - RNA, 19 nt, Artificial Sequence
  Description of Artificial Sequence: Synthetic oligonucleotide
  Antisense strand to SEQ ID NO: 1543526
auuccgagcagguacugug

SEQ ID NO: 1543528 - RNA, 19 nt, Artificial Sequence
  Description of Artificial Sequence: Synthetic oligonucleotide
  Sense strand starting at position 2664 of SEQ ID NO: 1245190
cgguucucucguccgcaau

SEQ ID NO: 1543529 - RNA, 19 nt, Artificial Sequence
  Description of Artificial Sequence: Synthetic oligonucleotide
  Antisense strand to SEQ ID NO: 1543528
auugcggacgagagaaccg

SEQ ID NO: 1543530 - RNA, 19 nt, Artificial Sequence
  Description of Artificial Sequence: Synthetic oligonucleotide
  Sense strand starting at position 2678 of SEQ ID NO: 1245190
gcaauacgugggugauaau

SEQ ID NO: 1543531 - RNA, 19 nt, Artificial Sequence
  Description of Artificial Sequence: Synthetic oligonucleotide
  Antisense strand to SEQ ID NO: 1543530
auuaucacccacguauugc

SEQ ID NO: 1543532 - RNA, 19 nt, Artificial Sequence
  Description of Artificial Sequence: Synthetic oligonucleotide
  Sense strand starting at position 2832 of SEQ ID NO: 1245190
ggaccagugagccgagauu

SEQ ID NO: 1543533 - RNA, 19 nt, Artificial Sequence
  Description of Artificial Sequence: Synthetic oligonucleotide
  Antisense strand to SEQ ID NO: 1543532
aaucucggcucacuggucc

SEQ ID NO: 1543534 - RNA, 19 nt, Artificial Sequence
  Description of Artificial Sequence: Synthetic oligonucleotide
  Sense strand starting at position 2901 of SEQ ID NO: 1245190
cuccuuggcgagugaaauc

SEQ ID NO: 1543535 - RNA, 19 nt, Artificial Sequence
  Description of Artificial Sequence: Synthetic oligonucleotide
  Antisense strand to SEQ ID NO: 1543534
gauuucacucgccaaggag

SEQ ID NO: 1543536 - RNA, 19 nt, Artificial Sequence
  Description of Artificial Sequence: Synthetic oligonucleotide
  Sense strand starting at position 3542 of SEQ ID NO: 1245190
cagacauaggucuaauguu

SEQ ID NO: 1543537 - RNA, 19 nt, Artificial Sequence
  Description of Artificial Sequence: Synthetic oligonucleotide
  Antisense strand to SEQ ID NO: 1543536
aacauuagaccuaugucug

SEQ ID NO: 1543538 - RNA, 19 nt, Artificial Sequence
  Description of Artificial Sequence: Synthetic oligonucleotide
  Sense strand starting at position 3550 of SEQ ID NO: 1245190
ggucuaauguuaucuccau

SEQ ID NO: 1543539 - RNA, 19 nt, Artificial Sequence
  Description of Artificial Sequence: Synthetic oligonucleotide
  Antisense strand to SEQ ID NO: 1543538
auggagauaacauuagacc

SEQ ID NO: 1543540 - RNA, 19 nt, Artificial Sequence
  Description of Artificial Sequence: Synthetic oligonucleotide
  Sense strand starting at position 3551 of SEQ ID NO: 1245190
gucuaauguuaucuccauu

SEQ ID NO: 1543541 - RNA, 19 nt, Artificial Sequence
  Description of Artificial Sequence: Synthetic oligonucleotide
  Antisense strand to SEQ ID NO: 1543540
aauggagauaacauuagac

SEQ ID NO: 1543542 - RNA, 19 nt, Artificial Sequence
  Description of Artificial Sequence: Synthetic oligonucleotide
  Sense strand starting at position 3601 of SEQ ID NO: 1245190
ggcugcagauuugaagaaa

SEQ ID NO: 1543543 - RNA, 19 nt, Artificial Sequence
  Description of Artificial Sequence: Synthetic oligonucleotide
  Antisense strand to SEQ ID NO: 1543542
uuucuucaaaucugcagcc

SEQ ID NO: 1543544 - RNA, 19 nt, Artificial Sequence
  Description of Artificial Sequence: Synthetic oligonucleotide
  Sense strand starting at position 3612 of SEQ ID NO: 1245190
ugaagaaagucucaagaca

SEQ ID NO: 1543545 - RNA, 19 nt, Artificial Sequence
  Description of Artificial Sequence: Synthetic oligonucleotide
  Antisense strand to SEQ ID NO: 1543544
ugucuugagacuuucuuca

SEQ ID NO: 1543546 - RNA, 19 nt, Artificial Sequence
  Description of Artificial Sequence: Synthetic oligonucleotide
  Sense strand starting at position 3973 of SEQ ID NO: 1245190
agccauggucccuagaaca

SEQ ID NO: 1543547 - RNA, 19 nt, Artificial Sequence
  Description of Artificial Sequence: Synthetic oligonucleotide
  Antisense strand to SEQ ID NO: 1543546
uguucuagggaccauggcu

SEQ ID NO: 1543548 - RNA, 19 nt, Artificial Sequence
  Description of Artificial Sequence: Synthetic oligonucleotide
  Sense strand starting at position 1 of SEQ ID NO: 1245191
guugguuccggcucuguaa

SEQ ID NO: 1543549 - RNA, 19 nt, Artificial Sequence
  Description of Artificial Sequence: Synthetic oligonucleotide
  Antisense strand to SEQ ID NO: 1543548
uuacagagccggaaccaac

SEQ ID NO: 1543550 - RNA, 19 nt, Artificial Sequence
  Description of Artificial Sequence: Synthetic oligonucleotide
  Sense strand starting at position 40 of SEQ ID NO: 1245191
uugacuaguugauuaacau

SEQ ID NO: 1543551 - RNA, 19 nt, Artificial Sequence
  Description of Artificial Sequence: Synthetic oligonucleotide
  Antisense strand to SEQ ID NO: 1543550
auguuaaucaacuagucaa

SEQ ID NO: 1543552 - RNA, 19 nt, Artificial Sequence
  Description of Artificial Sequence: Synthetic oligonucleotide
  Sense strand starting at position 58 of SEQ ID NO: 1245191
uuccuaauuggcuaaugua

SEQ ID NO: 1543553 - RNA, 19 nt, Artificial Sequence
  Description of Artificial Sequence: Synthetic oligonucleotide
  Antisense strand to SEQ ID NO: 1543552
uacauuagccaauuaggaa

SEQ ID NO: 1543554 - RNA, 19 nt, Artificial Sequence
  Description of Artificial Sequence: Synthetic oligonucleotide
  Sense strand starting at position 300 of SEQ ID NO: 1245191
gcugcaugggcacauaaua

SEQ ID NO: 1543555 - RNA, 19 nt, Artificial Sequence
  Description of Artificial Sequence: Synthetic oligonucleotide
  Antisense strand to SEQ ID NO: 1543554
uauuaugugcccaugcagc

SEQ ID NO: 1543556 - RNA, 19 nt, Artificial Sequence
  Description of Artificial Sequence: Synthetic oligonucleotide
  Sense strand starting at position 320 of SEQ ID NO: 1245191
augacugcugaguaacgaa

SEQ ID NO: 1543557 - RNA, 19 nt, Artificial Sequence
  Description of Artificial Sequence: Synthetic oligonucleotide
  Antisense strand to SEQ ID NO: 1543556
uucguuacucagcagucau

SEQ ID NO: 1543558 - RNA, 19 nt, Artificial Sequence
  Description of Artificial Sequence: Synthetic oligonucleotide
  Sense strand starting at position 334 of SEQ ID NO: 1245191
acgaaauaacugcacucua

SEQ ID NO: 1543559 - RNA, 19 nt, Artificial Sequence
  Description of Artificial Sequence: Synthetic oligonucleotide
  Antisense strand to SEQ ID NO: 1543558
uagagugcaguuauuucgu

SEQ ID NO: 1543560 - RNA, 19 nt, Artificial Sequence
  Description of Artificial Sequence: Synthetic oligonucleotide
  Sense strand starting at position 361 of SEQ ID NO: 1245191
acuuaaugacuuggucauu

SEQ ID NO: 1543561 - RNA, 19 nt, Artificial Sequence
  Description of Artificial Sequence: Synthetic oligonucleotide
  Antisense strand to SEQ ID NO: 1543560
aaugaccaagucauuaagu

SEQ ID NO: 1543562 - RNA, 19 nt, Artificial Sequence
  Description of Artificial Sequence: Synthetic oligonucleotide
  Sense strand starting at position 362 of SEQ ID NO: 1245191
cuuaaugacuuggucauua

SEQ ID NO: 1543563 - RNA, 19 nt, Artificial Sequence
  Description of Artificial Sequence: Synthetic oligonucleotide
  Antisense strand to SEQ ID NO: 1543562
uaaugaccaagucauuaag

SEQ ID NO: 1543564 - RNA, 19 nt, Artificial Sequence
  Description of Artificial Sequence: Synthetic oligonucleotide
  Sense strand starting at position 366 of SEQ ID NO: 1245191
augacuuggucauuaaguc

SEQ ID NO: 1543565 - RNA, 19 nt, Artificial Sequence
  Description of Artificial Sequence: Synthetic oligonucleotide
  Antisense strand to SEQ ID NO: 1543564
gacuuaaugaccaagucau

SEQ ID NO: 1543566 - RNA, 19 nt, Artificial Sequence
  Description of Artificial Sequence: Synthetic oligonucleotide
  Sense strand starting at position 370 of SEQ ID NO: 1245191
cuuggucauuaagucaaau

SEQ ID NO: 1543567 - RNA, 19 nt, Artificial Sequence
  Description of Artificial Sequence: Synthetic oligonucleotide
  Antisense strand to SEQ ID NO: 1543566
auuugacuuaaugaccaag

SEQ ID NO: 1543568 - RNA, 19 nt, Artificial Sequence
  Description of Artificial Sequence: Synthetic oligonucleotide
  Sense strand starting at position 741 of SEQ ID NO: 1245191
gccagagcuccucaucuca

SEQ ID NO: 1543569 - RNA, 19 nt, Artificial Sequence
  Description of Artificial Sequence: Synthetic oligonucleotide
  Antisense strand to SEQ ID NO: 1543568
ugagaugaggagcucuggc

SEQ ID NO: 1543570 - RNA, 19 nt, Artificial Sequence
  Description of Artificial Sequence: Synthetic oligonucleotide
  Sense strand starting at position 788 of SEQ ID NO: 1245191
gguauaucugauggucacu

SEQ ID NO: 1543571 - RNA, 19 nt, Artificial Sequence
  Description of Artificial Sequence: Synthetic oligonucleotide
  Antisense strand to SEQ ID NO: 1543570
agugaccaucagauauacc

SEQ ID NO: 1543572 - RNA, 19 nt, Artificial Sequence
  Description of Artificial Sequence: Synthetic oligonucleotide
  Sense strand starting at position 793 of SEQ ID NO: 1245191
aucugauggucacugaaca

SEQ ID NO: 1543573 - RNA, 19 nt, Artificial Sequence
  Description of Artificial Sequence: Synthetic oligonucleotide
  Antisense strand to SEQ ID NO: 1543572
uguucagugaccaucagau

SEQ ID NO: 1543574 - RNA, 19 nt, Artificial Sequence
  Description of Artificial Sequence: Synthetic oligonucleotide
  Sense strand starting at position 835 of SEQ ID NO: 1245191
acgauugacuccuuaguca

SEQ ID NO: 1543575 - RNA, 19 nt, Artificial Sequence
  Description of Artificial Sequence: Synthetic oligonucleotide
  Antisense strand to SEQ ID NO: 1543574
ugacuaaggagucaaucgu

SEQ ID NO: 1543576 - RNA, 19 nt, Artificial Sequence
  Description of Artificial Sequence: Synthetic oligonucleotide
  Sense strand starting at position 846 of SEQ ID NO: 1245191
cuuagucagcagugacaca

SEQ ID NO: 1543577 - RNA, 19 nt, Artificial Sequence
  Description of Artificial Sequence: Synthetic oligonucleotide
  Antisense strand to SEQ ID NO: 1543576
ugugucacugcugacuaag

SEQ ID NO: 1543578 - RNA, 19 nt, Artificial Sequence
  Description of Artificial Sequence: Synthetic oligonucleotide
  Sense strand starting at position 857 of SEQ ID NO: 1245191
gugacacaucagcacuaaa

SEQ ID NO: 1543579 - RNA, 19 nt, Artificial Sequence
  Description of Artificial Sequence: Synthetic oligonucleotide
  Antisense strand to SEQ ID NO: 1543578
uuuagugcugaugugucac

SEQ ID NO: 1543580 - RNA, 19 nt, Artificial Sequence
  Description of Artificial Sequence: Synthetic oligonucleotide
  Sense strand starting at position 1085 of SEQ ID NO: 1245191
guuacauaauguguuacua

SEQ ID NO: 1543581 - RNA, 19 nt, Artificial Sequence
  Description of Artificial Sequence: Synthetic oligonucleotide
  Antisense strand to SEQ ID NO: 1543580
uaguaacacauuauguaac

SEQ ID NO: 1543582 - RNA, 19 nt, Artificial Sequence
  Description of Artificial Sequence: Synthetic oligonucleotide
  Sense strand starting at position 1163 of SEQ ID NO: 1245191
guauaagaaugucuucuga

SEQ ID NO: 1543583 - RNA, 19 nt, Artificial Sequence
  Description of Artificial Sequence: Synthetic oligonucleotide
  Antisense strand to SEQ ID NO: 1543582
ucagaagacauucuuauac

SEQ ID NO: 1543584 - RNA, 19 nt, Artificial Sequence
  Description of Artificial Sequence: Synthetic oligonucleotide
  Sense strand starting at position 1165 of SEQ ID NO: 1245191
auaagaaugucuucugaca

SEQ ID NO: 1543585 - RNA, 19 nt, Artificial Sequence
  Description of Artificial Sequence: Synthetic oligonucleotide
  Antisense strand to SEQ ID NO: 1543584
ugucagaagacauucuuau

SEQ ID NO: 1543586 - RNA, 19 nt, Artificial Sequence
  Description of Artificial Sequence: Synthetic oligonucleotide
  Sense strand starting at position 1382 of SEQ ID NO: 1245191
gcacauuucuccuagagac

SEQ ID NO: 1543587 - RNA, 19 nt, Artificial Sequence
  Description of Artificial Sequence: Synthetic oligonucleotide
  Antisense strand to SEQ ID NO: 1543586
gucucuaggagaaaugugc

SEQ ID NO: 1543588 - RNA, 19 nt, Artificial Sequence
  Description of Artificial Sequence: Synthetic oligonucleotide
  Sense strand starting at position 1403 of SEQ ID NO: 1245191
ggcguugugaaacaugaua

SEQ ID NO: 1543589 - RNA, 19 nt, Artificial Sequence
  Description of Artificial Sequence: Synthetic oligonucleotide
  Antisense strand to SEQ ID NO: 1543588
uaucauguuucacaacgcc

SEQ ID NO: 1543590 - RNA, 19 nt, Artificial Sequence
  Description of Artificial Sequence: Synthetic oligonucleotide
  Sense strand starting at position 1471 of SEQ ID NO: 1245191
ucuagauccaacggaaagu

SEQ ID NO: 1543591 - RNA, 19 nt, Artificial Sequence
  Description of Artificial Sequence: Synthetic oligonucleotide
  Antisense strand to SEQ ID NO: 1543590
acuuuccguuggaucuaga

SEQ ID NO: 1543592 - RNA, 19 nt, Artificial Sequence
  Description of Artificial Sequence: Synthetic oligonucleotide
  Sense strand starting at position 1817 of SEQ ID NO: 1245191
cuguauuuguacucgaaac

SEQ ID NO: 1543593 - RNA, 19 nt, Artificial Sequence
  Description of Artificial Sequence: Synthetic oligonucleotide
  Antisense strand to SEQ ID NO: 1543592
guuucgaguacaaauacag

SEQ ID NO: 1543594 - RNA, 19 nt, Artificial Sequence
  Description of Artificial Sequence: Synthetic oligonucleotide
  Sense strand starting at position 1818 of SEQ ID NO: 1245191
uguauuuguacucgaaacg

SEQ ID NO: 1543595 - RNA, 19 nt, Artificial Sequence
  Description of Artificial Sequence: Synthetic oligonucleotide
  Antisense strand to SEQ ID NO: 1543594
cguuucgaguacaaauaca

SEQ ID NO: 1543596 - RNA, 19 nt, Artificial Sequence
  Description of Artificial Sequence: Synthetic oligonucleotide
  Sense strand starting at position 2281 of SEQ ID NO: 1245191
gagcuuucuccggcuucuu

SEQ ID NO: 1543597 - RNA, 19 nt, Artificial Sequence
  Description of Artificial Sequence: Synthetic oligonucleotide
  Antisense strand to SEQ ID NO: 1543596
aagaagccggagaaagcuc

SEQ ID NO: 1543598 - RNA, 19 nt, Artificial Sequence
  Description of Artificial Sequence: Synthetic oligonucleotide
  Sense strand starting at position 2297 of SEQ ID NO: 1245191
cuuagaauaccugggagca

SEQ ID NO: 1543599 - RNA, 19 nt, Artificial Sequence
  Description of Artificial Sequence: Synthetic oligonucleotide
  Antisense strand to SEQ ID NO: 1543598
ugcucccagguauucuaag

SEQ ID NO: 1543600 - RNA, 19 nt, Artificial Sequence
  Description of Artificial Sequence: Synthetic oligonucleotide
  Sense strand starting at position 2456 of SEQ ID NO: 1245191
ucuaccaagcuauguuaga

SEQ ID NO: 1543601 - RNA, 19 nt, Artificial Sequence
  Description of Artificial Sequence: Synthetic oligonucleotide
  Antisense strand to SEQ ID NO: 1543600
ucuaacauagcuugguaga

SEQ ID NO: 1543602 - RNA, 19 nt, Artificial Sequence
  Description of Artificial Sequence: Synthetic oligonucleotide
  Sense strand starting at position 2529 of SEQ ID NO: 1245191
uaaguuggugucggaaaga

SEQ ID NO: 1543603 - RNA, 19 nt, Artificial Sequence
  Description of Artificial Sequence: Synthetic oligonucleotide
  Antisense strand to SEQ ID NO: 1543602
ucuuuccgacaccaacuua

SEQ ID NO: 1543604 - RNA, 19 nt, Artificial Sequence
  Description of Artificial Sequence: Synthetic oligonucleotide
  Sense strand starting at position 2542 of SEQ ID NO: 1245191
gaaagaggguuucugugaa

SEQ ID NO: 1543605 - RNA, 19 nt, Artificial Sequence
  Description of Artificial Sequence: Synthetic oligonucleotide
  Antisense strand to SEQ ID NO: 1543604
uucacagaaacccucuuuc

SEQ ID NO: 1543606 - RNA, 19 nt, Artificial Sequence
  Description of Artificial Sequence: Synthetic oligonucleotide
  Sense strand starting at position 2703 of SEQ ID NO: 1245191
gucuguagaaccuggacau

SEQ ID NO: 1543607 - RNA, 19 nt, Artificial Sequence
  Description of Artificial Sequence: Synthetic oligonucleotide
  Antisense strand to SEQ ID NO: 1543606
auguccagguucuacagac

SEQ ID NO: 1543608 - RNA, 19 nt, Artificial Sequence
  Description of Artificial Sequence: Synthetic oligonucleotide
  Sense strand starting at position 2704 of SEQ ID NO: 1245191
ucuguagaaccuggacauu

SEQ ID NO: 1543609 - RNA, 19 nt, Artificial Sequence
  Description of Artificial Sequence: Synthetic oligonucleotide
  Antisense strand to SEQ ID NO: 1543608
aauguccagguucuacaga

SEQ ID NO: 1543610 - RNA, 19 nt, Artificial Sequence
  Description of Artificial Sequence: Synthetic oligonucleotide
  Sense strand starting at position 2714 of SEQ ID NO: 1245191
cuggacauuugauauagga

SEQ ID NO: 1543611 - RNA, 19 nt, Artificial Sequence
  Description of Artificial Sequence: Synthetic oligonucleotide
  Antisense strand to SEQ ID NO: 1543610
uccuauaucaaauguccag

SEQ ID NO: 1543612 - RNA, 19 nt, Artificial Sequence
  Description of Artificial Sequence: Synthetic oligonucleotide
  Sense strand starting at position 2722 of SEQ ID NO: 1245191
uugauauaggaucggucuu

SEQ ID NO: 1543613 - RNA, 19 nt, Artificial Sequence
  Description of Artificial Sequence: Synthetic oligonucleotide
  Antisense strand to SEQ ID NO: 1543612
aagaccgauccuauaucaa

SEQ ID NO: 1543614 - RNA, 19 nt, Artificial Sequence
  Description of Artificial Sequence: Synthetic oligonucleotide
  Sense strand starting at position 3092 of SEQ ID NO: 1245191
caaguugaauauggauuua

SEQ ID NO: 1543615 - RNA, 19 nt, Artificial Sequence
  Description of Artificial Sequence: Synthetic oligonucleotide
  Antisense strand to SEQ ID NO: 1543614
uaaauccauauucaacuug

SEQ ID NO: 1543616 - RNA, 19 nt, Artificial Sequence
  Description of Artificial Sequence: Synthetic oligonucleotide
  Sense strand starting at position 3125 of SEQ ID NO: 1245191
cuagucucgagauguaauu

SEQ ID NO: 1543617 - RNA, 19 nt, Artificial Sequence
  Description of Artificial Sequence: Synthetic oligonucleotide
  Antisense strand to SEQ ID NO: 1543616
aauuacaucucgagacuag

SEQ ID NO: 1543618 - RNA, 19 nt, Artificial Sequence
  Description of Artificial Sequence: Synthetic oligonucleotide
  Sense strand starting at position 3153 of SEQ ID NO: 1245191
guaccauacuuacugcuau

SEQ ID NO: 1543619 - RNA, 19 nt, Artificial Sequence
  Description of Artificial Sequence: Synthetic oligonucleotide
  Antisense strand to SEQ ID NO: 1543618
auagcaguaaguaugguac

SEQ ID NO: 1543620 - RNA, 19 nt, Artificial Sequence
  Description of Artificial Sequence: Synthetic oligonucleotide
  Sense strand starting at position 3315 of SEQ ID NO: 1245191
cuugcacagagugaagauu

SEQ ID NO: 1543621 - RNA, 19 nt, Artificial Sequence
  Description of Artificial Sequence: Synthetic oligonucleotide
  Antisense strand to SEQ ID NO: 1543620
aaucuucacucugugcaag

SEQ ID NO: 1543622 - RNA, 19 nt, Artificial Sequence
  Description of Artificial Sequence: Synthetic oligonucleotide
  Sense strand starting at position 3463 of SEQ ID NO: 1245191
gguagaugccauuaauauu

SEQ ID NO: 1543623 - RNA, 19 nt, Artificial Sequence
  Description of Artificial Sequence: Synthetic oligonucleotide
  Antisense strand to SEQ ID NO: 1543622
aauauuaauggcaucuacc

SEQ ID NO: 1543624 - RNA, 19 nt, Artificial Sequence
  Description of Artificial Sequence: Synthetic oligonucleotide
  Sense strand starting at position 3712 of SEQ ID NO: 1245191
uuugcugaaccauaaaugu

SEQ ID NO: 1543625 - RNA, 19 nt, Artificial Sequence
  Description of Artificial Sequence: Synthetic oligonucleotide
  Antisense strand to SEQ ID NO: 1543624
acauuuaugguucagcaaa

SEQ ID NO: 1543626 - RNA, 19 nt, Artificial Sequence
  Description of Artificial Sequence: Synthetic oligonucleotide
  Sense strand starting at position 3803 of SEQ ID NO: 1245191
uuaugccagccuuaagaau

SEQ ID NO: 1543627 - RNA, 19 nt, Artificial Sequence
  Description of Artificial Sequence: Synthetic oligonucleotide
  Antisense strand to SEQ ID NO: 1543626
auucuuaaggcuggcauaa

SEQ ID NO: 1543628 - RNA, 19 nt, Artificial Sequence
  Description of Artificial Sequence: Synthetic oligonucleotide
  Sense strand starting at position 253 of SEQ ID NO: 1245192
agugguaagccagagcaua

SEQ ID NO: 1543629 - RNA, 19 nt, Artificial Sequence
  Description of Artificial Sequence: Synthetic oligonucleotide
  Antisense strand to SEQ ID NO: 1543628
uaugcucuggcuuaccacu

SEQ ID NO: 1543630 - RNA, 19 nt, Artificial Sequence
  Description of Artificial Sequence: Synthetic oligonucleotide
  Sense strand starting at position 329 of SEQ ID NO: 1245192
cauggaaaguugcuagaua

SEQ ID NO: 1543631 - RNA, 19 nt, Artificial Sequence
  Description of Artificial Sequence: Synthetic oligonucleotide
  Antisense strand to SEQ ID NO: 1543630
uaucuagcaacuuuccaug

SEQ ID NO: 1543632 - RNA, 19 nt, Artificial Sequence
  Description of Artificial Sequence: Synthetic oligonucleotide
  Sense strand starting at position 350 of SEQ ID NO: 1245192
gaaugaaaugacuguguuu

SEQ ID NO: 1543633 - RNA, 19 nt, Artificial Sequence
  Description of Artificial Sequence: Synthetic oligonucleotide
  Antisense strand to SEQ ID NO: 1543632
aaacacagucauuucauuc

SEQ ID NO: 1543634 - RNA, 19 nt, Artificial Sequence
  Description of Artificial Sequence: Synthetic oligonucleotide
  Sense strand starting at position 352 of SEQ ID NO: 1245192
augaaaugacuguguuuau

SEQ ID NO: 1543635 - RNA, 19 nt, Artificial Sequence
  Description of Artificial Sequence: Synthetic oligonucleotide
  Antisense strand to SEQ ID NO: 1543634
auaaacacagucauuucau

SEQ ID NO: 1543636 - RNA, 19 nt, Artificial Sequence
  Description of Artificial Sequence: Synthetic oligonucleotide
  Sense strand starting at position 353 of SEQ ID NO: 1245192
ugaaaugacuguguuuaua

SEQ ID NO: 1543637 - RNA, 19 nt, Artificial Sequence
  Description of Artificial Sequence: Synthetic oligonucleotide
  Antisense strand to SEQ ID NO: 1543636
uauaaacacagucauuuca

SEQ ID NO: 1543638 - RNA, 19 nt, Artificial Sequence
  Description of Artificial Sequence: Synthetic oligonucleotide
  Sense strand starting at position 361 of SEQ ID NO: 1245192
cuguguuuauauuuguaag

SEQ ID NO: 1543639 - RNA, 19 nt, Artificial Sequence
  Description of Artificial Sequence: Synthetic oligonucleotide
  Antisense strand to SEQ ID NO: 1543638
cuuacaaauauaaacacag

SEQ ID NO: 1543640 - RNA, 19 nt, Artificial Sequence
  Description of Artificial Sequence: Synthetic oligonucleotide
  Sense strand starting at position 391 of SEQ ID NO: 1245192
gcuggagugugaagauuag

SEQ ID NO: 1543641 - RNA, 19 nt, Artificial Sequence
  Description of Artificial Sequence: Synthetic oligonucleotide
  Antisense strand to SEQ ID NO: 1543640
cuaaucuucacacuccagc

SEQ ID NO: 1543642 - RNA, 19 nt, Artificial Sequence
  Description of Artificial Sequence: Synthetic oligonucleotide
  Sense strand starting at position 461 of SEQ ID NO: 1245192
gaggaugugacuugcauug

SEQ ID NO: 1543643 - RNA, 19 nt, Artificial Sequence
  Description of Artificial Sequence: Synthetic oligonucleotide
  Antisense strand to SEQ ID NO: 1543642
caaugcaagucacauccuc

SEQ ID NO: 1543644 - RNA, 19 nt, Artificial Sequence
  Description of Artificial Sequence: Synthetic oligonucleotide
  Sense strand starting at position 565 of SEQ ID NO: 1245192
gaagcaagagacuggucau

SEQ ID NO: 1543645 - RNA, 19 nt, Artificial Sequence
  Description of Artificial Sequence: Synthetic oligonucleotide
  Antisense strand to SEQ ID NO: 1543644
augaccagucucuugcuuc

SEQ ID NO: 1543646 - RNA, 19 nt, Artificial Sequence
  Description of Artificial Sequence: Synthetic oligonucleotide
  Sense strand starting at position 609 of SEQ ID NO: 1245192
ggaccuacgguuugagaca

SEQ ID NO: 1543647 - RNA, 19 nt, Artificial Sequence
  Description of Artificial Sequence: Synthetic oligonucleotide
  Antisense strand to SEQ ID NO: 1543646
ugucucaaaccguaggucc

SEQ ID NO: 1543648 - RNA, 19 nt, Artificial Sequence
  Description of Artificial Sequence: Synthetic oligonucleotide
  Sense strand starting at position 724 of SEQ ID NO: 1245192
guuugaaggcuucaaguug

SEQ ID NO: 1543649 - RNA, 19 nt, Artificial Sequence
  Description of Artificial Sequence: Synthetic oligonucleotide
  Antisense strand to SEQ ID NO: 1543648
caacuugaagccuucaaac

SEQ ID NO: 1543650 - RNA, 19 nt, Artificial Sequence
  Description of Artificial Sequence: Synthetic oligonucleotide
  Sense strand starting at position 810 of SEQ ID NO: 1245192
ucagaaagcuuacuggaug

SEQ ID NO: 1543651 - RNA, 19 nt, Artificial Sequence
  Description of Artificial Sequence: Synthetic oligonucleotide
  Antisense strand to SEQ ID NO: 1543650
cauccaguaagcuuucuga

SEQ ID NO: 1543652 - RNA, 19 nt, Artificial Sequence
  Description of Artificial Sequence: Synthetic oligonucleotide
  Sense strand starting at position 813 of SEQ ID NO: 1245192
gaaagcuuacuggauguca

SEQ ID NO: 1543653 - RNA, 19 nt, Artificial Sequence
  Description of Artificial Sequence: Synthetic oligonucleotide
  Antisense strand to SEQ ID NO: 1543652
ugacauccaguaagcuuuc

SEQ ID NO: 1543654 - RNA, 19 nt, Artificial Sequence
  Description of Artificial Sequence: Synthetic oligonucleotide
  Sense strand starting at position 815 of SEQ ID NO: 1245192
aagcuuacuggaugucaag

SEQ ID NO: 1543655 - RNA, 19 nt, Artificial Sequence
  Description of Artificial Sequence: Synthetic oligonucleotide
  Antisense strand to SEQ ID NO: 1543654
cuugacauccaguaagcuu

SEQ ID NO: 1543656 - RNA, 19 nt, Artificial Sequence
  Description of Artificial Sequence: Synthetic oligonucleotide
  Sense strand starting at position 824 of SEQ ID NO: 1245192
ggaugucaaguacauguua

SEQ ID NO: 1543657 - RNA, 19 nt, Artificial Sequence
  Description of Artificial Sequence: Synthetic oligonucleotide
  Antisense strand to SEQ ID NO: 1543656
uaacauguacuugacaucc

SEQ ID NO: 1543658 - RNA, 19 nt, Artificial Sequence
  Description of Artificial Sequence: Synthetic oligonucleotide
  Sense strand starting at position 832 of SEQ ID NO: 1245192
aguacauguuaggcauauu

SEQ ID NO: 1543659 - RNA, 19 nt, Artificial Sequence
  Description of Artificial Sequence: Synthetic oligonucleotide
  Antisense strand to SEQ ID NO: 1543658
aauaugccuaacauguacu

SEQ ID NO: 1543660 - RNA, 19 nt, Artificial Sequence
  Description of Artificial Sequence: Synthetic oligonucleotide
  Sense strand starting at position 850 of SEQ ID NO: 1245192
uuugguauagcugaucuca

SEQ ID NO: 1543661 - RNA, 19 nt, Artificial Sequence
  Description of Artificial Sequence: Synthetic oligonucleotide
  Antisense strand to SEQ ID NO: 1543660
ugagaucagcuauaccaaa

SEQ ID NO: 1543662 - RNA, 19 nt, Artificial Sequence
  Description of Artificial Sequence: Synthetic oligonucleotide
  Sense strand starting at position 888 of SEQ ID NO: 1245192
uucccagugaaggguuauu

SEQ ID NO: 1543663 - RNA, 19 nt, Artificial Sequence
  Description of Artificial Sequence: Synthetic oligonucleotide
  Antisense strand to SEQ ID NO: 1543662
aauaacccuucacugggaa

SEQ ID NO: 1543664 - RNA, 19 nt, Artificial Sequence
  Description of Artificial Sequence: Synthetic oligonucleotide
  Sense strand starting at position 899 of SEQ ID NO: 1245192
ggguuauuaucacuuuaua

SEQ ID NO: 1543665 - RNA, 19 nt, Artificial Sequence
  Description of Artificial Sequence: Synthetic oligonucleotide
  Antisense strand to SEQ ID NO: 1543664
uauaaagugauaauaaccc

SEQ ID NO: 1543666 - RNA, 19 nt, Artificial Sequence
  Description of Artificial Sequence: Synthetic oligonucleotide
  Sense strand starting at position 919 of SEQ ID NO: 1245192
uugaaacaucuguggcuca

SEQ ID NO: 1543667 - RNA, 19 nt, Artificial Sequence
  Description of Artificial Sequence: Synthetic oligonucleotide
  Antisense strand to SEQ ID NO: 1543666
ugagccacagauguuucaa

SEQ ID NO: 1543668 - RNA, 19 nt, Artificial Sequence
  Description of Artificial Sequence: Synthetic oligonucleotide
  Sense strand starting at position 922 of SEQ ID NO: 1245192
aaacaucuguggcucagaa

SEQ ID NO: 1543669 - RNA, 19 nt, Artificial Sequence
  Description of Artificial Sequence: Synthetic oligonucleotide
  Antisense strand to SEQ ID NO: 1543668
uucugagccacagauguuu

SEQ ID NO: 1543670 - RNA, 19 nt, Artificial Sequence
  Description of Artificial Sequence: Synthetic oligonucleotide
  Sense strand starting at position 924 of SEQ ID NO: 1245192
acaucuguggcucagaaag

SEQ ID NO: 1543671 - RNA, 19 nt, Artificial Sequence
  Description of Artificial Sequence: Synthetic oligonucleotide
  Antisense strand to SEQ ID NO: 1543670
cuuucugagccacagaugu

SEQ ID NO: 1543672 - RNA, 19 nt, Artificial Sequence
  Description of Artificial Sequence: Synthetic oligonucleotide
  Sense strand starting at position 976 of SEQ ID NO: 1245192
aaaugaguucugugaucua

SEQ ID NO: 1543673 - RNA, 19 nt, Artificial Sequence
  Description of Artificial Sequence: Synthetic oligonucleotide
  Antisense strand to SEQ ID NO: 1543672
uagaucacagaacucauuu

SEQ ID NO: 1543674 - RNA, 19 nt, Artificial Sequence
  Description of Artificial Sequence: Synthetic oligonucleotide
  Sense strand starting at position 981 of SEQ ID NO: 1245192
aguucugugaucuauggaa

SEQ ID NO: 1543675 - RNA, 19 nt, Artificial Sequence
  Description of Artificial Sequence: Synthetic oligonucleotide
  Antisense strand to SEQ ID NO: 1543674
uuccauagaucacagaacu

SEQ ID NO: 1543676 - RNA, 19 nt, Artificial Sequence
  Description of Artificial Sequence: Synthetic oligonucleotide
  Sense strand starting at position 985 of SEQ ID NO: 1245192
cugugaucuauggaacgua

SEQ ID NO: 1543677 - RNA, 19 nt, Artificial Sequence
  Description of Artificial Sequence: Synthetic oligonucleotide
  Antisense strand to SEQ ID NO: 1543676
uacguuccauagaucacag

SEQ ID NO: 1543678 - RNA, 19 nt, Artificial Sequence
  Description of Artificial Sequence: Synthetic oligonucleotide
  Sense strand starting at position 1053 of SEQ ID NO: 1245192
cuccuuaaagaaugagcau

SEQ ID NO: 1543679 - RNA, 19 nt, Artificial Sequence
  Description of Artificial Sequence: Synthetic oligonucleotide
  Antisense strand to SEQ ID NO: 1543678
augcucauucuuuaaggag

SEQ ID NO: 1543680 - RNA, 19 nt, Artificial Sequence
  Description of Artificial Sequence: Synthetic oligonucleotide
  Sense strand starting at position 1142 of SEQ ID NO: 1245192
aaucaugaagccugggaau

SEQ ID NO: 1543681 - RNA, 19 nt, Artificial Sequence
  Description of Artificial Sequence: Synthetic oligonucleotide
  Antisense strand to SEQ ID NO: 1543680
auucccaggcuucaugauu

SEQ ID NO: 1543682 - RNA, 19 nt, Artificial Sequence
  Description of Artificial Sequence: Synthetic oligonucleotide
  Sense strand starting at position 1144 of SEQ ID NO: 1245192
ucaugaagccugggaauca

SEQ ID NO: 1543683 - RNA, 19 nt, Artificial Sequence
  Description of Artificial Sequence: Synthetic oligonucleotide
  Antisense strand to SEQ ID NO: 1543682
ugauucccaggcuucauga

SEQ ID NO: 1543684 - RNA, 19 nt, Artificial Sequence
  Description of Artificial Sequence: Synthetic oligonucleotide
  Sense strand starting at position 1679 of SEQ ID NO: 1245192
uuuguuaacuaagugaacu

SEQ ID NO: 1543685 - RNA, 19 nt, Artificial Sequence
  Description of Artificial Sequence: Synthetic oligonucleotide
  Antisense strand to SEQ ID NO: 1543684
aguucacuuaguuaacaaa

SEQ ID NO: 1543686 - RNA, 19 nt, Artificial Sequence
  Description of Artificial Sequence: Synthetic oligonucleotide
  Sense strand starting at position 2482 of SEQ ID NO: 1245192
ugcauaauagagcauguau

SEQ ID NO: 1543687 - RNA, 19 nt, Artificial Sequence
  Description of Artificial Sequence: Synthetic oligonucleotide
  Antisense strand to SEQ ID NO: 1543686
auacaugcucuauuaugca

SEQ ID NO: 1543688 - RNA, 19 nt, Artificial Sequence
  Description of Artificial Sequence: Synthetic oligonucleotide
  Sense strand starting at position 2555 of SEQ ID NO: 1245192
agaggcguaacccaacaau

SEQ ID NO: 1543689 - RNA, 19 nt, Artificial Sequence
  Description of Artificial Sequence: Synthetic oligonucleotide
  Antisense strand to SEQ ID NO: 1543688
auuguuggguuacgccucu

SEQ ID NO: 1543690 - RNA, 19 nt, Artificial Sequence
  Description of Artificial Sequence: Synthetic oligonucleotide
  Sense strand starting at position 2631 of SEQ ID NO: 1245192
gugucuccaagcugaagau

SEQ ID NO: 1543691 - RNA, 19 nt, Artificial Sequence
  Description of Artificial Sequence: Synthetic oligonucleotide
  Antisense strand to SEQ ID NO: 1543690
aucuucagcuuggagacac

SEQ ID NO: 1543692 - RNA, 19 nt, Artificial Sequence
  Description of Artificial Sequence: Synthetic oligonucleotide
  Sense strand starting at position 3523 of SEQ ID NO: 1245192
cuauguaaaggcuaaacua

SEQ ID NO: 1543693 - RNA, 19 nt, Artificial Sequence
  Description of Artificial Sequence: Synthetic oligonucleotide
  Antisense strand to SEQ ID NO: 1543692
uaguuuagccuuuacauag

SEQ ID NO: 1543694 - RNA, 19 nt, Artificial Sequence
  Description of Artificial Sequence: Synthetic oligonucleotide
  Sense strand starting at position 3560 of SEQ ID NO: 1245192
guggucugacagcaugaca

SEQ ID NO: 1543695 - RNA, 19 nt, Artificial Sequence
  Description of Artificial Sequence: Synthetic oligonucleotide
  Antisense strand to SEQ ID NO: 1543694
ugucaugcugucagaccac

SEQ ID NO: 1543696 - RNA, 19 nt, Artificial Sequence
  Description of Artificial Sequence: Synthetic oligonucleotide
  Sense strand starting at position 3628 of SEQ ID NO: 1245192
guauaaguacauuaaagca

SEQ ID NO: 1543697 - RNA, 19 nt, Artificial Sequence
  Description of Artificial Sequence: Synthetic oligonucleotide
  Antisense strand to SEQ ID NO: 1543696
ugcuuuaauguacuuauac

SEQ ID NO: 1543698 - RNA, 19 nt, Artificial Sequence
  Description of Artificial Sequence: Synthetic oligonucleotide
  Sense strand starting at position 3667 of SEQ ID NO: 1245192
gcauauauuacggguauug

SEQ ID NO: 1543699 - RNA, 19 nt, Artificial Sequence
  Description of Artificial Sequence: Synthetic oligonucleotide
  Antisense strand to SEQ ID NO: 1543698
caauacccguaauauaugc

SEQ ID NO: 1543700 - RNA, 19 nt, Artificial Sequence
  Description of Artificial Sequence: Synthetic oligonucleotide
  Sense strand starting at position 3709 of SEQ ID NO: 1245192
acaggauuguguccuugca

SEQ ID NO: 1543701 - RNA, 19 nt, Artificial Sequence
  Description of Artificial Sequence: Synthetic oligonucleotide
  Antisense strand to SEQ ID NO: 1543700
ugcaaggacacaauccugu

SEQ ID NO: 1543702 - RNA, 19 nt, Artificial Sequence
  Description of Artificial Sequence: Synthetic oligonucleotide
  Sense strand starting at position 3926 of SEQ ID NO: 1245192
gccaauauccuauggccaa

SEQ ID NO: 1543703 - RNA, 19 nt, Artificial Sequence
  Description of Artificial Sequence: Synthetic oligonucleotide
  Antisense strand to SEQ ID NO: 1543702
uuggccauaggauauuggc

SEQ ID NO: 1543704 - RNA, 19 nt, Artificial Sequence
  Description of Artificial Sequence: Synthetic oligonucleotide
  Sense strand starting at position 3930 of SEQ ID NO: 1245192
auauccuauggccaaagua

SEQ ID NO: 1543705 - RNA, 19 nt, Artificial Sequence
  Description of Artificial Sequence: Synthetic oligonucleotide
  Antisense strand to SEQ ID NO: 1543704
uacuuuggccauaggauau

SEQ ID NO: 1543706 - RNA, 19 nt, Artificial Sequence
  Description of Artificial Sequence: Synthetic oligonucleotide
  Sense strand starting at position 3958 of SEQ ID NO: 1245192
ggcuaagcccagcagaaau

SEQ ID NO: 1543707 - RNA, 19 nt, Artificial Sequence
  Description of Artificial Sequence: Synthetic oligonucleotide
  Antisense strand to SEQ ID NO: 1543706
auuucugcugggcuuagcc

SEQ ID NO: 1543708 - RNA, 19 nt, Artificial Sequence
  Description of Artificial Sequence: Synthetic oligonucleotide
  Sense strand starting at position 98 of SEQ ID NO: 1245193
uuagaagaccucuguugaa

SEQ ID NO: 1543709 - RNA, 19 nt, Artificial Sequence
  Description of Artificial Sequence: Synthetic oligonucleotide
  Antisense strand to SEQ ID NO: 1543708
uucaacagaggucuucuaa

SEQ ID NO: 1543710 - RNA, 19 nt, Artificial Sequence
  Description of Artificial Sequence: Synthetic oligonucleotide
  Sense strand starting at position 237 of SEQ ID NO: 1245193
accugaagcgguugggaaa

SEQ ID NO: 1543711 - RNA, 19 nt, Artificial Sequence
  Description of Artificial Sequence: Synthetic oligonucleotide
  Antisense strand to SEQ ID NO: 1543710
uuucccaaccgcuucaggu

SEQ ID NO: 1543712 - RNA, 19 nt, Artificial Sequence
  Description of Artificial Sequence: Synthetic oligonucleotide
  Sense strand starting at position 313 of SEQ ID NO: 1245193
uuuacugagucaucuacga

SEQ ID NO: 1543713 - RNA, 19 nt, Artificial Sequence
  Description of Artificial Sequence: Synthetic oligonucleotide
  Antisense strand to SEQ ID NO: 1543712
ucguagaugacucaguaaa

SEQ ID NO: 1543714 - RNA, 19 nt, Artificial Sequence
  Description of Artificial Sequence: Synthetic oligonucleotide
  Sense strand starting at position 417 of SEQ ID NO: 1245193
uguguuaauagaugaggca

SEQ ID NO: 1543715 - RNA, 19 nt, Artificial Sequence
  Description of Artificial Sequence: Synthetic oligonucleotide
  Antisense strand to SEQ ID NO: 1543714
ugccucaucuauuaacaca

SEQ ID NO: 1543716 - RNA, 19 nt, Artificial Sequence
  Description of Artificial Sequence: Synthetic oligonucleotide
  Sense strand starting at position 468 of SEQ ID NO: 1245193
acuugaaucgagcagaucu

SEQ ID NO: 1543717 - RNA, 19 nt, Artificial Sequence
  Description of Artificial Sequence: Synthetic oligonucleotide
  Antisense strand to SEQ ID NO: 1543716
agaucugcucgauucaagu

SEQ ID NO: 1543718 - RNA, 19 nt, Artificial Sequence
  Description of Artificial Sequence: Synthetic oligonucleotide
  Sense strand starting at position 470 of SEQ ID NO: 1245193
uugaaucgagcagaucuuu

SEQ ID NO: 1543719 - RNA, 19 nt, Artificial Sequence
  Description of Artificial Sequence: Synthetic oligonucleotide
  Antisense strand to SEQ ID NO: 1543718
aaagaucugcucgauucaa

SEQ ID NO: 1543720 - RNA, 19 nt, Artificial Sequence
  Description of Artificial Sequence: Synthetic oligonucleotide
  Sense strand starting at position 524 of SEQ ID NO: 1245193
uaacuuaugcuagagugaa

SEQ ID NO: 1543721 - RNA, 19 nt, Artificial Sequence
  Description of Artificial Sequence: Synthetic oligonucleotide
  Antisense strand to SEQ ID NO: 1543720
uucacucuagcauaaguua

SEQ ID NO: 1543722 - RNA, 19 nt, Artificial Sequence
  Description of Artificial Sequence: Synthetic oligonucleotide
  Sense strand starting at position 528 of SEQ ID NO: 1245193
uuaugcuagagugaaguuu

SEQ ID NO: 1543723 - RNA, 19 nt, Artificial Sequence
  Description of Artificial Sequence: Synthetic oligonucleotide
  Antisense strand to SEQ ID NO: 1543722
aaacuucacucuagcauaa

SEQ ID NO: 1543724 - RNA, 19 nt, Artificial Sequence
  Description of Artificial Sequence: Synthetic oligonucleotide
  Sense strand starting at position 597 of SEQ ID NO: 1245193
cgccaacauguauaagaau

SEQ ID NO: 1543725 - RNA, 19 nt, Artificial Sequence
  Description of Artificial Sequence: Synthetic oligonucleotide
  Antisense strand to SEQ ID NO: 1543724
auucuuauacauguuggcg

SEQ ID NO: 1543726 - RNA, 19 nt, Artificial Sequence
  Description of Artificial Sequence: Synthetic oligonucleotide
  Sense strand starting at position 648 of SEQ ID NO: 1245193
gcggccuugggugaugaaa

SEQ ID NO: 1543727 - RNA, 19 nt, Artificial Sequence
  Description of Artificial Sequence: Synthetic oligonucleotide
  Antisense strand to SEQ ID NO: 1543726
uuucaucacccaaggccgc

SEQ ID NO: 1543728 - RNA, 19 nt, Artificial Sequence
  Description of Artificial Sequence: Synthetic oligonucleotide
  Sense strand starting at position 712 of SEQ ID NO: 1245193
cuaccugacuggucacauu

SEQ ID NO: 1543729 - RNA, 19 nt, Artificial Sequence
  Description of Artificial Sequence: Synthetic oligonucleotide
  Antisense strand to SEQ ID NO: 1543728
aaugugaccagucagguag

SEQ ID NO: 1543730 - RNA, 19 nt, Artificial Sequence
  Description of Artificial Sequence: Synthetic oligonucleotide
  Sense strand starting at position 721 of SEQ ID NO: 1245193
uggucacauuucguaaguu

SEQ ID NO: 1543731 - RNA, 19 nt, Artificial Sequence
  Description of Artificial Sequence: Synthetic oligonucleotide
  Antisense strand to SEQ ID NO: 1543730
aacuuacgaaaugugacca

SEQ ID NO: 1543732 - RNA, 19 nt, Artificial Sequence
  Description of Artificial Sequence: Synthetic oligonucleotide
  Sense strand starting at position 779 of SEQ ID NO: 1245193
ggauaauggccuuggaugu

SEQ ID NO: 1543733 - RNA, 19 nt, Artificial Sequence
  Description of Artificial Sequence: Synthetic oligonucleotide
  Antisense strand to SEQ ID NO: 1543732
acauccaaggccauuaucc

SEQ ID NO: 1543734 - RNA, 19 nt, Artificial Sequence
  Description of Artificial Sequence: Synthetic oligonucleotide
  Sense strand starting at position 780 of SEQ ID NO: 1245193
gauaauggccuuggauguu

SEQ ID NO: 1543735 - RNA, 19 nt, Artificial Sequence
  Description of Artificial Sequence: Synthetic oligonucleotide
  Antisense strand to SEQ ID NO: 1543734
aacauccaaggccauuauc

SEQ ID NO: 1543736 - RNA, 19 nt, Artificial Sequence
  Description of Artificial Sequence: Synthetic oligonucleotide
  Sense strand starting at position 797 of SEQ ID NO: 1245193
uugcuaagauuggcagaga

SEQ ID NO: 1543737 - RNA, 19 nt, Artificial Sequence
  Description of Artificial Sequence: Synthetic oligonucleotide
  Antisense strand to SEQ ID NO: 1543736
ucucugccaaucuuagcaa

SEQ ID NO: 1543738 - RNA, 19 nt, Artificial Sequence
  Description of Artificial Sequence: Synthetic oligonucleotide
  Sense strand starting at position 876 of SEQ ID NO: 1245193
ugcuuugaugacggagauu

SEQ ID NO: 1543739 - RNA, 19 nt, Artificial Sequence
  Description of Artificial Sequence: Synthetic oligonucleotide
  Antisense strand to SEQ ID NO: 1543738
aaucuccgucaucaaagca

SEQ ID NO: 1543740 - RNA, 19 nt, Artificial Sequence
  Description of Artificial Sequence: Synthetic oligonucleotide
  Sense strand starting at position 913 of SEQ ID NO: 1245193
cgguguaaaccagaugauu

SEQ ID NO: 1543741 - RNA, 19 nt, Artificial Sequence
  Description of Artificial Sequence: Synthetic oligonucleotide
  Antisense strand to SEQ ID NO: 1543740
aaucaucugguuuacaccg

SEQ ID NO: 1543742 - RNA, 19 nt, Artificial Sequence
  Description of Artificial Sequence: Synthetic oligonucleotide
  Sense strand starting at position 921 of SEQ ID NO: 1245193
accagaugauuccugcuaa

SEQ ID NO: 1543743 - RNA, 19 nt, Artificial Sequence
  Description of Artificial Sequence: Synthetic oligonucleotide
  Antisense strand to SEQ ID NO: 1543742
uuagcaggaaucaucuggu

SEQ ID NO: 1543744 - RNA, 19 nt, Artificial Sequence
  Description of Artificial Sequence: Synthetic oligonucleotide
  Sense strand starting at position 955 of SEQ ID NO: 1245193
agaucugauuagcccuaaa

SEQ ID NO: 1543745 - RNA, 19 nt, Artificial Sequence
  Description of Artificial Sequence: Synthetic oligonucleotide
  Antisense strand to SEQ ID NO: 1543744
uuuagggcuaaucagaucu

SEQ ID NO: 1543746 - RNA, 19 nt, Artificial Sequence
  Description of Artificial Sequence: Synthetic oligonucleotide
  Sense strand starting at position 1162 of SEQ ID NO: 1245193
caugaaagucccugaguca

SEQ ID NO: 1543747 - RNA, 19 nt, Artificial Sequence
  Description of Artificial Sequence: Synthetic oligonucleotide
  Antisense strand to SEQ ID NO: 1543746
ugacucagggacuuucaug

SEQ ID NO: 1543748 - RNA, 19 nt, Artificial Sequence
  Description of Artificial Sequence: Synthetic oligonucleotide
  Sense strand starting at position 2323 of SEQ ID NO: 1245193
ggcagucauccagaggacu

SEQ ID NO: 1543749 - RNA, 19 nt, Artificial Sequence
  Description of Artificial Sequence: Synthetic oligonucleotide
  Antisense strand to SEQ ID NO: 1543748
aguccucuggaugacugcc

SEQ ID NO: 1543750 - RNA, 19 nt, Artificial Sequence
  Description of Artificial Sequence: Synthetic oligonucleotide
  Sense strand starting at position 2595 of SEQ ID NO: 1245193
guauuaggguuccugaagu

SEQ ID NO: 1543751 - RNA, 19 nt, Artificial Sequence
  Description of Artificial Sequence: Synthetic oligonucleotide
  Antisense strand to SEQ ID NO: 1543750
acuucaggaacccuaauac

SEQ ID NO: 1543752 - RNA, 19 nt, Artificial Sequence
  Description of Artificial Sequence: Synthetic oligonucleotide
  Sense strand starting at position 2668 of SEQ ID NO: 1245193
ucuuauguggguuagagau

SEQ ID NO: 1543753 - RNA, 19 nt, Artificial Sequence
  Description of Artificial Sequence: Synthetic oligonucleotide
  Antisense strand to SEQ ID NO: 1543752
aucucuaacccacauaaga

SEQ ID NO: 1543754 - RNA, 19 nt, Artificial Sequence
  Description of Artificial Sequence: Synthetic oligonucleotide
  Sense strand starting at position 2840 of SEQ ID NO: 1245193
cuauuagagaaguggcauu

SEQ ID NO: 1543755 - RNA, 19 nt, Artificial Sequence
  Description of Artificial Sequence: Synthetic oligonucleotide
  Antisense strand to SEQ ID NO: 1543754
aaugccacuucucuaauag

SEQ ID NO: 1543756 - RNA, 19 nt, Artificial Sequence
  Description of Artificial Sequence: Synthetic oligonucleotide
  Sense strand starting at position 2870 of SEQ ID NO: 1245193
ugaagaucucuuuaauguc

SEQ ID NO: 1543757 - RNA, 19 nt, Artificial Sequence
  Description of Artificial Sequence: Synthetic oligonucleotide
  Antisense strand to SEQ ID NO: 1543756
gacauuaaagagaucuuca

SEQ ID NO: 1543758 - RNA, 19 nt, Artificial Sequence
  Description of Artificial Sequence: Synthetic oligonucleotide
  Sense strand starting at position 2913 of SEQ ID NO: 1245193
cguuuaugugcuucugcau

SEQ ID NO: 1543759 - RNA, 19 nt, Artificial Sequence
  Description of Artificial Sequence: Synthetic oligonucleotide
  Antisense strand to SEQ ID NO: 1543758
augcagaagcacauaaacg

SEQ ID NO: 1543760 - RNA, 19 nt, Artificial Sequence
  Description of Artificial Sequence: Synthetic oligonucleotide
  Sense strand starting at position 2914 of SEQ ID NO: 1245193
guuuaugugcuucugcauu

SEQ ID NO: 1543761 - RNA, 19 nt, Artificial Sequence
  Description of Artificial Sequence: Synthetic oligonucleotide
  Antisense strand to SEQ ID NO: 1543760
aaugcagaagcacauaaac

SEQ ID NO: 1543762 - RNA, 19 nt, Artificial Sequence
  Description of Artificial Sequence: Synthetic oligonucleotide
  Sense strand starting at position 2977 of SEQ ID NO: 1245193
guguccacuccugaaagaa

SEQ ID NO: 1543763 - RNA, 19 nt, Artificial Sequence
  Description of Artificial Sequence: Synthetic oligonucleotide
  Antisense strand to SEQ ID NO: 1543762
uucuuucaggaguggacac

SEQ ID NO: 1543764 - RNA, 19 nt, Artificial Sequence
  Description of Artificial Sequence: Synthetic oligonucleotide
  Sense strand starting at position 3116 of SEQ ID NO: 1245193
acuuuauaccauuguugua

SEQ ID NO: 1543765 - RNA, 19 nt, Artificial Sequence
  Description of Artificial Sequence: Synthetic oligonucleotide
  Antisense strand to SEQ ID NO: 1543764
uacaacaaugguauaaagu

SEQ ID NO: 1543766 - RNA, 19 nt, Artificial Sequence
  Description of Artificial Sequence: Synthetic oligonucleotide
  Sense strand starting at position 3189 of SEQ ID NO: 1245193
agauuugucuuacaguaua

SEQ ID NO: 1543767 - RNA, 19 nt, Artificial Sequence
  Description of Artificial Sequence: Synthetic oligonucleotide
  Antisense strand to SEQ ID NO: 1543766
uauacuguaagacaaaucu

SEQ ID NO: 1543768 - RNA, 19 nt, Artificial Sequence
  Description of Artificial Sequence: Synthetic oligonucleotide
  Sense strand starting at position 3262 of SEQ ID NO: 1245193
uucuguuauguauagaggu

SEQ ID NO: 1543769 - RNA, 19 nt, Artificial Sequence
  Description of Artificial Sequence: Synthetic oligonucleotide
  Antisense strand to SEQ ID NO: 1543768
accucuauacauaacagaa

SEQ ID NO: 1543770 - RNA, 19 nt, Artificial Sequence
  Description of Artificial Sequence: Synthetic oligonucleotide
  Sense strand starting at position 3264 of SEQ ID NO: 1245193
cuguuauguauagagguua

SEQ ID NO: 1543771 - RNA, 19 nt, Artificial Sequence
  Description of Artificial Sequence: Synthetic oligonucleotide
  Antisense strand to SEQ ID NO: 1543770
uaaccucuauacauaacag

SEQ ID NO: 1543772 - RNA, 19 nt, Artificial Sequence
  Description of Artificial Sequence: Synthetic oligonucleotide
  Sense strand starting at position 3279 of SEQ ID NO: 1245193
guuaguaaauacuugauga

SEQ ID NO: 1543773 - RNA, 19 nt, Artificial Sequence
  Description of Artificial Sequence: Synthetic oligonucleotide
  Antisense strand to SEQ ID NO: 1543772
ucaucaaguauuuacuaac

SEQ ID NO: 1543774 - RNA, 19 nt, Artificial Sequence
  Description of Artificial Sequence: Synthetic oligonucleotide
  Sense strand starting at position 3286 of SEQ ID NO: 1245193
aauacuugaugagaggaaa

SEQ ID NO: 1543775 - RNA, 19 nt, Artificial Sequence
  Description of Artificial Sequence: Synthetic oligonucleotide
  Antisense strand to SEQ ID NO: 1543774
uuuccucucaucaaguauu

SEQ ID NO: 1543776 - RNA, 19 nt, Artificial Sequence
  Description of Artificial Sequence: Synthetic oligonucleotide
  Sense strand starting at position 3455 of SEQ ID NO: 1245193
cuguguuggguaugaauga

SEQ ID NO: 1543777 - RNA, 19 nt, Artificial Sequence
  Description of Artificial Sequence: Synthetic oligonucleotide
  Antisense strand to SEQ ID NO: 1543776
ucauucauacccaacacag

SEQ ID NO: 1543778 - RNA, 19 nt, Artificial Sequence
  Description of Artificial Sequence: Synthetic oligonucleotide
  Sense strand starting at position 3908 of SEQ ID NO: 1245193
uguuucagaguuugggauu

SEQ ID NO: 1543779 - RNA, 19 nt, Artificial Sequence
  Description of Artificial Sequence: Synthetic oligonucleotide
  Antisense strand to SEQ ID NO: 1543778
aaucccaaacucugaaaca

SEQ ID NO: 1543780 - RNA, 19 nt, Artificial Sequence
  Description of Artificial Sequence: Synthetic oligonucleotide
  Sense strand starting at position 3914 of SEQ ID NO: 1245193
agaguuugggauugaggca

SEQ ID NO: 1543781 - RNA, 19 nt, Artificial Sequence
  Description of Artificial Sequence: Synthetic oligonucleotide
  Antisense strand to SEQ ID NO: 1543780
ugccucaaucccaaacucu

SEQ ID NO: 1543782 - RNA, 19 nt, Artificial Sequence
  Description of Artificial Sequence: Synthetic oligonucleotide
  Sense strand starting at position 3937 of SEQ ID NO: 1245193
auaauagugacuugggauu

SEQ ID NO: 1543783 - RNA, 19 nt, Artificial Sequence
  Description of Artificial Sequence: Synthetic oligonucleotide
  Antisense strand to SEQ ID NO: 1543782
aaucccaagucacuauuau

SEQ ID NO: 1543784 - RNA, 19 nt, Artificial Sequence
  Description of Artificial Sequence: Synthetic oligonucleotide
  Sense strand starting at position 3959 of SEQ ID NO: 1245193
gcuugugcaaaggaguaau

SEQ ID NO: 1543785 - RNA, 19 nt, Artificial Sequence
  Description of Artificial Sequence: Synthetic oligonucleotide
  Antisense strand to SEQ ID NO: 1543784
auuacuccuuugcacaagc

SEQ ID NO: 1543786 - RNA, 19 nt, Artificial Sequence
  Description of Artificial Sequence: Synthetic oligonucleotide
  Sense strand starting at position 3962 of SEQ ID NO: 1245193
ugugcaaaggaguaaugau

SEQ ID NO: 1543787 - RNA, 19 nt, Artificial Sequence
  Description of Artificial Sequence: Synthetic oligonucleotide
  Antisense strand to SEQ ID NO: 1543786
aucauuacuccuuugcaca

SEQ ID NO: 1543788 - RNA, 19 nt, Artificial Sequence
  Description of Artificial Sequence: Synthetic oligonucleotide
  Sense strand starting at position 54 of SEQ ID NO: 1245194
cucguuguucaugucagua

SEQ ID NO: 1543789 - RNA, 19 nt, Artificial Sequence
  Description of Artificial Sequence: Synthetic oligonucleotide
  Antisense strand to SEQ ID NO: 1543788
uacugacaugaacaacgag

SEQ ID NO: 1543790 - RNA, 19 nt, Artificial Sequence
  Description of Artificial Sequence: Synthetic oligonucleotide
  Sense strand starting at position 66 of SEQ ID NO: 1245194
gucaguaaugucuauucug

SEQ ID NO: 1543791 - RNA, 19 nt, Artificial Sequence
  Description of Artificial Sequence: Synthetic oligonucleotide
  Antisense strand to SEQ ID NO: 1543790
cagaauagacauuacugac

SEQ ID NO: 1543792 - RNA, 19 nt, Artificial Sequence
  Description of Artificial Sequence: Synthetic oligonucleotide
  Sense strand starting at position 75 of SEQ ID NO: 1245194
gucuauucuguccaggaac

SEQ ID NO: 1543793 - RNA, 19 nt, Artificial Sequence
  Description of Artificial Sequence: Synthetic oligonucleotide
  Antisense strand to SEQ ID NO: 1543792
guuccuggacagaauagac

SEQ ID NO: 1543794 - RNA, 19 nt, Artificial Sequence
  Description of Artificial Sequence: Synthetic oligonucleotide
  Sense strand starting at position 77 of SEQ ID NO: 1245194
cuauucuguccaggaacca

SEQ ID NO: 1543795 - RNA, 19 nt, Artificial Sequence
  Description of Artificial Sequence: Synthetic oligonucleotide
  Antisense strand to SEQ ID NO: 1543794
ugguuccuggacagaauag

SEQ ID NO: 1543796 - RNA, 19 nt, Artificial Sequence
  Description of Artificial Sequence: Synthetic oligonucleotide
  Sense strand starting at position 111 of SEQ ID NO: 1245194
uguguugucguggcgaauc

SEQ ID NO: 1543797 - RNA, 19 nt, Artificial Sequence
  Description of Artificial Sequence: Synthetic oligonucleotide
  Antisense strand to SEQ ID NO: 1543796
gauucgccacgacaacaca

SEQ ID NO: 1543798 - RNA, 19 nt, Artificial Sequence
  Description of Artificial Sequence: Synthetic oligonucleotide
  Sense strand starting at position 319 of SEQ ID NO: 1245194
uggagaaugucacuuagua

SEQ ID NO: 1543799 - RNA, 19 nt, Artificial Sequence
  Description of Artificial Sequence: Synthetic oligonucleotide
  Antisense strand to SEQ ID NO: 1543798
uacuaagugacauucucca

SEQ ID NO: 1543800 - RNA, 19 nt, Artificial Sequence
  Description of Artificial Sequence: Synthetic oligonucleotide
  Sense strand starting at position 323 of SEQ ID NO: 1245194
gaaugucacuuaguagucu

SEQ ID NO: 1543801 - RNA, 19 nt, Artificial Sequence
  Description of Artificial Sequence: Synthetic oligonucleotide
  Antisense strand to SEQ ID NO: 1543800
agacuacuaagugacauuc

SEQ ID NO: 1543802 - RNA, 19 nt, Artificial Sequence
  Description of Artificial Sequence: Synthetic oligonucleotide
  Sense strand starting at position 398 of SEQ ID NO: 1245194
cucucauguccaggaaggu

SEQ ID NO: 1543803 - RNA, 19 nt, Artificial Sequence
  Description of Artificial Sequence: Synthetic oligonucleotide
  Antisense strand to SEQ ID NO: 1543802
accuuccuggacaugagag

SEQ ID NO: 1543804 - RNA, 19 nt, Artificial Sequence
  Description of Artificial Sequence: Synthetic oligonucleotide
  Sense strand starting at position 462 of SEQ ID NO: 1245194
gaagauagguuugcuggau

SEQ ID NO: 1543805 - RNA, 19 nt, Artificial Sequence
  Description of Artificial Sequence: Synthetic oligonucleotide
  Antisense strand to SEQ ID NO: 1543804
auccagcaaaccuaucuuc

SEQ ID NO: 1543806 - RNA, 19 nt, Artificial Sequence
  Description of Artificial Sequence: Synthetic oligonucleotide
  Sense strand starting at position 619 of SEQ ID NO: 1245194
auccaaagugacugucaga

SEQ ID NO: 1543807 - RNA, 19 nt, Artificial Sequence
  Description of Artificial Sequence: Synthetic oligonucleotide
  Antisense strand to SEQ ID NO: 1543806
ucugacagucacuuuggau

SEQ ID NO: 1543808 - RNA, 19 nt, Artificial Sequence
  Description of Artificial Sequence: Synthetic oligonucleotide
  Sense strand starting at position 684 of SEQ ID NO: 1245194
uggaucacaccaugugaau

SEQ ID NO: 1543809 - RNA, 19 nt, Artificial Sequence
  Description of Artificial Sequence: Synthetic oligonucleotide
  Antisense strand to SEQ ID NO: 1543808
auucacauggugugaucca

SEQ ID NO: 1543810 - RNA, 19 nt, Artificial Sequence
  Description of Artificial Sequence: Synthetic oligonucleotide
  Sense strand starting at position 763 of SEQ ID NO: 1245194
ggccuucuuggauauaacu

SEQ ID NO: 1543811 - RNA, 19 nt, Artificial Sequence
  Description of Artificial Sequence: Synthetic oligonucleotide
  Antisense strand to SEQ ID NO: 1543810
aguuauauccaagaaggcc

SEQ ID NO: 1543812 - RNA, 19 nt, Artificial Sequence
  Description of Artificial Sequence: Synthetic oligonucleotide
  Sense strand starting at position 830 of SEQ ID NO: 1245194
cagaaauaguaugaugaaa

SEQ ID NO: 1543813 - RNA, 19 nt, Artificial Sequence
  Description of Artificial Sequence: Synthetic oligonucleotide
  Antisense strand to SEQ ID NO: 1543812
uuucaucauacuauuucug

SEQ ID NO: 1543814 - RNA, 19 nt, Artificial Sequence
  Description of Artificial Sequence: Synthetic oligonucleotide
  Sense strand starting at position 966 of SEQ ID NO: 1245194
ggcagauaccaugauucuu

SEQ ID NO: 1543815 - RNA, 19 nt, Artificial Sequence
  Description of Artificial Sequence: Synthetic oligonucleotide
  Antisense strand to SEQ ID NO: 1543814
aagaaucaugguaucugcc

SEQ ID NO: 1543816 - RNA, 19 nt, Artificial Sequence
  Description of Artificial Sequence: Synthetic oligonucleotide
  Sense strand starting at position 1117 of SEQ ID NO: 1245194
uuaccaguugcacaaguua

SEQ ID NO: 1543817 - RNA, 19 nt, Artificial Sequence
  Description of Artificial Sequence: Synthetic oligonucleotide
  Antisense strand to SEQ ID NO: 1543816
uaacuugugcaacugguaa

SEQ ID NO: 1543818 - RNA, 19 nt, Artificial Sequence
  Description of Artificial Sequence: Synthetic oligonucleotide
  Sense strand starting at position 1136 of SEQ ID NO: 1245194
uguaguccucuauagaaau

SEQ ID NO: 1543819 - RNA, 19 nt, Artificial Sequence
  Description of Artificial Sequence: Synthetic oligonucleotide
  Antisense strand to SEQ ID NO: 1543818
auuucuauagaggacuaca

SEQ ID NO: 1543820 - RNA, 19 nt, Artificial Sequence
  Description of Artificial Sequence: Synthetic oligonucleotide
  Sense strand starting at position 1168 of SEQ ID NO: 1245194
agaaauauguggcuauaau

SEQ ID NO: 1543821 - RNA, 19 nt, Artificial Sequence
  Description of Artificial Sequence: Synthetic oligonucleotide
  Antisense strand to SEQ ID NO: 1543820
auuauagccacauauuucu

SEQ ID NO: 1543822 - RNA, 19 nt, Artificial Sequence
  Description of Artificial Sequence: Synthetic oligonucleotide
  Sense strand starting at position 1169 of SEQ ID NO: 1245194
gaaauauguggcuauaauu

SEQ ID NO: 1543823 - RNA, 19 nt, Artificial Sequence
  Description of Artificial Sequence: Synthetic oligonucleotide
  Antisense strand to SEQ ID NO: 1543822
aauuauagccacauauuuc

SEQ ID NO: 1543824 - RNA, 19 nt, Artificial Sequence
  Description of Artificial Sequence: Synthetic oligonucleotide
  Sense strand starting at position 1434 of SEQ ID NO: 1245194
ggcaaagaugacggcuuua

SEQ ID NO: 1543825 - RNA, 19 nt, Artificial Sequence
  Description of Artificial Sequence: Synthetic oligonucleotide
  Antisense strand to SEQ ID NO: 1543824
uaaagccgucaucuuugcc

SEQ ID NO: 1543826 - RNA, 19 nt, Artificial Sequence
  Description of Artificial Sequence: Synthetic oligonucleotide
  Sense strand starting at position 1479 of SEQ ID NO: 1245194
ggaagaguaagguaugugu

SEQ ID NO: 1543827 - RNA, 19 nt, Artificial Sequence
  Description of Artificial Sequence: Synthetic oligonucleotide
  Antisense strand to SEQ ID NO: 1543826
acacauaccuuacucuucc

SEQ ID NO: 1543828 - RNA, 19 nt, Artificial Sequence
  Description of Artificial Sequence: Synthetic oligonucleotide
  Sense strand starting at position 1481 of SEQ ID NO: 1245194
aagaguaagguauguguau

SEQ ID NO: 1543829 - RNA, 19 nt, Artificial Sequence
  Description of Artificial Sequence: Synthetic oligonucleotide
  Antisense strand to SEQ ID NO: 1543828
auacacauaccuuacucuu

SEQ ID NO: 1543830 - RNA, 19 nt, Artificial Sequence
  Description of Artificial Sequence: Synthetic oligonucleotide
  Sense strand starting at position 1482 of SEQ ID NO: 1245194
agaguaagguauguguauu

SEQ ID NO: 1543831 - RNA, 19 nt, Artificial Sequence
  Description of Artificial Sequence: Synthetic oligonucleotide
  Antisense strand to SEQ ID NO: 1543830
aauacacauaccuuacucu

SEQ ID NO: 1543832 - RNA, 19 nt, Artificial Sequence
  Description of Artificial Sequence: Synthetic oligonucleotide
  Sense strand starting at position 1483 of SEQ ID NO: 1245194
gaguaagguauguguauuu

SEQ ID NO: 1543833 - RNA, 19 nt, Artificial Sequence
  Description of Artificial Sequence: Synthetic oligonucleotide
  Antisense strand to SEQ ID NO: 1543832
aaauacacauaccuuacuc

SEQ ID NO: 1543834 - RNA, 19 nt, Artificial Sequence
  Description of Artificial Sequence: Synthetic oligonucleotide
  Sense strand starting at position 1508 of SEQ ID NO: 1245194
auggauucccacugcauua

SEQ ID NO: 1543835 - RNA, 19 nt, Artificial Sequence
  Description of Artificial Sequence: Synthetic oligonucleotide
  Antisense strand to SEQ ID NO: 1543834
uaaugcagugggaauccau

SEQ ID NO: 1543836 - RNA, 19 nt, Artificial Sequence
  Description of Artificial Sequence: Synthetic oligonucleotide
  Sense strand starting at position 1706 of SEQ ID NO: 1245194
gugguuccaucuucugaga

SEQ ID NO: 1543837 - RNA, 19 nt, Artificial Sequence
  Description of Artificial Sequence: Synthetic oligonucleotide
  Antisense strand to SEQ ID NO: 1543836
ucucagaagauggaaccac

SEQ ID NO: 1543838 - RNA, 19 nt, Artificial Sequence
  Description of Artificial Sequence: Synthetic oligonucleotide
  Sense strand starting at position 1981 of SEQ ID NO: 1245194
guaucaguguuacugaaga

SEQ ID NO: 1543839 - RNA, 19 nt, Artificial Sequence
  Description of Artificial Sequence: Synthetic oligonucleotide
  Antisense strand to SEQ ID NO: 1543838
ucuucaguaacacugauac

SEQ ID NO: 1543840 - RNA, 19 nt, Artificial Sequence
  Description of Artificial Sequence: Synthetic oligonucleotide
  Sense strand starting at position 2219 of SEQ ID NO: 1245194
gaugguuagguagacguua

SEQ ID NO: 1543841 - RNA, 19 nt, Artificial Sequence
  Description of Artificial Sequence: Synthetic oligonucleotide
  Antisense strand to SEQ ID NO: 1543840
uaacgucuaccuaaccauc

SEQ ID NO: 1543842 - RNA, 19 nt, Artificial Sequence
  Description of Artificial Sequence: Synthetic oligonucleotide
  Sense strand starting at position 2287 of SEQ ID NO: 1245194
agguguuuccuguagacac

SEQ ID NO: 1543843 - RNA, 19 nt, Artificial Sequence
  Description of Artificial Sequence: Synthetic oligonucleotide
  Antisense strand to SEQ ID NO: 1543842
gugucuacaggaaacaccu

SEQ ID NO: 1543844 - RNA, 19 nt, Artificial Sequence
  Description of Artificial Sequence: Synthetic oligonucleotide
  Sense strand starting at position 2506 of SEQ ID NO: 1245194
gucaguuguauugagucau

SEQ ID NO: 1543845 - RNA, 19 nt, Artificial Sequence
  Description of Artificial Sequence: Synthetic oligonucleotide
  Antisense strand to SEQ ID NO: 1543844
augacucaauacaacugac

SEQ ID NO: 1543846 - RNA, 19 nt, Artificial Sequence
  Description of Artificial Sequence: Synthetic oligonucleotide
  Sense strand starting at position 2510 of SEQ ID NO: 1245194
guuguauugagucauauca

SEQ ID NO: 1543847 - RNA, 19 nt, Artificial Sequence
  Description of Artificial Sequence: Synthetic oligonucleotide
  Antisense strand to SEQ ID NO: 1543846
ugauaugacucaauacaac

SEQ ID NO: 1543848 - RNA, 19 nt, Artificial Sequence
  Description of Artificial Sequence: Synthetic oligonucleotide
  Sense strand starting at position 2518 of SEQ ID NO: 1245194
gagucauaucagggcuccu

SEQ ID NO: 1543849 - RNA, 19 nt, Artificial Sequence
  Description of Artificial Sequence: Synthetic oligonucleotide
  Antisense strand to SEQ ID NO: 1543848
aggagcccugauaugacuc

SEQ ID NO: 1543850 - RNA, 19 nt, Artificial Sequence
  Description of Artificial Sequence: Synthetic oligonucleotide
  Sense strand starting at position 2589 of SEQ ID NO: 1245194
cccaaacagcagugucaau

SEQ ID NO: 1543851 - RNA, 19 nt, Artificial Sequence
  Description of Artificial Sequence: Synthetic oligonucleotide
  Antisense strand to SEQ ID NO: 1543850
auugacacugcuguuuggg

SEQ ID NO: 1543852 - RNA, 19 nt, Artificial Sequence
  Description of Artificial Sequence: Synthetic oligonucleotide
  Sense strand starting at position 2632 of SEQ ID NO: 1245194
gagagcuauuugggaacca

SEQ ID NO: 1543853 - RNA, 19 nt, Artificial Sequence
  Description of Artificial Sequence: Synthetic oligonucleotide
  Antisense strand to SEQ ID NO: 1543852
ugguucccaaauagcucuc

SEQ ID NO: 1543854 - RNA, 19 nt, Artificial Sequence
  Description of Artificial Sequence: Synthetic oligonucleotide
  Sense strand starting at position 2633 of SEQ ID NO: 1245194
agagcuauuugggaaccau

SEQ ID NO: 1543855 - RNA, 19 nt, Artificial Sequence
  Description of Artificial Sequence: Synthetic oligonucleotide
  Antisense strand to SEQ ID NO: 1543854
augguucccaaauagcucu

SEQ ID NO: 1543856 - RNA, 19 nt, Artificial Sequence
  Description of Artificial Sequence: Synthetic oligonucleotide
  Sense strand starting at position 2945 of SEQ ID NO: 1245194
cgaggacuccucugaugag

SEQ ID NO: 1543857 - RNA, 19 nt, Artificial Sequence
  Description of Artificial Sequence: Synthetic oligonucleotide
  Antisense strand to SEQ ID NO: 1543856
cucaucagaggaguccucg

SEQ ID NO: 1543858 - RNA, 19 nt, Artificial Sequence
  Description of Artificial Sequence: Synthetic oligonucleotide
  Sense strand starting at position 3724 of SEQ ID NO: 1245194
caguguuaaccguauauaa

SEQ ID NO: 1543859 - RNA, 19 nt, Artificial Sequence
  Description of Artificial Sequence: Synthetic oligonucleotide
  Antisense strand to SEQ ID NO: 1543858
uuauauacgguuaacacug

SEQ ID NO: 1543860 - RNA, 19 nt, Artificial Sequence
  Description of Artificial Sequence: Synthetic oligonucleotide
  Sense strand starting at position 3726 of SEQ ID NO: 1245194
guguuaaccguauauaacu

SEQ ID NO: 1543861 - RNA, 19 nt, Artificial Sequence
  Description of Artificial Sequence: Synthetic oligonucleotide
  Antisense strand to SEQ ID NO: 1543860
aguuauauacgguuaacac

SEQ ID NO: 1543862 - RNA, 19 nt, Artificial Sequence
  Description of Artificial Sequence: Synthetic oligonucleotide
  Sense strand starting at position 3952 of SEQ ID NO: 1245194
ugcccucuugauuaugagu

SEQ ID NO: 1543863 - RNA, 19 nt, Artificial Sequence
  Description of Artificial Sequence: Synthetic oligonucleotide
  Antisense strand to SEQ ID NO: 1543862
acucauaaucaagagggca

SEQ ID NO: 1543864 - RNA, 19 nt, Artificial Sequence
  Description of Artificial Sequence: Synthetic oligonucleotide
  Sense strand starting at position 3957 of SEQ ID NO: 1245194
ucuugauuaugaguuccuu

SEQ ID NO: 1543865 - RNA, 19 nt, Artificial Sequence
  Description of Artificial Sequence: Synthetic oligonucleotide
  Antisense strand to SEQ ID NO: 1543864
aaggaacucauaaucaaga

SEQ ID NO: 1543866 - RNA, 19 nt, Artificial Sequence
  Description of Artificial Sequence: Synthetic oligonucleotide
  Sense strand starting at position 3963 of SEQ ID NO: 1245194
uuaugaguuccuuaaaggc

SEQ ID NO: 1543867 - RNA, 19 nt, Artificial Sequence
  Description of Artificial Sequence: Synthetic oligonucleotide
  Antisense strand to SEQ ID NO: 1543866
gccuuuaaggaacucauaa

SEQ ID NO: 1543868 - RNA, 19 nt, Artificial Sequence
  Description of Artificial Sequence: Synthetic oligonucleotide
  Sense strand starting at position 38 of SEQ ID NO: 1245195
aaauguuaagcuuaggauc

SEQ ID NO: 1543869 - RNA, 19 nt, Artificial Sequence
  Description of Artificial Sequence: Synthetic oligonucleotide
  Antisense strand to SEQ ID NO: 1543868
gauccuaagcuuaacauuu

SEQ ID NO: 1543870 - RNA, 19 nt, Artificial Sequence
  Description of Artificial Sequence: Synthetic oligonucleotide
  Sense strand starting at position 248 of SEQ ID NO: 1245195
gggccaucuggguauaguu

SEQ ID NO: 1543871 - RNA, 19 nt, Artificial Sequence
  Description of Artificial Sequence: Synthetic oligonucleotide
  Antisense strand to SEQ ID NO: 1543870
aacuauacccagauggccc

SEQ ID NO: 1543872 - RNA, 19 nt, Artificial Sequence
  Description of Artificial Sequence: Synthetic oligonucleotide
  Sense strand starting at position 366 of SEQ ID NO: 1245195
guuauuauuauaggguuga

SEQ ID NO: 1543873 - RNA, 19 nt, Artificial Sequence
  Description of Artificial Sequence: Synthetic oligonucleotide
  Antisense strand to SEQ ID NO: 1543872
ucaacccuauaauaauaac

SEQ ID NO: 1543874 - RNA, 19 nt, Artificial Sequence
  Description of Artificial Sequence: Synthetic oligonucleotide
  Sense strand starting at position 457 of SEQ ID NO: 1245195
guuaguguugcuguuauug

SEQ ID NO: 1543875 - RNA, 19 nt, Artificial Sequence
  Description of Artificial Sequence: Synthetic oligonucleotide
  Antisense strand to SEQ ID NO: 1543874
caauaacagcaacacuaac

SEQ ID NO: 1543876 - RNA, 19 nt, Artificial Sequence
  Description of Artificial Sequence: Synthetic oligonucleotide
  Sense strand starting at position 618 of SEQ ID NO: 1245195
guaaucauuugagacuuac

SEQ ID NO: 1543877 - RNA, 19 nt, Artificial Sequence
  Description of Artificial Sequence: Synthetic oligonucleotide
  Antisense strand to SEQ ID NO: 1543876
guaagucucaaaugauuac

SEQ ID NO: 1543878 - RNA, 19 nt, Artificial Sequence
  Description of Artificial Sequence: Synthetic oligonucleotide
  Sense strand starting at position 704 of SEQ ID NO: 1245195
cuuauauugccauaguaca

SEQ ID NO: 1543879 - RNA, 19 nt, Artificial Sequence
  Description of Artificial Sequence: Synthetic oligonucleotide
  Antisense strand to SEQ ID NO: 1543878
uguacuauggcaauauaag

SEQ ID NO: 1543880 - RNA, 19 nt, Artificial Sequence
  Description of Artificial Sequence: Synthetic oligonucleotide
  Sense strand starting at position 817 of SEQ ID NO: 1245195
agaaauguuauggguagag

SEQ ID NO: 1543881 - RNA, 19 nt, Artificial Sequence
  Description of Artificial Sequence: Synthetic oligonucleotide
  Antisense strand to SEQ ID NO: 1543880
cucuacccauaacauuucu

SEQ ID NO: 1543882 - RNA, 19 nt, Artificial Sequence
  Description of Artificial Sequence: Synthetic oligonucleotide
  Sense strand starting at position 819 of SEQ ID NO: 1245195
aaauguuauggguagaggu

SEQ ID NO: 1543883 - RNA, 19 nt, Artificial Sequence
  Description of Artificial Sequence: Synthetic oligonucleotide
  Antisense strand to SEQ ID NO: 1543882
accucuacccauaacauuu

SEQ ID NO: 1543884 - RNA, 19 nt, Artificial Sequence
  Description of Artificial Sequence: Synthetic oligonucleotide
  Sense strand starting at position 821 of SEQ ID NO: 1245195
auguuauggguagagguga

SEQ ID NO: 1543885 - RNA, 19 nt, Artificial Sequence
  Description of Artificial Sequence: Synthetic oligonucleotide
  Antisense strand to SEQ ID NO: 1543884
ucaccucuacccauaacau

SEQ ID NO: 1543886 - RNA, 19 nt, Artificial Sequence
  Description of Artificial Sequence: Synthetic oligonucleotide
  Sense strand starting at position 870 of SEQ ID NO: 1245195
ugagcuggcccuugaaaga

SEQ ID NO: 1543887 - RNA, 19 nt, Artificial Sequence
  Description of Artificial Sequence: Synthetic oligonucleotide
  Antisense strand to SEQ ID NO: 1543886
ucuuucaagggccagcuca

SEQ ID NO: 1543888 - RNA, 19 nt, Artificial Sequence
  Description of Artificial Sequence: Synthetic oligonucleotide
  Sense strand starting at position 955 of SEQ ID NO: 1245195
ugagaaucagccuggcuga

SEQ ID NO: 1543889 - RNA, 19 nt, Artificial Sequence
  Description of Artificial Sequence: Synthetic oligonucleotide
  Antisense strand to SEQ ID NO: 1543888
ucagccaggcugauucuca

SEQ ID NO: 1543890 - RNA, 19 nt, Artificial Sequence
  Description of Artificial Sequence: Synthetic oligonucleotide
  Sense strand starting at position 956 of SEQ ID NO: 1245195
gagaaucagccuggcugaa

SEQ ID NO: 1543891 - RNA, 19 nt, Artificial Sequence
  Description of Artificial Sequence: Synthetic oligonucleotide
  Antisense strand to SEQ ID NO: 1543890
uucagccaggcugauucuc

SEQ ID NO: 1543892 - RNA, 19 nt, Artificial Sequence
  Description of Artificial Sequence: Synthetic oligonucleotide
  Sense strand starting at position 993 of SEQ ID NO: 1245195
gggagaguugaauguggga

SEQ ID NO: 1543893 - RNA, 19 nt, Artificial Sequence
  Description of Artificial Sequence: Synthetic oligonucleotide
  Antisense strand to SEQ ID NO: 1543892
ucccacauucaacucuccc

SEQ ID NO: 1543894 - RNA, 19 nt, Artificial Sequence
  Description of Artificial Sequence: Synthetic oligonucleotide
  Sense strand starting at position 1098 of SEQ ID NO: 1245195
gggucaugaagauguugga

SEQ ID NO: 1543895 - RNA, 19 nt, Artificial Sequence
  Description of Artificial Sequence: Synthetic oligonucleotide
  Antisense strand to SEQ ID NO: 1543894
uccaacaucuucaugaccc

SEQ ID NO: 1543896 - RNA, 19 nt, Artificial Sequence
  Description of Artificial Sequence: Synthetic oligonucleotide
  Sense strand starting at position 1231 of SEQ ID NO: 1245195
gccucagucucaccagaga

SEQ ID NO: 1543897 - RNA, 19 nt, Artificial Sequence
  Description of Artificial Sequence: Synthetic oligonucleotide
  Antisense strand to SEQ ID NO: 1543896
ucucuggugagacugaggc

SEQ ID NO: 1543898 - RNA, 19 nt, Artificial Sequence
  Description of Artificial Sequence: Synthetic oligonucleotide
  Sense strand starting at position 1394 of SEQ ID NO: 1245195
gcccuucugcaauagaaac

SEQ ID NO: 1543899 - RNA, 19 nt, Artificial Sequence
  Description of Artificial Sequence: Synthetic oligonucleotide
  Antisense strand to SEQ ID NO: 1543898
guuucuauugcagaagggc

SEQ ID NO: 1543900 - RNA, 19 nt, Artificial Sequence
  Description of Artificial Sequence: Synthetic oligonucleotide
  Sense strand starting at position 1633 of SEQ ID NO: 1245195
gugagagcugcugacaauu

SEQ ID NO: 1543901 - RNA, 19 nt, Artificial Sequence
  Description of Artificial Sequence: Synthetic oligonucleotide
  Antisense strand to SEQ ID NO: 1543900
aauugucagcagcucucac

SEQ ID NO: 1543902 - RNA, 19 nt, Artificial Sequence
  Description of Artificial Sequence: Synthetic oligonucleotide
  Sense strand starting at position 1769 of SEQ ID NO: 1245195
ggugccaucgggagugauu

SEQ ID NO: 1543903 - RNA, 19 nt, Artificial Sequence
  Description of Artificial Sequence: Synthetic oligonucleotide
  Antisense strand to SEQ ID NO: 1543902
aaucacucccgauggcacc

SEQ ID NO: 1543904 - RNA, 19 nt, Artificial Sequence
  Description of Artificial Sequence: Synthetic oligonucleotide
  Sense strand starting at position 1805 of SEQ ID NO: 1245195
gccucaauccacuggagaa

SEQ ID NO: 1543905 - RNA, 19 nt, Artificial Sequence
  Description of Artificial Sequence: Synthetic oligonucleotide
  Antisense strand to SEQ ID NO: 1543904
uucuccaguggauugaggc

SEQ ID NO: 1543906 - RNA, 19 nt, Artificial Sequence
  Description of Artificial Sequence: Synthetic oligonucleotide
  Sense strand starting at position 1872 of SEQ ID NO: 1245195
gccauuuagccugaggugu

SEQ ID NO: 1543907 - RNA, 19 nt, Artificial Sequence
  Description of Artificial Sequence: Synthetic oligonucleotide
  Antisense strand to SEQ ID NO: 1543906
acaccucaggcuaaauggc

SEQ ID NO: 1543908 - RNA, 19 nt, Artificial Sequence
  Description of Artificial Sequence: Synthetic oligonucleotide
  Sense strand starting at position 1883 of SEQ ID NO: 1245195
ugaggugugcuccaaagag

SEQ ID NO: 1543909 - RNA, 19 nt, Artificial Sequence
  Description of Artificial Sequence: Synthetic oligonucleotide
  Antisense strand to SEQ ID NO: 1543908
cucuuuggagcacaccuca

SEQ ID NO: 1543910 - RNA, 19 nt, Artificial Sequence
  Description of Artificial Sequence: Synthetic oligonucleotide
  Sense strand starting at position 1887 of SEQ ID NO: 1245195
gugugcuccaaagagaaug

SEQ ID NO: 1543911 - RNA, 19 nt, Artificial Sequence
  Description of Artificial Sequence: Synthetic oligonucleotide
  Antisense strand to SEQ ID NO: 1543910
cauucucuuuggagcacac

SEQ ID NO: 1543912 - RNA, 19 nt, Artificial Sequence
  Description of Artificial Sequence: Synthetic oligonucleotide
  Sense strand starting at position 1897 of SEQ ID NO: 1245195
aagagaaugucugcccucu

SEQ ID NO: 1543913 - RNA, 19 nt, Artificial Sequence
  Description of Artificial Sequence: Synthetic oligonucleotide
  Antisense strand to SEQ ID NO: 1543912
agagggcagacauucucuu

SEQ ID NO: 1543914 - RNA, 19 nt, Artificial Sequence
  Description of Artificial Sequence: Synthetic oligonucleotide
  Sense strand starting at position 2022 of SEQ ID NO: 1245195
uuacacugauguucuagaa

SEQ ID NO: 1543915 - RNA, 19 nt, Artificial Sequence
  Description of Artificial Sequence: Synthetic oligonucleotide
  Antisense strand to SEQ ID NO: 1543914
uucuagaacaucaguguaa

SEQ ID NO: 1543916 - RNA, 19 nt, Artificial Sequence
  Description of Artificial Sequence: Synthetic oligonucleotide
  Sense strand starting at position 2026 of SEQ ID NO: 1245195
acugauguucuagaauguu

SEQ ID NO: 1543917 - RNA, 19 nt, Artificial Sequence
  Description of Artificial Sequence: Synthetic oligonucleotide
  Antisense strand to SEQ ID NO: 1543916
aacauucuagaacaucagu

SEQ ID NO: 1543918 - RNA, 19 nt, Artificial Sequence
  Description of Artificial Sequence: Synthetic oligonucleotide
  Sense strand starting at position 2154 of SEQ ID NO: 1245195
uugacugucuccuuugaac

SEQ ID NO: 1543919 - RNA, 19 nt, Artificial Sequence
  Description of Artificial Sequence: Synthetic oligonucleotide
  Antisense strand to SEQ ID NO: 1543918
guucaaaggagacagucaa

SEQ ID NO: 1543920 - RNA, 19 nt, Artificial Sequence
  Description of Artificial Sequence: Synthetic oligonucleotide
  Sense strand starting at position 2344 of SEQ ID NO: 1245195
ucuagaaucucugccagga

SEQ ID NO: 1543921 - RNA, 19 nt, Artificial Sequence
  Description of Artificial Sequence: Synthetic oligonucleotide
  Antisense strand to SEQ ID NO: 1543920
uccuggcagagauucuaga

SEQ ID NO: 1543922 - RNA, 19 nt, Artificial Sequence
  Description of Artificial Sequence: Synthetic oligonucleotide
  Sense strand starting at position 2363 of SEQ ID NO: 1245195
cacugugagguuugaagua

SEQ ID NO: 1543923 - RNA, 19 nt, Artificial Sequence
  Description of Artificial Sequence: Synthetic oligonucleotide
  Antisense strand to SEQ ID NO: 1543922
uacuucaaaccucacagug

SEQ ID NO: 1543924 - RNA, 19 nt, Artificial Sequence
  Description of Artificial Sequence: Synthetic oligonucleotide
  Sense strand starting at position 2739 of SEQ ID NO: 1245195
uuguaauucuagucugaua

SEQ ID NO: 1543925 - RNA, 19 nt, Artificial Sequence
  Description of Artificial Sequence: Synthetic oligonucleotide
  Antisense strand to SEQ ID NO: 1543924
uaucagacuagaauuacaa

SEQ ID NO: 1543926 - RNA, 19 nt, Artificial Sequence
  Description of Artificial Sequence: Synthetic oligonucleotide
  Sense strand starting at position 2741 of SEQ ID NO: 1245195
guaauucuagucugauacc

SEQ ID NO: 1543927 - RNA, 19 nt, Artificial Sequence
  Description of Artificial Sequence: Synthetic oligonucleotide
  Antisense strand to SEQ ID NO: 1543926
gguaucagacuagaauuac

SEQ ID NO: 1543928 - RNA, 19 nt, Artificial Sequence
  Description of Artificial Sequence: Synthetic oligonucleotide
  Sense strand starting at position 2845 of SEQ ID NO: 1245195
cggguguaggucuggauuu

SEQ ID NO: 1543929 - RNA, 19 nt, Artificial Sequence
  Description of Artificial Sequence: Synthetic oligonucleotide
  Antisense strand to SEQ ID NO: 1543928
aaauccagaccuacacccg

SEQ ID NO: 1543930 - RNA, 19 nt, Artificial Sequence
  Description of Artificial Sequence: Synthetic oligonucleotide
  Sense strand starting at position 3046 of SEQ ID NO: 1245195
aaggaugugcgcuauagaa

SEQ ID NO: 1543931 - RNA, 19 nt, Artificial Sequence
  Description of Artificial Sequence: Synthetic oligonucleotide
  Antisense strand to SEQ ID NO: 1543930
uucuauagcgcacauccuu

SEQ ID NO: 1543932 - RNA, 19 nt, Artificial Sequence
  Description of Artificial Sequence: Synthetic oligonucleotide
  Sense strand starting at position 3048 of SEQ ID NO: 1245195
ggaugugcgcuauagaaag

SEQ ID NO: 1543933 - RNA, 19 nt, Artificial Sequence
  Description of Artificial Sequence: Synthetic oligonucleotide
  Antisense strand to SEQ ID NO: 1543932
cuuucuauagcgcacaucc

SEQ ID NO: 1543934 - RNA, 19 nt, Artificial Sequence
  Description of Artificial Sequence: Synthetic oligonucleotide
  Sense strand starting at position 3184 of SEQ ID NO: 1245195
cacucagguccaggugauu

SEQ ID NO: 1543935 - RNA, 19 nt, Artificial Sequence
  Description of Artificial Sequence: Synthetic oligonucleotide
  Antisense strand to SEQ ID NO: 1543934
aaucaccuggaccugagug

SEQ ID NO: 1543936 - RNA, 19 nt, Artificial Sequence
  Description of Artificial Sequence: Synthetic oligonucleotide
  Sense strand starting at position 3510 of SEQ ID NO: 1245195
uucaguuaaggaggguauu

SEQ ID NO: 1543937 - RNA, 19 nt, Artificial Sequence
  Description of Artificial Sequence: Synthetic oligonucleotide
  Antisense strand to SEQ ID NO: 1543936
aauacccuccuuaacugaa

SEQ ID NO: 1543938 - RNA, 19 nt, Artificial Sequence
  Description of Artificial Sequence: Synthetic oligonucleotide
  Sense strand starting at position 3519 of SEQ ID NO: 1245195
ggaggguauuguguggaca

SEQ ID NO: 1543939 - RNA, 19 nt, Artificial Sequence
  Description of Artificial Sequence: Synthetic oligonucleotide
  Antisense strand to SEQ ID NO: 1543938
uguccacacaauacccucc

SEQ ID NO: 1543940 - RNA, 19 nt, Artificial Sequence
  Description of Artificial Sequence: Synthetic oligonucleotide
  Sense strand starting at position 3522 of SEQ ID NO: 1245195
ggguauuguguggacacca

SEQ ID NO: 1543941 - RNA, 19 nt, Artificial Sequence
  Description of Artificial Sequence: Synthetic oligonucleotide
  Antisense strand to SEQ ID NO: 1543940
ugguguccacacaauaccc

SEQ ID NO: 1543942 - RNA, 19 nt, Artificial Sequence
  Description of Artificial Sequence: Synthetic oligonucleotide
  Sense strand starting at position 3619 of SEQ ID NO: 1245195
guggauccuuuggugaaca

SEQ ID NO: 1543943 - RNA, 19 nt, Artificial Sequence
  Description of Artificial Sequence: Synthetic oligonucleotide
  Antisense strand to SEQ ID NO: 1543942
uguucaccaaaggauccac

SEQ ID NO: 1543944 - RNA, 19 nt, Artificial Sequence
  Description of Artificial Sequence: Synthetic oligonucleotide
  Sense strand starting at position 3658 of SEQ ID NO: 1245195
agagcugcuuacucacaaa

SEQ ID NO: 1543945 - RNA, 19 nt, Artificial Sequence
  Description of Artificial Sequence: Synthetic oligonucleotide
  Antisense strand to SEQ ID NO: 1543944
uuugugaguaagcagcucu

SEQ ID NO: 1543946 - RNA, 19 nt, Artificial Sequence
  Description of Artificial Sequence: Synthetic oligonucleotide
  Sense strand starting at position 3738 of SEQ ID NO: 1245195
guagcagggaugcauuauu

SEQ ID NO: 1543947 - RNA, 19 nt, Artificial Sequence
  Description of Artificial Sequence: Synthetic oligonucleotide
  Antisense strand to SEQ ID NO: 1543946
aauaaugcaucccugcuac

SEQ ID NO: 1543948 - RNA, 19 nt, Artificial Sequence
  Description of Artificial Sequence: Synthetic oligonucleotide
  Sense strand starting at position 18 of SEQ ID NO: 1245196
ugcaaugugucaucaugaa

SEQ ID NO: 1543949 - RNA, 19 nt, Artificial Sequence
  Description of Artificial Sequence: Synthetic oligonucleotide
  Antisense strand to SEQ ID NO: 1543948
uucaugaugacacauugca

SEQ ID NO: 1543950 - RNA, 19 nt, Artificial Sequence
  Description of Artificial Sequence: Synthetic oligonucleotide
  Sense strand starting at position 54 of SEQ ID NO: 1245196
ugaauaaagugcuuaacuc

SEQ ID NO: 1543951 - RNA, 19 nt, Artificial Sequence
  Description of Artificial Sequence: Synthetic oligonucleotide
  Antisense strand to SEQ ID NO: 1543950
gaguuaagcacuuuauuca

SEQ ID NO: 1543952 - RNA, 19 nt, Artificial Sequence
  Description of Artificial Sequence: Synthetic oligonucleotide
  Sense strand starting at position 142 of SEQ ID NO: 1245196
aaagauauuugagguucuu

SEQ ID NO: 1543953 - RNA, 19 nt, Artificial Sequence
  Description of Artificial Sequence: Synthetic oligonucleotide
  Antisense strand to SEQ ID NO: 1543952
aagaaccucaaauaucuuu

SEQ ID NO: 1543954 - RNA, 19 nt, Artificial Sequence
  Description of Artificial Sequence: Synthetic oligonucleotide
  Sense strand starting at position 207 of SEQ ID NO: 1245196
gggccucagucuuuaacuu

SEQ ID NO: 1543955 - RNA, 19 nt, Artificial Sequence
  Description of Artificial Sequence: Synthetic oligonucleotide
  Antisense strand to SEQ ID NO: 1543954
aaguuaaagacugaggccc

SEQ ID NO: 1543956 - RNA, 19 nt, Artificial Sequence
  Description of Artificial Sequence: Synthetic oligonucleotide
  Sense strand starting at position 211 of SEQ ID NO: 1245196
cucagucuuuaacuuguga

SEQ ID NO: 1543957 - RNA, 19 nt, Artificial Sequence
  Description of Artificial Sequence: Synthetic oligonucleotide
  Antisense strand to SEQ ID NO: 1543956
ucacaaguuaaagacugag

SEQ ID NO: 1543958 - RNA, 19 nt, Artificial Sequence
  Description of Artificial Sequence: Synthetic oligonucleotide
  Sense strand starting at position 253 of SEQ ID NO: 1245196
gacugugcucagggaucuu

SEQ ID NO: 1543959 - RNA, 19 nt, Artificial Sequence
  Description of Artificial Sequence: Synthetic oligonucleotide
  Antisense strand to SEQ ID NO: 1543958
aagaucccugagcacaguc

SEQ ID NO: 1543960 - RNA, 19 nt, Artificial Sequence
  Description of Artificial Sequence: Synthetic oligonucleotide
  Sense strand starting at position 328 of SEQ ID NO: 1245196
cgaucauuauggccacacu

SEQ ID NO: 1543961 - RNA, 19 nt, Artificial Sequence
  Description of Artificial Sequence: Synthetic oligonucleotide
  Antisense strand to SEQ ID NO: 1543960
aguguggccauaaugaucg

SEQ ID NO: 1543962 - RNA, 19 nt, Artificial Sequence
  Description of Artificial Sequence: Synthetic oligonucleotide
  Sense strand starting at position 388 of SEQ ID NO: 1245196
cuggcugugagagguucua

SEQ ID NO: 1543963 - RNA, 19 nt, Artificial Sequence
  Description of Artificial Sequence: Synthetic oligonucleotide
  Antisense strand to SEQ ID NO: 1543962
uagaaccucucacagccag

SEQ ID NO: 1543964 - RNA, 19 nt, Artificial Sequence
  Description of Artificial Sequence: Synthetic oligonucleotide
  Sense strand starting at position 603 of SEQ ID NO: 1245196
ccuucuacccuuggaggua

SEQ ID NO: 1543965 - RNA, 19 nt, Artificial Sequence
  Description of Artificial Sequence: Synthetic oligonucleotide
  Antisense strand to SEQ ID NO: 1543964
uaccuccaaggguagaagg

SEQ ID NO: 1543966 - RNA, 19 nt, Artificial Sequence
  Description of Artificial Sequence: Synthetic oligonucleotide
  Sense strand starting at position 625 of SEQ ID NO: 1245196
aggauucuguaccuggaaa

SEQ ID NO: 1543967 - RNA, 19 nt, Artificial Sequence
  Description of Artificial Sequence: Synthetic oligonucleotide
  Antisense strand to SEQ ID NO: 1543966
uuuccagguacagaauccu

SEQ ID NO: 1543968 - RNA, 19 nt, Artificial Sequence
  Description of Artificial Sequence: Synthetic oligonucleotide
  Sense strand starting at position 626 of SEQ ID NO: 1245196
ggauucuguaccuggaaag

SEQ ID NO: 1543969 - RNA, 19 nt, Artificial Sequence
  Description of Artificial Sequence: Synthetic oligonucleotide
  Antisense strand to SEQ ID NO: 1543968
cuuuccagguacagaaucc

SEQ ID NO: 1543970 - RNA, 19 nt, Artificial Sequence
  Description of Artificial Sequence: Synthetic oligonucleotide
  Sense strand starting at position 659 of SEQ ID NO: 1245196
cugaucucagcugagacua

SEQ ID NO: 1543971 - RNA, 19 nt, Artificial Sequence
  Description of Artificial Sequence: Synthetic oligonucleotide
  Antisense strand to SEQ ID NO: 1543970
uagucucagcugagaucag

SEQ ID NO: 1543972 - RNA, 19 nt, Artificial Sequence
  Description of Artificial Sequence: Synthetic oligonucleotide
  Sense strand starting at position 795 of SEQ ID NO: 1245196
acaagcuuugcaggaaaca

SEQ ID NO: 1543973 - RNA, 19 nt, Artificial Sequence
  Description of Artificial Sequence: Synthetic oligonucleotide
  Antisense strand to SEQ ID NO: 1543972
uguuuccugcaaagcuugu

SEQ ID NO: 1543974 - RNA, 19 nt, Artificial Sequence
  Description of Artificial Sequence: Synthetic oligonucleotide
  Sense strand starting at position 823 of SEQ ID NO: 1245196
uuaugaauuggauguaauc

SEQ ID NO: 1543975 - RNA, 19 nt, Artificial Sequence
  Description of Artificial Sequence: Synthetic oligonucleotide
  Antisense strand to SEQ ID NO: 1543974
gauuacauccaauucauaa

SEQ ID NO: 1543976 - RNA, 19 nt, Artificial Sequence
  Description of Artificial Sequence: Synthetic oligonucleotide
  Sense strand starting at position 902 of SEQ ID NO: 1245196
gggcuuucagagugaggac

SEQ ID NO: 1543977 - RNA, 19 nt, Artificial Sequence
  Description of Artificial Sequence: Synthetic oligonucleotide
  Antisense strand to SEQ ID NO: 1543976
guccucacucugaaagccc

SEQ ID NO: 1543978 - RNA, 19 nt, Artificial Sequence
  Description of Artificial Sequence: Synthetic oligonucleotide
  Sense strand starting at position 1056 of SEQ ID NO: 1245196
uggagucagcauugagaau

SEQ ID NO: 1543979 - RNA, 19 nt, Artificial Sequence
  Description of Artificial Sequence: Synthetic oligonucleotide
  Antisense strand to SEQ ID NO: 1543978
auucucaaugcugacucca

SEQ ID NO: 1543980 - RNA, 19 nt, Artificial Sequence
  Description of Artificial Sequence: Synthetic oligonucleotide
  Sense strand starting at position 1099 of SEQ ID NO: 1245196
ggcagcacugaugaguaaa

SEQ ID NO: 1543981 - RNA, 19 nt, Artificial Sequence
  Description of Artificial Sequence: Synthetic oligonucleotide
  Antisense strand to SEQ ID NO: 1543980
uuuacucaucagugcugcc

SEQ ID NO: 1543982 - RNA, 19 nt, Artificial Sequence
  Description of Artificial Sequence: Synthetic oligonucleotide
  Sense strand starting at position 1143 of SEQ ID NO: 1245196
agugguggagacugugaua

SEQ ID NO: 1543983 - RNA, 19 nt, Artificial Sequence
  Description of Artificial Sequence: Synthetic oligonucleotide
  Antisense strand to SEQ ID NO: 1543982
uaucacagucuccaccacu

SEQ ID NO: 1543984 - RNA, 19 nt, Artificial Sequence
  Description of Artificial Sequence: Synthetic oligonucleotide
  Sense strand starting at position 1383 of SEQ ID NO: 1245196
ccgccuucgacauauggga

SEQ ID NO: 1543985 - RNA, 19 nt, Artificial Sequence
  Description of Artificial Sequence: Synthetic oligonucleotide
  Antisense strand to SEQ ID NO: 1543984
ucccauaugucgaaggcgg

SEQ ID NO: 1543986 - RNA, 19 nt, Artificial Sequence
  Description of Artificial Sequence: Synthetic oligonucleotide
  Sense strand starting at position 1401 of SEQ ID NO: 1245196
auggacaucuccuugcaaa

SEQ ID NO: 1543987 - RNA, 19 nt, Artificial Sequence
  Description of Artificial Sequence: Synthetic oligonucleotide
  Antisense strand to SEQ ID NO: 1543986
uuugcaaggagauguccau

SEQ ID NO: 1543988 - RNA, 19 nt, Artificial Sequence
  Description of Artificial Sequence: Synthetic oligonucleotide
  Sense strand starting at position 1402 of SEQ ID NO: 1245196
uggacaucuccuugcaaag

SEQ ID NO: 1543989 - RNA, 19 nt, Artificial Sequence
  Description of Artificial Sequence: Synthetic oligonucleotide
  Antisense strand to SEQ ID NO: 1543988
cuuugcaaggagaugucca

SEQ ID NO: 1543990 - RNA, 19 nt, Artificial Sequence
  Description of Artificial Sequence: Synthetic oligonucleotide
  Sense strand starting at position 1765 of SEQ ID NO: 1245196
aagggcuugcuccgaaauc

SEQ ID NO: 1543991 - RNA, 19 nt, Artificial Sequence
  Description of Artificial Sequence: Synthetic oligonucleotide
  Antisense strand to SEQ ID NO: 1543990
gauuucggagcaagcccuu

SEQ ID NO: 1543992 - RNA, 19 nt, Artificial Sequence
  Description of Artificial Sequence: Synthetic oligonucleotide
  Sense strand starting at position 1952 of SEQ ID NO: 1245196
ccaggaagucgauguccuu

SEQ ID NO: 1543993 - RNA, 19 nt, Artificial Sequence
  Description of Artificial Sequence: Synthetic oligonucleotide
  Antisense strand to SEQ ID NO: 1543992
aaggacaucgacuuccugg

SEQ ID NO: 1543994 - RNA, 19 nt, Artificial Sequence
  Description of Artificial Sequence: Synthetic oligonucleotide
  Sense strand starting at position 2374 of SEQ ID NO: 1245196
cucuccucccuauggagaa

SEQ ID NO: 1543995 - RNA, 19 nt, Artificial Sequence
  Description of Artificial Sequence: Synthetic oligonucleotide
  Antisense strand to SEQ ID NO: 1543994
uucuccauagggaggagag

SEQ ID NO: 1543996 - RNA, 19 nt, Artificial Sequence
  Description of Artificial Sequence: Synthetic oligonucleotide
  Sense strand starting at position 2591 of SEQ ID NO: 1245196
cccguuucucuccauuauu

SEQ ID NO: 1543997 - RNA, 19 nt, Artificial Sequence
  Description of Artificial Sequence: Synthetic oligonucleotide
  Antisense strand to SEQ ID NO: 1543996
aauaauggagagaaacggg

SEQ ID NO: 1543998 - RNA, 19 nt, Artificial Sequence
  Description of Artificial Sequence: Synthetic oligonucleotide
  Sense strand starting at position 2772 of SEQ ID NO: 1245196
ugagcuuuauaugcacuaa

SEQ ID NO: 1543999 - RNA, 19 nt, Artificial Sequence
  Description of Artificial Sequence: Synthetic oligonucleotide
  Antisense strand to SEQ ID NO: 1543998
uuagugcauauaaagcuca

SEQ ID NO: 1544000 - RNA, 19 nt, Artificial Sequence
  Description of Artificial Sequence: Synthetic oligonucleotide
  Sense strand starting at position 2930 of SEQ ID NO: 1245196
agagguguugaacgcuaau

SEQ ID NO: 1544001 - RNA, 19 nt, Artificial Sequence
  Description of Artificial Sequence: Synthetic oligonucleotide
  Antisense strand to SEQ ID NO: 1544000
auuagcguucaacaccucu

SEQ ID NO: 1544002 - RNA, 19 nt, Artificial Sequence
  Description of Artificial Sequence: Synthetic oligonucleotide
  Sense strand starting at position 3012 of SEQ ID NO: 1245196
uuuaaagcuccuggugacu

SEQ ID NO: 1544003 - RNA, 19 nt, Artificial Sequence
  Description of Artificial Sequence: Synthetic oligonucleotide
  Antisense strand to SEQ ID NO: 1544002
agucaccaggagcuuuaaa

SEQ ID NO: 1544004 - RNA, 19 nt, Artificial Sequence
  Description of Artificial Sequence: Synthetic oligonucleotide
  Sense strand starting at position 3071 of SEQ ID NO: 1245196
agguaacuuaggugugcua

SEQ ID NO: 1544005 - RNA, 19 nt, Artificial Sequence
  Description of Artificial Sequence: Synthetic oligonucleotide
  Antisense strand to SEQ ID NO: 1544004
uagcacaccuaaguuaccu

SEQ ID NO: 1544006 - RNA, 19 nt, Artificial Sequence
  Description of Artificial Sequence: Synthetic oligonucleotide
  Sense strand starting at position 3074 of SEQ ID NO: 1245196
uaacuuaggugugcuaaca

SEQ ID NO: 1544007 - RNA, 19 nt, Artificial Sequence
  Description of Artificial Sequence: Synthetic oligonucleotide
  Antisense strand to SEQ ID NO: 1544006
uguuagcacaccuaaguua

SEQ ID NO: 1544008 - RNA, 19 nt, Artificial Sequence
  Description of Artificial Sequence: Synthetic oligonucleotide
  Sense strand starting at position 3090 of SEQ ID NO: 1245196
acaggaguccucuagaagc

SEQ ID NO: 1544009 - RNA, 19 nt, Artificial Sequence
  Description of Artificial Sequence: Synthetic oligonucleotide
  Antisense strand to SEQ ID NO: 1544008
gcuucuagaggacuccugu

SEQ ID NO: 1544010 - RNA, 19 nt, Artificial Sequence
  Description of Artificial Sequence: Synthetic oligonucleotide
  Sense strand starting at position 3103 of SEQ ID NO: 1245196
agaagcaacacgugugauu

SEQ ID NO: 1544011 - RNA, 19 nt, Artificial Sequence
  Description of Artificial Sequence: Synthetic oligonucleotide
  Antisense strand to SEQ ID NO: 1544010
aaucacacguguugcuucu

SEQ ID NO: 1544012 - RNA, 19 nt, Artificial Sequence
  Description of Artificial Sequence: Synthetic oligonucleotide
  Sense strand starting at position 3310 of SEQ ID NO: 1245196
gaacguuccuacccaggaa

SEQ ID NO: 1544013 - RNA, 19 nt, Artificial Sequence
  Description of Artificial Sequence: Synthetic oligonucleotide
  Antisense strand to SEQ ID NO: 1544012
uuccuggguaggaacguuc

SEQ ID NO: 1544014 - RNA, 19 nt, Artificial Sequence
  Description of Artificial Sequence: Synthetic oligonucleotide
  Sense strand starting at position 3313 of SEQ ID NO: 1245196
cguuccuacccaggaaaga

SEQ ID NO: 1544015 - RNA, 19 nt, Artificial Sequence
  Description of Artificial Sequence: Synthetic oligonucleotide
  Antisense strand to SEQ ID NO: 1544014
ucuuuccuggguaggaacg

SEQ ID NO: 1544016 - RNA, 19 nt, Artificial Sequence
  Description of Artificial Sequence: Synthetic oligonucleotide
  Sense strand starting at position 3381 of SEQ ID NO: 1245196
cucaaaguccucugaggac

SEQ ID NO: 1544017 - RNA, 19 nt, Artificial Sequence
  Description of Artificial Sequence: Synthetic oligonucleotide
  Antisense strand to SEQ ID NO: 1544016
guccucagaggacuuugag

SEQ ID NO: 1544018 - RNA, 19 nt, Artificial Sequence
  Description of Artificial Sequence: Synthetic oligonucleotide
  Sense strand starting at position 3438 of SEQ ID NO: 1245196
ucuggcaauaugugguuua

SEQ ID NO: 1544019 - RNA, 19 nt, Artificial Sequence
  Description of Artificial Sequence: Synthetic oligonucleotide
  Antisense strand to SEQ ID NO: 1544018
uaaaccacauauugccaga

SEQ ID NO: 1544020 - RNA, 19 nt, Artificial Sequence
  Description of Artificial Sequence: Synthetic oligonucleotide
  Sense strand starting at position 3441 of SEQ ID NO: 1245196
ggcaauaugugguuuacac

SEQ ID NO: 1544021 - RNA, 19 nt, Artificial Sequence
  Description of Artificial Sequence: Synthetic oligonucleotide
  Antisense strand to SEQ ID NO: 1544020
guguaaaccacauauugcc

SEQ ID NO: 1544022 - RNA, 19 nt, Artificial Sequence
  Description of Artificial Sequence: Synthetic oligonucleotide
  Sense strand starting at position 3498 of SEQ ID NO: 1245196
cuaggaaucuacuaagaaa

SEQ ID NO: 1544023 - RNA, 19 nt, Artificial Sequence
  Description of Artificial Sequence: Synthetic oligonucleotide
  Antisense strand to SEQ ID NO: 1544022
uuucuuaguagauuccuag

SEQ ID NO: 1544024 - RNA, 19 nt, Artificial Sequence
  Description of Artificial Sequence: Synthetic oligonucleotide
  Sense strand starting at position 3898 of SEQ ID NO: 1245196
uagagaaucccaugguacu

SEQ ID NO: 1544025 - RNA, 19 nt, Artificial Sequence
  Description of Artificial Sequence: Synthetic oligonucleotide
  Antisense strand to SEQ ID NO: 1544024
aguaccaugggauucucua

SEQ ID NO: 1544026 - RNA, 19 nt, Artificial Sequence
  Description of Artificial Sequence: Synthetic oligonucleotide
  Sense strand starting at position 3899 of SEQ ID NO: 1245196
agagaaucccaugguacug

SEQ ID NO: 1544027 - RNA, 19 nt, Artificial Sequence
  Description of Artificial Sequence: Synthetic oligonucleotide
  Antisense strand to SEQ ID NO: 1544026
caguaccaugggauucucu

SEQ ID NO: 1544028 - RNA, 19 nt, Artificial Sequence
  Description of Artificial Sequence: Synthetic oligonucleotide
  Sense strand starting at position 15 of SEQ ID NO: 1245197
cuuccuuucugacugagaa

SEQ ID NO: 1544029 - RNA, 19 nt, Artificial Sequence
  Description of Artificial Sequence: Synthetic oligonucleotide
  Antisense strand to SEQ ID NO: 1544028
uucucagucagaaaggaag

SEQ ID NO: 1544030 - RNA, 19 nt, Artificial Sequence
  Description of Artificial Sequence: Synthetic oligonucleotide
  Sense strand starting at position 16 of SEQ ID NO: 1245197
uuccuuucugacugagaag

SEQ ID NO: 1544031 - RNA, 19 nt, Artificial Sequence
  Description of Artificial Sequence: Synthetic oligonucleotide
  Antisense strand to SEQ ID NO: 1544030
cuucucagucagaaaggaa

SEQ ID NO: 1544032 - RNA, 19 nt, Artificial Sequence
  Description of Artificial Sequence: Synthetic oligonucleotide
  Sense strand starting at position 19 of SEQ ID NO: 1245197
cuuucugacugagaaguug

SEQ ID NO: 1544033 - RNA, 19 nt, Artificial Sequence
  Description of Artificial Sequence: Synthetic oligonucleotide
  Antisense strand to SEQ ID NO: 1544032
caacuucucagucagaaag

SEQ ID NO: 1544034 - RNA, 19 nt, Artificial Sequence
  Description of Artificial Sequence: Synthetic oligonucleotide
  Sense strand starting at position 193 of SEQ ID NO: 1245197
cccucacgcuugucuugaa

SEQ ID NO: 1544035 - RNA, 19 nt, Artificial Sequence
  Description of Artificial Sequence: Synthetic oligonucleotide
  Antisense strand to SEQ ID NO: 1544034
uucaagacaagcgugaggg

SEQ ID NO: 1544036 - RNA, 19 nt, Artificial Sequence
  Description of Artificial Sequence: Synthetic oligonucleotide
  Sense strand starting at position 194 of SEQ ID NO: 1245197
ccucacgcuugucuugaaa

SEQ ID NO: 1544037 - RNA, 19 nt, Artificial Sequence
  Description of Artificial Sequence: Synthetic oligonucleotide
  Antisense strand to SEQ ID NO: 1544036
uuucaagacaagcgugagg

SEQ ID NO: 1544038 - RNA, 19 nt, Artificial Sequence
  Description of Artificial Sequence: Synthetic oligonucleotide
  Sense strand starting at position 219 of SEQ ID NO: 1245197
uguaauaagcguuuagugu

SEQ ID NO: 1544039 - RNA, 19 nt, Artificial Sequence
  Description of Artificial Sequence: Synthetic oligonucleotide
  Antisense strand to SEQ ID NO: 1544038
acacuaaacgcuuauuaca

SEQ ID NO: 1544040 - RNA, 19 nt, Artificial Sequence
  Description of Artificial Sequence: Synthetic oligonucleotide
  Sense strand starting at position 220 of SEQ ID NO: 1245197
guaauaagcguuuaguguu

SEQ ID NO: 1544041 - RNA, 19 nt, Artificial Sequence
  Description of Artificial Sequence: Synthetic oligonucleotide
  Antisense strand to SEQ ID NO: 1544040
aacacuaaacgcuuauuac

SEQ ID NO: 1544042 - RNA, 19 nt, Artificial Sequence
  Description of Artificial Sequence: Synthetic oligonucleotide
  Sense strand starting at position 228 of SEQ ID NO: 1245197
cguuuaguguuaguaauag

SEQ ID NO: 1544043 - RNA, 19 nt, Artificial Sequence
  Description of Artificial Sequence: Synthetic oligonucleotide
  Antisense strand to SEQ ID NO: 1544042
cuauuacuaacacuaaacg

SEQ ID NO: 1544044 - RNA, 19 nt, Artificial Sequence
  Description of Artificial Sequence: Synthetic oligonucleotide
  Sense strand starting at position 237 of SEQ ID NO: 1245197
uuaguaauaguguguuacu

SEQ ID NO: 1544045 - RNA, 19 nt, Artificial Sequence
  Description of Artificial Sequence: Synthetic oligonucleotide
  Antisense strand to SEQ ID NO: 1544044
aguaacacacuauuacuaa

SEQ ID NO: 1544046 - RNA, 19 nt, Artificial Sequence
  Description of Artificial Sequence: Synthetic oligonucleotide
  Sense strand starting at position 238 of SEQ ID NO: 1245197
uaguaauaguguguuacua

SEQ ID NO: 1544047 - RNA, 19 nt, Artificial Sequence
  Description of Artificial Sequence: Synthetic oligonucleotide
  Antisense strand to SEQ ID NO: 1544046
uaguaacacacuauuacua

SEQ ID NO: 1544048 - RNA, 19 nt, Artificial Sequence
  Description of Artificial Sequence: Synthetic oligonucleotide
  Sense strand starting at position 344 of SEQ ID NO: 1245197
ucuuauuaccaagguauag

SEQ ID NO: 1544049 - RNA, 19 nt, Artificial Sequence
  Description of Artificial Sequence: Synthetic oligonucleotide
  Antisense strand to SEQ ID NO: 1544048
cuauaccuugguaauaaga

SEQ ID NO: 1544050 - RNA, 19 nt, Artificial Sequence
  Description of Artificial Sequence: Synthetic oligonucleotide
  Sense strand starting at position 371 of SEQ ID NO: 1245197
cuuacugcuccaggcuaua

SEQ ID NO: 1544051 - RNA, 19 nt, Artificial Sequence
  Description of Artificial Sequence: Synthetic oligonucleotide
  Antisense strand to SEQ ID NO: 1544050
uauagccuggagcaguaag

SEQ ID NO: 1544052 - RNA, 19 nt, Artificial Sequence
  Description of Artificial Sequence: Synthetic oligonucleotide
  Sense strand starting at position 374 of SEQ ID NO: 1245197
acugcuccaggcuauaaua

SEQ ID NO: 1544053 - RNA, 19 nt, Artificial Sequence
  Description of Artificial Sequence: Synthetic oligonucleotide
  Antisense strand to SEQ ID NO: 1544052
uauuauagccuggagcagu

SEQ ID NO: 1544054 - RNA, 19 nt, Artificial Sequence
  Description of Artificial Sequence: Synthetic oligonucleotide
  Sense strand starting at position 503 of SEQ ID NO: 1245197
acgagacucugggucucau

SEQ ID NO: 1544055 - RNA, 19 nt, Artificial Sequence
  Description of Artificial Sequence: Synthetic oligonucleotide
  Antisense strand to SEQ ID NO: 1544054
augagacccagagucucgu

SEQ ID NO: 1544056 - RNA, 19 nt, Artificial Sequence
  Description of Artificial Sequence: Synthetic oligonucleotide
  Sense strand starting at position 511 of SEQ ID NO: 1245197
cugggucucauugagaagu

SEQ ID NO: 1544057 - RNA, 19 nt, Artificial Sequence
  Description of Artificial Sequence: Synthetic oligonucleotide
  Antisense strand to SEQ ID NO: 1544056
acuucucaaugagacccag

SEQ ID NO: 1544058 - RNA, 19 nt, Artificial Sequence
  Description of Artificial Sequence: Synthetic oligonucleotide
  Sense strand starting at position 731 of SEQ ID NO: 1245197
ugauguaaauugcuaagca

SEQ ID NO: 1544059 - RNA, 19 nt, Artificial Sequence
  Description of Artificial Sequence: Synthetic oligonucleotide
  Antisense strand to SEQ ID NO: 1544058
ugcuuagcaauuuacauca

SEQ ID NO: 1544060 - RNA, 19 nt, Artificial Sequence
  Description of Artificial Sequence: Synthetic oligonucleotide
  Sense strand starting at position 735 of SEQ ID NO: 1245197
guaaauugcuaagcaccua

SEQ ID NO: 1544061 - RNA, 19 nt, Artificial Sequence
  Description of Artificial Sequence: Synthetic oligonucleotide
  Antisense strand to SEQ ID NO: 1544060
uaggugcuuagcaauuuac

SEQ ID NO: 1544062 - RNA, 19 nt, Artificial Sequence
  Description of Artificial Sequence: Synthetic oligonucleotide
  Sense strand starting at position 818 of SEQ ID NO: 1245197
aggcguuacugugcugaua

SEQ ID NO: 1544063 - RNA, 19 nt, Artificial Sequence
  Description of Artificial Sequence: Synthetic oligonucleotide
  Antisense strand to SEQ ID NO: 1544062
uaucagcacaguaacgccu

SEQ ID NO: 1544064 - RNA, 19 nt, Artificial Sequence
  Description of Artificial Sequence: Synthetic oligonucleotide
  Sense strand starting at position 819 of SEQ ID NO: 1245197
ggcguuacugugcugauau

SEQ ID NO: 1544065 - RNA, 19 nt, Artificial Sequence
  Description of Artificial Sequence: Synthetic oligonucleotide
  Antisense strand to SEQ ID NO: 1544064
auaucagcacaguaacgcc

SEQ ID NO: 1544066 - RNA, 19 nt, Artificial Sequence
  Description of Artificial Sequence: Synthetic oligonucleotide
  Sense strand starting at position 821 of SEQ ID NO: 1245197
cguuacugugcugauauau

SEQ ID NO: 1544067 - RNA, 19 nt, Artificial Sequence
  Description of Artificial Sequence: Synthetic oligonucleotide
  Antisense strand to SEQ ID NO: 1544066
auauaucagcacaguaacg

SEQ ID NO: 1544068 - RNA, 19 nt, Artificial Sequence
  Description of Artificial Sequence: Synthetic oligonucleotide
  Sense strand starting at position 1105 of SEQ ID NO: 1245197
cggcuaugugcuuggaacu

SEQ ID NO: 1544069 - RNA, 19 nt, Artificial Sequence
  Description of Artificial Sequence: Synthetic oligonucleotide
  Antisense strand to SEQ ID NO: 1544068
aguuccaagcacauagccg

SEQ ID NO: 1544070 - RNA, 19 nt, Artificial Sequence
  Description of Artificial Sequence: Synthetic oligonucleotide
  Sense strand starting at position 1106 of SEQ ID NO: 1245197
ggcuaugugcuuggaacuu

SEQ ID NO: 1544071 - RNA, 19 nt, Artificial Sequence
  Description of Artificial Sequence: Synthetic oligonucleotide
  Antisense strand to SEQ ID NO: 1544070
aaguuccaagcacauagcc

SEQ ID NO: 1544072 - RNA, 19 nt, Artificial Sequence
  Description of Artificial Sequence: Synthetic oligonucleotide
  Sense strand starting at position 1267 of SEQ ID NO: 1245197
gcuucuuaacagugcuuua

SEQ ID NO: 1544073 - RNA, 19 nt, Artificial Sequence
  Description of Artificial Sequence: Synthetic oligonucleotide
  Antisense strand to SEQ ID NO: 1544072
uaaagcacuguuaagaagc

SEQ ID NO: 1544074 - RNA, 19 nt, Artificial Sequence
  Description of Artificial Sequence: Synthetic oligonucleotide
  Sense strand starting at position 1277 of SEQ ID NO: 1245197
agugcuuuacuauaguauu

SEQ ID NO: 1544075 - RNA, 19 nt, Artificial Sequence
  Description of Artificial Sequence: Synthetic oligonucleotide
  Antisense strand to SEQ ID NO: 1544074
aauacuauaguaaagcacu

SEQ ID NO: 1544076 - RNA, 19 nt, Artificial Sequence
  Description of Artificial Sequence: Synthetic oligonucleotide
  Sense strand starting at position 1333 of SEQ ID NO: 1245197
agcauaaugcgugccuauu

SEQ ID NO: 1544077 - RNA, 19 nt, Artificial Sequence
  Description of Artificial Sequence: Synthetic oligonucleotide
  Antisense strand to SEQ ID NO: 1544076
aauaggcacgcauuaugcu

SEQ ID NO: 1544078 - RNA, 19 nt, Artificial Sequence
  Description of Artificial Sequence: Synthetic oligonucleotide
  Sense strand starting at position 1334 of SEQ ID NO: 1245197
gcauaaugcgugccuauug

SEQ ID NO: 1544079 - RNA, 19 nt, Artificial Sequence
  Description of Artificial Sequence: Synthetic oligonucleotide
  Antisense strand to SEQ ID NO: 1544078
caauaggcacgcauuaugc

SEQ ID NO: 1544080 - RNA, 19 nt, Artificial Sequence
  Description of Artificial Sequence: Synthetic oligonucleotide
  Sense strand starting at position 1428 of SEQ ID NO: 1245197
aaaguugggcauggagaua

SEQ ID NO: 1544081 - RNA, 19 nt, Artificial Sequence
  Description of Artificial Sequence: Synthetic oligonucleotide
  Antisense strand to SEQ ID NO: 1544080
uaucuccaugcccaacuuu

SEQ ID NO: 1544082 - RNA, 19 nt, Artificial Sequence
  Description of Artificial Sequence: Synthetic oligonucleotide
  Sense strand starting at position 1642 of SEQ ID NO: 1245197
gggcacaagaaucgcuuua

SEQ ID NO: 1544083 - RNA, 19 nt, Artificial Sequence
  Description of Artificial Sequence: Synthetic oligonucleotide
  Antisense strand to SEQ ID NO: 1544082
uaaagcgauucuugugccc

SEQ ID NO: 1544084 - RNA, 19 nt, Artificial Sequence
  Description of Artificial Sequence: Synthetic oligonucleotide
  Sense strand starting at position 1672 of SEQ ID NO: 1245197
agagauugcagugaucgga

SEQ ID NO: 1544085 - RNA, 19 nt, Artificial Sequence
  Description of Artificial Sequence: Synthetic oligonucleotide
  Antisense strand to SEQ ID NO: 1544084
uccgaucacugcaaucucu

SEQ ID NO: 1544086 - RNA, 19 nt, Artificial Sequence
  Description of Artificial Sequence: Synthetic oligonucleotide
  Sense strand starting at position 1675 of SEQ ID NO: 1245197
gauugcagugaucggagau

SEQ ID NO: 1544087 - RNA, 19 nt, Artificial Sequence
  Description of Artificial Sequence: Synthetic oligonucleotide
  Antisense strand to SEQ ID NO: 1544086
aucuccgaucacugcaauc

SEQ ID NO: 1544088 - RNA, 19 nt, Artificial Sequence
  Description of Artificial Sequence: Synthetic oligonucleotide
  Sense strand starting at position 1676 of SEQ ID NO: 1245197
auugcagugaucggagauc

SEQ ID NO: 1544089 - RNA, 19 nt, Artificial Sequence
  Description of Artificial Sequence: Synthetic oligonucleotide
  Antisense strand to SEQ ID NO: 1544088
gaucuccgaucacugcaau

SEQ ID NO: 1544090 - RNA, 19 nt, Artificial Sequence
  Description of Artificial Sequence: Synthetic oligonucleotide
  Sense strand starting at position 2048 of SEQ ID NO: 1245197
accaguaugggccacuaaa

SEQ ID NO: 1544091 - RNA, 19 nt, Artificial Sequence
  Description of Artificial Sequence: Synthetic oligonucleotide
  Antisense strand to SEQ ID NO: 1544090
uuuaguggcccauacuggu

SEQ ID NO: 1544092 - RNA, 19 nt, Artificial Sequence
  Description of Artificial Sequence: Synthetic oligonucleotide
  Sense strand starting at position 2058 of SEQ ID NO: 1245197
gccacuaaauaauucguaa

SEQ ID NO: 1544093 - RNA, 19 nt, Artificial Sequence
  Description of Artificial Sequence: Synthetic oligonucleotide
  Antisense strand to SEQ ID NO: 1544092
uuacgaauuauuuaguggc

SEQ ID NO: 1544094 - RNA, 19 nt, Artificial Sequence
  Description of Artificial Sequence: Synthetic oligonucleotide
  Sense strand starting at position 2166 of SEQ ID NO: 1245197
caucacuacuggguaaaga

SEQ ID NO: 1544095 - RNA, 19 nt, Artificial Sequence
  Description of Artificial Sequence: Synthetic oligonucleotide
  Antisense strand to SEQ ID NO: 1544094
ucuuuacccaguagugaug

SEQ ID NO: 1544096 - RNA, 19 nt, Artificial Sequence
  Description of Artificial Sequence: Synthetic oligonucleotide
  Sense strand starting at position 2364 of SEQ ID NO: 1245197
cugguacugguuugcauaa

SEQ ID NO: 1544097 - RNA, 19 nt, Artificial Sequence
  Description of Artificial Sequence: Synthetic oligonucleotide
  Antisense strand to SEQ ID NO: 1544096
uuaugcaaaccaguaccag

SEQ ID NO: 1544098 - RNA, 19 nt, Artificial Sequence
  Description of Artificial Sequence: Synthetic oligonucleotide
  Sense strand starting at position 2365 of SEQ ID NO: 1245197
ugguacugguuugcauaau

SEQ ID NO: 1544099 - RNA, 19 nt, Artificial Sequence
  Description of Artificial Sequence: Synthetic oligonucleotide
  Antisense strand to SEQ ID NO: 1544098
auuaugcaaaccaguacca

SEQ ID NO: 1544100 - RNA, 19 nt, Artificial Sequence
  Description of Artificial Sequence: Synthetic oligonucleotide
  Sense strand starting at position 2466 of SEQ ID NO: 1245197
ggcguuagaaguggacaga

SEQ ID NO: 1544101 - RNA, 19 nt, Artificial Sequence
  Description of Artificial Sequence: Synthetic oligonucleotide
  Antisense strand to SEQ ID NO: 1544100
ucuguccacuucuaacgcc

SEQ ID NO: 1544102 - RNA, 19 nt, Artificial Sequence
  Description of Artificial Sequence: Synthetic oligonucleotide
  Sense strand starting at position 2510 of SEQ ID NO: 1245197
gaacguguuccucacaaau

SEQ ID NO: 1544103 - RNA, 19 nt, Artificial Sequence
  Description of Artificial Sequence: Synthetic oligonucleotide
  Antisense strand to SEQ ID NO: 1544102
auuugugaggaacacguuc

SEQ ID NO: 1544104 - RNA, 19 nt, Artificial Sequence
  Description of Artificial Sequence: Synthetic oligonucleotide
  Sense strand starting at position 2775 of SEQ ID NO: 1245197
gguggucucggguaaccau

SEQ ID NO: 1544105 - RNA, 19 nt, Artificial Sequence
  Description of Artificial Sequence: Synthetic oligonucleotide
  Antisense strand to SEQ ID NO: 1544104
augguuacccgagaccacc

SEQ ID NO: 1544106 - RNA, 19 nt, Artificial Sequence
  Description of Artificial Sequence: Synthetic oligonucleotide
  Sense strand starting at position 3941 of SEQ ID NO: 1245197
uuaagaaauggguggcuca

SEQ ID NO: 1544107 - RNA, 19 nt, Artificial Sequence
  Description of Artificial Sequence: Synthetic oligonucleotide
  Antisense strand to SEQ ID NO: 1544106
ugagccacccauuucuuaa

SEQ ID NO: 1544108 - RNA, 19 nt, Artificial Sequence
  Description of Artificial Sequence: Synthetic oligonucleotide
  Sense strand starting at position 121 of SEQ ID NO: 1245198
uaacguuaacaugggaaag

SEQ ID NO: 1544109 - RNA, 19 nt, Artificial Sequence
  Description of Artificial Sequence: Synthetic oligonucleotide
  Antisense strand to SEQ ID NO: 1544108
cuuucccauguuaacguua

SEQ ID NO: 1544110 - RNA, 19 nt, Artificial Sequence
  Description of Artificial Sequence: Synthetic oligonucleotide
  Sense strand starting at position 185 of SEQ ID NO: 1245198
gcaugacuugucuaugucu

SEQ ID NO: 1544111 - RNA, 19 nt, Artificial Sequence
  Description of Artificial Sequence: Synthetic oligonucleotide
  Antisense strand to SEQ ID NO: 1544110
agacauagacaagucaugc

SEQ ID NO: 1544112 - RNA, 19 nt, Artificial Sequence
  Description of Artificial Sequence: Synthetic oligonucleotide
  Sense strand starting at position 187 of SEQ ID NO: 1245198
augacuugucuaugucuuu

SEQ ID NO: 1544113 - RNA, 19 nt, Artificial Sequence
  Description of Artificial Sequence: Synthetic oligonucleotide
  Antisense strand to SEQ ID NO: 1544112
aaagacauagacaagucau

SEQ ID NO: 1544114 - RNA, 19 nt, Artificial Sequence
  Description of Artificial Sequence: Synthetic oligonucleotide
  Sense strand starting at position 226 of SEQ ID NO: 1245198
gucauuguuggccaaauua

SEQ ID NO: 1544115 - RNA, 19 nt, Artificial Sequence
  Description of Artificial Sequence: Synthetic oligonucleotide
  Antisense strand to SEQ ID NO: 1544114
uaauuuggccaacaaugac

SEQ ID NO: 1544116 - RNA, 19 nt, Artificial Sequence
  Description of Artificial Sequence: Synthetic oligonucleotide
  Sense strand starting at position 253 of SEQ ID NO: 1245198
aguaguuuaucucugagag

SEQ ID NO: 1544117 - RNA, 19 nt, Artificial Sequence
  Description of Artificial Sequence: Synthetic oligonucleotide
  Antisense strand to SEQ ID NO: 1544116
cucucagagauaaacuacu

SEQ ID NO: 1544118 - RNA, 19 nt, Artificial Sequence
  Description of Artificial Sequence: Synthetic oligonucleotide
  Sense strand starting at position 254 of SEQ ID NO: 1245198
guaguuuaucucugagagg

SEQ ID NO: 1544119 - RNA, 19 nt, Artificial Sequence
  Description of Artificial Sequence: Synthetic oligonucleotide
  Antisense strand to SEQ ID NO: 1544118
ccucucagagauaaacuac

SEQ ID NO: 1544120 - RNA, 19 nt, Artificial Sequence
  Description of Artificial Sequence: Synthetic oligonucleotide
  Sense strand starting at position 272 of SEQ ID NO: 1245198
ggcagauguagucauggag

SEQ ID NO: 1544121 - RNA, 19 nt, Artificial Sequence
  Description of Artificial Sequence: Synthetic oligonucleotide
  Antisense strand to SEQ ID NO: 1544120
cuccaugacuacaucugcc

SEQ ID NO: 1544122 - RNA, 19 nt, Artificial Sequence
  Description of Artificial Sequence: Synthetic oligonucleotide
  Sense strand starting at position 275 of SEQ ID NO: 1245198
agauguagucauggagaag

SEQ ID NO: 1544123 - RNA, 19 nt, Artificial Sequence
  Description of Artificial Sequence: Synthetic oligonucleotide
  Antisense strand to SEQ ID NO: 1544122
cuucuccaugacuacaucu

SEQ ID NO: 1544124 - RNA, 19 nt, Artificial Sequence
  Description of Artificial Sequence: Synthetic oligonucleotide
  Sense strand starting at position 276 of SEQ ID NO: 1245198
gauguagucauggagaagu

SEQ ID NO: 1544125 - RNA, 19 nt, Artificial Sequence
  Description of Artificial Sequence: Synthetic oligonucleotide
  Antisense strand to SEQ ID NO: 1544124
acuucuccaugacuacauc

SEQ ID NO: 1544126 - RNA, 19 nt, Artificial Sequence
  Description of Artificial Sequence: Synthetic oligonucleotide
  Sense strand starting at position 278 of SEQ ID NO: 1245198
uguagucauggagaaguga

SEQ ID NO: 1544127 - RNA, 19 nt, Artificial Sequence
  Description of Artificial Sequence: Synthetic oligonucleotide
  Antisense strand to SEQ ID NO: 1544126
ucacuucuccaugacuaca

SEQ ID NO: 1544128 - RNA, 19 nt, Artificial Sequence
  Description of Artificial Sequence: Synthetic oligonucleotide
  Sense strand starting at position 304 of SEQ ID NO: 1245198
augggaucauuugaugauu

SEQ ID NO: 1544129 - RNA, 19 nt, Artificial Sequence
  Description of Artificial Sequence: Synthetic oligonucleotide
  Antisense strand to SEQ ID NO: 1544128
aaucaucaaaugaucccau

SEQ ID NO: 1544130 - RNA, 19 nt, Artificial Sequence
  Description of Artificial Sequence: Synthetic oligonucleotide
  Sense strand starting at position 321 of SEQ ID NO: 1245198
uugccuagugucuagcaaa

SEQ ID NO: 1544131 - RNA, 19 nt, Artificial Sequence
  Description of Artificial Sequence: Synthetic oligonucleotide
  Antisense strand to SEQ ID NO: 1544130
uuugcuagacacuaggcaa

SEQ ID NO: 1544132 - RNA, 19 nt, Artificial Sequence
  Description of Artificial Sequence: Synthetic oligonucleotide
  Sense strand starting at position 475 of SEQ ID NO: 1245198
cuugguuauuccucuguag

SEQ ID NO: 1544133 - RNA, 19 nt, Artificial Sequence
  Description of Artificial Sequence: Synthetic oligonucleotide
  Antisense strand to SEQ ID NO: 1544132
cuacagaggaauaaccaag

SEQ ID NO: 1544134 - RNA, 19 nt, Artificial Sequence
  Description of Artificial Sequence: Synthetic oligonucleotide
  Sense strand starting at position 526 of SEQ ID NO: 1245198
cccagaacucaaggcgaaa

SEQ ID NO: 1544135 - RNA, 19 nt, Artificial Sequence
  Description of Artificial Sequence: Synthetic oligonucleotide
  Antisense strand to SEQ ID NO: 1544134
uuucgccuugaguucuggg

SEQ ID NO: 1544136 - RNA, 19 nt, Artificial Sequence
  Description of Artificial Sequence: Synthetic oligonucleotide
  Sense strand starting at position 870 of SEQ ID NO: 1245198
aauuuauguuuaggaugag

SEQ ID NO: 1544137 - RNA, 19 nt, Artificial Sequence
  Description of Artificial Sequence: Synthetic oligonucleotide
  Antisense strand to SEQ ID NO: 1544136
cucauccuaaacauaaauu

SEQ ID NO: 1544138 - RNA, 19 nt, Artificial Sequence
  Description of Artificial Sequence: Synthetic oligonucleotide
  Sense strand starting at position 871 of SEQ ID NO: 1245198
auuuauguuuaggaugaga

SEQ ID NO: 1544139 - RNA, 19 nt, Artificial Sequence
  Description of Artificial Sequence: Synthetic oligonucleotide
  Antisense strand to SEQ ID NO: 1544138
ucucauccuaaacauaaau

SEQ ID NO: 1544140 - RNA, 19 nt, Artificial Sequence
  Description of Artificial Sequence: Synthetic oligonucleotide
  Sense strand starting at position 873 of SEQ ID NO: 1245198
uuauguuuaggaugagaug

SEQ ID NO: 1544141 - RNA, 19 nt, Artificial Sequence
  Description of Artificial Sequence: Synthetic oligonucleotide
  Antisense strand to SEQ ID NO: 1544140
caucucauccuaaacauaa

SEQ ID NO: 1544142 - RNA, 19 nt, Artificial Sequence
  Description of Artificial Sequence: Synthetic oligonucleotide
  Sense strand starting at position 905 of SEQ ID NO: 1245198
agagguuauuaagaacaua

SEQ ID NO: 1544143 - RNA, 19 nt, Artificial Sequence
  Description of Artificial Sequence: Synthetic oligonucleotide
  Antisense strand to SEQ ID NO: 1544142
uauguucuuaauaaccucu

SEQ ID NO: 1544144 - RNA, 19 nt, Artificial Sequence
  Description of Artificial Sequence: Synthetic oligonucleotide
  Sense strand starting at position 2254 of SEQ ID NO: 1245198
gcagcugggcuguaaugau

SEQ ID NO: 1544145 - RNA, 19 nt, Artificial Sequence
  Description of Artificial Sequence: Synthetic oligonucleotide
  Antisense strand to SEQ ID NO: 1544144
aucauuacagcccagcugc

SEQ ID NO: 1544146 - RNA, 19 nt, Artificial Sequence
  Description of Artificial Sequence: Synthetic oligonucleotide
  Sense strand starting at position 2268 of SEQ ID NO: 1245198
augauauacuuguccagga

SEQ ID NO: 1544147 - RNA, 19 nt, Artificial Sequence
  Description of Artificial Sequence: Synthetic oligonucleotide
  Antisense strand to SEQ ID NO: 1544146
uccuggacaaguauaucau

SEQ ID NO: 1544148 - RNA, 19 nt, Artificial Sequence
  Description of Artificial Sequence: Synthetic oligonucleotide
  Sense strand starting at position 2430 of SEQ ID NO: 1245198
acaguugagcagggugauu

SEQ ID NO: 1544149 - RNA, 19 nt, Artificial Sequence
  Description of Artificial Sequence: Synthetic oligonucleotide
  Antisense strand to SEQ ID NO: 1544148
aaucacccugcucaacugu

SEQ ID NO: 1544150 - RNA, 19 nt, Artificial Sequence
  Description of Artificial Sequence: Synthetic oligonucleotide
  Sense strand starting at position 2432 of SEQ ID NO: 1245198
aguugagcagggugauuaa

SEQ ID NO: 1544151 - RNA, 19 nt, Artificial Sequence
  Description of Artificial Sequence: Synthetic oligonucleotide
  Antisense strand to SEQ ID NO: 1544150
uuaaucacccugcucaacu

SEQ ID NO: 1544152 - RNA, 19 nt, Artificial Sequence
  Description of Artificial Sequence: Synthetic oligonucleotide
  Sense strand starting at position 2435 of SEQ ID NO: 1245198
ugagcagggugauuaacaa

SEQ ID NO: 1544153 - RNA, 19 nt, Artificial Sequence
  Description of Artificial Sequence: Synthetic oligonucleotide
  Antisense strand to SEQ ID NO: 1544152
uuguuaaucacccugcuca

SEQ ID NO: 1544154 - RNA, 19 nt, Artificial Sequence
  Description of Artificial Sequence: Synthetic oligonucleotide
  Sense strand starting at position 2516 of SEQ ID NO: 1245198
gcaggauugcgggagcuca

SEQ ID NO: 1544155 - RNA, 19 nt, Artificial Sequence
  Description of Artificial Sequence: Synthetic oligonucleotide
  Antisense strand to SEQ ID NO: 1544154
ugagcucccgcaauccugc

SEQ ID NO: 1544156 - RNA, 19 nt, Artificial Sequence
  Description of Artificial Sequence: Synthetic oligonucleotide
  Sense strand starting at position 2568 of SEQ ID NO: 1245198
gcuagugacaguuaugucu

SEQ ID NO: 1544157 - RNA, 19 nt, Artificial Sequence
  Description of Artificial Sequence: Synthetic oligonucleotide
  Antisense strand to SEQ ID NO: 1544156
agacauaacugucacuagc

SEQ ID NO: 1544158 - RNA, 19 nt, Artificial Sequence
  Description of Artificial Sequence: Synthetic oligonucleotide
  Sense strand starting at position 2575 of SEQ ID NO: 1245198
acaguuaugucuccaaagc

SEQ ID NO: 1544159 - RNA, 19 nt, Artificial Sequence
  Description of Artificial Sequence: Synthetic oligonucleotide
  Antisense strand to SEQ ID NO: 1544158
gcuuuggagacauaacugu

SEQ ID NO: 1544160 - RNA, 19 nt, Artificial Sequence
  Description of Artificial Sequence: Synthetic oligonucleotide
  Sense strand starting at position 2674 of SEQ ID NO: 1245198
cccggauaccuggaaucuu

SEQ ID NO: 1544161 - RNA, 19 nt, Artificial Sequence
  Description of Artificial Sequence: Synthetic oligonucleotide
  Antisense strand to SEQ ID NO: 1544160
aagauuccagguauccggg

SEQ ID NO: 1544162 - RNA, 19 nt, Artificial Sequence
  Description of Artificial Sequence: Synthetic oligonucleotide
  Sense strand starting at position 2684 of SEQ ID NO: 1245198
uggaaucuuccaggucaaa

SEQ ID NO: 1544163 - RNA, 19 nt, Artificial Sequence
  Description of Artificial Sequence: Synthetic oligonucleotide
  Antisense strand to SEQ ID NO: 1544162
uuugaccuggaagauucca

SEQ ID NO: 1544164 - RNA, 19 nt, Artificial Sequence
  Description of Artificial Sequence: Synthetic oligonucleotide
  Sense strand starting at position 2717 of SEQ ID NO: 1245198
gcuugucagaggugauuua

SEQ ID NO: 1544165 - RNA, 19 nt, Artificial Sequence
  Description of Artificial Sequence: Synthetic oligonucleotide
  Antisense strand to SEQ ID NO: 1544164
uaaaucaccucugacaagc

SEQ ID NO: 1544166 - RNA, 19 nt, Artificial Sequence
  Description of Artificial Sequence: Synthetic oligonucleotide
  Sense strand starting at position 2728 of SEQ ID NO: 1245198
gugauuuagugagaaggga

SEQ ID NO: 1544167 - RNA, 19 nt, Artificial Sequence
  Description of Artificial Sequence: Synthetic oligonucleotide
  Antisense strand to SEQ ID NO: 1544166
ucccuucucacuaaaucac

SEQ ID NO: 1544168 - RNA, 19 nt, Artificial Sequence
  Description of Artificial Sequence: Synthetic oligonucleotide
  Sense strand starting at position 2786 of SEQ ID NO: 1245198
agagaagcucugggcucau

SEQ ID NO: 1544169 - RNA, 19 nt, Artificial Sequence
  Description of Artificial Sequence: Synthetic oligonucleotide
  Antisense strand to SEQ ID NO: 1544168
augagcccagagcuucucu

SEQ ID NO: 1544170 - RNA, 19 nt, Artificial Sequence
  Description of Artificial Sequence: Synthetic oligonucleotide
  Sense strand starting at position 2841 of SEQ ID NO: 1245198
acuuuaaguguuugaacag

SEQ ID NO: 1544171 - RNA, 19 nt, Artificial Sequence
  Description of Artificial Sequence: Synthetic oligonucleotide
  Antisense strand to SEQ ID NO: 1544170
cuguucaaacacuuaaagu

SEQ ID NO: 1544172 - RNA, 19 nt, Artificial Sequence
  Description of Artificial Sequence: Synthetic oligonucleotide
  Sense strand starting at position 2851 of SEQ ID NO: 1245198
uuugaacagucacuugagu

SEQ ID NO: 1544173 - RNA, 19 nt, Artificial Sequence
  Description of Artificial Sequence: Synthetic oligonucleotide
  Antisense strand to SEQ ID NO: 1544172
acucaagugacuguucaaa

SEQ ID NO: 1544174 - RNA, 19 nt, Artificial Sequence
  Description of Artificial Sequence: Synthetic oligonucleotide
  Sense strand starting at position 2895 of SEQ ID NO: 1245198
gccaccuauuguccuggaa

SEQ ID NO: 1544175 - RNA, 19 nt, Artificial Sequence
  Description of Artificial Sequence: Synthetic oligonucleotide
  Antisense strand to SEQ ID NO: 1544174
uuccaggacaauagguggc

SEQ ID NO: 1544176 - RNA, 19 nt, Artificial Sequence
  Description of Artificial Sequence: Synthetic oligonucleotide
  Sense strand starting at position 2898 of SEQ ID NO: 1245198
accuauuguccuggaagga

SEQ ID NO: 1544177 - RNA, 19 nt, Artificial Sequence
  Description of Artificial Sequence: Synthetic oligonucleotide
  Antisense strand to SEQ ID NO: 1544176
uccuuccaggacaauaggu

SEQ ID NO: 1544178 - RNA, 19 nt, Artificial Sequence
  Description of Artificial Sequence: Synthetic oligonucleotide
  Sense strand starting at position 3302 of SEQ ID NO: 1245198
caucuuaaguuugcagagu

SEQ ID NO: 1544179 - RNA, 19 nt, Artificial Sequence
  Description of Artificial Sequence: Synthetic oligonucleotide
  Antisense strand to SEQ ID NO: 1544178
acucugcaaacuuaagaug

SEQ ID NO: 1544180 - RNA, 19 nt, Artificial Sequence
  Description of Artificial Sequence: Synthetic oligonucleotide
  Sense strand starting at position 3366 of SEQ ID NO: 1245198
ucaaauuucguaugcugaa

SEQ ID NO: 1544181 - RNA, 19 nt, Artificial Sequence
  Description of Artificial Sequence: Synthetic oligonucleotide
  Antisense strand to SEQ ID NO: 1544180
uucagcauacgaaauuuga

SEQ ID NO: 1544182 - RNA, 19 nt, Artificial Sequence
  Description of Artificial Sequence: Synthetic oligonucleotide
  Sense strand starting at position 3512 of SEQ ID NO: 1245198
gcuuccagucuccagaauu

SEQ ID NO: 1544183 - RNA, 19 nt, Artificial Sequence
  Description of Artificial Sequence: Synthetic oligonucleotide
  Antisense strand to SEQ ID NO: 1544182
aauucuggagacuggaagc

SEQ ID NO: 1544184 - RNA, 19 nt, Artificial Sequence
  Description of Artificial Sequence: Synthetic oligonucleotide
  Sense strand starting at position 3616 of SEQ ID NO: 1245198
cacacaucugcauagguga

SEQ ID NO: 1544185 - RNA, 19 nt, Artificial Sequence
  Description of Artificial Sequence: Synthetic oligonucleotide
  Antisense strand to SEQ ID NO: 1544184
ucaccuaugcagaugugug

SEQ ID NO: 1544186 - RNA, 19 nt, Artificial Sequence
  Description of Artificial Sequence: Synthetic oligonucleotide
  Sense strand starting at position 3760 of SEQ ID NO: 1245198
gcuauauauccuggagacc

SEQ ID NO: 1544187 - RNA, 19 nt, Artificial Sequence
  Description of Artificial Sequence: Synthetic oligonucleotide
  Antisense strand to SEQ ID NO: 1544186
ggucuccaggauauauagc

SEQ ID NO: 1544188 - RNA, 19 nt, Artificial Sequence
  Description of Artificial Sequence: Synthetic oligonucleotide
  Sense strand starting at position 549 of SEQ ID NO: 1245199
gcguucugugaccuguaau

SEQ ID NO: 1544189 - RNA, 19 nt, Artificial Sequence
  Description of Artificial Sequence: Synthetic oligonucleotide
  Antisense strand to SEQ ID NO: 1544188
auuacaggucacagaacgc

SEQ ID NO: 1544190 - RNA, 19 nt, Artificial Sequence
  Description of Artificial Sequence: Synthetic oligonucleotide
  Sense strand starting at position 563 of SEQ ID NO: 1245199
guaauagugcgacagacug

SEQ ID NO: 1544191 - RNA, 19 nt, Artificial Sequence
  Description of Artificial Sequence: Synthetic oligonucleotide
  Antisense strand to SEQ ID NO: 1544190
cagucugucgcacuauuac

SEQ ID NO: 1544192 - RNA, 19 nt, Artificial Sequence
  Description of Artificial Sequence: Synthetic oligonucleotide
  Sense strand starting at position 609 of SEQ ID NO: 1245199
cucugugauuaagccaaga

SEQ ID NO: 1544193 - RNA, 19 nt, Artificial Sequence
  Description of Artificial Sequence: Synthetic oligonucleotide
  Antisense strand to SEQ ID NO: 1544192
ucuuggcuuaaucacagag

SEQ ID NO: 1544194 - RNA, 19 nt, Artificial Sequence
  Description of Artificial Sequence: Synthetic oligonucleotide
  Sense strand starting at position 794 of SEQ ID NO: 1245199
ugguaaauaucaguaugua

SEQ ID NO: 1544195 - RNA, 19 nt, Artificial Sequence
  Description of Artificial Sequence: Synthetic oligonucleotide
  Antisense strand to SEQ ID NO: 1544194
uacauacugauauuuacca

SEQ ID NO: 1544196 - RNA, 19 nt, Artificial Sequence
  Description of Artificial Sequence: Synthetic oligonucleotide
  Sense strand starting at position 795 of SEQ ID NO: 1245199
gguaaauaucaguauguau

SEQ ID NO: 1544197 - RNA, 19 nt, Artificial Sequence
  Description of Artificial Sequence: Synthetic oligonucleotide
  Antisense strand to SEQ ID NO: 1544196
auacauacugauauuuacc

SEQ ID NO: 1544198 - RNA, 19 nt, Artificial Sequence
  Description of Artificial Sequence: Synthetic oligonucleotide
  Sense strand starting at position 1001 of SEQ ID NO: 1245199
cugguuugauggagggaga

SEQ ID NO: 1544199 - RNA, 19 nt, Artificial Sequence
  Description of Artificial Sequence: Synthetic oligonucleotide
  Antisense strand to SEQ ID NO: 1544198
ucucccuccaucaaaccag

SEQ ID NO: 1544200 - RNA, 19 nt, Artificial Sequence
  Description of Artificial Sequence: Synthetic oligonucleotide
  Sense strand starting at position 1022 of SEQ ID NO: 1245199
augaguucggcgucagucu

SEQ ID NO: 1544201 - RNA, 19 nt, Artificial Sequence
  Description of Artificial Sequence: Synthetic oligonucleotide
  Antisense strand to SEQ ID NO: 1544200
agacugacgccgaacucau

SEQ ID NO: 1544202 - RNA, 19 nt, Artificial Sequence
  Description of Artificial Sequence: Synthetic oligonucleotide
  Sense strand starting at position 1170 of SEQ ID NO: 1245199
uuaaguccucuggaugacu

SEQ ID NO: 1544203 - RNA, 19 nt, Artificial Sequence
  Description of Artificial Sequence: Synthetic oligonucleotide
  Antisense strand to SEQ ID NO: 1544202
agucauccagaggacuuaa

SEQ ID NO: 1544204 - RNA, 19 nt, Artificial Sequence
  Description of Artificial Sequence: Synthetic oligonucleotide
  Sense strand starting at position 2426 of SEQ ID NO: 1245199
auggcauugcuagagggaa

SEQ ID NO: 1544205 - RNA, 19 nt, Artificial Sequence
  Description of Artificial Sequence: Synthetic oligonucleotide
  Antisense strand to SEQ ID NO: 1544204
uucccucuagcaaugccau

SEQ ID NO: 1544206 - RNA, 19 nt, Artificial Sequence
  Description of Artificial Sequence: Synthetic oligonucleotide
  Sense strand starting at position 2441 of SEQ ID NO: 1245199
ggaaguagugcuggagauc

SEQ ID NO: 1544207 - RNA, 19 nt, Artificial Sequence
  Description of Artificial Sequence: Synthetic oligonucleotide
  Antisense strand to SEQ ID NO: 1544206
gaucuccagcacuacuucc

SEQ ID NO: 1544208 - RNA, 19 nt, Artificial Sequence
  Description of Artificial Sequence: Synthetic oligonucleotide
  Sense strand starting at position 2450 of SEQ ID NO: 1245199
gcuggagauccggauacuu

SEQ ID NO: 1544209 - RNA, 19 nt, Artificial Sequence
  Description of Artificial Sequence: Synthetic oligonucleotide
  Antisense strand to SEQ ID NO: 1544208
aaguauccggaucuccagc

SEQ ID NO: 1544210 - RNA, 19 nt, Artificial Sequence
  Description of Artificial Sequence: Synthetic oligonucleotide
  Sense strand starting at position 2459 of SEQ ID NO: 1245199
ccggauacuugaguuggaa

SEQ ID NO: 1544211 - RNA, 19 nt, Artificial Sequence
  Description of Artificial Sequence: Synthetic oligonucleotide
  Antisense strand to SEQ ID NO: 1544210
uuccaacucaaguauccgg

SEQ ID NO: 1544212 - RNA, 19 nt, Artificial Sequence
  Description of Artificial Sequence: Synthetic oligonucleotide
  Sense strand starting at position 2461 of SEQ ID NO: 1245199
ggauacuugaguuggaauu

SEQ ID NO: 1544213 - RNA, 19 nt, Artificial Sequence
  Description of Artificial Sequence: Synthetic oligonucleotide
  Antisense strand to SEQ ID NO: 1544212
aauuccaacucaaguaucc

SEQ ID NO: 1544214 - RNA, 19 nt, Artificial Sequence
  Description of Artificial Sequence: Synthetic oligonucleotide
  Sense strand starting at position 2554 of SEQ ID NO: 1245199
agaucuuggaaaugauugu

SEQ ID NO: 1544215 - RNA, 19 nt, Artificial Sequence
  Description of Artificial Sequence: Synthetic oligonucleotide
  Antisense strand to SEQ ID NO: 1544214
acaaucauuuccaagaucu

SEQ ID NO: 1544216 - RNA, 19 nt, Artificial Sequence
  Description of Artificial Sequence: Synthetic oligonucleotide
  Sense strand starting at position 2581 of SEQ ID NO: 1245199
ggaaucaucugguuuacac

SEQ ID NO: 1544217 - RNA, 19 nt, Artificial Sequence
  Description of Artificial Sequence: Synthetic oligonucleotide
  Antisense strand to SEQ ID NO: 1544216
guguaaaccagaugauucc

SEQ ID NO: 1544218 - RNA, 19 nt, Artificial Sequence
  Description of Artificial Sequence: Synthetic oligonucleotide
  Sense strand starting at position 2653 of SEQ ID NO: 1245199
ggaugccuuucccuggaau

SEQ ID NO: 1544219 - RNA, 19 nt, Artificial Sequence
  Description of Artificial Sequence: Synthetic oligonucleotide
  Antisense strand to SEQ ID NO: 1544218
auuccagggaaaggcaucc

SEQ ID NO: 1544220 - RNA, 19 nt, Artificial Sequence
  Description of Artificial Sequence: Synthetic oligonucleotide
  Sense strand starting at position 2655 of SEQ ID NO: 1245199
augccuuucccuggaauga

SEQ ID NO: 1544221 - RNA, 19 nt, Artificial Sequence
  Description of Artificial Sequence: Synthetic oligonucleotide
  Antisense strand to SEQ ID NO: 1544220
ucauuccagggaaaggcau

SEQ ID NO: 1544222 - RNA, 19 nt, Artificial Sequence
  Description of Artificial Sequence: Synthetic oligonucleotide
  Sense strand starting at position 2656 of SEQ ID NO: 1245199
ugccuuucccuggaaugau

SEQ ID NO: 1544223 - RNA, 19 nt, Artificial Sequence
  Description of Artificial Sequence: Synthetic oligonucleotide
  Antisense strand to SEQ ID NO: 1544222
aucauuccagggaaaggca

SEQ ID NO: 1544224 - RNA, 19 nt, Artificial Sequence
  Description of Artificial Sequence: Synthetic oligonucleotide
  Sense strand starting at position 2664 of SEQ ID NO: 1245199
ccuggaaugauccggaaug

SEQ ID NO: 1544225 - RNA, 19 nt, Artificial Sequence
  Description of Artificial Sequence: Synthetic oligonucleotide
  Antisense strand to SEQ ID NO: 1544224
cauuccggaucauuccagg

SEQ ID NO: 1544226 - RNA, 19 nt, Artificial Sequence
  Description of Artificial Sequence: Synthetic oligonucleotide
  Sense strand starting at position 2724 of SEQ ID NO: 1245199
aggccauuaucccuuugaa

SEQ ID NO: 1544227 - RNA, 19 nt, Artificial Sequence
  Description of Artificial Sequence: Synthetic oligonucleotide
  Antisense strand to SEQ ID NO: 1544226
uucaaagggauaauggccu

SEQ ID NO: 1544228 - RNA, 19 nt, Artificial Sequence
  Description of Artificial Sequence: Synthetic oligonucleotide
  Sense strand starting at position 2779 of SEQ ID NO: 1245199
uacgaaaugugaccaguca

SEQ ID NO: 1544229 - RNA, 19 nt, Artificial Sequence
  Description of Artificial Sequence: Synthetic oligonucleotide
  Antisense strand to SEQ ID NO: 1544228
ugacuggucacauuucgua

SEQ ID NO: 1544230 - RNA, 19 nt, Artificial Sequence
  Description of Artificial Sequence: Synthetic oligonucleotide
  Sense strand starting at position 2796 of SEQ ID NO: 1245199
cagguaguucccuacacga

SEQ ID NO: 1544231 - RNA, 19 nt, Artificial Sequence
  Description of Artificial Sequence: Synthetic oligonucleotide
  Antisense strand to SEQ ID NO: 1544230
ucguguagggaacuaccug

SEQ ID NO: 1544232 - RNA, 19 nt, Artificial Sequence
  Description of Artificial Sequence: Synthetic oligonucleotide
  Sense strand starting at position 2823 of SEQ ID NO: 1245199
ggcccaauuucuguugcca

SEQ ID NO: 1544233 - RNA, 19 nt, Artificial Sequence
  Description of Artificial Sequence: Synthetic oligonucleotide
  Antisense strand to SEQ ID NO: 1544232
uggcaacagaaauugggcc

SEQ ID NO: 1544234 - RNA, 19 nt, Artificial Sequence
  Description of Artificial Sequence: Synthetic oligonucleotide
  Sense strand starting at position 2878 of SEQ ID NO: 1245199
accaguaauuuggauaccu

SEQ ID NO: 1544235 - RNA, 19 nt, Artificial Sequence
  Description of Artificial Sequence: Synthetic oligonucleotide
  Antisense strand to SEQ ID NO: 1544234
agguauccaaauuacuggu

SEQ ID NO: 1544236 - RNA, 19 nt, Artificial Sequence
  Description of Artificial Sequence: Synthetic oligonucleotide
  Sense strand starting at position 2975 of SEQ ID NO: 1245199
acucuagcauaaguuaaga

SEQ ID NO: 1544237 - RNA, 19 nt, Artificial Sequence
  Description of Artificial Sequence: Synthetic oligonucleotide
  Antisense strand to SEQ ID NO: 1544236
ucuuaacuuaugcuagagu

SEQ ID NO: 1544238 - RNA, 19 nt, Artificial Sequence
  Description of Artificial Sequence: Synthetic oligonucleotide
  Sense strand starting at position 3012 of SEQ ID NO: 1245199
uggcuaagagcaugaaaga

SEQ ID NO: 1544239 - RNA, 19 nt, Artificial Sequence
  Description of Artificial Sequence: Synthetic oligonucleotide
  Antisense strand to SEQ ID NO: 1544238
ucuuucaugcucuuagcca

SEQ ID NO: 1544240 - RNA, 19 nt, Artificial Sequence
  Description of Artificial Sequence: Synthetic oligonucleotide
  Sense strand starting at position 3022 of SEQ ID NO: 1245199
caugaaagaucugcucgau

SEQ ID NO: 1544241 - RNA, 19 nt, Artificial Sequence
  Description of Artificial Sequence: Synthetic oligonucleotide
  Antisense strand to SEQ ID NO: 1544240
aucgagcagaucuuucaug

SEQ ID NO: 1544242 - RNA, 19 nt, Artificial Sequence
  Description of Artificial Sequence: Synthetic oligonucleotide
  Sense strand starting at position 3141 of SEQ ID NO: 1245199
ggaguugauguaugugaag

SEQ ID NO: 1544243 - RNA, 19 nt, Artificial Sequence
  Description of Artificial Sequence: Synthetic oligonucleotide
  Antisense strand to SEQ ID NO: 1544242
cuucacauacaucaacucc

SEQ ID NO: 1544244 - RNA, 19 nt, Artificial Sequence
  Description of Artificial Sequence: Synthetic oligonucleotide
  Sense strand starting at position 3185 of SEQ ID NO: 1245199
guagaugacucaguaaaug

SEQ ID NO: 1544245 - RNA, 19 nt, Artificial Sequence
  Description of Artificial Sequence: Synthetic oligonucleotide
  Antisense strand to SEQ ID NO: 1544244
cauuuacugagucaucuac

SEQ ID NO: 1544246 - RNA, 19 nt, Artificial Sequence
  Description of Artificial Sequence: Synthetic oligonucleotide
  Sense strand starting at position 3334 of SEQ ID NO: 1245199
gcaugugccaauuauggaa

SEQ ID NO: 1544247 - RNA, 19 nt, Artificial Sequence
  Description of Artificial Sequence: Synthetic oligonucleotide
  Antisense strand to SEQ ID NO: 1544246
uuccauaauuggcacaugc

SEQ ID NO: 1544248 - RNA, 19 nt, Artificial Sequence
  Description of Artificial Sequence: Synthetic oligonucleotide
  Sense strand starting at position 3463 of SEQ ID NO: 1245199
gcaaccucucgugugcaua

SEQ ID NO: 1544249 - RNA, 19 nt, Artificial Sequence
  Description of Artificial Sequence: Synthetic oligonucleotide
  Antisense strand to SEQ ID NO: 1544248
uaugcacacgagagguugc

SEQ ID NO: 1544250 - RNA, 19 nt, Artificial Sequence
  Description of Artificial Sequence: Synthetic oligonucleotide
  Sense strand starting at position 3775 of SEQ ID NO: 1245199
ggcauaaugguauaguaga

SEQ ID NO: 1544251 - RNA, 19 nt, Artificial Sequence
  Description of Artificial Sequence: Synthetic oligonucleotide
  Antisense strand to SEQ ID NO: 1544250
ucuacuauaccauuaugcc

SEQ ID NO: 1544252 - RNA, 19 nt, Artificial Sequence
  Description of Artificial Sequence: Synthetic oligonucleotide
  Sense strand starting at position 3788 of SEQ ID NO: 1245199
aguagaaugugaccuuuaa

SEQ ID NO: 1544253 - RNA, 19 nt, Artificial Sequence
  Description of Artificial Sequence: Synthetic oligonucleotide
  Antisense strand to SEQ ID NO: 1544252
uuaaaggucacauucuacu

SEQ ID NO: 1544254 - RNA, 19 nt, Artificial Sequence
  Description of Artificial Sequence: Synthetic oligonucleotide
  Sense strand starting at position 3792 of SEQ ID NO: 1245199
gaaugugaccuuuaaaguu

SEQ ID NO: 1544255 - RNA, 19 nt, Artificial Sequence
  Description of Artificial Sequence: Synthetic oligonucleotide
  Antisense strand to SEQ ID NO: 1544254
aacuuuaaaggucacauuc

SEQ ID NO: 1544256 - RNA, 19 nt, Artificial Sequence
  Description of Artificial Sequence: Synthetic oligonucleotide
  Sense strand starting at position 3801 of SEQ ID NO: 1245199
cuuuaaaguuaguccugaa

SEQ ID NO: 1544257 - RNA, 19 nt, Artificial Sequence
  Description of Artificial Sequence: Synthetic oligonucleotide
  Antisense strand to SEQ ID NO: 1544256
uucaggacuaacuuuaaag

SEQ ID NO: 1544258 - RNA, 19 nt, Artificial Sequence
  Description of Artificial Sequence: Synthetic oligonucleotide
  Sense strand starting at position 3849 of SEQ ID NO: 1245199
agucuagugguggaacuua

SEQ ID NO: 1544259 - RNA, 19 nt, Artificial Sequence
  Description of Artificial Sequence: Synthetic oligonucleotide
  Antisense strand to SEQ ID NO: 1544258
uaaguuccaccacuagacu

SEQ ID NO: 1544260 - RNA, 19 nt, Artificial Sequence
  Description of Artificial Sequence: Synthetic oligonucleotide
  Sense strand starting at position 3858 of SEQ ID NO: 1245199
guggaacuuaggugaucua

SEQ ID NO: 1544261 - RNA, 19 nt, Artificial Sequence
  Description of Artificial Sequence: Synthetic oligonucleotide
  Antisense strand to SEQ ID NO: 1544260
uagaucaccuaaguuccac

SEQ ID NO: 1544262 - RNA, 19 nt, Artificial Sequence
  Description of Artificial Sequence: Synthetic oligonucleotide
  Sense strand starting at position 3861 of SEQ ID NO: 1245199
gaacuuaggugaucuacuu

SEQ ID NO: 1544263 - RNA, 19 nt, Artificial Sequence
  Description of Artificial Sequence: Synthetic oligonucleotide
  Antisense strand to SEQ ID NO: 1544262
aaguagaucaccuaaguuc

SEQ ID NO: 1544264 - RNA, 19 nt, Artificial Sequence
  Description of Artificial Sequence: Synthetic oligonucleotide
  Sense strand starting at position 3941 of SEQ ID NO: 1245199
guuauauagcgucagggag

SEQ ID NO: 1544265 - RNA, 19 nt, Artificial Sequence
  Description of Artificial Sequence: Synthetic oligonucleotide
  Antisense strand to SEQ ID NO: 1544264
cucccugacgcuauauaac

SEQ ID NO: 1544266 - RNA, 19 nt, Artificial Sequence
  Description of Artificial Sequence: Synthetic oligonucleotide
  Sense strand starting at position 3953 of SEQ ID NO: 1245199
cagggagaaguaugugcau

SEQ ID NO: 1544267 - RNA, 19 nt, Artificial Sequence
  Description of Artificial Sequence: Synthetic oligonucleotide
  Antisense strand to SEQ ID NO: 1544266
augcacauacuucucccug

SEQ ID NO: 1544268 - RNA, 19 nt, Artificial Sequence
  Description of Artificial Sequence: Synthetic oligonucleotide
  Sense strand starting at position 9 of SEQ ID NO: 1245200
agcagaauucuaggaguua

SEQ ID NO: 1544269 - RNA, 19 nt, Artificial Sequence
  Description of Artificial Sequence: Synthetic oligonucleotide
  Antisense strand to SEQ ID NO: 1544268
uaacuccuagaauucugcu

SEQ ID NO: 1544270 - RNA, 19 nt, Artificial Sequence
  Description of Artificial Sequence: Synthetic oligonucleotide
  Sense strand starting at position 25 of SEQ ID NO: 1245200
uuaggucaguugucuagaa

SEQ ID NO: 1544271 - RNA, 19 nt, Artificial Sequence
  Description of Artificial Sequence: Synthetic oligonucleotide
  Antisense strand to SEQ ID NO: 1544270
uucuagacaacugaccuaa

SEQ ID NO: 1544272 - RNA, 19 nt, Artificial Sequence
  Description of Artificial Sequence: Synthetic oligonucleotide
  Sense strand starting at position 26 of SEQ ID NO: 1245200
uaggucaguugucuagaac

SEQ ID NO: 1544273 - RNA, 19 nt, Artificial Sequence
  Description of Artificial Sequence: Synthetic oligonucleotide
  Antisense strand to SEQ ID NO: 1544272
guucuagacaacugaccua

SEQ ID NO: 1544274 - RNA, 19 nt, Artificial Sequence
  Description of Artificial Sequence: Synthetic oligonucleotide
  Sense strand starting at position 27 of SEQ ID NO: 1245200
aggucaguugucuagaacu

SEQ ID NO: 1544275 - RNA, 19 nt, Artificial Sequence
  Description of Artificial Sequence: Synthetic oligonucleotide
  Antisense strand to SEQ ID NO: 1544274
aguucuagacaacugaccu

SEQ ID NO: 1544276 - RNA, 19 nt, Artificial Sequence
  Description of Artificial Sequence: Synthetic oligonucleotide
  Sense strand starting at position 29 of SEQ ID NO: 1245200
gucaguugucuagaacuuc

SEQ ID NO: 1544277 - RNA, 19 nt, Artificial Sequence
  Description of Artificial Sequence: Synthetic oligonucleotide
  Antisense strand to SEQ ID NO: 1544276
gaaguucuagacaacugac

SEQ ID NO: 1544278 - RNA, 19 nt, Artificial Sequence
  Description of Artificial Sequence: Synthetic oligonucleotide
  Sense strand starting at position 62 of SEQ ID NO: 1245200
caagguugcuuuguuauuu

SEQ ID NO: 1544279 - RNA, 19 nt, Artificial Sequence
  Description of Artificial Sequence: Synthetic oligonucleotide
  Antisense strand to SEQ ID NO: 1544278
aaauaacaaagcaaccuug

SEQ ID NO: 1544280 - RNA, 19 nt, Artificial Sequence
  Description of Artificial Sequence: Synthetic oligonucleotide
  Sense strand starting at position 63 of SEQ ID NO: 1245200
aagguugcuuuguuauuua

SEQ ID NO: 1544281 - RNA, 19 nt, Artificial Sequence
  Description of Artificial Sequence: Synthetic oligonucleotide
  Antisense strand to SEQ ID NO: 1544280
uaaauaacaaagcaaccuu

SEQ ID NO: 1544282 - RNA, 19 nt, Artificial Sequence
  Description of Artificial Sequence: Synthetic oligonucleotide
  Sense strand starting at position 66 of SEQ ID NO: 1245200
guugcuuuguuauuuaguu

SEQ ID NO: 1544283 - RNA, 19 nt, Artificial Sequence
  Description of Artificial Sequence: Synthetic oligonucleotide
  Antisense strand to SEQ ID NO: 1544282
aacuaaauaacaaagcaac

SEQ ID NO: 1544284 - RNA, 19 nt, Artificial Sequence
  Description of Artificial Sequence: Synthetic oligonucleotide
  Sense strand starting at position 81 of SEQ ID NO: 1245200
aguuuaaagcacugaguau

SEQ ID NO: 1544285 - RNA, 19 nt, Artificial Sequence
  Description of Artificial Sequence: Synthetic oligonucleotide
  Antisense strand to SEQ ID NO: 1544284
auacucagugcuuuaaacu

SEQ ID NO: 1544286 - RNA, 19 nt, Artificial Sequence
  Description of Artificial Sequence: Synthetic oligonucleotide
  Sense strand starting at position 93 of SEQ ID NO: 1245200
ugaguauucccacaauagc

SEQ ID NO: 1544287 - RNA, 19 nt, Artificial Sequence
  Description of Artificial Sequence: Synthetic oligonucleotide
  Antisense strand to SEQ ID NO: 1544286
gcuauugugggaauacuca

SEQ ID NO: 1544288 - RNA, 19 nt, Artificial Sequence
  Description of Artificial Sequence: Synthetic oligonucleotide
  Sense strand starting at position 113 of SEQ ID NO: 1245200
guuuaagcacgguaugaca

SEQ ID NO: 1544289 - RNA, 19 nt, Artificial Sequence
  Description of Artificial Sequence: Synthetic oligonucleotide
  Antisense strand to SEQ ID NO: 1544288
ugucauaccgugcuuaaac

SEQ ID NO: 1544290 - RNA, 19 nt, Artificial Sequence
  Description of Artificial Sequence: Synthetic oligonucleotide
  Sense strand starting at position 121 of SEQ ID NO: 1245200
acgguaugacaguagcauu

SEQ ID NO: 1544291 - RNA, 19 nt, Artificial Sequence
  Description of Artificial Sequence: Synthetic oligonucleotide
  Antisense strand to SEQ ID NO: 1544290
aaugcuacugucauaccgu

SEQ ID NO: 1544292 - RNA, 19 nt, Artificial Sequence
  Description of Artificial Sequence: Synthetic oligonucleotide
  Sense strand starting at position 218 of SEQ ID NO: 1245200
uuugauucccugugauaac

SEQ ID NO: 1544293 - RNA, 19 nt, Artificial Sequence
  Description of Artificial Sequence: Synthetic oligonucleotide
  Antisense strand to SEQ ID NO: 1544292
guuaucacagggaaucaaa

SEQ ID NO: 1544294 - RNA, 19 nt, Artificial Sequence
  Description of Artificial Sequence: Synthetic oligonucleotide
  Sense strand starting at position 227 of SEQ ID NO: 1245200
cugugauaacuccauggug

SEQ ID NO: 1544295 - RNA, 19 nt, Artificial Sequence
  Description of Artificial Sequence: Synthetic oligonucleotide
  Antisense strand to SEQ ID NO: 1544294
caccauggaguuaucacag

SEQ ID NO: 1544296 - RNA, 19 nt, Artificial Sequence
  Description of Artificial Sequence: Synthetic oligonucleotide
  Sense strand starting at position 267 of SEQ ID NO: 1245200
uuucuaaugcaaggaaacu

SEQ ID NO: 1544297 - RNA, 19 nt, Artificial Sequence
  Description of Artificial Sequence: Synthetic oligonucleotide
  Antisense strand to SEQ ID NO: 1544296
aguuuccuugcauuagaaa

SEQ ID NO: 1544298 - RNA, 19 nt, Artificial Sequence
  Description of Artificial Sequence: Synthetic oligonucleotide
  Sense strand starting at position 581 of SEQ ID NO: 1245200
aaggucauagcauagcuau

SEQ ID NO: 1544299 - RNA, 19 nt, Artificial Sequence
  Description of Artificial Sequence: Synthetic oligonucleotide
  Antisense strand to SEQ ID NO: 1544298
auagcuaugcuaugaccuu

SEQ ID NO: 1544300 - RNA, 19 nt, Artificial Sequence
  Description of Artificial Sequence: Synthetic oligonucleotide
  Sense strand starting at position 594 of SEQ ID NO: 1245200
agcuaucuugaacauagua

SEQ ID NO: 1544301 - RNA, 19 nt, Artificial Sequence
  Description of Artificial Sequence: Synthetic oligonucleotide
  Antisense strand to SEQ ID NO: 1544300
uacuauguucaagauagcu

SEQ ID NO: 1544302 - RNA, 19 nt, Artificial Sequence
  Description of Artificial Sequence: Synthetic oligonucleotide
  Sense strand starting at position 761 of SEQ ID NO: 1245200
aagguuauuuaagauagcu

SEQ ID NO: 1544303 - RNA, 19 nt, Artificial Sequence
  Description of Artificial Sequence: Synthetic oligonucleotide
  Antisense strand to SEQ ID NO: 1544302
agcuaucuuaaauaaccuu

SEQ ID NO: 1544304 - RNA, 19 nt, Artificial Sequence
  Description of Artificial Sequence: Synthetic oligonucleotide
  Sense strand starting at position 907 of SEQ ID NO: 1245200
agugcuuucgagagugcug

SEQ ID NO: 1544305 - RNA, 19 nt, Artificial Sequence
  Description of Artificial Sequence: Synthetic oligonucleotide
  Antisense strand to SEQ ID NO: 1544304
cagcacucucgaaagcacu

SEQ ID NO: 1544306 - RNA, 19 nt, Artificial Sequence
  Description of Artificial Sequence: Synthetic oligonucleotide
  Sense strand starting at position 991 of SEQ ID NO: 1245200
caggguaucgauuagcgau

SEQ ID NO: 1544307 - RNA, 19 nt, Artificial Sequence
  Description of Artificial Sequence: Synthetic oligonucleotide
  Antisense strand to SEQ ID NO: 1544306
aucgcuaaucgauacccug

SEQ ID NO: 1544308 - RNA, 19 nt, Artificial Sequence
  Description of Artificial Sequence: Synthetic oligonucleotide
  Sense strand starting at position 1184 of SEQ ID NO: 1245200
gauugcuuuccugauagag

SEQ ID NO: 1544309 - RNA, 19 nt, Artificial Sequence
  Description of Artificial Sequence: Synthetic oligonucleotide
  Antisense strand to SEQ ID NO: 1544308
cucuaucaggaaagcaauc

SEQ ID NO: 1544310 - RNA, 19 nt, Artificial Sequence
  Description of Artificial Sequence: Synthetic oligonucleotide
  Sense strand starting at position 1388 of SEQ ID NO: 1245200
gggagaggacgcuguauua

SEQ ID NO: 1544311 - RNA, 19 nt, Artificial Sequence
  Description of Artificial Sequence: Synthetic oligonucleotide
  Antisense strand to SEQ ID NO: 1544310
uaauacagcguccucuccc

SEQ ID NO: 1544312 - RNA, 19 nt, Artificial Sequence
  Description of Artificial Sequence: Synthetic oligonucleotide
  Sense strand starting at position 2669 of SEQ ID NO: 1245200
auuggcaugaccggaauaa

SEQ ID NO: 1544313 - RNA, 19 nt, Artificial Sequence
  Description of Artificial Sequence: Synthetic oligonucleotide
  Antisense strand to SEQ ID NO: 1544312
uuauuccggucaugccaau

SEQ ID NO: 1544314 - RNA, 19 nt, Artificial Sequence
  Description of Artificial Sequence: Synthetic oligonucleotide
  Sense strand starting at position 2747 of SEQ ID NO: 1245200
ggacccuaacacugguaau

SEQ ID NO: 1544315 - RNA, 19 nt, Artificial Sequence
  Description of Artificial Sequence: Synthetic oligonucleotide
  Antisense strand to SEQ ID NO: 1544314
auuaccaguguuagggucc

SEQ ID NO: 1544316 - RNA, 19 nt, Artificial Sequence
  Description of Artificial Sequence: Synthetic oligonucleotide
  Sense strand starting at position 2835 of SEQ ID NO: 1245200
cggugcgucccguuggaau

SEQ ID NO: 1544317 - RNA, 19 nt, Artificial Sequence
  Description of Artificial Sequence: Synthetic oligonucleotide
  Antisense strand to SEQ ID NO: 1544316
auuccaacgggacgcaccg

SEQ ID NO: 1544318 - RNA, 19 nt, Artificial Sequence
  Description of Artificial Sequence: Synthetic oligonucleotide
  Sense strand starting at position 3020 of SEQ ID NO: 1245200
gcaguuauucccgcuucgu

SEQ ID NO: 1544319 - RNA, 19 nt, Artificial Sequence
  Description of Artificial Sequence: Synthetic oligonucleotide
  Antisense strand to SEQ ID NO: 1544318
acgaagcgggaauaacugc

SEQ ID NO: 1544320 - RNA, 19 nt, Artificial Sequence
  Description of Artificial Sequence: Synthetic oligonucleotide
  Sense strand starting at position 3021 of SEQ ID NO: 1245200
caguuauucccgcuucguc

SEQ ID NO: 1544321 - RNA, 19 nt, Artificial Sequence
  Description of Artificial Sequence: Synthetic oligonucleotide
  Antisense strand to SEQ ID NO: 1544320
gacgaagcgggaauaacug

SEQ ID NO: 1544322 - RNA, 19 nt, Artificial Sequence
  Description of Artificial Sequence: Synthetic oligonucleotide
  Sense strand starting at position 3069 of SEQ ID NO: 1245200
auuccagacgcuuaauaau

SEQ ID NO: 1544323 - RNA, 19 nt, Artificial Sequence
  Description of Artificial Sequence: Synthetic oligonucleotide
  Antisense strand to SEQ ID NO: 1544322
auuauuaagcgucuggaau

SEQ ID NO: 1544324 - RNA, 19 nt, Artificial Sequence
  Description of Artificial Sequence: Synthetic oligonucleotide
  Sense strand starting at position 3179 of SEQ ID NO: 1245200
cacagugauggugguauga

SEQ ID NO: 1544325 - RNA, 19 nt, Artificial Sequence
  Description of Artificial Sequence: Synthetic oligonucleotide
  Antisense strand to SEQ ID NO: 1544324
ucauaccaccaucacugug

SEQ ID NO: 1544326 - RNA, 19 nt, Artificial Sequence
  Description of Artificial Sequence: Synthetic oligonucleotide
  Sense strand starting at position 3188 of SEQ ID NO: 1245200
ggugguaugaaggguaaug

SEQ ID NO: 1544327 - RNA, 19 nt, Artificial Sequence
  Description of Artificial Sequence: Synthetic oligonucleotide
  Antisense strand to SEQ ID NO: 1544326
cauuacccuucauaccacc

SEQ ID NO: 1544328 - RNA, 19 nt, Artificial Sequence
  Description of Artificial Sequence: Synthetic oligonucleotide
  Sense strand starting at position 3261 of SEQ ID NO: 1245200
guagguuuaggaugauaug

SEQ ID NO: 1544329 - RNA, 19 nt, Artificial Sequence
  Description of Artificial Sequence: Synthetic oligonucleotide
  Antisense strand to SEQ ID NO: 1544328
cauaucauccuaaaccuac

SEQ ID NO: 1544330 - RNA, 19 nt, Artificial Sequence
  Description of Artificial Sequence: Synthetic oligonucleotide
  Sense strand starting at position 3267 of SEQ ID NO: 1245200
uuaggaugauaugcuaagu

SEQ ID NO: 1544331 - RNA, 19 nt, Artificial Sequence
  Description of Artificial Sequence: Synthetic oligonucleotide
  Antisense strand to SEQ ID NO: 1544330
acuuagcauaucauccuaa

SEQ ID NO: 1544332 - RNA, 19 nt, Artificial Sequence
  Description of Artificial Sequence: Synthetic oligonucleotide
  Sense strand starting at position 3272 of SEQ ID NO: 1245200
augauaugcuaaguuagag

SEQ ID NO: 1544333 - RNA, 19 nt, Artificial Sequence
  Description of Artificial Sequence: Synthetic oligonucleotide
  Antisense strand to SEQ ID NO: 1544332
cucuaacuuagcauaucau

SEQ ID NO: 1544334 - RNA, 19 nt, Artificial Sequence
  Description of Artificial Sequence: Synthetic oligonucleotide
  Sense strand starting at position 3514 of SEQ ID NO: 1245200
acaucucuucuaugaagga

SEQ ID NO: 1544335 - RNA, 19 nt, Artificial Sequence
  Description of Artificial Sequence: Synthetic oligonucleotide
  Antisense strand to SEQ ID NO: 1544334
uccuucauagaagagaugu

SEQ ID NO: 1544336 - RNA, 19 nt, Artificial Sequence
  Description of Artificial Sequence: Synthetic oligonucleotide
  Sense strand starting at position 3630 of SEQ ID NO: 1245200
gcgaguccgaaugaagaga

SEQ ID NO: 1544337 - RNA, 19 nt, Artificial Sequence
  Description of Artificial Sequence: Synthetic oligonucleotide
  Antisense strand to SEQ ID NO: 1544336
ucucuucauucggacucgc

SEQ ID NO: 1544338 - RNA, 19 nt, Artificial Sequence
  Description of Artificial Sequence: Synthetic oligonucleotide
  Sense strand starting at position 3718 of SEQ ID NO: 1245200
uguuuaucuuaggucugga

SEQ ID NO: 1544339 - RNA, 19 nt, Artificial Sequence
  Description of Artificial Sequence: Synthetic oligonucleotide
  Antisense strand to SEQ ID NO: 1544338
uccagaccuaagauaaaca

SEQ ID NO: 1544340 - RNA, 19 nt, Artificial Sequence
  Description of Artificial Sequence: Synthetic oligonucleotide
  Sense strand starting at position 3758 of SEQ ID NO: 1245200
gcuuguccacgugagauaa

SEQ ID NO: 1544341 - RNA, 19 nt, Artificial Sequence
  Description of Artificial Sequence: Synthetic oligonucleotide
  Antisense strand to SEQ ID NO: 1544340
uuaucucacguggacaagc

SEQ ID NO: 1544342 - RNA, 19 nt, Artificial Sequence
  Description of Artificial Sequence: Synthetic oligonucleotide
  Sense strand starting at position 3818 of SEQ ID NO: 1245200
cugugugaugagcaugagu

SEQ ID NO: 1544343 - RNA, 19 nt, Artificial Sequence
  Description of Artificial Sequence: Synthetic oligonucleotide
  Antisense strand to SEQ ID NO: 1544342
acucaugcucaucacacag

SEQ ID NO: 1544344 - RNA, 19 nt, Artificial Sequence
  Description of Artificial Sequence: Synthetic oligonucleotide
  Sense strand starting at position 3831 of SEQ ID NO: 1245200
augagugagugguucauac

SEQ ID NO: 1544345 - RNA, 19 nt, Artificial Sequence
  Description of Artificial Sequence: Synthetic oligonucleotide
  Antisense strand to SEQ ID NO: 1544344
guaugaaccacucacucau

SEQ ID NO: 1544346 - RNA, 19 nt, Artificial Sequence
  Description of Artificial Sequence: Synthetic oligonucleotide
  Sense strand starting at position 3890 of SEQ ID NO: 1245200
gugaaauaugcauguuuaa

SEQ ID NO: 1544347 - RNA, 19 nt, Artificial Sequence
  Description of Artificial Sequence: Synthetic oligonucleotide
  Antisense strand to SEQ ID NO: 1544346
uuaaacaugcauauuucac

SEQ ID NO: 1544348 - RNA, 19 nt, Artificial Sequence
  Description of Artificial Sequence: Synthetic oligonucleotide
  Sense strand starting at position 31 of SEQ ID NO: 1245201
aauaguuugggaugugauc

SEQ ID NO: 1544349 - RNA, 19 nt, Artificial Sequence
  Description of Artificial Sequence: Synthetic oligonucleotide
  Antisense strand to SEQ ID NO: 1544348
gaucacaucccaaacuauu

SEQ ID NO: 1544350 - RNA, 19 nt, Artificial Sequence
  Description of Artificial Sequence: Synthetic oligonucleotide
  Sense strand starting at position 107 of SEQ ID NO: 1245201
gaaccagugcuuugaagaa

SEQ ID NO: 1544351 - RNA, 19 nt, Artificial Sequence
  Description of Artificial Sequence: Synthetic oligonucleotide
  Antisense strand to SEQ ID NO: 1544350
uucuucaaagcacugguuc

SEQ ID NO: 1544352 - RNA, 19 nt, Artificial Sequence
  Description of Artificial Sequence: Synthetic oligonucleotide
  Sense strand starting at position 111 of SEQ ID NO: 1245201
cagugcuuugaagaagcau

SEQ ID NO: 1544353 - RNA, 19 nt, Artificial Sequence
  Description of Artificial Sequence: Synthetic oligonucleotide
  Antisense strand to SEQ ID NO: 1544352
augcuucuucaaagcacug

SEQ ID NO: 1544354 - RNA, 19 nt, Artificial Sequence
  Description of Artificial Sequence: Synthetic oligonucleotide
  Sense strand starting at position 223 of SEQ ID NO: 1245201
cuuuaaucaguuuggcaga

SEQ ID NO: 1544355 - RNA, 19 nt, Artificial Sequence
  Description of Artificial Sequence: Synthetic oligonucleotide
  Antisense strand to SEQ ID NO: 1544354
ucugccaaacugauuaaag

SEQ ID NO: 1544356 - RNA, 19 nt, Artificial Sequence
  Description of Artificial Sequence: Synthetic oligonucleotide
  Sense strand starting at position 225 of SEQ ID NO: 1245201
uuaaucaguuuggcagaaa

SEQ ID NO: 1544357 - RNA, 19 nt, Artificial Sequence
  Description of Artificial Sequence: Synthetic oligonucleotide
  Antisense strand to SEQ ID NO: 1544356
uuucugccaaacugauuaa

SEQ ID NO: 1544358 - RNA, 19 nt, Artificial Sequence
  Description of Artificial Sequence: Synthetic oligonucleotide
  Sense strand starting at position 877 of SEQ ID NO: 1245201
ggcuucuccugaucaaaug

SEQ ID NO: 1544359 - RNA, 19 nt, Artificial Sequence
  Description of Artificial Sequence: Synthetic oligonucleotide
  Antisense strand to SEQ ID NO: 1544358
cauuugaucaggagaagcc

SEQ ID NO: 1544360 - RNA, 19 nt, Artificial Sequence
  Description of Artificial Sequence: Synthetic oligonucleotide
  Sense strand starting at position 937 of SEQ ID NO: 1245201
cacuguauugacgaaguca

SEQ ID NO: 1544361 - RNA, 19 nt, Artificial Sequence
  Description of Artificial Sequence: Synthetic oligonucleotide
  Antisense strand to SEQ ID NO: 1544360
ugacuucgucaauacagug

SEQ ID NO: 1544362 - RNA, 19 nt, Artificial Sequence
  Description of Artificial Sequence: Synthetic oligonucleotide
  Sense strand starting at position 1109 of SEQ ID NO: 1245201
cgaagaauuucccacuaag

SEQ ID NO: 1544363 - RNA, 19 nt, Artificial Sequence
  Description of Artificial Sequence: Synthetic oligonucleotide
  Antisense strand to SEQ ID NO: 1544362
cuuagugggaaauucuucg

SEQ ID NO: 1544364 - RNA, 19 nt, Artificial Sequence
  Description of Artificial Sequence: Synthetic oligonucleotide
  Sense strand starting at position 1187 of SEQ ID NO: 1245201
gaugcuugggcgcagaaua

SEQ ID NO: 1544365 - RNA, 19 nt, Artificial Sequence
  Description of Artificial Sequence: Synthetic oligonucleotide
  Antisense strand to SEQ ID NO: 1544364
uauucugcgcccaagcauc

SEQ ID NO: 1544366 - RNA, 19 nt, Artificial Sequence
  Description of Artificial Sequence: Synthetic oligonucleotide
  Sense strand starting at position 2120 of SEQ ID NO: 1245201
ccaggcugaauucgugaca

SEQ ID NO: 1544367 - RNA, 19 nt, Artificial Sequence
  Description of Artificial Sequence: Synthetic oligonucleotide
  Antisense strand to SEQ ID NO: 1544366
ugucacgaauucagccugg

SEQ ID NO: 1544368 - RNA, 19 nt, Artificial Sequence
  Description of Artificial Sequence: Synthetic oligonucleotide
  Sense strand starting at position 2127 of SEQ ID NO: 1245201
gaauucgugacagggaaga

SEQ ID NO: 1544369 - RNA, 19 nt, Artificial Sequence
  Description of Artificial Sequence: Synthetic oligonucleotide
  Antisense strand to SEQ ID NO: 1544368
ucuucccugucacgaauuc

SEQ ID NO: 1544370 - RNA, 19 nt, Artificial Sequence
  Description of Artificial Sequence: Synthetic oligonucleotide
  Sense strand starting at position 2160 of SEQ ID NO: 1245201
gaaauaaacuaagugguuu

SEQ ID NO: 1544371 - RNA, 19 nt, Artificial Sequence
  Description of Artificial Sequence: Synthetic oligonucleotide
  Antisense strand to SEQ ID NO: 1544370
aaaccacuuaguuuauuuc

SEQ ID NO: 1544372 - RNA, 19 nt, Artificial Sequence
  Description of Artificial Sequence: Synthetic oligonucleotide
  Sense strand starting at position 2246 of SEQ ID NO: 1245201
gugaauuaauuaccugcaa

SEQ ID NO: 1544373 - RNA, 19 nt, Artificial Sequence
  Description of Artificial Sequence: Synthetic oligonucleotide
  Antisense strand to SEQ ID NO: 1544372
uugcagguaauuaauucac

SEQ ID NO: 1544374 - RNA, 19 nt, Artificial Sequence
  Description of Artificial Sequence: Synthetic oligonucleotide
  Sense strand starting at position 2505 of SEQ ID NO: 1245201
aagcgaacuccagaagucu

SEQ ID NO: 1544375 - RNA, 19 nt, Artificial Sequence
  Description of Artificial Sequence: Synthetic oligonucleotide
  Antisense strand to SEQ ID NO: 1544374
agacuucuggaguucgcuu

SEQ ID NO: 1544376 - RNA, 19 nt, Artificial Sequence
  Description of Artificial Sequence: Synthetic oligonucleotide
  Sense strand starting at position 2637 of SEQ ID NO: 1245201
ggugcugaucgcagugauc

SEQ ID NO: 1544377 - RNA, 19 nt, Artificial Sequence
  Description of Artificial Sequence: Synthetic oligonucleotide
  Antisense strand to SEQ ID NO: 1544376
gaucacugcgaucagcacc

SEQ ID NO: 1544378 - RNA, 19 nt, Artificial Sequence
  Description of Artificial Sequence: Synthetic oligonucleotide
  Sense strand starting at position 2652 of SEQ ID NO: 1245201
gaucucuaguguuugaaac

SEQ ID NO: 1544379 - RNA, 19 nt, Artificial Sequence
  Description of Artificial Sequence: Synthetic oligonucleotide
  Antisense strand to SEQ ID NO: 1544378
guuucaaacacuagagauc

SEQ ID NO: 1544380 - RNA, 19 nt, Artificial Sequence
  Description of Artificial Sequence: Synthetic oligonucleotide
  Sense strand starting at position 2674 of SEQ ID NO: 1245201
aaggauuugucugaauccu

SEQ ID NO: 1544381 - RNA, 19 nt, Artificial Sequence
  Description of Artificial Sequence: Synthetic oligonucleotide
  Antisense strand to SEQ ID NO: 1544380
aggauucagacaaauccuu

SEQ ID NO: 1544382 - RNA, 19 nt, Artificial Sequence
  Description of Artificial Sequence: Synthetic oligonucleotide
  Sense strand starting at position 2757 of SEQ ID NO: 1245201
gggaaagauuguccauguc

SEQ ID NO: 1544383 - RNA, 19 nt, Artificial Sequence
  Description of Artificial Sequence: Synthetic oligonucleotide
  Antisense strand to SEQ ID NO: 1544382
gacauggacaaucuuuccc

SEQ ID NO: 1544384 - RNA, 19 nt, Artificial Sequence
  Description of Artificial Sequence: Synthetic oligonucleotide
  Sense strand starting at position 2803 of SEQ ID NO: 1245201
uucguaguggagugauuua

SEQ ID NO: 1544385 - RNA, 19 nt, Artificial Sequence
  Description of Artificial Sequence: Synthetic oligonucleotide
  Antisense strand to SEQ ID NO: 1544384
uaaaucacuccacuacgaa

SEQ ID NO: 1544386 - RNA, 19 nt, Artificial Sequence
  Description of Artificial Sequence: Synthetic oligonucleotide
  Sense strand starting at position 2874 of SEQ ID NO: 1245201
caaauuugagcgugucgag

SEQ ID NO: 1544387 - RNA, 19 nt, Artificial Sequence
  Description of Artificial Sequence: Synthetic oligonucleotide
  Antisense strand to SEQ ID NO: 1544386
cucgacacgcucaaauuug

SEQ ID NO: 1544388 - RNA, 19 nt, Artificial Sequence
  Description of Artificial Sequence: Synthetic oligonucleotide
  Sense strand starting at position 2890 of SEQ ID NO: 1245201
gagaguuaggccugagauu

SEQ ID NO: 1544389 - RNA, 19 nt, Artificial Sequence
  Description of Artificial Sequence: Synthetic oligonucleotide
  Antisense strand to SEQ ID NO: 1544388
aaucucaggccuaacucuc

SEQ ID NO: 1544390 - RNA, 19 nt, Artificial Sequence
  Description of Artificial Sequence: Synthetic oligonucleotide
  Sense strand starting at position 2891 of SEQ ID NO: 1245201
agaguuaggccugagauuc

SEQ ID NO: 1544391 - RNA, 19 nt, Artificial Sequence
  Description of Artificial Sequence: Synthetic oligonucleotide
  Antisense strand to SEQ ID NO: 1544390
gaaucucaggccuaacucu

SEQ ID NO: 1544392 - RNA, 19 nt, Artificial Sequence
  Description of Artificial Sequence: Synthetic oligonucleotide
  Sense strand starting at position 2935 of SEQ ID NO: 1245201
auggcauugcugcuaguuu

SEQ ID NO: 1544393 - RNA, 19 nt, Artificial Sequence
  Description of Artificial Sequence: Synthetic oligonucleotide
  Antisense strand to SEQ ID NO: 1544392
aaacuagcagcaaugccau

SEQ ID NO: 1544394 - RNA, 19 nt, Artificial Sequence
  Description of Artificial Sequence: Synthetic oligonucleotide
  Sense strand starting at position 2967 of SEQ ID NO: 1245201
ucaguagagagguguugau

SEQ ID NO: 1544395 - RNA, 19 nt, Artificial Sequence
  Description of Artificial Sequence: Synthetic oligonucleotide
  Antisense strand to SEQ ID NO: 1544394
aucaacaccucucuacuga

SEQ ID NO: 1544396 - RNA, 19 nt, Artificial Sequence
  Description of Artificial Sequence: Synthetic oligonucleotide
  Sense strand starting at position 3042 of SEQ ID NO: 1245201
auaugaucuuaggcaaguu

SEQ ID NO: 1544397 - RNA, 19 nt, Artificial Sequence
  Description of Artificial Sequence: Synthetic oligonucleotide
  Antisense strand to SEQ ID NO: 1544396
aacuugccuaagaucauau

SEQ ID NO: 1544398 - RNA, 19 nt, Artificial Sequence
  Description of Artificial Sequence: Synthetic oligonucleotide
  Sense strand starting at position 3114 of SEQ ID NO: 1245201
cucauaggguugucuugaa

SEQ ID NO: 1544399 - RNA, 19 nt, Artificial Sequence
  Description of Artificial Sequence: Synthetic oligonucleotide
  Antisense strand to SEQ ID NO: 1544398
uucaagacaacccuaugag

SEQ ID NO: 1544400 - RNA, 19 nt, Artificial Sequence
  Description of Artificial Sequence: Synthetic oligonucleotide
  Sense strand starting at position 3121 of SEQ ID NO: 1245201
gguugucuugaagauuaag

SEQ ID NO: 1544401 - RNA, 19 nt, Artificial Sequence
  Description of Artificial Sequence: Synthetic oligonucleotide
  Antisense strand to SEQ ID NO: 1544400
cuuaaucuucaagacaacc

SEQ ID NO: 1544402 - RNA, 19 nt, Artificial Sequence
  Description of Artificial Sequence: Synthetic oligonucleotide
  Sense strand starting at position 3204 of SEQ ID NO: 1245201
cuagcuaagucacuguaga

SEQ ID NO: 1544403 - RNA, 19 nt, Artificial Sequence
  Description of Artificial Sequence: Synthetic oligonucleotide
  Antisense strand to SEQ ID NO: 1544402
ucuacagugacuuagcuag

SEQ ID NO: 1544404 - RNA, 19 nt, Artificial Sequence
  Description of Artificial Sequence: Synthetic oligonucleotide
  Sense strand starting at position 3273 of SEQ ID NO: 1245201
gggagcaaugugugaaaug

SEQ ID NO: 1544405 - RNA, 19 nt, Artificial Sequence
  Description of Artificial Sequence: Synthetic oligonucleotide
  Antisense strand to SEQ ID NO: 1544404
cauuucacacauugcuccc

SEQ ID NO: 1544406 - RNA, 19 nt, Artificial Sequence
  Description of Artificial Sequence: Synthetic oligonucleotide
  Sense strand starting at position 3303 of SEQ ID NO: 1245201
gagguagccugcccaagaa

SEQ ID NO: 1544407 - RNA, 19 nt, Artificial Sequence
  Description of Artificial Sequence: Synthetic oligonucleotide
  Antisense strand to SEQ ID NO: 1544406
uucuugggcaggcuaccuc

SEQ ID NO: 1544408 - RNA, 19 nt, Artificial Sequence
  Description of Artificial Sequence: Synthetic oligonucleotide
  Sense strand starting at position 3345 of SEQ ID NO: 1245201
uagcaugugccagauguau

SEQ ID NO: 1544409 - RNA, 19 nt, Artificial Sequence
  Description of Artificial Sequence: Synthetic oligonucleotide
  Antisense strand to SEQ ID NO: 1544408
auacaucuggcacaugcua

SEQ ID NO: 1544410 - RNA, 19 nt, Artificial Sequence
  Description of Artificial Sequence: Synthetic oligonucleotide
  Sense strand starting at position 3351 of SEQ ID NO: 1245201
gugccagauguauaggaua

SEQ ID NO: 1544411 - RNA, 19 nt, Artificial Sequence
  Description of Artificial Sequence: Synthetic oligonucleotide
  Antisense strand to SEQ ID NO: 1544410
uauccuauacaucuggcac

SEQ ID NO: 1544412 - RNA, 19 nt, Artificial Sequence
  Description of Artificial Sequence: Synthetic oligonucleotide
  Sense strand starting at position 3353 of SEQ ID NO: 1245201
gccagauguauaggauaag

SEQ ID NO: 1544413 - RNA, 19 nt, Artificial Sequence
  Description of Artificial Sequence: Synthetic oligonucleotide
  Antisense strand to SEQ ID NO: 1544412
cuuauccuauacaucuggc

SEQ ID NO: 1544414 - RNA, 19 nt, Artificial Sequence
  Description of Artificial Sequence: Synthetic oligonucleotide
  Sense strand starting at position 3359 of SEQ ID NO: 1245201
uguauaggauaaguuugau

SEQ ID NO: 1544415 - RNA, 19 nt, Artificial Sequence
  Description of Artificial Sequence: Synthetic oligonucleotide
  Antisense strand to SEQ ID NO: 1544414
aucaaacuuauccuauaca

SEQ ID NO: 1544416 - RNA, 19 nt, Artificial Sequence
  Description of Artificial Sequence: Synthetic oligonucleotide
  Sense strand starting at position 3447 of SEQ ID NO: 1245201
augauaaauuaguucugag

SEQ ID NO: 1544417 - RNA, 19 nt, Artificial Sequence
  Description of Artificial Sequence: Synthetic oligonucleotide
  Antisense strand to SEQ ID NO: 1544416
cucagaacuaauuuaucau

SEQ ID NO: 1544418 - RNA, 19 nt, Artificial Sequence
  Description of Artificial Sequence: Synthetic oligonucleotide
  Sense strand starting at position 3518 of SEQ ID NO: 1245201
uugucacauggguaaucua

SEQ ID NO: 1544419 - RNA, 19 nt, Artificial Sequence
  Description of Artificial Sequence: Synthetic oligonucleotide
  Antisense strand to SEQ ID NO: 1544418
uagauuacccaugugacaa

SEQ ID NO: 1544420 - RNA, 19 nt, Artificial Sequence
  Description of Artificial Sequence: Synthetic oligonucleotide
  Sense strand starting at position 3562 of SEQ ID NO: 1245201
auuguuaagguuuaguaca

SEQ ID NO: 1544421 - RNA, 19 nt, Artificial Sequence
  Description of Artificial Sequence: Synthetic oligonucleotide
  Antisense strand to SEQ ID NO: 1544420
uguacuaaaccuuaacaau

SEQ ID NO: 1544422 - RNA, 19 nt, Artificial Sequence
  Description of Artificial Sequence: Synthetic oligonucleotide
  Sense strand starting at position 3564 of SEQ ID NO: 1245201
uguuaagguuuaguacauu

SEQ ID NO: 1544423 - RNA, 19 nt, Artificial Sequence
  Description of Artificial Sequence: Synthetic oligonucleotide
  Antisense strand to SEQ ID NO: 1544422
aauguacuaaaccuuaaca

SEQ ID NO: 1544424 - RNA, 19 nt, Artificial Sequence
  Description of Artificial Sequence: Synthetic oligonucleotide
  Sense strand starting at position 3732 of SEQ ID NO: 1245201
auaugaguguuuccucaga

SEQ ID NO: 1544425 - RNA, 19 nt, Artificial Sequence
  Description of Artificial Sequence: Synthetic oligonucleotide
  Antisense strand to SEQ ID NO: 1544424
ucugaggaaacacucauau

SEQ ID NO: 1544426 - RNA, 19 nt, Artificial Sequence
  Description of Artificial Sequence: Synthetic oligonucleotide
  Sense strand starting at position 3734 of SEQ ID NO: 1245201
augaguguuuccucagacu

SEQ ID NO: 1544427 - RNA, 19 nt, Artificial Sequence
  Description of Artificial Sequence: Synthetic oligonucleotide
  Antisense strand to SEQ ID NO: 1544426
agucugaggaaacacucau

SEQ ID NO: 1544428 - RNA, 19 nt, Artificial Sequence
  Description of Artificial Sequence: Synthetic oligonucleotide
  Sense strand starting at position 287 of SEQ ID NO: 1245202
gagugauagugauauuaaa

SEQ ID NO: 1544429 - RNA, 19 nt, Artificial Sequence
  Description of Artificial Sequence: Synthetic oligonucleotide
  Antisense strand to SEQ ID NO: 1544428
uuuaauaucacuaucacuc

SEQ ID NO: 1544430 - RNA, 19 nt, Artificial Sequence
  Description of Artificial Sequence: Synthetic oligonucleotide
  Sense strand starting at position 402 of SEQ ID NO: 1245202
acagguuauccuggaguaa

SEQ ID NO: 1544431 - RNA, 19 nt, Artificial Sequence
  Description of Artificial Sequence: Synthetic oligonucleotide
  Antisense strand to SEQ ID NO: 1544430
uuacuccaggauaaccugu

SEQ ID NO: 1544432 - RNA, 19 nt, Artificial Sequence
  Description of Artificial Sequence: Synthetic oligonucleotide
  Sense strand starting at position 403 of SEQ ID NO: 1245202
cagguuauccuggaguaau

SEQ ID NO: 1544433 - RNA, 19 nt, Artificial Sequence
  Description of Artificial Sequence: Synthetic oligonucleotide
  Antisense strand to SEQ ID NO: 1544432
auuacuccaggauaaccug

SEQ ID NO: 1544434 - RNA, 19 nt, Artificial Sequence
  Description of Artificial Sequence: Synthetic oligonucleotide
  Sense strand starting at position 446 of SEQ ID NO: 1245202
gcaagaaaccuuugguuaa

SEQ ID NO: 1544435 - RNA, 19 nt, Artificial Sequence
  Description of Artificial Sequence: Synthetic oligonucleotide
  Antisense strand to SEQ ID NO: 1544434
uuaaccaaagguuucuugc

SEQ ID NO: 1544436 - RNA, 19 nt, Artificial Sequence
  Description of Artificial Sequence: Synthetic oligonucleotide
  Sense strand starting at position 537 of SEQ ID NO: 1245202
cuggauguauaaucaagua

SEQ ID NO: 1544437 - RNA, 19 nt, Artificial Sequence
  Description of Artificial Sequence: Synthetic oligonucleotide
  Antisense strand to SEQ ID NO: 1544436
uacuugauuauacauccag

SEQ ID NO: 1544438 - RNA, 19 nt, Artificial Sequence
  Description of Artificial Sequence: Synthetic oligonucleotide
  Sense strand starting at position 686 of SEQ ID NO: 1245202
guuacaggaugucuaguua

SEQ ID NO: 1544439 - RNA, 19 nt, Artificial Sequence
  Description of Artificial Sequence: Synthetic oligonucleotide
  Antisense strand to SEQ ID NO: 1544438
uaacuagacauccuguaac

SEQ ID NO: 1544440 - RNA, 19 nt, Artificial Sequence
  Description of Artificial Sequence: Synthetic oligonucleotide
  Sense strand starting at position 750 of SEQ ID NO: 1245202
ggcagaauggugugcuaca

SEQ ID NO: 1544441 - RNA, 19 nt, Artificial Sequence
  Description of Artificial Sequence: Synthetic oligonucleotide
  Antisense strand to SEQ ID NO: 1544440
uguagcacaccauucugcc

SEQ ID NO: 1544442 - RNA, 19 nt, Artificial Sequence
  Description of Artificial Sequence: Synthetic oligonucleotide
  Sense strand starting at position 751 of SEQ ID NO: 1245202
gcagaauggugugcuacaa

SEQ ID NO: 1544443 - RNA, 19 nt, Artificial Sequence
  Description of Artificial Sequence: Synthetic oligonucleotide
  Antisense strand to SEQ ID NO: 1544442
uuguagcacaccauucugc

SEQ ID NO: 1544444 - RNA, 19 nt, Artificial Sequence
  Description of Artificial Sequence: Synthetic oligonucleotide
  Sense strand starting at position 794 of SEQ ID NO: 1245202
agauccugaucagauauua

SEQ ID NO: 1544445 - RNA, 19 nt, Artificial Sequence
  Description of Artificial Sequence: Synthetic oligonucleotide
  Antisense strand to SEQ ID NO: 1544444
uaauaucugaucaggaucu

SEQ ID NO: 1544446 - RNA, 19 nt, Artificial Sequence
  Description of Artificial Sequence: Synthetic oligonucleotide
  Sense strand starting at position 799 of SEQ ID NO: 1245202
cugaucagauauuaaaugu

SEQ ID NO: 1544447 - RNA, 19 nt, Artificial Sequence
  Description of Artificial Sequence: Synthetic oligonucleotide
  Antisense strand to SEQ ID NO: 1544446
acauuuaauaucugaucag

SEQ ID NO: 1544448 - RNA, 19 nt, Artificial Sequence
  Description of Artificial Sequence: Synthetic oligonucleotide
  Sense strand starting at position 833 of SEQ ID NO: 1245202
caguuugugcgugucaaca

SEQ ID NO: 1544449 - RNA, 19 nt, Artificial Sequence
  Description of Artificial Sequence: Synthetic oligonucleotide
  Antisense strand to SEQ ID NO: 1544448
uguugacacgcacaaacug

SEQ ID NO: 1544450 - RNA, 19 nt, Artificial Sequence
  Description of Artificial Sequence: Synthetic oligonucleotide
  Sense strand starting at position 849 of SEQ ID NO: 1245202
acaaacuacucgcuguaau

SEQ ID NO: 1544451 - RNA, 19 nt, Artificial Sequence
  Description of Artificial Sequence: Synthetic oligonucleotide
  Antisense strand to SEQ ID NO: 1544450
auuacagcgaguaguuugu

SEQ ID NO: 1544452 - RNA, 19 nt, Artificial Sequence
  Description of Artificial Sequence: Synthetic oligonucleotide
  Sense strand starting at position 859 of SEQ ID NO: 1245202
cgcuguaauuacuuccuau

SEQ ID NO: 1544453 - RNA, 19 nt, Artificial Sequence
  Description of Artificial Sequence: Synthetic oligonucleotide
  Antisense strand to SEQ ID NO: 1544452
auaggaaguaauuacagcg

SEQ ID NO: 1544454 - RNA, 19 nt, Artificial Sequence
  Description of Artificial Sequence: Synthetic oligonucleotide
  Sense strand starting at position 921 of SEQ ID NO: 1245202
gaguauguuucugcugggu

SEQ ID NO: 1544455 - RNA, 19 nt, Artificial Sequence
  Description of Artificial Sequence: Synthetic oligonucleotide
  Antisense strand to SEQ ID NO: 1544454
acccagcagaaacauacuc

SEQ ID NO: 1544456 - RNA, 19 nt, Artificial Sequence
  Description of Artificial Sequence: Synthetic oligonucleotide
  Sense strand starting at position 1013 of SEQ ID NO: 1245202
gaaaccaggcauugaagua

SEQ ID NO: 1544457 - RNA, 19 nt, Artificial Sequence
  Description of Artificial Sequence: Synthetic oligonucleotide
  Antisense strand to SEQ ID NO: 1544456
uacuucaaugccugguuuc

SEQ ID NO: 1544458 - RNA, 19 nt, Artificial Sequence
  Description of Artificial Sequence: Synthetic oligonucleotide
  Sense strand starting at position 1238 of SEQ ID NO: 1245202
cuuccuuugcuguagaguu

SEQ ID NO: 1544459 - RNA, 19 nt, Artificial Sequence
  Description of Artificial Sequence: Synthetic oligonucleotide
  Antisense strand to SEQ ID NO: 1544458
aacucuacagcaaaggaag

SEQ ID NO: 1544460 - RNA, 19 nt, Artificial Sequence
  Description of Artificial Sequence: Synthetic oligonucleotide
  Sense strand starting at position 1277 of SEQ ID NO: 1245202
ugaaguuaccaggaguugu

SEQ ID NO: 1544461 - RNA, 19 nt, Artificial Sequence
  Description of Artificial Sequence: Synthetic oligonucleotide
  Antisense strand to SEQ ID NO: 1544460
acaacuccugguaacuuca

SEQ ID NO: 1544462 - RNA, 19 nt, Artificial Sequence
  Description of Artificial Sequence: Synthetic oligonucleotide
  Sense strand starting at position 1347 of SEQ ID NO: 1245202
aauaguuugggaugugauc

SEQ ID NO: 1544463 - RNA, 19 nt, Artificial Sequence
  Description of Artificial Sequence: Synthetic oligonucleotide
  Antisense strand to SEQ ID NO: 1544462
gaucacaucccaaacuauu

SEQ ID NO: 1544464 - RNA, 19 nt, Artificial Sequence
  Description of Artificial Sequence: Synthetic oligonucleotide
  Sense strand starting at position 1423 of SEQ ID NO: 1245202
gaaccagugcuuugaagaa

SEQ ID NO: 1544465 - RNA, 19 nt, Artificial Sequence
  Description of Artificial Sequence: Synthetic oligonucleotide
  Antisense strand to SEQ ID NO: 1544464
uucuucaaagcacugguuc

SEQ ID NO: 1544466 - RNA, 19 nt, Artificial Sequence
  Description of Artificial Sequence: Synthetic oligonucleotide
  Sense strand starting at position 1427 of SEQ ID NO: 1245202
cagugcuuugaagaagcau

SEQ ID NO: 1544467 - RNA, 19 nt, Artificial Sequence
  Description of Artificial Sequence: Synthetic oligonucleotide
  Antisense strand to SEQ ID NO: 1544466
augcuucuucaaagcacug

SEQ ID NO: 1544468 - RNA, 19 nt, Artificial Sequence
  Description of Artificial Sequence: Synthetic oligonucleotide
  Sense strand starting at position 1539 of SEQ ID NO: 1245202
cuuuaaucaguuuggcaga

SEQ ID NO: 1544469 - RNA, 19 nt, Artificial Sequence
  Description of Artificial Sequence: Synthetic oligonucleotide
  Antisense strand to SEQ ID NO: 1544468
ucugccaaacugauuaaag

SEQ ID NO: 1544470 - RNA, 19 nt, Artificial Sequence
  Description of Artificial Sequence: Synthetic oligonucleotide
  Sense strand starting at position 1541 of SEQ ID NO: 1245202
uuaaucaguuuggcagaaa

SEQ ID NO: 1544471 - RNA, 19 nt, Artificial Sequence
  Description of Artificial Sequence: Synthetic oligonucleotide
  Antisense strand to SEQ ID NO: 1544470
uuucugccaaacugauuaa

SEQ ID NO: 1544472 - RNA, 19 nt, Artificial Sequence
  Description of Artificial Sequence: Synthetic oligonucleotide
  Sense strand starting at position 2042 of SEQ ID NO: 1245202
gugaacaagugauagagaa

SEQ ID NO: 1544473 - RNA, 19 nt, Artificial Sequence
  Description of Artificial Sequence: Synthetic oligonucleotide
  Antisense strand to SEQ ID NO: 1544472
uucucuaucacuuguucac

SEQ ID NO: 1544474 - RNA, 19 nt, Artificial Sequence
  Description of Artificial Sequence: Synthetic oligonucleotide
  Sense strand starting at position 2108 of SEQ ID NO: 1245202
aaaggcuaauguucguaau

SEQ ID NO: 1544475 - RNA, 19 nt, Artificial Sequence
  Description of Artificial Sequence: Synthetic oligonucleotide
  Antisense strand to SEQ ID NO: 1544474
auuacgaacauuagccuuu

SEQ ID NO: 1544476 - RNA, 19 nt, Artificial Sequence
  Description of Artificial Sequence: Synthetic oligonucleotide
  Sense strand starting at position 2109 of SEQ ID NO: 1245202
aaggcuaauguucguaaua

SEQ ID NO: 1544477 - RNA, 19 nt, Artificial Sequence
  Description of Artificial Sequence: Synthetic oligonucleotide
  Antisense strand to SEQ ID NO: 1544476
uauuacgaacauuagccuu

SEQ ID NO: 1544478 - RNA, 19 nt, Artificial Sequence
  Description of Artificial Sequence: Synthetic oligonucleotide
  Sense strand starting at position 2110 of SEQ ID NO: 1245202
aggcuaauguucguaauau

SEQ ID NO: 1544479 - RNA, 19 nt, Artificial Sequence
  Description of Artificial Sequence: Synthetic oligonucleotide
  Antisense strand to SEQ ID NO: 1544478
auauuacgaacauuagccu

SEQ ID NO: 1544480 - RNA, 19 nt, Artificial Sequence
  Description of Artificial Sequence: Synthetic oligonucleotide
  Sense strand starting at position 2193 of SEQ ID NO: 1245202
ggcuucuccugaucaaaug

SEQ ID NO: 1544481 - RNA, 19 nt, Artificial Sequence
  Description of Artificial Sequence: Synthetic oligonucleotide
  Antisense strand to SEQ ID NO: 1544480
cauuugaucaggagaagcc

SEQ ID NO: 1544482 - RNA, 19 nt, Artificial Sequence
  Description of Artificial Sequence: Synthetic oligonucleotide
  Sense strand starting at position 2253 of SEQ ID NO: 1245202
cacuguauugacgaaguca

SEQ ID NO: 1544483 - RNA, 19 nt, Artificial Sequence
  Description of Artificial Sequence: Synthetic oligonucleotide
  Antisense strand to SEQ ID NO: 1544482
ugacuucgucaauacagug

SEQ ID NO: 1544484 - RNA, 19 nt, Artificial Sequence
  Description of Artificial Sequence: Synthetic oligonucleotide
  Sense strand starting at position 2425 of SEQ ID NO: 1245202
cgaagaauuucccacuaag

SEQ ID NO: 1544485 - RNA, 19 nt, Artificial Sequence
  Description of Artificial Sequence: Synthetic oligonucleotide
  Antisense strand to SEQ ID NO: 1544484
cuuagugggaaauucuucg

SEQ ID NO: 1544486 - RNA, 19 nt, Artificial Sequence
  Description of Artificial Sequence: Synthetic oligonucleotide
  Sense strand starting at position 2503 of SEQ ID NO: 1245202
gaugcuugggcgcagaaua

SEQ ID NO: 1544487 - RNA, 19 nt, Artificial Sequence
  Description of Artificial Sequence: Synthetic oligonucleotide
  Antisense strand to SEQ ID NO: 1544486
uauucugcgcccaagcauc

SEQ ID NO: 1544488 - RNA, 19 nt, Artificial Sequence
  Description of Artificial Sequence: Synthetic oligonucleotide
  Sense strand starting at position 2595 of SEQ ID NO: 1245202
gagagugguggcugccgaa

SEQ ID NO: 1544489 - RNA, 19 nt, Artificial Sequence
  Description of Artificial Sequence: Synthetic oligonucleotide
  Antisense strand to SEQ ID NO: 1544488
uucggcagccaccacucuc

SEQ ID NO: 1544490 - RNA, 19 nt, Artificial Sequence
  Description of Artificial Sequence: Synthetic oligonucleotide
  Sense strand starting at position 3436 of SEQ ID NO: 1245202
ccaggcugaauucgugaca

SEQ ID NO: 1544491 - RNA, 19 nt, Artificial Sequence
  Description of Artificial Sequence: Synthetic oligonucleotide
  Antisense strand to SEQ ID NO: 1544490
ugucacgaauucagccugg

SEQ ID NO: 1544492 - RNA, 19 nt, Artificial Sequence
  Description of Artificial Sequence: Synthetic oligonucleotide
  Sense strand starting at position 3443 of SEQ ID NO: 1245202
gaauucgugacagggaaga

SEQ ID NO: 1544493 - RNA, 19 nt, Artificial Sequence
  Description of Artificial Sequence: Synthetic oligonucleotide
  Antisense strand to SEQ ID NO: 1544492
ucuucccugucacgaauuc

SEQ ID NO: 1544494 - RNA, 19 nt, Artificial Sequence
  Description of Artificial Sequence: Synthetic oligonucleotide
  Sense strand starting at position 3463 of SEQ ID NO: 1245202
agugccagcgggugaaaua

SEQ ID NO: 1544495 - RNA, 19 nt, Artificial Sequence
  Description of Artificial Sequence: Synthetic oligonucleotide
  Antisense strand to SEQ ID NO: 1544494
uauuucacccgcuggcacu

SEQ ID NO: 1544496 - RNA, 19 nt, Artificial Sequence
  Description of Artificial Sequence: Synthetic oligonucleotide
  Sense strand starting at position 3476 of SEQ ID NO: 1245202
gaaauaaacuaagugguuu

SEQ ID NO: 1544497 - RNA, 19 nt, Artificial Sequence
  Description of Artificial Sequence: Synthetic oligonucleotide
  Antisense strand to SEQ ID NO: 1544496
aaaccacuuaguuuauuuc

SEQ ID NO: 1544498 - RNA, 19 nt, Artificial Sequence
  Description of Artificial Sequence: Synthetic oligonucleotide
  Sense strand starting at position 3562 of SEQ ID NO: 1245202
gugaauuaauuaccugcaa

SEQ ID NO: 1544499 - RNA, 19 nt, Artificial Sequence
  Description of Artificial Sequence: Synthetic oligonucleotide
  Antisense strand to SEQ ID NO: 1544498
uugcagguaauuaauucac

SEQ ID NO: 1544500 - RNA, 19 nt, Artificial Sequence
  Description of Artificial Sequence: Synthetic oligonucleotide
  Sense strand starting at position 3821 of SEQ ID NO: 1245202
aagcgaacuccagaagucu

SEQ ID NO: 1544501 - RNA, 19 nt, Artificial Sequence
  Description of Artificial Sequence: Synthetic oligonucleotide
  Antisense strand to SEQ ID NO: 1544500
agacuucuggaguucgcuu

SEQ ID NO: 1544502 - RNA, 19 nt, Artificial Sequence
  Description of Artificial Sequence: Synthetic oligonucleotide
  Sense strand starting at position 3953 of SEQ ID NO: 1245202
ggugcugaucgcagugauc

SEQ ID NO: 1544503 - RNA, 19 nt, Artificial Sequence
  Description of Artificial Sequence: Synthetic oligonucleotide
  Antisense strand to SEQ ID NO: 1544502
gaucacugcgaucagcacc

SEQ ID NO: 1544504 - RNA, 19 nt, Artificial Sequence
  Description of Artificial Sequence: Synthetic oligonucleotide
  Sense strand starting at position 3962 of SEQ ID NO: 1245202
cgcagugaucucuaguguu

SEQ ID NO: 1544505 - RNA, 19 nt, Artificial Sequence
  Description of Artificial Sequence: Synthetic oligonucleotide
  Antisense strand to SEQ ID NO: 1544504
aacacuagagaucacugcg

SEQ ID NO: 1544506 - RNA, 19 nt, Artificial Sequence
  Description of Artificial Sequence: Synthetic oligonucleotide
  Sense strand starting at position 3968 of SEQ ID NO: 1245202
gaucucuaguguuugaaac

SEQ ID NO: 1544507 - RNA, 19 nt, Artificial Sequence
  Description of Artificial Sequence: Synthetic oligonucleotide
  Antisense strand to SEQ ID NO: 1544506
guuucaaacacuagagauc

SEQ ID NO: 1544508 - RNA, 19 nt, Artificial Sequence
  Description of Artificial Sequence: Synthetic oligonucleotide
  Sense strand starting at position 87 of SEQ ID NO: 1245203
ucaaacuagugagauuuaa

SEQ ID NO: 1544509 - RNA, 19 nt, Artificial Sequence
  Description of Artificial Sequence: Synthetic oligonucleotide
  Antisense strand to SEQ ID NO: 1544508
uuaaaucucacuaguuuga

SEQ ID NO: 1544510 - RNA, 19 nt, Artificial Sequence
  Description of Artificial Sequence: Synthetic oligonucleotide
  Sense strand starting at position 143 of SEQ ID NO: 1245203
aggcuuugggauggucaca

SEQ ID NO: 1544511 - RNA, 19 nt, Artificial Sequence
  Description of Artificial Sequence: Synthetic oligonucleotide
  Antisense strand to SEQ ID NO: 1544510
ugugaccaucccaaagccu

SEQ ID NO: 1544512 - RNA, 19 nt, Artificial Sequence
  Description of Artificial Sequence: Synthetic oligonucleotide
  Sense strand starting at position 214 of SEQ ID NO: 1245203
gggucucugaaaggauauc

SEQ ID NO: 1544513 - RNA, 19 nt, Artificial Sequence
  Description of Artificial Sequence: Synthetic oligonucleotide
  Antisense strand to SEQ ID NO: 1544512
gauauccuuucagagaccc

SEQ ID NO: 1544514 - RNA, 19 nt, Artificial Sequence
  Description of Artificial Sequence: Synthetic oligonucleotide
  Sense strand starting at position 292 of SEQ ID NO: 1245203
guaagaaugccauaucaac

SEQ ID NO: 1544515 - RNA, 19 nt, Artificial Sequence
  Description of Artificial Sequence: Synthetic oligonucleotide
  Antisense strand to SEQ ID NO: 1544514
guugauauggcauucuuac

SEQ ID NO: 1544516 - RNA, 19 nt, Artificial Sequence
  Description of Artificial Sequence: Synthetic oligonucleotide
  Sense strand starting at position 405 of SEQ ID NO: 1245203
gggcaaagguugcuuauaa

SEQ ID NO: 1544517 - RNA, 19 nt, Artificial Sequence
  Description of Artificial Sequence: Synthetic oligonucleotide
  Antisense strand to SEQ ID NO: 1544516
uuauaagcaaccuuugccc

SEQ ID NO: 1544518 - RNA, 19 nt, Artificial Sequence
  Description of Artificial Sequence: Synthetic oligonucleotide
  Sense strand starting at position 449 of SEQ ID NO: 1245203
acugcauuucuuuggccaa

SEQ ID NO: 1544519 - RNA, 19 nt, Artificial Sequence
  Description of Artificial Sequence: Synthetic oligonucleotide
  Antisense strand to SEQ ID NO: 1544518
uuggccaaagaaaugcagu

SEQ ID NO: 1544520 - RNA, 19 nt, Artificial Sequence
  Description of Artificial Sequence: Synthetic oligonucleotide
  Sense strand starting at position 546 of SEQ ID NO: 1245203
ccaucugaauguuuagaug

SEQ ID NO: 1544521 - RNA, 19 nt, Artificial Sequence
  Description of Artificial Sequence: Synthetic oligonucleotide
  Antisense strand to SEQ ID NO: 1544520
caucuaaacauucagaugg

SEQ ID NO: 1544522 - RNA, 19 nt, Artificial Sequence
  Description of Artificial Sequence: Synthetic oligonucleotide
  Sense strand starting at position 658 of SEQ ID NO: 1245203
agcauuguuagcguuuauc

SEQ ID NO: 1544523 - RNA, 19 nt, Artificial Sequence
  Description of Artificial Sequence: Synthetic oligonucleotide
  Antisense strand to SEQ ID NO: 1544522
gauaaacgcuaacaaugcu

SEQ ID NO: 1544524 - RNA, 19 nt, Artificial Sequence
  Description of Artificial Sequence: Synthetic oligonucleotide
  Sense strand starting at position 722 of SEQ ID NO: 1245203
aggaaauaugaccgaagcu

SEQ ID NO: 1544525 - RNA, 19 nt, Artificial Sequence
  Description of Artificial Sequence: Synthetic oligonucleotide
  Antisense strand to SEQ ID NO: 1544524
agcuucggucauauuuccu

SEQ ID NO: 1544526 - RNA, 19 nt, Artificial Sequence
  Description of Artificial Sequence: Synthetic oligonucleotide
  Sense strand starting at position 761 of SEQ ID NO: 1245203
ggccuugagcugcauaaga

SEQ ID NO: 1544527 - RNA, 19 nt, Artificial Sequence
  Description of Artificial Sequence: Synthetic oligonucleotide
  Antisense strand to SEQ ID NO: 1544526
ucuuaugcagcucaaggcc

SEQ ID NO: 1544528 - RNA, 19 nt, Artificial Sequence
  Description of Artificial Sequence: Synthetic oligonucleotide
  Sense strand starting at position 763 of SEQ ID NO: 1245203
ccuugagcugcauaagacu

SEQ ID NO: 1544529 - RNA, 19 nt, Artificial Sequence
  Description of Artificial Sequence: Synthetic oligonucleotide
  Antisense strand to SEQ ID NO: 1544528
agucuuaugcagcucaagg

SEQ ID NO: 1544530 - RNA, 19 nt, Artificial Sequence
  Description of Artificial Sequence: Synthetic oligonucleotide
  Sense strand starting at position 774 of SEQ ID NO: 1245203
auaagacucuagcugcauu

SEQ ID NO: 1544531 - RNA, 19 nt, Artificial Sequence
  Description of Artificial Sequence: Synthetic oligonucleotide
  Antisense strand to SEQ ID NO: 1544530
aaugcagcuagagucuuau

SEQ ID NO: 1544532 - RNA, 19 nt, Artificial Sequence
  Description of Artificial Sequence: Synthetic oligonucleotide
  Sense strand starting at position 841 of SEQ ID NO: 1245203
gcuuaucuacuggaacaua

SEQ ID NO: 1544533 - RNA, 19 nt, Artificial Sequence
  Description of Artificial Sequence: Synthetic oligonucleotide
  Antisense strand to SEQ ID NO: 1544532
uauguuccaguagauaagc

SEQ ID NO: 1544534 - RNA, 19 nt, Artificial Sequence
  Description of Artificial Sequence: Synthetic oligonucleotide
  Sense strand starting at position 851 of SEQ ID NO: 1245203
uggaacauauugccagaua

SEQ ID NO: 1544535 - RNA, 19 nt, Artificial Sequence
  Description of Artificial Sequence: Synthetic oligonucleotide
  Antisense strand to SEQ ID NO: 1544534
uaucuggcaauauguucca

SEQ ID NO: 1544536 - RNA, 19 nt, Artificial Sequence
  Description of Artificial Sequence: Synthetic oligonucleotide
  Sense strand starting at position 1177 of SEQ ID NO: 1245203
gcaccaaucagcgagcaga

SEQ ID NO: 1544537 - RNA, 19 nt, Artificial Sequence
  Description of Artificial Sequence: Synthetic oligonucleotide
  Antisense strand to SEQ ID NO: 1544536
ucugcucgcugauuggugc

SEQ ID NO: 1544538 - RNA, 19 nt, Artificial Sequence
  Description of Artificial Sequence: Synthetic oligonucleotide
  Sense strand starting at position 1180 of SEQ ID NO: 1245203
ccaaucagcgagcagaauu

SEQ ID NO: 1544539 - RNA, 19 nt, Artificial Sequence
  Description of Artificial Sequence: Synthetic oligonucleotide
  Antisense strand to SEQ ID NO: 1544538
aauucugcucgcugauugg

SEQ ID NO: 1544540 - RNA, 19 nt, Artificial Sequence
  Description of Artificial Sequence: Synthetic oligonucleotide
  Sense strand starting at position 1188 of SEQ ID NO: 1245203
cgagcagaauucuuacaaa

SEQ ID NO: 1544541 - RNA, 19 nt, Artificial Sequence
  Description of Artificial Sequence: Synthetic oligonucleotide
  Antisense strand to SEQ ID NO: 1544540
uuuguaagaauucugcucg

SEQ ID NO: 1544542 - RNA, 19 nt, Artificial Sequence
  Description of Artificial Sequence: Synthetic oligonucleotide
  Sense strand starting at position 1240 of SEQ ID NO: 1245203
ugcagcuuaaucuagagga

SEQ ID NO: 1544543 - RNA, 19 nt, Artificial Sequence
  Description of Artificial Sequence: Synthetic oligonucleotide
  Antisense strand to SEQ ID NO: 1544542
uccucuagauuaagcugca

SEQ ID NO: 1544544 - RNA, 19 nt, Artificial Sequence
  Description of Artificial Sequence: Synthetic oligonucleotide
  Sense strand starting at position 1550 of SEQ ID NO: 1245203
ggaaacagauaccaaauaa

SEQ ID NO: 1544545 - RNA, 19 nt, Artificial Sequence
  Description of Artificial Sequence: Synthetic oligonucleotide
  Antisense strand to SEQ ID NO: 1544544
uuauuugguaucuguuucc

SEQ ID NO: 1544546 - RNA, 19 nt, Artificial Sequence
  Description of Artificial Sequence: Synthetic oligonucleotide
  Sense strand starting at position 2338 of SEQ ID NO: 1245203
caauuaaacuuggucaggu

SEQ ID NO: 1544547 - RNA, 19 nt, Artificial Sequence
  Description of Artificial Sequence: Synthetic oligonucleotide
  Antisense strand to SEQ ID NO: 1544546
accugaccaaguuuaauug

SEQ ID NO: 1544548 - RNA, 19 nt, Artificial Sequence
  Description of Artificial Sequence: Synthetic oligonucleotide
  Sense strand starting at position 2339 of SEQ ID NO: 1245203
aauuaaacuuggucagguu

SEQ ID NO: 1544549 - RNA, 19 nt, Artificial Sequence
  Description of Artificial Sequence: Synthetic oligonucleotide
  Antisense strand to SEQ ID NO: 1544548
aaccugaccaaguuuaauu

SEQ ID NO: 1544550 - RNA, 19 nt, Artificial Sequence
  Description of Artificial Sequence: Synthetic oligonucleotide
  Sense strand starting at position 2340 of SEQ ID NO: 1245203
auuaaacuuggucagguuu

SEQ ID NO: 1544551 - RNA, 19 nt, Artificial Sequence
  Description of Artificial Sequence: Synthetic oligonucleotide
  Antisense strand to SEQ ID NO: 1544550
aaaccugaccaaguuuaau

SEQ ID NO: 1544552 - RNA, 19 nt, Artificial Sequence
  Description of Artificial Sequence: Synthetic oligonucleotide
  Sense strand starting at position 2731 of SEQ ID NO: 1245203
gugaucaccucacuuagua

SEQ ID NO: 1544553 - RNA, 19 nt, Artificial Sequence
  Description of Artificial Sequence: Synthetic oligonucleotide
  Antisense strand to SEQ ID NO: 1544552
uacuaagugaggugaucac

SEQ ID NO: 1544554 - RNA, 19 nt, Artificial Sequence
  Description of Artificial Sequence: Synthetic oligonucleotide
  Sense strand starting at position 2750 of SEQ ID NO: 1245203
uuugaaagugcuuaacauu

SEQ ID NO: 1544555 - RNA, 19 nt, Artificial Sequence
  Description of Artificial Sequence: Synthetic oligonucleotide
  Antisense strand to SEQ ID NO: 1544554
aauguuaagcacuuucaaa

SEQ ID NO: 1544556 - RNA, 19 nt, Artificial Sequence
  Description of Artificial Sequence: Synthetic oligonucleotide
  Sense strand starting at position 2802 of SEQ ID NO: 1245203
aaauauauuggcuauguga

SEQ ID NO: 1544557 - RNA, 19 nt, Artificial Sequence
  Description of Artificial Sequence: Synthetic oligonucleotide
  Antisense strand to SEQ ID NO: 1544556
ucacauagccaauauauuu

SEQ ID NO: 1544558 - RNA, 19 nt, Artificial Sequence
  Description of Artificial Sequence: Synthetic oligonucleotide
  Sense strand starting at position 2804 of SEQ ID NO: 1245203
auauauuggcuaugugaca

SEQ ID NO: 1544559 - RNA, 19 nt, Artificial Sequence
  Description of Artificial Sequence: Synthetic oligonucleotide
  Antisense strand to SEQ ID NO: 1544558
ugucacauagccaauauau

SEQ ID NO: 1544560 - RNA, 19 nt, Artificial Sequence
  Description of Artificial Sequence: Synthetic oligonucleotide
  Sense strand starting at position 2811 of SEQ ID NO: 1245203
ggcuaugugacagauacua

SEQ ID NO: 1544561 - RNA, 19 nt, Artificial Sequence
  Description of Artificial Sequence: Synthetic oligonucleotide
  Antisense strand to SEQ ID NO: 1544560
uaguaucugucacauagcc

SEQ ID NO: 1544562 - RNA, 19 nt, Artificial Sequence
  Description of Artificial Sequence: Synthetic oligonucleotide
  Sense strand starting at position 2869 of SEQ ID NO: 1245203
uaaguaaacugcuuaaggu

SEQ ID NO: 1544563 - RNA, 19 nt, Artificial Sequence
  Description of Artificial Sequence: Synthetic oligonucleotide
  Antisense strand to SEQ ID NO: 1544562
accuuaagcaguuuacuua

SEQ ID NO: 1544564 - RNA, 19 nt, Artificial Sequence
  Description of Artificial Sequence: Synthetic oligonucleotide
  Sense strand starting at position 2911 of SEQ ID NO: 1245203
ggagcuuccaagugacaug

SEQ ID NO: 1544565 - RNA, 19 nt, Artificial Sequence
  Description of Artificial Sequence: Synthetic oligonucleotide
  Antisense strand to SEQ ID NO: 1544564
caugucacuuggaagcucc

SEQ ID NO: 1544566 - RNA, 19 nt, Artificial Sequence
  Description of Artificial Sequence: Synthetic oligonucleotide
  Sense strand starting at position 2933 of SEQ ID NO: 1245203
uuaucaaugugacuggaca

SEQ ID NO: 1544567 - RNA, 19 nt, Artificial Sequence
  Description of Artificial Sequence: Synthetic oligonucleotide
  Antisense strand to SEQ ID NO: 1544566
uguccagucacauugauaa

SEQ ID NO: 1544568 - RNA, 19 nt, Artificial Sequence
  Description of Artificial Sequence: Synthetic oligonucleotide
  Sense strand starting at position 2950 of SEQ ID NO: 1245203
caguaaugaucuguaaugu

SEQ ID NO: 1544569 - RNA, 19 nt, Artificial Sequence
  Description of Artificial Sequence: Synthetic oligonucleotide
  Antisense strand to SEQ ID NO: 1544568
acauuacagaucauuacug

SEQ ID NO: 1544570 - RNA, 19 nt, Artificial Sequence
  Description of Artificial Sequence: Synthetic oligonucleotide
  Sense strand starting at position 2951 of SEQ ID NO: 1245203
aguaaugaucuguaaugug

SEQ ID NO: 1544571 - RNA, 19 nt, Artificial Sequence
  Description of Artificial Sequence: Synthetic oligonucleotide
  Antisense strand to SEQ ID NO: 1544570
cacauuacagaucauuacu

SEQ ID NO: 1544572 - RNA, 19 nt, Artificial Sequence
  Description of Artificial Sequence: Synthetic oligonucleotide
  Sense strand starting at position 2965 of SEQ ID NO: 1245203
augugagcucaauaaauau

SEQ ID NO: 1544573 - RNA, 19 nt, Artificial Sequence
  Description of Artificial Sequence: Synthetic oligonucleotide
  Antisense strand to SEQ ID NO: 1544572
auauuuauugagcucacau

SEQ ID NO: 1544574 - RNA, 19 nt, Artificial Sequence
  Description of Artificial Sequence: Synthetic oligonucleotide
  Sense strand starting at position 3064 of SEQ ID NO: 1245203
cagucuacggauuagauua

SEQ ID NO: 1544575 - RNA, 19 nt, Artificial Sequence
  Description of Artificial Sequence: Synthetic oligonucleotide
  Antisense strand to SEQ ID NO: 1544574
uaaucuaauccguagacug

SEQ ID NO: 1544576 - RNA, 19 nt, Artificial Sequence
  Description of Artificial Sequence: Synthetic oligonucleotide
  Sense strand starting at position 3108 of SEQ ID NO: 1245203
ucaguacuguccuccagag

SEQ ID NO: 1544577 - RNA, 19 nt, Artificial Sequence
  Description of Artificial Sequence: Synthetic oligonucleotide
  Antisense strand to SEQ ID NO: 1544576
cucuggaggacaguacuga

SEQ ID NO: 1544578 - RNA, 19 nt, Artificial Sequence
  Description of Artificial Sequence: Synthetic oligonucleotide
  Sense strand starting at position 3544 of SEQ ID NO: 1245203
aguauuaagcuaugacuca

SEQ ID NO: 1544579 - RNA, 19 nt, Artificial Sequence
  Description of Artificial Sequence: Synthetic oligonucleotide
  Antisense strand to SEQ ID NO: 1544578
ugagucauagcuuaauacu

SEQ ID NO: 1544580 - RNA, 19 nt, Artificial Sequence
  Description of Artificial Sequence: Synthetic oligonucleotide
  Sense strand starting at position 3572 of SEQ ID NO: 1245203
aucacuguaugguuuauca

SEQ ID NO: 1544581 - RNA, 19 nt, Artificial Sequence
  Description of Artificial Sequence: Synthetic oligonucleotide
  Antisense strand to SEQ ID NO: 1544580
ugauaaaccauacagugau

SEQ ID NO: 1544582 - RNA, 19 nt, Artificial Sequence
  Description of Artificial Sequence: Synthetic oligonucleotide
  Sense strand starting at position 3583 of SEQ ID NO: 1245203
guuuaucagcuuuaucauu

SEQ ID NO: 1544583 - RNA, 19 nt, Artificial Sequence
  Description of Artificial Sequence: Synthetic oligonucleotide
  Antisense strand to SEQ ID NO: 1544582
aaugauaaagcugauaaac

SEQ ID NO: 1544584 - RNA, 19 nt, Artificial Sequence
  Description of Artificial Sequence: Synthetic oligonucleotide
  Sense strand starting at position 3687 of SEQ ID NO: 1245203
gguaucaaguuucuggaau

SEQ ID NO: 1544585 - RNA, 19 nt, Artificial Sequence
  Description of Artificial Sequence: Synthetic oligonucleotide
  Antisense strand to SEQ ID NO: 1544584
auuccagaaacuugauacc

SEQ ID NO: 1544586 - RNA, 19 nt, Artificial Sequence
  Description of Artificial Sequence: Synthetic oligonucleotide
  Sense strand starting at position 3788 of SEQ ID NO: 1245203
uuccucuugggcuauuauu

SEQ ID NO: 1544587 - RNA, 19 nt, Artificial Sequence
  Description of Artificial Sequence: Synthetic oligonucleotide
  Antisense strand to SEQ ID NO: 1544586
aauaauagcccaagaggaa

SEQ ID NO: 1544588 - RNA, 19 nt, Artificial Sequence
  Description of Artificial Sequence: Synthetic oligonucleotide
  Sense strand starting at position 101 of SEQ ID NO: 1245204
cccaguaccucugguaaua

SEQ ID NO: 1544589 - RNA, 19 nt, Artificial Sequence
  Description of Artificial Sequence: Synthetic oligonucleotide
  Antisense strand to SEQ ID NO: 1544588
uauuaccagagguacuggg

SEQ ID NO: 1544590 - RNA, 19 nt, Artificial Sequence
  Description of Artificial Sequence: Synthetic oligonucleotide
  Sense strand starting at position 110 of SEQ ID NO: 1245204
ucugguaauaggugucuga

SEQ ID NO: 1544591 - RNA, 19 nt, Artificial Sequence
  Description of Artificial Sequence: Synthetic oligonucleotide
  Antisense strand to SEQ ID NO: 1544590
ucagacaccuauuaccaga

SEQ ID NO: 1544592 - RNA, 19 nt, Artificial Sequence
  Description of Artificial Sequence: Synthetic oligonucleotide
  Sense strand starting at position 114 of SEQ ID NO: 1245204
guaauaggugucugagcgu

SEQ ID NO: 1544593 - RNA, 19 nt, Artificial Sequence
  Description of Artificial Sequence: Synthetic oligonucleotide
  Antisense strand to SEQ ID NO: 1544592
acgcucagacaccuauuac

SEQ ID NO: 1544594 - RNA, 19 nt, Artificial Sequence
  Description of Artificial Sequence: Synthetic oligonucleotide
  Sense strand starting at position 155 of SEQ ID NO: 1245204
gaaagacuucgcggcgcuu

SEQ ID NO: 1544595 - RNA, 19 nt, Artificial Sequence
  Description of Artificial Sequence: Synthetic oligonucleotide
  Antisense strand to SEQ ID NO: 1544594
aagcgccgcgaagucuuuc

SEQ ID NO: 1544596 - RNA, 19 nt, Artificial Sequence
  Description of Artificial Sequence: Synthetic oligonucleotide
  Sense strand starting at position 320 of SEQ ID NO: 1245204
acugguauccauuagugcu

SEQ ID NO: 1544597 - RNA, 19 nt, Artificial Sequence
  Description of Artificial Sequence: Synthetic oligonucleotide
  Antisense strand to SEQ ID NO: 1544596
agcacuaauggauaccagu

SEQ ID NO: 1544598 - RNA, 19 nt, Artificial Sequence
  Description of Artificial Sequence: Synthetic oligonucleotide
  Sense strand starting at position 327 of SEQ ID NO: 1245204
uccauuagugcuugcccaa

SEQ ID NO: 1544599 - RNA, 19 nt, Artificial Sequence
  Description of Artificial Sequence: Synthetic oligonucleotide
  Antisense strand to SEQ ID NO: 1544598
uugggcaagcacuaaugga

SEQ ID NO: 1544600 - RNA, 19 nt, Artificial Sequence
  Description of Artificial Sequence: Synthetic oligonucleotide
  Sense strand starting at position 419 of SEQ ID NO: 1245204
cuauucugggccuaggaua

SEQ ID NO: 1544601 - RNA, 19 nt, Artificial Sequence
  Description of Artificial Sequence: Synthetic oligonucleotide
  Antisense strand to SEQ ID NO: 1544600
uauccuaggcccagaauag

SEQ ID NO: 1544602 - RNA, 19 nt, Artificial Sequence
  Description of Artificial Sequence: Synthetic oligonucleotide
  Sense strand starting at position 427 of SEQ ID NO: 1245204
ggccuaggauaucaucauu

SEQ ID NO: 1544603 - RNA, 19 nt, Artificial Sequence
  Description of Artificial Sequence: Synthetic oligonucleotide
  Antisense strand to SEQ ID NO: 1544602
aaugaugauauccuaggcc

SEQ ID NO: 1544604 - RNA, 19 nt, Artificial Sequence
  Description of Artificial Sequence: Synthetic oligonucleotide
  Sense strand starting at position 468 of SEQ ID NO: 1245204
ucuuauucucaguguccua

SEQ ID NO: 1544605 - RNA, 19 nt, Artificial Sequence
  Description of Artificial Sequence: Synthetic oligonucleotide
  Antisense strand to SEQ ID NO: 1544604
uaggacacugagaauaaga

SEQ ID NO: 1544606 - RNA, 19 nt, Artificial Sequence
  Description of Artificial Sequence: Synthetic oligonucleotide
  Sense strand starting at position 813 of SEQ ID NO: 1245204
cucgacuuccucugcgaga

SEQ ID NO: 1544607 - RNA, 19 nt, Artificial Sequence
  Description of Artificial Sequence: Synthetic oligonucleotide
  Antisense strand to SEQ ID NO: 1544606
ucucgcagaggaagucgag

SEQ ID NO: 1544608 - RNA, 19 nt, Artificial Sequence
  Description of Artificial Sequence: Synthetic oligonucleotide
  Sense strand starting at position 815 of SEQ ID NO: 1245204
cgacuuccucugcgagaca

SEQ ID NO: 1544609 - RNA, 19 nt, Artificial Sequence
  Description of Artificial Sequence: Synthetic oligonucleotide
  Antisense strand to SEQ ID NO: 1544608
ugucucgcagaggaagucg

SEQ ID NO: 1544610 - RNA, 19 nt, Artificial Sequence
  Description of Artificial Sequence: Synthetic oligonucleotide
  Sense strand starting at position 1120 of SEQ ID NO: 1245204
uguucuugucccgggauca

SEQ ID NO: 1544611 - RNA, 19 nt, Artificial Sequence
  Description of Artificial Sequence: Synthetic oligonucleotide
  Antisense strand to SEQ ID NO: 1544610
ugaucccgggacaagaaca

SEQ ID NO: 1544612 - RNA, 19 nt, Artificial Sequence
  Description of Artificial Sequence: Synthetic oligonucleotide
  Sense strand starting at position 1121 of SEQ ID NO: 1245204
guucuugucccgggaucau

SEQ ID NO: 1544613 - RNA, 19 nt, Artificial Sequence
  Description of Artificial Sequence: Synthetic oligonucleotide
  Antisense strand to SEQ ID NO: 1544612
augaucccgggacaagaac

SEQ ID NO: 1544614 - RNA, 19 nt, Artificial Sequence
  Description of Artificial Sequence: Synthetic oligonucleotide
  Sense strand starting at position 1227 of SEQ ID NO: 1245204
gccucuauuucuccuguca

SEQ ID NO: 1544615 - RNA, 19 nt, Artificial Sequence
  Description of Artificial Sequence: Synthetic oligonucleotide
  Antisense strand to SEQ ID NO: 1544614
ugacaggagaaauagaggc

SEQ ID NO: 1544616 - RNA, 19 nt, Artificial Sequence
  Description of Artificial Sequence: Synthetic oligonucleotide
  Sense strand starting at position 1264 of SEQ ID NO: 1245204
auuucucccucucagaguu

SEQ ID NO: 1544617 - RNA, 19 nt, Artificial Sequence
  Description of Artificial Sequence: Synthetic oligonucleotide
  Antisense strand to SEQ ID NO: 1544616
aacucugagagggagaaau

SEQ ID NO: 1544618 - RNA, 19 nt, Artificial Sequence
  Description of Artificial Sequence: Synthetic oligonucleotide
  Sense strand starting at position 1333 of SEQ ID NO: 1245204
gcguucugaucuccaccau

SEQ ID NO: 1544619 - RNA, 19 nt, Artificial Sequence
  Description of Artificial Sequence: Synthetic oligonucleotide
  Antisense strand to SEQ ID NO: 1544618
augguggagaucagaacgc

SEQ ID NO: 1544620 - RNA, 19 nt, Artificial Sequence
  Description of Artificial Sequence: Synthetic oligonucleotide
  Sense strand starting at position 1334 of SEQ ID NO: 1245204
cguucugaucuccaccauu

SEQ ID NO: 1544621 - RNA, 19 nt, Artificial Sequence
  Description of Artificial Sequence: Synthetic oligonucleotide
  Antisense strand to SEQ ID NO: 1544620
aaugguggagaucagaacg

SEQ ID NO: 1544622 - RNA, 19 nt, Artificial Sequence
  Description of Artificial Sequence: Synthetic oligonucleotide
  Sense strand starting at position 1382 of SEQ ID NO: 1245204
acuccuaccugucagaguu

SEQ ID NO: 1544623 - RNA, 19 nt, Artificial Sequence
  Description of Artificial Sequence: Synthetic oligonucleotide
  Antisense strand to SEQ ID NO: 1544622
aacucugacagguaggagu

SEQ ID NO: 1544624 - RNA, 19 nt, Artificial Sequence
  Description of Artificial Sequence: Synthetic oligonucleotide
  Sense strand starting at position 1438 of SEQ ID NO: 1245204
cccauuucuccucgucagu

SEQ ID NO: 1544625 - RNA, 19 nt, Artificial Sequence
  Description of Artificial Sequence: Synthetic oligonucleotide
  Antisense strand to SEQ ID NO: 1544624
acugacgaggagaaauggg

SEQ ID NO: 1544626 - RNA, 19 nt, Artificial Sequence
  Description of Artificial Sequence: Synthetic oligonucleotide
  Sense strand starting at position 1441 of SEQ ID NO: 1245204
auuucuccucgucaguauu

SEQ ID NO: 1544627 - RNA, 19 nt, Artificial Sequence
  Description of Artificial Sequence: Synthetic oligonucleotide
  Antisense strand to SEQ ID NO: 1544626
aauacugacgaggagaaau

SEQ ID NO: 1544628 - RNA, 19 nt, Artificial Sequence
  Description of Artificial Sequence: Synthetic oligonucleotide
  Sense strand starting at position 1516 of SEQ ID NO: 1245204
agcguucugagccacaauu

SEQ ID NO: 1544629 - RNA, 19 nt, Artificial Sequence
  Description of Artificial Sequence: Synthetic oligonucleotide
  Antisense strand to SEQ ID NO: 1544628
aauuguggcucagaacgcu

SEQ ID NO: 1544630 - RNA, 19 nt, Artificial Sequence
  Description of Artificial Sequence: Synthetic oligonucleotide
  Sense strand starting at position 1606 of SEQ ID NO: 1245204
gguaucuuccgccacucua

SEQ ID NO: 1544631 - RNA, 19 nt, Artificial Sequence
  Description of Artificial Sequence: Synthetic oligonucleotide
  Antisense strand to SEQ ID NO: 1544630
uagaguggcggaagauacc

SEQ ID NO: 1544632 - RNA, 19 nt, Artificial Sequence
  Description of Artificial Sequence: Synthetic oligonucleotide
  Sense strand starting at position 1804 of SEQ ID NO: 1245204
cgcacuauugccucgaugu

SEQ ID NO: 1544633 - RNA, 19 nt, Artificial Sequence
  Description of Artificial Sequence: Synthetic oligonucleotide
  Antisense strand to SEQ ID NO: 1544632
acaucgaggcaauagugcg

SEQ ID NO: 1544634 - RNA, 19 nt, Artificial Sequence
  Description of Artificial Sequence: Synthetic oligonucleotide
  Sense strand starting at position 1805 of SEQ ID NO: 1245204
gcacuauugccucgauguc

SEQ ID NO: 1544635 - RNA, 19 nt, Artificial Sequence
  Description of Artificial Sequence: Synthetic oligonucleotide
  Antisense strand to SEQ ID NO: 1544634
gacaucgaggcaauagugc

SEQ ID NO: 1544636 - RNA, 19 nt, Artificial Sequence
  Description of Artificial Sequence: Synthetic oligonucleotide
  Sense strand starting at position 2161 of SEQ ID NO: 1245204
gggucuauccuguguucgu

SEQ ID NO: 1544637 - RNA, 19 nt, Artificial Sequence
  Description of Artificial Sequence: Synthetic oligonucleotide
  Antisense strand to SEQ ID NO: 1544636
acgaacacaggauagaccc

SEQ ID NO: 1544638 - RNA, 19 nt, Artificial Sequence
  Description of Artificial Sequence: Synthetic oligonucleotide
  Sense strand starting at position 2522 of SEQ ID NO: 1245204
uauccagaagucuggaaca

SEQ ID NO: 1544639 - RNA, 19 nt, Artificial Sequence
  Description of Artificial Sequence: Synthetic oligonucleotide
  Antisense strand to SEQ ID NO: 1544638
uguuccagacuucuggaua

SEQ ID NO: 1544640 - RNA, 19 nt, Artificial Sequence
  Description of Artificial Sequence: Synthetic oligonucleotide
  Sense strand starting at position 2561 of SEQ ID NO: 1245204
gagacagcuuccuugguuu

SEQ ID NO: 1544641 - RNA, 19 nt, Artificial Sequence
  Description of Artificial Sequence: Synthetic oligonucleotide
  Antisense strand to SEQ ID NO: 1544640
aaaccaaggaagcugucuc

SEQ ID NO: 1544642 - RNA, 19 nt, Artificial Sequence
  Description of Artificial Sequence: Synthetic oligonucleotide
  Sense strand starting at position 2668 of SEQ ID NO: 1245204
gacagucccucugauaaag

SEQ ID NO: 1544643 - RNA, 19 nt, Artificial Sequence
  Description of Artificial Sequence: Synthetic oligonucleotide
  Antisense strand to SEQ ID NO: 1544642
cuuuaucagagggacuguc

SEQ ID NO: 1544644 - RNA, 19 nt, Artificial Sequence
  Description of Artificial Sequence: Synthetic oligonucleotide
  Sense strand starting at position 2781 of SEQ ID NO: 1245204
ucuggaaugcaggguguaa

SEQ ID NO: 1544645 - RNA, 19 nt, Artificial Sequence
  Description of Artificial Sequence: Synthetic oligonucleotide
  Antisense strand to SEQ ID NO: 1544644
uuacacccugcauuccaga

SEQ ID NO: 1544646 - RNA, 19 nt, Artificial Sequence
  Description of Artificial Sequence: Synthetic oligonucleotide
  Sense strand starting at position 2902 of SEQ ID NO: 1245204
cgcgguuugucauggcugu

SEQ ID NO: 1544647 - RNA, 19 nt, Artificial Sequence
  Description of Artificial Sequence: Synthetic oligonucleotide
  Antisense strand to SEQ ID NO: 1544646
acagccaugacaaaccgcg

SEQ ID NO: 1544648 - RNA, 19 nt, Artificial Sequence
  Description of Artificial Sequence: Synthetic oligonucleotide
  Sense strand starting at position 3117 of SEQ ID NO: 1245204
agcuucucccagcaguaau

SEQ ID NO: 1544649 - RNA, 19 nt, Artificial Sequence
  Description of Artificial Sequence: Synthetic oligonucleotide
  Antisense strand to SEQ ID NO: 1544648
auuacugcugggagaagcu

SEQ ID NO: 1544650 - RNA, 19 nt, Artificial Sequence
  Description of Artificial Sequence: Synthetic oligonucleotide
  Sense strand starting at position 3127 of SEQ ID NO: 1245204
agcaguaauggcgauugca

SEQ ID NO: 1544651 - RNA, 19 nt, Artificial Sequence
  Description of Artificial Sequence: Synthetic oligonucleotide
  Antisense strand to SEQ ID NO: 1544650
ugcaaucgccauuacugcu

SEQ ID NO: 1544652 - RNA, 19 nt, Artificial Sequence
  Description of Artificial Sequence: Synthetic oligonucleotide
  Sense strand starting at position 3256 of SEQ ID NO: 1245204
gaugaauagcggugauaag

SEQ ID NO: 1544653 - RNA, 19 nt, Artificial Sequence
  Description of Artificial Sequence: Synthetic oligonucleotide
  Antisense strand to SEQ ID NO: 1544652
cuuaucaccgcuauucauc

SEQ ID NO: 1544654 - RNA, 19 nt, Artificial Sequence
  Description of Artificial Sequence: Synthetic oligonucleotide
  Sense strand starting at position 3263 of SEQ ID NO: 1245204
agcggugauaagggagaau

SEQ ID NO: 1544655 - RNA, 19 nt, Artificial Sequence
  Description of Artificial Sequence: Synthetic oligonucleotide
  Antisense strand to SEQ ID NO: 1544654
auucucccuuaucaccgcu

SEQ ID NO: 1544656 - RNA, 19 nt, Artificial Sequence
  Description of Artificial Sequence: Synthetic oligonucleotide
  Sense strand starting at position 3549 of SEQ ID NO: 1245204
cucugaggauuauacacau

SEQ ID NO: 1544657 - RNA, 19 nt, Artificial Sequence
  Description of Artificial Sequence: Synthetic oligonucleotide
  Antisense strand to SEQ ID NO: 1544656
auguguauaauccucagag

SEQ ID NO: 1544658 - RNA, 19 nt, Artificial Sequence
  Description of Artificial Sequence: Synthetic oligonucleotide
  Sense strand starting at position 3782 of SEQ ID NO: 1245204
gcucucauacuggagggau

SEQ ID NO: 1544659 - RNA, 19 nt, Artificial Sequence
  Description of Artificial Sequence: Synthetic oligonucleotide
  Antisense strand to SEQ ID NO: 1544658
aucccuccaguaugagagc

SEQ ID NO: 1544660 - RNA, 19 nt, Artificial Sequence
  Description of Artificial Sequence: Synthetic oligonucleotide
  Sense strand starting at position 1 of SEQ ID NO: 1245205
ggauuaacuguaugugcau

SEQ ID NO: 1544661 - RNA, 19 nt, Artificial Sequence
  Description of Artificial Sequence: Synthetic oligonucleotide
  Antisense strand to SEQ ID NO: 1544660
augcacauacaguuaaucc

SEQ ID NO: 1544662 - RNA, 19 nt, Artificial Sequence
  Description of Artificial Sequence: Synthetic oligonucleotide
  Sense strand starting at position 2 of SEQ ID NO: 1245205
gauuaacuguaugugcaua

SEQ ID NO: 1544663 - RNA, 19 nt, Artificial Sequence
  Description of Artificial Sequence: Synthetic oligonucleotide
  Antisense strand to SEQ ID NO: 1544662
uaugcacauacaguuaauc

SEQ ID NO: 1544664 - RNA, 19 nt, Artificial Sequence
  Description of Artificial Sequence: Synthetic oligonucleotide
  Sense strand starting at position 4 of SEQ ID NO: 1245205
uuaacuguaugugcauaau

SEQ ID NO: 1544665 - RNA, 19 nt, Artificial Sequence
  Description of Artificial Sequence: Synthetic oligonucleotide
  Antisense strand to SEQ ID NO: 1544664
auuaugcacauacaguuaa

SEQ ID NO: 1544666 - RNA, 19 nt, Artificial Sequence
  Description of Artificial Sequence: Synthetic oligonucleotide
  Sense strand starting at position 108 of SEQ ID NO: 1245205
cccaguaccucugguaaua

SEQ ID NO: 1544667 - RNA, 19 nt, Artificial Sequence
  Description of Artificial Sequence: Synthetic oligonucleotide
  Antisense strand to SEQ ID NO: 1544666
uauuaccagagguacuggg

SEQ ID NO: 1544668 - RNA, 19 nt, Artificial Sequence
  Description of Artificial Sequence: Synthetic oligonucleotide
  Sense strand starting at position 117 of SEQ ID NO: 1245205
ucugguaauaggugucuga

SEQ ID NO: 1544669 - RNA, 19 nt, Artificial Sequence
  Description of Artificial Sequence: Synthetic oligonucleotide
  Antisense strand to SEQ ID NO: 1544668
ucagacaccuauuaccaga

SEQ ID NO: 1544670 - RNA, 19 nt, Artificial Sequence
  Description of Artificial Sequence: Synthetic oligonucleotide
  Sense strand starting at position 121 of SEQ ID NO: 1245205
guaauaggugucugagcgu

SEQ ID NO: 1544671 - RNA, 19 nt, Artificial Sequence
  Description of Artificial Sequence: Synthetic oligonucleotide
  Antisense strand to SEQ ID NO: 1544670
acgcucagacaccuauuac

SEQ ID NO: 1544672 - RNA, 19 nt, Artificial Sequence
  Description of Artificial Sequence: Synthetic oligonucleotide
  Sense strand starting at position 162 of SEQ ID NO: 1245205
gaaagacuucgcggcgcuu

SEQ ID NO: 1544673 - RNA, 19 nt, Artificial Sequence
  Description of Artificial Sequence: Synthetic oligonucleotide
  Antisense strand to SEQ ID NO: 1544672
aagcgccgcgaagucuuuc

SEQ ID NO: 1544674 - RNA, 19 nt, Artificial Sequence
  Description of Artificial Sequence: Synthetic oligonucleotide
  Sense strand starting at position 327 of SEQ ID NO: 1245205
acugguauccauuagugcu

SEQ ID NO: 1544675 - RNA, 19 nt, Artificial Sequence
  Description of Artificial Sequence: Synthetic oligonucleotide
  Antisense strand to SEQ ID NO: 1544674
agcacuaauggauaccagu

SEQ ID NO: 1544676 - RNA, 19 nt, Artificial Sequence
  Description of Artificial Sequence: Synthetic oligonucleotide
  Sense strand starting at position 334 of SEQ ID NO: 1245205
uccauuagugcuugcccaa

SEQ ID NO: 1544677 - RNA, 19 nt, Artificial Sequence
  Description of Artificial Sequence: Synthetic oligonucleotide
  Antisense strand to SEQ ID NO: 1544676
uugggcaagcacuaaugga

SEQ ID NO: 1544678 - RNA, 19 nt, Artificial Sequence
  Description of Artificial Sequence: Synthetic oligonucleotide
  Sense strand starting at position 426 of SEQ ID NO: 1245205
cuauucugggccuaggaua

SEQ ID NO: 1544679 - RNA, 19 nt, Artificial Sequence
  Description of Artificial Sequence: Synthetic oligonucleotide
  Antisense strand to SEQ ID NO: 1544678
uauccuaggcccagaauag

SEQ ID NO: 1544680 - RNA, 19 nt, Artificial Sequence
  Description of Artificial Sequence: Synthetic oligonucleotide
  Sense strand starting at position 434 of SEQ ID NO: 1245205
ggccuaggauaucaucauu

SEQ ID NO: 1544681 - RNA, 19 nt, Artificial Sequence
  Description of Artificial Sequence: Synthetic oligonucleotide
  Antisense strand to SEQ ID NO: 1544680
aaugaugauauccuaggcc

SEQ ID NO: 1544682 - RNA, 19 nt, Artificial Sequence
  Description of Artificial Sequence: Synthetic oligonucleotide
  Sense strand starting at position 475 of SEQ ID NO: 1245205
ucuuauucucaguguccua

SEQ ID NO: 1544683 - RNA, 19 nt, Artificial Sequence
  Description of Artificial Sequence: Synthetic oligonucleotide
  Antisense strand to SEQ ID NO: 1544682
uaggacacugagaauaaga

SEQ ID NO: 1544684 - RNA, 19 nt, Artificial Sequence
  Description of Artificial Sequence: Synthetic oligonucleotide
  Sense strand starting at position 820 of SEQ ID NO: 1245205
cucgacuuccucugcgaga

SEQ ID NO: 1544685 - RNA, 19 nt, Artificial Sequence
  Description of Artificial Sequence: Synthetic oligonucleotide
  Antisense strand to SEQ ID NO: 1544684
ucucgcagaggaagucgag

SEQ ID NO: 1544686 - RNA, 19 nt, Artificial Sequence
  Description of Artificial Sequence: Synthetic oligonucleotide
  Sense strand starting at position 822 of SEQ ID NO: 1245205
cgacuuccucugcgagaca

SEQ ID NO: 1544687 - RNA, 19 nt, Artificial Sequence
  Description of Artificial Sequence: Synthetic oligonucleotide
  Antisense strand to SEQ ID NO: 1544686
ugucucgcagaggaagucg

SEQ ID NO: 1544688 - RNA, 19 nt, Artificial Sequence
  Description of Artificial Sequence: Synthetic oligonucleotide
  Sense strand starting at position 1127 of SEQ ID NO: 1245205
uguucuugucccgggauca

SEQ ID NO: 1544689 - RNA, 19 nt, Artificial Sequence
  Description of Artificial Sequence: Synthetic oligonucleotide
  Antisense strand to SEQ ID NO: 1544688
ugaucccgggacaagaaca

SEQ ID NO: 1544690 - RNA, 19 nt, Artificial Sequence
  Description of Artificial Sequence: Synthetic oligonucleotide
  Sense strand starting at position 1128 of SEQ ID NO: 1245205
guucuugucccgggaucau

SEQ ID NO: 1544691 - RNA, 19 nt, Artificial Sequence
  Description of Artificial Sequence: Synthetic oligonucleotide
  Antisense strand to SEQ ID NO: 1544690
augaucccgggacaagaac

SEQ ID NO: 1544692 - RNA, 19 nt, Artificial Sequence
  Description of Artificial Sequence: Synthetic oligonucleotide
  Sense strand starting at position 1234 of SEQ ID NO: 1245205
gccucuauuucuccuguca

SEQ ID NO: 1544693 - RNA, 19 nt, Artificial Sequence
  Description of Artificial Sequence: Synthetic oligonucleotide
  Antisense strand to SEQ ID NO: 1544692
ugacaggagaaauagaggc

SEQ ID NO: 1544694 - RNA, 19 nt, Artificial Sequence
  Description of Artificial Sequence: Synthetic oligonucleotide
  Sense strand starting at position 1271 of SEQ ID NO: 1245205
auuucucccucucagaguu

SEQ ID NO: 1544695 - RNA, 19 nt, Artificial Sequence
  Description of Artificial Sequence: Synthetic oligonucleotide
  Antisense strand to SEQ ID NO: 1544694
aacucugagagggagaaau

SEQ ID NO: 1544696 - RNA, 19 nt, Artificial Sequence
  Description of Artificial Sequence: Synthetic oligonucleotide
  Sense strand starting at position 1340 of SEQ ID NO: 1245205
gcguucugaucuccaccau

SEQ ID NO: 1544697 - RNA, 19 nt, Artificial Sequence
  Description of Artificial Sequence: Synthetic oligonucleotide
  Antisense strand to SEQ ID NO: 1544696
augguggagaucagaacgc

SEQ ID NO: 1544698 - RNA, 19 nt, Artificial Sequence
  Description of Artificial Sequence: Synthetic oligonucleotide
  Sense strand starting at position 1341 of SEQ ID NO: 1245205
cguucugaucuccaccauu

SEQ ID NO: 1544699 - RNA, 19 nt, Artificial Sequence
  Description of Artificial Sequence: Synthetic oligonucleotide
  Antisense strand to SEQ ID NO: 1544698
aaugguggagaucagaacg

SEQ ID NO: 1544700 - RNA, 19 nt, Artificial Sequence
  Description of Artificial Sequence: Synthetic oligonucleotide
  Sense strand starting at position 1389 of SEQ ID NO: 1245205
acuccuaccugucagaguu

SEQ ID NO: 1544701 - RNA, 19 nt, Artificial Sequence
  Description of Artificial Sequence: Synthetic oligonucleotide
  Antisense strand to SEQ ID NO: 1544700
aacucugacagguaggagu

SEQ ID NO: 1544702 - RNA, 19 nt, Artificial Sequence
  Description of Artificial Sequence: Synthetic oligonucleotide
  Sense strand starting at position 1445 of SEQ ID NO: 1245205
cccauuucuccucgucagu

SEQ ID NO: 1544703 - RNA, 19 nt, Artificial Sequence
  Description of Artificial Sequence: Synthetic oligonucleotide
  Antisense strand to SEQ ID NO: 1544702
acugacgaggagaaauggg

SEQ ID NO: 1544704 - RNA, 19 nt, Artificial Sequence
  Description of Artificial Sequence: Synthetic oligonucleotide
  Sense strand starting at position 1448 of SEQ ID NO: 1245205
auuucuccucgucaguauu

SEQ ID NO: 1544705 - RNA, 19 nt, Artificial Sequence
  Description of Artificial Sequence: Synthetic oligonucleotide
  Antisense strand to SEQ ID NO: 1544704
aauacugacgaggagaaau

SEQ ID NO: 1544706 - RNA, 19 nt, Artificial Sequence
  Description of Artificial Sequence: Synthetic oligonucleotide
  Sense strand starting at position 1523 of SEQ ID NO: 1245205
agcguucugagccacaauu

SEQ ID NO: 1544707 - RNA, 19 nt, Artificial Sequence
  Description of Artificial Sequence: Synthetic oligonucleotide
  Antisense strand to SEQ ID NO: 1544706
aauuguggcucagaacgcu

SEQ ID NO: 1544708 - RNA, 19 nt, Artificial Sequence
  Description of Artificial Sequence: Synthetic oligonucleotide
  Sense strand starting at position 1613 of SEQ ID NO: 1245205
gguaucuuccgccacucua

SEQ ID NO: 1544709 - RNA, 19 nt, Artificial Sequence
  Description of Artificial Sequence: Synthetic oligonucleotide
  Antisense strand to SEQ ID NO: 1544708
uagaguggcggaagauacc

SEQ ID NO: 1544710 - RNA, 19 nt, Artificial Sequence
  Description of Artificial Sequence: Synthetic oligonucleotide
  Sense strand starting at position 1811 of SEQ ID NO: 1245205
cgcacuauugccucgaugu

SEQ ID NO: 1544711 - RNA, 19 nt, Artificial Sequence
  Description of Artificial Sequence: Synthetic oligonucleotide
  Antisense strand to SEQ ID NO: 1544710
acaucgaggcaauagugcg

SEQ ID NO: 1544712 - RNA, 19 nt, Artificial Sequence
  Description of Artificial Sequence: Synthetic oligonucleotide
  Sense strand starting at position 1812 of SEQ ID NO: 1245205
gcacuauugccucgauguc

SEQ ID NO: 1544713 - RNA, 19 nt, Artificial Sequence
  Description of Artificial Sequence: Synthetic oligonucleotide
  Antisense strand to SEQ ID NO: 1544712
gacaucgaggcaauagugc

SEQ ID NO: 1544714 - RNA, 19 nt, Artificial Sequence
  Description of Artificial Sequence: Synthetic oligonucleotide
  Sense strand starting at position 2168 of SEQ ID NO: 1245205
gggucuauccuguguucgu

SEQ ID NO: 1544715 - RNA, 19 nt, Artificial Sequence
  Description of Artificial Sequence: Synthetic oligonucleotide
  Antisense strand to SEQ ID NO: 1544714
acgaacacaggauagaccc

SEQ ID NO: 1544716 - RNA, 19 nt, Artificial Sequence
  Description of Artificial Sequence: Synthetic oligonucleotide
  Sense strand starting at position 2529 of SEQ ID NO: 1245205
uauccagaagucuggaaca

SEQ ID NO: 1544717 - RNA, 19 nt, Artificial Sequence
  Description of Artificial Sequence: Synthetic oligonucleotide
  Antisense strand to SEQ ID NO: 1544716
uguuccagacuucuggaua

SEQ ID NO: 1544718 - RNA, 19 nt, Artificial Sequence
  Description of Artificial Sequence: Synthetic oligonucleotide
  Sense strand starting at position 2568 of SEQ ID NO: 1245205
gagacagcuuccuugguuu

SEQ ID NO: 1544719 - RNA, 19 nt, Artificial Sequence
  Description of Artificial Sequence: Synthetic oligonucleotide
  Antisense strand to SEQ ID NO: 1544718
aaaccaaggaagcugucuc

SEQ ID NO: 1544720 - RNA, 19 nt, Artificial Sequence
  Description of Artificial Sequence: Synthetic oligonucleotide
  Sense strand starting at position 2675 of SEQ ID NO: 1245205
gacagucccucugauaaag

SEQ ID NO: 1544721 - RNA, 19 nt, Artificial Sequence
  Description of Artificial Sequence: Synthetic oligonucleotide
  Antisense strand to SEQ ID NO: 1544720
cuuuaucagagggacuguc

SEQ ID NO: 1544722 - RNA, 19 nt, Artificial Sequence
  Description of Artificial Sequence: Synthetic oligonucleotide
  Sense strand starting at position 2788 of SEQ ID NO: 1245205
ucuggaaugcaggguguaa

SEQ ID NO: 1544723 - RNA, 19 nt, Artificial Sequence
  Description of Artificial Sequence: Synthetic oligonucleotide
  Antisense strand to SEQ ID NO: 1544722
uuacacccugcauuccaga

SEQ ID NO: 1544724 - RNA, 19 nt, Artificial Sequence
  Description of Artificial Sequence: Synthetic oligonucleotide
  Sense strand starting at position 2909 of SEQ ID NO: 1245205
cgcgguuugucauggcugu

SEQ ID NO: 1544725 - RNA, 19 nt, Artificial Sequence
  Description of Artificial Sequence: Synthetic oligonucleotide
  Antisense strand to SEQ ID NO: 1544724
acagccaugacaaaccgcg

SEQ ID NO: 1544726 - RNA, 19 nt, Artificial Sequence
  Description of Artificial Sequence: Synthetic oligonucleotide
  Sense strand starting at position 3124 of SEQ ID NO: 1245205
agcuucucccagcaguaau

SEQ ID NO: 1544727 - RNA, 19 nt, Artificial Sequence
  Description of Artificial Sequence: Synthetic oligonucleotide
  Antisense strand to SEQ ID NO: 1544726
auuacugcugggagaagcu

SEQ ID NO: 1544728 - RNA, 19 nt, Artificial Sequence
  Description of Artificial Sequence: Synthetic oligonucleotide
  Sense strand starting at position 3134 of SEQ ID NO: 1245205
agcaguaauggcgauugca

SEQ ID NO: 1544729 - RNA, 19 nt, Artificial Sequence
  Description of Artificial Sequence: Synthetic oligonucleotide
  Antisense strand to SEQ ID NO: 1544728
ugcaaucgccauuacugcu

SEQ ID NO: 1544730 - RNA, 19 nt, Artificial Sequence
  Description of Artificial Sequence: Synthetic oligonucleotide
  Sense strand starting at position 3263 of SEQ ID NO: 1245205
gaugaauagcggugauaag

SEQ ID NO: 1544731 - RNA, 19 nt, Artificial Sequence
  Description of Artificial Sequence: Synthetic oligonucleotide
  Antisense strand to SEQ ID NO: 1544730
cuuaucaccgcuauucauc

SEQ ID NO: 1544732 - RNA, 19 nt, Artificial Sequence
  Description of Artificial Sequence: Synthetic oligonucleotide
  Sense strand starting at position 3270 of SEQ ID NO: 1245205
agcggugauaagggagaau

SEQ ID NO: 1544733 - RNA, 19 nt, Artificial Sequence
  Description of Artificial Sequence: Synthetic oligonucleotide
  Antisense strand to SEQ ID NO: 1544732
auucucccuuaucaccgcu

SEQ ID NO: 1544734 - RNA, 19 nt, Artificial Sequence
  Description of Artificial Sequence: Synthetic oligonucleotide
  Sense strand starting at position 3556 of SEQ ID NO: 1245205
cucugaggauuauacacau

SEQ ID NO: 1544735 - RNA, 19 nt, Artificial Sequence
  Description of Artificial Sequence: Synthetic oligonucleotide
  Antisense strand to SEQ ID NO: 1544734
auguguauaauccucagag

SEQ ID NO: 1544736 - RNA, 19 nt, Artificial Sequence
  Description of Artificial Sequence: Synthetic oligonucleotide
  Sense strand starting at position 3789 of SEQ ID NO: 1245205
gcucucauacuggagggau

SEQ ID NO: 1544737 - RNA, 19 nt, Artificial Sequence
  Description of Artificial Sequence: Synthetic oligonucleotide
  Antisense strand to SEQ ID NO: 1544736
aucccuccaguaugagagc

SEQ ID NO: 1544738 - RNA, 19 nt, Artificial Sequence
  Description of Artificial Sequence: Synthetic oligonucleotide
  Sense strand starting at position 69 of SEQ ID NO: 1245206
gaugguuacugugugacua

SEQ ID NO: 1544739 - RNA, 19 nt, Artificial Sequence
  Description of Artificial Sequence: Synthetic oligonucleotide
  Antisense strand to SEQ ID NO: 1544738
uagucacacaguaaccauc

SEQ ID NO: 1544740 - RNA, 19 nt, Artificial Sequence
  Description of Artificial Sequence: Synthetic oligonucleotide
  Sense strand starting at position 70 of SEQ ID NO: 1245206
augguuacugugugacuaa

SEQ ID NO: 1544741 - RNA, 19 nt, Artificial Sequence
  Description of Artificial Sequence: Synthetic oligonucleotide
  Antisense strand to SEQ ID NO: 1544740
uuagucacacaguaaccau

SEQ ID NO: 1544742 - RNA, 19 nt, Artificial Sequence
  Description of Artificial Sequence: Synthetic oligonucleotide
  Sense strand starting at position 92 of SEQ ID NO: 1245206
gcagguugugucuagaaca

SEQ ID NO: 1544743 - RNA, 19 nt, Artificial Sequence
  Description of Artificial Sequence: Synthetic oligonucleotide
  Antisense strand to SEQ ID NO: 1544742
uguucuagacacaaccugc

SEQ ID NO: 1544744 - RNA, 19 nt, Artificial Sequence
  Description of Artificial Sequence: Synthetic oligonucleotide
  Sense strand starting at position 99 of SEQ ID NO: 1245206
gugucuagaacauggauau

SEQ ID NO: 1544745 - RNA, 19 nt, Artificial Sequence
  Description of Artificial Sequence: Synthetic oligonucleotide
  Antisense strand to SEQ ID NO: 1544744
auauccauguucuagacac

SEQ ID NO: 1544746 - RNA, 19 nt, Artificial Sequence
  Description of Artificial Sequence: Synthetic oligonucleotide
  Sense strand starting at position 100 of SEQ ID NO: 1245206
ugucuagaacauggauaug

SEQ ID NO: 1544747 - RNA, 19 nt, Artificial Sequence
  Description of Artificial Sequence: Synthetic oligonucleotide
  Antisense strand to SEQ ID NO: 1544746
cauauccauguucuagaca

SEQ ID NO: 1544748 - RNA, 19 nt, Artificial Sequence
  Description of Artificial Sequence: Synthetic oligonucleotide
  Sense strand starting at position 266 of SEQ ID NO: 1245206
ggugguugacuguagguaa

SEQ ID NO: 1544749 - RNA, 19 nt, Artificial Sequence
  Description of Artificial Sequence: Synthetic oligonucleotide
  Antisense strand to SEQ ID NO: 1544748
uuaccuacagucaaccacc

SEQ ID NO: 1544750 - RNA, 19 nt, Artificial Sequence
  Description of Artificial Sequence: Synthetic oligonucleotide
  Sense strand starting at position 269 of SEQ ID NO: 1245206
gguugacuguagguaacua

SEQ ID NO: 1544751 - RNA, 19 nt, Artificial Sequence
  Description of Artificial Sequence: Synthetic oligonucleotide
  Antisense strand to SEQ ID NO: 1544750
uaguuaccuacagucaacc

SEQ ID NO: 1544752 - RNA, 19 nt, Artificial Sequence
  Description of Artificial Sequence: Synthetic oligonucleotide
  Sense strand starting at position 321 of SEQ ID NO: 1245206
agacuacuguauucuggau

SEQ ID NO: 1544753 - RNA, 19 nt, Artificial Sequence
  Description of Artificial Sequence: Synthetic oligonucleotide
  Antisense strand to SEQ ID NO: 1544752
auccagaauacaguagucu

SEQ ID NO: 1544754 - RNA, 19 nt, Artificial Sequence
  Description of Artificial Sequence: Synthetic oligonucleotide
  Sense strand starting at position 352 of SEQ ID NO: 1245206
guaauaaacugucuuugau

SEQ ID NO: 1544755 - RNA, 19 nt, Artificial Sequence
  Description of Artificial Sequence: Synthetic oligonucleotide
  Antisense strand to SEQ ID NO: 1544754
aucaaagacaguuuauuac

SEQ ID NO: 1544756 - RNA, 19 nt, Artificial Sequence
  Description of Artificial Sequence: Synthetic oligonucleotide
  Sense strand starting at position 362 of SEQ ID NO: 1245206
gucuuugaucuguaaccca

SEQ ID NO: 1544757 - RNA, 19 nt, Artificial Sequence
  Description of Artificial Sequence: Synthetic oligonucleotide
  Antisense strand to SEQ ID NO: 1544756
uggguuacagaucaaagac

SEQ ID NO: 1544758 - RNA, 19 nt, Artificial Sequence
  Description of Artificial Sequence: Synthetic oligonucleotide
  Sense strand starting at position 367 of SEQ ID NO: 1245206
ugaucuguaacccaggagu

SEQ ID NO: 1544759 - RNA, 19 nt, Artificial Sequence
  Description of Artificial Sequence: Synthetic oligonucleotide
  Antisense strand to SEQ ID NO: 1544758
acuccuggguuacagauca

SEQ ID NO: 1544760 - RNA, 19 nt, Artificial Sequence
  Description of Artificial Sequence: Synthetic oligonucleotide
  Sense strand starting at position 436 of SEQ ID NO: 1245206
uuguccuaagaaugaaauc

SEQ ID NO: 1544761 - RNA, 19 nt, Artificial Sequence
  Description of Artificial Sequence: Synthetic oligonucleotide
  Antisense strand to SEQ ID NO: 1544760
gauuucauucuuaggacaa

SEQ ID NO: 1544762 - RNA, 19 nt, Artificial Sequence
  Description of Artificial Sequence: Synthetic oligonucleotide
  Sense strand starting at position 452 of SEQ ID NO: 1245206
aucucagguucuuuauagu

SEQ ID NO: 1544763 - RNA, 19 nt, Artificial Sequence
  Description of Artificial Sequence: Synthetic oligonucleotide
  Antisense strand to SEQ ID NO: 1544762
acuauaaagaaccugagau

SEQ ID NO: 1544764 - RNA, 19 nt, Artificial Sequence
  Description of Artificial Sequence: Synthetic oligonucleotide
  Sense strand starting at position 672 of SEQ ID NO: 1245206
uguugacucucauuaguua

SEQ ID NO: 1544765 - RNA, 19 nt, Artificial Sequence
  Description of Artificial Sequence: Synthetic oligonucleotide
  Antisense strand to SEQ ID NO: 1544764
uaacuaaugagagucaaca

SEQ ID NO: 1544766 - RNA, 19 nt, Artificial Sequence
  Description of Artificial Sequence: Synthetic oligonucleotide
  Sense strand starting at position 673 of SEQ ID NO: 1245206
guugacucucauuaguuau

SEQ ID NO: 1544767 - RNA, 19 nt, Artificial Sequence
  Description of Artificial Sequence: Synthetic oligonucleotide
  Antisense strand to SEQ ID NO: 1544766
auaacuaaugagagucaac

SEQ ID NO: 1544768 - RNA, 19 nt, Artificial Sequence
  Description of Artificial Sequence: Synthetic oligonucleotide
  Sense strand starting at position 848 of SEQ ID NO: 1245206
ugauuauuugcauggucuu

SEQ ID NO: 1544769 - RNA, 19 nt, Artificial Sequence
  Description of Artificial Sequence: Synthetic oligonucleotide
  Antisense strand to SEQ ID NO: 1544768
aagaccaugcaaauaauca

SEQ ID NO: 1544770 - RNA, 19 nt, Artificial Sequence
  Description of Artificial Sequence: Synthetic oligonucleotide
  Sense strand starting at position 849 of SEQ ID NO: 1245206
gauuauuugcauggucuuu

SEQ ID NO: 1544771 - RNA, 19 nt, Artificial Sequence
  Description of Artificial Sequence: Synthetic oligonucleotide
  Antisense strand to SEQ ID NO: 1544770
aaagaccaugcaaauaauc

SEQ ID NO: 1544772 - RNA, 19 nt, Artificial Sequence
  Description of Artificial Sequence: Synthetic oligonucleotide
  Sense strand starting at position 851 of SEQ ID NO: 1245206
uuauuugcauggucuuuga

SEQ ID NO: 1544773 - RNA, 19 nt, Artificial Sequence
  Description of Artificial Sequence: Synthetic oligonucleotide
  Antisense strand to SEQ ID NO: 1544772
ucaaagaccaugcaaauaa

SEQ ID NO: 1544774 - RNA, 19 nt, Artificial Sequence
  Description of Artificial Sequence: Synthetic oligonucleotide
  Sense strand starting at position 855 of SEQ ID NO: 1245206
uugcauggucuuugaauga

SEQ ID NO: 1544775 - RNA, 19 nt, Artificial Sequence
  Description of Artificial Sequence: Synthetic oligonucleotide
  Antisense strand to SEQ ID NO: 1544774
ucauucaaagaccaugcaa

SEQ ID NO: 1544776 - RNA, 19 nt, Artificial Sequence
  Description of Artificial Sequence: Synthetic oligonucleotide
  Sense strand starting at position 862 of SEQ ID NO: 1245206
gucuuugaaugacucaaac

SEQ ID NO: 1544777 - RNA, 19 nt, Artificial Sequence
  Description of Artificial Sequence: Synthetic oligonucleotide
  Antisense strand to SEQ ID NO: 1544776
guuugagucauucaaagac

SEQ ID NO: 1544778 - RNA, 19 nt, Artificial Sequence
  Description of Artificial Sequence: Synthetic oligonucleotide
  Sense strand starting at position 1194 of SEQ ID NO: 1245206
cuuuauugaucgucauuuc

SEQ ID NO: 1544779 - RNA, 19 nt, Artificial Sequence
  Description of Artificial Sequence: Synthetic oligonucleotide
  Antisense strand to SEQ ID NO: 1544778
gaaaugacgaucaauaaag

SEQ ID NO: 1544780 - RNA, 19 nt, Artificial Sequence
  Description of Artificial Sequence: Synthetic oligonucleotide
  Sense strand starting at position 1327 of SEQ ID NO: 1245206
cugguuguaccauaauucu

SEQ ID NO: 1544781 - RNA, 19 nt, Artificial Sequence
  Description of Artificial Sequence: Synthetic oligonucleotide
  Antisense strand to SEQ ID NO: 1544780
agaauuaugguacaaccag

SEQ ID NO: 1544782 - RNA, 19 nt, Artificial Sequence
  Description of Artificial Sequence: Synthetic oligonucleotide
  Sense strand starting at position 1330 of SEQ ID NO: 1245206
guuguaccauaauucugau

SEQ ID NO: 1544783 - RNA, 19 nt, Artificial Sequence
  Description of Artificial Sequence: Synthetic oligonucleotide
  Antisense strand to SEQ ID NO: 1544782
aucagaauuaugguacaac

SEQ ID NO: 1544784 - RNA, 19 nt, Artificial Sequence
  Description of Artificial Sequence: Synthetic oligonucleotide
  Sense strand starting at position 1372 of SEQ ID NO: 1245206
acagcauuguaacucagau

SEQ ID NO: 1544785 - RNA, 19 nt, Artificial Sequence
  Description of Artificial Sequence: Synthetic oligonucleotide
  Antisense strand to SEQ ID NO: 1544784
aucugaguuacaaugcugu

SEQ ID NO: 1544786 - RNA, 19 nt, Artificial Sequence
  Description of Artificial Sequence: Synthetic oligonucleotide
  Sense strand starting at position 1385 of SEQ ID NO: 1245206
ucagauaaccagcaaaguu

SEQ ID NO: 1544787 - RNA, 19 nt, Artificial Sequence
  Description of Artificial Sequence: Synthetic oligonucleotide
  Antisense strand to SEQ ID NO: 1544786
aacuuugcugguuaucuga

SEQ ID NO: 1544788 - RNA, 19 nt, Artificial Sequence
  Description of Artificial Sequence: Synthetic oligonucleotide
  Sense strand starting at position 1401 of SEQ ID NO: 1245206
guuuaucugccuuguauuu

SEQ ID NO: 1544789 - RNA, 19 nt, Artificial Sequence
  Description of Artificial Sequence: Synthetic oligonucleotide
  Antisense strand to SEQ ID NO: 1544788
aaauacaaggcagauaaac

SEQ ID NO: 1544790 - RNA, 19 nt, Artificial Sequence
  Description of Artificial Sequence: Synthetic oligonucleotide
  Sense strand starting at position 1432 of SEQ ID NO: 1245206
acgacauagucuucucaca

SEQ ID NO: 1544791 - RNA, 19 nt, Artificial Sequence
  Description of Artificial Sequence: Synthetic oligonucleotide
  Antisense strand to SEQ ID NO: 1544790
ugugagaagacuaugucgu

SEQ ID NO: 1544792 - RNA, 19 nt, Artificial Sequence
  Description of Artificial Sequence: Synthetic oligonucleotide
  Sense strand starting at position 1562 of SEQ ID NO: 1245206
accuguuuacaguauuaaa

SEQ ID NO: 1544793 - RNA, 19 nt, Artificial Sequence
  Description of Artificial Sequence: Synthetic oligonucleotide
  Antisense strand to SEQ ID NO: 1544792
uuuaauacuguaaacaggu

SEQ ID NO: 1544794 - RNA, 19 nt, Artificial Sequence
  Description of Artificial Sequence: Synthetic oligonucleotide
  Sense strand starting at position 1611 of SEQ ID NO: 1245206
aaauacaugcauugaguga

SEQ ID NO: 1544795 - RNA, 19 nt, Artificial Sequence
  Description of Artificial Sequence: Synthetic oligonucleotide
  Antisense strand to SEQ ID NO: 1544794
ucacucaaugcauguauuu

SEQ ID NO: 1544796 - RNA, 19 nt, Artificial Sequence
  Description of Artificial Sequence: Synthetic oligonucleotide
  Sense strand starting at position 1615 of SEQ ID NO: 1245206
acaugcauugagugacagu

SEQ ID NO: 1544797 - RNA, 19 nt, Artificial Sequence
  Description of Artificial Sequence: Synthetic oligonucleotide
  Antisense strand to SEQ ID NO: 1544796
acugucacucaaugcaugu

SEQ ID NO: 1544798 - RNA, 19 nt, Artificial Sequence
  Description of Artificial Sequence: Synthetic oligonucleotide
  Sense strand starting at position 1647 of SEQ ID NO: 1245206
guacguauucuugaauaau

SEQ ID NO: 1544799 - RNA, 19 nt, Artificial Sequence
  Description of Artificial Sequence: Synthetic oligonucleotide
  Antisense strand to SEQ ID NO: 1544798
auuauucaagaauacguac

SEQ ID NO: 1544800 - RNA, 19 nt, Artificial Sequence
  Description of Artificial Sequence: Synthetic oligonucleotide
  Sense strand starting at position 1650 of SEQ ID NO: 1245206
cguauucuugaauaaucac

SEQ ID NO: 1544801 - RNA, 19 nt, Artificial Sequence
  Description of Artificial Sequence: Synthetic oligonucleotide
  Antisense strand to SEQ ID NO: 1544800
gugauuauucaagaauacg

SEQ ID NO: 1544802 - RNA, 19 nt, Artificial Sequence
  Description of Artificial Sequence: Synthetic oligonucleotide
  Sense strand starting at position 1743 of SEQ ID NO: 1245206
gcuaauaaggauuaacugu

SEQ ID NO: 1544803 - RNA, 19 nt, Artificial Sequence
  Description of Artificial Sequence: Synthetic oligonucleotide
  Antisense strand to SEQ ID NO: 1544802
acaguuaauccuuauuagc

SEQ ID NO: 1544804 - RNA, 19 nt, Artificial Sequence
  Description of Artificial Sequence: Synthetic oligonucleotide
  Sense strand starting at position 2077 of SEQ ID NO: 1245206
acugguauccauuagugcu

SEQ ID NO: 1544805 - RNA, 19 nt, Artificial Sequence
  Description of Artificial Sequence: Synthetic oligonucleotide
  Antisense strand to SEQ ID NO: 1544804
agcacuaauggauaccagu

SEQ ID NO: 1544806 - RNA, 19 nt, Artificial Sequence
  Description of Artificial Sequence: Synthetic oligonucleotide
  Sense strand starting at position 2176 of SEQ ID NO: 1245206
cuauucugggccuaggaua

SEQ ID NO: 1544807 - RNA, 19 nt, Artificial Sequence
  Description of Artificial Sequence: Synthetic oligonucleotide
  Antisense strand to SEQ ID NO: 1544806
uauccuaggcccagaauag

SEQ ID NO: 1544808 - RNA, 19 nt, Artificial Sequence
  Description of Artificial Sequence: Synthetic oligonucleotide
  Sense strand starting at position 2984 of SEQ ID NO: 1245206
gccucuauuucuccuguca

SEQ ID NO: 1544809 - RNA, 19 nt, Artificial Sequence
  Description of Artificial Sequence: Synthetic oligonucleotide
  Antisense strand to SEQ ID NO: 1544808
ugacaggagaaauagaggc

SEQ ID NO: 1544810 - RNA, 19 nt, Artificial Sequence
  Description of Artificial Sequence: Synthetic oligonucleotide
  Sense strand starting at position 3091 of SEQ ID NO: 1245206
cguucugaucuccaccauu

SEQ ID NO: 1544811 - RNA, 19 nt, Artificial Sequence
  Description of Artificial Sequence: Synthetic oligonucleotide
  Antisense strand to SEQ ID NO: 1544810
aaugguggagaucagaacg

SEQ ID NO: 1544812 - RNA, 19 nt, Artificial Sequence
  Description of Artificial Sequence: Synthetic oligonucleotide
  Sense strand starting at position 3195 of SEQ ID NO: 1245206
cccauuucuccucgucagu

SEQ ID NO: 1544813 - RNA, 19 nt, Artificial Sequence
  Description of Artificial Sequence: Synthetic oligonucleotide
  Antisense strand to SEQ ID NO: 1544812
acugacgaggagaaauggg

SEQ ID NO: 1544814 - RNA, 19 nt, Artificial Sequence
  Description of Artificial Sequence: Synthetic oligonucleotide
  Sense strand starting at position 3198 of SEQ ID NO: 1245206
auuucuccucgucaguauu

SEQ ID NO: 1544815 - RNA, 19 nt, Artificial Sequence
  Description of Artificial Sequence: Synthetic oligonucleotide
  Antisense strand to SEQ ID NO: 1544814
aauacugacgaggagaaau

SEQ ID NO: 1544816 - RNA, 19 nt, Artificial Sequence
  Description of Artificial Sequence: Synthetic oligonucleotide
  Sense strand starting at position 3561 of SEQ ID NO: 1245206
cgcacuauugccucgaugu

SEQ ID NO: 1544817 - RNA, 19 nt, Artificial Sequence
  Description of Artificial Sequence: Synthetic oligonucleotide
  Antisense strand to SEQ ID NO: 1544816
acaucgaggcaauagugcg

SEQ ID NO: 1544818 - RNA, 19 nt, Artificial Sequence
  Description of Artificial Sequence: Synthetic oligonucleotide
  Sense strand starting at position 302 of SEQ ID NO: 1245207
cuaucaauagcauggcuua

SEQ ID NO: 1544819 - RNA, 19 nt, Artificial Sequence
  Description of Artificial Sequence: Synthetic oligonucleotide
  Antisense strand to SEQ ID NO: 1544818
uaagccaugcuauugauag

SEQ ID NO: 1544820 - RNA, 19 nt, Artificial Sequence
  Description of Artificial Sequence: Synthetic oligonucleotide
  Sense strand starting at position 305 of SEQ ID NO: 1245207
ucaauagcauggcuuauua

SEQ ID NO: 1544821 - RNA, 19 nt, Artificial Sequence
  Description of Artificial Sequence: Synthetic oligonucleotide
  Antisense strand to SEQ ID NO: 1544820
uaauaagccaugcuauuga

SEQ ID NO: 1544822 - RNA, 19 nt, Artificial Sequence
  Description of Artificial Sequence: Synthetic oligonucleotide
  Sense strand starting at position 339 of SEQ ID NO: 1245207
guguauuaaguccacggau

SEQ ID NO: 1544823 - RNA, 19 nt, Artificial Sequence
  Description of Artificial Sequence: Synthetic oligonucleotide
  Antisense strand to SEQ ID NO: 1544822
auccguggacuuaauacac

SEQ ID NO: 1544824 - RNA, 19 nt, Artificial Sequence
  Description of Artificial Sequence: Synthetic oligonucleotide
  Sense strand starting at position 352 of SEQ ID NO: 1245207
acggaugucaauugccaua

SEQ ID NO: 1544825 - RNA, 19 nt, Artificial Sequence
  Description of Artificial Sequence: Synthetic oligonucleotide
  Antisense strand to SEQ ID NO: 1544824
uauggcaauugacauccgu

SEQ ID NO: 1544826 - RNA, 19 nt, Artificial Sequence
  Description of Artificial Sequence: Synthetic oligonucleotide
  Sense strand starting at position 370 of SEQ ID NO: 1245207
aggcacuuucuugagcuua

SEQ ID NO: 1544827 - RNA, 19 nt, Artificial Sequence
  Description of Artificial Sequence: Synthetic oligonucleotide
  Antisense strand to SEQ ID NO: 1544826
uaagcucaagaaagugccu

SEQ ID NO: 1544828 - RNA, 19 nt, Artificial Sequence
  Description of Artificial Sequence: Synthetic oligonucleotide
  Sense strand starting at position 415 of SEQ ID NO: 1245207
gcagcaugaccacgggauu

SEQ ID NO: 1544829 - RNA, 19 nt, Artificial Sequence
  Description of Artificial Sequence: Synthetic oligonucleotide
  Antisense strand to SEQ ID NO: 1544828
aaucccguggucaugcugc

SEQ ID NO: 1544830 - RNA, 19 nt, Artificial Sequence
  Description of Artificial Sequence: Synthetic oligonucleotide
  Sense strand starting at position 539 of SEQ ID NO: 1245207
uccuuuguauuaucgaaua

SEQ ID NO: 1544831 - RNA, 19 nt, Artificial Sequence
  Description of Artificial Sequence: Synthetic oligonucleotide
  Antisense strand to SEQ ID NO: 1544830
uauucgauaauacaaagga

SEQ ID NO: 1544832 - RNA, 19 nt, Artificial Sequence
  Description of Artificial Sequence: Synthetic oligonucleotide
  Sense strand starting at position 544 of SEQ ID NO: 1245207
uguauuaucgaauauguag

SEQ ID NO: 1544833 - RNA, 19 nt, Artificial Sequence
  Description of Artificial Sequence: Synthetic oligonucleotide
  Antisense strand to SEQ ID NO: 1544832
cuacauauucgauaauaca

SEQ ID NO: 1544834 - RNA, 19 nt, Artificial Sequence
  Description of Artificial Sequence: Synthetic oligonucleotide
  Sense strand starting at position 714 of SEQ ID NO: 1245207
agaguauauucugcaauac

SEQ ID NO: 1544835 - RNA, 19 nt, Artificial Sequence
  Description of Artificial Sequence: Synthetic oligonucleotide
  Antisense strand to SEQ ID NO: 1544834
guauugcagaauauacucu

SEQ ID NO: 1544836 - RNA, 19 nt, Artificial Sequence
  Description of Artificial Sequence: Synthetic oligonucleotide
  Sense strand starting at position 783 of SEQ ID NO: 1245207
aacuuucuuggaugaagua

SEQ ID NO: 1544837 - RNA, 19 nt, Artificial Sequence
  Description of Artificial Sequence: Synthetic oligonucleotide
  Antisense strand to SEQ ID NO: 1544836
uacuucauccaagaaaguu

SEQ ID NO: 1544838 - RNA, 19 nt, Artificial Sequence
  Description of Artificial Sequence: Synthetic oligonucleotide
  Sense strand starting at position 805 of SEQ ID NO: 1245207
gaaaccuuguuacuguaga

SEQ ID NO: 1544839 - RNA, 19 nt, Artificial Sequence
  Description of Artificial Sequence: Synthetic oligonucleotide
  Antisense strand to SEQ ID NO: 1544838
ucuacaguaacaagguuuc

SEQ ID NO: 1544840 - RNA, 19 nt, Artificial Sequence
  Description of Artificial Sequence: Synthetic oligonucleotide
  Sense strand starting at position 911 of SEQ ID NO: 1245207
uauaguuucgaugaauuac

SEQ ID NO: 1544841 - RNA, 19 nt, Artificial Sequence
  Description of Artificial Sequence: Synthetic oligonucleotide
  Antisense strand to SEQ ID NO: 1544840
guaauucaucgaaacuaua

SEQ ID NO: 1544842 - RNA, 19 nt, Artificial Sequence
  Description of Artificial Sequence: Synthetic oligonucleotide
  Sense strand starting at position 1001 of SEQ ID NO: 1245207
cgacgccuuccacauaaga

SEQ ID NO: 1544843 - RNA, 19 nt, Artificial Sequence
  Description of Artificial Sequence: Synthetic oligonucleotide
  Antisense strand to SEQ ID NO: 1544842
ucuuauguggaaggcgucg

SEQ ID NO: 1544844 - RNA, 19 nt, Artificial Sequence
  Description of Artificial Sequence: Synthetic oligonucleotide
  Sense strand starting at position 1219 of SEQ ID NO: 1245207
cagggagguaccugaagua

SEQ ID NO: 1544845 - RNA, 19 nt, Artificial Sequence
  Description of Artificial Sequence: Synthetic oligonucleotide
  Antisense strand to SEQ ID NO: 1544844
uacuucagguaccucccug

SEQ ID NO: 1544846 - RNA, 19 nt, Artificial Sequence
  Description of Artificial Sequence: Synthetic oligonucleotide
  Sense strand starting at position 2337 of SEQ ID NO: 1245207
uugacagauucuccuggaa

SEQ ID NO: 1544847 - RNA, 19 nt, Artificial Sequence
  Description of Artificial Sequence: Synthetic oligonucleotide
  Antisense strand to SEQ ID NO: 1544846
uuccaggagaaucugucaa

SEQ ID NO: 1544848 - RNA, 19 nt, Artificial Sequence
  Description of Artificial Sequence: Synthetic oligonucleotide
  Sense strand starting at position 2388 of SEQ ID NO: 1245207
uuggaauaugcccaugagu

SEQ ID NO: 1544849 - RNA, 19 nt, Artificial Sequence
  Description of Artificial Sequence: Synthetic oligonucleotide
  Antisense strand to SEQ ID NO: 1544848
acucaugggcauauuccaa

SEQ ID NO: 1544850 - RNA, 19 nt, Artificial Sequence
  Description of Artificial Sequence: Synthetic oligonucleotide
  Sense strand starting at position 2390 of SEQ ID NO: 1245207
ggaauaugcccaugaguca

SEQ ID NO: 1544851 - RNA, 19 nt, Artificial Sequence
  Description of Artificial Sequence: Synthetic oligonucleotide
  Antisense strand to SEQ ID NO: 1544850
ugacucaugggcauauucc

SEQ ID NO: 1544852 - RNA, 19 nt, Artificial Sequence
  Description of Artificial Sequence: Synthetic oligonucleotide
  Sense strand starting at position 2474 of SEQ ID NO: 1245207
agaugucuuugucuaauac

SEQ ID NO: 1544853 - RNA, 19 nt, Artificial Sequence
  Description of Artificial Sequence: Synthetic oligonucleotide
  Antisense strand to SEQ ID NO: 1544852
guauuagacaaagacaucu

SEQ ID NO: 1544854 - RNA, 19 nt, Artificial Sequence
  Description of Artificial Sequence: Synthetic oligonucleotide
  Sense strand starting at position 2556 of SEQ ID NO: 1245207
gucacaagccuuuaggaaa

SEQ ID NO: 1544855 - RNA, 19 nt, Artificial Sequence
  Description of Artificial Sequence: Synthetic oligonucleotide
  Antisense strand to SEQ ID NO: 1544854
uuuccuaaaggcuugugac

SEQ ID NO: 1544856 - RNA, 19 nt, Artificial Sequence
  Description of Artificial Sequence: Synthetic oligonucleotide
  Sense strand starting at position 2567 of SEQ ID NO: 1245207
uuaggaaacugugugguau

SEQ ID NO: 1544857 - RNA, 19 nt, Artificial Sequence
  Description of Artificial Sequence: Synthetic oligonucleotide
  Antisense strand to SEQ ID NO: 1544856
auaccacacaguuuccuaa

SEQ ID NO: 1544858 - RNA, 19 nt, Artificial Sequence
  Description of Artificial Sequence: Synthetic oligonucleotide
  Sense strand starting at position 2568 of SEQ ID NO: 1245207
uaggaaacugugugguauu

SEQ ID NO: 1544859 - RNA, 19 nt, Artificial Sequence
  Description of Artificial Sequence: Synthetic oligonucleotide
  Antisense strand to SEQ ID NO: 1544858
aauaccacacaguuuccua

SEQ ID NO: 1544860 - RNA, 19 nt, Artificial Sequence
  Description of Artificial Sequence: Synthetic oligonucleotide
  Sense strand starting at position 2626 of SEQ ID NO: 1245207
uucuauaaguugucgaaca

SEQ ID NO: 1544861 - RNA, 19 nt, Artificial Sequence
  Description of Artificial Sequence: Synthetic oligonucleotide
  Antisense strand to SEQ ID NO: 1544860
uguucgacaacuuauagaa

SEQ ID NO: 1544862 - RNA, 19 nt, Artificial Sequence
  Description of Artificial Sequence: Synthetic oligonucleotide
  Sense strand starting at position 2628 of SEQ ID NO: 1245207
cuauaaguugucgaacacu

SEQ ID NO: 1544863 - RNA, 19 nt, Artificial Sequence
  Description of Artificial Sequence: Synthetic oligonucleotide
  Antisense strand to SEQ ID NO: 1544862
aguguucgacaacuuauag

SEQ ID NO: 1544864 - RNA, 19 nt, Artificial Sequence
  Description of Artificial Sequence: Synthetic oligonucleotide
  Sense strand starting at position 2631 of SEQ ID NO: 1245207
uaaguugucgaacacuuau

SEQ ID NO: 1544865 - RNA, 19 nt, Artificial Sequence
  Description of Artificial Sequence: Synthetic oligonucleotide
  Antisense strand to SEQ ID NO: 1544864
auaaguguucgacaacuua

SEQ ID NO: 1544866 - RNA, 19 nt, Artificial Sequence
  Description of Artificial Sequence: Synthetic oligonucleotide
  Sense strand starting at position 2719 of SEQ ID NO: 1245207
auguuaucagccugaugau

SEQ ID NO: 1544867 - RNA, 19 nt, Artificial Sequence
  Description of Artificial Sequence: Synthetic oligonucleotide
  Antisense strand to SEQ ID NO: 1544866
aucaucaggcugauaacau

SEQ ID NO: 1544868 - RNA, 19 nt, Artificial Sequence
  Description of Artificial Sequence: Synthetic oligonucleotide
  Sense strand starting at position 2720 of SEQ ID NO: 1245207
uguuaucagccugaugaua

SEQ ID NO: 1544869 - RNA, 19 nt, Artificial Sequence
  Description of Artificial Sequence: Synthetic oligonucleotide
  Antisense strand to SEQ ID NO: 1544868
uaucaucaggcugauaaca

SEQ ID NO: 1544870 - RNA, 19 nt, Artificial Sequence
  Description of Artificial Sequence: Synthetic oligonucleotide
  Sense strand starting at position 2728 of SEQ ID NO: 1245207
gccugaugauaagcuaucu

SEQ ID NO: 1544871 - RNA, 19 nt, Artificial Sequence
  Description of Artificial Sequence: Synthetic oligonucleotide
  Antisense strand to SEQ ID NO: 1544870
agauagcuuaucaucaggc

SEQ ID NO: 1544872 - RNA, 19 nt, Artificial Sequence
  Description of Artificial Sequence: Synthetic oligonucleotide
  Sense strand starting at position 2733 of SEQ ID NO: 1245207
augauaagcuaucuugggu

SEQ ID NO: 1544873 - RNA, 19 nt, Artificial Sequence
  Description of Artificial Sequence: Synthetic oligonucleotide
  Antisense strand to SEQ ID NO: 1544872
acccaagauagcuuaucau

SEQ ID NO: 1544874 - RNA, 19 nt, Artificial Sequence
  Description of Artificial Sequence: Synthetic oligonucleotide
  Sense strand starting at position 2738 of SEQ ID NO: 1245207
aagcuaucuuggguuucua

SEQ ID NO: 1544875 - RNA, 19 nt, Artificial Sequence
  Description of Artificial Sequence: Synthetic oligonucleotide
  Antisense strand to SEQ ID NO: 1544874
uagaaacccaagauagcuu

SEQ ID NO: 1544876 - RNA, 19 nt, Artificial Sequence
  Description of Artificial Sequence: Synthetic oligonucleotide
  Sense strand starting at position 2748 of SEQ ID NO: 1245207
ggguuucuauacucauaug

SEQ ID NO: 1544877 - RNA, 19 nt, Artificial Sequence
  Description of Artificial Sequence: Synthetic oligonucleotide
  Antisense strand to SEQ ID NO: 1544876
cauaugaguauagaaaccc

SEQ ID NO: 1544878 - RNA, 19 nt, Artificial Sequence
  Description of Artificial Sequence: Synthetic oligonucleotide
  Sense strand starting at position 2884 of SEQ ID NO: 1245207
acaaacuugucugucucua

SEQ ID NO: 1544879 - RNA, 19 nt, Artificial Sequence
  Description of Artificial Sequence: Synthetic oligonucleotide
  Antisense strand to SEQ ID NO: 1544878
uagagacagacaaguuugu

SEQ ID NO: 1544880 - RNA, 19 nt, Artificial Sequence
  Description of Artificial Sequence: Synthetic oligonucleotide
  Sense strand starting at position 2922 of SEQ ID NO: 1245207
uuuaauguccuuuaguuga

SEQ ID NO: 1544881 - RNA, 19 nt, Artificial Sequence
  Description of Artificial Sequence: Synthetic oligonucleotide
  Antisense strand to SEQ ID NO: 1544880
ucaacuaaaggacauuaaa

SEQ ID NO: 1544882 - RNA, 19 nt, Artificial Sequence
  Description of Artificial Sequence: Synthetic oligonucleotide
  Sense strand starting at position 2953 of SEQ ID NO: 1245207
ugugguuuccuacaagaaa

SEQ ID NO: 1544883 - RNA, 19 nt, Artificial Sequence
  Description of Artificial Sequence: Synthetic oligonucleotide
  Antisense strand to SEQ ID NO: 1544882
uuucuuguaggaaaccaca

SEQ ID NO: 1544884 - RNA, 19 nt, Artificial Sequence
  Description of Artificial Sequence: Synthetic oligonucleotide
  Sense strand starting at position 3831 of SEQ ID NO: 1245207
auaagagaguacucugauu

SEQ ID NO: 1544885 - RNA, 19 nt, Artificial Sequence
  Description of Artificial Sequence: Synthetic oligonucleotide
  Antisense strand to SEQ ID NO: 1544884
aaucagaguacucucuuau

SEQ ID NO: 1544886 - RNA, 19 nt, Artificial Sequence
  Description of Artificial Sequence: Synthetic oligonucleotide
  Sense strand starting at position 3892 of SEQ ID NO: 1245207
cucaguagaaacgguaauu

SEQ ID NO: 1544887 - RNA, 19 nt, Artificial Sequence
  Description of Artificial Sequence: Synthetic oligonucleotide
  Antisense strand to SEQ ID NO: 1544886
aauuaccguuucuacugag

SEQ ID NO: 1544888 - RNA, 19 nt, Artificial Sequence
  Description of Artificial Sequence: Synthetic oligonucleotide
  Sense strand starting at position 3903 of SEQ ID NO: 1245207
cgguaauugagacagguag

SEQ ID NO: 1544889 - RNA, 19 nt, Artificial Sequence
  Description of Artificial Sequence: Synthetic oligonucleotide
  Antisense strand to SEQ ID NO: 1544888
cuaccugucucaauuaccg

SEQ ID NO: 1544890 - RNA, 19 nt, Artificial Sequence
  Description of Artificial Sequence: Synthetic oligonucleotide
  Sense strand starting at position 3905 of SEQ ID NO: 1245207
guaauugagacagguaguu

SEQ ID NO: 1544891 - RNA, 19 nt, Artificial Sequence
  Description of Artificial Sequence: Synthetic oligonucleotide
  Antisense strand to SEQ ID NO: 1544890
aacuaccugucucaauuac

SEQ ID NO: 1544892 - RNA, 19 nt, Artificial Sequence
  Description of Artificial Sequence: Synthetic oligonucleotide
  Sense strand starting at position 3911 of SEQ ID NO: 1245207
gagacagguaguugagaca

SEQ ID NO: 1544893 - RNA, 19 nt, Artificial Sequence
  Description of Artificial Sequence: Synthetic oligonucleotide
  Antisense strand to SEQ ID NO: 1544892
ugucucaacuaccugucuc

SEQ ID NO: 1544894 - RNA, 19 nt, Artificial Sequence
  Description of Artificial Sequence: Synthetic oligonucleotide
  Sense strand starting at position 3978 of SEQ ID NO: 1245207
ugcuaauaaggcuguagau

SEQ ID NO: 1544895 - RNA, 19 nt, Artificial Sequence
  Description of Artificial Sequence: Synthetic oligonucleotide
  Antisense strand to SEQ ID NO: 1544894
aucuacagccuuauuagca

SEQ ID NO: 1544896 - RNA, 19 nt, Artificial Sequence
  Description of Artificial Sequence: Synthetic oligonucleotide
  Sense strand starting at position 3980 of SEQ ID NO: 1245207
cuaauaaggcuguagauca

SEQ ID NO: 1544897 - RNA, 19 nt, Artificial Sequence
  Description of Artificial Sequence: Synthetic oligonucleotide
  Antisense strand to SEQ ID NO: 1544896
ugaucuacagccuuauuag

SEQ ID NO: 1544898 - RNA, 19 nt, Artificial Sequence
  Description of Artificial Sequence: Synthetic oligonucleotide
  Sense strand starting at position 7 of SEQ ID NO: 1245208
acaucuaugugugucaaua

SEQ ID NO: 1544899 - RNA, 19 nt, Artificial Sequence
  Description of Artificial Sequence: Synthetic oligonucleotide
  Antisense strand to SEQ ID NO: 1544898
uauugacacacauagaugu

SEQ ID NO: 1544900 - RNA, 19 nt, Artificial Sequence
  Description of Artificial Sequence: Synthetic oligonucleotide
  Sense strand starting at position 33 of SEQ ID NO: 1245208
gagauaaagucacaaugau

SEQ ID NO: 1544901 - RNA, 19 nt, Artificial Sequence
  Description of Artificial Sequence: Synthetic oligonucleotide
  Antisense strand to SEQ ID NO: 1544900
aucauugugacuuuaucuc

SEQ ID NO: 1544902 - RNA, 19 nt, Artificial Sequence
  Description of Artificial Sequence: Synthetic oligonucleotide
  Sense strand starting at position 225 of SEQ ID NO: 1245208
gcuguaugcgugagggaug

SEQ ID NO: 1544903 - RNA, 19 nt, Artificial Sequence
  Description of Artificial Sequence: Synthetic oligonucleotide
  Antisense strand to SEQ ID NO: 1544902
caucccucacgcauacagc

SEQ ID NO: 1544904 - RNA, 19 nt, Artificial Sequence
  Description of Artificial Sequence: Synthetic oligonucleotide
  Sense strand starting at position 247 of SEQ ID NO: 1245208
acauaauagcaacgcuuua

SEQ ID NO: 1544905 - RNA, 19 nt, Artificial Sequence
  Description of Artificial Sequence: Synthetic oligonucleotide
  Antisense strand to SEQ ID NO: 1544904
uaaagcguugcuauuaugu

SEQ ID NO: 1544906 - RNA, 19 nt, Artificial Sequence
  Description of Artificial Sequence: Synthetic oligonucleotide
  Sense strand starting at position 300 of SEQ ID NO: 1245208
uuugauagcugggcuugaa

SEQ ID NO: 1544907 - RNA, 19 nt, Artificial Sequence
  Description of Artificial Sequence: Synthetic oligonucleotide
  Antisense strand to SEQ ID NO: 1544906
uucaagcccagcuaucaaa

SEQ ID NO: 1544908 - RNA, 19 nt, Artificial Sequence
  Description of Artificial Sequence: Synthetic oligonucleotide
  Sense strand starting at position 322 of SEQ ID NO: 1245208
gugcuuccaguugaaauua

SEQ ID NO: 1544909 - RNA, 19 nt, Artificial Sequence
  Description of Artificial Sequence: Synthetic oligonucleotide
  Antisense strand to SEQ ID NO: 1544908
uaauuucaacuggaagcac

SEQ ID NO: 1544910 - RNA, 19 nt, Artificial Sequence
  Description of Artificial Sequence: Synthetic oligonucleotide
  Sense strand starting at position 341 of SEQ ID NO: 1245208
gcauuagaaaucgguuaga

SEQ ID NO: 1544911 - RNA, 19 nt, Artificial Sequence
  Description of Artificial Sequence: Synthetic oligonucleotide
  Antisense strand to SEQ ID NO: 1544910
ucuaaccgauuucuaaugc

SEQ ID NO: 1544912 - RNA, 19 nt, Artificial Sequence
  Description of Artificial Sequence: Synthetic oligonucleotide
  Sense strand starting at position 352 of SEQ ID NO: 1245208
cgguuagaacaccaacauu

SEQ ID NO: 1544913 - RNA, 19 nt, Artificial Sequence
  Description of Artificial Sequence: Synthetic oligonucleotide
  Antisense strand to SEQ ID NO: 1544912
aauguugguguucuaaccg

SEQ ID NO: 1544914 - RNA, 19 nt, Artificial Sequence
  Description of Artificial Sequence: Synthetic oligonucleotide
  Sense strand starting at position 483 of SEQ ID NO: 1245208
caaauaagucacggcaagu

SEQ ID NO: 1544915 - RNA, 19 nt, Artificial Sequence
  Description of Artificial Sequence: Synthetic oligonucleotide
  Antisense strand to SEQ ID NO: 1544914
acuugccgugacuuauuug

SEQ ID NO: 1544916 - RNA, 19 nt, Artificial Sequence
  Description of Artificial Sequence: Synthetic oligonucleotide
  Sense strand starting at position 500 of SEQ ID NO: 1245208
gugucacaaccugaaaucu

SEQ ID NO: 1544917 - RNA, 19 nt, Artificial Sequence
  Description of Artificial Sequence: Synthetic oligonucleotide
  Antisense strand to SEQ ID NO: 1544916
agauuucagguugugacac

SEQ ID NO: 1544918 - RNA, 19 nt, Artificial Sequence
  Description of Artificial Sequence: Synthetic oligonucleotide
  Sense strand starting at position 541 of SEQ ID NO: 1245208
uguuaacaguugccugaaa

SEQ ID NO: 1544919 - RNA, 19 nt, Artificial Sequence
  Description of Artificial Sequence: Synthetic oligonucleotide
  Antisense strand to SEQ ID NO: 1544918
uuucaggcaacuguuaaca

SEQ ID NO: 1544920 - RNA, 19 nt, Artificial Sequence
  Description of Artificial Sequence: Synthetic oligonucleotide
  Sense strand starting at position 543 of SEQ ID NO: 1245208
uuaacaguugccugaaacu

SEQ ID NO: 1544921 - RNA, 19 nt, Artificial Sequence
  Description of Artificial Sequence: Synthetic oligonucleotide
  Antisense strand to SEQ ID NO: 1544920
aguuucaggcaacuguuaa

SEQ ID NO: 1544922 - RNA, 19 nt, Artificial Sequence
  Description of Artificial Sequence: Synthetic oligonucleotide
  Sense strand starting at position 597 of SEQ ID NO: 1245208
ugacauuuguguuucucuu

SEQ ID NO: 1544923 - RNA, 19 nt, Artificial Sequence
  Description of Artificial Sequence: Synthetic oligonucleotide
  Antisense strand to SEQ ID NO: 1544922
aagagaaacacaaauguca

SEQ ID NO: 1544924 - RNA, 19 nt, Artificial Sequence
  Description of Artificial Sequence: Synthetic oligonucleotide
  Sense strand starting at position 706 of SEQ ID NO: 1245208
gauugcauguuaucagaau

SEQ ID NO: 1544925 - RNA, 19 nt, Artificial Sequence
  Description of Artificial Sequence: Synthetic oligonucleotide
  Antisense strand to SEQ ID NO: 1544924
auucugauaacaugcaauc

SEQ ID NO: 1544926 - RNA, 19 nt, Artificial Sequence
  Description of Artificial Sequence: Synthetic oligonucleotide
  Sense strand starting at position 825 of SEQ ID NO: 1245208
caucuuacagguuguguga

SEQ ID NO: 1544927 - RNA, 19 nt, Artificial Sequence
  Description of Artificial Sequence: Synthetic oligonucleotide
  Antisense strand to SEQ ID NO: 1544926
ucacacaaccuguaagaug

SEQ ID NO: 1544928 - RNA, 19 nt, Artificial Sequence
  Description of Artificial Sequence: Synthetic oligonucleotide
  Sense strand starting at position 964 of SEQ ID NO: 1245208
ggaccagcgcuuugaugaa

SEQ ID NO: 1544929 - RNA, 19 nt, Artificial Sequence
  Description of Artificial Sequence: Synthetic oligonucleotide
  Antisense strand to SEQ ID NO: 1544928
uucaucaaagcgcuggucc

SEQ ID NO: 1544930 - RNA, 19 nt, Artificial Sequence
  Description of Artificial Sequence: Synthetic oligonucleotide
  Sense strand starting at position 1206 of SEQ ID NO: 1245208
cagagaacguuugcucaag

SEQ ID NO: 1544931 - RNA, 19 nt, Artificial Sequence
  Description of Artificial Sequence: Synthetic oligonucleotide
  Antisense strand to SEQ ID NO: 1544930
cuugagcaaacguucucug

SEQ ID NO: 1544932 - RNA, 19 nt, Artificial Sequence
  Description of Artificial Sequence: Synthetic oligonucleotide
  Sense strand starting at position 1228 of SEQ ID NO: 1245208
gauuuaaauugaggaguuu

SEQ ID NO: 1544933 - RNA, 19 nt, Artificial Sequence
  Description of Artificial Sequence: Synthetic oligonucleotide
  Antisense strand to SEQ ID NO: 1544932
aaacuccucaauuuaaauc

SEQ ID NO: 1544934 - RNA, 19 nt, Artificial Sequence
  Description of Artificial Sequence: Synthetic oligonucleotide
  Sense strand starting at position 1271 of SEQ ID NO: 1245208
auccuaugauugucgcaga

SEQ ID NO: 1544935 - RNA, 19 nt, Artificial Sequence
  Description of Artificial Sequence: Synthetic oligonucleotide
  Antisense strand to SEQ ID NO: 1544934
ucugcgacaaucauaggau

SEQ ID NO: 1544936 - RNA, 19 nt, Artificial Sequence
  Description of Artificial Sequence: Synthetic oligonucleotide
  Sense strand starting at position 1276 of SEQ ID NO: 1245208
augauugucgcagagcaac

SEQ ID NO: 1544937 - RNA, 19 nt, Artificial Sequence
  Description of Artificial Sequence: Synthetic oligonucleotide
  Antisense strand to SEQ ID NO: 1544936
guugcucugcgacaaucau

SEQ ID NO: 1544938 - RNA, 19 nt, Artificial Sequence
  Description of Artificial Sequence: Synthetic oligonucleotide
  Sense strand starting at position 1329 of SEQ ID NO: 1245208
agcauaacccaguguugaa

SEQ ID NO: 1544939 - RNA, 19 nt, Artificial Sequence
  Description of Artificial Sequence: Synthetic oligonucleotide
  Antisense strand to SEQ ID NO: 1544938
uucaacacuggguuaugcu

SEQ ID NO: 1544940 - RNA, 19 nt, Artificial Sequence
  Description of Artificial Sequence: Synthetic oligonucleotide
  Sense strand starting at position 1367 of SEQ ID NO: 1245208
gaggcaacaucagucauca

SEQ ID NO: 1544941 - RNA, 19 nt, Artificial Sequence
  Description of Artificial Sequence: Synthetic oligonucleotide
  Antisense strand to SEQ ID NO: 1544940
ugaugacugauguugccuc

SEQ ID NO: 1544942 - RNA, 19 nt, Artificial Sequence
  Description of Artificial Sequence: Synthetic oligonucleotide
  Sense strand starting at position 1575 of SEQ ID NO: 1245208
ccacacucuugggcucaua

SEQ ID NO: 1544943 - RNA, 19 nt, Artificial Sequence
  Description of Artificial Sequence: Synthetic oligonucleotide
  Antisense strand to SEQ ID NO: 1544942
uaugagcccaagagugugg

SEQ ID NO: 1544944 - RNA, 19 nt, Artificial Sequence
  Description of Artificial Sequence: Synthetic oligonucleotide
  Sense strand starting at position 1594 of SEQ ID NO: 1245208
ugcauucuccagcacggaa

SEQ ID NO: 1544945 - RNA, 19 nt, Artificial Sequence
  Description of Artificial Sequence: Synthetic oligonucleotide
  Antisense strand to SEQ ID NO: 1544944
uuccgugcuggagaaugca

SEQ ID NO: 1544946 - RNA, 19 nt, Artificial Sequence
  Description of Artificial Sequence: Synthetic oligonucleotide
  Sense strand starting at position 1759 of SEQ ID NO: 1245208
cccugucaccgccaaagaa

SEQ ID NO: 1544947 - RNA, 19 nt, Artificial Sequence
  Description of Artificial Sequence: Synthetic oligonucleotide
  Antisense strand to SEQ ID NO: 1544946
uucuuuggcggugacaggg

SEQ ID NO: 1544948 - RNA, 19 nt, Artificial Sequence
  Description of Artificial Sequence: Synthetic oligonucleotide
  Sense strand starting at position 1780 of SEQ ID NO: 1245208
gcccgauggagucaaggau

SEQ ID NO: 1544949 - RNA, 19 nt, Artificial Sequence
  Description of Artificial Sequence: Synthetic oligonucleotide
  Antisense strand to SEQ ID NO: 1544948
auccuugacuccaucgggc

SEQ ID NO: 1544950 - RNA, 19 nt, Artificial Sequence
  Description of Artificial Sequence: Synthetic oligonucleotide
  Sense strand starting at position 2120 of SEQ ID NO: 1245208
cgcuguguccugagaggag

SEQ ID NO: 1544951 - RNA, 19 nt, Artificial Sequence
  Description of Artificial Sequence: Synthetic oligonucleotide
  Antisense strand to SEQ ID NO: 1544950
cuccucucaggacacagcg

SEQ ID NO: 1544952 - RNA, 19 nt, Artificial Sequence
  Description of Artificial Sequence: Synthetic oligonucleotide
  Sense strand starting at position 2367 of SEQ ID NO: 1245208
cugggaauuccucaguuac

SEQ ID NO: 1544953 - RNA, 19 nt, Artificial Sequence
  Description of Artificial Sequence: Synthetic oligonucleotide
  Antisense strand to SEQ ID NO: 1544952
guaacugaggaauucccag

SEQ ID NO: 1544954 - RNA, 19 nt, Artificial Sequence
  Description of Artificial Sequence: Synthetic oligonucleotide
  Sense strand starting at position 2369 of SEQ ID NO: 1245208
gggaauuccucaguuacuc

SEQ ID NO: 1544955 - RNA, 19 nt, Artificial Sequence
  Description of Artificial Sequence: Synthetic oligonucleotide
  Antisense strand to SEQ ID NO: 1544954
gaguaacugaggaauuccc

SEQ ID NO: 1544956 - RNA, 19 nt, Artificial Sequence
  Description of Artificial Sequence: Synthetic oligonucleotide
  Sense strand starting at position 2374 of SEQ ID NO: 1245208
uuccucaguuacucgagau

SEQ ID NO: 1544957 - RNA, 19 nt, Artificial Sequence
  Description of Artificial Sequence: Synthetic oligonucleotide
  Antisense strand to SEQ ID NO: 1544956
aucucgaguaacugaggaa

SEQ ID NO: 1544958 - RNA, 19 nt, Artificial Sequence
  Description of Artificial Sequence: Synthetic oligonucleotide
  Sense strand starting at position 2423 of SEQ ID NO: 1245208
ucccgaugaagucaucuga

SEQ ID NO: 1544959 - RNA, 19 nt, Artificial Sequence
  Description of Artificial Sequence: Synthetic oligonucleotide
  Antisense strand to SEQ ID NO: 1544958
ucagaugacuucaucggga

SEQ ID NO: 1544960 - RNA, 19 nt, Artificial Sequence
  Description of Artificial Sequence: Synthetic oligonucleotide
  Sense strand starting at position 2430 of SEQ ID NO: 1245208
gaagucaucugagcaugca

SEQ ID NO: 1544961 - RNA, 19 nt, Artificial Sequence
  Description of Artificial Sequence: Synthetic oligonucleotide
  Antisense strand to SEQ ID NO: 1544960
ugcaugcucagaugacuuc

SEQ ID NO: 1544962 - RNA, 19 nt, Artificial Sequence
  Description of Artificial Sequence: Synthetic oligonucleotide
  Sense strand starting at position 2524 of SEQ ID NO: 1245208
augggacauugacuguuua

SEQ ID NO: 1544963 - RNA, 19 nt, Artificial Sequence
  Description of Artificial Sequence: Synthetic oligonucleotide
  Antisense strand to SEQ ID NO: 1544962
uaaacagucaaugucccau

SEQ ID NO: 1544964 - RNA, 19 nt, Artificial Sequence
  Description of Artificial Sequence: Synthetic oligonucleotide
  Sense strand starting at position 2525 of SEQ ID NO: 1245208
ugggacauugacuguuuaa

SEQ ID NO: 1544965 - RNA, 19 nt, Artificial Sequence
  Description of Artificial Sequence: Synthetic oligonucleotide
  Antisense strand to SEQ ID NO: 1544964
uuaaacagucaauguccca

SEQ ID NO: 1544966 - RNA, 19 nt, Artificial Sequence
  Description of Artificial Sequence: Synthetic oligonucleotide
  Sense strand starting at position 2547 of SEQ ID NO: 1245208
gccacuggugcauaaguua

SEQ ID NO: 1544967 - RNA, 19 nt, Artificial Sequence
  Description of Artificial Sequence: Synthetic oligonucleotide
  Antisense strand to SEQ ID NO: 1544966
uaacuuaugcaccaguggc

SEQ ID NO: 1544968 - RNA, 19 nt, Artificial Sequence
  Description of Artificial Sequence: Synthetic oligonucleotide
  Sense strand starting at position 2550 of SEQ ID NO: 1245208
acuggugcauaaguuaaau

SEQ ID NO: 1544969 - RNA, 19 nt, Artificial Sequence
  Description of Artificial Sequence: Synthetic oligonucleotide
  Antisense strand to SEQ ID NO: 1544968
auuuaacuuaugcaccagu

SEQ ID NO: 1544970 - RNA, 19 nt, Artificial Sequence
  Description of Artificial Sequence: Synthetic oligonucleotide
  Sense strand starting at position 2744 of SEQ ID NO: 1245208
cuuggcuucuccucuggaa

SEQ ID NO: 1544971 - RNA, 19 nt, Artificial Sequence
  Description of Artificial Sequence: Synthetic oligonucleotide
  Antisense strand to SEQ ID NO: 1544970
uuccagaggagaagccaag

SEQ ID NO: 1544972 - RNA, 19 nt, Artificial Sequence
  Description of Artificial Sequence: Synthetic oligonucleotide
  Sense strand starting at position 2806 of SEQ ID NO: 1245208
guuguauaccagcaucuca

SEQ ID NO: 1544973 - RNA, 19 nt, Artificial Sequence
  Description of Artificial Sequence: Synthetic oligonucleotide
  Antisense strand to SEQ ID NO: 1544972
ugagaugcugguauacaac

SEQ ID NO: 1544974 - RNA, 19 nt, Artificial Sequence
  Description of Artificial Sequence: Synthetic oligonucleotide
  Sense strand starting at position 2892 of SEQ ID NO: 1245208
gaguguuagguuuaaauaa

SEQ ID NO: 1544975 - RNA, 19 nt, Artificial Sequence
  Description of Artificial Sequence: Synthetic oligonucleotide
  Antisense strand to SEQ ID NO: 1544974
uuauuuaaaccuaacacuc

SEQ ID NO: 1544976 - RNA, 19 nt, Artificial Sequence
  Description of Artificial Sequence: Synthetic oligonucleotide
  Sense strand starting at position 3355 of SEQ ID NO: 1245208
ucauccauucgucauccau

SEQ ID NO: 1544977 - RNA, 19 nt, Artificial Sequence
  Description of Artificial Sequence: Synthetic oligonucleotide
  Antisense strand to SEQ ID NO: 1544976
auggaugacgaauggauga

SEQ ID NO: 1544978 - RNA, 19 nt, Artificial Sequence
  Description of Artificial Sequence: Synthetic oligonucleotide
  Sense strand starting at position 21 of SEQ ID NO: 1245209
ucuuaucuuugggcagaac

SEQ ID NO: 1544979 - RNA, 19 nt, Artificial Sequence
  Description of Artificial Sequence: Synthetic oligonucleotide
  Antisense strand to SEQ ID NO: 1544978
guucugcccaaagauaaga

SEQ ID NO: 1544980 - RNA, 19 nt, Artificial Sequence
  Description of Artificial Sequence: Synthetic oligonucleotide
  Sense strand starting at position 30 of SEQ ID NO: 1245209
ugggcagaacugugauacu

SEQ ID NO: 1544981 - RNA, 19 nt, Artificial Sequence
  Description of Artificial Sequence: Synthetic oligonucleotide
  Antisense strand to SEQ ID NO: 1544980
aguaucacaguucugccca

SEQ ID NO: 1544982 - RNA, 19 nt, Artificial Sequence
  Description of Artificial Sequence: Synthetic oligonucleotide
  Sense strand starting at position 85 of SEQ ID NO: 1245209
cuuuguuuaacccggaguu

SEQ ID NO: 1544983 - RNA, 19 nt, Artificial Sequence
  Description of Artificial Sequence: Synthetic oligonucleotide
  Antisense strand to SEQ ID NO: 1544982
aacuccggguuaaacaaag

SEQ ID NO: 1544984 - RNA, 19 nt, Artificial Sequence
  Description of Artificial Sequence: Synthetic oligonucleotide
  Sense strand starting at position 86 of SEQ ID NO: 1245209
uuuguuuaacccggaguua

SEQ ID NO: 1544985 - RNA, 19 nt, Artificial Sequence
  Description of Artificial Sequence: Synthetic oligonucleotide
  Antisense strand to SEQ ID NO: 1544984
uaacuccggguuaaacaaa

SEQ ID NO: 1544986 - RNA, 19 nt, Artificial Sequence
  Description of Artificial Sequence: Synthetic oligonucleotide
  Sense strand starting at position 87 of SEQ ID NO: 1245209
uuguuuaacccggaguuag

SEQ ID NO: 1544987 - RNA, 19 nt, Artificial Sequence
  Description of Artificial Sequence: Synthetic oligonucleotide
  Antisense strand to SEQ ID NO: 1544986
cuaacuccggguuaaacaa

SEQ ID NO: 1544988 - RNA, 19 nt, Artificial Sequence
  Description of Artificial Sequence: Synthetic oligonucleotide
  Sense strand starting at position 101 of SEQ ID NO: 1245209
guuaguagaagugguuguu

SEQ ID NO: 1544989 - RNA, 19 nt, Artificial Sequence
  Description of Artificial Sequence: Synthetic oligonucleotide
  Antisense strand to SEQ ID NO: 1544988
aacaaccacuucuacuaac

SEQ ID NO: 1544990 - RNA, 19 nt, Artificial Sequence
  Description of Artificial Sequence: Synthetic oligonucleotide
  Sense strand starting at position 104 of SEQ ID NO: 1245209
aguagaagugguuguuuca

SEQ ID NO: 1544991 - RNA, 19 nt, Artificial Sequence
  Description of Artificial Sequence: Synthetic oligonucleotide
  Antisense strand to SEQ ID NO: 1544990
ugaaacaaccacuucuacu

SEQ ID NO: 1544992 - RNA, 19 nt, Artificial Sequence
  Description of Artificial Sequence: Synthetic oligonucleotide
  Sense strand starting at position 107 of SEQ ID NO: 1245209
agaagugguuguuucagaa

SEQ ID NO: 1544993 - RNA, 19 nt, Artificial Sequence
  Description of Artificial Sequence: Synthetic oligonucleotide
  Antisense strand to SEQ ID NO: 1544992
uucugaaacaaccacuucu

SEQ ID NO: 1544994 - RNA, 19 nt, Artificial Sequence
  Description of Artificial Sequence: Synthetic oligonucleotide
  Sense strand starting at position 126 of SEQ ID NO: 1245209
caguuaacucccugggagu

SEQ ID NO: 1544995 - RNA, 19 nt, Artificial Sequence
  Description of Artificial Sequence: Synthetic oligonucleotide
  Antisense strand to SEQ ID NO: 1544994
acucccagggaguuaacug

SEQ ID NO: 1544996 - RNA, 19 nt, Artificial Sequence
  Description of Artificial Sequence: Synthetic oligonucleotide
  Sense strand starting at position 127 of SEQ ID NO: 1245209
aguuaacucccugggaguu

SEQ ID NO: 1544997 - RNA, 19 nt, Artificial Sequence
  Description of Artificial Sequence: Synthetic oligonucleotide
  Antisense strand to SEQ ID NO: 1544996
aacucccagggaguuaacu

SEQ ID NO: 1544998 - RNA, 19 nt, Artificial Sequence
  Description of Artificial Sequence: Synthetic oligonucleotide
  Sense strand starting at position 128 of SEQ ID NO: 1245209
guuaacucccugggaguua

SEQ ID NO: 1544999 - RNA, 19 nt, Artificial Sequence
  Description of Artificial Sequence: Synthetic oligonucleotide
  Antisense strand to SEQ ID NO: 1544998
uaacucccagggaguuaac

SEQ ID NO: 1545000 - RNA, 19 nt, Artificial Sequence
  Description of Artificial Sequence: Synthetic oligonucleotide
  Sense strand starting at position 480 of SEQ ID NO: 1245209
gggugaccguccuuaaacu

SEQ ID NO: 1545001 - RNA, 19 nt, Artificial Sequence
  Description of Artificial Sequence: Synthetic oligonucleotide
  Antisense strand to SEQ ID NO: 1545000
aguuuaaggacggucaccc

SEQ ID NO: 1545002 - RNA, 19 nt, Artificial Sequence
  Description of Artificial Sequence: Synthetic oligonucleotide
  Sense strand starting at position 503 of SEQ ID NO: 1245209
cccggagcuucgccagaua

SEQ ID NO: 1545003 - RNA, 19 nt, Artificial Sequence
  Description of Artificial Sequence: Synthetic oligonucleotide
  Antisense strand to SEQ ID NO: 1545002
uaucuggcgaagcuccggg

SEQ ID NO: 1545004 - RNA, 19 nt, Artificial Sequence
  Description of Artificial Sequence: Synthetic oligonucleotide
  Sense strand starting at position 539 of SEQ ID NO: 1245209
acuggaguucccugacguu

SEQ ID NO: 1545005 - RNA, 19 nt, Artificial Sequence
  Description of Artificial Sequence: Synthetic oligonucleotide
  Antisense strand to SEQ ID NO: 1545004
aacgucagggaacuccagu

SEQ ID NO: 1545006 - RNA, 19 nt, Artificial Sequence
  Description of Artificial Sequence: Synthetic oligonucleotide
  Sense strand starting at position 552 of SEQ ID NO: 1245209
gacguuuccuuccucugaa

SEQ ID NO: 1545007 - RNA, 19 nt, Artificial Sequence
  Description of Artificial Sequence: Synthetic oligonucleotide
  Antisense strand to SEQ ID NO: 1545006
uucagaggaaggaaacguc

SEQ ID NO: 1545008 - RNA, 19 nt, Artificial Sequence
  Description of Artificial Sequence: Synthetic oligonucleotide
  Sense strand starting at position 553 of SEQ ID NO: 1245209
acguuuccuuccucugaaa

SEQ ID NO: 1545009 - RNA, 19 nt, Artificial Sequence
  Description of Artificial Sequence: Synthetic oligonucleotide
  Antisense strand to SEQ ID NO: 1545008
uuucagaggaaggaaacgu

SEQ ID NO: 1545010 - RNA, 19 nt, Artificial Sequence
  Description of Artificial Sequence: Synthetic oligonucleotide
  Sense strand starting at position 591 of SEQ ID NO: 1245209
gcguucuguggucagacga

SEQ ID NO: 1545011 - RNA, 19 nt, Artificial Sequence
  Description of Artificial Sequence: Synthetic oligonucleotide
  Antisense strand to SEQ ID NO: 1545010
ucgucugaccacagaacgc

SEQ ID NO: 1545012 - RNA, 19 nt, Artificial Sequence
  Description of Artificial Sequence: Synthetic oligonucleotide
  Sense strand starting at position 705 of SEQ ID NO: 1245209
acuuguugauucucacguu

SEQ ID NO: 1545013 - RNA, 19 nt, Artificial Sequence
  Description of Artificial Sequence: Synthetic oligonucleotide
  Antisense strand to SEQ ID NO: 1545012
aacgugagaaucaacaagu

SEQ ID NO: 1545014 - RNA, 19 nt, Artificial Sequence
  Description of Artificial Sequence: Synthetic oligonucleotide
  Sense strand starting at position 2351 of SEQ ID NO: 1245209
agaaacugccgauagacuu

SEQ ID NO: 1545015 - RNA, 19 nt, Artificial Sequence
  Description of Artificial Sequence: Synthetic oligonucleotide
  Antisense strand to SEQ ID NO: 1545014
aagucuaucggcaguuucu

SEQ ID NO: 1545016 - RNA, 19 nt, Artificial Sequence
  Description of Artificial Sequence: Synthetic oligonucleotide
  Sense strand starting at position 2630 of SEQ ID NO: 1245209
cagagacaucguggucuuc

SEQ ID NO: 1545017 - RNA, 19 nt, Artificial Sequence
  Description of Artificial Sequence: Synthetic oligonucleotide
  Antisense strand to SEQ ID NO: 1545016
gaagaccacgaugucucug

SEQ ID NO: 1545018 - RNA, 19 nt, Artificial Sequence
  Description of Artificial Sequence: Synthetic oligonucleotide
  Sense strand starting at position 2632 of SEQ ID NO: 1245209
gagacaucguggucuucgu

SEQ ID NO: 1545019 - RNA, 19 nt, Artificial Sequence
  Description of Artificial Sequence: Synthetic oligonucleotide
  Antisense strand to SEQ ID NO: 1545018
acgaagaccacgaugucuc

SEQ ID NO: 1545020 - RNA, 19 nt, Artificial Sequence
  Description of Artificial Sequence: Synthetic oligonucleotide
  Sense strand starting at position 2718 of SEQ ID NO: 1245209
cagagaucuuucucuggau

SEQ ID NO: 1545021 - RNA, 19 nt, Artificial Sequence
  Description of Artificial Sequence: Synthetic oligonucleotide
  Antisense strand to SEQ ID NO: 1545020
auccagagaaagaucucug

SEQ ID NO: 1545022 - RNA, 19 nt, Artificial Sequence
  Description of Artificial Sequence: Synthetic oligonucleotide
  Sense strand starting at position 2719 of SEQ ID NO: 1245209
agagaucuuucucuggauu

SEQ ID NO: 1545023 - RNA, 19 nt, Artificial Sequence
  Description of Artificial Sequence: Synthetic oligonucleotide
  Antisense strand to SEQ ID NO: 1545022
aauccagagaaagaucucu

SEQ ID NO: 1545024 - RNA, 19 nt, Artificial Sequence
  Description of Artificial Sequence: Synthetic oligonucleotide
  Sense strand starting at position 2720 of SEQ ID NO: 1245209
gagaucuuucucuggauuc

SEQ ID NO: 1545025 - RNA, 19 nt, Artificial Sequence
  Description of Artificial Sequence: Synthetic oligonucleotide
  Antisense strand to SEQ ID NO: 1545024
gaauccagagaaagaucuc

SEQ ID NO: 1545026 - RNA, 19 nt, Artificial Sequence
  Description of Artificial Sequence: Synthetic oligonucleotide
  Sense strand starting at position 2870 of SEQ ID NO: 1245209
ccacacaguuuguuaggaa

SEQ ID NO: 1545027 - RNA, 19 nt, Artificial Sequence
  Description of Artificial Sequence: Synthetic oligonucleotide
  Antisense strand to SEQ ID NO: 1545026
uuccuaacaaacugugugg

SEQ ID NO: 1545028 - RNA, 19 nt, Artificial Sequence
  Description of Artificial Sequence: Synthetic oligonucleotide
  Sense strand starting at position 3075 of SEQ ID NO: 1245209
ucguuuccucaggagagau

SEQ ID NO: 1545029 - RNA, 19 nt, Artificial Sequence
  Description of Artificial Sequence: Synthetic oligonucleotide
  Antisense strand to SEQ ID NO: 1545028
aucucuccugaggaaacga

SEQ ID NO: 1545030 - RNA, 19 nt, Artificial Sequence
  Description of Artificial Sequence: Synthetic oligonucleotide
  Sense strand starting at position 3162 of SEQ ID NO: 1245209
aagauaguguguuucucca

SEQ ID NO: 1545031 - RNA, 19 nt, Artificial Sequence
  Description of Artificial Sequence: Synthetic oligonucleotide
  Antisense strand to SEQ ID NO: 1545030
uggagaaacacacuaucuu

SEQ ID NO: 1545032 - RNA, 19 nt, Artificial Sequence
  Description of Artificial Sequence: Synthetic oligonucleotide
  Sense strand starting at position 3164 of SEQ ID NO: 1245209
gauaguguguuucuccaau

SEQ ID NO: 1545033 - RNA, 19 nt, Artificial Sequence
  Description of Artificial Sequence: Synthetic oligonucleotide
  Antisense strand to SEQ ID NO: 1545032
auuggagaaacacacuauc

SEQ ID NO: 1545034 - RNA, 19 nt, Artificial Sequence
  Description of Artificial Sequence: Synthetic oligonucleotide
  Sense strand starting at position 3356 of SEQ ID NO: 1245209
uuagauaccugcuuuagca

SEQ ID NO: 1545035 - RNA, 19 nt, Artificial Sequence
  Description of Artificial Sequence: Synthetic oligonucleotide
  Antisense strand to SEQ ID NO: 1545034
ugcuaaagcagguaucuaa

SEQ ID NO: 1545036 - RNA, 19 nt, Artificial Sequence
  Description of Artificial Sequence: Synthetic oligonucleotide
  Sense strand starting at position 3364 of SEQ ID NO: 1245209
cugcuuuagcaucagaaac

SEQ ID NO: 1545037 - RNA, 19 nt, Artificial Sequence
  Description of Artificial Sequence: Synthetic oligonucleotide
  Antisense strand to SEQ ID NO: 1545036
guuucugaugcuaaagcag

SEQ ID NO: 1545038 - RNA, 19 nt, Artificial Sequence
  Description of Artificial Sequence: Synthetic oligonucleotide
  Sense strand starting at position 3409 of SEQ ID NO: 1245209
ggcuuuaucucagugacuc

SEQ ID NO: 1545039 - RNA, 19 nt, Artificial Sequence
  Description of Artificial Sequence: Synthetic oligonucleotide
  Antisense strand to SEQ ID NO: 1545038
gagucacugagauaaagcc

SEQ ID NO: 1545040 - RNA, 19 nt, Artificial Sequence
  Description of Artificial Sequence: Synthetic oligonucleotide
  Sense strand starting at position 3541 of SEQ ID NO: 1245209
gcugguguuacagugguuu

SEQ ID NO: 1545041 - RNA, 19 nt, Artificial Sequence
  Description of Artificial Sequence: Synthetic oligonucleotide
  Antisense strand to SEQ ID NO: 1545040
aaaccacuguaacaccagc

SEQ ID NO: 1545042 - RNA, 19 nt, Artificial Sequence
  Description of Artificial Sequence: Synthetic oligonucleotide
  Sense strand starting at position 3549 of SEQ ID NO: 1245209
uacagugguuuccugaaac

SEQ ID NO: 1545043 - RNA, 19 nt, Artificial Sequence
  Description of Artificial Sequence: Synthetic oligonucleotide
  Antisense strand to SEQ ID NO: 1545042
guuucaggaaaccacugua

SEQ ID NO: 1545044 - RNA, 19 nt, Artificial Sequence
  Description of Artificial Sequence: Synthetic oligonucleotide
  Sense strand starting at position 3670 of SEQ ID NO: 1245209
gggauagaguguccacaca

SEQ ID NO: 1545045 - RNA, 19 nt, Artificial Sequence
  Description of Artificial Sequence: Synthetic oligonucleotide
  Antisense strand to SEQ ID NO: 1545044
uguguggacacucuauccc

SEQ ID NO: 1545046 - RNA, 19 nt, Artificial Sequence
  Description of Artificial Sequence: Synthetic oligonucleotide
  Sense strand starting at position 3900 of SEQ ID NO: 1245209
acaugaagauguccaugua

SEQ ID NO: 1545047 - RNA, 19 nt, Artificial Sequence
  Description of Artificial Sequence: Synthetic oligonucleotide
  Antisense strand to SEQ ID NO: 1545046
uacauggacaucuucaugu

SEQ ID NO: 1545048 - RNA, 19 nt, Artificial Sequence
  Description of Artificial Sequence: Synthetic oligonucleotide
  Sense strand starting at position 3912 of SEQ ID NO: 1245209
ccauguagcccucagcaaa

SEQ ID NO: 1545049 - RNA, 19 nt, Artificial Sequence
  Description of Artificial Sequence: Synthetic oligonucleotide
  Antisense strand to SEQ ID NO: 1545048
uuugcugagggcuacaugg

SEQ ID NO: 1545050 - RNA, 19 nt, Artificial Sequence
  Description of Artificial Sequence: Synthetic oligonucleotide
  Sense strand starting at position 3923 of SEQ ID NO: 1245209
ucagcaaagugacagagau

SEQ ID NO: 1545051 - RNA, 19 nt, Artificial Sequence
  Description of Artificial Sequence: Synthetic oligonucleotide
  Antisense strand to SEQ ID NO: 1545050
aucucugucacuuugcuga

SEQ ID NO: 1545052 - RNA, 19 nt, Artificial Sequence
  Description of Artificial Sequence: Synthetic oligonucleotide
  Sense strand starting at position 3933 of SEQ ID NO: 1245209
gacagagauucguugugcu

SEQ ID NO: 1545053 - RNA, 19 nt, Artificial Sequence
  Description of Artificial Sequence: Synthetic oligonucleotide
  Antisense strand to SEQ ID NO: 1545052
agcacaacgaaucucuguc

SEQ ID NO: 1545054 - RNA, 19 nt, Artificial Sequence
  Description of Artificial Sequence: Synthetic oligonucleotide
  Sense strand starting at position 3937 of SEQ ID NO: 1245209
gagauucguugugcugaau

SEQ ID NO: 1545055 - RNA, 19 nt, Artificial Sequence
  Description of Artificial Sequence: Synthetic oligonucleotide
  Antisense strand to SEQ ID NO: 1545054
auucagcacaacgaaucuc

SEQ ID NO: 1545056 - RNA, 19 nt, Artificial Sequence
  Description of Artificial Sequence: Synthetic oligonucleotide
  Sense strand starting at position 3940 of SEQ ID NO: 1245209
auucguugugcugaauaaa

SEQ ID NO: 1545057 - RNA, 19 nt, Artificial Sequence
  Description of Artificial Sequence: Synthetic oligonucleotide
  Antisense strand to SEQ ID NO: 1545056
uuuauucagcacaacgaau

SEQ ID NO: 1545058 - RNA, 19 nt, Artificial Sequence
  Description of Artificial Sequence: Synthetic oligonucleotide
  Sense strand starting at position 266 of SEQ ID NO: 1245210
agcuguuuguucuuauuuc

SEQ ID NO: 1545059 - RNA, 19 nt, Artificial Sequence
  Description of Artificial Sequence: Synthetic oligonucleotide
  Antisense strand to SEQ ID NO: 1545058
gaaauaagaacaaacagcu

SEQ ID NO: 1545060 - RNA, 19 nt, Artificial Sequence
  Description of Artificial Sequence: Synthetic oligonucleotide
  Sense strand starting at position 270 of SEQ ID NO: 1245210
guuuguucuuauuucuaca

SEQ ID NO: 1545061 - RNA, 19 nt, Artificial Sequence
  Description of Artificial Sequence: Synthetic oligonucleotide
  Antisense strand to SEQ ID NO: 1545060
uguagaaauaagaacaaac

SEQ ID NO: 1545062 - RNA, 19 nt, Artificial Sequence
  Description of Artificial Sequence: Synthetic oligonucleotide
  Sense strand starting at position 320 of SEQ ID NO: 1245210
ggaucugaguuccuuagga

SEQ ID NO: 1545063 - RNA, 19 nt, Artificial Sequence
  Description of Artificial Sequence: Synthetic oligonucleotide
  Antisense strand to SEQ ID NO: 1545062
uccuaaggaacucagaucc

SEQ ID NO: 1545064 - RNA, 19 nt, Artificial Sequence
  Description of Artificial Sequence: Synthetic oligonucleotide
  Sense strand starting at position 596 of SEQ ID NO: 1245210
ccuccucugccagagauuc

SEQ ID NO: 1545065 - RNA, 19 nt, Artificial Sequence
  Description of Artificial Sequence: Synthetic oligonucleotide
  Antisense strand to SEQ ID NO: 1545064
gaaucucuggcagaggagg

SEQ ID NO: 1545066 - RNA, 19 nt, Artificial Sequence
  Description of Artificial Sequence: Synthetic oligonucleotide
  Sense strand starting at position 891 of SEQ ID NO: 1245210
gcuugaucuaggcaugaau

SEQ ID NO: 1545067 - RNA, 19 nt, Artificial Sequence
  Description of Artificial Sequence: Synthetic oligonucleotide
  Antisense strand to SEQ ID NO: 1545066
auucaugccuagaucaagc

SEQ ID NO: 1545068 - RNA, 19 nt, Artificial Sequence
  Description of Artificial Sequence: Synthetic oligonucleotide
  Sense strand starting at position 1194 of SEQ ID NO: 1245210
agaagagcuguuuaaucga

SEQ ID NO: 1545069 - RNA, 19 nt, Artificial Sequence
  Description of Artificial Sequence: Synthetic oligonucleotide
  Antisense strand to SEQ ID NO: 1545068
ucgauuaaacagcucuucu

SEQ ID NO: 1545070 - RNA, 19 nt, Artificial Sequence
  Description of Artificial Sequence: Synthetic oligonucleotide
  Sense strand starting at position 1316 of SEQ ID NO: 1245210
aaacacuuugcaggaguau

SEQ ID NO: 1545071 - RNA, 19 nt, Artificial Sequence
  Description of Artificial Sequence: Synthetic oligonucleotide
  Antisense strand to SEQ ID NO: 1545070
auacuccugcaaaguguuu

SEQ ID NO: 1545072 - RNA, 19 nt, Artificial Sequence
  Description of Artificial Sequence: Synthetic oligonucleotide
  Sense strand starting at position 1331 of SEQ ID NO: 1245210
guaugugauaaucaguaug

SEQ ID NO: 1545073 - RNA, 19 nt, Artificial Sequence
  Description of Artificial Sequence: Synthetic oligonucleotide
  Antisense strand to SEQ ID NO: 1545072
cauacugauuaucacauac

SEQ ID NO: 1545074 - RNA, 19 nt, Artificial Sequence
  Description of Artificial Sequence: Synthetic oligonucleotide
  Sense strand starting at position 1408 of SEQ ID NO: 1245210
ugagcuagugguugagaaa

SEQ ID NO: 1545075 - RNA, 19 nt, Artificial Sequence
  Description of Artificial Sequence: Synthetic oligonucleotide
  Antisense strand to SEQ ID NO: 1545074
uuucucaaccacuagcuca

SEQ ID NO: 1545076 - RNA, 19 nt, Artificial Sequence
  Description of Artificial Sequence: Synthetic oligonucleotide
  Sense strand starting at position 1409 of SEQ ID NO: 1245210
gagcuagugguugagaaag

SEQ ID NO: 1545077 - RNA, 19 nt, Artificial Sequence
  Description of Artificial Sequence: Synthetic oligonucleotide
  Antisense strand to SEQ ID NO: 1545076
cuuucucaaccacuagcuc

SEQ ID NO: 1545078 - RNA, 19 nt, Artificial Sequence
  Description of Artificial Sequence: Synthetic oligonucleotide
  Sense strand starting at position 1480 of SEQ ID NO: 1245210
gguggaguugcuuagacac

SEQ ID NO: 1545079 - RNA, 19 nt, Artificial Sequence
  Description of Artificial Sequence: Synthetic oligonucleotide
  Antisense strand to SEQ ID NO: 1545078
gugucuaagcaacuccacc

SEQ ID NO: 1545080 - RNA, 19 nt, Artificial Sequence
  Description of Artificial Sequence: Synthetic oligonucleotide
  Sense strand starting at position 1661 of SEQ ID NO: 1245210
gcuguaguccuugaauaga

SEQ ID NO: 1545081 - RNA, 19 nt, Artificial Sequence
  Description of Artificial Sequence: Synthetic oligonucleotide
  Antisense strand to SEQ ID NO: 1545080
ucuauucaaggacuacagc

SEQ ID NO: 1545082 - RNA, 19 nt, Artificial Sequence
  Description of Artificial Sequence: Synthetic oligonucleotide
  Sense strand starting at position 1837 of SEQ ID NO: 1245210
augagcuauuuggaggaau

SEQ ID NO: 1545083 - RNA, 19 nt, Artificial Sequence
  Description of Artificial Sequence: Synthetic oligonucleotide
  Antisense strand to SEQ ID NO: 1545082
auuccuccaaauagcucau

SEQ ID NO: 1545084 - RNA, 19 nt, Artificial Sequence
  Description of Artificial Sequence: Synthetic oligonucleotide
  Sense strand starting at position 1995 of SEQ ID NO: 1245210
aggaaugagcucggagaga

SEQ ID NO: 1545085 - RNA, 19 nt, Artificial Sequence
  Description of Artificial Sequence: Synthetic oligonucleotide
  Antisense strand to SEQ ID NO: 1545084
ucucuccgagcucauuccu

SEQ ID NO: 1545086 - RNA, 19 nt, Artificial Sequence
  Description of Artificial Sequence: Synthetic oligonucleotide
  Sense strand starting at position 2054 of SEQ ID NO: 1245210
acaugcaucaccggagaua

SEQ ID NO: 1545087 - RNA, 19 nt, Artificial Sequence
  Description of Artificial Sequence: Synthetic oligonucleotide
  Antisense strand to SEQ ID NO: 1545086
uaucuccggugaugcaugu

SEQ ID NO: 1545088 - RNA, 19 nt, Artificial Sequence
  Description of Artificial Sequence: Synthetic oligonucleotide
  Sense strand starting at position 2067 of SEQ ID NO: 1245210
gagauacagcuagauuguu

SEQ ID NO: 1545089 - RNA, 19 nt, Artificial Sequence
  Description of Artificial Sequence: Synthetic oligonucleotide
  Antisense strand to SEQ ID NO: 1545088
aacaaucuagcuguaucuc

SEQ ID NO: 1545090 - RNA, 19 nt, Artificial Sequence
  Description of Artificial Sequence: Synthetic oligonucleotide
  Sense strand starting at position 2118 of SEQ ID NO: 1245210
aacugugcauuucugguaa

SEQ ID NO: 1545091 - RNA, 19 nt, Artificial Sequence
  Description of Artificial Sequence: Synthetic oligonucleotide
  Antisense strand to SEQ ID NO: 1545090
uuaccagaaaugcacaguu

SEQ ID NO: 1545092 - RNA, 19 nt, Artificial Sequence
  Description of Artificial Sequence: Synthetic oligonucleotide
  Sense strand starting at position 2199 of SEQ ID NO: 1245210
agucaagguuacuuccaau

SEQ ID NO: 1545093 - RNA, 19 nt, Artificial Sequence
  Description of Artificial Sequence: Synthetic oligonucleotide
  Antisense strand to SEQ ID NO: 1545092
auuggaaguaaccuugacu

SEQ ID NO: 1545094 - RNA, 19 nt, Artificial Sequence
  Description of Artificial Sequence: Synthetic oligonucleotide
  Sense strand starting at position 2228 of SEQ ID NO: 1245210
auguuucuagcagauuaug

SEQ ID NO: 1545095 - RNA, 19 nt, Artificial Sequence
  Description of Artificial Sequence: Synthetic oligonucleotide
  Antisense strand to SEQ ID NO: 1545094
cauaaucugcuagaaacau

SEQ ID NO: 1545096 - RNA, 19 nt, Artificial Sequence
  Description of Artificial Sequence: Synthetic oligonucleotide
  Sense strand starting at position 2398 of SEQ ID NO: 1245210
auauuuggcucauuaguuu

SEQ ID NO: 1545097 - RNA, 19 nt, Artificial Sequence
  Description of Artificial Sequence: Synthetic oligonucleotide
  Antisense strand to SEQ ID NO: 1545096
aaacuaaugagccaaauau

SEQ ID NO: 1545098 - RNA, 19 nt, Artificial Sequence
  Description of Artificial Sequence: Synthetic oligonucleotide
  Sense strand starting at position 2505 of SEQ ID NO: 1245210
gacgcauggguccagacaa

SEQ ID NO: 1545099 - RNA, 19 nt, Artificial Sequence
  Description of Artificial Sequence: Synthetic oligonucleotide
  Antisense strand to SEQ ID NO: 1545098
uugucuggacccaugcguc

SEQ ID NO: 1545100 - RNA, 19 nt, Artificial Sequence
  Description of Artificial Sequence: Synthetic oligonucleotide
  Sense strand starting at position 2701 of SEQ ID NO: 1245210
aauguugaaguguggaauu

SEQ ID NO: 1545101 - RNA, 19 nt, Artificial Sequence
  Description of Artificial Sequence: Synthetic oligonucleotide
  Antisense strand to SEQ ID NO: 1545100
aauuccacacuucaacauu

SEQ ID NO: 1545102 - RNA, 19 nt, Artificial Sequence
  Description of Artificial Sequence: Synthetic oligonucleotide
  Sense strand starting at position 2861 of SEQ ID NO: 1245210
gaauuugccaggcggguaa

SEQ ID NO: 1545103 - RNA, 19 nt, Artificial Sequence
  Description of Artificial Sequence: Synthetic oligonucleotide
  Antisense strand to SEQ ID NO: 1545102
uuacccgccuggcaaauuc

SEQ ID NO: 1545104 - RNA, 19 nt, Artificial Sequence
  Description of Artificial Sequence: Synthetic oligonucleotide
  Sense strand starting at position 3054 of SEQ ID NO: 1245210
agucauguaguugagauaa

SEQ ID NO: 1545105 - RNA, 19 nt, Artificial Sequence
  Description of Artificial Sequence: Synthetic oligonucleotide
  Antisense strand to SEQ ID NO: 1545104
uuaucucaacuacaugacu

SEQ ID NO: 1545106 - RNA, 19 nt, Artificial Sequence
  Description of Artificial Sequence: Synthetic oligonucleotide
  Sense strand starting at position 3085 of SEQ ID NO: 1245210
aggcauugccuccagaaag

SEQ ID NO: 1545107 - RNA, 19 nt, Artificial Sequence
  Description of Artificial Sequence: Synthetic oligonucleotide
  Antisense strand to SEQ ID NO: 1545106
cuuucuggaggcaaugccu

SEQ ID NO: 1545108 - RNA, 19 nt, Artificial Sequence
  Description of Artificial Sequence: Synthetic oligonucleotide
  Sense strand starting at position 3173 of SEQ ID NO: 1245210
uugucagagaucuguggau

SEQ ID NO: 1545109 - RNA, 19 nt, Artificial Sequence
  Description of Artificial Sequence: Synthetic oligonucleotide
  Antisense strand to SEQ ID NO: 1545108
auccacagaucucugacaa

SEQ ID NO: 1545110 - RNA, 19 nt, Artificial Sequence
  Description of Artificial Sequence: Synthetic oligonucleotide
  Sense strand starting at position 3175 of SEQ ID NO: 1245210
gucagagaucuguggaucu

SEQ ID NO: 1545111 - RNA, 19 nt, Artificial Sequence
  Description of Artificial Sequence: Synthetic oligonucleotide
  Antisense strand to SEQ ID NO: 1545110
agauccacagaucucugac

SEQ ID NO: 1545112 - RNA, 19 nt, Artificial Sequence
  Description of Artificial Sequence: Synthetic oligonucleotide
  Sense strand starting at position 3192 of SEQ ID NO: 1245210
cugauuagcugauugggaa

SEQ ID NO: 1545113 - RNA, 19 nt, Artificial Sequence
  Description of Artificial Sequence: Synthetic oligonucleotide
  Antisense strand to SEQ ID NO: 1545112
uucccaaucagcuaaucag

SEQ ID NO: 1545114 - RNA, 19 nt, Artificial Sequence
  Description of Artificial Sequence: Synthetic oligonucleotide
  Sense strand starting at position 3193 of SEQ ID NO: 1245210
ugauuagcugauugggaaa

SEQ ID NO: 1545115 - RNA, 19 nt, Artificial Sequence
  Description of Artificial Sequence: Synthetic oligonucleotide
  Antisense strand to SEQ ID NO: 1545114
uuucccaaucagcuaauca

SEQ ID NO: 1545116 - RNA, 19 nt, Artificial Sequence
  Description of Artificial Sequence: Synthetic oligonucleotide
  Sense strand starting at position 3522 of SEQ ID NO: 1245210
cgcggucagaguucugagu

SEQ ID NO: 1545117 - RNA, 19 nt, Artificial Sequence
  Description of Artificial Sequence: Synthetic oligonucleotide
  Antisense strand to SEQ ID NO: 1545116
acucagaacucugaccgcg

SEQ ID NO: 1545118 - RNA, 19 nt, Artificial Sequence
  Description of Artificial Sequence: Synthetic oligonucleotide
  Sense strand starting at position 3576 of SEQ ID NO: 1245210
cgggcuguugugagaauuc

SEQ ID NO: 1545119 - RNA, 19 nt, Artificial Sequence
  Description of Artificial Sequence: Synthetic oligonucleotide
  Antisense strand to SEQ ID NO: 1545118
gaauucucacaacagcccg

SEQ ID NO: 1545120 - RNA, 19 nt, Artificial Sequence
  Description of Artificial Sequence: Synthetic oligonucleotide
  Sense strand starting at position 3593 of SEQ ID NO: 1245210
ucagacuagguuuguaaca

SEQ ID NO: 1545121 - RNA, 19 nt, Artificial Sequence
  Description of Artificial Sequence: Synthetic oligonucleotide
  Antisense strand to SEQ ID NO: 1545120
uguuacaaaccuagucuga

SEQ ID NO: 1545122 - RNA, 19 nt, Artificial Sequence
  Description of Artificial Sequence: Synthetic oligonucleotide
  Sense strand starting at position 3605 of SEQ ID NO: 1245210
uguaacagugcucagggaa

SEQ ID NO: 1545123 - RNA, 19 nt, Artificial Sequence
  Description of Artificial Sequence: Synthetic oligonucleotide
  Antisense strand to SEQ ID NO: 1545122
uucccugagcacuguuaca

SEQ ID NO: 1545124 - RNA, 19 nt, Artificial Sequence
  Description of Artificial Sequence: Synthetic oligonucleotide
  Sense strand starting at position 3608 of SEQ ID NO: 1245210
aacagugcucagggaaauc

SEQ ID NO: 1545125 - RNA, 19 nt, Artificial Sequence
  Description of Artificial Sequence: Synthetic oligonucleotide
  Antisense strand to SEQ ID NO: 1545124
gauuucccugagcacuguu

SEQ ID NO: 1545126 - RNA, 19 nt, Artificial Sequence
  Description of Artificial Sequence: Synthetic oligonucleotide
  Sense strand starting at position 3701 of SEQ ID NO: 1245210
agaaauaucuuugcuguag

SEQ ID NO: 1545127 - RNA, 19 nt, Artificial Sequence
  Description of Artificial Sequence: Synthetic oligonucleotide
  Antisense strand to SEQ ID NO: 1545126
cuacagcaaagauauuucu

SEQ ID NO: 1545128 - RNA, 19 nt, Artificial Sequence
  Description of Artificial Sequence: Synthetic oligonucleotide
  Sense strand starting at position 3705 of SEQ ID NO: 1245210
auaucuuugcuguagggaa

SEQ ID NO: 1545129 - RNA, 19 nt, Artificial Sequence
  Description of Artificial Sequence: Synthetic oligonucleotide
  Antisense strand to SEQ ID NO: 1545128
uucccuacagcaaagauau

SEQ ID NO: 1545130 - RNA, 19 nt, Artificial Sequence
  Description of Artificial Sequence: Synthetic oligonucleotide
  Sense strand starting at position 3733 of SEQ ID NO: 1245210
gcuggugaucauuggaaag

SEQ ID NO: 1545131 - RNA, 19 nt, Artificial Sequence
  Description of Artificial Sequence: Synthetic oligonucleotide
  Antisense strand to SEQ ID NO: 1545130
cuuuccaaugaucaccagc

SEQ ID NO: 1545132 - RNA, 19 nt, Artificial Sequence
  Description of Artificial Sequence: Synthetic oligonucleotide
  Sense strand starting at position 3751 of SEQ ID NO: 1245210
gcaaacuuguaaguggaga

SEQ ID NO: 1545133 - RNA, 19 nt, Artificial Sequence
  Description of Artificial Sequence: Synthetic oligonucleotide
  Antisense strand to SEQ ID NO: 1545132
ucuccacuuacaaguuugc

SEQ ID NO: 1545134 - RNA, 19 nt, Artificial Sequence
  Description of Artificial Sequence: Synthetic oligonucleotide
  Sense strand starting at position 3775 of SEQ ID NO: 1245210
guagaugaacucugaugac

SEQ ID NO: 1545135 - RNA, 19 nt, Artificial Sequence
  Description of Artificial Sequence: Synthetic oligonucleotide
  Antisense strand to SEQ ID NO: 1545134
gucaucagaguucaucuac

SEQ ID NO: 1545136 - RNA, 19 nt, Artificial Sequence
  Description of Artificial Sequence: Synthetic oligonucleotide
  Sense strand starting at position 3784 of SEQ ID NO: 1245210
cucugaugaccauguuaca

SEQ ID NO: 1545137 - RNA, 19 nt, Artificial Sequence
  Description of Artificial Sequence: Synthetic oligonucleotide
  Antisense strand to SEQ ID NO: 1545136
uguaacauggucaucagag

SEQ ID NO: 1545138 - RNA, 19 nt, Artificial Sequence
  Description of Artificial Sequence: Synthetic oligonucleotide
  Sense strand starting at position 95 of SEQ ID NO: 1245211
agcuguuuguucuuauuuc

SEQ ID NO: 1545139 - RNA, 19 nt, Artificial Sequence
  Description of Artificial Sequence: Synthetic oligonucleotide
  Antisense strand to SEQ ID NO: 1545138
gaaauaagaacaaacagcu

SEQ ID NO: 1545140 - RNA, 19 nt, Artificial Sequence
  Description of Artificial Sequence: Synthetic oligonucleotide
  Sense strand starting at position 99 of SEQ ID NO: 1245211
guuuguucuuauuucuaca

SEQ ID NO: 1545141 - RNA, 19 nt, Artificial Sequence
  Description of Artificial Sequence: Synthetic oligonucleotide
  Antisense strand to SEQ ID NO: 1545140
uguagaaauaagaacaaac

SEQ ID NO: 1545142 - RNA, 19 nt, Artificial Sequence
  Description of Artificial Sequence: Synthetic oligonucleotide
  Sense strand starting at position 149 of SEQ ID NO: 1245211
ggaucugaguuccuuagga

SEQ ID NO: 1545143 - RNA, 19 nt, Artificial Sequence
  Description of Artificial Sequence: Synthetic oligonucleotide
  Antisense strand to SEQ ID NO: 1545142
uccuaaggaacucagaucc

SEQ ID NO: 1545144 - RNA, 19 nt, Artificial Sequence
  Description of Artificial Sequence: Synthetic oligonucleotide
  Sense strand starting at position 425 of SEQ ID NO: 1245211
ccuccucugccagagauuc

SEQ ID NO: 1545145 - RNA, 19 nt, Artificial Sequence
  Description of Artificial Sequence: Synthetic oligonucleotide
  Antisense strand to SEQ ID NO: 1545144
gaaucucuggcagaggagg

SEQ ID NO: 1545146 - RNA, 19 nt, Artificial Sequence
  Description of Artificial Sequence: Synthetic oligonucleotide
  Sense strand starting at position 720 of SEQ ID NO: 1245211
gcuugaucuaggcaugaau

SEQ ID NO: 1545147 - RNA, 19 nt, Artificial Sequence
  Description of Artificial Sequence: Synthetic oligonucleotide
  Antisense strand to SEQ ID NO: 1545146
auucaugccuagaucaagc

SEQ ID NO: 1545148 - RNA, 19 nt, Artificial Sequence
  Description of Artificial Sequence: Synthetic oligonucleotide
  Sense strand starting at position 1023 of SEQ ID NO: 1245211
agaagagcuguuuaaucga

SEQ ID NO: 1545149 - RNA, 19 nt, Artificial Sequence
  Description of Artificial Sequence: Synthetic oligonucleotide
  Antisense strand to SEQ ID NO: 1545148
ucgauuaaacagcucuucu

SEQ ID NO: 1545150 - RNA, 19 nt, Artificial Sequence
  Description of Artificial Sequence: Synthetic oligonucleotide
  Sense strand starting at position 1145 of SEQ ID NO: 1245211
aaacacuuugcaggaguau

SEQ ID NO: 1545151 - RNA, 19 nt, Artificial Sequence
  Description of Artificial Sequence: Synthetic oligonucleotide
  Antisense strand to SEQ ID NO: 1545150
auacuccugcaaaguguuu

SEQ ID NO: 1545152 - RNA, 19 nt, Artificial Sequence
  Description of Artificial Sequence: Synthetic oligonucleotide
  Sense strand starting at position 1160 of SEQ ID NO: 1245211
guaugugauaaucaguaug

SEQ ID NO: 1545153 - RNA, 19 nt, Artificial Sequence
  Description of Artificial Sequence: Synthetic oligonucleotide
  Antisense strand to SEQ ID NO: 1545152
cauacugauuaucacauac

SEQ ID NO: 1545154 - RNA, 19 nt, Artificial Sequence
  Description of Artificial Sequence: Synthetic oligonucleotide
  Sense strand starting at position 1237 of SEQ ID NO: 1245211
ugagcuagugguugagaaa

SEQ ID NO: 1545155 - RNA, 19 nt, Artificial Sequence
  Description of Artificial Sequence: Synthetic oligonucleotide
  Antisense strand to SEQ ID NO: 1545154
uuucucaaccacuagcuca

SEQ ID NO: 1545156 - RNA, 19 nt, Artificial Sequence
  Description of Artificial Sequence: Synthetic oligonucleotide
  Sense strand starting at position 1238 of SEQ ID NO: 1245211
gagcuagugguugagaaag

SEQ ID NO: 1545157 - RNA, 19 nt, Artificial Sequence
  Description of Artificial Sequence: Synthetic oligonucleotide
  Antisense strand to SEQ ID NO: 1545156
cuuucucaaccacuagcuc

SEQ ID NO: 1545158 - RNA, 19 nt, Artificial Sequence
  Description of Artificial Sequence: Synthetic oligonucleotide
  Sense strand starting at position 1309 of SEQ ID NO: 1245211
gguggaguugcuuagacac

SEQ ID NO: 1545159 - RNA, 19 nt, Artificial Sequence
  Description of Artificial Sequence: Synthetic oligonucleotide
  Antisense strand to SEQ ID NO: 1545158
gugucuaagcaacuccacc

SEQ ID NO: 1545160 - RNA, 19 nt, Artificial Sequence
  Description of Artificial Sequence: Synthetic oligonucleotide
  Sense strand starting at position 1490 of SEQ ID NO: 1245211
gcuguaguccuugaauaga

SEQ ID NO: 1545161 - RNA, 19 nt, Artificial Sequence
  Description of Artificial Sequence: Synthetic oligonucleotide
  Antisense strand to SEQ ID NO: 1545160
ucuauucaaggacuacagc

SEQ ID NO: 1545162 - RNA, 19 nt, Artificial Sequence
  Description of Artificial Sequence: Synthetic oligonucleotide
  Sense strand starting at position 1666 of SEQ ID NO: 1245211
augagcuauuuggaggaau

SEQ ID NO: 1545163 - RNA, 19 nt, Artificial Sequence
  Description of Artificial Sequence: Synthetic oligonucleotide
  Antisense strand to SEQ ID NO: 1545162
auuccuccaaauagcucau

SEQ ID NO: 1545164 - RNA, 19 nt, Artificial Sequence
  Description of Artificial Sequence: Synthetic oligonucleotide
  Sense strand starting at position 1824 of SEQ ID NO: 1245211
aggaaugagcucggagaga

SEQ ID NO: 1545165 - RNA, 19 nt, Artificial Sequence
  Description of Artificial Sequence: Synthetic oligonucleotide
  Antisense strand to SEQ ID NO: 1545164
ucucuccgagcucauuccu

SEQ ID NO: 1545166 - RNA, 19 nt, Artificial Sequence
  Description of Artificial Sequence: Synthetic oligonucleotide
  Sense strand starting at position 1883 of SEQ ID NO: 1245211
acaugcaucaccggagaua

SEQ ID NO: 1545167 - RNA, 19 nt, Artificial Sequence
  Description of Artificial Sequence: Synthetic oligonucleotide
  Antisense strand to SEQ ID NO: 1545166
uaucuccggugaugcaugu

SEQ ID NO: 1545168 - RNA, 19 nt, Artificial Sequence
  Description of Artificial Sequence: Synthetic oligonucleotide
  Sense strand starting at position 1896 of SEQ ID NO: 1245211
gagauacagcuagauuguu

SEQ ID NO: 1545169 - RNA, 19 nt, Artificial Sequence
  Description of Artificial Sequence: Synthetic oligonucleotide
  Antisense strand to SEQ ID NO: 1545168
aacaaucuagcuguaucuc

SEQ ID NO: 1545170 - RNA, 19 nt, Artificial Sequence
  Description of Artificial Sequence: Synthetic oligonucleotide
  Sense strand starting at position 1947 of SEQ ID NO: 1245211
aacugugcauuucugguaa

SEQ ID NO: 1545171 - RNA, 19 nt, Artificial Sequence
  Description of Artificial Sequence: Synthetic oligonucleotide
  Antisense strand to SEQ ID NO: 1545170
uuaccagaaaugcacaguu

SEQ ID NO: 1545172 - RNA, 19 nt, Artificial Sequence
  Description of Artificial Sequence: Synthetic oligonucleotide
  Sense strand starting at position 2028 of SEQ ID NO: 1245211
agucaagguuacuuccaau

SEQ ID NO: 1545173 - RNA, 19 nt, Artificial Sequence
  Description of Artificial Sequence: Synthetic oligonucleotide
  Antisense strand to SEQ ID NO: 1545172
auuggaaguaaccuugacu

SEQ ID NO: 1545174 - RNA, 19 nt, Artificial Sequence
  Description of Artificial Sequence: Synthetic oligonucleotide
  Sense strand starting at position 2057 of SEQ ID NO: 1245211
auguuucuagcagauuaug

SEQ ID NO: 1545175 - RNA, 19 nt, Artificial Sequence
  Description of Artificial Sequence: Synthetic oligonucleotide
  Antisense strand to SEQ ID NO: 1545174
cauaaucugcuagaaacau

SEQ ID NO: 1545176 - RNA, 19 nt, Artificial Sequence
  Description of Artificial Sequence: Synthetic oligonucleotide
  Sense strand starting at position 2227 of SEQ ID NO: 1245211
auauuuggcucauuaguuu

SEQ ID NO: 1545177 - RNA, 19 nt, Artificial Sequence
  Description of Artificial Sequence: Synthetic oligonucleotide
  Antisense strand to SEQ ID NO: 1545176
aaacuaaugagccaaauau

SEQ ID NO: 1545178 - RNA, 19 nt, Artificial Sequence
  Description of Artificial Sequence: Synthetic oligonucleotide
  Sense strand starting at position 2334 of SEQ ID NO: 1245211
gacgcauggguccagacaa

SEQ ID NO: 1545179 - RNA, 19 nt, Artificial Sequence
  Description of Artificial Sequence: Synthetic oligonucleotide
  Antisense strand to SEQ ID NO: 1545178
uugucuggacccaugcguc

SEQ ID NO: 1545180 - RNA, 19 nt, Artificial Sequence
  Description of Artificial Sequence: Synthetic oligonucleotide
  Sense strand starting at position 2530 of SEQ ID NO: 1245211
aauguugaaguguggaauu

SEQ ID NO: 1545181 - RNA, 19 nt, Artificial Sequence
  Description of Artificial Sequence: Synthetic oligonucleotide
  Antisense strand to SEQ ID NO: 1545180
aauuccacacuucaacauu

SEQ ID NO: 1545182 - RNA, 19 nt, Artificial Sequence
  Description of Artificial Sequence: Synthetic oligonucleotide
  Sense strand starting at position 2690 of SEQ ID NO: 1245211
gaauuugccaggcggguaa

SEQ ID NO: 1545183 - RNA, 19 nt, Artificial Sequence
  Description of Artificial Sequence: Synthetic oligonucleotide
  Antisense strand to SEQ ID NO: 1545182
uuacccgccuggcaaauuc

SEQ ID NO: 1545184 - RNA, 19 nt, Artificial Sequence
  Description of Artificial Sequence: Synthetic oligonucleotide
  Sense strand starting at position 2883 of SEQ ID NO: 1245211
agucauguaguugagauaa

SEQ ID NO: 1545185 - RNA, 19 nt, Artificial Sequence
  Description of Artificial Sequence: Synthetic oligonucleotide
  Antisense strand to SEQ ID NO: 1545184
uuaucucaacuacaugacu

SEQ ID NO: 1545186 - RNA, 19 nt, Artificial Sequence
  Description of Artificial Sequence: Synthetic oligonucleotide
  Sense strand starting at position 2914 of SEQ ID NO: 1245211
aggcauugccuccagaaag

SEQ ID NO: 1545187 - RNA, 19 nt, Artificial Sequence
  Description of Artificial Sequence: Synthetic oligonucleotide
  Antisense strand to SEQ ID NO: 1545186
cuuucuggaggcaaugccu

SEQ ID NO: 1545188 - RNA, 19 nt, Artificial Sequence
  Description of Artificial Sequence: Synthetic oligonucleotide
  Sense strand starting at position 3002 of SEQ ID NO: 1245211
uugucagagaucuguggau

SEQ ID NO: 1545189 - RNA, 19 nt, Artificial Sequence
  Description of Artificial Sequence: Synthetic oligonucleotide
  Antisense strand to SEQ ID NO: 1545188
auccacagaucucugacaa

SEQ ID NO: 1545190 - RNA, 19 nt, Artificial Sequence
  Description of Artificial Sequence: Synthetic oligonucleotide
  Sense strand starting at position 3004 of SEQ ID NO: 1245211
gucagagaucuguggaucu

SEQ ID NO: 1545191 - RNA, 19 nt, Artificial Sequence
  Description of Artificial Sequence: Synthetic oligonucleotide
  Antisense strand to SEQ ID NO: 1545190
agauccacagaucucugac

SEQ ID NO: 1545192 - RNA, 19 nt, Artificial Sequence
  Description of Artificial Sequence: Synthetic oligonucleotide
  Sense strand starting at position 3021 of SEQ ID NO: 1245211
cugauuagcugauugggaa

SEQ ID NO: 1545193 - RNA, 19 nt, Artificial Sequence
  Description of Artificial Sequence: Synthetic oligonucleotide
  Antisense strand to SEQ ID NO: 1545192
uucccaaucagcuaaucag

SEQ ID NO: 1545194 - RNA, 19 nt, Artificial Sequence
  Description of Artificial Sequence: Synthetic oligonucleotide
  Sense strand starting at position 3022 of SEQ ID NO: 1245211
ugauuagcugauugggaaa

SEQ ID NO: 1545195 - RNA, 19 nt, Artificial Sequence
  Description of Artificial Sequence: Synthetic oligonucleotide
  Antisense strand to SEQ ID NO: 1545194
uuucccaaucagcuaauca

SEQ ID NO: 1545196 - RNA, 19 nt, Artificial Sequence
  Description of Artificial Sequence: Synthetic oligonucleotide
  Sense strand starting at position 3351 of SEQ ID NO: 1245211
cgcggucagaguucugagu

SEQ ID NO: 1545197 - RNA, 19 nt, Artificial Sequence
  Description of Artificial Sequence: Synthetic oligonucleotide
  Antisense strand to SEQ ID NO: 1545196
acucagaacucugaccgcg

SEQ ID NO: 1545198 - RNA, 19 nt, Artificial Sequence
  Description of Artificial Sequence: Synthetic oligonucleotide
  Sense strand starting at position 3405 of SEQ ID NO: 1245211
cgggcuguugugagaauuc

SEQ ID NO: 1545199 - RNA, 19 nt, Artificial Sequence
  Description of Artificial Sequence: Synthetic oligonucleotide
  Antisense strand to SEQ ID NO: 1545198
gaauucucacaacagcccg

SEQ ID NO: 1545200 - RNA, 19 nt, Artificial Sequence
  Description of Artificial Sequence: Synthetic oligonucleotide
  Sense strand starting at position 3422 of SEQ ID NO: 1245211
ucagacuagguuuguaaca

SEQ ID NO: 1545201 - RNA, 19 nt, Artificial Sequence
  Description of Artificial Sequence: Synthetic oligonucleotide
  Antisense strand to SEQ ID NO: 1545200
uguuacaaaccuagucuga

SEQ ID NO: 1545202 - RNA, 19 nt, Artificial Sequence
  Description of Artificial Sequence: Synthetic oligonucleotide
  Sense strand starting at position 3434 of SEQ ID NO: 1245211
uguaacagugcucagggaa

SEQ ID NO: 1545203 - RNA, 19 nt, Artificial Sequence
  Description of Artificial Sequence: Synthetic oligonucleotide
  Antisense strand to SEQ ID NO: 1545202
uucccugagcacuguuaca

SEQ ID NO: 1545204 - RNA, 19 nt, Artificial Sequence
  Description of Artificial Sequence: Synthetic oligonucleotide
  Sense strand starting at position 3437 of SEQ ID NO: 1245211
aacagugcucagggaaauc

SEQ ID NO: 1545205 - RNA, 19 nt, Artificial Sequence
  Description of Artificial Sequence: Synthetic oligonucleotide
  Antisense strand to SEQ ID NO: 1545204
gauuucccugagcacuguu

SEQ ID NO: 1545206 - RNA, 19 nt, Artificial Sequence
  Description of Artificial Sequence: Synthetic oligonucleotide
  Sense strand starting at position 3530 of SEQ ID NO: 1245211
agaaauaucuuugcuguag

SEQ ID NO: 1545207 - RNA, 19 nt, Artificial Sequence
  Description of Artificial Sequence: Synthetic oligonucleotide
  Antisense strand to SEQ ID NO: 1545206
cuacagcaaagauauuucu

SEQ ID NO: 1545208 - RNA, 19 nt, Artificial Sequence
  Description of Artificial Sequence: Synthetic oligonucleotide
  Sense strand starting at position 3534 of SEQ ID NO: 1245211
auaucuuugcuguagggaa

SEQ ID NO: 1545209 - RNA, 19 nt, Artificial Sequence
  Description of Artificial Sequence: Synthetic oligonucleotide
  Antisense strand to SEQ ID NO: 1545208
uucccuacagcaaagauau

SEQ ID NO: 1545210 - RNA, 19 nt, Artificial Sequence
  Description of Artificial Sequence: Synthetic oligonucleotide
  Sense strand starting at position 3562 of SEQ ID NO: 1245211
gcuggugaucauuggaaag

SEQ ID NO: 1545211 - RNA, 19 nt, Artificial Sequence
  Description of Artificial Sequence: Synthetic oligonucleotide
  Antisense strand to SEQ ID NO: 1545210
cuuuccaaugaucaccagc

SEQ ID NO: 1545212 - RNA, 19 nt, Artificial Sequence
  Description of Artificial Sequence: Synthetic oligonucleotide
  Sense strand starting at position 3580 of SEQ ID NO: 1245211
gcaaacuuguaaguggaga

SEQ ID NO: 1545213 - RNA, 19 nt, Artificial Sequence
  Description of Artificial Sequence: Synthetic oligonucleotide
  Antisense strand to SEQ ID NO: 1545212
ucuccacuuacaaguuugc

SEQ ID NO: 1545214 - RNA, 19 nt, Artificial Sequence
  Description of Artificial Sequence: Synthetic oligonucleotide
  Sense strand starting at position 3604 of SEQ ID NO: 1245211
guagaugaacucugaugac

SEQ ID NO: 1545215 - RNA, 19 nt, Artificial Sequence
  Description of Artificial Sequence: Synthetic oligonucleotide
  Antisense strand to SEQ ID NO: 1545214
gucaucagaguucaucuac

SEQ ID NO: 1545216 - RNA, 19 nt, Artificial Sequence
  Description of Artificial Sequence: Synthetic oligonucleotide
  Sense strand starting at position 3613 of SEQ ID NO: 1245211
cucugaugaccauguuaca

SEQ ID NO: 1545217 - RNA, 19 nt, Artificial Sequence
  Description of Artificial Sequence: Synthetic oligonucleotide
  Antisense strand to SEQ ID NO: 1545216
uguaacauggucaucagag

SEQ ID NO: 1545218 - RNA, 19 nt, Artificial Sequence
  Description of Artificial Sequence: Synthetic oligonucleotide
  Sense strand starting at position 233 of SEQ ID NO: 1245212
cucugauuucuauguuacg

SEQ ID NO: 1545219 - RNA, 19 nt, Artificial Sequence
  Description of Artificial Sequence: Synthetic oligonucleotide
  Antisense strand to SEQ ID NO: 1545218
cguaacauagaaaucagag

SEQ ID NO: 1545220 - RNA, 19 nt, Artificial Sequence
  Description of Artificial Sequence: Synthetic oligonucleotide
  Sense strand starting at position 264 of SEQ ID NO: 1245212
guguccaaugcuuaugaau

SEQ ID NO: 1545221 - RNA, 19 nt, Artificial Sequence
  Description of Artificial Sequence: Synthetic oligonucleotide
  Antisense strand to SEQ ID NO: 1545220
auucauaagcauuggacac

SEQ ID NO: 1545222 - RNA, 19 nt, Artificial Sequence
  Description of Artificial Sequence: Synthetic oligonucleotide
  Sense strand starting at position 386 of SEQ ID NO: 1245212
guagcaugacauuggaaau

SEQ ID NO: 1545223 - RNA, 19 nt, Artificial Sequence
  Description of Artificial Sequence: Synthetic oligonucleotide
  Antisense strand to SEQ ID NO: 1545222
auuuccaaugucaugcuac

SEQ ID NO: 1545224 - RNA, 19 nt, Artificial Sequence
  Description of Artificial Sequence: Synthetic oligonucleotide
  Sense strand starting at position 501 of SEQ ID NO: 1245212
guugcagaaguacaauauu

SEQ ID NO: 1545225 - RNA, 19 nt, Artificial Sequence
  Description of Artificial Sequence: Synthetic oligonucleotide
  Antisense strand to SEQ ID NO: 1545224
aauauuguacuucugcaac

SEQ ID NO: 1545226 - RNA, 19 nt, Artificial Sequence
  Description of Artificial Sequence: Synthetic oligonucleotide
  Sense strand starting at position 630 of SEQ ID NO: 1245212
agaugaucucuuugaaggu

SEQ ID NO: 1545227 - RNA, 19 nt, Artificial Sequence
  Description of Artificial Sequence: Synthetic oligonucleotide
  Antisense strand to SEQ ID NO: 1545226
accuucaaagagaucaucu

SEQ ID NO: 1545228 - RNA, 19 nt, Artificial Sequence
  Description of Artificial Sequence: Synthetic oligonucleotide
  Sense strand starting at position 674 of SEQ ID NO: 1245212
gcauaaaucagaggaucga

SEQ ID NO: 1545229 - RNA, 19 nt, Artificial Sequence
  Description of Artificial Sequence: Synthetic oligonucleotide
  Antisense strand to SEQ ID NO: 1545228
ucgauccucugauuuaugc

SEQ ID NO: 1545230 - RNA, 19 nt, Artificial Sequence
  Description of Artificial Sequence: Synthetic oligonucleotide
  Sense strand starting at position 1009 of SEQ ID NO: 1245212
acuacuaucugaguaaaug

SEQ ID NO: 1545231 - RNA, 19 nt, Artificial Sequence
  Description of Artificial Sequence: Synthetic oligonucleotide
  Antisense strand to SEQ ID NO: 1545230
cauuuacucagauaguagu

SEQ ID NO: 1545232 - RNA, 19 nt, Artificial Sequence
  Description of Artificial Sequence: Synthetic oligonucleotide
  Sense strand starting at position 1051 of SEQ ID NO: 1245212
gcaagcugcccagauacaa

SEQ ID NO: 1545233 - RNA, 19 nt, Artificial Sequence
  Description of Artificial Sequence: Synthetic oligonucleotide
  Antisense strand to SEQ ID NO: 1545232
uuguaucugggcagcuugc

SEQ ID NO: 1545234 - RNA, 19 nt, Artificial Sequence
  Description of Artificial Sequence: Synthetic oligonucleotide
  Sense strand starting at position 1257 of SEQ ID NO: 1245212
uguuuaauagggugaugac

SEQ ID NO: 1545235 - RNA, 19 nt, Artificial Sequence
  Description of Artificial Sequence: Synthetic oligonucleotide
  Antisense strand to SEQ ID NO: 1545234
gucaucacccuauuaaaca

SEQ ID NO: 1545236 - RNA, 19 nt, Artificial Sequence
  Description of Artificial Sequence: Synthetic oligonucleotide
  Sense strand starting at position 1266 of SEQ ID NO: 1245212
gggugaugacaaugguuuc

SEQ ID NO: 1545237 - RNA, 19 nt, Artificial Sequence
  Description of Artificial Sequence: Synthetic oligonucleotide
  Antisense strand to SEQ ID NO: 1545236
gaaaccauugucaucaccc

SEQ ID NO: 1545238 - RNA, 19 nt, Artificial Sequence
  Description of Artificial Sequence: Synthetic oligonucleotide
  Sense strand starting at position 1269 of SEQ ID NO: 1245212
ugaugacaaugguuucuga

SEQ ID NO: 1545239 - RNA, 19 nt, Artificial Sequence
  Description of Artificial Sequence: Synthetic oligonucleotide
  Antisense strand to SEQ ID NO: 1545238
ucagaaaccauugucauca

SEQ ID NO: 1545240 - RNA, 19 nt, Artificial Sequence
  Description of Artificial Sequence: Synthetic oligonucleotide
  Sense strand starting at position 1504 of SEQ ID NO: 1245212
auugcugugcagucuguaa

SEQ ID NO: 1545241 - RNA, 19 nt, Artificial Sequence
  Description of Artificial Sequence: Synthetic oligonucleotide
  Antisense strand to SEQ ID NO: 1545240
uuacagacugcacagcaau

SEQ ID NO: 1545242 - RNA, 19 nt, Artificial Sequence
  Description of Artificial Sequence: Synthetic oligonucleotide
  Sense strand starting at position 1578 of SEQ ID NO: 1245212
ccaugcuggcaggagaauu

SEQ ID NO: 1545243 - RNA, 19 nt, Artificial Sequence
  Description of Artificial Sequence: Synthetic oligonucleotide
  Antisense strand to SEQ ID NO: 1545242
aauucuccugccagcaugg

SEQ ID NO: 1545244 - RNA, 19 nt, Artificial Sequence
  Description of Artificial Sequence: Synthetic oligonucleotide
  Sense strand starting at position 1635 of SEQ ID NO: 1245212
ggagucgucucaguuauuu

SEQ ID NO: 1545245 - RNA, 19 nt, Artificial Sequence
  Description of Artificial Sequence: Synthetic oligonucleotide
  Antisense strand to SEQ ID NO: 1545244
aaauaacugagacgacucc

SEQ ID NO: 1545246 - RNA, 19 nt, Artificial Sequence
  Description of Artificial Sequence: Synthetic oligonucleotide
  Sense strand starting at position 1729 of SEQ ID NO: 1245212
agagcuugacauggaguuu

SEQ ID NO: 1545247 - RNA, 19 nt, Artificial Sequence
  Description of Artificial Sequence: Synthetic oligonucleotide
  Antisense strand to SEQ ID NO: 1545246
aaacuccaugucaagcucu

SEQ ID NO: 1545248 - RNA, 19 nt, Artificial Sequence
  Description of Artificial Sequence: Synthetic oligonucleotide
  Sense strand starting at position 1759 of SEQ ID NO: 1245212
uagguacgacucuaaucau

SEQ ID NO: 1545249 - RNA, 19 nt, Artificial Sequence
  Description of Artificial Sequence: Synthetic oligonucleotide
  Antisense strand to SEQ ID NO: 1545248
augauuagagucguaccua

SEQ ID NO: 1545250 - RNA, 19 nt, Artificial Sequence
  Description of Artificial Sequence: Synthetic oligonucleotide
  Sense strand starting at position 1762 of SEQ ID NO: 1245212
guacgacucuaaucaucau

SEQ ID NO: 1545251 - RNA, 19 nt, Artificial Sequence
  Description of Artificial Sequence: Synthetic oligonucleotide
  Antisense strand to SEQ ID NO: 1545250
augaugauuagagucguac

SEQ ID NO: 1545252 - RNA, 19 nt, Artificial Sequence
  Description of Artificial Sequence: Synthetic oligonucleotide
  Sense strand starting at position 2117 of SEQ ID NO: 1245212
gucugugagacaggauuau

SEQ ID NO: 1545253 - RNA, 19 nt, Artificial Sequence
  Description of Artificial Sequence: Synthetic oligonucleotide
  Antisense strand to SEQ ID NO: 1545252
auaauccugucucacagac

SEQ ID NO: 1545254 - RNA, 19 nt, Artificial Sequence
  Description of Artificial Sequence: Synthetic oligonucleotide
  Sense strand starting at position 2121 of SEQ ID NO: 1245212
gugagacaggauuauguuu

SEQ ID NO: 1545255 - RNA, 19 nt, Artificial Sequence
  Description of Artificial Sequence: Synthetic oligonucleotide
  Antisense strand to SEQ ID NO: 1545254
aaacauaauccugucucac

SEQ ID NO: 1545256 - RNA, 19 nt, Artificial Sequence
  Description of Artificial Sequence: Synthetic oligonucleotide
  Sense strand starting at position 2146 of SEQ ID NO: 1245212
cacaaauugcagggugaca

SEQ ID NO: 1545257 - RNA, 19 nt, Artificial Sequence
  Description of Artificial Sequence: Synthetic oligonucleotide
  Antisense strand to SEQ ID NO: 1545256
ugucacccugcaauuugug

SEQ ID NO: 1545258 - RNA, 19 nt, Artificial Sequence
  Description of Artificial Sequence: Synthetic oligonucleotide
  Sense strand starting at position 2191 of SEQ ID NO: 1245212
gucugaagucgagaagcaa

SEQ ID NO: 1545259 - RNA, 19 nt, Artificial Sequence
  Description of Artificial Sequence: Synthetic oligonucleotide
  Antisense strand to SEQ ID NO: 1545258
uugcuucucgacuucagac

SEQ ID NO: 1545260 - RNA, 19 nt, Artificial Sequence
  Description of Artificial Sequence: Synthetic oligonucleotide
  Sense strand starting at position 2268 of SEQ ID NO: 1245212
agaggccauucugugauau

SEQ ID NO: 1545261 - RNA, 19 nt, Artificial Sequence
  Description of Artificial Sequence: Synthetic oligonucleotide
  Antisense strand to SEQ ID NO: 1545260
auaucacagaauggccucu

SEQ ID NO: 1545262 - RNA, 19 nt, Artificial Sequence
  Description of Artificial Sequence: Synthetic oligonucleotide
  Sense strand starting at position 2373 of SEQ ID NO: 1245212
ucuuauguuccugaaacag

SEQ ID NO: 1545263 - RNA, 19 nt, Artificial Sequence
  Description of Artificial Sequence: Synthetic oligonucleotide
  Antisense strand to SEQ ID NO: 1545262
cuguuucaggaacauaaga

SEQ ID NO: 1545264 - RNA, 19 nt, Artificial Sequence
  Description of Artificial Sequence: Synthetic oligonucleotide
  Sense strand starting at position 2524 of SEQ ID NO: 1245212
caugguauggcuggaagaa

SEQ ID NO: 1545265 - RNA, 19 nt, Artificial Sequence
  Description of Artificial Sequence: Synthetic oligonucleotide
  Antisense strand to SEQ ID NO: 1545264
uucuuccagccauaccaug

SEQ ID NO: 1545266 - RNA, 19 nt, Artificial Sequence
  Description of Artificial Sequence: Synthetic oligonucleotide
  Sense strand starting at position 2539 of SEQ ID NO: 1245212
agaacuauguagguagcua

SEQ ID NO: 1545267 - RNA, 19 nt, Artificial Sequence
  Description of Artificial Sequence: Synthetic oligonucleotide
  Antisense strand to SEQ ID NO: 1545266
uagcuaccuacauaguucu

SEQ ID NO: 1545268 - RNA, 19 nt, Artificial Sequence
  Description of Artificial Sequence: Synthetic oligonucleotide
  Sense strand starting at position 2675 of SEQ ID NO: 1245212
cucauacggcauuaaugua

SEQ ID NO: 1545269 - RNA, 19 nt, Artificial Sequence
  Description of Artificial Sequence: Synthetic oligonucleotide
  Antisense strand to SEQ ID NO: 1545268
uacauuaaugccguaugag

SEQ ID NO: 1545270 - RNA, 19 nt, Artificial Sequence
  Description of Artificial Sequence: Synthetic oligonucleotide
  Sense strand starting at position 2776 of SEQ ID NO: 1245212
guuuaacguaucguaaguu

SEQ ID NO: 1545271 - RNA, 19 nt, Artificial Sequence
  Description of Artificial Sequence: Synthetic oligonucleotide
  Antisense strand to SEQ ID NO: 1545270
aacuuacgauacguuaaac

SEQ ID NO: 1545272 - RNA, 19 nt, Artificial Sequence
  Description of Artificial Sequence: Synthetic oligonucleotide
  Sense strand starting at position 2788 of SEQ ID NO: 1245212
guaaguugaaccgacaaau

SEQ ID NO: 1545273 - RNA, 19 nt, Artificial Sequence
  Description of Artificial Sequence: Synthetic oligonucleotide
  Antisense strand to SEQ ID NO: 1545272
auuugucgguucaacuuac

SEQ ID NO: 1545274 - RNA, 19 nt, Artificial Sequence
  Description of Artificial Sequence: Synthetic oligonucleotide
  Sense strand starting at position 2838 of SEQ ID NO: 1245212
ggugauacuaguuaguuau

SEQ ID NO: 1545275 - RNA, 19 nt, Artificial Sequence
  Description of Artificial Sequence: Synthetic oligonucleotide
  Antisense strand to SEQ ID NO: 1545274
auaacuaacuaguaucacc

SEQ ID NO: 1545276 - RNA, 19 nt, Artificial Sequence
  Description of Artificial Sequence: Synthetic oligonucleotide
  Sense strand starting at position 2841 of SEQ ID NO: 1245212
gauacuaguuaguuauuga

SEQ ID NO: 1545277 - RNA, 19 nt, Artificial Sequence
  Description of Artificial Sequence: Synthetic oligonucleotide
  Antisense strand to SEQ ID NO: 1545276
ucaauaacuaacuaguauc

SEQ ID NO: 1545278 - RNA, 19 nt, Artificial Sequence
  Description of Artificial Sequence: Synthetic oligonucleotide
  Sense strand starting at position 2882 of SEQ ID NO: 1245212
ggugguuugaaagauggca

SEQ ID NO: 1545279 - RNA, 19 nt, Artificial Sequence
  Description of Artificial Sequence: Synthetic oligonucleotide
  Antisense strand to SEQ ID NO: 1545278
ugccaucuuucaaaccacc

SEQ ID NO: 1545280 - RNA, 19 nt, Artificial Sequence
  Description of Artificial Sequence: Synthetic oligonucleotide
  Sense strand starting at position 2890 of SEQ ID NO: 1245212
gaaagauggcagcaaaguu

SEQ ID NO: 1545281 - RNA, 19 nt, Artificial Sequence
  Description of Artificial Sequence: Synthetic oligonucleotide
  Antisense strand to SEQ ID NO: 1545280
aacuuugcugccaucuuuc

SEQ ID NO: 1545282 - RNA, 19 nt, Artificial Sequence
  Description of Artificial Sequence: Synthetic oligonucleotide
  Sense strand starting at position 3033 of SEQ ID NO: 1245212
aguuacuuagguugggaau

SEQ ID NO: 1545283 - RNA, 19 nt, Artificial Sequence
  Description of Artificial Sequence: Synthetic oligonucleotide
  Antisense strand to SEQ ID NO: 1545282
auucccaaccuaaguaacu

SEQ ID NO: 1545284 - RNA, 19 nt, Artificial Sequence
  Description of Artificial Sequence: Synthetic oligonucleotide
  Sense strand starting at position 3044 of SEQ ID NO: 1245212
uugggaauguauccucuuu

SEQ ID NO: 1545285 - RNA, 19 nt, Artificial Sequence
  Description of Artificial Sequence: Synthetic oligonucleotide
  Antisense strand to SEQ ID NO: 1545284
aaagaggauacauucccaa

SEQ ID NO: 1545286 - RNA, 19 nt, Artificial Sequence
  Description of Artificial Sequence: Synthetic oligonucleotide
  Sense strand starting at position 3076 of SEQ ID NO: 1245212
agacaauacuaaguauugu

SEQ ID NO: 1545287 - RNA, 19 nt, Artificial Sequence
  Description of Artificial Sequence: Synthetic oligonucleotide
  Antisense strand to SEQ ID NO: 1545286
acaauacuuaguauugucu

SEQ ID NO: 1545288 - RNA, 19 nt, Artificial Sequence
  Description of Artificial Sequence: Synthetic oligonucleotide
  Sense strand starting at position 3291 of SEQ ID NO: 1245212
ucucuugaaugauugcaca

SEQ ID NO: 1545289 - RNA, 19 nt, Artificial Sequence
  Description of Artificial Sequence: Synthetic oligonucleotide
  Antisense strand to SEQ ID NO: 1545288
ugugcaaucauucaagaga

SEQ ID NO: 1545290 - RNA, 19 nt, Artificial Sequence
  Description of Artificial Sequence: Synthetic oligonucleotide
  Sense strand starting at position 3401 of SEQ ID NO: 1245212
acaucaugagcuggaaaua

SEQ ID NO: 1545291 - RNA, 19 nt, Artificial Sequence
  Description of Artificial Sequence: Synthetic oligonucleotide
  Antisense strand to SEQ ID NO: 1545290
uauuuccagcucaugaugu

SEQ ID NO: 1545292 - RNA, 19 nt, Artificial Sequence
  Description of Artificial Sequence: Synthetic oligonucleotide
  Sense strand starting at position 3535 of SEQ ID NO: 1245212
agaguugugccauaaucau

SEQ ID NO: 1545293 - RNA, 19 nt, Artificial Sequence
  Description of Artificial Sequence: Synthetic oligonucleotide
  Antisense strand to SEQ ID NO: 1545292
augauuauggcacaacucu

SEQ ID NO: 1545294 - RNA, 19 nt, Artificial Sequence
  Description of Artificial Sequence: Synthetic oligonucleotide
  Sense strand starting at position 3577 of SEQ ID NO: 1245212
ucauuaucccauuagcagu

SEQ ID NO: 1545295 - RNA, 19 nt, Artificial Sequence
  Description of Artificial Sequence: Synthetic oligonucleotide
  Antisense strand to SEQ ID NO: 1545294
acugcuaaugggauaauga

SEQ ID NO: 1545296 - RNA, 19 nt, Artificial Sequence
  Description of Artificial Sequence: Synthetic oligonucleotide
  Sense strand starting at position 3751 of SEQ ID NO: 1245212
guuugcuuacacuauaaug

SEQ ID NO: 1545297 - RNA, 19 nt, Artificial Sequence
  Description of Artificial Sequence: Synthetic oligonucleotide
  Antisense strand to SEQ ID NO: 1545296
cauuauaguguaagcaaac

SEQ ID NO: 1545298 - RNA, 19 nt, Artificial Sequence
  Description of Artificial Sequence: Synthetic oligonucleotide
  Sense strand starting at position 153 of SEQ ID NO: 1245213
gaggcaggguuucuagcau

SEQ ID NO: 1545299 - RNA, 19 nt, Artificial Sequence
  Description of Artificial Sequence: Synthetic oligonucleotide
  Antisense strand to SEQ ID NO: 1545298
augcuagaaacccugccuc

SEQ ID NO: 1545300 - RNA, 19 nt, Artificial Sequence
  Description of Artificial Sequence: Synthetic oligonucleotide
  Sense strand starting at position 159 of SEQ ID NO: 1245213
ggguuucuagcauaagguu

SEQ ID NO: 1545301 - RNA, 19 nt, Artificial Sequence
  Description of Artificial Sequence: Synthetic oligonucleotide
  Antisense strand to SEQ ID NO: 1545300
aaccuuaugcuagaaaccc

SEQ ID NO: 1545302 - RNA, 19 nt, Artificial Sequence
  Description of Artificial Sequence: Synthetic oligonucleotide
  Sense strand starting at position 191 of SEQ ID NO: 1245213
agcgcaacaccaugauuga

SEQ ID NO: 1545303 - RNA, 19 nt, Artificial Sequence
  Description of Artificial Sequence: Synthetic oligonucleotide
  Antisense strand to SEQ ID NO: 1545302
ucaaucaugguguugcgcu

SEQ ID NO: 1545304 - RNA, 19 nt, Artificial Sequence
  Description of Artificial Sequence: Synthetic oligonucleotide
  Sense strand starting at position 198 of SEQ ID NO: 1245213
caccaugauugacagaagu

SEQ ID NO: 1545305 - RNA, 19 nt, Artificial Sequence
  Description of Artificial Sequence: Synthetic oligonucleotide
  Antisense strand to SEQ ID NO: 1545304
acuucugucaaucauggug

SEQ ID NO: 1545306 - RNA, 19 nt, Artificial Sequence
  Description of Artificial Sequence: Synthetic oligonucleotide
  Sense strand starting at position 298 of SEQ ID NO: 1245213
ugaacagauugcuucugau

SEQ ID NO: 1545307 - RNA, 19 nt, Artificial Sequence
  Description of Artificial Sequence: Synthetic oligonucleotide
  Antisense strand to SEQ ID NO: 1545306
aucagaagcaaucuguuca

SEQ ID NO: 1545308 - RNA, 19 nt, Artificial Sequence
  Description of Artificial Sequence: Synthetic oligonucleotide
  Sense strand starting at position 302 of SEQ ID NO: 1245213
cagauugcuucugauggaa

SEQ ID NO: 1545309 - RNA, 19 nt, Artificial Sequence
  Description of Artificial Sequence: Synthetic oligonucleotide
  Antisense strand to SEQ ID NO: 1545308
uuccaucagaagcaaucug

SEQ ID NO: 1545310 - RNA, 19 nt, Artificial Sequence
  Description of Artificial Sequence: Synthetic oligonucleotide
  Sense strand starting at position 304 of SEQ ID NO: 1245213
gauugcuucugauggaaag

SEQ ID NO: 1545311 - RNA, 19 nt, Artificial Sequence
  Description of Artificial Sequence: Synthetic oligonucleotide
  Antisense strand to SEQ ID NO: 1545310
cuuuccaucagaagcaauc

SEQ ID NO: 1545312 - RNA, 19 nt, Artificial Sequence
  Description of Artificial Sequence: Synthetic oligonucleotide
  Sense strand starting at position 305 of SEQ ID NO: 1245213
auugcuucugauggaaaga

SEQ ID NO: 1545313 - RNA, 19 nt, Artificial Sequence
  Description of Artificial Sequence: Synthetic oligonucleotide
  Antisense strand to SEQ ID NO: 1545312
ucuuuccaucagaagcaau

SEQ ID NO: 1545314 - RNA, 19 nt, Artificial Sequence
  Description of Artificial Sequence: Synthetic oligonucleotide
  Sense strand starting at position 586 of SEQ ID NO: 1245213
guaagaaauugucaugacu

SEQ ID NO: 1545315 - RNA, 19 nt, Artificial Sequence
  Description of Artificial Sequence: Synthetic oligonucleotide
  Antisense strand to SEQ ID NO: 1545314
agucaugacaauuucuuac

SEQ ID NO: 1545316 - RNA, 19 nt, Artificial Sequence
  Description of Artificial Sequence: Synthetic oligonucleotide
  Sense strand starting at position 678 of SEQ ID NO: 1245213
gcccaugucugagcuggua

SEQ ID NO: 1545317 - RNA, 19 nt, Artificial Sequence
  Description of Artificial Sequence: Synthetic oligonucleotide
  Antisense strand to SEQ ID NO: 1545316
uaccagcucagacaugggc

SEQ ID NO: 1545318 - RNA, 19 nt, Artificial Sequence
  Description of Artificial Sequence: Synthetic oligonucleotide
  Sense strand starting at position 680 of SEQ ID NO: 1245213
ccaugucugagcugguaaa

SEQ ID NO: 1545319 - RNA, 19 nt, Artificial Sequence
  Description of Artificial Sequence: Synthetic oligonucleotide
  Antisense strand to SEQ ID NO: 1545318
uuuaccagcucagacaugg

SEQ ID NO: 1545320 - RNA, 19 nt, Artificial Sequence
  Description of Artificial Sequence: Synthetic oligonucleotide
  Sense strand starting at position 2213 of SEQ ID NO: 1245213
acaugcaucuuacuagaga

SEQ ID NO: 1545321 - RNA, 19 nt, Artificial Sequence
  Description of Artificial Sequence: Synthetic oligonucleotide
  Antisense strand to SEQ ID NO: 1545320
ucucuaguaagaugcaugu

SEQ ID NO: 1545322 - RNA, 19 nt, Artificial Sequence
  Description of Artificial Sequence: Synthetic oligonucleotide
  Sense strand starting at position 2214 of SEQ ID NO: 1245213
caugcaucuuacuagagag

SEQ ID NO: 1545323 - RNA, 19 nt, Artificial Sequence
  Description of Artificial Sequence: Synthetic oligonucleotide
  Antisense strand to SEQ ID NO: 1545322
cucucuaguaagaugcaug

SEQ ID NO: 1545324 - RNA, 19 nt, Artificial Sequence
  Description of Artificial Sequence: Synthetic oligonucleotide
  Sense strand starting at position 2418 of SEQ ID NO: 1245213
cccguauucccuuaagaca

SEQ ID NO: 1545325 - RNA, 19 nt, Artificial Sequence
  Description of Artificial Sequence: Synthetic oligonucleotide
  Antisense strand to SEQ ID NO: 1545324
ugucuuaagggaauacggg

SEQ ID NO: 1545326 - RNA, 19 nt, Artificial Sequence
  Description of Artificial Sequence: Synthetic oligonucleotide
  Sense strand starting at position 2496 of SEQ ID NO: 1245213
ccuccacagcuguaaguaa

SEQ ID NO: 1545327 - RNA, 19 nt, Artificial Sequence
  Description of Artificial Sequence: Synthetic oligonucleotide
  Antisense strand to SEQ ID NO: 1545326
uuacuuacagcuguggagg

SEQ ID NO: 1545328 - RNA, 19 nt, Artificial Sequence
  Description of Artificial Sequence: Synthetic oligonucleotide
  Sense strand starting at position 2520 of SEQ ID NO: 1245213
uaaccagaauggucuguua

SEQ ID NO: 1545329 - RNA, 19 nt, Artificial Sequence
  Description of Artificial Sequence: Synthetic oligonucleotide
  Antisense strand to SEQ ID NO: 1545328
uaacagaccauucugguua

SEQ ID NO: 1545330 - RNA, 19 nt, Artificial Sequence
  Description of Artificial Sequence: Synthetic oligonucleotide
  Sense strand starting at position 2531 of SEQ ID NO: 1245213
gucuguuacccugagcaaa

SEQ ID NO: 1545331 - RNA, 19 nt, Artificial Sequence
  Description of Artificial Sequence: Synthetic oligonucleotide
  Antisense strand to SEQ ID NO: 1545330
uuugcucaggguaacagac

SEQ ID NO: 1545332 - RNA, 19 nt, Artificial Sequence
  Description of Artificial Sequence: Synthetic oligonucleotide
  Sense strand starting at position 2533 of SEQ ID NO: 1245213
cuguuacccugagcaaagu

SEQ ID NO: 1545333 - RNA, 19 nt, Artificial Sequence
  Description of Artificial Sequence: Synthetic oligonucleotide
  Antisense strand to SEQ ID NO: 1545332
acuuugcucaggguaacag

SEQ ID NO: 1545334 - RNA, 19 nt, Artificial Sequence
  Description of Artificial Sequence: Synthetic oligonucleotide
  Sense strand starting at position 2568 of SEQ ID NO: 1245213
cugucuuaaguuuguaagu

SEQ ID NO: 1545335 - RNA, 19 nt, Artificial Sequence
  Description of Artificial Sequence: Synthetic oligonucleotide
  Antisense strand to SEQ ID NO: 1545334
acuuacaaacuuaagacag

SEQ ID NO: 1545336 - RNA, 19 nt, Artificial Sequence
  Description of Artificial Sequence: Synthetic oligonucleotide
  Sense strand starting at position 2591 of SEQ ID NO: 1245213
gcugcacauacguguuaaa

SEQ ID NO: 1545337 - RNA, 19 nt, Artificial Sequence
  Description of Artificial Sequence: Synthetic oligonucleotide
  Antisense strand to SEQ ID NO: 1545336
uuuaacacguaugugcagc

SEQ ID NO: 1545338 - RNA, 19 nt, Artificial Sequence
  Description of Artificial Sequence: Synthetic oligonucleotide
  Sense strand starting at position 2669 of SEQ ID NO: 1245213
uguggaauuccaugagguc

SEQ ID NO: 1545339 - RNA, 19 nt, Artificial Sequence
  Description of Artificial Sequence: Synthetic oligonucleotide
  Antisense strand to SEQ ID NO: 1545338
gaccucauggaauuccaca

SEQ ID NO: 1545340 - RNA, 19 nt, Artificial Sequence
  Description of Artificial Sequence: Synthetic oligonucleotide
  Sense strand starting at position 2670 of SEQ ID NO: 1245213
guggaauuccaugaggucu

SEQ ID NO: 1545341 - RNA, 19 nt, Artificial Sequence
  Description of Artificial Sequence: Synthetic oligonucleotide
  Antisense strand to SEQ ID NO: 1545340
agaccucauggaauuccac

SEQ ID NO: 1545342 - RNA, 19 nt, Artificial Sequence
  Description of Artificial Sequence: Synthetic oligonucleotide
  Sense strand starting at position 2676 of SEQ ID NO: 1245213
uuccaugaggucugcuuga

SEQ ID NO: 1545343 - RNA, 19 nt, Artificial Sequence
  Description of Artificial Sequence: Synthetic oligonucleotide
  Antisense strand to SEQ ID NO: 1545342
ucaagcagaccucauggaa

SEQ ID NO: 1545344 - RNA, 19 nt, Artificial Sequence
  Description of Artificial Sequence: Synthetic oligonucleotide
  Sense strand starting at position 2681 of SEQ ID NO: 1245213
ugaggucugcuugauaguu

SEQ ID NO: 1545345 - RNA, 19 nt, Artificial Sequence
  Description of Artificial Sequence: Synthetic oligonucleotide
  Antisense strand to SEQ ID NO: 1545344
aacuaucaagcagaccuca

SEQ ID NO: 1545346 - RNA, 19 nt, Artificial Sequence
  Description of Artificial Sequence: Synthetic oligonucleotide
  Sense strand starting at position 2686 of SEQ ID NO: 1245213
ucugcuugauaguuuauua

SEQ ID NO: 1545347 - RNA, 19 nt, Artificial Sequence
  Description of Artificial Sequence: Synthetic oligonucleotide
  Antisense strand to SEQ ID NO: 1545346
uaauaaacuaucaagcaga

SEQ ID NO: 1545348 - RNA, 19 nt, Artificial Sequence
  Description of Artificial Sequence: Synthetic oligonucleotide
  Sense strand starting at position 2710 of SEQ ID NO: 1245213
gcgugagcacaguauuuaa

SEQ ID NO: 1545349 - RNA, 19 nt, Artificial Sequence
  Description of Artificial Sequence: Synthetic oligonucleotide
  Antisense strand to SEQ ID NO: 1545348
uuaaauacugugcucacgc

SEQ ID NO: 1545350 - RNA, 19 nt, Artificial Sequence
  Description of Artificial Sequence: Synthetic oligonucleotide
  Sense strand starting at position 2822 of SEQ ID NO: 1245213
cagaucacaucuggagaga

SEQ ID NO: 1545351 - RNA, 19 nt, Artificial Sequence
  Description of Artificial Sequence: Synthetic oligonucleotide
  Antisense strand to SEQ ID NO: 1545350
ucucuccagaugugaucug

SEQ ID NO: 1545352 - RNA, 19 nt, Artificial Sequence
  Description of Artificial Sequence: Synthetic oligonucleotide
  Sense strand starting at position 2872 of SEQ ID NO: 1245213
guaaucacuuugggaggga

SEQ ID NO: 1545353 - RNA, 19 nt, Artificial Sequence
  Description of Artificial Sequence: Synthetic oligonucleotide
  Antisense strand to SEQ ID NO: 1545352
ucccucccaaagugauuac

SEQ ID NO: 1545354 - RNA, 19 nt, Artificial Sequence
  Description of Artificial Sequence: Synthetic oligonucleotide
  Sense strand starting at position 3093 of SEQ ID NO: 1245213
ugaguuccagcucagauau

SEQ ID NO: 1545355 - RNA, 19 nt, Artificial Sequence
  Description of Artificial Sequence: Synthetic oligonucleotide
  Antisense strand to SEQ ID NO: 1545354
auaucugagcuggaacuca

SEQ ID NO: 1545356 - RNA, 19 nt, Artificial Sequence
  Description of Artificial Sequence: Synthetic oligonucleotide
  Sense strand starting at position 3095 of SEQ ID NO: 1245213
aguuccagcucagauauau

SEQ ID NO: 1545357 - RNA, 19 nt, Artificial Sequence
  Description of Artificial Sequence: Synthetic oligonucleotide
  Antisense strand to SEQ ID NO: 1545356
auauaucugagcuggaacu

SEQ ID NO: 1545358 - RNA, 19 nt, Artificial Sequence
  Description of Artificial Sequence: Synthetic oligonucleotide
  Sense strand starting at position 3104 of SEQ ID NO: 1245213
ucagauauaucgguaaauu

SEQ ID NO: 1545359 - RNA, 19 nt, Artificial Sequence
  Description of Artificial Sequence: Synthetic oligonucleotide
  Antisense strand to SEQ ID NO: 1545358
aauuuaccgauauaucuga

SEQ ID NO: 1545360 - RNA, 19 nt, Artificial Sequence
  Description of Artificial Sequence: Synthetic oligonucleotide
  Sense strand starting at position 3113 of SEQ ID NO: 1245213
ucgguaaauuaugcaauua

SEQ ID NO: 1545361 - RNA, 19 nt, Artificial Sequence
  Description of Artificial Sequence: Synthetic oligonucleotide
  Antisense strand to SEQ ID NO: 1545360
uaauugcauaauuuaccga

SEQ ID NO: 1545362 - RNA, 19 nt, Artificial Sequence
  Description of Artificial Sequence: Synthetic oligonucleotide
  Sense strand starting at position 3140 of SEQ ID NO: 1245213
aucauaucgagcuguguua

SEQ ID NO: 1545363 - RNA, 19 nt, Artificial Sequence
  Description of Artificial Sequence: Synthetic oligonucleotide
  Antisense strand to SEQ ID NO: 1545362
uaacacagcucgauaugau

SEQ ID NO: 1545364 - RNA, 19 nt, Artificial Sequence
  Description of Artificial Sequence: Synthetic oligonucleotide
  Sense strand starting at position 3142 of SEQ ID NO: 1245213
cauaucgagcuguguuaaa

SEQ ID NO: 1545365 - RNA, 19 nt, Artificial Sequence
  Description of Artificial Sequence: Synthetic oligonucleotide
  Antisense strand to SEQ ID NO: 1545364
uuuaacacagcucgauaug

SEQ ID NO: 1545366 - RNA, 19 nt, Artificial Sequence
  Description of Artificial Sequence: Synthetic oligonucleotide
  Sense strand starting at position 3222 of SEQ ID NO: 1245213
ugcauuuauucucaggauc

SEQ ID NO: 1545367 - RNA, 19 nt, Artificial Sequence
  Description of Artificial Sequence: Synthetic oligonucleotide
  Antisense strand to SEQ ID NO: 1545366
gauccugagaauaaaugca

SEQ ID NO: 1545368 - RNA, 19 nt, Artificial Sequence
  Description of Artificial Sequence: Synthetic oligonucleotide
  Sense strand starting at position 3763 of SEQ ID NO: 1245213
cggguuaguuaguugggua

SEQ ID NO: 1545369 - RNA, 19 nt, Artificial Sequence
  Description of Artificial Sequence: Synthetic oligonucleotide
  Antisense strand to SEQ ID NO: 1545368
uacccaacuaacuaacccg

SEQ ID NO: 1545370 - RNA, 19 nt, Artificial Sequence
  Description of Artificial Sequence: Synthetic oligonucleotide
  Sense strand starting at position 3785 of SEQ ID NO: 1245213
gggugguugccugauuggu

SEQ ID NO: 1545371 - RNA, 19 nt, Artificial Sequence
  Description of Artificial Sequence: Synthetic oligonucleotide
  Antisense strand to SEQ ID NO: 1545370
accaaucaggcaaccaccc

SEQ ID NO: 1545372 - RNA, 19 nt, Artificial Sequence
  Description of Artificial Sequence: Synthetic oligonucleotide
  Sense strand starting at position 3793 of SEQ ID NO: 1245213
gccugauugguugauuggu

SEQ ID NO: 1545373 - RNA, 19 nt, Artificial Sequence
  Description of Artificial Sequence: Synthetic oligonucleotide
  Antisense strand to SEQ ID NO: 1545372
accaaucaaccaaucaggc

SEQ ID NO: 1545374 - RNA, 19 nt, Artificial Sequence
  Description of Artificial Sequence: Synthetic oligonucleotide
  Sense strand starting at position 3971 of SEQ ID NO: 1245213
uugcuugguugagugagua

SEQ ID NO: 1545375 - RNA, 19 nt, Artificial Sequence
  Description of Artificial Sequence: Synthetic oligonucleotide
  Antisense strand to SEQ ID NO: 1545374
uacucacucaaccaagcaa

SEQ ID NO: 1545376 - RNA, 19 nt, Artificial Sequence
  Description of Artificial Sequence: Synthetic oligonucleotide
  Sense strand starting at position 3981 of SEQ ID NO: 1245213
gagugaguagaugguuacu

SEQ ID NO: 1545377 - RNA, 19 nt, Artificial Sequence
  Description of Artificial Sequence: Synthetic oligonucleotide
  Antisense strand to SEQ ID NO: 1545376
aguaaccaucuacucacuc

SEQ ID NO: 1545378 - RNA, 19 nt, Artificial Sequence
  Description of Artificial Sequence: Synthetic oligonucleotide
  Sense strand starting at position 295 of SEQ ID NO: 1245214
agaagcauagcccaacauu

SEQ ID NO: 1545379 - RNA, 19 nt, Artificial Sequence
  Description of Artificial Sequence: Synthetic oligonucleotide
  Antisense strand to SEQ ID NO: 1545378
aauguugggcuaugcuucu

SEQ ID NO: 1545380 - RNA, 19 nt, Artificial Sequence
  Description of Artificial Sequence: Synthetic oligonucleotide
  Sense strand starting at position 515 of SEQ ID NO: 1245214
cccagaagugcuggaauua

SEQ ID NO: 1545381 - RNA, 19 nt, Artificial Sequence
  Description of Artificial Sequence: Synthetic oligonucleotide
  Antisense strand to SEQ ID NO: 1545380
uaauuccagcacuucuggg

SEQ ID NO: 1545382 - RNA, 19 nt, Artificial Sequence
  Description of Artificial Sequence: Synthetic oligonucleotide
  Sense strand starting at position 645 of SEQ ID NO: 1245214
ucgcaauuagcuuaacaac

SEQ ID NO: 1545383 - RNA, 19 nt, Artificial Sequence
  Description of Artificial Sequence: Synthetic oligonucleotide
  Antisense strand to SEQ ID NO: 1545382
guuguuaagcuaauugcga

SEQ ID NO: 1545384 - RNA, 19 nt, Artificial Sequence
  Description of Artificial Sequence: Synthetic oligonucleotide
  Sense strand starting at position 681 of SEQ ID NO: 1245214
aguauacacguuuaaggga

SEQ ID NO: 1545385 - RNA, 19 nt, Artificial Sequence
  Description of Artificial Sequence: Synthetic oligonucleotide
  Antisense strand to SEQ ID NO: 1545384
ucccuuaaacguguauacu

SEQ ID NO: 1545386 - RNA, 19 nt, Artificial Sequence
  Description of Artificial Sequence: Synthetic oligonucleotide
  Sense strand starting at position 731 of SEQ ID NO: 1245214
accacuugaguuugaaucu

SEQ ID NO: 1545387 - RNA, 19 nt, Artificial Sequence
  Description of Artificial Sequence: Synthetic oligonucleotide
  Antisense strand to SEQ ID NO: 1545386
agauucaaacucaaguggu

SEQ ID NO: 1545388 - RNA, 19 nt, Artificial Sequence
  Description of Artificial Sequence: Synthetic oligonucleotide
  Sense strand starting at position 863 of SEQ ID NO: 1245214
uugagauaauccguguaga

SEQ ID NO: 1545389 - RNA, 19 nt, Artificial Sequence
  Description of Artificial Sequence: Synthetic oligonucleotide
  Antisense strand to SEQ ID NO: 1545388
ucuacacggauuaucucaa

SEQ ID NO: 1545390 - RNA, 19 nt, Artificial Sequence
  Description of Artificial Sequence: Synthetic oligonucleotide
  Sense strand starting at position 864 of SEQ ID NO: 1245214
ugagauaauccguguagaa

SEQ ID NO: 1545391 - RNA, 19 nt, Artificial Sequence
  Description of Artificial Sequence: Synthetic oligonucleotide
  Antisense strand to SEQ ID NO: 1545390
uucuacacggauuaucuca

SEQ ID NO: 1545392 - RNA, 19 nt, Artificial Sequence
  Description of Artificial Sequence: Synthetic oligonucleotide
  Sense strand starting at position 866 of SEQ ID NO: 1245214
agauaauccguguagaaac

SEQ ID NO: 1545393 - RNA, 19 nt, Artificial Sequence
  Description of Artificial Sequence: Synthetic oligonucleotide
  Antisense strand to SEQ ID NO: 1545392
guuucuacacggauuaucu

SEQ ID NO: 1545394 - RNA, 19 nt, Artificial Sequence
  Description of Artificial Sequence: Synthetic oligonucleotide
  Sense strand starting at position 868 of SEQ ID NO: 1245214
auaauccguguagaaacua

SEQ ID NO: 1545395 - RNA, 19 nt, Artificial Sequence
  Description of Artificial Sequence: Synthetic oligonucleotide
  Antisense strand to SEQ ID NO: 1545394
uaguuucuacacggauuau

SEQ ID NO: 1545396 - RNA, 19 nt, Artificial Sequence
  Description of Artificial Sequence: Synthetic oligonucleotide
  Sense strand starting at position 987 of SEQ ID NO: 1245214
aggugauagccacaagcau

SEQ ID NO: 1545397 - RNA, 19 nt, Artificial Sequence
  Description of Artificial Sequence: Synthetic oligonucleotide
  Antisense strand to SEQ ID NO: 1545396
augcuuguggcuaucaccu

SEQ ID NO: 1545398 - RNA, 19 nt, Artificial Sequence
  Description of Artificial Sequence: Synthetic oligonucleotide
  Sense strand starting at position 1000 of SEQ ID NO: 1245214
aagcaucaggaagguaaau

SEQ ID NO: 1545399 - RNA, 19 nt, Artificial Sequence
  Description of Artificial Sequence: Synthetic oligonucleotide
  Antisense strand to SEQ ID NO: 1545398
auuuaccuuccugaugcuu

SEQ ID NO: 1545400 - RNA, 19 nt, Artificial Sequence
  Description of Artificial Sequence: Synthetic oligonucleotide
  Sense strand starting at position 1059 of SEQ ID NO: 1245214
guguuaauuugaucacgcu

SEQ ID NO: 1545401 - RNA, 19 nt, Artificial Sequence
  Description of Artificial Sequence: Synthetic oligonucleotide
  Antisense strand to SEQ ID NO: 1545400
agcgugaucaaauuaacac

SEQ ID NO: 1545402 - RNA, 19 nt, Artificial Sequence
  Description of Artificial Sequence: Synthetic oligonucleotide
  Sense strand starting at position 1174 of SEQ ID NO: 1245214
uaguuaucgccagcgugaa

SEQ ID NO: 1545403 - RNA, 19 nt, Artificial Sequence
  Description of Artificial Sequence: Synthetic oligonucleotide
  Antisense strand to SEQ ID NO: 1545402
uucacgcuggcgauaacua

SEQ ID NO: 1545404 - RNA, 19 nt, Artificial Sequence
  Description of Artificial Sequence: Synthetic oligonucleotide
  Sense strand starting at position 1348 of SEQ ID NO: 1245214
aggagauaggcuugccaaa

SEQ ID NO: 1545405 - RNA, 19 nt, Artificial Sequence
  Description of Artificial Sequence: Synthetic oligonucleotide
  Antisense strand to SEQ ID NO: 1545404
uuuggcaagccuaucuccu

SEQ ID NO: 1545406 - RNA, 19 nt, Artificial Sequence
  Description of Artificial Sequence: Synthetic oligonucleotide
  Sense strand starting at position 1366 of SEQ ID NO: 1245214
aggguuuccagccacagaa

SEQ ID NO: 1545407 - RNA, 19 nt, Artificial Sequence
  Description of Artificial Sequence: Synthetic oligonucleotide
  Antisense strand to SEQ ID NO: 1545406
uucuguggcuggaaacccu

SEQ ID NO: 1545408 - RNA, 19 nt, Artificial Sequence
  Description of Artificial Sequence: Synthetic oligonucleotide
  Sense strand starting at position 1487 of SEQ ID NO: 1245214
ggcggaggaaccuggaaau

SEQ ID NO: 1545409 - RNA, 19 nt, Artificial Sequence
  Description of Artificial Sequence: Synthetic oligonucleotide
  Antisense strand to SEQ ID NO: 1545408
auuuccagguuccuccgcc

SEQ ID NO: 1545410 - RNA, 19 nt, Artificial Sequence
  Description of Artificial Sequence: Synthetic oligonucleotide
  Sense strand starting at position 2466 of SEQ ID NO: 1245214
cuugcucuucugcagaauu

SEQ ID NO: 1545411 - RNA, 19 nt, Artificial Sequence
  Description of Artificial Sequence: Synthetic oligonucleotide
  Antisense strand to SEQ ID NO: 1545410
aauucugcagaagagcaag

SEQ ID NO: 1545412 - RNA, 19 nt, Artificial Sequence
  Description of Artificial Sequence: Synthetic oligonucleotide
  Sense strand starting at position 2550 of SEQ ID NO: 1245214
cugucacagucaccauaaa

SEQ ID NO: 1545413 - RNA, 19 nt, Artificial Sequence
  Description of Artificial Sequence: Synthetic oligonucleotide
  Antisense strand to SEQ ID NO: 1545412
uuuauggugacugugacag

SEQ ID NO: 1545414 - RNA, 19 nt, Artificial Sequence
  Description of Artificial Sequence: Synthetic oligonucleotide
  Sense strand starting at position 2551 of SEQ ID NO: 1245214
ugucacagucaccauaaau

SEQ ID NO: 1545415 - RNA, 19 nt, Artificial Sequence
  Description of Artificial Sequence: Synthetic oligonucleotide
  Antisense strand to SEQ ID NO: 1545414
auuuauggugacugugaca

SEQ ID NO: 1545416 - RNA, 19 nt, Artificial Sequence
  Description of Artificial Sequence: Synthetic oligonucleotide
  Sense strand starting at position 2564 of SEQ ID NO: 1245214
auaaauagaugcucaaugu

SEQ ID NO: 1545417 - RNA, 19 nt, Artificial Sequence
  Description of Artificial Sequence: Synthetic oligonucleotide
  Antisense strand to SEQ ID NO: 1545416
acauugagcaucuauuuau

SEQ ID NO: 1545418 - RNA, 19 nt, Artificial Sequence
  Description of Artificial Sequence: Synthetic oligonucleotide
  Sense strand starting at position 2612 of SEQ ID NO: 1245214
auugucuuguccuugaaag

SEQ ID NO: 1545419 - RNA, 19 nt, Artificial Sequence
  Description of Artificial Sequence: Synthetic oligonucleotide
  Antisense strand to SEQ ID NO: 1545418
cuuucaaggacaagacaau

SEQ ID NO: 1545420 - RNA, 19 nt, Artificial Sequence
  Description of Artificial Sequence: Synthetic oligonucleotide
  Sense strand starting at position 2677 of SEQ ID NO: 1245214
gguugugacaugggaggau

SEQ ID NO: 1545421 - RNA, 19 nt, Artificial Sequence
  Description of Artificial Sequence: Synthetic oligonucleotide
  Antisense strand to SEQ ID NO: 1545420
auccucccaugucacaacc

SEQ ID NO: 1545422 - RNA, 19 nt, Artificial Sequence
  Description of Artificial Sequence: Synthetic oligonucleotide
  Sense strand starting at position 2680 of SEQ ID NO: 1245214
ugugacaugggaggauauu

SEQ ID NO: 1545423 - RNA, 19 nt, Artificial Sequence
  Description of Artificial Sequence: Synthetic oligonucleotide
  Antisense strand to SEQ ID NO: 1545422
aauauccucccaugucaca

SEQ ID NO: 1545424 - RNA, 19 nt, Artificial Sequence
  Description of Artificial Sequence: Synthetic oligonucleotide
  Sense strand starting at position 2994 of SEQ ID NO: 1245214
ggugauaauccauaggugu

SEQ ID NO: 1545425 - RNA, 19 nt, Artificial Sequence
  Description of Artificial Sequence: Synthetic oligonucleotide
  Antisense strand to SEQ ID NO: 1545424
acaccuauggauuaucacc

SEQ ID NO: 1545426 - RNA, 19 nt, Artificial Sequence
  Description of Artificial Sequence: Synthetic oligonucleotide
  Sense strand starting at position 3033 of SEQ ID NO: 1245214
caggcaaggagagguuaua

SEQ ID NO: 1545427 - RNA, 19 nt, Artificial Sequence
  Description of Artificial Sequence: Synthetic oligonucleotide
  Antisense strand to SEQ ID NO: 1545426
uauaaccucuccuugccug

SEQ ID NO: 1545428 - RNA, 19 nt, Artificial Sequence
  Description of Artificial Sequence: Synthetic oligonucleotide
  Sense strand starting at position 3074 of SEQ ID NO: 1245214
ucugcuugccaggaacuua

SEQ ID NO: 1545429 - RNA, 19 nt, Artificial Sequence
  Description of Artificial Sequence: Synthetic oligonucleotide
  Antisense strand to SEQ ID NO: 1545428
uaaguuccuggcaagcaga

SEQ ID NO: 1545430 - RNA, 19 nt, Artificial Sequence
  Description of Artificial Sequence: Synthetic oligonucleotide
  Sense strand starting at position 3130 of SEQ ID NO: 1245214
accagugucuuucuacaua

SEQ ID NO: 1545431 - RNA, 19 nt, Artificial Sequence
  Description of Artificial Sequence: Synthetic oligonucleotide
  Antisense strand to SEQ ID NO: 1545430
uauguagaaagacacuggu

SEQ ID NO: 1545432 - RNA, 19 nt, Artificial Sequence
  Description of Artificial Sequence: Synthetic oligonucleotide
  Sense strand starting at position 3133 of SEQ ID NO: 1245214
agugucuuucuacauaaau

SEQ ID NO: 1545433 - RNA, 19 nt, Artificial Sequence
  Description of Artificial Sequence: Synthetic oligonucleotide
  Antisense strand to SEQ ID NO: 1545432
auuuauguagaaagacacu

SEQ ID NO: 1545434 - RNA, 19 nt, Artificial Sequence
  Description of Artificial Sequence: Synthetic oligonucleotide
  Sense strand starting at position 3152 of SEQ ID NO: 1245214
gcuucauuaguagagguga

SEQ ID NO: 1545435 - RNA, 19 nt, Artificial Sequence
  Description of Artificial Sequence: Synthetic oligonucleotide
  Antisense strand to SEQ ID NO: 1545434
ucaccucuacuaaugaagc

SEQ ID NO: 1545436 - RNA, 19 nt, Artificial Sequence
  Description of Artificial Sequence: Synthetic oligonucleotide
  Sense strand starting at position 3271 of SEQ ID NO: 1245214
agaaauaucgcacagcaug

SEQ ID NO: 1545437 - RNA, 19 nt, Artificial Sequence
  Description of Artificial Sequence: Synthetic oligonucleotide
  Antisense strand to SEQ ID NO: 1545436
caugcugugcgauauuucu

SEQ ID NO: 1545438 - RNA, 19 nt, Artificial Sequence
  Description of Artificial Sequence: Synthetic oligonucleotide
  Sense strand starting at position 3309 of SEQ ID NO: 1245214
uauauuucgcaauggcuga

SEQ ID NO: 1545439 - RNA, 19 nt, Artificial Sequence
  Description of Artificial Sequence: Synthetic oligonucleotide
  Antisense strand to SEQ ID NO: 1545438
ucagccauugcgaaauaua

SEQ ID NO: 1545440 - RNA, 19 nt, Artificial Sequence
  Description of Artificial Sequence: Synthetic oligonucleotide
  Sense strand starting at position 3514 of SEQ ID NO: 1245214
gugaucuugacucaccgaa

SEQ ID NO: 1545441 - RNA, 19 nt, Artificial Sequence
  Description of Artificial Sequence: Synthetic oligonucleotide
  Antisense strand to SEQ ID NO: 1545440
uucggugagucaagaucac

SEQ ID NO: 1545442 - RNA, 19 nt, Artificial Sequence
  Description of Artificial Sequence: Synthetic oligonucleotide
  Sense strand starting at position 3748 of SEQ ID NO: 1245214
gcccgaccauaauuauaua

SEQ ID NO: 1545443 - RNA, 19 nt, Artificial Sequence
  Description of Artificial Sequence: Synthetic oligonucleotide
  Antisense strand to SEQ ID NO: 1545442
uauauaauuauggucgggc

SEQ ID NO: 1545444 - RNA, 19 nt, Artificial Sequence
  Description of Artificial Sequence: Synthetic oligonucleotide
  Sense strand starting at position 3794 of SEQ ID NO: 1245214
aggacaguuuguccuacau

SEQ ID NO: 1545445 - RNA, 19 nt, Artificial Sequence
  Description of Artificial Sequence: Synthetic oligonucleotide
  Antisense strand to SEQ ID NO: 1545444
auguaggacaaacuguccu

SEQ ID NO: 1545446 - RNA, 19 nt, Artificial Sequence
  Description of Artificial Sequence: Synthetic oligonucleotide
  Sense strand starting at position 3798 of SEQ ID NO: 1245214
caguuuguccuacauucga

SEQ ID NO: 1545447 - RNA, 19 nt, Artificial Sequence
  Description of Artificial Sequence: Synthetic oligonucleotide
  Antisense strand to SEQ ID NO: 1545446
ucgaauguaggacaaacug

SEQ ID NO: 1545448 - RNA, 19 nt, Artificial Sequence
  Description of Artificial Sequence: Synthetic oligonucleotide
  Sense strand starting at position 3824 of SEQ ID NO: 1245214
cagauugaaaguuguagag

SEQ ID NO: 1545449 - RNA, 19 nt, Artificial Sequence
  Description of Artificial Sequence: Synthetic oligonucleotide
  Antisense strand to SEQ ID NO: 1545448
cucuacaacuuucaaucug

SEQ ID NO: 1545450 - RNA, 19 nt, Artificial Sequence
  Description of Artificial Sequence: Synthetic oligonucleotide
  Sense strand starting at position 3830 of SEQ ID NO: 1245214
gaaaguuguagagagcuau

SEQ ID NO: 1545451 - RNA, 19 nt, Artificial Sequence
  Description of Artificial Sequence: Synthetic oligonucleotide
  Antisense strand to SEQ ID NO: 1545450
auagcucucuacaacuuuc

SEQ ID NO: 1545452 - RNA, 19 nt, Artificial Sequence
  Description of Artificial Sequence: Synthetic oligonucleotide
  Sense strand starting at position 3834 of SEQ ID NO: 1245214
guuguagagagcuaucaug

SEQ ID NO: 1545453 - RNA, 19 nt, Artificial Sequence
  Description of Artificial Sequence: Synthetic oligonucleotide
  Antisense strand to SEQ ID NO: 1545452
caugauagcucucuacaac

SEQ ID NO: 1545454 - RNA, 19 nt, Artificial Sequence
  Description of Artificial Sequence: Synthetic oligonucleotide
  Sense strand starting at position 3974 of SEQ ID NO: 1245214
cacuuacagugauugguca

SEQ ID NO: 1545455 - RNA, 19 nt, Artificial Sequence
  Description of Artificial Sequence: Synthetic oligonucleotide
  Antisense strand to SEQ ID NO: 1545454
ugaccaaucacuguaagug

SEQ ID NO: 1545456 - RNA, 19 nt, Artificial Sequence
  Description of Artificial Sequence: Synthetic oligonucleotide
  Sense strand starting at position 3975 of SEQ ID NO: 1245214
acuuacagugauuggucaa

SEQ ID NO: 1545457 - RNA, 19 nt, Artificial Sequence
  Description of Artificial Sequence: Synthetic oligonucleotide
  Antisense strand to SEQ ID NO: 1545456
uugaccaaucacuguaagu

SEQ ID NO: 1545458 - RNA, 19 nt, Artificial Sequence
  Description of Artificial Sequence: Synthetic oligonucleotide
  Sense strand starting at position 5 of SEQ ID NO: 1245215
gcauaugaagccuggaaca

SEQ ID NO: 1545459 - RNA, 19 nt, Artificial Sequence
  Description of Artificial Sequence: Synthetic oligonucleotide
  Antisense strand to SEQ ID NO: 1545458
uguuccaggcuucauaugc

SEQ ID NO: 1545460 - RNA, 19 nt, Artificial Sequence
  Description of Artificial Sequence: Synthetic oligonucleotide
  Sense strand starting at position 60 of SEQ ID NO: 1245215
ccaguauuagaucaaaguu

SEQ ID NO: 1545461 - RNA, 19 nt, Artificial Sequence
  Description of Artificial Sequence: Synthetic oligonucleotide
  Antisense strand to SEQ ID NO: 1545460
aacuuugaucuaauacugg

SEQ ID NO: 1545462 - RNA, 19 nt, Artificial Sequence
  Description of Artificial Sequence: Synthetic oligonucleotide
  Sense strand starting at position 114 of SEQ ID NO: 1245215
auguaugauguuuagcauu

SEQ ID NO: 1545463 - RNA, 19 nt, Artificial Sequence
  Description of Artificial Sequence: Synthetic oligonucleotide
  Antisense strand to SEQ ID NO: 1545462
aaugcuaaacaucauacau

SEQ ID NO: 1545464 - RNA, 19 nt, Artificial Sequence
  Description of Artificial Sequence: Synthetic oligonucleotide
  Sense strand starting at position 145 of SEQ ID NO: 1245215
gguucucuauaaccuagaa

SEQ ID NO: 1545465 - RNA, 19 nt, Artificial Sequence
  Description of Artificial Sequence: Synthetic oligonucleotide
  Antisense strand to SEQ ID NO: 1545464
uucuagguuauagagaacc

SEQ ID NO: 1545466 - RNA, 19 nt, Artificial Sequence
  Description of Artificial Sequence: Synthetic oligonucleotide
  Sense strand starting at position 193 of SEQ ID NO: 1245215
ucuggaguugccugggaaa

SEQ ID NO: 1545467 - RNA, 19 nt, Artificial Sequence
  Description of Artificial Sequence: Synthetic oligonucleotide
  Antisense strand to SEQ ID NO: 1545466
uuucccaggcaacuccaga

SEQ ID NO: 1545468 - RNA, 19 nt, Artificial Sequence
  Description of Artificial Sequence: Synthetic oligonucleotide
  Sense strand starting at position 195 of SEQ ID NO: 1245215
uggaguugccugggaaaua

SEQ ID NO: 1545469 - RNA, 19 nt, Artificial Sequence
  Description of Artificial Sequence: Synthetic oligonucleotide
  Antisense strand to SEQ ID NO: 1545468
uauuucccaggcaacucca

SEQ ID NO: 1545470 - RNA, 19 nt, Artificial Sequence
  Description of Artificial Sequence: Synthetic oligonucleotide
  Sense strand starting at position 233 of SEQ ID NO: 1245215
uuauuauaaugcccaggaa

SEQ ID NO: 1545471 - RNA, 19 nt, Artificial Sequence
  Description of Artificial Sequence: Synthetic oligonucleotide
  Antisense strand to SEQ ID NO: 1545470
uuccugggcauuauaauaa

SEQ ID NO: 1545472 - RNA, 19 nt, Artificial Sequence
  Description of Artificial Sequence: Synthetic oligonucleotide
  Sense strand starting at position 246 of SEQ ID NO: 1245215
caggaauggucuucuugga

SEQ ID NO: 1545473 - RNA, 19 nt, Artificial Sequence
  Description of Artificial Sequence: Synthetic oligonucleotide
  Antisense strand to SEQ ID NO: 1545472
uccaagaagaccauuccug

SEQ ID NO: 1545474 - RNA, 19 nt, Artificial Sequence
  Description of Artificial Sequence: Synthetic oligonucleotide
  Sense strand starting at position 315 of SEQ ID NO: 1245215
auggauuacuuccugacau

SEQ ID NO: 1545475 - RNA, 19 nt, Artificial Sequence
  Description of Artificial Sequence: Synthetic oligonucleotide
  Antisense strand to SEQ ID NO: 1545474
augucaggaaguaauccau

SEQ ID NO: 1545476 - RNA, 19 nt, Artificial Sequence
  Description of Artificial Sequence: Synthetic oligonucleotide
  Sense strand starting at position 317 of SEQ ID NO: 1245215
ggauuacuuccugacaugu

SEQ ID NO: 1545477 - RNA, 19 nt, Artificial Sequence
  Description of Artificial Sequence: Synthetic oligonucleotide
  Antisense strand to SEQ ID NO: 1545476
acaugucaggaaguaaucc

SEQ ID NO: 1545478 - RNA, 19 nt, Artificial Sequence
  Description of Artificial Sequence: Synthetic oligonucleotide
  Sense strand starting at position 375 of SEQ ID NO: 1245215
accaaagggucuucucauu

SEQ ID NO: 1545479 - RNA, 19 nt, Artificial Sequence
  Description of Artificial Sequence: Synthetic oligonucleotide
  Antisense strand to SEQ ID NO: 1545478
aaugagaagacccuuuggu

SEQ ID NO: 1545480 - RNA, 19 nt, Artificial Sequence
  Description of Artificial Sequence: Synthetic oligonucleotide
  Sense strand starting at position 834 of SEQ ID NO: 1245215
agaaaugucuuagugugau

SEQ ID NO: 1545481 - RNA, 19 nt, Artificial Sequence
  Description of Artificial Sequence: Synthetic oligonucleotide
  Antisense strand to SEQ ID NO: 1545480
aucacacuaagacauuucu

SEQ ID NO: 1545482 - RNA, 19 nt, Artificial Sequence
  Description of Artificial Sequence: Synthetic oligonucleotide
  Sense strand starting at position 872 of SEQ ID NO: 1245215
gacugucuggguuauguua

SEQ ID NO: 1545483 - RNA, 19 nt, Artificial Sequence
  Description of Artificial Sequence: Synthetic oligonucleotide
  Antisense strand to SEQ ID NO: 1545482
uaacauaacccagacaguc

SEQ ID NO: 1545484 - RNA, 19 nt, Artificial Sequence
  Description of Artificial Sequence: Synthetic oligonucleotide
  Sense strand starting at position 948 of SEQ ID NO: 1245215
aagauauggucaguaccug

SEQ ID NO: 1545485 - RNA, 19 nt, Artificial Sequence
  Description of Artificial Sequence: Synthetic oligonucleotide
  Antisense strand to SEQ ID NO: 1545484
cagguacugaccauaucuu

SEQ ID NO: 1545486 - RNA, 19 nt, Artificial Sequence
  Description of Artificial Sequence: Synthetic oligonucleotide
  Sense strand starting at position 975 of SEQ ID NO: 1245215
ggguauugugaggguuaca

SEQ ID NO: 1545487 - RNA, 19 nt, Artificial Sequence
  Description of Artificial Sequence: Synthetic oligonucleotide
  Antisense strand to SEQ ID NO: 1545486
uguaacccucacaauaccc

SEQ ID NO: 1545488 - RNA, 19 nt, Artificial Sequence
  Description of Artificial Sequence: Synthetic oligonucleotide
  Sense strand starting at position 978 of SEQ ID NO: 1245215
uauugugaggguuacagua

SEQ ID NO: 1545489 - RNA, 19 nt, Artificial Sequence
  Description of Artificial Sequence: Synthetic oligonucleotide
  Antisense strand to SEQ ID NO: 1545488
uacuguaacccucacaaua

SEQ ID NO: 1545490 - RNA, 19 nt, Artificial Sequence
  Description of Artificial Sequence: Synthetic oligonucleotide
  Sense strand starting at position 1006 of SEQ ID NO: 1245215
aaagaaggcucauuguaag

SEQ ID NO: 1545491 - RNA, 19 nt, Artificial Sequence
  Description of Artificial Sequence: Synthetic oligonucleotide
  Antisense strand to SEQ ID NO: 1545490
cuuacaaugagccuucuuu

SEQ ID NO: 1545492 - RNA, 19 nt, Artificial Sequence
  Description of Artificial Sequence: Synthetic oligonucleotide
  Sense strand starting at position 1134 of SEQ ID NO: 1245215
gauggaugguuaccaucau

SEQ ID NO: 1545493 - RNA, 19 nt, Artificial Sequence
  Description of Artificial Sequence: Synthetic oligonucleotide
  Antisense strand to SEQ ID NO: 1545492
augaugguaaccauccauc

SEQ ID NO: 1545494 - RNA, 19 nt, Artificial Sequence
  Description of Artificial Sequence: Synthetic oligonucleotide
  Sense strand starting at position 1487 of SEQ ID NO: 1245215
gaagaagcauaagagaaau

SEQ ID NO: 1545495 - RNA, 19 nt, Artificial Sequence
  Description of Artificial Sequence: Synthetic oligonucleotide
  Antisense strand to SEQ ID NO: 1545494
auuucucuuaugcuucuuc

SEQ ID NO: 1545496 - RNA, 19 nt, Artificial Sequence
  Description of Artificial Sequence: Synthetic oligonucleotide
  Sense strand starting at position 1498 of SEQ ID NO: 1245215
agagaaauaccacguuaua

SEQ ID NO: 1545497 - RNA, 19 nt, Artificial Sequence
  Description of Artificial Sequence: Synthetic oligonucleotide
  Antisense strand to SEQ ID NO: 1545496
uauaacgugguauuucucu

SEQ ID NO: 1545498 - RNA, 19 nt, Artificial Sequence
  Description of Artificial Sequence: Synthetic oligonucleotide
  Sense strand starting at position 1651 of SEQ ID NO: 1245215
cuuguuacacaaugaugaa

SEQ ID NO: 1545499 - RNA, 19 nt, Artificial Sequence
  Description of Artificial Sequence: Synthetic oligonucleotide
  Antisense strand to SEQ ID NO: 1545498
uucaucauuguguaacaag

SEQ ID NO: 1545500 - RNA, 19 nt, Artificial Sequence
  Description of Artificial Sequence: Synthetic oligonucleotide
  Sense strand starting at position 1716 of SEQ ID NO: 1245215
ggcuauuugucacucccua

SEQ ID NO: 1545501 - RNA, 19 nt, Artificial Sequence
  Description of Artificial Sequence: Synthetic oligonucleotide
  Antisense strand to SEQ ID NO: 1545500
uagggagugacaaauagcc

SEQ ID NO: 1545502 - RNA, 19 nt, Artificial Sequence
  Description of Artificial Sequence: Synthetic oligonucleotide
  Sense strand starting at position 2189 of SEQ ID NO: 1245215
ggcugagacuucuuaauga

SEQ ID NO: 1545503 - RNA, 19 nt, Artificial Sequence
  Description of Artificial Sequence: Synthetic oligonucleotide
  Antisense strand to SEQ ID NO: 1545502
ucauuaagaagucucagcc

SEQ ID NO: 1545504 - RNA, 19 nt, Artificial Sequence
  Description of Artificial Sequence: Synthetic oligonucleotide
  Sense strand starting at position 2227 of SEQ ID NO: 1245215
uguacugguccuuagacua

SEQ ID NO: 1545505 - RNA, 19 nt, Artificial Sequence
  Description of Artificial Sequence: Synthetic oligonucleotide
  Antisense strand to SEQ ID NO: 1545504
uagucuaaggaccaguaca

SEQ ID NO: 1545506 - RNA, 19 nt, Artificial Sequence
  Description of Artificial Sequence: Synthetic oligonucleotide
  Sense strand starting at position 2232 of SEQ ID NO: 1245215
ugguccuuagacuaguaaa

SEQ ID NO: 1545507 - RNA, 19 nt, Artificial Sequence
  Description of Artificial Sequence: Synthetic oligonucleotide
  Antisense strand to SEQ ID NO: 1545506
uuuacuagucuaaggacca

SEQ ID NO: 1545508 - RNA, 19 nt, Artificial Sequence
  Description of Artificial Sequence: Synthetic oligonucleotide
  Sense strand starting at position 2391 of SEQ ID NO: 1245215
auuauugagugccuauaau

SEQ ID NO: 1545509 - RNA, 19 nt, Artificial Sequence
  Description of Artificial Sequence: Synthetic oligonucleotide
  Antisense strand to SEQ ID NO: 1545508
auuauaggcacucaauaau

SEQ ID NO: 1545510 - RNA, 19 nt, Artificial Sequence
  Description of Artificial Sequence: Synthetic oligonucleotide
  Sense strand starting at position 2425 of SEQ ID NO: 1245215
auccauuaaugugcuagaa

SEQ ID NO: 1545511 - RNA, 19 nt, Artificial Sequence
  Description of Artificial Sequence: Synthetic oligonucleotide
  Antisense strand to SEQ ID NO: 1545510
uucuagcacauuaauggau

SEQ ID NO: 1545512 - RNA, 19 nt, Artificial Sequence
  Description of Artificial Sequence: Synthetic oligonucleotide
  Sense strand starting at position 2429 of SEQ ID NO: 1245215
auuaaugugcuagaaauca

SEQ ID NO: 1545513 - RNA, 19 nt, Artificial Sequence
  Description of Artificial Sequence: Synthetic oligonucleotide
  Antisense strand to SEQ ID NO: 1545512
ugauuucuagcacauuaau

SEQ ID NO: 1545514 - RNA, 19 nt, Artificial Sequence
  Description of Artificial Sequence: Synthetic oligonucleotide
  Sense strand starting at position 2690 of SEQ ID NO: 1245215
acuuaagaugcaggauaau

SEQ ID NO: 1545515 - RNA, 19 nt, Artificial Sequence
  Description of Artificial Sequence: Synthetic oligonucleotide
  Antisense strand to SEQ ID NO: 1545514
auuauccugcaucuuaagu

SEQ ID NO: 1545516 - RNA, 19 nt, Artificial Sequence
  Description of Artificial Sequence: Synthetic oligonucleotide
  Sense strand starting at position 3087 of SEQ ID NO: 1245215
uaggaagacuaucaagaga

SEQ ID NO: 1545517 - RNA, 19 nt, Artificial Sequence
  Description of Artificial Sequence: Synthetic oligonucleotide
  Antisense strand to SEQ ID NO: 1545516
ucucuugauagucuuccua

SEQ ID NO: 1545518 - RNA, 19 nt, Artificial Sequence
  Description of Artificial Sequence: Synthetic oligonucleotide
  Sense strand starting at position 3228 of SEQ ID NO: 1245215
ucacuugaucccugagauc

SEQ ID NO: 1545519 - RNA, 19 nt, Artificial Sequence
  Description of Artificial Sequence: Synthetic oligonucleotide
  Antisense strand to SEQ ID NO: 1545518
gaucucagggaucaaguga

SEQ ID NO: 1545520 - RNA, 19 nt, Artificial Sequence
  Description of Artificial Sequence: Synthetic oligonucleotide
  Sense strand starting at position 3405 of SEQ ID NO: 1245215
ccugaagagccauguggau

SEQ ID NO: 1545521 - RNA, 19 nt, Artificial Sequence
  Description of Artificial Sequence: Synthetic oligonucleotide
  Antisense strand to SEQ ID NO: 1545520
auccacauggcucuucagg

SEQ ID NO: 1545522 - RNA, 19 nt, Artificial Sequence
  Description of Artificial Sequence: Synthetic oligonucleotide
  Sense strand starting at position 3426 of SEQ ID NO: 1245215
gaauaaggaugucuccauu

SEQ ID NO: 1545523 - RNA, 19 nt, Artificial Sequence
  Description of Artificial Sequence: Synthetic oligonucleotide
  Antisense strand to SEQ ID NO: 1545522
aauggagacauccuuauuc

SEQ ID NO: 1545524 - RNA, 19 nt, Artificial Sequence
  Description of Artificial Sequence: Synthetic oligonucleotide
  Sense strand starting at position 3429 of SEQ ID NO: 1245215
uaaggaugucuccauugca

SEQ ID NO: 1545525 - RNA, 19 nt, Artificial Sequence
  Description of Artificial Sequence: Synthetic oligonucleotide
  Antisense strand to SEQ ID NO: 1545524
ugcaauggagacauccuua

SEQ ID NO: 1545526 - RNA, 19 nt, Artificial Sequence
  Description of Artificial Sequence: Synthetic oligonucleotide
  Sense strand starting at position 3496 of SEQ ID NO: 1245215
agaggaugccugugaggau

SEQ ID NO: 1545527 - RNA, 19 nt, Artificial Sequence
  Description of Artificial Sequence: Synthetic oligonucleotide
  Antisense strand to SEQ ID NO: 1545526
auccucacaggcauccucu

SEQ ID NO: 1545528 - RNA, 19 nt, Artificial Sequence
  Description of Artificial Sequence: Synthetic oligonucleotide
  Sense strand starting at position 3500 of SEQ ID NO: 1245215
gaugccugugaggauagau

SEQ ID NO: 1545529 - RNA, 19 nt, Artificial Sequence
  Description of Artificial Sequence: Synthetic oligonucleotide
  Antisense strand to SEQ ID NO: 1545528
aucuauccucacaggcauc

SEQ ID NO: 1545530 - RNA, 19 nt, Artificial Sequence
  Description of Artificial Sequence: Synthetic oligonucleotide
  Sense strand starting at position 3548 of SEQ ID NO: 1245215
augcauugggacuguuaau

SEQ ID NO: 1545531 - RNA, 19 nt, Artificial Sequence
  Description of Artificial Sequence: Synthetic oligonucleotide
  Antisense strand to SEQ ID NO: 1545530
auuaacagucccaaugcau

SEQ ID NO: 1545532 - RNA, 19 nt, Artificial Sequence
  Description of Artificial Sequence: Synthetic oligonucleotide
  Sense strand starting at position 3555 of SEQ ID NO: 1245215
gggacuguuaauuaagguu

SEQ ID NO: 1545533 - RNA, 19 nt, Artificial Sequence
  Description of Artificial Sequence: Synthetic oligonucleotide
  Antisense strand to SEQ ID NO: 1545532
aaccuuaauuaacaguccc

SEQ ID NO: 1545534 - RNA, 19 nt, Artificial Sequence
  Description of Artificial Sequence: Synthetic oligonucleotide
  Sense strand starting at position 3604 of SEQ ID NO: 1245215
cugaauuagccgcaauuaa

SEQ ID NO: 1545535 - RNA, 19 nt, Artificial Sequence
  Description of Artificial Sequence: Synthetic oligonucleotide
  Antisense strand to SEQ ID NO: 1545534
uuaauugcggcuaauucag

SEQ ID NO: 1545536 - RNA, 19 nt, Artificial Sequence
  Description of Artificial Sequence: Synthetic oligonucleotide
  Sense strand starting at position 3631 of SEQ ID NO: 1245215
caucuaugugaaugggaac

SEQ ID NO: 1545537 - RNA, 19 nt, Artificial Sequence
  Description of Artificial Sequence: Synthetic oligonucleotide
  Antisense strand to SEQ ID NO: 1545536
guucccauucacauagaug

SEQ ID NO: 1545538 - RNA, 19 nt, Artificial Sequence
  Description of Artificial Sequence: Synthetic oligonucleotide
  Sense strand starting at position 218 of SEQ ID NO: 1245216
uucgccuuccaugaggaau

SEQ ID NO: 1545539 - RNA, 19 nt, Artificial Sequence
  Description of Artificial Sequence: Synthetic oligonucleotide
  Antisense strand to SEQ ID NO: 1545538
auuccucauggaaggcgaa

SEQ ID NO: 1545540 - RNA, 19 nt, Artificial Sequence
  Description of Artificial Sequence: Synthetic oligonucleotide
  Sense strand starting at position 491 of SEQ ID NO: 1245216
aagagucaccaggguuauu

SEQ ID NO: 1545541 - RNA, 19 nt, Artificial Sequence
  Description of Artificial Sequence: Synthetic oligonucleotide
  Antisense strand to SEQ ID NO: 1545540
aauaacccuggugacucuu

SEQ ID NO: 1545542 - RNA, 19 nt, Artificial Sequence
  Description of Artificial Sequence: Synthetic oligonucleotide
  Sense strand starting at position 536 of SEQ ID NO: 1245216
ggugguuaaaccugggaaa

SEQ ID NO: 1545543 - RNA, 19 nt, Artificial Sequence
  Description of Artificial Sequence: Synthetic oligonucleotide
  Antisense strand to SEQ ID NO: 1545542
uuucccagguuuaaccacc

SEQ ID NO: 1545544 - RNA, 19 nt, Artificial Sequence
  Description of Artificial Sequence: Synthetic oligonucleotide
  Sense strand starting at position 613 of SEQ ID NO: 1245216
gcaauugugcuugcucuua

SEQ ID NO: 1545545 - RNA, 19 nt, Artificial Sequence
  Description of Artificial Sequence: Synthetic oligonucleotide
  Antisense strand to SEQ ID NO: 1545544
uaagagcaagcacaauugc

SEQ ID NO: 1545546 - RNA, 19 nt, Artificial Sequence
  Description of Artificial Sequence: Synthetic oligonucleotide
  Sense strand starting at position 654 of SEQ ID NO: 1245216
cucacaugugaucauccuu

SEQ ID NO: 1545547 - RNA, 19 nt, Artificial Sequence
  Description of Artificial Sequence: Synthetic oligonucleotide
  Antisense strand to SEQ ID NO: 1545546
aaggaugaucacaugugag

SEQ ID NO: 1545548 - RNA, 19 nt, Artificial Sequence
  Description of Artificial Sequence: Synthetic oligonucleotide
  Sense strand starting at position 679 of SEQ ID NO: 1245216
auuggagucuagcuugaaa

SEQ ID NO: 1545549 - RNA, 19 nt, Artificial Sequence
  Description of Artificial Sequence: Synthetic oligonucleotide
  Antisense strand to SEQ ID NO: 1545548
uuucaagcuagacuccaau

SEQ ID NO: 1545550 - RNA, 19 nt, Artificial Sequence
  Description of Artificial Sequence: Synthetic oligonucleotide
  Sense strand starting at position 682 of SEQ ID NO: 1245216
ggagucuagcuugaaaugu

SEQ ID NO: 1545551 - RNA, 19 nt, Artificial Sequence
  Description of Artificial Sequence: Synthetic oligonucleotide
  Antisense strand to SEQ ID NO: 1545550
acauuucaagcuagacucc

SEQ ID NO: 1545552 - RNA, 19 nt, Artificial Sequence
  Description of Artificial Sequence: Synthetic oligonucleotide
  Sense strand starting at position 813 of SEQ ID NO: 1245216
aggaaauuggcaggcuuga

SEQ ID NO: 1545553 - RNA, 19 nt, Artificial Sequence
  Description of Artificial Sequence: Synthetic oligonucleotide
  Antisense strand to SEQ ID NO: 1545552
ucaagccugccaauuuccu

SEQ ID NO: 1545554 - RNA, 19 nt, Artificial Sequence
  Description of Artificial Sequence: Synthetic oligonucleotide
  Sense strand starting at position 964 of SEQ ID NO: 1245216
gcaacuaucuagucagaaa

SEQ ID NO: 1545555 - RNA, 19 nt, Artificial Sequence
  Description of Artificial Sequence: Synthetic oligonucleotide
  Antisense strand to SEQ ID NO: 1545554
uuucugacuagauaguugc

SEQ ID NO: 1545556 - RNA, 19 nt, Artificial Sequence
  Description of Artificial Sequence: Synthetic oligonucleotide
  Sense strand starting at position 1035 of SEQ ID NO: 1245216
uuuaacaaucuguagguaa

SEQ ID NO: 1545557 - RNA, 19 nt, Artificial Sequence
  Description of Artificial Sequence: Synthetic oligonucleotide
  Antisense strand to SEQ ID NO: 1545556
uuaccuacagauuguuaaa

SEQ ID NO: 1545558 - RNA, 19 nt, Artificial Sequence
  Description of Artificial Sequence: Synthetic oligonucleotide
  Sense strand starting at position 1037 of SEQ ID NO: 1245216
uaacaaucuguagguaaag

SEQ ID NO: 1545559 - RNA, 19 nt, Artificial Sequence
  Description of Artificial Sequence: Synthetic oligonucleotide
  Antisense strand to SEQ ID NO: 1545558
cuuuaccuacagauuguua

SEQ ID NO: 1545560 - RNA, 19 nt, Artificial Sequence
  Description of Artificial Sequence: Synthetic oligonucleotide
  Sense strand starting at position 1038 of SEQ ID NO: 1245216
aacaaucuguagguaaagu

SEQ ID NO: 1545561 - RNA, 19 nt, Artificial Sequence
  Description of Artificial Sequence: Synthetic oligonucleotide
  Antisense strand to SEQ ID NO: 1545560
acuuuaccuacagauuguu

SEQ ID NO: 1545562 - RNA, 19 nt, Artificial Sequence
  Description of Artificial Sequence: Synthetic oligonucleotide
  Sense strand starting at position 1046 of SEQ ID NO: 1245216
guagguaaaguuuaaccua

SEQ ID NO: 1545563 - RNA, 19 nt, Artificial Sequence
  Description of Artificial Sequence: Synthetic oligonucleotide
  Antisense strand to SEQ ID NO: 1545562
uagguuaaacuuuaccuac

SEQ ID NO: 1545564 - RNA, 19 nt, Artificial Sequence
  Description of Artificial Sequence: Synthetic oligonucleotide
  Sense strand starting at position 1049 of SEQ ID NO: 1245216
gguaaaguuuaaccuaaca

SEQ ID NO: 1545565 - RNA, 19 nt, Artificial Sequence
  Description of Artificial Sequence: Synthetic oligonucleotide
  Antisense strand to SEQ ID NO: 1545564
uguuagguuaaacuuuacc

SEQ ID NO: 1545566 - RNA, 19 nt, Artificial Sequence
  Description of Artificial Sequence: Synthetic oligonucleotide
  Sense strand starting at position 1199 of SEQ ID NO: 1245216
gcuagugagagcuagaaau

SEQ ID NO: 1545567 - RNA, 19 nt, Artificial Sequence
  Description of Artificial Sequence: Synthetic oligonucleotide
  Antisense strand to SEQ ID NO: 1545566
auuucuagcucucacuagc

SEQ ID NO: 1545568 - RNA, 19 nt, Artificial Sequence
  Description of Artificial Sequence: Synthetic oligonucleotide
  Sense strand starting at position 2197 of SEQ ID NO: 1245216
acugaaugacaucggauua

SEQ ID NO: 1545569 - RNA, 19 nt, Artificial Sequence
  Description of Artificial Sequence: Synthetic oligonucleotide
  Antisense strand to SEQ ID NO: 1545568
uaauccgaugucauucagu

SEQ ID NO: 1545570 - RNA, 19 nt, Artificial Sequence
  Description of Artificial Sequence: Synthetic oligonucleotide
  Sense strand starting at position 2231 of SEQ ID NO: 1245216
agcuguucuggaggaagaa

SEQ ID NO: 1545571 - RNA, 19 nt, Artificial Sequence
  Description of Artificial Sequence: Synthetic oligonucleotide
  Antisense strand to SEQ ID NO: 1545570
uucuuccuccagaacagcu

SEQ ID NO: 1545572 - RNA, 19 nt, Artificial Sequence
  Description of Artificial Sequence: Synthetic oligonucleotide
  Sense strand starting at position 2349 of SEQ ID NO: 1245216
cugguuucacgggaucuau

SEQ ID NO: 1545573 - RNA, 19 nt, Artificial Sequence
  Description of Artificial Sequence: Synthetic oligonucleotide
  Antisense strand to SEQ ID NO: 1545572
auagaucccgugaaaccag

SEQ ID NO: 1545574 - RNA, 19 nt, Artificial Sequence
  Description of Artificial Sequence: Synthetic oligonucleotide
  Sense strand starting at position 2579 of SEQ ID NO: 1245216
ucaugagagcuacauucua

SEQ ID NO: 1545575 - RNA, 19 nt, Artificial Sequence
  Description of Artificial Sequence: Synthetic oligonucleotide
  Antisense strand to SEQ ID NO: 1545574
uagaauguagcucucauga

SEQ ID NO: 1545576 - RNA, 19 nt, Artificial Sequence
  Description of Artificial Sequence: Synthetic oligonucleotide
  Sense strand starting at position 2587 of SEQ ID NO: 1245216
gcuacauucuaaguggaga

SEQ ID NO: 1545577 - RNA, 19 nt, Artificial Sequence
  Description of Artificial Sequence: Synthetic oligonucleotide
  Antisense strand to SEQ ID NO: 1545576
ucuccacuuagaauguagc

SEQ ID NO: 1545578 - RNA, 19 nt, Artificial Sequence
  Description of Artificial Sequence: Synthetic oligonucleotide
  Sense strand starting at position 2601 of SEQ ID NO: 1245216
ggagauuaaacguggacac

SEQ ID NO: 1545579 - RNA, 19 nt, Artificial Sequence
  Description of Artificial Sequence: Synthetic oligonucleotide
  Antisense strand to SEQ ID NO: 1545578
guguccacguuuaaucucc

SEQ ID NO: 1545580 - RNA, 19 nt, Artificial Sequence
  Description of Artificial Sequence: Synthetic oligonucleotide
  Sense strand starting at position 2602 of SEQ ID NO: 1245216
gagauuaaacguggacaca

SEQ ID NO: 1545581 - RNA, 19 nt, Artificial Sequence
  Description of Artificial Sequence: Synthetic oligonucleotide
  Antisense strand to SEQ ID NO: 1545580
uguguccacguuuaaucuc

SEQ ID NO: 1545582 - RNA, 19 nt, Artificial Sequence
  Description of Artificial Sequence: Synthetic oligonucleotide
  Sense strand starting at position 2648 of SEQ ID NO: 1245216
ugaacaagcgcauauugaa

SEQ ID NO: 1545583 - RNA, 19 nt, Artificial Sequence
  Description of Artificial Sequence: Synthetic oligonucleotide
  Antisense strand to SEQ ID NO: 1545582
uucaauaugcgcuuguuca

SEQ ID NO: 1545584 - RNA, 19 nt, Artificial Sequence
  Description of Artificial Sequence: Synthetic oligonucleotide
  Sense strand starting at position 2655 of SEQ ID NO: 1245216
gcgcauauugaagaggaaa

SEQ ID NO: 1545585 - RNA, 19 nt, Artificial Sequence
  Description of Artificial Sequence: Synthetic oligonucleotide
  Antisense strand to SEQ ID NO: 1545584
uuuccucuucaauaugcgc

SEQ ID NO: 1545586 - RNA, 19 nt, Artificial Sequence
  Description of Artificial Sequence: Synthetic oligonucleotide
  Sense strand starting at position 2690 of SEQ ID NO: 1245216
agaagagucuaaucagugu

SEQ ID NO: 1545587 - RNA, 19 nt, Artificial Sequence
  Description of Artificial Sequence: Synthetic oligonucleotide
  Antisense strand to SEQ ID NO: 1545586
acacugauuagacucuucu

SEQ ID NO: 1545588 - RNA, 19 nt, Artificial Sequence
  Description of Artificial Sequence: Synthetic oligonucleotide
  Sense strand starting at position 2693 of SEQ ID NO: 1245216
agagucuaaucaguguaaa

SEQ ID NO: 1545589 - RNA, 19 nt, Artificial Sequence
  Description of Artificial Sequence: Synthetic oligonucleotide
  Antisense strand to SEQ ID NO: 1545588
uuuacacugauuagacucu

SEQ ID NO: 1545590 - RNA, 19 nt, Artificial Sequence
  Description of Artificial Sequence: Synthetic oligonucleotide
  Sense strand starting at position 2819 of SEQ ID NO: 1245216
aaucauguguauccuagga

SEQ ID NO: 1545591 - RNA, 19 nt, Artificial Sequence
  Description of Artificial Sequence: Synthetic oligonucleotide
  Antisense strand to SEQ ID NO: 1545590
uccuaggauacacaugauu

SEQ ID NO: 1545592 - RNA, 19 nt, Artificial Sequence
  Description of Artificial Sequence: Synthetic oligonucleotide
  Sense strand starting at position 2823 of SEQ ID NO: 1245216
auguguauccuaggagaca

SEQ ID NO: 1545593 - RNA, 19 nt, Artificial Sequence
  Description of Artificial Sequence: Synthetic oligonucleotide
  Antisense strand to SEQ ID NO: 1545592
ugucuccuaggauacacau

SEQ ID NO: 1545594 - RNA, 19 nt, Artificial Sequence
  Description of Artificial Sequence: Synthetic oligonucleotide
  Sense strand starting at position 3248 of SEQ ID NO: 1245216
auauauagugggcaguuaa

SEQ ID NO: 1545595 - RNA, 19 nt, Artificial Sequence
  Description of Artificial Sequence: Synthetic oligonucleotide
  Antisense strand to SEQ ID NO: 1545594
uuaacugcccacuauauau

SEQ ID NO: 1545596 - RNA, 19 nt, Artificial Sequence
  Description of Artificial Sequence: Synthetic oligonucleotide
  Sense strand starting at position 3389 of SEQ ID NO: 1245216
augaaaccugacugucuuu

SEQ ID NO: 1545597 - RNA, 19 nt, Artificial Sequence
  Description of Artificial Sequence: Synthetic oligonucleotide
  Antisense strand to SEQ ID NO: 1545596
aaagacagucagguuucau

SEQ ID NO: 1545598 - RNA, 19 nt, Artificial Sequence
  Description of Artificial Sequence: Synthetic oligonucleotide
  Sense strand starting at position 3414 of SEQ ID NO: 1245216
aaggauaaauaguugcuua

SEQ ID NO: 1545599 - RNA, 19 nt, Artificial Sequence
  Description of Artificial Sequence: Synthetic oligonucleotide
  Antisense strand to SEQ ID NO: 1545598
uaagcaacuauuuauccuu

SEQ ID NO: 1545600 - RNA, 19 nt, Artificial Sequence
  Description of Artificial Sequence: Synthetic oligonucleotide
  Sense strand starting at position 3417 of SEQ ID NO: 1245216
gauaaauaguugcuuaaug

SEQ ID NO: 1545601 - RNA, 19 nt, Artificial Sequence
  Description of Artificial Sequence: Synthetic oligonucleotide
  Antisense strand to SEQ ID NO: 1545600
cauuaagcaacuauuuauc

SEQ ID NO: 1545602 - RNA, 19 nt, Artificial Sequence
  Description of Artificial Sequence: Synthetic oligonucleotide
  Sense strand starting at position 3439 of SEQ ID NO: 1245216
caucucugucuggaaaguu

SEQ ID NO: 1545603 - RNA, 19 nt, Artificial Sequence
  Description of Artificial Sequence: Synthetic oligonucleotide
  Antisense strand to SEQ ID NO: 1545602
aacuuuccagacagagaug

SEQ ID NO: 1545604 - RNA, 19 nt, Artificial Sequence
  Description of Artificial Sequence: Synthetic oligonucleotide
  Sense strand starting at position 3465 of SEQ ID NO: 1245216
aauacugaauucgugaaug

SEQ ID NO: 1545605 - RNA, 19 nt, Artificial Sequence
  Description of Artificial Sequence: Synthetic oligonucleotide
  Antisense strand to SEQ ID NO: 1545604
cauucacgaauucaguauu

SEQ ID NO: 1545606 - RNA, 19 nt, Artificial Sequence
  Description of Artificial Sequence: Synthetic oligonucleotide
  Sense strand starting at position 3467 of SEQ ID NO: 1245216
uacugaauucgugaaugua

SEQ ID NO: 1545607 - RNA, 19 nt, Artificial Sequence
  Description of Artificial Sequence: Synthetic oligonucleotide
  Antisense strand to SEQ ID NO: 1545606
uacauucacgaauucagua

SEQ ID NO: 1545608 - RNA, 19 nt, Artificial Sequence
  Description of Artificial Sequence: Synthetic oligonucleotide
  Sense strand starting at position 3599 of SEQ ID NO: 1245216
gaguauuucccuugugguu

SEQ ID NO: 1545609 - RNA, 19 nt, Artificial Sequence
  Description of Artificial Sequence: Synthetic oligonucleotide
  Antisense strand to SEQ ID NO: 1545608
aaccacaagggaaauacuc

SEQ ID NO: 1545610 - RNA, 19 nt, Artificial Sequence
  Description of Artificial Sequence: Synthetic oligonucleotide
  Sense strand starting at position 3632 of SEQ ID NO: 1245216
uuaucaucuuaggcaaaga

SEQ ID NO: 1545611 - RNA, 19 nt, Artificial Sequence
  Description of Artificial Sequence: Synthetic oligonucleotide
  Antisense strand to SEQ ID NO: 1545610
ucuuugccuaagaugauaa

SEQ ID NO: 1545612 - RNA, 19 nt, Artificial Sequence
  Description of Artificial Sequence: Synthetic oligonucleotide
  Sense strand starting at position 3678 of SEQ ID NO: 1245216
uguaauaugagugaugucu

SEQ ID NO: 1545613 - RNA, 19 nt, Artificial Sequence
  Description of Artificial Sequence: Synthetic oligonucleotide
  Antisense strand to SEQ ID NO: 1545612
agacaucacucauauuaca

SEQ ID NO: 1545614 - RNA, 19 nt, Artificial Sequence
  Description of Artificial Sequence: Synthetic oligonucleotide
  Sense strand starting at position 3689 of SEQ ID NO: 1245216
ugaugucuuggugaaucuu

SEQ ID NO: 1545615 - RNA, 19 nt, Artificial Sequence
  Description of Artificial Sequence: Synthetic oligonucleotide
  Antisense strand to SEQ ID NO: 1545614
aagauucaccaagacauca

SEQ ID NO: 1545616 - RNA, 19 nt, Artificial Sequence
  Description of Artificial Sequence: Synthetic oligonucleotide
  Sense strand starting at position 3933 of SEQ ID NO: 1245216
cugagauauuuccaauuag

SEQ ID NO: 1545617 - RNA, 19 nt, Artificial Sequence
  Description of Artificial Sequence: Synthetic oligonucleotide
  Antisense strand to SEQ ID NO: 1545616
cuaauuggaaauaucucag

SEQ ID NO: 1545618 - RNA, 19 nt, Artificial Sequence
  Description of Artificial Sequence: Synthetic oligonucleotide
  Sense strand starting at position 80 of SEQ ID NO: 1245217
agguccuuugucugaacaa

SEQ ID NO: 1545619 - RNA, 19 nt, Artificial Sequence
  Description of Artificial Sequence: Synthetic oligonucleotide
  Antisense strand to SEQ ID NO: 1545618
uuguucagacaaaggaccu

SEQ ID NO: 1545620 - RNA, 19 nt, Artificial Sequence
  Description of Artificial Sequence: Synthetic oligonucleotide
  Sense strand starting at position 81 of SEQ ID NO: 1245217
gguccuuugucugaacaau

SEQ ID NO: 1545621 - RNA, 19 nt, Artificial Sequence
  Description of Artificial Sequence: Synthetic oligonucleotide
  Antisense strand to SEQ ID NO: 1545620
auuguucagacaaaggacc

SEQ ID NO: 1545622 - RNA, 19 nt, Artificial Sequence
  Description of Artificial Sequence: Synthetic oligonucleotide
  Sense strand starting at position 103 of SEQ ID NO: 1245217
ggaggagucugucugcagu

SEQ ID NO: 1545623 - RNA, 19 nt, Artificial Sequence
  Description of Artificial Sequence: Synthetic oligonucleotide
  Antisense strand to SEQ ID NO: 1545622
acugcagacagacuccucc

SEQ ID NO: 1545624 - RNA, 19 nt, Artificial Sequence
  Description of Artificial Sequence: Synthetic oligonucleotide
  Sense strand starting at position 106 of SEQ ID NO: 1245217
ggagucugucugcaguacu

SEQ ID NO: 1545625 - RNA, 19 nt, Artificial Sequence
  Description of Artificial Sequence: Synthetic oligonucleotide
  Antisense strand to SEQ ID NO: 1545624
aguacugcagacagacucc

SEQ ID NO: 1545626 - RNA, 19 nt, Artificial Sequence
  Description of Artificial Sequence: Synthetic oligonucleotide
  Sense strand starting at position 163 of SEQ ID NO: 1245217
uguauaaaccgaugaaguu

SEQ ID NO: 1545627 - RNA, 19 nt, Artificial Sequence
  Description of Artificial Sequence: Synthetic oligonucleotide
  Antisense strand to SEQ ID NO: 1545626
aacuucaucgguuuauaca

SEQ ID NO: 1545628 - RNA, 19 nt, Artificial Sequence
  Description of Artificial Sequence: Synthetic oligonucleotide
  Sense strand starting at position 164 of SEQ ID NO: 1245217
guauaaaccgaugaaguuu

SEQ ID NO: 1545629 - RNA, 19 nt, Artificial Sequence
  Description of Artificial Sequence: Synthetic oligonucleotide
  Antisense strand to SEQ ID NO: 1545628
aaacuucaucgguuuauac

SEQ ID NO: 1545630 - RNA, 19 nt, Artificial Sequence
  Description of Artificial Sequence: Synthetic oligonucleotide
  Sense strand starting at position 172 of SEQ ID NO: 1245217
cgaugaaguuucuuaauua

SEQ ID NO: 1545631 - RNA, 19 nt, Artificial Sequence
  Description of Artificial Sequence: Synthetic oligonucleotide
  Antisense strand to SEQ ID NO: 1545630
uaauuaagaaacuucaucg

SEQ ID NO: 1545632 - RNA, 19 nt, Artificial Sequence
  Description of Artificial Sequence: Synthetic oligonucleotide
  Sense strand starting at position 253 of SEQ ID NO: 1245217
cagugugucuuuccgagag

SEQ ID NO: 1545633 - RNA, 19 nt, Artificial Sequence
  Description of Artificial Sequence: Synthetic oligonucleotide
  Antisense strand to SEQ ID NO: 1545632
cucucggaaagacacacug

SEQ ID NO: 1545634 - RNA, 19 nt, Artificial Sequence
  Description of Artificial Sequence: Synthetic oligonucleotide
  Sense strand starting at position 255 of SEQ ID NO: 1245217
gugugucuuuccgagaguu

SEQ ID NO: 1545635 - RNA, 19 nt, Artificial Sequence
  Description of Artificial Sequence: Synthetic oligonucleotide
  Antisense strand to SEQ ID NO: 1545634
aacucucggaaagacacac

SEQ ID NO: 1545636 - RNA, 19 nt, Artificial Sequence
  Description of Artificial Sequence: Synthetic oligonucleotide
  Sense strand starting at position 257 of SEQ ID NO: 1245217
gugucuuuccgagaguuga

SEQ ID NO: 1545637 - RNA, 19 nt, Artificial Sequence
  Description of Artificial Sequence: Synthetic oligonucleotide
  Antisense strand to SEQ ID NO: 1545636
ucaacucucggaaagacac

SEQ ID NO: 1545638 - RNA, 19 nt, Artificial Sequence
  Description of Artificial Sequence: Synthetic oligonucleotide
  Sense strand starting at position 271 of SEQ ID NO: 1245217
guugaaacguaccgagaga

SEQ ID NO: 1545639 - RNA, 19 nt, Artificial Sequence
  Description of Artificial Sequence: Synthetic oligonucleotide
  Antisense strand to SEQ ID NO: 1545638
ucucucgguacguuucaac

SEQ ID NO: 1545640 - RNA, 19 nt, Artificial Sequence
  Description of Artificial Sequence: Synthetic oligonucleotide
  Sense strand starting at position 368 of SEQ ID NO: 1245217
ggcggugauaccgaccauu

SEQ ID NO: 1545641 - RNA, 19 nt, Artificial Sequence
  Description of Artificial Sequence: Synthetic oligonucleotide
  Antisense strand to SEQ ID NO: 1545640
aauggucgguaucaccgcc

SEQ ID NO: 1545642 - RNA, 19 nt, Artificial Sequence
  Description of Artificial Sequence: Synthetic oligonucleotide
  Sense strand starting at position 452 of SEQ ID NO: 1245217
ugaacaaguucuuguaagg

SEQ ID NO: 1545643 - RNA, 19 nt, Artificial Sequence
  Description of Artificial Sequence: Synthetic oligonucleotide
  Antisense strand to SEQ ID NO: 1545642
ccuuacaagaacuuguuca

SEQ ID NO: 1545644 - RNA, 19 nt, Artificial Sequence
  Description of Artificial Sequence: Synthetic oligonucleotide
  Sense strand starting at position 508 of SEQ ID NO: 1245217
acuugcaaucucgaagcuu

SEQ ID NO: 1545645 - RNA, 19 nt, Artificial Sequence
  Description of Artificial Sequence: Synthetic oligonucleotide
  Antisense strand to SEQ ID NO: 1545644
aagcuucgagauugcaagu

SEQ ID NO: 1545646 - RNA, 19 nt, Artificial Sequence
  Description of Artificial Sequence: Synthetic oligonucleotide
  Sense strand starting at position 519 of SEQ ID NO: 1245217
cgaagcuuuccguacccaa

SEQ ID NO: 1545647 - RNA, 19 nt, Artificial Sequence
  Description of Artificial Sequence: Synthetic oligonucleotide
  Antisense strand to SEQ ID NO: 1545646
uuggguacggaaagcuucg

SEQ ID NO: 1545648 - RNA, 19 nt, Artificial Sequence
  Description of Artificial Sequence: Synthetic oligonucleotide
  Sense strand starting at position 605 of SEQ ID NO: 1245217
ccugguguuccacgaauac

SEQ ID NO: 1545649 - RNA, 19 nt, Artificial Sequence
  Description of Artificial Sequence: Synthetic oligonucleotide
  Antisense strand to SEQ ID NO: 1545648
guauucguggaacaccagg

SEQ ID NO: 1545650 - RNA, 19 nt, Artificial Sequence
  Description of Artificial Sequence: Synthetic oligonucleotide
  Sense strand starting at position 651 of SEQ ID NO: 1245217
cugggucgcccgagaaacu

SEQ ID NO: 1545651 - RNA, 19 nt, Artificial Sequence
  Description of Artificial Sequence: Synthetic oligonucleotide
  Antisense strand to SEQ ID NO: 1545650
aguuucucgggcgacccag

SEQ ID NO: 1545652 - RNA, 19 nt, Artificial Sequence
  Description of Artificial Sequence: Synthetic oligonucleotide
  Sense strand starting at position 2128 of SEQ ID NO: 1245217
gagcucucugauuggguga

SEQ ID NO: 1545653 - RNA, 19 nt, Artificial Sequence
  Description of Artificial Sequence: Synthetic oligonucleotide
  Antisense strand to SEQ ID NO: 1545652
ucacccaaucagagagcuc

SEQ ID NO: 1545654 - RNA, 19 nt, Artificial Sequence
  Description of Artificial Sequence: Synthetic oligonucleotide
  Sense strand starting at position 2224 of SEQ ID NO: 1245217
gcggagagggacugugauu

SEQ ID NO: 1545655 - RNA, 19 nt, Artificial Sequence
  Description of Artificial Sequence: Synthetic oligonucleotide
  Antisense strand to SEQ ID NO: 1545654
aaucacagucccucuccgc

SEQ ID NO: 1545656 - RNA, 19 nt, Artificial Sequence
  Description of Artificial Sequence: Synthetic oligonucleotide
  Sense strand starting at position 2417 of SEQ ID NO: 1245217
ccauguggcugaguucuuu

SEQ ID NO: 1545657 - RNA, 19 nt, Artificial Sequence
  Description of Artificial Sequence: Synthetic oligonucleotide
  Antisense strand to SEQ ID NO: 1545656
aaagaacucagccacaugg

SEQ ID NO: 1545658 - RNA, 19 nt, Artificial Sequence
  Description of Artificial Sequence: Synthetic oligonucleotide
  Sense strand starting at position 2476 of SEQ ID NO: 1245217
ggcauagguucgagagcau

SEQ ID NO: 1545659 - RNA, 19 nt, Artificial Sequence
  Description of Artificial Sequence: Synthetic oligonucleotide
  Antisense strand to SEQ ID NO: 1545658
augcucucgaaccuaugcc

SEQ ID NO: 1545660 - RNA, 19 nt, Artificial Sequence
  Description of Artificial Sequence: Synthetic oligonucleotide
  Sense strand starting at position 2485 of SEQ ID NO: 1245217
ucgagagcauuguuuccuu

SEQ ID NO: 1545661 - RNA, 19 nt, Artificial Sequence
  Description of Artificial Sequence: Synthetic oligonucleotide
  Antisense strand to SEQ ID NO: 1545660
aaggaaacaaugcucucga

SEQ ID NO: 1545662 - RNA, 19 nt, Artificial Sequence
  Description of Artificial Sequence: Synthetic oligonucleotide
  Sense strand starting at position 2492 of SEQ ID NO: 1245217
cauuguuuccuuggguuga

SEQ ID NO: 1545663 - RNA, 19 nt, Artificial Sequence
  Description of Artificial Sequence: Synthetic oligonucleotide
  Antisense strand to SEQ ID NO: 1545662
ucaacccaaggaaacaaug

SEQ ID NO: 1545664 - RNA, 19 nt, Artificial Sequence
  Description of Artificial Sequence: Synthetic oligonucleotide
  Sense strand starting at position 2496 of SEQ ID NO: 1245217
guuuccuuggguugaggaa

SEQ ID NO: 1545665 - RNA, 19 nt, Artificial Sequence
  Description of Artificial Sequence: Synthetic oligonucleotide
  Antisense strand to SEQ ID NO: 1545664
uuccucaacccaaggaaac

SEQ ID NO: 1545666 - RNA, 19 nt, Artificial Sequence
  Description of Artificial Sequence: Synthetic oligonucleotide
  Sense strand starting at position 3380 of SEQ ID NO: 1245217
guuuccuccucccuagaca

SEQ ID NO: 1545667 - RNA, 19 nt, Artificial Sequence
  Description of Artificial Sequence: Synthetic oligonucleotide
  Antisense strand to SEQ ID NO: 1545666
ugucuagggaggaggaaac

SEQ ID NO: 1545668 - RNA, 19 nt, Artificial Sequence
  Description of Artificial Sequence: Synthetic oligonucleotide
  Sense strand starting at position 3406 of SEQ ID NO: 1245217
cacaguauugcucagguga

SEQ ID NO: 1545669 - RNA, 19 nt, Artificial Sequence
  Description of Artificial Sequence: Synthetic oligonucleotide
  Antisense strand to SEQ ID NO: 1545668
ucaccugagcaauacugug

SEQ ID NO: 1545670 - RNA, 19 nt, Artificial Sequence
  Description of Artificial Sequence: Synthetic oligonucleotide
  Sense strand starting at position 3408 of SEQ ID NO: 1245217
caguauugcucaggugauc

SEQ ID NO: 1545671 - RNA, 19 nt, Artificial Sequence
  Description of Artificial Sequence: Synthetic oligonucleotide
  Antisense strand to SEQ ID NO: 1545670
gaucaccugagcaauacug

SEQ ID NO: 1545672 - RNA, 19 nt, Artificial Sequence
  Description of Artificial Sequence: Synthetic oligonucleotide
  Sense strand starting at position 3639 of SEQ ID NO: 1245217
uguagagacuggguucuua

SEQ ID NO: 1545673 - RNA, 19 nt, Artificial Sequence
  Description of Artificial Sequence: Synthetic oligonucleotide
  Antisense strand to SEQ ID NO: 1545672
uaagaacccagucucuaca

SEQ ID NO: 1545674 - RNA, 19 nt, Artificial Sequence
  Description of Artificial Sequence: Synthetic oligonucleotide
  Sense strand starting at position 3835 of SEQ ID NO: 1245217
cgucuaucccuuuaguacu

SEQ ID NO: 1545675 - RNA, 19 nt, Artificial Sequence
  Description of Artificial Sequence: Synthetic oligonucleotide
  Antisense strand to SEQ ID NO: 1545674
aguacuaaagggauagacg

SEQ ID NO: 1545676 - RNA, 19 nt, Artificial Sequence
  Description of Artificial Sequence: Synthetic oligonucleotide
  Sense strand starting at position 3853 of SEQ ID NO: 1245217
uaaguccugccagguuaau

SEQ ID NO: 1545677 - RNA, 19 nt, Artificial Sequence
  Description of Artificial Sequence: Synthetic oligonucleotide
  Antisense strand to SEQ ID NO: 1545676
auuaaccuggcaggacuua

SEQ ID NO: 1545678 - RNA, 19 nt, Artificial Sequence
  Description of Artificial Sequence: Synthetic oligonucleotide
  Sense strand starting at position 3864 of SEQ ID NO: 1245217
agguuaaucuuagccagca

SEQ ID NO: 1545679 - RNA, 19 nt, Artificial Sequence
  Description of Artificial Sequence: Synthetic oligonucleotide
  Antisense strand to SEQ ID NO: 1545678
ugcuggcuaagauuaaccu

SEQ ID NO: 1545680 - RNA, 19 nt, Artificial Sequence
  Description of Artificial Sequence: Synthetic oligonucleotide
  Sense strand starting at position 3877 of SEQ ID NO: 1245217
ccagcagcuugguccuaua

SEQ ID NO: 1545681 - RNA, 19 nt, Artificial Sequence
  Description of Artificial Sequence: Synthetic oligonucleotide
  Antisense strand to SEQ ID NO: 1545680
uauaggaccaagcugcugg

SEQ ID NO: 1545682 - RNA, 19 nt, Artificial Sequence
  Description of Artificial Sequence: Synthetic oligonucleotide
  Sense strand starting at position 3880 of SEQ ID NO: 1245217
gcagcuugguccuauaccu

SEQ ID NO: 1545683 - RNA, 19 nt, Artificial Sequence
  Description of Artificial Sequence: Synthetic oligonucleotide
  Antisense strand to SEQ ID NO: 1545682
agguauaggaccaagcugc

SEQ ID NO: 1545684 - RNA, 19 nt, Artificial Sequence
  Description of Artificial Sequence: Synthetic oligonucleotide
  Sense strand starting at position 34 of SEQ ID NO: 1245218
agugcagaggagugaauau

SEQ ID NO: 1545685 - RNA, 19 nt, Artificial Sequence
  Description of Artificial Sequence: Synthetic oligonucleotide
  Antisense strand to SEQ ID NO: 1545684
auauucacuccucugcacu

SEQ ID NO: 1545686 - RNA, 19 nt, Artificial Sequence
  Description of Artificial Sequence: Synthetic oligonucleotide
  Sense strand starting at position 88 of SEQ ID NO: 1245218
uuuauaguauagucacaca

SEQ ID NO: 1545687 - RNA, 19 nt, Artificial Sequence
  Description of Artificial Sequence: Synthetic oligonucleotide
  Antisense strand to SEQ ID NO: 1545686
ugugugacuauacuauaaa

SEQ ID NO: 1545688 - RNA, 19 nt, Artificial Sequence
  Description of Artificial Sequence: Synthetic oligonucleotide
  Sense strand starting at position 106 of SEQ ID NO: 1245218
acaugcuugccaugcaaua

SEQ ID NO: 1545689 - RNA, 19 nt, Artificial Sequence
  Description of Artificial Sequence: Synthetic oligonucleotide
  Antisense strand to SEQ ID NO: 1545688
uauugcauggcaagcaugu

SEQ ID NO: 1545690 - RNA, 19 nt, Artificial Sequence
  Description of Artificial Sequence: Synthetic oligonucleotide
  Sense strand starting at position 119 of SEQ ID NO: 1245218
gcaauagaguauucugcaa

SEQ ID NO: 1545691 - RNA, 19 nt, Artificial Sequence
  Description of Artificial Sequence: Synthetic oligonucleotide
  Antisense strand to SEQ ID NO: 1545690
uugcagaauacucuauugc

SEQ ID NO: 1545692 - RNA, 19 nt, Artificial Sequence
  Description of Artificial Sequence: Synthetic oligonucleotide
  Sense strand starting at position 123 of SEQ ID NO: 1245218
uagaguauucugcaagacu

SEQ ID NO: 1545693 - RNA, 19 nt, Artificial Sequence
  Description of Artificial Sequence: Synthetic oligonucleotide
  Antisense strand to SEQ ID NO: 1545692
agucuugcagaauacucua

SEQ ID NO: 1545694 - RNA, 19 nt, Artificial Sequence
  Description of Artificial Sequence: Synthetic oligonucleotide
  Sense strand starting at position 126 of SEQ ID NO: 1245218
aguauucugcaagacuaca

SEQ ID NO: 1545695 - RNA, 19 nt, Artificial Sequence
  Description of Artificial Sequence: Synthetic oligonucleotide
  Antisense strand to SEQ ID NO: 1545694
uguagucuugcagaauacu

SEQ ID NO: 1545696 - RNA, 19 nt, Artificial Sequence
  Description of Artificial Sequence: Synthetic oligonucleotide
  Sense strand starting at position 351 of SEQ ID NO: 1245218
cgagacaacugucucuaaa

SEQ ID NO: 1545697 - RNA, 19 nt, Artificial Sequence
  Description of Artificial Sequence: Synthetic oligonucleotide
  Antisense strand to SEQ ID NO: 1545696
uuuagagacaguugucucg

SEQ ID NO: 1545698 - RNA, 19 nt, Artificial Sequence
  Description of Artificial Sequence: Synthetic oligonucleotide
  Sense strand starting at position 499 of SEQ ID NO: 1245218
uuccaagauuuguaaggcu

SEQ ID NO: 1545699 - RNA, 19 nt, Artificial Sequence
  Description of Artificial Sequence: Synthetic oligonucleotide
  Antisense strand to SEQ ID NO: 1545698
agccuuacaaaucuuggaa

SEQ ID NO: 1545700 - RNA, 19 nt, Artificial Sequence
  Description of Artificial Sequence: Synthetic oligonucleotide
  Sense strand starting at position 507 of SEQ ID NO: 1245218
uuuguaaggcuuugccaaa

SEQ ID NO: 1545701 - RNA, 19 nt, Artificial Sequence
  Description of Artificial Sequence: Synthetic oligonucleotide
  Antisense strand to SEQ ID NO: 1545700
uuuggcaaagccuuacaaa

SEQ ID NO: 1545702 - RNA, 19 nt, Artificial Sequence
  Description of Artificial Sequence: Synthetic oligonucleotide
  Sense strand starting at position 676 of SEQ ID NO: 1245218
aaagcaagccuuugguuua

SEQ ID NO: 1545703 - RNA, 19 nt, Artificial Sequence
  Description of Artificial Sequence: Synthetic oligonucleotide
  Antisense strand to SEQ ID NO: 1545702
uaaaccaaaggcuugcuuu

SEQ ID NO: 1545704 - RNA, 19 nt, Artificial Sequence
  Description of Artificial Sequence: Synthetic oligonucleotide
  Sense strand starting at position 768 of SEQ ID NO: 1245218
gacucacugcugggugaau

SEQ ID NO: 1545705 - RNA, 19 nt, Artificial Sequence
  Description of Artificial Sequence: Synthetic oligonucleotide
  Antisense strand to SEQ ID NO: 1545704
auucacccagcagugaguc

SEQ ID NO: 1545706 - RNA, 19 nt, Artificial Sequence
  Description of Artificial Sequence: Synthetic oligonucleotide
  Sense strand starting at position 770 of SEQ ID NO: 1245218
cucacugcugggugaauga

SEQ ID NO: 1545707 - RNA, 19 nt, Artificial Sequence
  Description of Artificial Sequence: Synthetic oligonucleotide
  Antisense strand to SEQ ID NO: 1545706
ucauucacccagcagugag

SEQ ID NO: 1545708 - RNA, 19 nt, Artificial Sequence
  Description of Artificial Sequence: Synthetic oligonucleotide
  Sense strand starting at position 777 of SEQ ID NO: 1245218
cugggugaaugaguaagau

SEQ ID NO: 1545709 - RNA, 19 nt, Artificial Sequence
  Description of Artificial Sequence: Synthetic oligonucleotide
  Antisense strand to SEQ ID NO: 1545708
aucuuacucauucacccag

SEQ ID NO: 1545710 - RNA, 19 nt, Artificial Sequence
  Description of Artificial Sequence: Synthetic oligonucleotide
  Sense strand starting at position 903 of SEQ ID NO: 1245218
ucaagagcucaggauguuu

SEQ ID NO: 1545711 - RNA, 19 nt, Artificial Sequence
  Description of Artificial Sequence: Synthetic oligonucleotide
  Antisense strand to SEQ ID NO: 1545710
aaacauccugagcucuuga

SEQ ID NO: 1545712 - RNA, 19 nt, Artificial Sequence
  Description of Artificial Sequence: Synthetic oligonucleotide
  Sense strand starting at position 949 of SEQ ID NO: 1245218
auagaacaauuuggaugaa

SEQ ID NO: 1545713 - RNA, 19 nt, Artificial Sequence
  Description of Artificial Sequence: Synthetic oligonucleotide
  Antisense strand to SEQ ID NO: 1545712
uucauccaaauuguucuau

SEQ ID NO: 1545714 - RNA, 19 nt, Artificial Sequence
  Description of Artificial Sequence: Synthetic oligonucleotide
  Sense strand starting at position 998 of SEQ ID NO: 1245218
gcuacugaacuccaaguaa

SEQ ID NO: 1545715 - RNA, 19 nt, Artificial Sequence
  Description of Artificial Sequence: Synthetic oligonucleotide
  Antisense strand to SEQ ID NO: 1545714
uuacuuggaguucaguagc

SEQ ID NO: 1545716 - RNA, 19 nt, Artificial Sequence
  Description of Artificial Sequence: Synthetic oligonucleotide
  Sense strand starting at position 1009 of SEQ ID NO: 1245218
ccaaguaauucugugucac

SEQ ID NO: 1545717 - RNA, 19 nt, Artificial Sequence
  Description of Artificial Sequence: Synthetic oligonucleotide
  Antisense strand to SEQ ID NO: 1545716
gugacacagaauuacuugg

SEQ ID NO: 1545718 - RNA, 19 nt, Artificial Sequence
  Description of Artificial Sequence: Synthetic oligonucleotide
  Sense strand starting at position 1011 of SEQ ID NO: 1245218
aaguaauucugugucacag

SEQ ID NO: 1545719 - RNA, 19 nt, Artificial Sequence
  Description of Artificial Sequence: Synthetic oligonucleotide
  Antisense strand to SEQ ID NO: 1545718
cugugacacagaauuacuu

SEQ ID NO: 1545720 - RNA, 19 nt, Artificial Sequence
  Description of Artificial Sequence: Synthetic oligonucleotide
  Sense strand starting at position 1150 of SEQ ID NO: 1245218
ucacuugguggcugauuaa

SEQ ID NO: 1545721 - RNA, 19 nt, Artificial Sequence
  Description of Artificial Sequence: Synthetic oligonucleotide
  Antisense strand to SEQ ID NO: 1545720
uuaaucagccaccaaguga

SEQ ID NO: 1545722 - RNA, 19 nt, Artificial Sequence
  Description of Artificial Sequence: Synthetic oligonucleotide
  Sense strand starting at position 1278 of SEQ ID NO: 1245218
aaagcaucccggugauggu

SEQ ID NO: 1545723 - RNA, 19 nt, Artificial Sequence
  Description of Artificial Sequence: Synthetic oligonucleotide
  Antisense strand to SEQ ID NO: 1545722
accaucaccgggaugcuuu

SEQ ID NO: 1545724 - RNA, 19 nt, Artificial Sequence
  Description of Artificial Sequence: Synthetic oligonucleotide
  Sense strand starting at position 1341 of SEQ ID NO: 1245218
guuuguucacccguucgga

SEQ ID NO: 1545725 - RNA, 19 nt, Artificial Sequence
  Description of Artificial Sequence: Synthetic oligonucleotide
  Antisense strand to SEQ ID NO: 1545724
uccgaacgggugaacaaac

SEQ ID NO: 1545726 - RNA, 19 nt, Artificial Sequence
  Description of Artificial Sequence: Synthetic oligonucleotide
  Sense strand starting at position 1351 of SEQ ID NO: 1245218
ccguucggaaccuagaauu

SEQ ID NO: 1545727 - RNA, 19 nt, Artificial Sequence
  Description of Artificial Sequence: Synthetic oligonucleotide
  Antisense strand to SEQ ID NO: 1545726
aauucuagguuccgaacgg

SEQ ID NO: 1545728 - RNA, 19 nt, Artificial Sequence
  Description of Artificial Sequence: Synthetic oligonucleotide
  Sense strand starting at position 2437 of SEQ ID NO: 1245218
gauccucggcaauaauaga

SEQ ID NO: 1545729 - RNA, 19 nt, Artificial Sequence
  Description of Artificial Sequence: Synthetic oligonucleotide
  Antisense strand to SEQ ID NO: 1545728
ucuauuauugccgaggauc

SEQ ID NO: 1545730 - RNA, 19 nt, Artificial Sequence
  Description of Artificial Sequence: Synthetic oligonucleotide
  Sense strand starting at position 2659 of SEQ ID NO: 1245218
cccaaugagcuaugaggaa

SEQ ID NO: 1545731 - RNA, 19 nt, Artificial Sequence
  Description of Artificial Sequence: Synthetic oligonucleotide
  Antisense strand to SEQ ID NO: 1545730
uuccucauagcucauuggg

SEQ ID NO: 1545732 - RNA, 19 nt, Artificial Sequence
  Description of Artificial Sequence: Synthetic oligonucleotide
  Sense strand starting at position 2795 of SEQ ID NO: 1245218
aggcgaacuaaaugugaau

SEQ ID NO: 1545733 - RNA, 19 nt, Artificial Sequence
  Description of Artificial Sequence: Synthetic oligonucleotide
  Antisense strand to SEQ ID NO: 1545732
auucacauuuaguucgccu

SEQ ID NO: 1545734 - RNA, 19 nt, Artificial Sequence
  Description of Artificial Sequence: Synthetic oligonucleotide
  Sense strand starting at position 2797 of SEQ ID NO: 1245218
gcgaacuaaaugugaauua

SEQ ID NO: 1545735 - RNA, 19 nt, Artificial Sequence
  Description of Artificial Sequence: Synthetic oligonucleotide
  Antisense strand to SEQ ID NO: 1545734
uaauucacauuuaguucgc

SEQ ID NO: 1545736 - RNA, 19 nt, Artificial Sequence
  Description of Artificial Sequence: Synthetic oligonucleotide
  Sense strand starting at position 2879 of SEQ ID NO: 1245218
gcgaucuguauuugugugu

SEQ ID NO: 1545737 - RNA, 19 nt, Artificial Sequence
  Description of Artificial Sequence: Synthetic oligonucleotide
  Antisense strand to SEQ ID NO: 1545736
acacacaaauacagaucgc

SEQ ID NO: 1545738 - RNA, 19 nt, Artificial Sequence
  Description of Artificial Sequence: Synthetic oligonucleotide
  Sense strand starting at position 2880 of SEQ ID NO: 1245218
cgaucuguauuugugugua

SEQ ID NO: 1545739 - RNA, 19 nt, Artificial Sequence
  Description of Artificial Sequence: Synthetic oligonucleotide
  Antisense strand to SEQ ID NO: 1545738
uacacacaaauacagaucg

SEQ ID NO: 1545740 - RNA, 19 nt, Artificial Sequence
  Description of Artificial Sequence: Synthetic oligonucleotide
  Sense strand starting at position 2882 of SEQ ID NO: 1245218
aucuguauuuguguguaaa

SEQ ID NO: 1545741 - RNA, 19 nt, Artificial Sequence
  Description of Artificial Sequence: Synthetic oligonucleotide
  Antisense strand to SEQ ID NO: 1545740
uuuacacacaaauacagau

SEQ ID NO: 1545742 - RNA, 19 nt, Artificial Sequence
  Description of Artificial Sequence: Synthetic oligonucleotide
  Sense strand starting at position 2884 of SEQ ID NO: 1245218
cuguauuuguguguaaauu

SEQ ID NO: 1545743 - RNA, 19 nt, Artificial Sequence
  Description of Artificial Sequence: Synthetic oligonucleotide
  Antisense strand to SEQ ID NO: 1545742
aauuuacacacaaauacag

SEQ ID NO: 1545744 - RNA, 19 nt, Artificial Sequence
  Description of Artificial Sequence: Synthetic oligonucleotide
  Sense strand starting at position 2967 of SEQ ID NO: 1245218
gaauguugugagcaacggu

SEQ ID NO: 1545745 - RNA, 19 nt, Artificial Sequence
  Description of Artificial Sequence: Synthetic oligonucleotide
  Antisense strand to SEQ ID NO: 1545744
accguugcucacaacauuc

SEQ ID NO: 1545746 - RNA, 19 nt, Artificial Sequence
  Description of Artificial Sequence: Synthetic oligonucleotide
  Sense strand starting at position 2970 of SEQ ID NO: 1245218
uguugugagcaacgguaaa

SEQ ID NO: 1545747 - RNA, 19 nt, Artificial Sequence
  Description of Artificial Sequence: Synthetic oligonucleotide
  Antisense strand to SEQ ID NO: 1545746
uuuaccguugcucacaaca

SEQ ID NO: 1545748 - RNA, 19 nt, Artificial Sequence
  Description of Artificial Sequence: Synthetic oligonucleotide
  Sense strand starting at position 2993 of SEQ ID NO: 1245218
uuuagaaggugugucuuga

SEQ ID NO: 1545749 - RNA, 19 nt, Artificial Sequence
  Description of Artificial Sequence: Synthetic oligonucleotide
  Antisense strand to SEQ ID NO: 1545748
ucaagacacaccuucuaaa

SEQ ID NO: 1545750 - RNA, 19 nt, Artificial Sequence
  Description of Artificial Sequence: Synthetic oligonucleotide
  Sense strand starting at position 3006 of SEQ ID NO: 1245218
ucuugacuuuaugcagaau

SEQ ID NO: 1545751 - RNA, 19 nt, Artificial Sequence
  Description of Artificial Sequence: Synthetic oligonucleotide
  Antisense strand to SEQ ID NO: 1545750
auucugcauaaagucaaga

SEQ ID NO: 1545752 - RNA, 19 nt, Artificial Sequence
  Description of Artificial Sequence: Synthetic oligonucleotide
  Sense strand starting at position 3018 of SEQ ID NO: 1245218
gcagaauuagggugauagg

SEQ ID NO: 1545753 - RNA, 19 nt, Artificial Sequence
  Description of Artificial Sequence: Synthetic oligonucleotide
  Antisense strand to SEQ ID NO: 1545752
ccuaucacccuaauucugc

SEQ ID NO: 1545754 - RNA, 19 nt, Artificial Sequence
  Description of Artificial Sequence: Synthetic oligonucleotide
  Sense strand starting at position 3115 of SEQ ID NO: 1245218
aaaggaagauucgaagacu

SEQ ID NO: 1545755 - RNA, 19 nt, Artificial Sequence
  Description of Artificial Sequence: Synthetic oligonucleotide
  Antisense strand to SEQ ID NO: 1545754
agucuucgaaucuuccuuu

SEQ ID NO: 1545756 - RNA, 19 nt, Artificial Sequence
  Description of Artificial Sequence: Synthetic oligonucleotide
  Sense strand starting at position 3277 of SEQ ID NO: 1245218
gggaaaugcuaacagaaug

SEQ ID NO: 1545757 - RNA, 19 nt, Artificial Sequence
  Description of Artificial Sequence: Synthetic oligonucleotide
  Antisense strand to SEQ ID NO: 1545756
cauucuguuagcauuuccc

SEQ ID NO: 1545758 - RNA, 19 nt, Artificial Sequence
  Description of Artificial Sequence: Synthetic oligonucleotide
  Sense strand starting at position 3340 of SEQ ID NO: 1245218
aaggaauuacuauguacug

SEQ ID NO: 1545759 - RNA, 19 nt, Artificial Sequence
  Description of Artificial Sequence: Synthetic oligonucleotide
  Antisense strand to SEQ ID NO: 1545758
caguacauaguaauuccuu

SEQ ID NO: 1545760 - RNA, 19 nt, Artificial Sequence
  Description of Artificial Sequence: Synthetic oligonucleotide
  Sense strand starting at position 3341 of SEQ ID NO: 1245218
aggaauuacuauguacuga

SEQ ID NO: 1545761 - RNA, 19 nt, Artificial Sequence
  Description of Artificial Sequence: Synthetic oligonucleotide
  Antisense strand to SEQ ID NO: 1545760
ucaguacauaguaauuccu

SEQ ID NO: 1545762 - RNA, 19 nt, Artificial Sequence
  Description of Artificial Sequence: Synthetic oligonucleotide
  Sense strand starting at position 3692 of SEQ ID NO: 1245218
ucccaaaguguuuauccca

SEQ ID NO: 1545763 - RNA, 19 nt, Artificial Sequence
  Description of Artificial Sequence: Synthetic oligonucleotide
  Antisense strand to SEQ ID NO: 1545762
ugggauaaacacuuuggga

SEQ ID NO: 1545764 - RNA, 19 nt, Artificial Sequence
  Description of Artificial Sequence: Synthetic oligonucleotide
  Sense strand starting at position 135 of SEQ ID NO: 1245219
gucagauuagugcacaaau

SEQ ID NO: 1545765 - RNA, 19 nt, Artificial Sequence
  Description of Artificial Sequence: Synthetic oligonucleotide
  Antisense strand to SEQ ID NO: 1545764
auuugugcacuaaucugac

SEQ ID NO: 1545766 - RNA, 19 nt, Artificial Sequence
  Description of Artificial Sequence: Synthetic oligonucleotide
  Sense strand starting at position 137 of SEQ ID NO: 1245219
cagauuagugcacaaaugu

SEQ ID NO: 1545767 - RNA, 19 nt, Artificial Sequence
  Description of Artificial Sequence: Synthetic oligonucleotide
  Antisense strand to SEQ ID NO: 1545766
acauuugugcacuaaucug

SEQ ID NO: 1545768 - RNA, 19 nt, Artificial Sequence
  Description of Artificial Sequence: Synthetic oligonucleotide
  Sense strand starting at position 145 of SEQ ID NO: 1245219
ugcacaaaugucugcuuua

SEQ ID NO: 1545769 - RNA, 19 nt, Artificial Sequence
  Description of Artificial Sequence: Synthetic oligonucleotide
  Antisense strand to SEQ ID NO: 1545768
uaaagcagacauuugugca

SEQ ID NO: 1545770 - RNA, 19 nt, Artificial Sequence
  Description of Artificial Sequence: Synthetic oligonucleotide
  Sense strand starting at position 146 of SEQ ID NO: 1245219
gcacaaaugucugcuuuaa

SEQ ID NO: 1545771 - RNA, 19 nt, Artificial Sequence
  Description of Artificial Sequence: Synthetic oligonucleotide
  Antisense strand to SEQ ID NO: 1545770
uuaaagcagacauuugugc

SEQ ID NO: 1545772 - RNA, 19 nt, Artificial Sequence
  Description of Artificial Sequence: Synthetic oligonucleotide
  Sense strand starting at position 156 of SEQ ID NO: 1245219
cugcuuuaaccguaaugua

SEQ ID NO: 1545773 - RNA, 19 nt, Artificial Sequence
  Description of Artificial Sequence: Synthetic oligonucleotide
  Antisense strand to SEQ ID NO: 1545772
uacauuacgguuaaagcag

SEQ ID NO: 1545774 - RNA, 19 nt, Artificial Sequence
  Description of Artificial Sequence: Synthetic oligonucleotide
  Sense strand starting at position 165 of SEQ ID NO: 1245219
ccguaauguagaggaaaua

SEQ ID NO: 1545775 - RNA, 19 nt, Artificial Sequence
  Description of Artificial Sequence: Synthetic oligonucleotide
  Antisense strand to SEQ ID NO: 1545774
uauuuccucuacauuacgg

SEQ ID NO: 1545776 - RNA, 19 nt, Artificial Sequence
  Description of Artificial Sequence: Synthetic oligonucleotide
  Sense strand starting at position 300 of SEQ ID NO: 1245219
aguacuguucucugaggga

SEQ ID NO: 1545777 - RNA, 19 nt, Artificial Sequence
  Description of Artificial Sequence: Synthetic oligonucleotide
  Antisense strand to SEQ ID NO: 1545776
ucccucagagaacaguacu

SEQ ID NO: 1545778 - RNA, 19 nt, Artificial Sequence
  Description of Artificial Sequence: Synthetic oligonucleotide
  Sense strand starting at position 392 of SEQ ID NO: 1245219
aauagugggcgugagagau

SEQ ID NO: 1545779 - RNA, 19 nt, Artificial Sequence
  Description of Artificial Sequence: Synthetic oligonucleotide
  Antisense strand to SEQ ID NO: 1545778
aucucucacgcccacuauu

SEQ ID NO: 1545780 - RNA, 19 nt, Artificial Sequence
  Description of Artificial Sequence: Synthetic oligonucleotide
  Sense strand starting at position 441 of SEQ ID NO: 1245219
aggugcggugcugauauaa

SEQ ID NO: 1545781 - RNA, 19 nt, Artificial Sequence
  Description of Artificial Sequence: Synthetic oligonucleotide
  Antisense strand to SEQ ID NO: 1545780
uuauaucagcaccgcaccu

SEQ ID NO: 1545782 - RNA, 19 nt, Artificial Sequence
  Description of Artificial Sequence: Synthetic oligonucleotide
  Sense strand starting at position 452 of SEQ ID NO: 1245219
ugauauaauuacucaggua

SEQ ID NO: 1545783 - RNA, 19 nt, Artificial Sequence
  Description of Artificial Sequence: Synthetic oligonucleotide
  Antisense strand to SEQ ID NO: 1545782
uaccugaguaauuauauca

SEQ ID NO: 1545784 - RNA, 19 nt, Artificial Sequence
  Description of Artificial Sequence: Synthetic oligonucleotide
  Sense strand starting at position 464 of SEQ ID NO: 1245219
ucagguagccuugaagagu

SEQ ID NO: 1545785 - RNA, 19 nt, Artificial Sequence
  Description of Artificial Sequence: Synthetic oligonucleotide
  Antisense strand to SEQ ID NO: 1545784
acucuucaaggcuaccuga

SEQ ID NO: 1545786 - RNA, 19 nt, Artificial Sequence
  Description of Artificial Sequence: Synthetic oligonucleotide
  Sense strand starting at position 543 of SEQ ID NO: 1245219
auuucugagugguaggaaa

SEQ ID NO: 1545787 - RNA, 19 nt, Artificial Sequence
  Description of Artificial Sequence: Synthetic oligonucleotide
  Antisense strand to SEQ ID NO: 1545786
uuuccuaccacucagaaau

SEQ ID NO: 1545788 - RNA, 19 nt, Artificial Sequence
  Description of Artificial Sequence: Synthetic oligonucleotide
  Sense strand starting at position 545 of SEQ ID NO: 1245219
uucugagugguaggaaauu

SEQ ID NO: 1545789 - RNA, 19 nt, Artificial Sequence
  Description of Artificial Sequence: Synthetic oligonucleotide
  Antisense strand to SEQ ID NO: 1545788
aauuuccuaccacucagaa

SEQ ID NO: 1545790 - RNA, 19 nt, Artificial Sequence
  Description of Artificial Sequence: Synthetic oligonucleotide
  Sense strand starting at position 554 of SEQ ID NO: 1245219
guaggaaauuuccauaauu

SEQ ID NO: 1545791 - RNA, 19 nt, Artificial Sequence
  Description of Artificial Sequence: Synthetic oligonucleotide
  Antisense strand to SEQ ID NO: 1545790
aauuauggaaauuuccuac

SEQ ID NO: 1545792 - RNA, 19 nt, Artificial Sequence
  Description of Artificial Sequence: Synthetic oligonucleotide
  Sense strand starting at position 819 of SEQ ID NO: 1245219
gcugaaaucagcuacccga

SEQ ID NO: 1545793 - RNA, 19 nt, Artificial Sequence
  Description of Artificial Sequence: Synthetic oligonucleotide
  Antisense strand to SEQ ID NO: 1545792
ucggguagcugauuucagc

SEQ ID NO: 1545794 - RNA, 19 nt, Artificial Sequence
  Description of Artificial Sequence: Synthetic oligonucleotide
  Sense strand starting at position 822 of SEQ ID NO: 1245219
gaaaucagcuacccgagua

SEQ ID NO: 1545795 - RNA, 19 nt, Artificial Sequence
  Description of Artificial Sequence: Synthetic oligonucleotide
  Antisense strand to SEQ ID NO: 1545794
uacucggguagcugauuuc

SEQ ID NO: 1545796 - RNA, 19 nt, Artificial Sequence
  Description of Artificial Sequence: Synthetic oligonucleotide
  Sense strand starting at position 827 of SEQ ID NO: 1245219
cagcuacccgaguagugaa

SEQ ID NO: 1545797 - RNA, 19 nt, Artificial Sequence
  Description of Artificial Sequence: Synthetic oligonucleotide
  Antisense strand to SEQ ID NO: 1545796
uucacuacucggguagcug

SEQ ID NO: 1545798 - RNA, 19 nt, Artificial Sequence
  Description of Artificial Sequence: Synthetic oligonucleotide
  Sense strand starting at position 1120 of SEQ ID NO: 1245219
ccuguuccgcucugaggaa

SEQ ID NO: 1545799 - RNA, 19 nt, Artificial Sequence
  Description of Artificial Sequence: Synthetic oligonucleotide
  Antisense strand to SEQ ID NO: 1545798
uuccucagagcggaacagg

SEQ ID NO: 1545800 - RNA, 19 nt, Artificial Sequence
  Description of Artificial Sequence: Synthetic oligonucleotide
  Sense strand starting at position 1239 of SEQ ID NO: 1245219
ggagcucagagggauuguu

SEQ ID NO: 1545801 - RNA, 19 nt, Artificial Sequence
  Description of Artificial Sequence: Synthetic oligonucleotide
  Antisense strand to SEQ ID NO: 1545800
aacaaucccucugagcucc

SEQ ID NO: 1545802 - RNA, 19 nt, Artificial Sequence
  Description of Artificial Sequence: Synthetic oligonucleotide
  Sense strand starting at position 1309 of SEQ ID NO: 1245219
caggcuaucccagaggagu

SEQ ID NO: 1545803 - RNA, 19 nt, Artificial Sequence
  Description of Artificial Sequence: Synthetic oligonucleotide
  Antisense strand to SEQ ID NO: 1545802
acuccucugggauagccug

SEQ ID NO: 1545804 - RNA, 19 nt, Artificial Sequence
  Description of Artificial Sequence: Synthetic oligonucleotide
  Sense strand starting at position 2166 of SEQ ID NO: 1245219
gggugccagucuuuaaaca

SEQ ID NO: 1545805 - RNA, 19 nt, Artificial Sequence
  Description of Artificial Sequence: Synthetic oligonucleotide
  Antisense strand to SEQ ID NO: 1545804
uguuuaaagacuggcaccc

SEQ ID NO: 1545806 - RNA, 19 nt, Artificial Sequence
  Description of Artificial Sequence: Synthetic oligonucleotide
  Sense strand starting at position 2273 of SEQ ID NO: 1245219
gaagcaacgaggugaucuu

SEQ ID NO: 1545807 - RNA, 19 nt, Artificial Sequence
  Description of Artificial Sequence: Synthetic oligonucleotide
  Antisense strand to SEQ ID NO: 1545806
aagaucaccucguugcuuc

SEQ ID NO: 1545808 - RNA, 19 nt, Artificial Sequence
  Description of Artificial Sequence: Synthetic oligonucleotide
  Sense strand starting at position 2433 of SEQ ID NO: 1245219
gugugcuugccguuuguua

SEQ ID NO: 1545809 - RNA, 19 nt, Artificial Sequence
  Description of Artificial Sequence: Synthetic oligonucleotide
  Antisense strand to SEQ ID NO: 1545808
uaacaaacggcaagcacac

SEQ ID NO: 1545810 - RNA, 19 nt, Artificial Sequence
  Description of Artificial Sequence: Synthetic oligonucleotide
  Sense strand starting at position 2449 of SEQ ID NO: 1245219
uuagaaugcggcugaccaa

SEQ ID NO: 1545811 - RNA, 19 nt, Artificial Sequence
  Description of Artificial Sequence: Synthetic oligonucleotide
  Antisense strand to SEQ ID NO: 1545810
uuggucagccgcauucuaa

SEQ ID NO: 1545812 - RNA, 19 nt, Artificial Sequence
  Description of Artificial Sequence: Synthetic oligonucleotide
  Sense strand starting at position 2694 of SEQ ID NO: 1245219
ccgggcccucucuauuaaa

SEQ ID NO: 1545813 - RNA, 19 nt, Artificial Sequence
  Description of Artificial Sequence: Synthetic oligonucleotide
  Antisense strand to SEQ ID NO: 1545812
uuuaauagagagggcccgg

SEQ ID NO: 1545814 - RNA, 19 nt, Artificial Sequence
  Description of Artificial Sequence: Synthetic oligonucleotide
  Sense strand starting at position 2713 of SEQ ID NO: 1245219
gcaagagugcccuaggaca

SEQ ID NO: 1545815 - RNA, 19 nt, Artificial Sequence
  Description of Artificial Sequence: Synthetic oligonucleotide
  Antisense strand to SEQ ID NO: 1545814
uguccuagggcacucuugc

SEQ ID NO: 1545816 - RNA, 19 nt, Artificial Sequence
  Description of Artificial Sequence: Synthetic oligonucleotide
  Sense strand starting at position 2715 of SEQ ID NO: 1245219
aagagugcccuaggacaaa

SEQ ID NO: 1545817 - RNA, 19 nt, Artificial Sequence
  Description of Artificial Sequence: Synthetic oligonucleotide
  Antisense strand to SEQ ID NO: 1545816
uuuguccuagggcacucuu

SEQ ID NO: 1545818 - RNA, 19 nt, Artificial Sequence
  Description of Artificial Sequence: Synthetic oligonucleotide
  Sense strand starting at position 2818 of SEQ ID NO: 1245219
cggcucugucuuggagaac

SEQ ID NO: 1545819 - RNA, 19 nt, Artificial Sequence
  Description of Artificial Sequence: Synthetic oligonucleotide
  Antisense strand to SEQ ID NO: 1545818
guucuccaagacagagccg

SEQ ID NO: 1545820 - RNA, 19 nt, Artificial Sequence
  Description of Artificial Sequence: Synthetic oligonucleotide
  Sense strand starting at position 2831 of SEQ ID NO: 1245219
gagaacaggugccucaaua

SEQ ID NO: 1545821 - RNA, 19 nt, Artificial Sequence
  Description of Artificial Sequence: Synthetic oligonucleotide
  Antisense strand to SEQ ID NO: 1545820
uauugaggcaccuguucuc

SEQ ID NO: 1545822 - RNA, 19 nt, Artificial Sequence
  Description of Artificial Sequence: Synthetic oligonucleotide
  Sense strand starting at position 2954 of SEQ ID NO: 1245219
ggaaaucucacgugcgauc

SEQ ID NO: 1545823 - RNA, 19 nt, Artificial Sequence
  Description of Artificial Sequence: Synthetic oligonucleotide
  Antisense strand to SEQ ID NO: 1545822
gaucgcacgugagauuucc

SEQ ID NO: 1545824 - RNA, 19 nt, Artificial Sequence
  Description of Artificial Sequence: Synthetic oligonucleotide
  Sense strand starting at position 3536 of SEQ ID NO: 1245219
gcugaauguccaggaccuu

SEQ ID NO: 1545825 - RNA, 19 nt, Artificial Sequence
  Description of Artificial Sequence: Synthetic oligonucleotide
  Antisense strand to SEQ ID NO: 1545824
aagguccuggacauucagc

SEQ ID NO: 1545826 - RNA, 19 nt, Artificial Sequence
  Description of Artificial Sequence: Synthetic oligonucleotide
  Sense strand starting at position 3566 of SEQ ID NO: 1245219
acccauaguuguucgagga

SEQ ID NO: 1545827 - RNA, 19 nt, Artificial Sequence
  Description of Artificial Sequence: Synthetic oligonucleotide
  Antisense strand to SEQ ID NO: 1545826
uccucgaacaacuaugggu

SEQ ID NO: 1545828 - RNA, 19 nt, Artificial Sequence
  Description of Artificial Sequence: Synthetic oligonucleotide
  Sense strand starting at position 3567 of SEQ ID NO: 1245219
cccauaguuguucgaggag

SEQ ID NO: 1545829 - RNA, 19 nt, Artificial Sequence
  Description of Artificial Sequence: Synthetic oligonucleotide
  Antisense strand to SEQ ID NO: 1545828
cuccucgaacaacuauggg

SEQ ID NO: 1545830 - RNA, 19 nt, Artificial Sequence
  Description of Artificial Sequence: Synthetic oligonucleotide
  Sense strand starting at position 3570 of SEQ ID NO: 1245219
auaguuguucgaggaggag

SEQ ID NO: 1545831 - RNA, 19 nt, Artificial Sequence
  Description of Artificial Sequence: Synthetic oligonucleotide
  Antisense strand to SEQ ID NO: 1545830
cuccuccucgaacaacuau

SEQ ID NO: 1545832 - RNA, 19 nt, Artificial Sequence
  Description of Artificial Sequence: Synthetic oligonucleotide
  Sense strand starting at position 3573 of SEQ ID NO: 1245219
guuguucgaggaggaguua

SEQ ID NO: 1545833 - RNA, 19 nt, Artificial Sequence
  Description of Artificial Sequence: Synthetic oligonucleotide
  Antisense strand to SEQ ID NO: 1545832
uaacuccuccucgaacaac

SEQ ID NO: 1545834 - RNA, 19 nt, Artificial Sequence
  Description of Artificial Sequence: Synthetic oligonucleotide
  Sense strand starting at position 3610 of SEQ ID NO: 1245219
gcaggcauuugcucauuga

SEQ ID NO: 1545835 - RNA, 19 nt, Artificial Sequence
  Description of Artificial Sequence: Synthetic oligonucleotide
  Antisense strand to SEQ ID NO: 1545834
ucaaugagcaaaugccugc

SEQ ID NO: 1545836 - RNA, 19 nt, Artificial Sequence
  Description of Artificial Sequence: Synthetic oligonucleotide
  Sense strand starting at position 3613 of SEQ ID NO: 1245219
ggcauuugcucauugacau

SEQ ID NO: 1545837 - RNA, 19 nt, Artificial Sequence
  Description of Artificial Sequence: Synthetic oligonucleotide
  Antisense strand to SEQ ID NO: 1545836
augucaaugagcaaaugcc

SEQ ID NO: 1545838 - RNA, 19 nt, Artificial Sequence
  Description of Artificial Sequence: Synthetic oligonucleotide
  Sense strand starting at position 3614 of SEQ ID NO: 1245219
gcauuugcucauugacauc

SEQ ID NO: 1545839 - RNA, 19 nt, Artificial Sequence
  Description of Artificial Sequence: Synthetic oligonucleotide
  Antisense strand to SEQ ID NO: 1545838
gaugucaaugagcaaaugc

SEQ ID NO: 1545840 - RNA, 19 nt, Artificial Sequence
  Description of Artificial Sequence: Synthetic oligonucleotide
  Sense strand starting at position 3691 of SEQ ID NO: 1245219
acuggacugucuucuguga

SEQ ID NO: 1545841 - RNA, 19 nt, Artificial Sequence
  Description of Artificial Sequence: Synthetic oligonucleotide
  Antisense strand to SEQ ID NO: 1545840
ucacagaagacaguccagu

SEQ ID NO: 1545842 - RNA, 19 nt, Artificial Sequence
  Description of Artificial Sequence: Synthetic oligonucleotide
  Sense strand starting at position 3695 of SEQ ID NO: 1245219
gacugucuucugugaaugu

SEQ ID NO: 1545843 - RNA, 19 nt, Artificial Sequence
  Description of Artificial Sequence: Synthetic oligonucleotide
  Antisense strand to SEQ ID NO: 1545842
acauucacagaagacaguc

SEQ ID NO: 1545844 - RNA, 19 nt, Artificial Sequence
  Description of Artificial Sequence: Synthetic oligonucleotide
  Sense strand starting at position 278 of SEQ ID NO: 1245220
gguggaacuugacacauuu

SEQ ID NO: 1545845 - RNA, 19 nt, Artificial Sequence
  Description of Artificial Sequence: Synthetic oligonucleotide
  Antisense strand to SEQ ID NO: 1545844
aaaugugucaaguuccacc

SEQ ID NO: 1545846 - RNA, 19 nt, Artificial Sequence
  Description of Artificial Sequence: Synthetic oligonucleotide
  Sense strand starting at position 524 of SEQ ID NO: 1245220
cugucauaccuuuauggac

SEQ ID NO: 1545847 - RNA, 19 nt, Artificial Sequence
  Description of Artificial Sequence: Synthetic oligonucleotide
  Antisense strand to SEQ ID NO: 1545846
guccauaaagguaugacag

SEQ ID NO: 1545848 - RNA, 19 nt, Artificial Sequence
  Description of Artificial Sequence: Synthetic oligonucleotide
  Sense strand starting at position 933 of SEQ ID NO: 1245220
cucgcaucucugggaucaa

SEQ ID NO: 1545849 - RNA, 19 nt, Artificial Sequence
  Description of Artificial Sequence: Synthetic oligonucleotide
  Antisense strand to SEQ ID NO: 1545848
uugaucccagagaugcgag

SEQ ID NO: 1545850 - RNA, 19 nt, Artificial Sequence
  Description of Artificial Sequence: Synthetic oligonucleotide
  Sense strand starting at position 1155 of SEQ ID NO: 1245220
gcgacuugcauuugaaauu

SEQ ID NO: 1545851 - RNA, 19 nt, Artificial Sequence
  Description of Artificial Sequence: Synthetic oligonucleotide
  Antisense strand to SEQ ID NO: 1545850
aauuucaaaugcaagucgc

SEQ ID NO: 1545852 - RNA, 19 nt, Artificial Sequence
  Description of Artificial Sequence: Synthetic oligonucleotide
  Sense strand starting at position 1156 of SEQ ID NO: 1245220
cgacuugcauuugaaauuu

SEQ ID NO: 1545853 - RNA, 19 nt, Artificial Sequence
  Description of Artificial Sequence: Synthetic oligonucleotide
  Antisense strand to SEQ ID NO: 1545852
aaauuucaaaugcaagucg

SEQ ID NO: 1545854 - RNA, 19 nt, Artificial Sequence
  Description of Artificial Sequence: Synthetic oligonucleotide
  Sense strand starting at position 1256 of SEQ ID NO: 1245220
aguaauacaugggccuuaa

SEQ ID NO: 1545855 - RNA, 19 nt, Artificial Sequence
  Description of Artificial Sequence: Synthetic oligonucleotide
  Antisense strand to SEQ ID NO: 1545854
uuaaggcccauguauuacu

SEQ ID NO: 1545856 - RNA, 19 nt, Artificial Sequence
  Description of Artificial Sequence: Synthetic oligonucleotide
  Sense strand starting at position 1267 of SEQ ID NO: 1245220
ggccuuaagucaccgagau

SEQ ID NO: 1545857 - RNA, 19 nt, Artificial Sequence
  Description of Artificial Sequence: Synthetic oligonucleotide
  Antisense strand to SEQ ID NO: 1545856
aucucggugacuuaaggcc

SEQ ID NO: 1545858 - RNA, 19 nt, Artificial Sequence
  Description of Artificial Sequence: Synthetic oligonucleotide
  Sense strand starting at position 1292 of SEQ ID NO: 1245220
gcaaauaauuugcagaaug

SEQ ID NO: 1545859 - RNA, 19 nt, Artificial Sequence
  Description of Artificial Sequence: Synthetic oligonucleotide
  Antisense strand to SEQ ID NO: 1545858
cauucugcaaauuauuugc

SEQ ID NO: 1545860 - RNA, 19 nt, Artificial Sequence
  Description of Artificial Sequence: Synthetic oligonucleotide
  Sense strand starting at position 1863 of SEQ ID NO: 1245220
cugagugucgcguuacaga

SEQ ID NO: 1545861 - RNA, 19 nt, Artificial Sequence
  Description of Artificial Sequence: Synthetic oligonucleotide
  Antisense strand to SEQ ID NO: 1545860
ucuguaacgcgacacucag

SEQ ID NO: 1545862 - RNA, 19 nt, Artificial Sequence
  Description of Artificial Sequence: Synthetic oligonucleotide
  Sense strand starting at position 1974 of SEQ ID NO: 1245220
gucguuagggcccaggaaa

SEQ ID NO: 1545863 - RNA, 19 nt, Artificial Sequence
  Description of Artificial Sequence: Synthetic oligonucleotide
  Antisense strand to SEQ ID NO: 1545862
uuuccugggcccuaacgac

SEQ ID NO: 1545864 - RNA, 19 nt, Artificial Sequence
  Description of Artificial Sequence: Synthetic oligonucleotide
  Sense strand starting at position 2338 of SEQ ID NO: 1245220
gaaagugcccuccagagau

SEQ ID NO: 1545865 - RNA, 19 nt, Artificial Sequence
  Description of Artificial Sequence: Synthetic oligonucleotide
  Antisense strand to SEQ ID NO: 1545864
aucucuggagggcacuuuc
